United States Patent Application Publication US 2024/0000970 A1 - sequence listing, part 3

SEQ ID NO: 60626 - RNA, 21 nt, Artificial Sequence
  LRRK2 RNA guide
ucuuagcacuuaaaaaacccu

SEQ ID NO: 60627 - RNA, 21 nt, Artificial Sequence
  LRRK2 RNA guide
uguuugcuguuuuaggguuuu

SEQ ID NO: 60628 - RNA, 21 nt, Artificial Sequence
  LRRK2 RNA guide
uuguuugcuguuuuaggguuu

SEQ ID NO: 60629 - RNA, 22 nt, Artificial Sequence
  LRRK2 RNA guide
aaaaaacccuaaaacagcaaac

SEQ ID NO: 60630 - RNA, 22 nt, Artificial Sequence
  LRRK2 RNA guide
aaaaacccuaaaacagcaaaca

SEQ ID NO: 60631 - RNA, 22 nt, Artificial Sequence
  LRRK2 RNA guide
aaaacccuaaaacagcaaacaa

SEQ ID NO: 60632 - RNA, 22 nt, Artificial Sequence
  LRRK2 RNA guide
aaacccuaaaacagcaaacaau

SEQ ID NO: 60633 - RNA, 22 nt, Artificial Sequence
  LRRK2 RNA guide
aacccuaaaacagcaaacaauu

SEQ ID NO: 60634 - RNA, 22 nt, Artificial Sequence
  LRRK2 RNA guide
aauuguuugcuguuuuaggguu

SEQ ID NO: 60635 - RNA, 22 nt, Artificial Sequence
  LRRK2 RNA guide
acccuaaaacagcaaacaauuc

SEQ ID NO: 60636 - RNA, 22 nt, Artificial Sequence
  LRRK2 RNA guide
acuuaaaaaacccuaaaacagc

SEQ ID NO: 60637 - RNA, 22 nt, Artificial Sequence
  LRRK2 RNA guide
agaauuguuugcuguuuuaggg

SEQ ID NO: 60638 - RNA, 22 nt, Artificial Sequence
  LRRK2 RNA guide
agcacuuaaaaaacccuaaaac

SEQ ID NO: 60639 - RNA, 22 nt, Artificial Sequence
  LRRK2 RNA guide
aggguuuuuuaagugcuaagac

SEQ ID NO: 60640 - RNA, 22 nt, Artificial Sequence
  LRRK2 RNA guide
aggucuuagcacuuaaaaaacc

SEQ ID NO: 60641 - RNA, 22 nt, Artificial Sequence
  LRRK2 RNA guide
auuguuugcuguuuuaggguuu

SEQ ID NO: 60642 - RNA, 22 nt, Artificial Sequence
  LRRK2 RNA guide
cacuuaaaaaacccuaaaacag

SEQ ID NO: 60643 - RNA, 22 nt, Artificial Sequence
  LRRK2 RNA guide
cccuaaaacagcaaacaauucu

SEQ ID NO: 60644 - RNA, 22 nt, Artificial Sequence
  LRRK2 RNA guide
cuguuuuaggguuuuuuaagug

SEQ ID NO: 60645 - RNA, 22 nt, Artificial Sequence
  LRRK2 RNA guide
cuuaaaaaacccuaaaacagca

SEQ ID NO: 60646 - RNA, 22 nt, Artificial Sequence
  LRRK2 RNA guide
cuuagcacuuaaaaaacccuaa

SEQ ID NO: 60647 - RNA, 22 nt, Artificial Sequence
  LRRK2 RNA guide
gaauuguuugcuguuuuagggu

SEQ ID NO: 60648 - RNA, 22 nt, Artificial Sequence
  LRRK2 RNA guide
gagaauuguuugcuguuuuagg

SEQ ID NO: 60649 - RNA, 22 nt, Artificial Sequence
  LRRK2 RNA guide
gcacuuaaaaaacccuaaaaca

SEQ ID NO: 60650 - RNA, 22 nt, Artificial Sequence
  LRRK2 RNA guide
gcuguuuuaggguuuuuuaagu

SEQ ID NO: 60651 - RNA, 22 nt, Artificial Sequence
  LRRK2 RNA guide
ggguuuuuuaagugcuaagacc

SEQ ID NO: 60652 - RNA, 22 nt, Artificial Sequence
  LRRK2 RNA guide
ggucuuagcacuuaaaaaaccc

SEQ ID NO: 60653 - RNA, 22 nt, Artificial Sequence
  LRRK2 RNA guide
gucuuagcacuuaaaaaacccu

SEQ ID NO: 60654 - RNA, 22 nt, Artificial Sequence
  LRRK2 RNA guide
guuugcuguuuuaggguuuuuu

SEQ ID NO: 60655 - RNA, 22 nt, Artificial Sequence
  LRRK2 RNA guide
guuuuaggguuuuuuaagugcu

SEQ ID NO: 60656 - RNA, 22 nt, Artificial Sequence
  LRRK2 RNA guide
uaggguuuuuuaagugcuaaga

SEQ ID NO: 60657 - RNA, 22 nt, Artificial Sequence
  LRRK2 RNA guide
ucuuagcacuuaaaaaacccua

SEQ ID NO: 60658 - RNA, 22 nt, Artificial Sequence
  LRRK2 RNA guide
ugcuguuuuaggguuuuuuaag

SEQ ID NO: 60659 - RNA, 22 nt, Artificial Sequence
  LRRK2 RNA guide
uguuugcuguuuuaggguuuuu

SEQ ID NO: 60660 - RNA, 22 nt, Artificial Sequence
  LRRK2 RNA guide
uguuuuaggguuuuuuaagugc

SEQ ID NO: 60661 - RNA, 22 nt, Artificial Sequence
  LRRK2 RNA guide
uuaggguuuuuuaagugcuaag

SEQ ID NO: 60662 - RNA, 22 nt, Artificial Sequence
  LRRK2 RNA guide
uuguuugcuguuuuaggguuuu

SEQ ID NO: 60663 - RNA, 20 nt, Artificial Sequence
  LRRK2 RNA guide
aaacuguaagagcgaucugg

SEQ ID NO: 60664 - RNA, 20 nt, Artificial Sequence
  LRRK2 RNA guide
aacuguaagagcgaucugga

SEQ ID NO: 60665 - RNA, 20 nt, Artificial Sequence
  LRRK2 RNA guide
aagagcgaucuggaauugcu

SEQ ID NO: 60666 - RNA, 20 nt, Artificial Sequence
  LRRK2 RNA guide
aauuccagaucgcucuuaca

SEQ ID NO: 60667 - RNA, 20 nt, Artificial Sequence
  LRRK2 RNA guide
accaccuaaacuguaagagc

SEQ ID NO: 60668 - RNA, 20 nt, Artificial Sequence
  LRRK2 RNA guide
accuaaacuguaagagcgau

SEQ ID NO: 60669 - RNA, 20 nt, Artificial Sequence
  LRRK2 RNA guide
acuguaagagcgaucuggaa

SEQ ID NO: 60670 - RNA, 20 nt, Artificial Sequence
  LRRK2 RNA guide
acuuuauagcaauuccagau

SEQ ID NO: 60671 - RNA, 20 nt, Artificial Sequence
  LRRK2 RNA guide
agagcgaucuggaauugcua

SEQ ID NO: 60672 - RNA, 20 nt, Artificial Sequence
  LRRK2 RNA guide
agaucgcucuuacaguuuag

SEQ ID NO: 60673 - RNA, 20 nt, Artificial Sequence
  LRRK2 RNA guide
agcaauuccagaucgcucuu

SEQ ID NO: 60674 - RNA, 20 nt, Artificial Sequence
  LRRK2 RNA guide
agcgaucuggaauugcuaua

SEQ ID NO: 60675 - RNA, 20 nt, Artificial Sequence
  LRRK2 RNA guide
auagcaauuccagaucgcuc

SEQ ID NO: 60676 - RNA, 20 nt, Artificial Sequence
  LRRK2 RNA guide
aucgcucuuacaguuuaggu

SEQ ID NO: 60677 - RNA, 20 nt, Artificial Sequence
  LRRK2 RNA guide
auuccagaucgcucuuacag

SEQ ID NO: 60678 - RNA, 20 nt, Artificial Sequence
  LRRK2 RNA guide
caauuccagaucgcucuuac

SEQ ID NO: 60679 - RNA, 20 nt, Artificial Sequence
  LRRK2 RNA guide
caccuaaacuguaagagcga

SEQ ID NO: 60680 - RNA, 20 nt, Artificial Sequence
  LRRK2 RNA guide
cagaucgcucuuacaguuua

SEQ ID NO: 60681 - RNA, 20 nt, Artificial Sequence
  LRRK2 RNA guide
ccaccuaaacuguaagagcg

SEQ ID NO: 60682 - RNA, 20 nt, Artificial Sequence
  LRRK2 RNA guide
ccagaucgcucuuacaguuu

SEQ ID NO: 60683 - RNA, 20 nt, Artificial Sequence
  LRRK2 RNA guide
ccuaaacuguaagagcgauc

SEQ ID NO: 60684 - RNA, 20 nt, Artificial Sequence
  LRRK2 RNA guide
cgaucuggaauugcuauaaa

SEQ ID NO: 60685 - RNA, 20 nt, Artificial Sequence
  LRRK2 RNA guide
cuaaacuguaagagcgaucu

SEQ ID NO: 60686 - RNA, 20 nt, Artificial Sequence
  LRRK2 RNA guide
cuguaagagcgaucuggaau

SEQ ID NO: 60687 - RNA, 20 nt, Artificial Sequence
  LRRK2 RNA guide
cuuuaccaccuaaacuguaa

SEQ ID NO: 60688 - RNA, 20 nt, Artificial Sequence
  LRRK2 RNA guide
cuuuauagcaauuccagauc

SEQ ID NO: 60689 - RNA, 20 nt, Artificial Sequence
  LRRK2 RNA guide
gagcgaucuggaauugcuau

SEQ ID NO: 60690 - RNA, 20 nt, Artificial Sequence
  LRRK2 RNA guide
gaucgcucuuacaguuuagg

SEQ ID NO: 60691 - RNA, 20 nt, Artificial Sequence
  LRRK2 RNA guide
gcaauuccagaucgcucuua

SEQ ID NO: 60692 - RNA, 20 nt, Artificial Sequence
  LRRK2 RNA guide
gcgaucuggaauugcuauaa

SEQ ID NO: 60693 - RNA, 20 nt, Artificial Sequence
  LRRK2 RNA guide
guaagagcgaucuggaauug

SEQ ID NO: 60694 - RNA, 20 nt, Artificial Sequence
  LRRK2 RNA guide
guacuuuauagcaauuccag

SEQ ID NO: 60695 - RNA, 20 nt, Artificial Sequence
  LRRK2 RNA guide
guguacuuuauagcaauucc

SEQ ID NO: 60696 - RNA, 20 nt, Artificial Sequence
  LRRK2 RNA guide
uaaacuguaagagcgaucug

SEQ ID NO: 60697 - RNA, 20 nt, Artificial Sequence
  LRRK2 RNA guide
uaagagcgaucuggaauugc

SEQ ID NO: 60698 - RNA, 20 nt, Artificial Sequence
  LRRK2 RNA guide
uaccaccuaaacuguaagag

SEQ ID NO: 60699 - RNA, 20 nt, Artificial Sequence
  LRRK2 RNA guide
uacuuuauagcaauuccaga

SEQ ID NO: 60700 - RNA, 20 nt, Artificial Sequence
  LRRK2 RNA guide
uagcaauuccagaucgcucu

SEQ ID NO: 60701 - RNA, 20 nt, Artificial Sequence
  LRRK2 RNA guide
uauagcaauuccagaucgcu

SEQ ID NO: 60702 - RNA, 20 nt, Artificial Sequence
  LRRK2 RNA guide
uccagaucgcucuuacaguu

SEQ ID NO: 60703 - RNA, 20 nt, Artificial Sequence
  LRRK2 RNA guide
ucgcucuuacaguuuaggug

SEQ ID NO: 60704 - RNA, 20 nt, Artificial Sequence
  LRRK2 RNA guide
uguaagagcgaucuggaauu

SEQ ID NO: 60705 - RNA, 20 nt, Artificial Sequence
  LRRK2 RNA guide
uguacuuuauagcaauucca

SEQ ID NO: 60706 - RNA, 20 nt, Artificial Sequence
  LRRK2 RNA guide
uuaccaccuaaacuguaaga

SEQ ID NO: 60707 - RNA, 20 nt, Artificial Sequence
  LRRK2 RNA guide
uuauagcaauuccagaucgc

SEQ ID NO: 60708 - RNA, 20 nt, Artificial Sequence
  LRRK2 RNA guide
uuccagaucgcucuuacagu

SEQ ID NO: 60709 - RNA, 20 nt, Artificial Sequence
  LRRK2 RNA guide
uuuaccaccuaaacuguaag

SEQ ID NO: 60710 - RNA, 20 nt, Artificial Sequence
  LRRK2 RNA guide
uuuauagcaauuccagaucg

SEQ ID NO: 60711 - RNA, 21 nt, Artificial Sequence
  LRRK2 RNA guide
aaacuguaagagcgaucugga

SEQ ID NO: 60712 - RNA, 21 nt, Artificial Sequence
  LRRK2 RNA guide
aacuguaagagcgaucuggaa

SEQ ID NO: 60713 - RNA, 21 nt, Artificial Sequence
  LRRK2 RNA guide
aagagcgaucuggaauugcua

SEQ ID NO: 60714 - RNA, 21 nt, Artificial Sequence
  LRRK2 RNA guide
aauuccagaucgcucuuacag

SEQ ID NO: 60715 - RNA, 21 nt, Artificial Sequence
  LRRK2 RNA guide
accaccuaaacuguaagagcg

SEQ ID NO: 60716 - RNA, 21 nt, Artificial Sequence
  LRRK2 RNA guide
accuaaacuguaagagcgauc

SEQ ID NO: 60717 - RNA, 21 nt, Artificial Sequence
  LRRK2 RNA guide
acuguaagagcgaucuggaau

SEQ ID NO: 60718 - RNA, 21 nt, Artificial Sequence
  LRRK2 RNA guide
acuuuauagcaauuccagauc

SEQ ID NO: 60719 - RNA, 21 nt, Artificial Sequence
  LRRK2 RNA guide
agagcgaucuggaauugcuau

SEQ ID NO: 60720 - RNA, 21 nt, Artificial Sequence
  LRRK2 RNA guide
agaucgcucuuacaguuuagg

SEQ ID NO: 60721 - RNA, 21 nt, Artificial Sequence
  LRRK2 RNA guide
agcaauuccagaucgcucuua

SEQ ID NO: 60722 - RNA, 21 nt, Artificial Sequence
  LRRK2 RNA guide
agcgaucuggaauugcuauaa

SEQ ID NO: 60723 - RNA, 21 nt, Artificial Sequence
  LRRK2 RNA guide
auagcaauuccagaucgcucu

SEQ ID NO: 60724 - RNA, 21 nt, Artificial Sequence
  LRRK2 RNA guide
aucgcucuuacaguuuaggug

SEQ ID NO: 60725 - RNA, 21 nt, Artificial Sequence
  LRRK2 RNA guide
auuccagaucgcucuuacagu

SEQ ID NO: 60726 - RNA, 21 nt, Artificial Sequence
  LRRK2 RNA guide
caauuccagaucgcucuuaca

SEQ ID NO: 60727 - RNA, 21 nt, Artificial Sequence
  LRRK2 RNA guide
caccuaaacuguaagagcgau

SEQ ID NO: 60728 - RNA, 21 nt, Artificial Sequence
  LRRK2 RNA guide
cagaucgcucuuacaguuuag

SEQ ID NO: 60729 - RNA, 21 nt, Artificial Sequence
  LRRK2 RNA guide
ccaccuaaacuguaagagcga

SEQ ID NO: 60730 - RNA, 21 nt, Artificial Sequence
  LRRK2 RNA guide
ccagaucgcucuuacaguuua

SEQ ID NO: 60731 - RNA, 21 nt, Artificial Sequence
  LRRK2 RNA guide
ccuaaacuguaagagcgaucu

SEQ ID NO: 60732 - RNA, 21 nt, Artificial Sequence
  LRRK2 RNA guide
cgaucuggaauugcuauaaag

SEQ ID NO: 60733 - RNA, 21 nt, Artificial Sequence
  LRRK2 RNA guide
cuaaacuguaagagcgaucug

SEQ ID NO: 60734 - RNA, 21 nt, Artificial Sequence
  LRRK2 RNA guide
cuguaagagcgaucuggaauu

SEQ ID NO: 60735 - RNA, 21 nt, Artificial Sequence
  LRRK2 RNA guide
cuuuaccaccuaaacuguaag

SEQ ID NO: 60736 - RNA, 21 nt, Artificial Sequence
  LRRK2 RNA guide
cuuuauagcaauuccagaucg

SEQ ID NO: 60737 - RNA, 21 nt, Artificial Sequence
  LRRK2 RNA guide
gagcgaucuggaauugcuaua

SEQ ID NO: 60738 - RNA, 21 nt, Artificial Sequence
  LRRK2 RNA guide
gaucgcucuuacaguuuaggu

SEQ ID NO: 60739 - RNA, 21 nt, Artificial Sequence
  LRRK2 RNA guide
gcaauuccagaucgcucuuac

SEQ ID NO: 60740 - RNA, 21 nt, Artificial Sequence
  LRRK2 RNA guide
gcgaucuggaauugcuauaaa

SEQ ID NO: 60741 - RNA, 21 nt, Artificial Sequence
  LRRK2 RNA guide
guaagagcgaucuggaauugc

SEQ ID NO: 60742 - RNA, 21 nt, Artificial Sequence
  LRRK2 RNA guide
guacuuuauagcaauuccaga

SEQ ID NO: 60743 - RNA, 21 nt, Artificial Sequence
  LRRK2 RNA guide
guguacuuuauagcaauucca

SEQ ID NO: 60744 - RNA, 21 nt, Artificial Sequence
  LRRK2 RNA guide
uaaacuguaagagcgaucugg

SEQ ID NO: 60745 - RNA, 21 nt, Artificial Sequence
  LRRK2 RNA guide
uaagagcgaucuggaauugcu

SEQ ID NO: 60746 - RNA, 21 nt, Artificial Sequence
  LRRK2 RNA guide
uaccaccuaaacuguaagagc

SEQ ID NO: 60747 - RNA, 21 nt, Artificial Sequence
  LRRK2 RNA guide
uagcaauuccagaucgcucuu

SEQ ID NO: 60748 - RNA, 21 nt, Artificial Sequence
  LRRK2 RNA guide
uauagcaauuccagaucgcuc

SEQ ID NO: 60749 - RNA, 21 nt, Artificial Sequence
  LRRK2 RNA guide
uccagaucgcucuuacaguuu

SEQ ID NO: 60750 - RNA, 21 nt, Artificial Sequence
  LRRK2 RNA guide
ucgcucuuacaguuuaggugg

SEQ ID NO: 60751 - RNA, 21 nt, Artificial Sequence
  LRRK2 RNA guide
ucuuuaccaccuaaacuguaa

SEQ ID NO: 60752 - RNA, 21 nt, Artificial Sequence
  LRRK2 RNA guide
uguaagagcgaucuggaauug

SEQ ID NO: 60753 - RNA, 21 nt, Artificial Sequence
  LRRK2 RNA guide
uguacuuuauagcaauuccag

SEQ ID NO: 60754 - RNA, 21 nt, Artificial Sequence
  LRRK2 RNA guide
uguguacuuuauagcaauucc

SEQ ID NO: 60755 - RNA, 21 nt, Artificial Sequence
  LRRK2 RNA guide
uuaccaccuaaacuguaagag

SEQ ID NO: 60756 - RNA, 21 nt, Artificial Sequence
  LRRK2 RNA guide
uuauagcaauuccagaucgcu

SEQ ID NO: 60757 - RNA, 21 nt, Artificial Sequence
  LRRK2 RNA guide
uuccagaucgcucuuacaguu

SEQ ID NO: 60758 - RNA, 21 nt, Artificial Sequence
  LRRK2 RNA guide
uuuaccaccuaaacuguaaga

SEQ ID NO: 60759 - RNA, 21 nt, Artificial Sequence
  LRRK2 RNA guide
uuuauagcaauuccagaucgc

SEQ ID NO: 60760 - RNA, 22 nt, Artificial Sequence
  LRRK2 RNA guide
aaacuguaagagcgaucuggaa

SEQ ID NO: 60761 - RNA, 22 nt, Artificial Sequence
  LRRK2 RNA guide
aacuguaagagcgaucuggaau

SEQ ID NO: 60762 - RNA, 22 nt, Artificial Sequence
  LRRK2 RNA guide
aagagcgaucuggaauugcuau

SEQ ID NO: 60763 - RNA, 22 nt, Artificial Sequence
  LRRK2 RNA guide
aauuccagaucgcucuuacagu

SEQ ID NO: 60764 - RNA, 22 nt, Artificial Sequence
  LRRK2 RNA guide
accaccuaaacuguaagagcga

SEQ ID NO: 60765 - RNA, 22 nt, Artificial Sequence
  LRRK2 RNA guide
accuaaacuguaagagcgaucu

SEQ ID NO: 60766 - RNA, 22 nt, Artificial Sequence
  LRRK2 RNA guide
acuguaagagcgaucuggaauu

SEQ ID NO: 60767 - RNA, 22 nt, Artificial Sequence
  LRRK2 RNA guide
acuuuauagcaauuccagaucg

SEQ ID NO: 60768 - RNA, 22 nt, Artificial Sequence
  LRRK2 RNA guide
agagcgaucuggaauugcuaua

SEQ ID NO: 60769 - RNA, 22 nt, Artificial Sequence
  LRRK2 RNA guide
agaucgcucuuacaguuuaggu

SEQ ID NO: 60770 - RNA, 22 nt, Artificial Sequence
  LRRK2 RNA guide
agcaauuccagaucgcucuuac

SEQ ID NO: 60771 - RNA, 22 nt, Artificial Sequence
  LRRK2 RNA guide
agcgaucuggaauugcuauaaa

SEQ ID NO: 60772 - RNA, 22 nt, Artificial Sequence
  LRRK2 RNA guide
auagcaauuccagaucgcucuu

SEQ ID NO: 60773 - RNA, 22 nt, Artificial Sequence
  LRRK2 RNA guide
aucgcucuuacaguuuaggugg

SEQ ID NO: 60774 - RNA, 22 nt, Artificial Sequence
  LRRK2 RNA guide
auuccagaucgcucuuacaguu

SEQ ID NO: 60775 - RNA, 22 nt, Artificial Sequence
  LRRK2 RNA guide
caauuccagaucgcucuuacag

SEQ ID NO: 60776 - RNA, 22 nt, Artificial Sequence
  LRRK2 RNA guide
caccuaaacuguaagagcgauc

SEQ ID NO: 60777 - RNA, 22 nt, Artificial Sequence
  LRRK2 RNA guide
cagaucgcucuuacaguuuagg

SEQ ID NO: 60778 - RNA, 22 nt, Artificial Sequence
  LRRK2 RNA guide
ccaccuaaacuguaagagcgau

SEQ ID NO: 60779 - RNA, 22 nt, Artificial Sequence
  LRRK2 RNA guide
ccagaucgcucuuacaguuuag

SEQ ID NO: 60780 - RNA, 22 nt, Artificial Sequence
  LRRK2 RNA guide
ccuaaacuguaagagcgaucug

SEQ ID NO: 60781 - RNA, 22 nt, Artificial Sequence
  LRRK2 RNA guide
cgaucuggaauugcuauaaagu

SEQ ID NO: 60782 - RNA, 22 nt, Artificial Sequence
  LRRK2 RNA guide
cuaaacuguaagagcgaucugg

SEQ ID NO: 60783 - RNA, 22 nt, Artificial Sequence
  LRRK2 RNA guide
cucuuuaccaccuaaacuguaa

SEQ ID NO: 60784 - RNA, 22 nt, Artificial Sequence
  LRRK2 RNA guide
cuguaagagcgaucuggaauug

SEQ ID NO: 60785 - RNA, 22 nt, Artificial Sequence
  LRRK2 RNA guide
cuuuaccaccuaaacuguaaga

SEQ ID NO: 60786 - RNA, 22 nt, Artificial Sequence
  LRRK2 RNA guide
cuuuauagcaauuccagaucgc

SEQ ID NO: 60787 - RNA, 22 nt, Artificial Sequence
  LRRK2 RNA guide
gagcgaucuggaauugcuauaa

SEQ ID NO: 60788 - RNA, 22 nt, Artificial Sequence
  LRRK2 RNA guide
gaucgcucuuacaguuuaggug

SEQ ID NO: 60789 - RNA, 22 nt, Artificial Sequence
  LRRK2 RNA guide
gcaauuccagaucgcucuuaca

SEQ ID NO: 60790 - RNA, 22 nt, Artificial Sequence
  LRRK2 RNA guide
gcgaucuggaauugcuauaaag

SEQ ID NO: 60791 - RNA, 22 nt, Artificial Sequence
  LRRK2 RNA guide
guaagagcgaucuggaauugcu

SEQ ID NO: 60792 - RNA, 22 nt, Artificial Sequence
  LRRK2 RNA guide
guacuuuauagcaauuccagau

SEQ ID NO: 60793 - RNA, 22 nt, Artificial Sequence
  LRRK2 RNA guide
guguacuuuauagcaauuccag

SEQ ID NO: 60794 - RNA, 22 nt, Artificial Sequence
  LRRK2 RNA guide
uaaacuguaagagcgaucugga

SEQ ID NO: 60795 - RNA, 22 nt, Artificial Sequence
  LRRK2 RNA guide
uaagagcgaucuggaauugcua

SEQ ID NO: 60796 - RNA, 22 nt, Artificial Sequence
  LRRK2 RNA guide
uaccaccuaaacuguaagagcg

SEQ ID NO: 60797 - RNA, 22 nt, Artificial Sequence
  LRRK2 RNA guide
uacuuuauagcaauuccagauc

SEQ ID NO: 60798 - RNA, 22 nt, Artificial Sequence
  LRRK2 RNA guide
uagcaauuccagaucgcucuua

SEQ ID NO: 60799 - RNA, 22 nt, Artificial Sequence
  LRRK2 RNA guide
uauagcaauuccagaucgcucu

SEQ ID NO: 60800 - RNA, 22 nt, Artificial Sequence
  LRRK2 RNA guide
uccagaucgcucuuacaguuua

SEQ ID NO: 60801 - RNA, 22 nt, Artificial Sequence
  LRRK2 RNA guide
ucgcucuuacaguuuagguggu

SEQ ID NO: 60802 - RNA, 22 nt, Artificial Sequence
  LRRK2 RNA guide
ucuuuaccaccuaaacuguaag

SEQ ID NO: 60803 - RNA, 22 nt, Artificial Sequence
  LRRK2 RNA guide
uguaagagcgaucuggaauugc

SEQ ID NO: 60804 - RNA, 22 nt, Artificial Sequence
  LRRK2 RNA guide
uguacuuuauagcaauuccaga

SEQ ID NO: 60805 - RNA, 22 nt, Artificial Sequence
  LRRK2 RNA guide
uguguacuuuauagcaauucca

SEQ ID NO: 60806 - RNA, 22 nt, Artificial Sequence
  LRRK2 RNA guide
uuaccaccuaaacuguaagagc

SEQ ID NO: 60807 - RNA, 22 nt, Artificial Sequence
  LRRK2 RNA guide
uuauagcaauuccagaucgcuc

SEQ ID NO: 60808 - RNA, 22 nt, Artificial Sequence
  LRRK2 RNA guide
uuccagaucgcucuuacaguuu

SEQ ID NO: 60809 - RNA, 22 nt, Artificial Sequence
  LRRK2 RNA guide
uuguguacuuuauagcaauucc

SEQ ID NO: 60810 - RNA, 22 nt, Artificial Sequence
  LRRK2 RNA guide
uuuaccaccuaaacuguaagag

SEQ ID NO: 60811 - RNA, 22 nt, Artificial Sequence
  LRRK2 RNA guide
uuuauagcaauuccagaucgcu

SEQ ID NO: 60812 - RNA, 20 nt, Artificial Sequence
  LRRK2 RNA guide
aaacuguaagagcaaucugg

SEQ ID NO: 60813 - RNA, 20 nt, Artificial Sequence
  LRRK2 RNA guide
aacuguaagagcaaucugga

SEQ ID NO: 60814 - RNA, 20 nt, Artificial Sequence
  LRRK2 RNA guide
aagagcaaucuggaauugcu

SEQ ID NO: 60815 - RNA, 20 nt, Artificial Sequence
  LRRK2 RNA guide
aauuccagauugcucuuaca

SEQ ID NO: 60816 - RNA, 20 nt, Artificial Sequence
  LRRK2 RNA guide
accuaaacuguaagagcaau

SEQ ID NO: 60817 - RNA, 20 nt, Artificial Sequence
  LRRK2 RNA guide
acuguaagagcaaucuggaa

SEQ ID NO: 60818 - RNA, 20 nt, Artificial Sequence
  LRRK2 RNA guide
agagcaaucuggaauugcua

SEQ ID NO: 60819 - RNA, 20 nt, Artificial Sequence
  LRRK2 RNA guide
agauugcucuuacaguuuag

SEQ ID NO: 60820 - RNA, 20 nt, Artificial Sequence
  LRRK2 RNA guide
agcaaucuggaauugcuaua

SEQ ID NO: 60821 - RNA, 20 nt, Artificial Sequence
  LRRK2 RNA guide
agcaauuccagauugcucuu

SEQ ID NO: 60822 - RNA, 20 nt, Artificial Sequence
  LRRK2 RNA guide
auagcaauuccagauugcuc

SEQ ID NO: 60823 - RNA, 20 nt, Artificial Sequence
  LRRK2 RNA guide
auuccagauugcucuuacag

SEQ ID NO: 60824 - RNA, 20 nt, Artificial Sequence
  LRRK2 RNA guide
auugcucuuacaguuuaggu

SEQ ID NO: 60825 - RNA, 20 nt, Artificial Sequence
  LRRK2 RNA guide
caaucuggaauugcuauaaa

SEQ ID NO: 60826 - RNA, 20 nt, Artificial Sequence
  LRRK2 RNA guide
caauuccagauugcucuuac

SEQ ID NO: 60827 - RNA, 20 nt, Artificial Sequence
  LRRK2 RNA guide
caccuaaacuguaagagcaa

SEQ ID NO: 60828 - RNA, 20 nt, Artificial Sequence
  LRRK2 RNA guide
cagauugcucuuacaguuua

SEQ ID NO: 60829 - RNA, 20 nt, Artificial Sequence
  LRRK2 RNA guide
ccaccuaaacuguaagagca

SEQ ID NO: 60830 - RNA, 20 nt, Artificial Sequence
  LRRK2 RNA guide
ccagauugcucuuacaguuu

SEQ ID NO: 60831 - RNA, 20 nt, Artificial Sequence
  LRRK2 RNA guide
ccuaaacuguaagagcaauc

SEQ ID NO: 60832 - RNA, 20 nt, Artificial Sequence
  LRRK2 RNA guide
cuaaacuguaagagcaaucu

SEQ ID NO: 60833 - RNA, 20 nt, Artificial Sequence
  LRRK2 RNA guide
cuguaagagcaaucuggaau

SEQ ID NO: 60834 - RNA, 20 nt, Artificial Sequence
  LRRK2 RNA guide
cuuuauagcaauuccagauu

SEQ ID NO: 60835 - RNA, 20 nt, Artificial Sequence
  LRRK2 RNA guide
gagcaaucuggaauugcuau

SEQ ID NO: 60836 - RNA, 20 nt, Artificial Sequence
  LRRK2 RNA guide
gauugcucuuacaguuuagg

SEQ ID NO: 60837 - RNA, 20 nt, Artificial Sequence
  LRRK2 RNA guide
gcaaucuggaauugcuauaa

SEQ ID NO: 60838 - RNA, 20 nt, Artificial Sequence
  LRRK2 RNA guide
gcaauuccagauugcucuua

SEQ ID NO: 60839 - RNA, 20 nt, Artificial Sequence
  LRRK2 RNA guide
guaagagcaaucuggaauug

SEQ ID NO: 60840 - RNA, 20 nt, Artificial Sequence
  LRRK2 RNA guide
uaaacuguaagagcaaucug

SEQ ID NO: 60841 - RNA, 20 nt, Artificial Sequence
  LRRK2 RNA guide
uaagagcaaucuggaauugc

SEQ ID NO: 60842 - RNA, 20 nt, Artificial Sequence
  LRRK2 RNA guide
uagcaauuccagauugcucu

SEQ ID NO: 60843 - RNA, 20 nt, Artificial Sequence
  LRRK2 RNA guide
uauagcaauuccagauugcu

SEQ ID NO: 60844 - RNA, 20 nt, Artificial Sequence
  LRRK2 RNA guide
uccagauugcucuuacaguu

SEQ ID NO: 60845 - RNA, 20 nt, Artificial Sequence
  LRRK2 RNA guide
uguaagagcaaucuggaauu

SEQ ID NO: 60846 - RNA, 20 nt, Artificial Sequence
  LRRK2 RNA guide
uuauagcaauuccagauugc

SEQ ID NO: 60847 - RNA, 20 nt, Artificial Sequence
  LRRK2 RNA guide
uuccagauugcucuuacagu

SEQ ID NO: 60848 - RNA, 20 nt, Artificial Sequence
  LRRK2 RNA guide
uugcucuuacaguuuaggug

SEQ ID NO: 60849 - RNA, 20 nt, Artificial Sequence
  LRRK2 RNA guide
uuuauagcaauuccagauug

SEQ ID NO: 60850 - RNA, 21 nt, Artificial Sequence
  LRRK2 RNA guide
aaacuguaagagcaaucugga

SEQ ID NO: 60851 - RNA, 21 nt, Artificial Sequence
  LRRK2 RNA guide
aacuguaagagcaaucuggaa

SEQ ID NO: 60852 - RNA, 21 nt, Artificial Sequence
  LRRK2 RNA guide
aagagcaaucuggaauugcua

SEQ ID NO: 60853 - RNA, 21 nt, Artificial Sequence
  LRRK2 RNA guide
aauuccagauugcucuuacag

SEQ ID NO: 60854 - RNA, 21 nt, Artificial Sequence
  LRRK2 RNA guide
accaccuaaacuguaagagca

SEQ ID NO: 60855 - RNA, 21 nt, Artificial Sequence
  LRRK2 RNA guide
accuaaacuguaagagcaauc

SEQ ID NO: 60856 - RNA, 21 nt, Artificial Sequence
  LRRK2 RNA guide
acuguaagagcaaucuggaau

SEQ ID NO: 60857 - RNA, 21 nt, Artificial Sequence
  LRRK2 RNA guide
agagcaaucuggaauugcuau

SEQ ID NO: 60858 - RNA, 21 nt, Artificial Sequence
  LRRK2 RNA guide
agauugcucuuacaguuuagg

SEQ ID NO: 60859 - RNA, 21 nt, Artificial Sequence
  LRRK2 RNA guide
agcaaucuggaauugcuauaa

SEQ ID NO: 60860 - RNA, 21 nt, Artificial Sequence
  LRRK2 RNA guide
agcaauuccagauugcucuua

SEQ ID NO: 60861 - RNA, 21 nt, Artificial Sequence
  LRRK2 RNA guide
auagcaauuccagauugcucu

SEQ ID NO: 60862 - RNA, 21 nt, Artificial Sequence
  LRRK2 RNA guide
auuccagauugcucuuacagu

SEQ ID NO: 60863 - RNA, 21 nt, Artificial Sequence
  LRRK2 RNA guide
auugcucuuacaguuuaggug

SEQ ID NO: 60864 - RNA, 21 nt, Artificial Sequence
  LRRK2 RNA guide
caaucuggaauugcuauaaag

SEQ ID NO: 60865 - RNA, 21 nt, Artificial Sequence
  LRRK2 RNA guide
caauuccagauugcucuuaca

SEQ ID NO: 60866 - RNA, 21 nt, Artificial Sequence
  LRRK2 RNA guide
caccuaaacuguaagagcaau

SEQ ID NO: 60867 - RNA, 21 nt, Artificial Sequence
  LRRK2 RNA guide
cagauugcucuuacaguuuag

SEQ ID NO: 60868 - RNA, 21 nt, Artificial Sequence
  LRRK2 RNA guide
ccaccuaaacuguaagagcaa

SEQ ID NO: 60869 - RNA, 21 nt, Artificial Sequence
  LRRK2 RNA guide
ccagauugcucuuacaguuua

SEQ ID NO: 60870 - RNA, 21 nt, Artificial Sequence
  LRRK2 RNA guide
ccuaaacuguaagagcaaucu

SEQ ID NO: 60871 - RNA, 21 nt, Artificial Sequence
  LRRK2 RNA guide
cuaaacuguaagagcaaucug

SEQ ID NO: 60872 - RNA, 21 nt, Artificial Sequence
  LRRK2 RNA guide
cuguaagagcaaucuggaauu

SEQ ID NO: 60873 - RNA, 21 nt, Artificial Sequence
  LRRK2 RNA guide
cuuuauagcaauuccagauug

SEQ ID NO: 60874 - RNA, 21 nt, Artificial Sequence
  LRRK2 RNA guide
gagcaaucuggaauugcuaua

SEQ ID NO: 60875 - RNA, 21 nt, Artificial Sequence
  LRRK2 RNA guide
gauugcucuuacaguuuaggu

SEQ ID NO: 60876 - RNA, 21 nt, Artificial Sequence
  LRRK2 RNA guide
gcaaucuggaauugcuauaaa

SEQ ID NO: 60877 - RNA, 21 nt, Artificial Sequence
  LRRK2 RNA guide
gcaauuccagauugcucuuac

SEQ ID NO: 60878 - RNA, 21 nt, Artificial Sequence
  LRRK2 RNA guide
guaagagcaaucuggaauugc

SEQ ID NO: 60879 - RNA, 21 nt, Artificial Sequence
  LRRK2 RNA guide
uaaacuguaagagcaaucugg

SEQ ID NO: 60880 - RNA, 21 nt, Artificial Sequence
  LRRK2 RNA guide
uaagagcaaucuggaauugcu

SEQ ID NO: 60881 - RNA, 21 nt, Artificial Sequence
  LRRK2 RNA guide
uagcaauuccagauugcucuu

SEQ ID NO: 60882 - RNA, 21 nt, Artificial Sequence
  LRRK2 RNA guide
uauagcaauuccagauugcuc

SEQ ID NO: 60883 - RNA, 21 nt, Artificial Sequence
  LRRK2 RNA guide
uccagauugcucuuacaguuu

SEQ ID NO: 60884 - RNA, 21 nt, Artificial Sequence
  LRRK2 RNA guide
uguaagagcaaucuggaauug

SEQ ID NO: 60885 - RNA, 21 nt, Artificial Sequence
  LRRK2 RNA guide
uuauagcaauuccagauugcu

SEQ ID NO: 60886 - RNA, 21 nt, Artificial Sequence
  LRRK2 RNA guide
uuccagauugcucuuacaguu

SEQ ID NO: 60887 - RNA, 21 nt, Artificial Sequence
  LRRK2 RNA guide
uugcucuuacaguuuaggugg

SEQ ID NO: 60888 - RNA, 21 nt, Artificial Sequence
  LRRK2 RNA guide
uuuauagcaauuccagauugc

SEQ ID NO: 60889 - RNA, 22 nt, Artificial Sequence
  LRRK2 RNA guide
aaacuguaagagcaaucuggaa

SEQ ID NO: 60890 - RNA, 22 nt, Artificial Sequence
  LRRK2 RNA guide
aacuguaagagcaaucuggaau

SEQ ID NO: 60891 - RNA, 22 nt, Artificial Sequence
  LRRK2 RNA guide
aagagcaaucuggaauugcuau

SEQ ID NO: 60892 - RNA, 22 nt, Artificial Sequence
  LRRK2 RNA guide
aauuccagauugcucuuacagu

SEQ ID NO: 60893 - RNA, 22 nt, Artificial Sequence
  LRRK2 RNA guide
accaccuaaacuguaagagcaa

SEQ ID NO: 60894 - RNA, 22 nt, Artificial Sequence
  LRRK2 RNA guide
accuaaacuguaagagcaaucu

SEQ ID NO: 60895 - RNA, 22 nt, Artificial Sequence
  LRRK2 RNA guide
acuguaagagcaaucuggaauu

SEQ ID NO: 60896 - RNA, 22 nt, Artificial Sequence
  LRRK2 RNA guide
acuuuauagcaauuccagauug

SEQ ID NO: 60897 - RNA, 22 nt, Artificial Sequence
  LRRK2 RNA guide
agagcaaucuggaauugcuaua

SEQ ID NO: 60898 - RNA, 22 nt, Artificial Sequence
  LRRK2 RNA guide
agauugcucuuacaguuuaggu

SEQ ID NO: 60899 - RNA, 22 nt, Artificial Sequence
  LRRK2 RNA guide
agcaaucuggaauugcuauaaa

SEQ ID NO: 60900 - RNA, 22 nt, Artificial Sequence
  LRRK2 RNA guide
agcaauuccagauugcucuuac

SEQ ID NO: 60901 - RNA, 22 nt, Artificial Sequence
  LRRK2 RNA guide
auagcaauuccagauugcucuu

SEQ ID NO: 60902 - RNA, 22 nt, Artificial Sequence
  LRRK2 RNA guide
auuccagauugcucuuacaguu

SEQ ID NO: 60903 - RNA, 22 nt, Artificial Sequence
  LRRK2 RNA guide
auugcucuuacaguuuaggugg

SEQ ID NO: 60904 - RNA, 22 nt, Artificial Sequence
  LRRK2 RNA guide
caaucuggaauugcuauaaagu

SEQ ID NO: 60905 - RNA, 22 nt, Artificial Sequence
  LRRK2 RNA guide
caauuccagauugcucuuacag

SEQ ID NO: 60906 - RNA, 22 nt, Artificial Sequence
  LRRK2 RNA guide
caccuaaacuguaagagcaauc

SEQ ID NO: 60907 - RNA, 22 nt, Artificial Sequence
  LRRK2 RNA guide
cagauugcucuuacaguuuagg

SEQ ID NO: 60908 - RNA, 22 nt, Artificial Sequence
  LRRK2 RNA guide
ccaccuaaacuguaagagcaau

SEQ ID NO: 60909 - RNA, 22 nt, Artificial Sequence
  LRRK2 RNA guide
ccagauugcucuuacaguuuag

SEQ ID NO: 60910 - RNA, 22 nt, Artificial Sequence
  LRRK2 RNA guide
ccuaaacuguaagagcaaucug

SEQ ID NO: 60911 - RNA, 22 nt, Artificial Sequence
  LRRK2 RNA guide
cuaaacuguaagagcaaucugg

SEQ ID NO: 60912 - RNA, 22 nt, Artificial Sequence
  LRRK2 RNA guide
cuguaagagcaaucuggaauug

SEQ ID NO: 60913 - RNA, 22 nt, Artificial Sequence
  LRRK2 RNA guide
cuuuauagcaauuccagauugc

SEQ ID NO: 60914 - RNA, 22 nt, Artificial Sequence
  LRRK2 RNA guide
gagcaaucuggaauugcuauaa

SEQ ID NO: 60915 - RNA, 22 nt, Artificial Sequence
  LRRK2 RNA guide
gauugcucuuacaguuuaggug

SEQ ID NO: 60916 - RNA, 22 nt, Artificial Sequence
  LRRK2 RNA guide
gcaaucuggaauugcuauaaag

SEQ ID NO: 60917 - RNA, 22 nt, Artificial Sequence
  LRRK2 RNA guide
gcaauuccagauugcucuuaca

SEQ ID NO: 60918 - RNA, 22 nt, Artificial Sequence
  LRRK2 RNA guide
guaagagcaaucuggaauugcu

SEQ ID NO: 60919 - RNA, 22 nt, Artificial Sequence
  LRRK2 RNA guide
uaaacuguaagagcaaucugga

SEQ ID NO: 60920 - RNA, 22 nt, Artificial Sequence
  LRRK2 RNA guide
uaagagcaaucuggaauugcua

SEQ ID NO: 60921 - RNA, 22 nt, Artificial Sequence
  LRRK2 RNA guide
uaccaccuaaacuguaagagca

SEQ ID NO: 60922 - RNA, 22 nt, Artificial Sequence
  LRRK2 RNA guide
uagcaauuccagauugcucuua

SEQ ID NO: 60923 - RNA, 22 nt, Artificial Sequence
  LRRK2 RNA guide
uauagcaauuccagauugcucu

SEQ ID NO: 60924 - RNA, 22 nt, Artificial Sequence
  LRRK2 RNA guide
uccagauugcucuuacaguuua

SEQ ID NO: 60925 - RNA, 22 nt, Artificial Sequence
  LRRK2 RNA guide
uguaagagcaaucuggaauugc

SEQ ID NO: 60926 - RNA, 22 nt, Artificial Sequence
  LRRK2 RNA guide
uuauagcaauuccagauugcuc

SEQ ID NO: 60927 - RNA, 22 nt, Artificial Sequence
  LRRK2 RNA guide
uuccagauugcucuuacaguuu

SEQ ID NO: 60928 - RNA, 22 nt, Artificial Sequence
  LRRK2 RNA guide
uugcucuuacaguuuagguggu

SEQ ID NO: 60929 - RNA, 22 nt, Artificial Sequence
  LRRK2 RNA guide
uuuauagcaauuccagauugcu

SEQ ID NO: 60930 - RNA, 20 nt, Artificial Sequence
  LRRK2 RNA guide
aaaguacgcaaaguacauau

SEQ ID NO: 60931 - RNA, 20 nt, Artificial Sequence
  LRRK2 RNA guide
aacacauguaaaguacgcaa

SEQ ID NO: 60932 - RNA, 20 nt, Artificial Sequence
  LRRK2 RNA guide
aaguacgcaaaguacauaug

SEQ ID NO: 60933 - RNA, 20 nt, Artificial Sequence
  LRRK2 RNA guide
aauaacacauguaaaguacg

SEQ ID NO: 60934 - RNA, 20 nt, Artificial Sequence
  LRRK2 RNA guide
acacauguaaaguacgcaaa

SEQ ID NO: 60935 - RNA, 20 nt, Artificial Sequence
  LRRK2 RNA guide
acauguaaaguacgcaaagu

SEQ ID NO: 60936 - RNA, 20 nt, Artificial Sequence
  LRRK2 RNA guide
acgcaaaguacauaugacaa

SEQ ID NO: 60937 - RNA, 20 nt, Artificial Sequence
  LRRK2 RNA guide
acuuugcguacuuuacaugu

SEQ ID NO: 60938 - RNA, 20 nt, Artificial Sequence
  LRRK2 RNA guide
aguacgcaaaguacauauga

SEQ ID NO: 60939 - RNA, 20 nt, Artificial Sequence
  LRRK2 RNA guide
auaacacauguaaaguacgc

SEQ ID NO: 60940 - RNA, 20 nt, Artificial Sequence
  LRRK2 RNA guide
auauguacuuugcguacuuu

SEQ ID NO: 60941 - RNA, 20 nt, Artificial Sequence
  LRRK2 RNA guide
auguaaaguacgcaaaguac

SEQ ID NO: 60942 - RNA, 20 nt, Artificial Sequence
  LRRK2 RNA guide
auguacuuugcguacuuuac

SEQ ID NO: 60943 - RNA, 20 nt, Artificial Sequence
  LRRK2 RNA guide
auuugucauauguacuuugc

SEQ ID NO: 60944 - RNA, 20 nt, Artificial Sequence
  LRRK2 RNA guide
cacauguaaaguacgcaaag

SEQ ID NO: 60945 - RNA, 20 nt, Artificial Sequence
  LRRK2 RNA guide
cauauguacuuugcguacuu

SEQ ID NO: 60946 - RNA, 20 nt, Artificial Sequence
  LRRK2 RNA guide
cauguaaaguacgcaaagua

SEQ ID NO: 60947 - RNA, 20 nt, Artificial Sequence
  LRRK2 RNA guide
cguacuuuacauguguuauu

SEQ ID NO: 60948 - RNA, 20 nt, Artificial Sequence
  LRRK2 RNA guide
cuuugcguacuuuacaugug

SEQ ID NO: 60949 - RNA, 20 nt, Artificial Sequence
  LRRK2 RNA guide
gcguacuuuacauguguuau

SEQ ID NO: 60950 - RNA, 20 nt, Artificial Sequence
  LRRK2 RNA guide
guaaaguacgcaaaguacau

SEQ ID NO: 60951 - RNA, 20 nt, Artificial Sequence
  LRRK2 RNA guide
guacgcaaaguacauaugac

SEQ ID NO: 60952 - RNA, 20 nt, Artificial Sequence
  LRRK2 RNA guide
guacuuugcguacuuuacau

SEQ ID NO: 60953 - RNA, 20 nt, Artificial Sequence
  LRRK2 RNA guide
gucauauguacuuugcguac

SEQ ID NO: 60954 - RNA, 20 nt, Artificial Sequence
  LRRK2 RNA guide
uaaaguacgcaaaguacaua

SEQ ID NO: 60955 - RNA, 20 nt, Artificial Sequence
  LRRK2 RNA guide
uaacacauguaaaguacgca

SEQ ID NO: 60956 - RNA, 20 nt, Artificial Sequence
  LRRK2 RNA guide
uacgcaaaguacauaugaca

SEQ ID NO: 60957 - RNA, 20 nt, Artificial Sequence
  LRRK2 RNA guide
uacuuugcguacuuuacaug

SEQ ID NO: 60958 - RNA, 20 nt, Artificial Sequence
  LRRK2 RNA guide
uauguacuuugcguacuuua

SEQ ID NO: 60959 - RNA, 20 nt, Artificial Sequence
  LRRK2 RNA guide
ucauauguacuuugcguacu

SEQ ID NO: 60960 - RNA, 20 nt, Artificial Sequence
  LRRK2 RNA guide
ugcguacuuuacauguguua

SEQ ID NO: 60961 - RNA, 20 nt, Artificial Sequence
  LRRK2 RNA guide
uguaaaguacgcaaaguaca

SEQ ID NO: 60962 - RNA, 20 nt, Artificial Sequence
  LRRK2 RNA guide
uguacuuugcguacuuuaca

SEQ ID NO: 60963 - RNA, 20 nt, Artificial Sequence
  LRRK2 RNA guide
ugucauauguacuuugcgua

SEQ ID NO: 60964 - RNA, 20 nt, Artificial Sequence
  LRRK2 RNA guide
uugcguacuuuacauguguu

SEQ ID NO: 60965 - RNA, 20 nt, Artificial Sequence
  LRRK2 RNA guide
uugucauauguacuuugcgu

SEQ ID NO: 60966 - RNA, 20 nt, Artificial Sequence
  LRRK2 RNA guide
uuugcguacuuuacaugugu

SEQ ID NO: 60967 - RNA, 20 nt, Artificial Sequence
  LRRK2 RNA guide
uuugucauauguacuuugcg

SEQ ID NO: 60968 - RNA, 21 nt, Artificial Sequence
  LRRK2 RNA guide
aaaguacgcaaaguacauaug

SEQ ID NO: 60969 - RNA, 21 nt, Artificial Sequence
  LRRK2 RNA guide
aacacauguaaaguacgcaaa

SEQ ID NO: 60970 - RNA, 21 nt, Artificial Sequence
  LRRK2 RNA guide
aaguacgcaaaguacauauga

SEQ ID NO: 60971 - RNA, 21 nt, Artificial Sequence
  LRRK2 RNA guide
aauaacacauguaaaguacgc

SEQ ID NO: 60972 - RNA, 21 nt, Artificial Sequence
  LRRK2 RNA guide
acacauguaaaguacgcaaag

SEQ ID NO: 60973 - RNA, 21 nt, Artificial Sequence
  LRRK2 RNA guide
acauguaaaguacgcaaagua

SEQ ID NO: 60974 - RNA, 21 nt, Artificial Sequence
  LRRK2 RNA guide
acgcaaaguacauaugacaaa

SEQ ID NO: 60975 - RNA, 21 nt, Artificial Sequence
  LRRK2 RNA guide
acuuugcguacuuuacaugug

SEQ ID NO: 60976 - RNA, 21 nt, Artificial Sequence
  LRRK2 RNA guide
aguacgcaaaguacauaugac

SEQ ID NO: 60977 - RNA, 21 nt, Artificial Sequence
  LRRK2 RNA guide
auaacacauguaaaguacgca

SEQ ID NO: 60978 - RNA, 21 nt, Artificial Sequence
  LRRK2 RNA guide
auguaaaguacgcaaaguaca

SEQ ID NO: 60979 - RNA, 21 nt, Artificial Sequence
  LRRK2 RNA guide
auguacuuugcguacuuuaca

SEQ ID NO: 60980 - RNA, 21 nt, Artificial Sequence
  LRRK2 RNA guide
auuugucauauguacuuugcg

SEQ ID NO: 60981 - RNA, 21 nt, Artificial Sequence
  LRRK2 RNA guide
cacauguaaaguacgcaaagu

SEQ ID NO: 60982 - RNA, 21 nt, Artificial Sequence
  LRRK2 RNA guide
cauauguacuuugcguacuuu

SEQ ID NO: 60983 - RNA, 21 nt, Artificial Sequence
  LRRK2 RNA guide
cauguaaaguacgcaaaguac

SEQ ID NO: 60984 - RNA, 21 nt, Artificial Sequence
  LRRK2 RNA guide
cuuugcguacuuuacaugugu

SEQ ID NO: 60985 - RNA, 21 nt, Artificial Sequence
  LRRK2 RNA guide
gcguacuuuacauguguuauu

SEQ ID NO: 60986 - RNA, 21 nt, Artificial Sequence
  LRRK2 RNA guide
guaaaguacgcaaaguacaua

SEQ ID NO: 60987 - RNA, 21 nt, Artificial Sequence
  LRRK2 RNA guide
guacgcaaaguacauaugaca

SEQ ID NO: 60988 - RNA, 21 nt, Artificial Sequence
  LRRK2 RNA guide
guacuuugcguacuuuacaug

SEQ ID NO: 60989 - RNA, 21 nt, Artificial Sequence
  LRRK2 RNA guide
gucauauguacuuugcguacu

SEQ ID NO: 60990 - RNA, 21 nt, Artificial Sequence
  LRRK2 RNA guide
uaacacauguaaaguacgcaa

SEQ ID NO: 60991 - RNA, 21 nt, Artificial Sequence
  LRRK2 RNA guide
uacgcaaaguacauaugacaa

SEQ ID NO: 60992 - RNA, 21 nt, Artificial Sequence
  LRRK2 RNA guide
uacuuugcguacuuuacaugu

SEQ ID NO: 60993 - RNA, 21 nt, Artificial Sequence
  LRRK2 RNA guide
uauguacuuugcguacuuuac

SEQ ID NO: 60994 - RNA, 21 nt, Artificial Sequence
  LRRK2 RNA guide
ucauauguacuuugcguacuu

SEQ ID NO: 60995 - RNA, 21 nt, Artificial Sequence
  LRRK2 RNA guide
ugcguacuuuacauguguuau

SEQ ID NO: 60996 - RNA, 21 nt, Artificial Sequence
  LRRK2 RNA guide
uguaaaguacgcaaaguacau

SEQ ID NO: 60997 - RNA, 21 nt, Artificial Sequence
  LRRK2 RNA guide
uguacuuugcguacuuuacau

SEQ ID NO: 60998 - RNA, 21 nt, Artificial Sequence
  LRRK2 RNA guide
ugucauauguacuuugcguac

SEQ ID NO: 60999 - RNA, 21 nt, Artificial Sequence
  LRRK2 RNA guide
uugcguacuuuacauguguua

SEQ ID NO: 61000 - RNA, 21 nt, Artificial Sequence
  LRRK2 RNA guide
uugucauauguacuuugcgua

SEQ ID NO: 61001 - RNA, 21 nt, Artificial Sequence
  LRRK2 RNA guide
uuugcguacuuuacauguguu

SEQ ID NO: 61002 - RNA, 21 nt, Artificial Sequence
  LRRK2 RNA guide
uuugucauauguacuuugcgu

SEQ ID NO: 61003 - RNA, 22 nt, Artificial Sequence
  LRRK2 RNA guide
aaaguacgcaaaguacauauga

SEQ ID NO: 61004 - RNA, 22 nt, Artificial Sequence
  LRRK2 RNA guide
aaauaacacauguaaaguacgc

SEQ ID NO: 61005 - RNA, 22 nt, Artificial Sequence
  LRRK2 RNA guide
aacacauguaaaguacgcaaag

SEQ ID NO: 61006 - RNA, 22 nt, Artificial Sequence
  LRRK2 RNA guide
aaguacgcaaaguacauaugac

SEQ ID NO: 61007 - RNA, 22 nt, Artificial Sequence
  LRRK2 RNA guide
aauaacacauguaaaguacgca

SEQ ID NO: 61008 - RNA, 22 nt, Artificial Sequence
  LRRK2 RNA guide
aauuugucauauguacuuugcg

SEQ ID NO: 61009 - RNA, 22 nt, Artificial Sequence
  LRRK2 RNA guide
acacauguaaaguacgcaaagu

SEQ ID NO: 61010 - RNA, 22 nt, Artificial Sequence
  LRRK2 RNA guide
acauguaaaguacgcaaaguac

SEQ ID NO: 61011 - RNA, 22 nt, Artificial Sequence
  LRRK2 RNA guide
acgcaaaguacauaugacaaau

SEQ ID NO: 61012 - RNA, 22 nt, Artificial Sequence
  LRRK2 RNA guide
acuuugcguacuuuacaugugu

SEQ ID NO: 61013 - RNA, 22 nt, Artificial Sequence
  LRRK2 RNA guide
aguacgcaaaguacauaugaca

SEQ ID NO: 61014 - RNA, 22 nt, Artificial Sequence
  LRRK2 RNA guide
auaacacauguaaaguacgcaa

SEQ ID NO: 61015 - RNA, 22 nt, Artificial Sequence
  LRRK2 RNA guide
auauguacuuugcguacuuuac

SEQ ID NO: 61016 - RNA, 22 nt, Artificial Sequence
  LRRK2 RNA guide
auguaaaguacgcaaaguacau

SEQ ID NO: 61017 - RNA, 22 nt, Artificial Sequence
  LRRK2 RNA guide
auguacuuugcguacuuuacau

SEQ ID NO: 61018 - RNA, 22 nt, Artificial Sequence
  LRRK2 RNA guide
auuugucauauguacuuugcgu

SEQ ID NO: 61019 - RNA, 22 nt, Artificial Sequence
  LRRK2 RNA guide
cacauguaaaguacgcaaagua

SEQ ID NO: 61020 - RNA, 22 nt, Artificial Sequence
  LRRK2 RNA guide
cauauguacuuugcguacuuua

SEQ ID NO: 61021 - RNA, 22 nt, Artificial Sequence
  LRRK2 RNA guide
cauguaaaguacgcaaaguaca

SEQ ID NO: 61022 - RNA, 22 nt, Artificial Sequence
  LRRK2 RNA guide
cguacuuuacauguguuauuuc

SEQ ID NO: 61023 - RNA, 22 nt, Artificial Sequence
  LRRK2 RNA guide
cuuugcguacuuuacauguguu

SEQ ID NO: 61024 - RNA, 22 nt, Artificial Sequence
  LRRK2 RNA guide
gaaauaacacauguaaaguacg

SEQ ID NO: 61025 - RNA, 22 nt, Artificial Sequence
  LRRK2 RNA guide
gcguacuuuacauguguuauuu

SEQ ID NO: 61026 - RNA, 22 nt, Artificial Sequence
  LRRK2 RNA guide
guaaaguacgcaaaguacauau

SEQ ID NO: 61027 - RNA, 22 nt, Artificial Sequence
  LRRK2 RNA guide
guacgcaaaguacauaugacaa

SEQ ID NO: 61028 - RNA, 22 nt, Artificial Sequence
  LRRK2 RNA guide
guacuuugcguacuuuacaugu

SEQ ID NO: 61029 - RNA, 22 nt, Artificial Sequence
  LRRK2 RNA guide
gucauauguacuuugcguacuu

SEQ ID NO: 61030 - RNA, 22 nt, Artificial Sequence
  LRRK2 RNA guide
uaaaguacgcaaaguacauaug

SEQ ID NO: 61031 - RNA, 22 nt, Artificial Sequence
  LRRK2 RNA guide
uaacacauguaaaguacgcaaa

SEQ ID NO: 61032 - RNA, 22 nt, Artificial Sequence
  LRRK2 RNA guide
uacgcaaaguacauaugacaaa

SEQ ID NO: 61033 - RNA, 22 nt, Artificial Sequence
  LRRK2 RNA guide
uacuuugcguacuuuacaugug

SEQ ID NO: 61034 - RNA, 22 nt, Artificial Sequence
  LRRK2 RNA guide
uauguacuuugcguacuuuaca

SEQ ID NO: 61035 - RNA, 22 nt, Artificial Sequence
  LRRK2 RNA guide
ucauauguacuuugcguacuuu

SEQ ID NO: 61036 - RNA, 22 nt, Artificial Sequence
  LRRK2 RNA guide
ugcguacuuuacauguguuauu

SEQ ID NO: 61037 - RNA, 22 nt, Artificial Sequence
  LRRK2 RNA guide
uguaaaguacgcaaaguacaua

SEQ ID NO: 61038 - RNA, 22 nt, Artificial Sequence
  LRRK2 RNA guide
uguacuuugcguacuuuacaug

SEQ ID NO: 61039 - RNA, 22 nt, Artificial Sequence
  LRRK2 RNA guide
ugucauauguacuuugcguacu

SEQ ID NO: 61040 - RNA, 22 nt, Artificial Sequence
  LRRK2 RNA guide
uugcguacuuuacauguguuau

SEQ ID NO: 61041 - RNA, 22 nt, Artificial Sequence
  LRRK2 RNA guide
uugucauauguacuuugcguac

SEQ ID NO: 61042 - RNA, 22 nt, Artificial Sequence
  LRRK2 RNA guide
uuugcguacuuuacauguguua

SEQ ID NO: 61043 - RNA, 22 nt, Artificial Sequence
  LRRK2 RNA guide
uuugucauauguacuuugcgua

SEQ ID NO: 61044 - RNA, 20 nt, Artificial Sequence
  LRRK2 RNA guide
aacacauguaaaguaugcaa

SEQ ID NO: 61045 - RNA, 20 nt, Artificial Sequence
  LRRK2 RNA guide
aaguaugcaaaguacauaug

SEQ ID NO: 61046 - RNA, 20 nt, Artificial Sequence
  LRRK2 RNA guide
acacauguaaaguaugcaaa

SEQ ID NO: 61047 - RNA, 20 nt, Artificial Sequence
  LRRK2 RNA guide
acauguaaaguaugcaaagu

SEQ ID NO: 61048 - RNA, 20 nt, Artificial Sequence
  LRRK2 RNA guide
acuuugcauacuuuacaugu

SEQ ID NO: 61049 - RNA, 20 nt, Artificial Sequence
  LRRK2 RNA guide
aguaugcaaaguacauauga

SEQ ID NO: 61050 - RNA, 20 nt, Artificial Sequence
  LRRK2 RNA guide
auaacacauguaaaguaugc

SEQ ID NO: 61051 - RNA, 20 nt, Artificial Sequence
  LRRK2 RNA guide
augcaaaguacauaugacaa

SEQ ID NO: 61052 - RNA, 20 nt, Artificial Sequence
  LRRK2 RNA guide
auguaaaguaugcaaaguac

SEQ ID NO: 61053 - RNA, 20 nt, Artificial Sequence
  LRRK2 RNA guide
auguacuuugcauacuuuac

SEQ ID NO: 61054 - RNA, 20 nt, Artificial Sequence
  LRRK2 RNA guide
cacauguaaaguaugcaaag

SEQ ID NO: 61055 - RNA, 20 nt, Artificial Sequence
  LRRK2 RNA guide
cauauguacuuugcauacuu

SEQ ID NO: 61056 - RNA, 20 nt, Artificial Sequence
  LRRK2 RNA guide
cauguaaaguaugcaaagua

SEQ ID NO: 61057 - RNA, 20 nt, Artificial Sequence
  LRRK2 RNA guide
cuuugcauacuuuacaugug

SEQ ID NO: 61058 - RNA, 20 nt, Artificial Sequence
  LRRK2 RNA guide
gcauacuuuacauguguuau

SEQ ID NO: 61059 - RNA, 20 nt, Artificial Sequence
  LRRK2 RNA guide
guaaaguaugcaaaguacau

SEQ ID NO: 61060 - RNA, 20 nt, Artificial Sequence
  LRRK2 RNA guide
guacuuugcauacuuuacau

SEQ ID NO: 61061 - RNA, 20 nt, Artificial Sequence
  LRRK2 RNA guide
guaugcaaaguacauaugac

SEQ ID NO: 61062 - RNA, 20 nt, Artificial Sequence
  LRRK2 RNA guide
gucauauguacuuugcauac

SEQ ID NO: 61063 - RNA, 20 nt, Artificial Sequence
  LRRK2 RNA guide
uaacacauguaaaguaugca

SEQ ID NO: 61064 - RNA, 20 nt, Artificial Sequence
  LRRK2 RNA guide
uacuuugcauacuuuacaug

SEQ ID NO: 61065 - RNA, 20 nt, Artificial Sequence
  LRRK2 RNA guide
uaugcaaaguacauaugaca

SEQ ID NO: 61066 - RNA, 20 nt, Artificial Sequence
  LRRK2 RNA guide
ucauauguacuuugcauacu

SEQ ID NO: 61067 - RNA, 20 nt, Artificial Sequence
  LRRK2 RNA guide
ugcauacuuuacauguguua

SEQ ID NO: 61068 - RNA, 20 nt, Artificial Sequence
  LRRK2 RNA guide
uguaaaguaugcaaaguaca

SEQ ID NO: 61069 - RNA, 20 nt, Artificial Sequence
  LRRK2 RNA guide
uguacuuugcauacuuuaca

SEQ ID NO: 61070 - RNA, 20 nt, Artificial Sequence
  LRRK2 RNA guide
ugucauauguacuuugcaua

SEQ ID NO: 61071 - RNA, 20 nt, Artificial Sequence
  LRRK2 RNA guide
uugcauacuuuacauguguu

SEQ ID NO: 61072 - RNA, 20 nt, Artificial Sequence
  LRRK2 RNA guide
uugucauauguacuuugcau

SEQ ID NO: 61073 - RNA, 20 nt, Artificial Sequence
  LRRK2 RNA guide
uuugcauacuuuacaugugu

SEQ ID NO: 61074 - RNA, 20 nt, Artificial Sequence
  LRRK2 RNA guide
uuugucauauguacuuugca

SEQ ID NO: 61075 - RNA, 21 nt, Artificial Sequence
  LRRK2 RNA guide
acacauguaaaguaugcaaag

SEQ ID NO: 61076 - RNA, 21 nt, Artificial Sequence
  LRRK2 RNA guide
acuuugcauacuuuacaugug

SEQ ID NO: 61077 - RNA, 21 nt, Artificial Sequence
  LRRK2 RNA guide
aguaugcaaaguacauaugac

SEQ ID NO: 61078 - RNA, 21 nt, Artificial Sequence
  LRRK2 RNA guide
cacauguaaaguaugcaaagu

SEQ ID NO: 61079 - RNA, 21 nt, Artificial Sequence
  LRRK2 RNA guide
cauguaaaguaugcaaaguac

SEQ ID NO: 61080 - RNA, 21 nt, Artificial Sequence
  LRRK2 RNA guide
cuuugcauacuuuacaugugu

SEQ ID NO: 61081 - RNA, 21 nt, Artificial Sequence
  LRRK2 RNA guide
guacuuugcauacuuuacaug

SEQ ID NO: 61082 - RNA, 21 nt, Artificial Sequence
  LRRK2 RNA guide
guaugcaaaguacauaugaca

SEQ ID NO: 61083 - RNA, 21 nt, Artificial Sequence
  LRRK2 RNA guide
gucauauguacuuugcauacu

SEQ ID NO: 61084 - RNA, 21 nt, Artificial Sequence
  LRRK2 RNA guide
ugucauauguacuuugcauac

SEQ ID NO: 61085 - RNA, 22 nt, Artificial Sequence
  LRRK2 RNA guide
aacacauguaaaguaugcaaag

SEQ ID NO: 61086 - RNA, 22 nt, Artificial Sequence
  LRRK2 RNA guide
aaguaugcaaaguacauaugac

SEQ ID NO: 61087 - RNA, 22 nt, Artificial Sequence
  LRRK2 RNA guide
acacauguaaaguaugcaaagu

SEQ ID NO: 61088 - RNA, 22 nt, Artificial Sequence
  LRRK2 RNA guide
acauguaaaguaugcaaaguac

SEQ ID NO: 61089 - RNA, 22 nt, Artificial Sequence
  LRRK2 RNA guide
acuuugcauacuuuacaugugu

SEQ ID NO: 61090 - RNA, 22 nt, Artificial Sequence
  LRRK2 RNA guide
aguaugcaaaguacauaugaca

SEQ ID NO: 61091 - RNA, 22 nt, Artificial Sequence
  LRRK2 RNA guide
cacauguaaaguaugcaaagua

SEQ ID NO: 61092 - RNA, 22 nt, Artificial Sequence
  LRRK2 RNA guide
cauguaaaguaugcaaaguaca

SEQ ID NO: 61093 - RNA, 22 nt, Artificial Sequence
  LRRK2 RNA guide
cuuugcauacuuuacauguguu

SEQ ID NO: 61094 - RNA, 22 nt, Artificial Sequence
  LRRK2 RNA guide
guacuuugcauacuuuacaugu

SEQ ID NO: 61095 - RNA, 22 nt, Artificial Sequence
  LRRK2 RNA guide
guaugcaaaguacauaugacaa

SEQ ID NO: 61096 - RNA, 22 nt, Artificial Sequence
  LRRK2 RNA guide
gucauauguacuuugcauacuu

SEQ ID NO: 61097 - RNA, 22 nt, Artificial Sequence
  LRRK2 RNA guide
uacuuugcauacuuuacaugug

SEQ ID NO: 61098 - RNA, 22 nt, Artificial Sequence
  LRRK2 RNA guide
uguacuuugcauacuuuacaug

SEQ ID NO: 61099 - RNA, 22 nt, Artificial Sequence
  LRRK2 RNA guide
ugucauauguacuuugcauacu

SEQ ID NO: 61100 - RNA, 22 nt, Artificial Sequence
  LRRK2 RNA guide
uugucauauguacuuugcauac

SEQ ID NO: 61101 - RNA, 20 nt, Artificial Sequence
  LRRK2 RNA guide
aaagcucaaagugugaucuc

SEQ ID NO: 61102 - RNA, 20 nt, Artificial Sequence
  LRRK2 RNA guide
aaagugugaucucuguguua

SEQ ID NO: 61103 - RNA, 20 nt, Artificial Sequence
  LRRK2 RNA guide
aacacagagaucacacuuug

SEQ ID NO: 61104 - RNA, 20 nt, Artificial Sequence
  LRRK2 RNA guide
aagcucaaagugugaucucu

SEQ ID NO: 61105 - RNA, 20 nt, Artificial Sequence
  LRRK2 RNA guide
aaggaucaaagcucaaagug

SEQ ID NO: 61106 - RNA, 20 nt, Artificial Sequence
  LRRK2 RNA guide
aagugugaucucuguguuag

SEQ ID NO: 61107 - RNA, 20 nt, Artificial Sequence
  LRRK2 RNA guide
acaaggaucaaagcucaaag

SEQ ID NO: 61108 - RNA, 20 nt, Artificial Sequence
  LRRK2 RNA guide
acacagagaucacacuuuga

SEQ ID NO: 61109 - RNA, 20 nt, Artificial Sequence
  LRRK2 RNA guide
acacuuugagcuuugauccu

SEQ ID NO: 61110 - RNA, 20 nt, Artificial Sequence
  LRRK2 RNA guide
acagagaucacacuuugagc

SEQ ID NO: 61111 - RNA, 20 nt, Artificial Sequence
  LRRK2 RNA guide
agagaucacacuuugagcuu

SEQ ID NO: 61112 - RNA, 20 nt, Artificial Sequence
  LRRK2 RNA guide
agaucacacuuugagcuuug

SEQ ID NO: 61113 - RNA, 20 nt, Artificial Sequence
  LRRK2 RNA guide
agcucaaagugugaucucug

SEQ ID NO: 61114 - RNA, 20 nt, Artificial Sequence
  LRRK2 RNA guide
aggaucaaagcucaaagugu

SEQ ID NO: 61115 - RNA, 20 nt, Artificial Sequence
  LRRK2 RNA guide
agugugaucucuguguuaga

SEQ ID NO: 61116 - RNA, 20 nt, Artificial Sequence
  LRRK2 RNA guide
aucaaagcucaaagugugau

SEQ ID NO: 61117 - RNA, 20 nt, Artificial Sequence
  LRRK2 RNA guide
aucacacuuugagcuuugau

SEQ ID NO: 61118 - RNA, 20 nt, Artificial Sequence
  LRRK2 RNA guide
augacaaggaucaaagcuca

SEQ ID NO: 61119 - RNA, 20 nt, Artificial Sequence
  LRRK2 RNA guide
auguuucuaacacagagauc

SEQ ID NO: 61120 - RNA, 20 nt, Artificial Sequence
  LRRK2 RNA guide
caaagcucaaagugugaucu

SEQ ID NO: 61121 - RNA, 20 nt, Artificial Sequence
  LRRK2 RNA guide
caaagugugaucucuguguu

SEQ ID NO: 61122 - RNA, 20 nt, Artificial Sequence
  LRRK2 RNA guide
caaggaucaaagcucaaagu

SEQ ID NO: 61123 - RNA, 20 nt, Artificial Sequence
  LRRK2 RNA guide
cacacuuugagcuuugaucc

SEQ ID NO: 61124 - RNA, 20 nt, Artificial Sequence
  LRRK2 RNA guide
cacagagaucacacuuugag

SEQ ID NO: 61125 - RNA, 20 nt, Artificial Sequence
  LRRK2 RNA guide
cagagaucacacuuugagcu

SEQ ID NO: 61126 - RNA, 20 nt, Artificial Sequence
  LRRK2 RNA guide
ccgauguuucuaacacagag

SEQ ID NO: 61127 - RNA, 20 nt, Artificial Sequence
  LRRK2 RNA guide
cgauguuucuaacacagaga

SEQ ID NO: 61128 - RNA, 20 nt, Artificial Sequence
  LRRK2 RNA guide
cuaacacagagaucacacuu

SEQ ID NO: 61129 - RNA, 20 nt, Artificial Sequence
  LRRK2 RNA guide
cucaaagugugaucucugug

SEQ ID NO: 61130 - RNA, 20 nt, Artificial Sequence
  LRRK2 RNA guide
gacaaggaucaaagcucaaa

SEQ ID NO: 61131 - RNA, 20 nt, Artificial Sequence
  LRRK2 RNA guide
gagaucacacuuugagcuuu

SEQ ID NO: 61132 - RNA, 20 nt, Artificial Sequence
  LRRK2 RNA guide
gaucaaagcucaaaguguga

SEQ ID NO: 61133 - RNA, 20 nt, Artificial Sequence
  LRRK2 RNA guide
gaucacacuuugagcuuuga

SEQ ID NO: 61134 - RNA, 20 nt, Artificial Sequence
  LRRK2 RNA guide
gauguuucuaacacagagau

SEQ ID NO: 61135 - RNA, 20 nt, Artificial Sequence
  LRRK2 RNA guide
gcucaaagugugaucucugu

SEQ ID NO: 61136 - RNA, 20 nt, Artificial Sequence
  LRRK2 RNA guide
ggaucaaagcucaaagugug

SEQ ID NO: 61137 - RNA, 20 nt, Artificial Sequence
  LRRK2 RNA guide
gugugaucucuguguuagaa

SEQ ID NO: 61138 - RNA, 20 nt, Artificial Sequence
  LRRK2 RNA guide
guuucuaacacagagaucac

SEQ ID NO: 61139 - RNA, 20 nt, Artificial Sequence
  LRRK2 RNA guide
uaacacagagaucacacuuu

SEQ ID NO: 61140 - RNA, 20 nt, Artificial Sequence
  LRRK2 RNA guide
ucaaagcucaaagugugauc

SEQ ID NO: 61141 - RNA, 20 nt, Artificial Sequence
  LRRK2 RNA guide
ucaaagugugaucucugugu

SEQ ID NO: 61142 - RNA, 20 nt, Artificial Sequence
  LRRK2 RNA guide
ucacacuuugagcuuugauc

SEQ ID NO: 61143 - RNA, 20 nt, Artificial Sequence
  LRRK2 RNA guide
ucuaacacagagaucacacu

SEQ ID NO: 61144 - RNA, 20 nt, Artificial Sequence
  LRRK2 RNA guide
ugacaaggaucaaagcucaa

SEQ ID NO: 61145 - RNA, 20 nt, Artificial Sequence
  LRRK2 RNA guide
ugugaucucuguguuagaaa

SEQ ID NO: 61146 - RNA, 20 nt, Artificial Sequence
  LRRK2 RNA guide
uguuucuaacacagagauca

SEQ ID NO: 61147 - RNA, 20 nt, Artificial Sequence
  LRRK2 RNA guide
uucuaacacagagaucacac

SEQ ID NO: 61148 - RNA, 20 nt, Artificial Sequence
  LRRK2 RNA guide
uuucuaacacagagaucaca

SEQ ID NO: 61149 - RNA, 21 nt, Artificial Sequence
  LRRK2 RNA guide
aaagcucaaagugugaucucu

SEQ ID NO: 61150 - RNA, 21 nt, Artificial Sequence
  LRRK2 RNA guide
aaagugugaucucuguguuag

SEQ ID NO: 61151 - RNA, 21 nt, Artificial Sequence
  LRRK2 RNA guide
aacacagagaucacacuuuga

SEQ ID NO: 61152 - RNA, 21 nt, Artificial Sequence
  LRRK2 RNA guide
aagcucaaagugugaucucug

SEQ ID NO: 61153 - RNA, 21 nt, Artificial Sequence
  LRRK2 RNA guide
aaggaucaaagcucaaagugu

SEQ ID NO: 61154 - RNA, 21 nt, Artificial Sequence
  LRRK2 RNA guide
aagugugaucucuguguuaga

SEQ ID NO: 61155 - RNA, 21 nt, Artificial Sequence
  LRRK2 RNA guide
acaaggaucaaagcucaaagu

SEQ ID NO: 61156 - RNA, 21 nt, Artificial Sequence
  LRRK2 RNA guide
acacagagaucacacuuugag

SEQ ID NO: 61157 - RNA, 21 nt, Artificial Sequence
  LRRK2 RNA guide
acacuuugagcuuugauccuu

SEQ ID NO: 61158 - RNA, 21 nt, Artificial Sequence
  LRRK2 RNA guide
acagagaucacacuuugagcu

SEQ ID NO: 61159 - RNA, 21 nt, Artificial Sequence
  LRRK2 RNA guide
agagaucacacuuugagcuuu

SEQ ID NO: 61160 - RNA, 21 nt, Artificial Sequence
  LRRK2 RNA guide
agaucacacuuugagcuuuga

SEQ ID NO: 61161 - RNA, 21 nt, Artificial Sequence
  LRRK2 RNA guide
agcucaaagugugaucucugu

SEQ ID NO: 61162 - RNA, 21 nt, Artificial Sequence
  LRRK2 RNA guide
aggaucaaagcucaaagugug

SEQ ID NO: 61163 - RNA, 21 nt, Artificial Sequence
  LRRK2 RNA guide
agugugaucucuguguuagaa

SEQ ID NO: 61164 - RNA, 21 nt, Artificial Sequence
  LRRK2 RNA guide
aucaaagcucaaagugugauc

SEQ ID NO: 61165 - RNA, 21 nt, Artificial Sequence
  LRRK2 RNA guide
aucacacuuugagcuuugauc

SEQ ID NO: 61166 - RNA, 21 nt, Artificial Sequence
  LRRK2 RNA guide
augacaaggaucaaagcucaa

SEQ ID NO: 61167 - RNA, 21 nt, Artificial Sequence
  LRRK2 RNA guide
auguuucuaacacagagauca

SEQ ID NO: 61168 - RNA, 21 nt, Artificial Sequence
  LRRK2 RNA guide
caaagcucaaagugugaucuc

SEQ ID NO: 61169 - RNA, 21 nt, Artificial Sequence
  LRRK2 RNA guide
caaagugugaucucuguguua

SEQ ID NO: 61170 - RNA, 21 nt, Artificial Sequence
  LRRK2 RNA guide
caaggaucaaagcucaaagug

SEQ ID NO: 61171 - RNA, 21 nt, Artificial Sequence
  LRRK2 RNA guide
cacacuuugagcuuugauccu

SEQ ID NO: 61172 - RNA, 21 nt, Artificial Sequence
  LRRK2 RNA guide
cacagagaucacacuuugagc

SEQ ID NO: 61173 - RNA, 21 nt, Artificial Sequence
  LRRK2 RNA guide
cagagaucacacuuugagcuu

SEQ ID NO: 61174 - RNA, 21 nt, Artificial Sequence
  LRRK2 RNA guide
caugacaaggaucaaagcuca

SEQ ID NO: 61175 - RNA, 21 nt, Artificial Sequence
  LRRK2 RNA guide
cccgauguuucuaacacagag

SEQ ID NO: 61176 - RNA, 21 nt, Artificial Sequence
  LRRK2 RNA guide
ccgauguuucuaacacagaga

SEQ ID NO: 61177 - RNA, 21 nt, Artificial Sequence
  LRRK2 RNA guide
cgauguuucuaacacagagau

SEQ ID NO: 61178 - RNA, 21 nt, Artificial Sequence
  LRRK2 RNA guide
cuaacacagagaucacacuuu

SEQ ID NO: 61179 - RNA, 21 nt, Artificial Sequence
  LRRK2 RNA guide
cucaaagugugaucucugugu

SEQ ID NO: 61180 - RNA, 21 nt, Artificial Sequence
  LRRK2 RNA guide
gacaaggaucaaagcucaaag

SEQ ID NO: 61181 - RNA, 21 nt, Artificial Sequence
  LRRK2 RNA guide
gagaucacacuuugagcuuug

SEQ ID NO: 61182 - RNA, 21 nt, Artificial Sequence
  LRRK2 RNA guide
gaucaaagcucaaagugugau

SEQ ID NO: 61183 - RNA, 21 nt, Artificial Sequence
  LRRK2 RNA guide
gaucacacuuugagcuuugau

SEQ ID NO: 61184 - RNA, 21 nt, Artificial Sequence
  LRRK2 RNA guide
gauguuucuaacacagagauc

SEQ ID NO: 61185 - RNA, 21 nt, Artificial Sequence
  LRRK2 RNA guide
gcucaaagugugaucucugug

SEQ ID NO: 61186 - RNA, 21 nt, Artificial Sequence
  LRRK2 RNA guide
ggaucaaagcucaaaguguga

SEQ ID NO: 61187 - RNA, 21 nt, Artificial Sequence
  LRRK2 RNA guide
gugugaucucuguguuagaaa

SEQ ID NO: 61188 - RNA, 21 nt, Artificial Sequence
  LRRK2 RNA guide
guuucuaacacagagaucaca

SEQ ID NO: 61189 - RNA, 21 nt, Artificial Sequence
  LRRK2 RNA guide
uaacacagagaucacacuuug

SEQ ID NO: 61190 - RNA, 21 nt, Artificial Sequence
  LRRK2 RNA guide
ucaaagcucaaagugugaucu

SEQ ID NO: 61191 - RNA, 21 nt, Artificial Sequence
  LRRK2 RNA guide
ucaaagugugaucucuguguu

SEQ ID NO: 61192 - RNA, 21 nt, Artificial Sequence
  LRRK2 RNA guide
ucacacuuugagcuuugaucc

SEQ ID NO: 61193 - RNA, 21 nt, Artificial Sequence
  LRRK2 RNA guide
ucuaacacagagaucacacuu

SEQ ID NO: 61194 - RNA, 21 nt, Artificial Sequence
  LRRK2 RNA guide
ugacaaggaucaaagcucaaa

SEQ ID NO: 61195 - RNA, 21 nt, Artificial Sequence
  LRRK2 RNA guide
ugugaucucuguguuagaaac

SEQ ID NO: 61196 - RNA, 21 nt, Artificial Sequence
  LRRK2 RNA guide
uguuucuaacacagagaucac

SEQ ID NO: 61197 - RNA, 21 nt, Artificial Sequence
  LRRK2 RNA guide
uucuaacacagagaucacacu

SEQ ID NO: 61198 - RNA, 21 nt, Artificial Sequence
  LRRK2 RNA guide
uuucuaacacagagaucacac

SEQ ID NO: 61199 - RNA, 22 nt, Artificial Sequence
  LRRK2 RNA guide
aaagcucaaagugugaucucug

SEQ ID NO: 61200 - RNA, 22 nt, Artificial Sequence
  LRRK2 RNA guide
aaagugugaucucuguguuaga

SEQ ID NO: 61201 - RNA, 22 nt, Artificial Sequence
  LRRK2 RNA guide
aacacagagaucacacuuugag

SEQ ID NO: 61202 - RNA, 22 nt, Artificial Sequence
  LRRK2 RNA guide
aagcucaaagugugaucucugu

SEQ ID NO: 61203 - RNA, 22 nt, Artificial Sequence
  LRRK2 RNA guide
aaggaucaaagcucaaagugug

SEQ ID NO: 61204 - RNA, 22 nt, Artificial Sequence
  LRRK2 RNA guide
aagugugaucucuguguuagaa

SEQ ID NO: 61205 - RNA, 22 nt, Artificial Sequence
  LRRK2 RNA guide
acaaggaucaaagcucaaagug

SEQ ID NO: 61206 - RNA, 22 nt, Artificial Sequence
  LRRK2 RNA guide
acacagagaucacacuuugagc

SEQ ID NO: 61207 - RNA, 22 nt, Artificial Sequence
  LRRK2 RNA guide
acacuuugagcuuugauccuug

SEQ ID NO: 61208 - RNA, 22 nt, Artificial Sequence
  LRRK2 RNA guide
acagagaucacacuuugagcuu

SEQ ID NO: 61209 - RNA, 22 nt, Artificial Sequence
  LRRK2 RNA guide
agagaucacacuuugagcuuug

SEQ ID NO: 61210 - RNA, 22 nt, Artificial Sequence
  LRRK2 RNA guide
agaucacacuuugagcuuugau

SEQ ID NO: 61211 - RNA, 22 nt, Artificial Sequence
  LRRK2 RNA guide
agcucaaagugugaucucugug

SEQ ID NO: 61212 - RNA, 22 nt, Artificial Sequence
  LRRK2 RNA guide
aggaucaaagcucaaaguguga

SEQ ID NO: 61213 - RNA, 22 nt, Artificial Sequence
  LRRK2 RNA guide
agugugaucucuguguuagaaa

SEQ ID NO: 61214 - RNA, 22 nt, Artificial Sequence
  LRRK2 RNA guide
aucaaagcucaaagugugaucu

SEQ ID NO: 61215 - RNA, 22 nt, Artificial Sequence
  LRRK2 RNA guide
aucacacuuugagcuuugaucc

SEQ ID NO: 61216 - RNA, 22 nt, Artificial Sequence
  LRRK2 RNA guide
augacaaggaucaaagcucaaa

SEQ ID NO: 61217 - RNA, 22 nt, Artificial Sequence
  LRRK2 RNA guide
auguuucuaacacagagaucac

SEQ ID NO: 61218 - RNA, 22 nt, Artificial Sequence
  LRRK2 RNA guide
caaagcucaaagugugaucucu

SEQ ID NO: 61219 - RNA, 22 nt, Artificial Sequence
  LRRK2 RNA guide
caaagugugaucucuguguuag

SEQ ID NO: 61220 - RNA, 22 nt, Artificial Sequence
  LRRK2 RNA guide
caaggaucaaagcucaaagugu

SEQ ID NO: 61221 - RNA, 22 nt, Artificial Sequence
  LRRK2 RNA guide
cacacuuugagcuuugauccuu

SEQ ID NO: 61222 - RNA, 22 nt, Artificial Sequence
  LRRK2 RNA guide
cacagagaucacacuuugagcu

SEQ ID NO: 61223 - RNA, 22 nt, Artificial Sequence
  LRRK2 RNA guide
cagagaucacacuuugagcuuu

SEQ ID NO: 61224 - RNA, 22 nt, Artificial Sequence
  LRRK2 RNA guide
caugacaaggaucaaagcucaa

SEQ ID NO: 61225 - RNA, 22 nt, Artificial Sequence
  LRRK2 RNA guide
ccaugacaaggaucaaagcuca

SEQ ID NO: 61226 - RNA, 22 nt, Artificial Sequence
  LRRK2 RNA guide
ccccgauguuucuaacacagag

SEQ ID NO: 61227 - RNA, 22 nt, Artificial Sequence
  LRRK2 RNA guide
cccgauguuucuaacacagaga

SEQ ID NO: 61228 - RNA, 22 nt, Artificial Sequence
  LRRK2 RNA guide
ccgauguuucuaacacagagau

SEQ ID NO: 61229 - RNA, 22 nt, Artificial Sequence
  LRRK2 RNA guide
cgauguuucuaacacagagauc

SEQ ID NO: 61230 - RNA, 22 nt, Artificial Sequence
  LRRK2 RNA guide
cuaacacagagaucacacuuug

SEQ ID NO: 61231 - RNA, 22 nt, Artificial Sequence
  LRRK2 RNA guide
cucaaagugugaucucuguguu

SEQ ID NO: 61232 - RNA, 22 nt, Artificial Sequence
  LRRK2 RNA guide
gacaaggaucaaagcucaaagu

SEQ ID NO: 61233 - RNA, 22 nt, Artificial Sequence
  LRRK2 RNA guide
gagaucacacuuugagcuuuga

SEQ ID NO: 61234 - RNA, 22 nt, Artificial Sequence
  LRRK2 RNA guide
gaucaaagcucaaagugugauc

SEQ ID NO: 61235 - RNA, 22 nt, Artificial Sequence
  LRRK2 RNA guide
gaucacacuuugagcuuugauc

SEQ ID NO: 61236 - RNA, 22 nt, Artificial Sequence
  LRRK2 RNA guide
gauguuucuaacacagagauca

SEQ ID NO: 61237 - RNA, 22 nt, Artificial Sequence
  LRRK2 RNA guide
gcucaaagugugaucucugugu

SEQ ID NO: 61238 - RNA, 22 nt, Artificial Sequence
  LRRK2 RNA guide
ggaucaaagcucaaagugugau

SEQ ID NO: 61239 - RNA, 22 nt, Artificial Sequence
  LRRK2 RNA guide
gugugaucucuguguuagaaac

SEQ ID NO: 61240 - RNA, 22 nt, Artificial Sequence
  LRRK2 RNA guide
guuucuaacacagagaucacac

SEQ ID NO: 61241 - RNA, 22 nt, Artificial Sequence
  LRRK2 RNA guide
uaacacagagaucacacuuuga

SEQ ID NO: 61242 - RNA, 22 nt, Artificial Sequence
  LRRK2 RNA guide
ucaaagcucaaagugugaucuc

SEQ ID NO: 61243 - RNA, 22 nt, Artificial Sequence
  LRRK2 RNA guide
ucaaagugugaucucuguguua

SEQ ID NO: 61244 - RNA, 22 nt, Artificial Sequence
  LRRK2 RNA guide
ucacacuuugagcuuugauccu

SEQ ID NO: 61245 - RNA, 22 nt, Artificial Sequence
  LRRK2 RNA guide
ucuaacacagagaucacacuuu

SEQ ID NO: 61246 - RNA, 22 nt, Artificial Sequence
  LRRK2 RNA guide
ugacaaggaucaaagcucaaag

SEQ ID NO: 61247 - RNA, 22 nt, Artificial Sequence
  LRRK2 RNA guide
ugugaucucuguguuagaaaca

SEQ ID NO: 61248 - RNA, 22 nt, Artificial Sequence
  LRRK2 RNA guide
uguuucuaacacagagaucaca

SEQ ID NO: 61249 - RNA, 22 nt, Artificial Sequence
  LRRK2 RNA guide
uucuaacacagagaucacacuu

SEQ ID NO: 61250 - RNA, 22 nt, Artificial Sequence
  LRRK2 RNA guide
uuucuaacacagagaucacacu

SEQ ID NO: 61251 - RNA, 20 nt, Artificial Sequence
  LRRK2 RNA guide
aaagcucaaaguaugaucuc

SEQ ID NO: 61252 - RNA, 20 nt, Artificial Sequence
  LRRK2 RNA guide
aaaguaugaucucuguguua

SEQ ID NO: 61253 - RNA, 20 nt, Artificial Sequence
  LRRK2 RNA guide
aacacagagaucauacuuug

SEQ ID NO: 61254 - RNA, 20 nt, Artificial Sequence
  LRRK2 RNA guide
aagcucaaaguaugaucucu

SEQ ID NO: 61255 - RNA, 20 nt, Artificial Sequence
  LRRK2 RNA guide
aaggaucaaagcucaaagua

SEQ ID NO: 61256 - RNA, 20 nt, Artificial Sequence
  LRRK2 RNA guide
aaguaugaucucuguguuag

SEQ ID NO: 61257 - RNA, 20 nt, Artificial Sequence
  LRRK2 RNA guide
acacagagaucauacuuuga

SEQ ID NO: 61258 - RNA, 20 nt, Artificial Sequence
  LRRK2 RNA guide
acagagaucauacuuugagc

SEQ ID NO: 61259 - RNA, 20 nt, Artificial Sequence
  LRRK2 RNA guide
agagaucauacuuugagcuu

SEQ ID NO: 61260 - RNA, 20 nt, Artificial Sequence
  LRRK2 RNA guide
agaucauacuuugagcuuug

SEQ ID NO: 61261 - RNA, 20 nt, Artificial Sequence
  LRRK2 RNA guide
agcucaaaguaugaucucug

SEQ ID NO: 61262 - RNA, 20 nt, Artificial Sequence
  LRRK2 RNA guide
aggaucaaagcucaaaguau

SEQ ID NO: 61263 - RNA, 20 nt, Artificial Sequence
  LRRK2 RNA guide
aguaugaucucuguguuaga

SEQ ID NO: 61264 - RNA, 20 nt, Artificial Sequence
  LRRK2 RNA guide
auacuuugagcuuugauccu

SEQ ID NO: 61265 - RNA, 20 nt, Artificial Sequence
  LRRK2 RNA guide
aucaaagcucaaaguaugau

SEQ ID NO: 61266 - RNA, 20 nt, Artificial Sequence
  LRRK2 RNA guide
aucauacuuugagcuuugau

SEQ ID NO: 61267 - RNA, 20 nt, Artificial Sequence
  LRRK2 RNA guide
caaagcucaaaguaugaucu

SEQ ID NO: 61268 - RNA, 20 nt, Artificial Sequence
  LRRK2 RNA guide
caaaguaugaucucuguguu

SEQ ID NO: 61269 - RNA, 20 nt, Artificial Sequence
  LRRK2 RNA guide
cacagagaucauacuuugag

SEQ ID NO: 61270 - RNA, 20 nt, Artificial Sequence
  LRRK2 RNA guide
cagagaucauacuuugagcu

SEQ ID NO: 61271 - RNA, 20 nt, Artificial Sequence
  LRRK2 RNA guide
cauacuuugagcuuugaucc

SEQ ID NO: 61272 - RNA, 20 nt, Artificial Sequence
  LRRK2 RNA guide
cuaacacagagaucauacuu

SEQ ID NO: 61273 - RNA, 20 nt, Artificial Sequence
  LRRK2 RNA guide
cucaaaguaugaucucugug

SEQ ID NO: 61274 - RNA, 20 nt, Artificial Sequence
  LRRK2 RNA guide
gagaucauacuuugagcuuu

SEQ ID NO: 61275 - RNA, 20 nt, Artificial Sequence
  LRRK2 RNA guide
gaucaaagcucaaaguauga

SEQ ID NO: 61276 - RNA, 20 nt, Artificial Sequence
  LRRK2 RNA guide
gaucauacuuugagcuuuga

SEQ ID NO: 61277 - RNA, 20 nt, Artificial Sequence
  LRRK2 RNA guide
gcucaaaguaugaucucugu

SEQ ID NO: 61278 - RNA, 20 nt, Artificial Sequence
  LRRK2 RNA guide
ggaucaaagcucaaaguaug

SEQ ID NO: 61279 - RNA, 20 nt, Artificial Sequence
  LRRK2 RNA guide
guaugaucucuguguuagaa

SEQ ID NO: 61280 - RNA, 20 nt, Artificial Sequence
  LRRK2 RNA guide
guuucuaacacagagaucau

SEQ ID NO: 61281 - RNA, 20 nt, Artificial Sequence
  LRRK2 RNA guide
uaacacagagaucauacuuu

SEQ ID NO: 61282 - RNA, 20 nt, Artificial Sequence
  LRRK2 RNA guide
uaugaucucuguguuagaaa

SEQ ID NO: 61283 - RNA, 20 nt, Artificial Sequence
  LRRK2 RNA guide
ucaaagcucaaaguaugauc

SEQ ID NO: 61284 - RNA, 20 nt, Artificial Sequence
  LRRK2 RNA guide
ucaaaguaugaucucugugu

SEQ ID NO: 61285 - RNA, 20 nt, Artificial Sequence
  LRRK2 RNA guide
ucauacuuugagcuuugauc

SEQ ID NO: 61286 - RNA, 20 nt, Artificial Sequence
  LRRK2 RNA guide
ucuaacacagagaucauacu

SEQ ID NO: 61287 - RNA, 20 nt, Artificial Sequence
  LRRK2 RNA guide
uucuaacacagagaucauac

SEQ ID NO: 61288 - RNA, 20 nt, Artificial Sequence
  LRRK2 RNA guide
uuucuaacacagagaucaua

SEQ ID NO: 61289 - RNA, 21 nt, Artificial Sequence
  LRRK2 RNA guide
aaagcucaaaguaugaucucu

SEQ ID NO: 61290 - RNA, 21 nt, Artificial Sequence
  LRRK2 RNA guide
aaaguaugaucucuguguuag

SEQ ID NO: 61291 - RNA, 21 nt, Artificial Sequence
  LRRK2 RNA guide
aacacagagaucauacuuuga

SEQ ID NO: 61292 - RNA, 21 nt, Artificial Sequence
  LRRK2 RNA guide
aagcucaaaguaugaucucug

SEQ ID NO: 61293 - RNA, 21 nt, Artificial Sequence
  LRRK2 RNA guide
aaggaucaaagcucaaaguau

SEQ ID NO: 61294 - RNA, 21 nt, Artificial Sequence
  LRRK2 RNA guide
aaguaugaucucuguguuaga

SEQ ID NO: 61295 - RNA, 21 nt, Artificial Sequence
  LRRK2 RNA guide
acacagagaucauacuuugag

SEQ ID NO: 61296 - RNA, 21 nt, Artificial Sequence
  LRRK2 RNA guide
acagagaucauacuuugagcu

SEQ ID NO: 61297 - RNA, 21 nt, Artificial Sequence
  LRRK2 RNA guide
agagaucauacuuugagcuuu

SEQ ID NO: 61298 - RNA, 21 nt, Artificial Sequence
  LRRK2 RNA guide
agaucauacuuugagcuuuga

SEQ ID NO: 61299 - RNA, 21 nt, Artificial Sequence
  LRRK2 RNA guide
agcucaaaguaugaucucugu

SEQ ID NO: 61300 - RNA, 21 nt, Artificial Sequence
  LRRK2 RNA guide
aggaucaaagcucaaaguaug

SEQ ID NO: 61301 - RNA, 21 nt, Artificial Sequence
  LRRK2 RNA guide
aguaugaucucuguguuagaa

SEQ ID NO: 61302 - RNA, 21 nt, Artificial Sequence
  LRRK2 RNA guide
auacuuugagcuuugauccuu

SEQ ID NO: 61303 - RNA, 21 nt, Artificial Sequence
  LRRK2 RNA guide
aucaaagcucaaaguaugauc

SEQ ID NO: 61304 - RNA, 21 nt, Artificial Sequence
  LRRK2 RNA guide
aucauacuuugagcuuugauc

SEQ ID NO: 61305 - RNA, 21 nt, Artificial Sequence
  LRRK2 RNA guide
caaagcucaaaguaugaucuc

SEQ ID NO: 61306 - RNA, 21 nt, Artificial Sequence
  LRRK2 RNA guide
caaaguaugaucucuguguua

SEQ ID NO: 61307 - RNA, 21 nt, Artificial Sequence
  LRRK2 RNA guide
caaggaucaaagcucaaagua

SEQ ID NO: 61308 - RNA, 21 nt, Artificial Sequence
  LRRK2 RNA guide
cacagagaucauacuuugagc

SEQ ID NO: 61309 - RNA, 21 nt, Artificial Sequence
  LRRK2 RNA guide
cagagaucauacuuugagcuu

SEQ ID NO: 61310 - RNA, 21 nt, Artificial Sequence
  LRRK2 RNA guide
cauacuuugagcuuugauccu

SEQ ID NO: 61311 - RNA, 21 nt, Artificial Sequence
  LRRK2 RNA guide
cuaacacagagaucauacuuu

SEQ ID NO: 61312 - RNA, 21 nt, Artificial Sequence
  LRRK2 RNA guide
cucaaaguaugaucucugugu

SEQ ID NO: 61313 - RNA, 21 nt, Artificial Sequence
  LRRK2 RNA guide
gagaucauacuuugagcuuug

SEQ ID NO: 61314 - RNA, 21 nt, Artificial Sequence
  LRRK2 RNA guide
gaucaaagcucaaaguaugau

SEQ ID NO: 61315 - RNA, 21 nt, Artificial Sequence
  LRRK2 RNA guide
gaucauacuuugagcuuugau

SEQ ID NO: 61316 - RNA, 21 nt, Artificial Sequence
  LRRK2 RNA guide
gcucaaaguaugaucucugug

SEQ ID NO: 61317 - RNA, 21 nt, Artificial Sequence
  LRRK2 RNA guide
ggaucaaagcucaaaguauga

SEQ ID NO: 61318 - RNA, 21 nt, Artificial Sequence
  LRRK2 RNA guide
guaugaucucuguguuagaaa

SEQ ID NO: 61319 - RNA, 21 nt, Artificial Sequence
  LRRK2 RNA guide
guuucuaacacagagaucaua

SEQ ID NO: 61320 - RNA, 21 nt, Artificial Sequence
  LRRK2 RNA guide
uaacacagagaucauacuuug

SEQ ID NO: 61321 - RNA, 21 nt, Artificial Sequence
  LRRK2 RNA guide
uaugaucucuguguuagaaac

SEQ ID NO: 61322 - RNA, 21 nt, Artificial Sequence
  LRRK2 RNA guide
ucaaagcucaaaguaugaucu

SEQ ID NO: 61323 - RNA, 21 nt, Artificial Sequence
  LRRK2 RNA guide
ucaaaguaugaucucuguguu

SEQ ID NO: 61324 - RNA, 21 nt, Artificial Sequence
  LRRK2 RNA guide
ucauacuuugagcuuugaucc

SEQ ID NO: 61325 - RNA, 21 nt, Artificial Sequence
  LRRK2 RNA guide
ucuaacacagagaucauacuu

SEQ ID NO: 61326 - RNA, 21 nt, Artificial Sequence
  LRRK2 RNA guide
uguuucuaacacagagaucau

SEQ ID NO: 61327 - RNA, 21 nt, Artificial Sequence
  LRRK2 RNA guide
uucuaacacagagaucauacu

SEQ ID NO: 61328 - RNA, 21 nt, Artificial Sequence
  LRRK2 RNA guide
uuucuaacacagagaucauac

SEQ ID NO: 61329 - RNA, 22 nt, Artificial Sequence
  LRRK2 RNA guide
aaagcucaaaguaugaucucug

SEQ ID NO: 61330 - RNA, 22 nt, Artificial Sequence
  LRRK2 RNA guide
aaaguaugaucucuguguuaga

SEQ ID NO: 61331 - RNA, 22 nt, Artificial Sequence
  LRRK2 RNA guide
aacacagagaucauacuuugag

SEQ ID NO: 61332 - RNA, 22 nt, Artificial Sequence
  LRRK2 RNA guide
aagcucaaaguaugaucucugu

SEQ ID NO: 61333 - RNA, 22 nt, Artificial Sequence
  LRRK2 RNA guide
aaggaucaaagcucaaaguaug

SEQ ID NO: 61334 - RNA, 22 nt, Artificial Sequence
  LRRK2 RNA guide
aaguaugaucucuguguuagaa

SEQ ID NO: 61335 - RNA, 22 nt, Artificial Sequence
  LRRK2 RNA guide
acaaggaucaaagcucaaagua

SEQ ID NO: 61336 - RNA, 22 nt, Artificial Sequence
  LRRK2 RNA guide
acacagagaucauacuuugagc

SEQ ID NO: 61337 - RNA, 22 nt, Artificial Sequence
  LRRK2 RNA guide
acagagaucauacuuugagcuu

SEQ ID NO: 61338 - RNA, 22 nt, Artificial Sequence
  LRRK2 RNA guide
agagaucauacuuugagcuuug

SEQ ID NO: 61339 - RNA, 22 nt, Artificial Sequence
  LRRK2 RNA guide
agaucauacuuugagcuuugau

SEQ ID NO: 61340 - RNA, 22 nt, Artificial Sequence
  LRRK2 RNA guide
agcucaaaguaugaucucugug

SEQ ID NO: 61341 - RNA, 22 nt, Artificial Sequence
  LRRK2 RNA guide
aggaucaaagcucaaaguauga

SEQ ID NO: 61342 - RNA, 22 nt, Artificial Sequence
  LRRK2 RNA guide
aguaugaucucuguguuagaaa

SEQ ID NO: 61343 - RNA, 22 nt, Artificial Sequence
  LRRK2 RNA guide
auacuuugagcuuugauccuug

SEQ ID NO: 61344 - RNA, 22 nt, Artificial Sequence
  LRRK2 RNA guide
aucaaagcucaaaguaugaucu

SEQ ID NO: 61345 - RNA, 22 nt, Artificial Sequence
  LRRK2 RNA guide
aucauacuuugagcuuugaucc

SEQ ID NO: 61346 - RNA, 22 nt, Artificial Sequence
  LRRK2 RNA guide
auguuucuaacacagagaucau

SEQ ID NO: 61347 - RNA, 22 nt, Artificial Sequence
  LRRK2 RNA guide
caaagcucaaaguaugaucucu

SEQ ID NO: 61348 - RNA, 22 nt, Artificial Sequence
  LRRK2 RNA guide
caaaguaugaucucuguguuag

SEQ ID NO: 61349 - RNA, 22 nt, Artificial Sequence
  LRRK2 RNA guide
caaggaucaaagcucaaaguau

SEQ ID NO: 61350 - RNA, 22 nt, Artificial Sequence
  LRRK2 RNA guide
cacagagaucauacuuugagcu

SEQ ID NO: 61351 - RNA, 22 nt, Artificial Sequence
  LRRK2 RNA guide
cagagaucauacuuugagcuuu

SEQ ID NO: 61352 - RNA, 22 nt, Artificial Sequence
  LRRK2 RNA guide
cauacuuugagcuuugauccuu

SEQ ID NO: 61353 - RNA, 22 nt, Artificial Sequence
  LRRK2 RNA guide
cuaacacagagaucauacuuug

SEQ ID NO: 61354 - RNA, 22 nt, Artificial Sequence
  LRRK2 RNA guide
cucaaaguaugaucucuguguu

SEQ ID NO: 61355 - RNA, 22 nt, Artificial Sequence
  LRRK2 RNA guide
gagaucauacuuugagcuuuga

SEQ ID NO: 61356 - RNA, 22 nt, Artificial Sequence
  LRRK2 RNA guide
gaucaaagcucaaaguaugauc

SEQ ID NO: 61357 - RNA, 22 nt, Artificial Sequence
  LRRK2 RNA guide
gaucauacuuugagcuuugauc

SEQ ID NO: 61358 - RNA, 22 nt, Artificial Sequence
  LRRK2 RNA guide
gcucaaaguaugaucucugugu

SEQ ID NO: 61359 - RNA, 22 nt, Artificial Sequence
  LRRK2 RNA guide
ggaucaaagcucaaaguaugau

SEQ ID NO: 61360 - RNA, 22 nt, Artificial Sequence
  LRRK2 RNA guide
guaugaucucuguguuagaaac

SEQ ID NO: 61361 - RNA, 22 nt, Artificial Sequence
  LRRK2 RNA guide
guuucuaacacagagaucauac

SEQ ID NO: 61362 - RNA, 22 nt, Artificial Sequence
  LRRK2 RNA guide
uaacacagagaucauacuuuga

SEQ ID NO: 61363 - RNA, 22 nt, Artificial Sequence
  LRRK2 RNA guide
uaugaucucuguguuagaaaca

SEQ ID NO: 61364 - RNA, 22 nt, Artificial Sequence
  LRRK2 RNA guide
ucaaagcucaaaguaugaucuc

SEQ ID NO: 61365 - RNA, 22 nt, Artificial Sequence
  LRRK2 RNA guide
ucaaaguaugaucucuguguua

SEQ ID NO: 61366 - RNA, 22 nt, Artificial Sequence
  LRRK2 RNA guide
ucauacuuugagcuuugauccu

SEQ ID NO: 61367 - RNA, 22 nt, Artificial Sequence
  LRRK2 RNA guide
ucuaacacagagaucauacuuu

SEQ ID NO: 61368 - RNA, 22 nt, Artificial Sequence
  LRRK2 RNA guide
uguuucuaacacagagaucaua

SEQ ID NO: 61369 - RNA, 22 nt, Artificial Sequence
  LRRK2 RNA guide
uucuaacacagagaucauacuu

SEQ ID NO: 61370 - RNA, 22 nt, Artificial Sequence
  LRRK2 RNA guide
uuucuaacacagagaucauacu

SEQ ID NO: 61371 - RNA, 20 nt, Artificial Sequence
  LRRK2 RNA guide
aaauuaagggaguuaauucg

SEQ ID NO: 61372 - RNA, 20 nt, Artificial Sequence
  LRRK2 RNA guide
aagggaguuaauucggauag

SEQ ID NO: 61373 - RNA, 20 nt, Artificial Sequence
  LRRK2 RNA guide
aaguucaaugauuuccuauc

SEQ ID NO: 61374 - RNA, 20 nt, Artificial Sequence
  LRRK2 RNA guide
aaugauuuccuauccgaauu

SEQ ID NO: 61375 - RNA, 20 nt, Artificial Sequence
  LRRK2 RNA guide
aauuaagggaguuaauucgg

SEQ ID NO: 61376 - RNA, 20 nt, Artificial Sequence
  LRRK2 RNA guide
aauucggauaggaaaucauu

SEQ ID NO: 61377 - RNA, 20 nt, Artificial Sequence
  LRRK2 RNA guide
agggaguuaauucggauagg

SEQ ID NO: 61378 - RNA, 20 nt, Artificial Sequence
  LRRK2 RNA guide
agugaaguucaaugauuucc

SEQ ID NO: 61379 - RNA, 20 nt, Artificial Sequence
  LRRK2 RNA guide
aguuaauucggauaggaaau

SEQ ID NO: 61380 - RNA, 20 nt, Artificial Sequence
  LRRK2 RNA guide
aguucaaugauuuccuaucc

SEQ ID NO: 61381 - RNA, 20 nt, Artificial Sequence
  LRRK2 RNA guide
auaggaaaucauugaacuuc

SEQ ID NO: 61382 - RNA, 20 nt, Artificial Sequence
  LRRK2 RNA guide
augauuuccuauccgaauua

SEQ ID NO: 61383 - RNA, 20 nt, Artificial Sequence
  LRRK2 RNA guide
auuaagggaguuaauucgga

SEQ ID NO: 61384 - RNA, 20 nt, Artificial Sequence
  LRRK2 RNA guide
auucggauaggaaaucauug

SEQ ID NO: 61385 - RNA, 20 nt, Artificial Sequence
  LRRK2 RNA guide
auuuccuauccgaauuaacu

SEQ ID NO: 61386 - RNA, 20 nt, Artificial Sequence
  LRRK2 RNA guide
caaugauuuccuauccgaau

SEQ ID NO: 61387 - RNA, 20 nt, Artificial Sequence
  LRRK2 RNA guide
cagugaaguucaaugauuuc

SEQ ID NO: 61388 - RNA, 20 nt, Artificial Sequence
  LRRK2 RNA guide
ccuauccgaauuaacucccu

SEQ ID NO: 61389 - RNA, 20 nt, Artificial Sequence
  LRRK2 RNA guide
cggauaggaaaucauugaac

SEQ ID NO: 61390 - RNA, 20 nt, Artificial Sequence
  LRRK2 RNA guide
cuauccgaauuaacucccuu

SEQ ID NO: 61391 - RNA, 20 nt, Artificial Sequence
  LRRK2 RNA guide
gaaguucaaugauuuccuau

SEQ ID NO: 61392 - RNA, 20 nt, Artificial Sequence
  LRRK2 RNA guide
gaguuaauucggauaggaaa

SEQ ID NO: 61393 - RNA, 20 nt, Artificial Sequence
  LRRK2 RNA guide
gauaggaaaucauugaacuu

SEQ ID NO: 61394 - RNA, 20 nt, Artificial Sequence
  LRRK2 RNA guide
gauuuccuauccgaauuaac

SEQ ID NO: 61395 - RNA, 20 nt, Artificial Sequence
  LRRK2 RNA guide
ggaguuaauucggauaggaa

SEQ ID NO: 61396 - RNA, 20 nt, Artificial Sequence
  LRRK2 RNA guide
ggauaggaaaucauugaacu

SEQ ID NO: 61397 - RNA, 20 nt, Artificial Sequence
  LRRK2 RNA guide
gggaguuaauucggauagga

SEQ ID NO: 61398 - RNA, 20 nt, Artificial Sequence
  LRRK2 RNA guide
gugaaguucaaugauuuccu

SEQ ID NO: 61399 - RNA, 20 nt, Artificial Sequence
  LRRK2 RNA guide
guuaauucggauaggaaauc

SEQ ID NO: 61400 - RNA, 20 nt, Artificial Sequence
  LRRK2 RNA guide
guucaaugauuuccuauccg

SEQ ID NO: 61401 - RNA, 20 nt, Artificial Sequence
  LRRK2 RNA guide
uaagggaguuaauucggaua

SEQ ID NO: 61402 - RNA, 20 nt, Artificial Sequence
  LRRK2 RNA guide
uaauucggauaggaaaucau

SEQ ID NO: 61403 - RNA, 20 nt, Artificial Sequence
  LRRK2 RNA guide
uaggaaaucauugaacuuca

SEQ ID NO: 61404 - RNA, 20 nt, Artificial Sequence
  LRRK2 RNA guide
ucaaugauuuccuauccgaa

SEQ ID NO: 61405 - RNA, 20 nt, Artificial Sequence
  LRRK2 RNA guide
ucagugaaguucaaugauuu

SEQ ID NO: 61406 - RNA, 20 nt, Artificial Sequence
  LRRK2 RNA guide
uccuauccgaauuaacuccc

SEQ ID NO: 61407 - RNA, 20 nt, Artificial Sequence
  LRRK2 RNA guide
ucggauaggaaaucauugaa

SEQ ID NO: 61408 - RNA, 20 nt, Artificial Sequence
  LRRK2 RNA guide
ugaaguucaaugauuuccua

SEQ ID NO: 61409 - RNA, 20 nt, Artificial Sequence
  LRRK2 RNA guide
ugauuuccuauccgaauuaa

SEQ ID NO: 61410 - RNA, 20 nt, Artificial Sequence
  LRRK2 RNA guide
uuaagggaguuaauucggau

SEQ ID NO: 61411 - RNA, 20 nt, Artificial Sequence
  LRRK2 RNA guide
uuaauucggauaggaaauca

SEQ ID NO: 61412 - RNA, 20 nt, Artificial Sequence
  LRRK2 RNA guide
uucaaugauuuccuauccga

SEQ ID NO: 61413 - RNA, 20 nt, Artificial Sequence
  LRRK2 RNA guide
uucagugaaguucaaugauu

SEQ ID NO: 61414 - RNA, 20 nt, Artificial Sequence
  LRRK2 RNA guide
uuccuauccgaauuaacucc

SEQ ID NO: 61415 - RNA, 20 nt, Artificial Sequence
  LRRK2 RNA guide
uucggauaggaaaucauuga

SEQ ID NO: 61416 - RNA, 20 nt, Artificial Sequence
  LRRK2 RNA guide
uuucagugaaguucaaugau

SEQ ID NO: 61417 - RNA, 20 nt, Artificial Sequence
  LRRK2 RNA guide
uuuccuauccgaauuaacuc

SEQ ID NO: 61418 - RNA, 21 nt, Artificial Sequence
  LRRK2 RNA guide
aaauuaagggaguuaauucgg

SEQ ID NO: 61419 - RNA, 21 nt, Artificial Sequence
  LRRK2 RNA guide
aagggaguuaauucggauagg

SEQ ID NO: 61420 - RNA, 21 nt, Artificial Sequence
  LRRK2 RNA guide
aaguucaaugauuuccuaucc

SEQ ID NO: 61421 - RNA, 21 nt, Artificial Sequence
  LRRK2 RNA guide
aauuaagggaguuaauucgga

SEQ ID NO: 61422 - RNA, 21 nt, Artificial Sequence
  LRRK2 RNA guide
aauucggauaggaaaucauug

SEQ ID NO: 61423 - RNA, 21 nt, Artificial Sequence
  LRRK2 RNA guide
agggaguuaauucggauagga

SEQ ID NO: 61424 - RNA, 21 nt, Artificial Sequence
  LRRK2 RNA guide
agugaaguucaaugauuuccu

SEQ ID NO: 61425 - RNA, 21 nt, Artificial Sequence
  LRRK2 RNA guide
aguuaauucggauaggaaauc

SEQ ID NO: 61426 - RNA, 21 nt, Artificial Sequence
  LRRK2 RNA guide
aguucaaugauuuccuauccg

SEQ ID NO: 61427 - RNA, 21 nt, Artificial Sequence
  LRRK2 RNA guide
auuaagggaguuaauucggau

SEQ ID NO: 61428 - RNA, 21 nt, Artificial Sequence
  LRRK2 RNA guide
auucggauaggaaaucauuga

SEQ ID NO: 61429 - RNA, 21 nt, Artificial Sequence
  LRRK2 RNA guide
auuuccuauccgaauuaacuc

SEQ ID NO: 61430 - RNA, 21 nt, Artificial Sequence
  LRRK2 RNA guide
caaugauuuccuauccgaauu

SEQ ID NO: 61431 - RNA, 21 nt, Artificial Sequence
  LRRK2 RNA guide
cagugaaguucaaugauuucc

SEQ ID NO: 61432 - RNA, 21 nt, Artificial Sequence
  LRRK2 RNA guide
ccuauccgaauuaacucccuu

SEQ ID NO: 61433 - RNA, 21 nt, Artificial Sequence
  LRRK2 RNA guide
cggauaggaaaucauugaacu

SEQ ID NO: 61434 - RNA, 21 nt, Artificial Sequence
  LRRK2 RNA guide
cuauccgaauuaacucccuua

SEQ ID NO: 61435 - RNA, 21 nt, Artificial Sequence
  LRRK2 RNA guide
gaaguucaaugauuuccuauc

SEQ ID NO: 61436 - RNA, 21 nt, Artificial Sequence
  LRRK2 RNA guide
gaguuaauucggauaggaaau

SEQ ID NO: 61437 - RNA, 21 nt, Artificial Sequence
  LRRK2 RNA guide
gauaggaaaucauugaacuuc

SEQ ID NO: 61438 - RNA, 21 nt, Artificial Sequence
  LRRK2 RNA guide
gauuuccuauccgaauuaacu

SEQ ID NO: 61439 - RNA, 21 nt, Artificial Sequence
  LRRK2 RNA guide
ggaguuaauucggauaggaaa

SEQ ID NO: 61440 - RNA, 21 nt, Artificial Sequence
  LRRK2 RNA guide
ggauaggaaaucauugaacuu

SEQ ID NO: 61441 - RNA, 21 nt, Artificial Sequence
  LRRK2 RNA guide
gggaguuaauucggauaggaa

SEQ ID NO: 61442 - RNA, 21 nt, Artificial Sequence
  LRRK2 RNA guide
gugaaguucaaugauuuccua

SEQ ID NO: 61443 - RNA, 21 nt, Artificial Sequence
  LRRK2 RNA guide
guuaauucggauaggaaauca

SEQ ID NO: 61444 - RNA, 21 nt, Artificial Sequence
  LRRK2 RNA guide
guucaaugauuuccuauccga

SEQ ID NO: 61445 - RNA, 21 nt, Artificial Sequence
  LRRK2 RNA guide
guuucagugaaguucaaugau

SEQ ID NO: 61446 - RNA, 21 nt, Artificial Sequence
  LRRK2 RNA guide
uaagggaguuaauucggauag

SEQ ID NO: 61447 - RNA, 21 nt, Artificial Sequence
  LRRK2 RNA guide
uaggaaaucauugaacuucac

SEQ ID NO: 61448 - RNA, 21 nt, Artificial Sequence
  LRRK2 RNA guide
ucaaugauuuccuauccgaau

SEQ ID NO: 61449 - RNA, 21 nt, Artificial Sequence
  LRRK2 RNA guide
ucagugaaguucaaugauuuc

SEQ ID NO: 61450 - RNA, 21 nt, Artificial Sequence
  LRRK2 RNA guide
uccuauccgaauuaacucccu

SEQ ID NO: 61451 - RNA, 21 nt, Artificial Sequence
  LRRK2 RNA guide
ucggauaggaaaucauugaac

SEQ ID NO: 61452 - RNA, 21 nt, Artificial Sequence
  LRRK2 RNA guide
ugauuuccuauccgaauuaac

SEQ ID NO: 61453 - RNA, 21 nt, Artificial Sequence
  LRRK2 RNA guide
uuaagggaguuaauucggaua

SEQ ID NO: 61454 - RNA, 21 nt, Artificial Sequence
  LRRK2 RNA guide
uucaaugauuuccuauccgaa

SEQ ID NO: 61455 - RNA, 21 nt, Artificial Sequence
  LRRK2 RNA guide
uuccuauccgaauuaacuccc

SEQ ID NO: 61456 - RNA, 21 nt, Artificial Sequence
  LRRK2 RNA guide
uucggauaggaaaucauugaa

SEQ ID NO: 61457 - RNA, 21 nt, Artificial Sequence
  LRRK2 RNA guide
uuuccuauccgaauuaacucc

SEQ ID NO: 61458 - RNA, 22 nt, Artificial Sequence
  LRRK2 RNA guide
aaauuaagggaguuaauucgga

SEQ ID NO: 61459 - RNA, 22 nt, Artificial Sequence
  LRRK2 RNA guide
aagggaguuaauucggauagga

SEQ ID NO: 61460 - RNA, 22 nt, Artificial Sequence
  LRRK2 RNA guide
aaguucaaugauuuccuauccg

SEQ ID NO: 61461 - RNA, 22 nt, Artificial Sequence
  LRRK2 RNA guide
aauuaagggaguuaauucggau

SEQ ID NO: 61462 - RNA, 22 nt, Artificial Sequence
  LRRK2 RNA guide
aauucggauaggaaaucauuga

SEQ ID NO: 61463 - RNA, 22 nt, Artificial Sequence
  LRRK2 RNA guide
agggaguuaauucggauaggaa

SEQ ID NO: 61464 - RNA, 22 nt, Artificial Sequence
  LRRK2 RNA guide
agugaaguucaaugauuuccua

SEQ ID NO: 61465 - RNA, 22 nt, Artificial Sequence
  LRRK2 RNA guide
aguuaauucggauaggaaauca

SEQ ID NO: 61466 - RNA, 22 nt, Artificial Sequence
  LRRK2 RNA guide
aguucaaugauuuccuauccga

SEQ ID NO: 61467 - RNA, 22 nt, Artificial Sequence
  LRRK2 RNA guide
auaggaaaucauugaacuucac

SEQ ID NO: 61468 - RNA, 22 nt, Artificial Sequence
  LRRK2 RNA guide
augauuuccuauccgaauuaac

SEQ ID NO: 61469 - RNA, 22 nt, Artificial Sequence
  LRRK2 RNA guide
auuaagggaguuaauucggaua

SEQ ID NO: 61470 - RNA, 22 nt, Artificial Sequence
  LRRK2 RNA guide
auucggauaggaaaucauugaa

SEQ ID NO: 61471 - RNA, 22 nt, Artificial Sequence
  LRRK2 RNA guide
auuuccuauccgaauuaacucc

SEQ ID NO: 61472 - RNA, 22 nt, Artificial Sequence
  LRRK2 RNA guide
caaugauuuccuauccgaauua

SEQ ID NO: 61473 - RNA, 22 nt, Artificial Sequence
  LRRK2 RNA guide
cagugaaguucaaugauuuccu

SEQ ID NO: 61474 - RNA, 22 nt, Artificial Sequence
  LRRK2 RNA guide
ccuauccgaauuaacucccuua

SEQ ID NO: 61475 - RNA, 22 nt, Artificial Sequence
  LRRK2 RNA guide
cggauaggaaaucauugaacuu

SEQ ID NO: 61476 - RNA, 22 nt, Artificial Sequence
  LRRK2 RNA guide
cuauccgaauuaacucccuuaa

SEQ ID NO: 61477 - RNA, 22 nt, Artificial Sequence
  LRRK2 RNA guide
gaaguucaaugauuuccuaucc

SEQ ID NO: 61478 - RNA, 22 nt, Artificial Sequence
  LRRK2 RNA guide
gaguuaauucggauaggaaauc

SEQ ID NO: 61479 - RNA, 22 nt, Artificial Sequence
  LRRK2 RNA guide
gauaggaaaucauugaacuuca

SEQ ID NO: 61480 - RNA, 22 nt, Artificial Sequence
  LRRK2 RNA guide
gauuuccuauccgaauuaacuc

SEQ ID NO: 61481 - RNA, 22 nt, Artificial Sequence
  LRRK2 RNA guide
ggaguuaauucggauaggaaau

SEQ ID NO: 61482 - RNA, 22 nt, Artificial Sequence
  LRRK2 RNA guide
ggauaggaaaucauugaacuuc

SEQ ID NO: 61483 - RNA, 22 nt, Artificial Sequence
  LRRK2 RNA guide
gggaguuaauucggauaggaaa

SEQ ID NO: 61484 - RNA, 22 nt, Artificial Sequence
  LRRK2 RNA guide
gugaaguucaaugauuuccuau

SEQ ID NO: 61485 - RNA, 22 nt, Artificial Sequence
  LRRK2 RNA guide
guuaauucggauaggaaaucau

SEQ ID NO: 61486 - RNA, 22 nt, Artificial Sequence
  LRRK2 RNA guide
guucaaugauuuccuauccgaa

SEQ ID NO: 61487 - RNA, 22 nt, Artificial Sequence
  LRRK2 RNA guide
guuucagugaaguucaaugauu

SEQ ID NO: 61488 - RNA, 22 nt, Artificial Sequence
  LRRK2 RNA guide
uaaauuaagggaguuaauucgg

SEQ ID NO: 61489 - RNA, 22 nt, Artificial Sequence
  LRRK2 RNA guide
uaagggaguuaauucggauagg

SEQ ID NO: 61490 - RNA, 22 nt, Artificial Sequence
  LRRK2 RNA guide
uaauucggauaggaaaucauug

SEQ ID NO: 61491 - RNA, 22 nt, Artificial Sequence
  LRRK2 RNA guide
uaggaaaucauugaacuucacu

SEQ ID NO: 61492 - RNA, 22 nt, Artificial Sequence
  LRRK2 RNA guide
ucaaugauuuccuauccgaauu

SEQ ID NO: 61493 - RNA, 22 nt, Artificial Sequence
  LRRK2 RNA guide
ucagugaaguucaaugauuucc

SEQ ID NO: 61494 - RNA, 22 nt, Artificial Sequence
  LRRK2 RNA guide
uccuauccgaauuaacucccuu

SEQ ID NO: 61495 - RNA, 22 nt, Artificial Sequence
  LRRK2 RNA guide
ucggauaggaaaucauugaacu

SEQ ID NO: 61496 - RNA, 22 nt, Artificial Sequence
  LRRK2 RNA guide
ugaaguucaaugauuuccuauc

SEQ ID NO: 61497 - RNA, 22 nt, Artificial Sequence
  LRRK2 RNA guide
ugauuuccuauccgaauuaacu

SEQ ID NO: 61498 - RNA, 22 nt, Artificial Sequence
  LRRK2 RNA guide
uguuucagugaaguucaaugau

SEQ ID NO: 61499 - RNA, 22 nt, Artificial Sequence
  LRRK2 RNA guide
uuaagggaguuaauucggauag

SEQ ID NO: 61500 - RNA, 22 nt, Artificial Sequence
  LRRK2 RNA guide
uucaaugauuuccuauccgaau

SEQ ID NO: 61501 - RNA, 22 nt, Artificial Sequence
  LRRK2 RNA guide
uucagugaaguucaaugauuuc

SEQ ID NO: 61502 - RNA, 22 nt, Artificial Sequence
  LRRK2 RNA guide
uuccuauccgaauuaacucccu

SEQ ID NO: 61503 - RNA, 22 nt, Artificial Sequence
  LRRK2 RNA guide
uucggauaggaaaucauugaac

SEQ ID NO: 61504 - RNA, 22 nt, Artificial Sequence
  LRRK2 RNA guide
uuuccuauccgaauuaacuccc

SEQ ID NO: 61505 - RNA, 20 nt, Artificial Sequence
  LRRK2 RNA guide
aagggaguuaauucggaucg

SEQ ID NO: 61506 - RNA, 20 nt, Artificial Sequence
  LRRK2 RNA guide
aaguucaaugauuuccgauc

SEQ ID NO: 61507 - RNA, 20 nt, Artificial Sequence
  LRRK2 RNA guide
aaugauuuccgauccgaauu

SEQ ID NO: 61508 - RNA, 20 nt, Artificial Sequence
  LRRK2 RNA guide
aauucggaucggaaaucauu

SEQ ID NO: 61509 - RNA, 20 nt, Artificial Sequence
  LRRK2 RNA guide
agggaguuaauucggaucgg

SEQ ID NO: 61510 - RNA, 20 nt, Artificial Sequence
  LRRK2 RNA guide
aguuaauucggaucggaaau

SEQ ID NO: 61511 - RNA, 20 nt, Artificial Sequence
  LRRK2 RNA guide
aguucaaugauuuccgaucc

SEQ ID NO: 61512 - RNA, 20 nt, Artificial Sequence
  LRRK2 RNA guide
aucggaaaucauugaacuuc

SEQ ID NO: 61513 - RNA, 20 nt, Artificial Sequence
  LRRK2 RNA guide
augauuuccgauccgaauua

SEQ ID NO: 61514 - RNA, 20 nt, Artificial Sequence
  LRRK2 RNA guide
auucggaucggaaaucauug

SEQ ID NO: 61515 - RNA, 20 nt, Artificial Sequence
  LRRK2 RNA guide
auuuccgauccgaauuaacu

SEQ ID NO: 61516 - RNA, 20 nt, Artificial Sequence
  LRRK2 RNA guide
caaugauuuccgauccgaau

SEQ ID NO: 61517 - RNA, 20 nt, Artificial Sequence
  LRRK2 RNA guide
ccgauccgaauuaacucccu

SEQ ID NO: 61518 - RNA, 20 nt, Artificial Sequence
  LRRK2 RNA guide
cgauccgaauuaacucccuu

SEQ ID NO: 61519 - RNA, 20 nt, Artificial Sequence
  LRRK2 RNA guide
cggaucggaaaucauugaac

SEQ ID NO: 61520 - RNA, 20 nt, Artificial Sequence
  LRRK2 RNA guide
gaaguucaaugauuuccgau

SEQ ID NO: 61521 - RNA, 20 nt, Artificial Sequence
  LRRK2 RNA guide
gaguuaauucggaucggaaa

SEQ ID NO: 61522 - RNA, 20 nt, Artificial Sequence
  LRRK2 RNA guide
gaucggaaaucauugaacuu

SEQ ID NO: 61523 - RNA, 20 nt, Artificial Sequence
  LRRK2 RNA guide
gauuuccgauccgaauuaac

SEQ ID NO: 61524 - RNA, 20 nt, Artificial Sequence
  LRRK2 RNA guide
ggaguuaauucggaucggaa

SEQ ID NO: 61525 - RNA, 20 nt, Artificial Sequence
  LRRK2 RNA guide
ggaucggaaaucauugaacu

SEQ ID NO: 61526 - RNA, 20 nt, Artificial Sequence
  LRRK2 RNA guide
gggaguuaauucggaucgga

SEQ ID NO: 61527 - RNA, 20 nt, Artificial Sequence
  LRRK2 RNA guide
gugaaguucaaugauuuccg

SEQ ID NO: 61528 - RNA, 20 nt, Artificial Sequence
  LRRK2 RNA guide
guuaauucggaucggaaauc

SEQ ID NO: 61529 - RNA, 20 nt, Artificial Sequence
  LRRK2 RNA guide
guucaaugauuuccgauccg

SEQ ID NO: 61530 - RNA, 20 nt, Artificial Sequence
  LRRK2 RNA guide
uaagggaguuaauucggauc

SEQ ID NO: 61531 - RNA, 20 nt, Artificial Sequence
  LRRK2 RNA guide
uaauucggaucggaaaucau

SEQ ID NO: 61532 - RNA, 20 nt, Artificial Sequence
  LRRK2 RNA guide
ucaaugauuuccgauccgaa

SEQ ID NO: 61533 - RNA, 20 nt, Artificial Sequence
  LRRK2 RNA guide
uccgauccgaauuaacuccc

SEQ ID NO: 61534 - RNA, 20 nt, Artificial Sequence
  LRRK2 RNA guide
ucggaaaucauugaacuuca

SEQ ID NO: 61535 - RNA, 20 nt, Artificial Sequence
  LRRK2 RNA guide
ucggaucggaaaucauugaa

SEQ ID NO: 61536 - RNA, 20 nt, Artificial Sequence
  LRRK2 RNA guide
ugaaguucaaugauuuccga

SEQ ID NO: 61537 - RNA, 20 nt, Artificial Sequence
  LRRK2 RNA guide
ugauuuccgauccgaauuaa

SEQ ID NO: 61538 - RNA, 20 nt, Artificial Sequence
  LRRK2 RNA guide
uuaauucggaucggaaauca

SEQ ID NO: 61539 - RNA, 20 nt, Artificial Sequence
  LRRK2 RNA guide
uucaaugauuuccgauccga

SEQ ID NO: 61540 - RNA, 20 nt, Artificial Sequence
  LRRK2 RNA guide
uuccgauccgaauuaacucc

SEQ ID NO: 61541 - RNA, 20 nt, Artificial Sequence
  LRRK2 RNA guide
uucggaucggaaaucauuga

SEQ ID NO: 61542 - RNA, 20 nt, Artificial Sequence
  LRRK2 RNA guide
uuuccgauccgaauuaacuc

SEQ ID NO: 61543 - RNA, 21 nt, Artificial Sequence
  LRRK2 RNA guide
aagggaguuaauucggaucgg

SEQ ID NO: 61544 - RNA, 21 nt, Artificial Sequence
  LRRK2 RNA guide
aaguucaaugauuuccgaucc

SEQ ID NO: 61545 - RNA, 21 nt, Artificial Sequence
  LRRK2 RNA guide
aaugauuuccgauccgaauua

SEQ ID NO: 61546 - RNA, 21 nt, Artificial Sequence
  LRRK2 RNA guide
aauucggaucggaaaucauug

SEQ ID NO: 61547 - RNA, 21 nt, Artificial Sequence
  LRRK2 RNA guide
agggaguuaauucggaucgga

SEQ ID NO: 61548 - RNA, 21 nt, Artificial Sequence
  LRRK2 RNA guide
agugaaguucaaugauuuccg

SEQ ID NO: 61549 - RNA, 21 nt, Artificial Sequence
  LRRK2 RNA guide
aguuaauucggaucggaaauc

SEQ ID NO: 61550 - RNA, 21 nt, Artificial Sequence
  LRRK2 RNA guide
aguucaaugauuuccgauccg

SEQ ID NO: 61551 - RNA, 21 nt, Artificial Sequence
  LRRK2 RNA guide
aucggaaaucauugaacuuca

SEQ ID NO: 61552 - RNA, 21 nt, Artificial Sequence
  LRRK2 RNA guide
augauuuccgauccgaauuaa

SEQ ID NO: 61553 - RNA, 21 nt, Artificial Sequence
  LRRK2 RNA guide
auucggaucggaaaucauuga

SEQ ID NO: 61554 - RNA, 21 nt, Artificial Sequence
  LRRK2 RNA guide
auuuccgauccgaauuaacuc

SEQ ID NO: 61555 - RNA, 21 nt, Artificial Sequence
  LRRK2 RNA guide
caaugauuuccgauccgaauu

SEQ ID NO: 61556 - RNA, 21 nt, Artificial Sequence
  LRRK2 RNA guide
ccgauccgaauuaacucccuu

SEQ ID NO: 61557 - RNA, 21 nt, Artificial Sequence
  LRRK2 RNA guide
cgauccgaauuaacucccuua

SEQ ID NO: 61558 - RNA, 21 nt, Artificial Sequence
  LRRK2 RNA guide
cggaucggaaaucauugaacu

SEQ ID NO: 61559 - RNA, 21 nt, Artificial Sequence
  LRRK2 RNA guide
gaaguucaaugauuuccgauc

SEQ ID NO: 61560 - RNA, 21 nt, Artificial Sequence
  LRRK2 RNA guide
gaguuaauucggaucggaaau

SEQ ID NO: 61561 - RNA, 21 nt, Artificial Sequence
  LRRK2 RNA guide
gaucggaaaucauugaacuuc

SEQ ID NO: 61562 - RNA, 21 nt, Artificial Sequence
  LRRK2 RNA guide
gauuuccgauccgaauuaacu

SEQ ID NO: 61563 - RNA, 21 nt, Artificial Sequence
  LRRK2 RNA guide
ggaguuaauucggaucggaaa

SEQ ID NO: 61564 - RNA, 21 nt, Artificial Sequence
  LRRK2 RNA guide
ggaucggaaaucauugaacuu

SEQ ID NO: 61565 - RNA, 21 nt, Artificial Sequence
  LRRK2 RNA guide
gggaguuaauucggaucggaa

SEQ ID NO: 61566 - RNA, 21 nt, Artificial Sequence
  LRRK2 RNA guide
gugaaguucaaugauuuccga

SEQ ID NO: 61567 - RNA, 21 nt, Artificial Sequence
  LRRK2 RNA guide
guuaauucggaucggaaauca

SEQ ID NO: 61568 - RNA, 21 nt, Artificial Sequence
  LRRK2 RNA guide
guucaaugauuuccgauccga

SEQ ID NO: 61569 - RNA, 21 nt, Artificial Sequence
  LRRK2 RNA guide
uaagggaguuaauucggaucg

SEQ ID NO: 61570 - RNA, 21 nt, Artificial Sequence
  LRRK2 RNA guide
uaauucggaucggaaaucauu

SEQ ID NO: 61571 - RNA, 21 nt, Artificial Sequence
  LRRK2 RNA guide
ucaaugauuuccgauccgaau

SEQ ID NO: 61572 - RNA, 21 nt, Artificial Sequence
  LRRK2 RNA guide
uccgauccgaauuaacucccu

SEQ ID NO: 61573 - RNA, 21 nt, Artificial Sequence
  LRRK2 RNA guide
ucggaaaucauugaacuucac

SEQ ID NO: 61574 - RNA, 21 nt, Artificial Sequence
  LRRK2 RNA guide
ucggaucggaaaucauugaac

SEQ ID NO: 61575 - RNA, 21 nt, Artificial Sequence
  LRRK2 RNA guide
ugaaguucaaugauuuccgau

SEQ ID NO: 61576 - RNA, 21 nt, Artificial Sequence
  LRRK2 RNA guide
ugauuuccgauccgaauuaac

SEQ ID NO: 61577 - RNA, 21 nt, Artificial Sequence
  LRRK2 RNA guide
uuaagggaguuaauucggauc

SEQ ID NO: 61578 - RNA, 21 nt, Artificial Sequence
  LRRK2 RNA guide
uuaauucggaucggaaaucau

SEQ ID NO: 61579 - RNA, 21 nt, Artificial Sequence
  LRRK2 RNA guide
uucaaugauuuccgauccgaa

SEQ ID NO: 61580 - RNA, 21 nt, Artificial Sequence
  LRRK2 RNA guide
uuccgauccgaauuaacuccc

SEQ ID NO: 61581 - RNA, 21 nt, Artificial Sequence
  LRRK2 RNA guide
uucggaucggaaaucauugaa

SEQ ID NO: 61582 - RNA, 21 nt, Artificial Sequence
  LRRK2 RNA guide
uuuccgauccgaauuaacucc

SEQ ID NO: 61583 - RNA, 22 nt, Artificial Sequence
  LRRK2 RNA guide
aagggaguuaauucggaucgga

SEQ ID NO: 61584 - RNA, 22 nt, Artificial Sequence
  LRRK2 RNA guide
aaguucaaugauuuccgauccg

SEQ ID NO: 61585 - RNA, 22 nt, Artificial Sequence
  LRRK2 RNA guide
aaugauuuccgauccgaauuaa

SEQ ID NO: 61586 - RNA, 22 nt, Artificial Sequence
  LRRK2 RNA guide
aauucggaucggaaaucauuga

SEQ ID NO: 61587 - RNA, 22 nt, Artificial Sequence
  LRRK2 RNA guide
agggaguuaauucggaucggaa

SEQ ID NO: 61588 - RNA, 22 nt, Artificial Sequence
  LRRK2 RNA guide
agugaaguucaaugauuuccga

SEQ ID NO: 61589 - RNA, 22 nt, Artificial Sequence
  LRRK2 RNA guide
aguuaauucggaucggaaauca

SEQ ID NO: 61590 - RNA, 22 nt, Artificial Sequence
  LRRK2 RNA guide
aguucaaugauuuccgauccga

SEQ ID NO: 61591 - RNA, 22 nt, Artificial Sequence
  LRRK2 RNA guide
aucggaaaucauugaacuucac

SEQ ID NO: 61592 - RNA, 22 nt, Artificial Sequence
  LRRK2 RNA guide
augauuuccgauccgaauuaac

SEQ ID NO: 61593 - RNA, 22 nt, Artificial Sequence
  LRRK2 RNA guide
auuaagggaguuaauucggauc

SEQ ID NO: 61594 - RNA, 22 nt, Artificial Sequence
  LRRK2 RNA guide
auucggaucggaaaucauugaa

SEQ ID NO: 61595 - RNA, 22 nt, Artificial Sequence
  LRRK2 RNA guide
auuuccgauccgaauuaacucc

SEQ ID NO: 61596 - RNA, 22 nt, Artificial Sequence
  LRRK2 RNA guide
caaugauuuccgauccgaauua

SEQ ID NO: 61597 - RNA, 22 nt, Artificial Sequence
  LRRK2 RNA guide
cagugaaguucaaugauuuccg

SEQ ID NO: 61598 - RNA, 22 nt, Artificial Sequence
  LRRK2 RNA guide
ccgauccgaauuaacucccuua

SEQ ID NO: 61599 - RNA, 22 nt, Artificial Sequence
  LRRK2 RNA guide
cgauccgaauuaacucccuuaa

SEQ ID NO: 61600 - RNA, 22 nt, Artificial Sequence
  LRRK2 RNA guide
cggaucggaaaucauugaacuu

SEQ ID NO: 61601 - RNA, 22 nt, Artificial Sequence
  LRRK2 RNA guide
gaaguucaaugauuuccgaucc

SEQ ID NO: 61602 - RNA, 22 nt, Artificial Sequence
  LRRK2 RNA guide
gaguuaauucggaucggaaauc

SEQ ID NO: 61603 - RNA, 22 nt, Artificial Sequence
  LRRK2 RNA guide
gaucggaaaucauugaacuuca

SEQ ID NO: 61604 - RNA, 22 nt, Artificial Sequence
  LRRK2 RNA guide
gauuuccgauccgaauuaacuc

SEQ ID NO: 61605 - RNA, 22 nt, Artificial Sequence
  LRRK2 RNA guide
ggaguuaauucggaucggaaau

SEQ ID NO: 61606 - RNA, 22 nt, Artificial Sequence
  LRRK2 RNA guide
ggaucggaaaucauugaacuuc

SEQ ID NO: 61607 - RNA, 22 nt, Artificial Sequence
  LRRK2 RNA guide
gggaguuaauucggaucggaaa

SEQ ID NO: 61608 - RNA, 22 nt, Artificial Sequence
  LRRK2 RNA guide
gugaaguucaaugauuuccgau

SEQ ID NO: 61609 - RNA, 22 nt, Artificial Sequence
  LRRK2 RNA guide
guuaauucggaucggaaaucau

SEQ ID NO: 61610 - RNA, 22 nt, Artificial Sequence
  LRRK2 RNA guide
guucaaugauuuccgauccgaa

SEQ ID NO: 61611 - RNA, 22 nt, Artificial Sequence
  LRRK2 RNA guide
uaagggaguuaauucggaucgg

SEQ ID NO: 61612 - RNA, 22 nt, Artificial Sequence
  LRRK2 RNA guide
uaauucggaucggaaaucauug

SEQ ID NO: 61613 - RNA, 22 nt, Artificial Sequence
  LRRK2 RNA guide
ucaaugauuuccgauccgaauu

SEQ ID NO: 61614 - RNA, 22 nt, Artificial Sequence
  LRRK2 RNA guide
uccgauccgaauuaacucccuu

SEQ ID NO: 61615 - RNA, 22 nt, Artificial Sequence
  LRRK2 RNA guide
ucggaaaucauugaacuucacu

SEQ ID NO: 61616 - RNA, 22 nt, Artificial Sequence
  LRRK2 RNA guide
ucggaucggaaaucauugaacu

SEQ ID NO: 61617 - RNA, 22 nt, Artificial Sequence
  LRRK2 RNA guide
ugaaguucaaugauuuccgauc

SEQ ID NO: 61618 - RNA, 22 nt, Artificial Sequence
  LRRK2 RNA guide
ugauuuccgauccgaauuaacu

SEQ ID NO: 61619 - RNA, 22 nt, Artificial Sequence
  LRRK2 RNA guide
uuaagggaguuaauucggaucg

SEQ ID NO: 61620 - RNA, 22 nt, Artificial Sequence
  LRRK2 RNA guide
uuaauucggaucggaaaucauu

SEQ ID NO: 61621 - RNA, 22 nt, Artificial Sequence
  LRRK2 RNA guide
uucaaugauuuccgauccgaau

SEQ ID NO: 61622 - RNA, 22 nt, Artificial Sequence
  LRRK2 RNA guide
uuccgauccgaauuaacucccu

SEQ ID NO: 61623 - RNA, 22 nt, Artificial Sequence
  LRRK2 RNA guide
uucggaucggaaaucauugaac

SEQ ID NO: 61624 - RNA, 22 nt, Artificial Sequence
  LRRK2 RNA guide
uuuccgauccgaauuaacuccc

SEQ ID NO: 61625 - RNA, 20 nt, Artificial Sequence
  LRRK2 RNA guide
ccgaauuaacucccuuaauu

SEQ ID NO: 61626 - RNA, 20 nt, Artificial Sequence
  LRRK2 RNA guide
cgaauuaacucccuuaauuu

SEQ ID NO: 61627 - RNA, 20 nt, Artificial Sequence
  LRRK2 RNA guide
uccgaauuaacucccuuaau

SEQ ID NO: 61628 - RNA, 21 nt, Artificial Sequence
  LRRK2 RNA guide
auccgaauuaacucccuuaau

SEQ ID NO: 61629 - RNA, 21 nt, Artificial Sequence
  LRRK2 RNA guide
ccgaauuaacucccuuaauuu

SEQ ID NO: 61630 - RNA, 21 nt, Artificial Sequence
  LRRK2 RNA guide
uccgaauuaacucccuuaauu

SEQ ID NO: 61631 - RNA, 22 nt, Artificial Sequence
  LRRK2 RNA guide
auccgaauuaacucccuuaauu

SEQ ID NO: 61632 - RNA, 22 nt, Artificial Sequence
  LRRK2 RNA guide
ccgaauuaacucccuuaauuua

SEQ ID NO: 61633 - RNA, 22 nt, Artificial Sequence
  LRRK2 RNA guide
uauccgaauuaacucccuuaau

SEQ ID NO: 61634 - RNA, 22 nt, Artificial Sequence
  LRRK2 RNA guide
uccgaauuaacucccuuaauuu

SEQ ID NO: 61635 - RNA, 20 nt, Artificial Sequence
  LRRK2 RNA guide
gggcauucacucucaaaaaa

SEQ ID NO: 61636 - RNA, 20 nt, Artificial Sequence
  LRRK2 RNA guide
ggggcauucacucucaaaaa

SEQ ID NO: 61637 - RNA, 21 nt, Artificial Sequence
  LRRK2 RNA guide
aggggcauucacucucaaaaa

SEQ ID NO: 61638 - RNA, 21 nt, Artificial Sequence
  LRRK2 RNA guide
ggggcauucacucucaaaaaa

SEQ ID NO: 61639 - RNA, 22 nt, Artificial Sequence
  LRRK2 RNA guide
aggggcauucacucucaaaaaa

SEQ ID NO: 61640 - RNA, 22 nt, Artificial Sequence
  LRRK2 RNA guide
gaggggcauucacucucaaaaa

SEQ ID NO: 61641 - RNA, 20 nt, Artificial Sequence
  LRRK2 RNA guide
cgagucauaaauaaucacua

SEQ ID NO: 61642 - RNA, 20 nt, Artificial Sequence
  LRRK2 RNA guide
gauucgagucauaaauaauc

SEQ ID NO: 61643 - RNA, 20 nt, Artificial Sequence
  LRRK2 RNA guide
ucgagucauaaauaaucacu

SEQ ID NO: 61644 - RNA, 20 nt, Artificial Sequence
  LRRK2 RNA guide
uucgagucauaaauaaucac

SEQ ID NO: 61645 - RNA, 22 nt, Artificial Sequence
  LRRK2 RNA guide
gauucgagucauaaauaaucac

SEQ ID NO: 61646 - RNA, 20 nt, Artificial Sequence
  LRRK2 RNA guide
gagucauaaauaaucacuag

SEQ ID NO: 61647 - RNA, 21 nt, Artificial Sequence
  LRRK2 RNA guide
cgagucauaaauaaucacuag

SEQ ID NO: 61648 - RNA, 22 nt, Artificial Sequence
  LRRK2 RNA guide
cgagucauaaauaaucacuaga

SEQ ID NO: 61649 - RNA, 22 nt, Artificial Sequence
  LRRK2 RNA guide
ucgagucauaaauaaucacuag

SEQ ID NO: 61650 - RNA, 22 nt, Artificial Sequence
  LRRK2 RNA guide
ucuagugauuauuuaugacucg

SEQ ID NO: 61651 - RNA, 20 nt, Artificial Sequence
  LRRK2 RNA guide
aaaacacccuaagggcauua

SEQ ID NO: 61652 - RNA, 20 nt, Artificial Sequence
  LRRK2 RNA guide
aaacacccuaagggcauuau

SEQ ID NO: 61653 - RNA, 20 nt, Artificial Sequence
  LRRK2 RNA guide
aaauaaugcccuuagggugu

SEQ ID NO: 61654 - RNA, 20 nt, Artificial Sequence
  LRRK2 RNA guide
aagggcauuauuucgcguag

SEQ ID NO: 61655 - RNA, 20 nt, Artificial Sequence
  LRRK2 RNA guide
aauaaugcccuuaggguguu

SEQ ID NO: 61656 - RNA, 20 nt, Artificial Sequence
  LRRK2 RNA guide
aaugcccuuaggguguuuug

SEQ ID NO: 61657 - RNA, 20 nt, Artificial Sequence
  LRRK2 RNA guide
acaucucuacgcgaaauaau

SEQ ID NO: 61658 - RNA, 20 nt, Artificial Sequence
  LRRK2 RNA guide
acgcgaaauaaugcccuuag

SEQ ID NO: 61659 - RNA, 20 nt, Artificial Sequence
  LRRK2 RNA guide
agggcauuauuucgcguaga

SEQ ID NO: 61660 - RNA, 20 nt, Artificial Sequence
  LRRK2 RNA guide
agguuguccaaaacacccua

SEQ ID NO: 61661 - RNA, 20 nt, Artificial Sequence
  LRRK2 RNA guide
auaaugcccuuaggguguuu

SEQ ID NO: 61662 - RNA, 20 nt, Artificial Sequence
  LRRK2 RNA guide
aucucuacgcgaaauaaugc

SEQ ID NO: 61663 - RNA, 20 nt, Artificial Sequence
  LRRK2 RNA guide
augcccuuaggguguuuugg

SEQ ID NO: 61664 - RNA, 20 nt, Artificial Sequence
  LRRK2 RNA guide
caaaacacccuaagggcauu

SEQ ID NO: 61665 - RNA, 20 nt, Artificial Sequence
  LRRK2 RNA guide
cacaucucuacgcgaaauaa

SEQ ID NO: 61666 - RNA, 20 nt, Artificial Sequence
  LRRK2 RNA guide
caucucuacgcgaaauaaug

SEQ ID NO: 61667 - RNA, 20 nt, Artificial Sequence
  LRRK2 RNA guide
ccaaaacacccuaagggcau

SEQ ID NO: 61668 - RNA, 20 nt, Artificial Sequence
  LRRK2 RNA guide
ccacaucucuacgcgaaaua

SEQ ID NO: 61669 - RNA, 20 nt, Artificial Sequence
  LRRK2 RNA guide
ccuaagggcauuauuucgcg

SEQ ID NO: 61670 - RNA, 20 nt, Artificial Sequence
  LRRK2 RNA guide
cgaaauaaugcccuuagggu

SEQ ID NO: 61671 - RNA, 20 nt, Artificial Sequence
  LRRK2 RNA guide
cgcgaaauaaugcccuuagg

SEQ ID NO: 61672 - RNA, 20 nt, Artificial Sequence
  LRRK2 RNA guide
cuaagggcauuauuucgcgu

SEQ ID NO: 61673 - RNA, 20 nt, Artificial Sequence
  LRRK2 RNA guide
cuacgcgaaauaaugcccuu

SEQ ID NO: 61674 - RNA, 20 nt, Artificial Sequence
  LRRK2 RNA guide
cucuacgcgaaauaaugccc

SEQ ID NO: 61675 - RNA, 20 nt, Artificial Sequence
  LRRK2 RNA guide
gcgaaauaaugcccuuaggg

SEQ ID NO: 61676 - RNA, 20 nt, Artificial Sequence
  LRRK2 RNA guide
gguuguccaaaacacccuaa

SEQ ID NO: 61677 - RNA, 20 nt, Artificial Sequence
  LRRK2 RNA guide
guccaaaacacccuaagggc

SEQ ID NO: 61678 - RNA, 20 nt, Artificial Sequence
  LRRK2 RNA guide
guuguccaaaacacccuaag

SEQ ID NO: 61679 - RNA, 20 nt, Artificial Sequence
  LRRK2 RNA guide
uaagggcauuauuucgcgua

SEQ ID NO: 61680 - RNA, 20 nt, Artificial Sequence
  LRRK2 RNA guide
uaaugcccuuaggguguuuu

SEQ ID NO: 61681 - RNA, 20 nt, Artificial Sequence
  LRRK2 RNA guide
uacgcgaaauaaugcccuua

SEQ ID NO: 61682 - RNA, 20 nt, Artificial Sequence
  LRRK2 RNA guide
uccaaaacacccuaagggca

SEQ ID NO: 61683 - RNA, 20 nt, Artificial Sequence
  LRRK2 RNA guide
uccacaucucuacgcgaaau

SEQ ID NO: 61684 - RNA, 20 nt, Artificial Sequence
  LRRK2 RNA guide
ucuacgcgaaauaaugcccu

SEQ ID NO: 61685 - RNA, 20 nt, Artificial Sequence
  LRRK2 RNA guide
ugcccuuaggguguuuugga

SEQ ID NO: 61686 - RNA, 20 nt, Artificial Sequence
  LRRK2 RNA guide
uguccaaaacacccuaaggg

SEQ ID NO: 61687 - RNA, 20 nt, Artificial Sequence
  LRRK2 RNA guide
uuccacaucucuacgcgaaa

SEQ ID NO: 61688 - RNA, 20 nt, Artificial Sequence
  LRRK2 RNA guide
uuguccaaaacacccuaagg

SEQ ID NO: 61689 - RNA, 21 nt, Artificial Sequence
  LRRK2 RNA guide
aaaacacccuaagggcauuau

SEQ ID NO: 61690 - RNA, 21 nt, Artificial Sequence
  LRRK2 RNA guide
aaauaaugcccuuaggguguu

SEQ ID NO: 61691 - RNA, 21 nt, Artificial Sequence
  LRRK2 RNA guide
aagggcauuauuucgcguaga

SEQ ID NO: 61692 - RNA, 21 nt, Artificial Sequence
  LRRK2 RNA guide
aagguuguccaaaacacccua

SEQ ID NO: 61693 - RNA, 21 nt, Artificial Sequence
  LRRK2 RNA guide
aauaaugcccuuaggguguuu

SEQ ID NO: 61694 - RNA, 21 nt, Artificial Sequence
  LRRK2 RNA guide
aaugcccuuaggguguuuugg

SEQ ID NO: 61695 - RNA, 21 nt, Artificial Sequence
  LRRK2 RNA guide
acaucucuacgcgaaauaaug

SEQ ID NO: 61696 - RNA, 21 nt, Artificial Sequence
  LRRK2 RNA guide
acgcgaaauaaugcccuuagg

SEQ ID NO: 61697 - RNA, 21 nt, Artificial Sequence
  LRRK2 RNA guide
agggcauuauuucgcguagag

SEQ ID NO: 61698 - RNA, 21 nt, Artificial Sequence
  LRRK2 RNA guide
agguuguccaaaacacccuaa

SEQ ID NO: 61699 - RNA, 21 nt, Artificial Sequence
  LRRK2 RNA guide
auaaugcccuuaggguguuuu

SEQ ID NO: 61700 - RNA, 21 nt, Artificial Sequence
  LRRK2 RNA guide
aucucuacgcgaaauaaugcc

SEQ ID NO: 61701 - RNA, 21 nt, Artificial Sequence
  LRRK2 RNA guide
augcccuuaggguguuuugga

SEQ ID NO: 61702 - RNA, 21 nt, Artificial Sequence
  LRRK2 RNA guide
caaaacacccuaagggcauua

SEQ ID NO: 61703 - RNA, 21 nt, Artificial Sequence
  LRRK2 RNA guide
cacaucucuacgcgaaauaau

SEQ ID NO: 61704 - RNA, 21 nt, Artificial Sequence
  LRRK2 RNA guide
caucucuacgcgaaauaaugc

SEQ ID NO: 61705 - RNA, 21 nt, Artificial Sequence
  LRRK2 RNA guide
ccaaaacacccuaagggcauu

SEQ ID NO: 61706 - RNA, 21 nt, Artificial Sequence
  LRRK2 RNA guide
ccacaucucuacgcgaaauaa

SEQ ID NO: 61707 - RNA, 21 nt, Artificial Sequence
  LRRK2 RNA guide
cccuaagggcauuauuucgcg

SEQ ID NO: 61708 - RNA, 21 nt, Artificial Sequence
  LRRK2 RNA guide
ccuaagggcauuauuucgcgu

SEQ ID NO: 61709 - RNA, 21 nt, Artificial Sequence
  LRRK2 RNA guide
cgaaauaaugcccuuagggug

SEQ ID NO: 61710 - RNA, 21 nt, Artificial Sequence
  LRRK2 RNA guide
cgcgaaauaaugcccuuaggg

SEQ ID NO: 61711 - RNA, 21 nt, Artificial Sequence
  LRRK2 RNA guide
cuaagggcauuauuucgcgua

SEQ ID NO: 61712 - RNA, 21 nt, Artificial Sequence
  LRRK2 RNA guide
cuacgcgaaauaaugcccuua

SEQ ID NO: 61713 - RNA, 21 nt, Artificial Sequence
  LRRK2 RNA guide
cucuacgcgaaauaaugcccu

SEQ ID NO: 61714 - RNA, 21 nt, Artificial Sequence
  LRRK2 RNA guide
gaaauaaugcccuuagggugu

SEQ ID NO: 61715 - RNA, 21 nt, Artificial Sequence
  LRRK2 RNA guide
gcgaaauaaugcccuuagggu

SEQ ID NO: 61716 - RNA, 21 nt, Artificial Sequence
  LRRK2 RNA guide
gguuguccaaaacacccuaag

SEQ ID NO: 61717 - RNA, 21 nt, Artificial Sequence
  LRRK2 RNA guide
guccaaaacacccuaagggca

SEQ ID NO: 61718 - RNA, 21 nt, Artificial Sequence
  LRRK2 RNA guide
guuguccaaaacacccuaagg

SEQ ID NO: 61719 - RNA, 21 nt, Artificial Sequence
  LRRK2 RNA guide
uaagggcauuauuucgcguag

SEQ ID NO: 61720 - RNA, 21 nt, Artificial Sequence
  LRRK2 RNA guide
uaaugcccuuaggguguuuug

SEQ ID NO: 61721 - RNA, 21 nt, Artificial Sequence
  LRRK2 RNA guide
uacgcgaaauaaugcccuuag

SEQ ID NO: 61722 - RNA, 21 nt, Artificial Sequence
  LRRK2 RNA guide
uccaaaacacccuaagggcau

SEQ ID NO: 61723 - RNA, 21 nt, Artificial Sequence
  LRRK2 RNA guide
uccacaucucuacgcgaaaua

SEQ ID NO: 61724 - RNA, 21 nt, Artificial Sequence
  LRRK2 RNA guide
ucuacgcgaaauaaugcccuu

SEQ ID NO: 61725 - RNA, 21 nt, Artificial Sequence
  LRRK2 RNA guide
ucucuacgcgaaauaaugccc

SEQ ID NO: 61726 - RNA, 21 nt, Artificial Sequence
  LRRK2 RNA guide
ugcccuuaggguguuuuggac

SEQ ID NO: 61727 - RNA, 21 nt, Artificial Sequence
  LRRK2 RNA guide
uguccaaaacacccuaagggc

SEQ ID NO: 61728 - RNA, 21 nt, Artificial Sequence
  LRRK2 RNA guide
uuccacaucucuacgcgaaau

SEQ ID NO: 61729 - RNA, 21 nt, Artificial Sequence
  LRRK2 RNA guide
uuguccaaaacacccuaaggg

SEQ ID NO: 61730 - RNA, 21 nt, Artificial Sequence
  LRRK2 RNA guide
uuuccacaucucuacgcgaaa

SEQ ID NO: 61731 - RNA, 22 nt, Artificial Sequence
  LRRK2 RNA guide
aaauaaugcccuuaggguguuu

SEQ ID NO: 61732 - RNA, 22 nt, Artificial Sequence
  LRRK2 RNA guide
aagggcauuauuucgcguagag

SEQ ID NO: 61733 - RNA, 22 nt, Artificial Sequence
  LRRK2 RNA guide
aagguuguccaaaacacccuaa

SEQ ID NO: 61734 - RNA, 22 nt, Artificial Sequence
  LRRK2 RNA guide
aauaaugcccuuaggguguuuu

SEQ ID NO: 61735 - RNA, 22 nt, Artificial Sequence
  LRRK2 RNA guide
aaugcccuuaggguguuuugga

SEQ ID NO: 61736 - RNA, 22 nt, Artificial Sequence
  LRRK2 RNA guide
acaucucuacgcgaaauaaugc

SEQ ID NO: 61737 - RNA, 22 nt, Artificial Sequence
  LRRK2 RNA guide
acccuaagggcauuauuucgcg

SEQ ID NO: 61738 - RNA, 22 nt, Artificial Sequence
  LRRK2 RNA guide
acgcgaaauaaugcccuuaggg

SEQ ID NO: 61739 - RNA, 22 nt, Artificial Sequence
  LRRK2 RNA guide
agguuguccaaaacacccuaag

SEQ ID NO: 61740 - RNA, 22 nt, Artificial Sequence
  LRRK2 RNA guide
auaaugcccuuaggguguuuug

SEQ ID NO: 61741 - RNA, 22 nt, Artificial Sequence
  LRRK2 RNA guide
aucucuacgcgaaauaaugccc

SEQ ID NO: 61742 - RNA, 22 nt, Artificial Sequence
  LRRK2 RNA guide
augcccuuaggguguuuuggac

SEQ ID NO: 61743 - RNA, 22 nt, Artificial Sequence
  LRRK2 RNA guide
caaaacacccuaagggcauuau

SEQ ID NO: 61744 - RNA, 22 nt, Artificial Sequence
  LRRK2 RNA guide
cacaucucuacgcgaaauaaug

SEQ ID NO: 61745 - RNA, 22 nt, Artificial Sequence
  LRRK2 RNA guide
caucucuacgcgaaauaaugcc

SEQ ID NO: 61746 - RNA, 22 nt, Artificial Sequence
  LRRK2 RNA guide
ccaaaacacccuaagggcauua

SEQ ID NO: 61747 - RNA, 22 nt, Artificial Sequence
  LRRK2 RNA guide
ccacaucucuacgcgaaauaau

SEQ ID NO: 61748 - RNA, 22 nt, Artificial Sequence
  LRRK2 RNA guide
cccuaagggcauuauuucgcgu

SEQ ID NO: 61749 - RNA, 22 nt, Artificial Sequence
  LRRK2 RNA guide
ccuaagggcauuauuucgcgua

SEQ ID NO: 61750 - RNA, 22 nt, Artificial Sequence
  LRRK2 RNA guide
cgaaauaaugcccuuagggugu

SEQ ID NO: 61751 - RNA, 22 nt, Artificial Sequence
  LRRK2 RNA guide
cgcgaaauaaugcccuuagggu

SEQ ID NO: 61752 - RNA, 22 nt, Artificial Sequence
  LRRK2 RNA guide
cuaagggcauuauuucgcguag

SEQ ID NO: 61753 - RNA, 22 nt, Artificial Sequence
  LRRK2 RNA guide
cuacgcgaaauaaugcccuuag

SEQ ID NO: 61754 - RNA, 22 nt, Artificial Sequence
  LRRK2 RNA guide
cucuacgcgaaauaaugcccuu

SEQ ID NO: 61755 - RNA, 22 nt, Artificial Sequence
  LRRK2 RNA guide
gaaauaaugcccuuaggguguu

SEQ ID NO: 61756 - RNA, 22 nt, Artificial Sequence
  LRRK2 RNA guide
gaagguuguccaaaacacccua

SEQ ID NO: 61757 - RNA, 22 nt, Artificial Sequence
  LRRK2 RNA guide
gcgaaauaaugcccuuagggug

SEQ ID NO: 61758 - RNA, 22 nt, Artificial Sequence
  LRRK2 RNA guide
gguuguccaaaacacccuaagg

SEQ ID NO: 61759 - RNA, 22 nt, Artificial Sequence
  LRRK2 RNA guide
guccaaaacacccuaagggcau

SEQ ID NO: 61760 - RNA, 22 nt, Artificial Sequence
  LRRK2 RNA guide
guuguccaaaacacccuaaggg

SEQ ID NO: 61761 - RNA, 22 nt, Artificial Sequence
  LRRK2 RNA guide
uaagggcauuauuucgcguaga

SEQ ID NO: 61762 - RNA, 22 nt, Artificial Sequence
  LRRK2 RNA guide
uaaugcccuuaggguguuuugg

SEQ ID NO: 61763 - RNA, 22 nt, Artificial Sequence
  LRRK2 RNA guide
uacgcgaaauaaugcccuuagg

SEQ ID NO: 61764 - RNA, 22 nt, Artificial Sequence
  LRRK2 RNA guide
uccaaaacacccuaagggcauu

SEQ ID NO: 61765 - RNA, 22 nt, Artificial Sequence
  LRRK2 RNA guide
uccacaucucuacgcgaaauaa

SEQ ID NO: 61766 - RNA, 22 nt, Artificial Sequence
  LRRK2 RNA guide
ucuacgcgaaauaaugcccuua

SEQ ID NO: 61767 - RNA, 22 nt, Artificial Sequence
  LRRK2 RNA guide
ucucuacgcgaaauaaugcccu

SEQ ID NO: 61768 - RNA, 22 nt, Artificial Sequence
  LRRK2 RNA guide
ugcccuuaggguguuuuggaca

SEQ ID NO: 61769 - RNA, 22 nt, Artificial Sequence
  LRRK2 RNA guide
uguccaaaacacccuaagggca

SEQ ID NO: 61770 - RNA, 22 nt, Artificial Sequence
  LRRK2 RNA guide
uuccacaucucuacgcgaaaua

SEQ ID NO: 61771 - RNA, 22 nt, Artificial Sequence
  LRRK2 RNA guide
uuguccaaaacacccuaagggc

SEQ ID NO: 61772 - RNA, 22 nt, Artificial Sequence
  LRRK2 RNA guide
uuuccacaucucuacgcgaaau

SEQ ID NO: 61773 - RNA, 22 nt, Artificial Sequence
  LRRK2 RNA guide
uuuuccacaucucuacgcgaaa

SEQ ID NO: 61774 - RNA, 20 nt, Artificial Sequence
  LRRK2 RNA guide
aaaacacccuaagggaauua

SEQ ID NO: 61775 - RNA, 20 nt, Artificial Sequence
  LRRK2 RNA guide
aaacacccuaagggaauuau

SEQ ID NO: 61776 - RNA, 20 nt, Artificial Sequence
  LRRK2 RNA guide
aaauaauucccuuagggugu

SEQ ID NO: 61777 - RNA, 20 nt, Artificial Sequence
  LRRK2 RNA guide
aacacccuaagggaauuauu

SEQ ID NO: 61778 - RNA, 20 nt, Artificial Sequence
  LRRK2 RNA guide
aagggaauuauuucgcguag

SEQ ID NO: 61779 - RNA, 20 nt, Artificial Sequence
  LRRK2 RNA guide
aauaauucccuuaggguguu

SEQ ID NO: 61780 - RNA, 20 nt, Artificial Sequence
  LRRK2 RNA guide
aauucccuuaggguguuuug

SEQ ID NO: 61781 - RNA, 20 nt, Artificial Sequence
  LRRK2 RNA guide
acacccuaagggaauuauuu

SEQ ID NO: 61782 - RNA, 20 nt, Artificial Sequence
  LRRK2 RNA guide
acccuaagggaauuauuucg

SEQ ID NO: 61783 - RNA, 20 nt, Artificial Sequence
  LRRK2 RNA guide
acgcgaaauaauucccuuag

SEQ ID NO: 61784 - RNA, 20 nt, Artificial Sequence
  LRRK2 RNA guide
agggaauuauuucgcguaga

SEQ ID NO: 61785 - RNA, 20 nt, Artificial Sequence
  LRRK2 RNA guide
auaauucccuuaggguguuu

SEQ ID NO: 61786 - RNA, 20 nt, Artificial Sequence
  LRRK2 RNA guide
aucucuacgcgaaauaauuc

SEQ ID NO: 61787 - RNA, 20 nt, Artificial Sequence
  LRRK2 RNA guide
auucccuuaggguguuuugg

SEQ ID NO: 61788 - RNA, 20 nt, Artificial Sequence
  LRRK2 RNA guide
caaaacacccuaagggaauu

SEQ ID NO: 61789 - RNA, 20 nt, Artificial Sequence
  LRRK2 RNA guide
cacccuaagggaauuauuuc

SEQ ID NO: 61790 - RNA, 20 nt, Artificial Sequence
  LRRK2 RNA guide
caucucuacgcgaaauaauu

SEQ ID NO: 61791 - RNA, 20 nt, Artificial Sequence
  LRRK2 RNA guide
ccaaaacacccuaagggaau

SEQ ID NO: 61792 - RNA, 20 nt, Artificial Sequence
  LRRK2 RNA guide
cccuaagggaauuauuucgc

SEQ ID NO: 61793 - RNA, 20 nt, Artificial Sequence
  LRRK2 RNA guide
ccuaagggaauuauuucgcg

SEQ ID NO: 61794 - RNA, 20 nt, Artificial Sequence
  LRRK2 RNA guide
cgaaauaauucccuuagggu

SEQ ID NO: 61795 - RNA, 20 nt, Artificial Sequence
  LRRK2 RNA guide
cgcgaaauaauucccuuagg

SEQ ID NO: 61796 - RNA, 20 nt, Artificial Sequence
  LRRK2 RNA guide
cuaagggaauuauuucgcgu

SEQ ID NO: 61797 - RNA, 20 nt, Artificial Sequence
  LRRK2 RNA guide
cuacgcgaaauaauucccuu

SEQ ID NO: 61798 - RNA, 20 nt, Artificial Sequence
  LRRK2 RNA guide
cucuacgcgaaauaauuccc

SEQ ID NO: 61799 - RNA, 20 nt, Artificial Sequence
  LRRK2 RNA guide
gaaauaauucccuuagggug

SEQ ID NO: 61800 - RNA, 20 nt, Artificial Sequence
  LRRK2 RNA guide
gaauuauuucgcguagagau

SEQ ID NO: 61801 - RNA, 20 nt, Artificial Sequence
  LRRK2 RNA guide
gcgaaauaauucccuuaggg

SEQ ID NO: 61802 - RNA, 20 nt, Artificial Sequence
  LRRK2 RNA guide
ggaauuauuucgcguagaga

SEQ ID NO: 61803 - RNA, 20 nt, Artificial Sequence
  LRRK2 RNA guide
gggaauuauuucgcguagag

SEQ ID NO: 61804 - RNA, 20 nt, Artificial Sequence
  LRRK2 RNA guide
guccaaaacacccuaaggga

SEQ ID NO: 61805 - RNA, 20 nt, Artificial Sequence
  LRRK2 RNA guide
uaagggaauuauuucgcgua

SEQ ID NO: 61806 - RNA, 20 nt, Artificial Sequence
  LRRK2 RNA guide
uaauucccuuaggguguuuu

SEQ ID NO: 61807 - RNA, 20 nt, Artificial Sequence
  LRRK2 RNA guide
uacgcgaaauaauucccuua

SEQ ID NO: 61808 - RNA, 20 nt, Artificial Sequence
  LRRK2 RNA guide
uccaaaacacccuaagggaa

SEQ ID NO: 61809 - RNA, 20 nt, Artificial Sequence
  LRRK2 RNA guide
ucuacgcgaaauaauucccu

SEQ ID NO: 61810 - RNA, 20 nt, Artificial Sequence
  LRRK2 RNA guide
ucucuacgcgaaauaauucc

SEQ ID NO: 61811 - RNA, 20 nt, Artificial Sequence
  LRRK2 RNA guide
uucccuuaggguguuuugga

SEQ ID NO: 61812 - RNA, 21 nt, Artificial Sequence
  LRRK2 RNA guide
aaaacacccuaagggaauuau

SEQ ID NO: 61813 - RNA, 21 nt, Artificial Sequence
  LRRK2 RNA guide
aaacacccuaagggaauuauu

SEQ ID NO: 61814 - RNA, 21 nt, Artificial Sequence
  LRRK2 RNA guide
aaauaauucccuuaggguguu

SEQ ID NO: 61815 - RNA, 21 nt, Artificial Sequence
  LRRK2 RNA guide
aacacccuaagggaauuauuu

SEQ ID NO: 61816 - RNA, 21 nt, Artificial Sequence
  LRRK2 RNA guide
aagggaauuauuucgcguaga

SEQ ID NO: 61817 - RNA, 21 nt, Artificial Sequence
  LRRK2 RNA guide
aauaauucccuuaggguguuu

SEQ ID NO: 61818 - RNA, 21 nt, Artificial Sequence
  LRRK2 RNA guide
aauucccuuaggguguuuugg

SEQ ID NO: 61819 - RNA, 21 nt, Artificial Sequence
  LRRK2 RNA guide
acacccuaagggaauuauuuc

SEQ ID NO: 61820 - RNA, 21 nt, Artificial Sequence
  LRRK2 RNA guide
acaucucuacgcgaaauaauu

SEQ ID NO: 61821 - RNA, 21 nt, Artificial Sequence
  LRRK2 RNA guide
acccuaagggaauuauuucgc

SEQ ID NO: 61822 - RNA, 21 nt, Artificial Sequence
  LRRK2 RNA guide
acgcgaaauaauucccuuagg

SEQ ID NO: 61823 - RNA, 21 nt, Artificial Sequence
  LRRK2 RNA guide
agggaauuauuucgcguagag

SEQ ID NO: 61824 - RNA, 21 nt, Artificial Sequence
  LRRK2 RNA guide
auaauucccuuaggguguuuu

SEQ ID NO: 61825 - RNA, 21 nt, Artificial Sequence
  LRRK2 RNA guide
aucucuacgcgaaauaauucc

SEQ ID NO: 61826 - RNA, 21 nt, Artificial Sequence
  LRRK2 RNA guide
auucccuuaggguguuuugga

SEQ ID NO: 61827 - RNA, 21 nt, Artificial Sequence
  LRRK2 RNA guide
caaaacacccuaagggaauua

SEQ ID NO: 61828 - RNA, 21 nt, Artificial Sequence
  LRRK2 RNA guide
cacccuaagggaauuauuucg

SEQ ID NO: 61829 - RNA, 21 nt, Artificial Sequence
  LRRK2 RNA guide
caucucuacgcgaaauaauuc

SEQ ID NO: 61830 - RNA, 21 nt, Artificial Sequence
  LRRK2 RNA guide
ccaaaacacccuaagggaauu

SEQ ID NO: 61831 - RNA, 21 nt, Artificial Sequence
  LRRK2 RNA guide
cccuaagggaauuauuucgcg

SEQ ID NO: 61832 - RNA, 21 nt, Artificial Sequence
  LRRK2 RNA guide
ccuaagggaauuauuucgcgu

SEQ ID NO: 61833 - RNA, 21 nt, Artificial Sequence
  LRRK2 RNA guide
cgaaauaauucccuuagggug

SEQ ID NO: 61834 - RNA, 21 nt, Artificial Sequence
  LRRK2 RNA guide
cgcgaaauaauucccuuaggg

SEQ ID NO: 61835 - RNA, 21 nt, Artificial Sequence
  LRRK2 RNA guide
cuaagggaauuauuucgcgua

SEQ ID NO: 61836 - RNA, 21 nt, Artificial Sequence
  LRRK2 RNA guide
cuacgcgaaauaauucccuua

SEQ ID NO: 61837 - RNA, 21 nt, Artificial Sequence
  LRRK2 RNA guide
cucuacgcgaaauaauucccu

SEQ ID NO: 61838 - RNA, 21 nt, Artificial Sequence
  LRRK2 RNA guide
gaaauaauucccuuagggugu

SEQ ID NO: 61839 - RNA, 21 nt, Artificial Sequence
  LRRK2 RNA guide
gaauuauuucgcguagagaug

SEQ ID NO: 61840 - RNA, 21 nt, Artificial Sequence
  LRRK2 RNA guide
gcgaaauaauucccuuagggu

SEQ ID NO: 61841 - RNA, 21 nt, Artificial Sequence
  LRRK2 RNA guide
ggaauuauuucgcguagagau

SEQ ID NO: 61842 - RNA, 21 nt, Artificial Sequence
  LRRK2 RNA guide
gggaauuauuucgcguagaga

SEQ ID NO: 61843 - RNA, 21 nt, Artificial Sequence
  LRRK2 RNA guide
guccaaaacacccuaagggaa

SEQ ID NO: 61844 - RNA, 21 nt, Artificial Sequence
  LRRK2 RNA guide
uaagggaauuauuucgcguag

SEQ ID NO: 61845 - RNA, 21 nt, Artificial Sequence
  LRRK2 RNA guide
uaauucccuuaggguguuuug

SEQ ID NO: 61846 - RNA, 21 nt, Artificial Sequence
  LRRK2 RNA guide
uacgcgaaauaauucccuuag

SEQ ID NO: 61847 - RNA, 21 nt, Artificial Sequence
  LRRK2 RNA guide
uccaaaacacccuaagggaau

SEQ ID NO: 61848 - RNA, 21 nt, Artificial Sequence
  LRRK2 RNA guide
ucuacgcgaaauaauucccuu

SEQ ID NO: 61849 - RNA, 21 nt, Artificial Sequence
  LRRK2 RNA guide
ucucuacgcgaaauaauuccc

SEQ ID NO: 61850 - RNA, 21 nt, Artificial Sequence
  LRRK2 RNA guide
uguccaaaacacccuaaggga

SEQ ID NO: 61851 - RNA, 21 nt, Artificial Sequence
  LRRK2 RNA guide
uucccuuaggguguuuuggac

SEQ ID NO: 61852 - RNA, 22 nt, Artificial Sequence
  LRRK2 RNA guide
aaaacacccuaagggaauuauu

SEQ ID NO: 61853 - RNA, 22 nt, Artificial Sequence
  LRRK2 RNA guide
aaacacccuaagggaauuauuu

SEQ ID NO: 61854 - RNA, 22 nt, Artificial Sequence
  LRRK2 RNA guide
aaauaauucccuuaggguguuu

SEQ ID NO: 61855 - RNA, 22 nt, Artificial Sequence
  LRRK2 RNA guide
aacacccuaagggaauuauuuc

SEQ ID NO: 61856 - RNA, 22 nt, Artificial Sequence
  LRRK2 RNA guide
aagggaauuauuucgcguagag

SEQ ID NO: 61857 - RNA, 22 nt, Artificial Sequence
  LRRK2 RNA guide
aauaauucccuuaggguguuuu

SEQ ID NO: 61858 - RNA, 22 nt, Artificial Sequence
  LRRK2 RNA guide
aauucccuuaggguguuuugga

SEQ ID NO: 61859 - RNA, 22 nt, Artificial Sequence
  LRRK2 RNA guide
acacccuaagggaauuauuucg

SEQ ID NO: 61860 - RNA, 22 nt, Artificial Sequence
  LRRK2 RNA guide
acaucucuacgcgaaauaauuc

SEQ ID NO: 61861 - RNA, 22 nt, Artificial Sequence
  LRRK2 RNA guide
acccuaagggaauuauuucgcg

SEQ ID NO: 61862 - RNA, 22 nt, Artificial Sequence
  LRRK2 RNA guide
acgcgaaauaauucccuuaggg

SEQ ID NO: 61863 - RNA, 22 nt, Artificial Sequence
  LRRK2 RNA guide
agggaauuauuucgcguagaga

SEQ ID NO: 61864 - RNA, 22 nt, Artificial Sequence
  LRRK2 RNA guide
auaauucccuuaggguguuuug

SEQ ID NO: 61865 - RNA, 22 nt, Artificial Sequence
  LRRK2 RNA guide
aucucuacgcgaaauaauuccc

SEQ ID NO: 61866 - RNA, 22 nt, Artificial Sequence
  LRRK2 RNA guide
auucccuuaggguguuuuggac

SEQ ID NO: 61867 - RNA, 22 nt, Artificial Sequence
  LRRK2 RNA guide
caaaacacccuaagggaauuau

SEQ ID NO: 61868 - RNA, 22 nt, Artificial Sequence
  LRRK2 RNA guide
cacaucucuacgcgaaauaauu

SEQ ID NO: 61869 - RNA, 22 nt, Artificial Sequence
  LRRK2 RNA guide
cacccuaagggaauuauuucgc

SEQ ID NO: 61870 - RNA, 22 nt, Artificial Sequence
  LRRK2 RNA guide
caucucuacgcgaaauaauucc

SEQ ID NO: 61871 - RNA, 22 nt, Artificial Sequence
  LRRK2 RNA guide
ccaaaacacccuaagggaauua

SEQ ID NO: 61872 - RNA, 22 nt, Artificial Sequence
  LRRK2 RNA guide
cccuaagggaauuauuucgcgu

SEQ ID NO: 61873 - RNA, 22 nt, Artificial Sequence
  LRRK2 RNA guide
ccuaagggaauuauuucgcgua

SEQ ID NO: 61874 - RNA, 22 nt, Artificial Sequence
  LRRK2 RNA guide
cgaaauaauucccuuagggugu

SEQ ID NO: 61875 - RNA, 22 nt, Artificial Sequence
  LRRK2 RNA guide
cgcgaaauaauucccuuagggu

SEQ ID NO: 61876 - RNA, 22 nt, Artificial Sequence
  LRRK2 RNA guide
cuaagggaauuauuucgcguag

SEQ ID NO: 61877 - RNA, 22 nt, Artificial Sequence
  LRRK2 RNA guide
cuacgcgaaauaauucccuuag

SEQ ID NO: 61878 - RNA, 22 nt, Artificial Sequence
  LRRK2 RNA guide
cucuacgcgaaauaauucccuu

SEQ ID NO: 61879 - RNA, 22 nt, Artificial Sequence
  LRRK2 RNA guide
gaaauaauucccuuaggguguu

SEQ ID NO: 61880 - RNA, 22 nt, Artificial Sequence
  LRRK2 RNA guide
gaauuauuucgcguagagaugu

SEQ ID NO: 61881 - RNA, 22 nt, Artificial Sequence
  LRRK2 RNA guide
gcgaaauaauucccuuagggug

SEQ ID NO: 61882 - RNA, 22 nt, Artificial Sequence
  LRRK2 RNA guide
ggaauuauuucgcguagagaug

SEQ ID NO: 61883 - RNA, 22 nt, Artificial Sequence
  LRRK2 RNA guide
gggaauuauuucgcguagagau

SEQ ID NO: 61884 - RNA, 22 nt, Artificial Sequence
  LRRK2 RNA guide
guccaaaacacccuaagggaau

SEQ ID NO: 61885 - RNA, 22 nt, Artificial Sequence
  LRRK2 RNA guide
uaagggaauuauuucgcguaga

SEQ ID NO: 61886 - RNA, 22 nt, Artificial Sequence
  LRRK2 RNA guide
uaauucccuuaggguguuuugg

SEQ ID NO: 61887 - RNA, 22 nt, Artificial Sequence
  LRRK2 RNA guide
uacgcgaaauaauucccuuagg

SEQ ID NO: 61888 - RNA, 22 nt, Artificial Sequence
  LRRK2 RNA guide
uccaaaacacccuaagggaauu

SEQ ID NO: 61889 - RNA, 22 nt, Artificial Sequence
  LRRK2 RNA guide
ucuacgcgaaauaauucccuua

SEQ ID NO: 61890 - RNA, 22 nt, Artificial Sequence
  LRRK2 RNA guide
ucucuacgcgaaauaauucccu

SEQ ID NO: 61891 - RNA, 22 nt, Artificial Sequence
  LRRK2 RNA guide
uguccaaaacacccuaagggaa

SEQ ID NO: 61892 - RNA, 22 nt, Artificial Sequence
  LRRK2 RNA guide
uucccuuaggguguuuuggaca

SEQ ID NO: 61893 - RNA, 22 nt, Artificial Sequence
  LRRK2 RNA guide
uuguccaaaacacccuaaggga

SEQ ID NO: 61894 - RNA, 20 nt, Artificial Sequence
  LRRK2 RNA guide
aguucuuuggaaauuuccuu

SEQ ID NO: 61895 - RNA, 20 nt, Artificial Sequence
  LRRK2 RNA guide
gauguggaaaaauuucuuuc

SEQ ID NO: 61896 - RNA, 20 nt, Artificial Sequence
  LRRK2 RNA guide
guaguucuuuggaaauuucc

SEQ ID NO: 61897 - RNA, 20 nt, Artificial Sequence
  LRRK2 RNA guide
guucuuuggaaauuuccuuu

SEQ ID NO: 61898 - RNA, 20 nt, Artificial Sequence
  LRRK2 RNA guide
uaguucuuuggaaauuuccu

SEQ ID NO: 61899 - RNA, 21 nt, Artificial Sequence
  LRRK2 RNA guide
guaguucuuuggaaauuuccu

SEQ ID NO: 61900 - RNA, 21 nt, Artificial Sequence
  LRRK2 RNA guide
uguaguucuuuggaaauuucc

SEQ ID NO: 61901 - RNA, 22 nt, Artificial Sequence
  LRRK2 RNA guide
auguaguucuuuggaaauuucc

SEQ ID NO: 61902 - RNA, 22 nt, Artificial Sequence
  LRRK2 RNA guide
gagauguggaaaaauuucuuuc

SEQ ID NO: 61903 - RNA, 22 nt, Artificial Sequence
  LRRK2 RNA guide
guaguucuuuggaaauuuccuu

SEQ ID NO: 61904 - RNA, 22 nt, Artificial Sequence
  LRRK2 RNA guide
uguaguucuuuggaaauuuccu

SEQ ID NO: 61905 - RNA, 20 nt, Artificial Sequence
  LRRK2 RNA guide
agaaaaggaaauuuccaaag

SEQ ID NO: 61906 - RNA, 20 nt, Artificial Sequence
  LRRK2 RNA guide
caaagaaaaggaaauuucca

SEQ ID NO: 61907 - RNA, 20 nt, Artificial Sequence
  LRRK2 RNA guide
cuuuggaaauuuccuuuucu

SEQ ID NO: 61908 - RNA, 20 nt, Artificial Sequence
  LRRK2 RNA guide
ggaaauuuccuuuucuuuga

SEQ ID NO: 61909 - RNA, 20 nt, Artificial Sequence
  LRRK2 RNA guide
ucaaagaaaaggaaauuucc

SEQ ID NO: 61910 - RNA, 20 nt, Artificial Sequence
  LRRK2 RNA guide
ucuuuggaaauuuccuuuuc

SEQ ID NO: 61911 - RNA, 20 nt, Artificial Sequence
  LRRK2 RNA guide
uggaaauuuccuuuucuuug

SEQ ID NO: 61912 - RNA, 22 nt, Artificial Sequence
  LRRK2 RNA guide
guucuuuggaaauuuccuuuuc

SEQ ID NO: 61913 - RNA, 20 nt, Artificial Sequence
  LRRK2 RNA guide
aaagaacuacaugucacagu

SEQ ID NO: 61914 - RNA, 20 nt, Artificial Sequence
  LRRK2 RNA guide
aaauacugugacauguaguu

SEQ ID NO: 61915 - RNA, 20 nt, Artificial Sequence
  LRRK2 RNA guide
aacuacaugucacaguauuu

SEQ ID NO: 61916 - RNA, 20 nt, Artificial Sequence
  LRRK2 RNA guide
aagaacuacaugucacagua

SEQ ID NO: 61917 - RNA, 20 nt, Artificial Sequence
  LRRK2 RNA guide
aauuuccaaagaacuacaug

SEQ ID NO: 61918 - RNA, 20 nt, Artificial Sequence
  LRRK2 RNA guide
acaugucacaguauuuuaag

SEQ ID NO: 61919 - RNA, 20 nt, Artificial Sequence
  LRRK2 RNA guide
acuacaugucacaguauuuu

SEQ ID NO: 61920 - RNA, 20 nt, Artificial Sequence
  LRRK2 RNA guide
agaacuacaugucacaguau

SEQ ID NO: 61921 - RNA, 20 nt, Artificial Sequence
  LRRK2 RNA guide
auuuccaaagaacuacaugu

SEQ ID NO: 61922 - RNA, 20 nt, Artificial Sequence
  LRRK2 RNA guide
caaagaacuacaugucacag

SEQ ID NO: 61923 - RNA, 20 nt, Artificial Sequence
  LRRK2 RNA guide
ccaaagaacuacaugucaca

SEQ ID NO: 61924 - RNA, 20 nt, Artificial Sequence
  LRRK2 RNA guide
cuacaugucacaguauuuua

SEQ ID NO: 61925 - RNA, 20 nt, Artificial Sequence
  LRRK2 RNA guide
gaacuacaugucacaguauu

SEQ ID NO: 61926 - RNA, 20 nt, Artificial Sequence
  LRRK2 RNA guide
uccaaagaacuacaugucac

SEQ ID NO: 61927 - RNA, 20 nt, Artificial Sequence
  LRRK2 RNA guide
ugacauguaguucuuuggaa

SEQ ID NO: 61928 - RNA, 20 nt, Artificial Sequence
  LRRK2 RNA guide
uuccaaagaacuacauguca

SEQ ID NO: 61929 - RNA, 20 nt, Artificial Sequence
  LRRK2 RNA guide
uucuaggagcuuaaaauacu

SEQ ID NO: 61930 - RNA, 20 nt, Artificial Sequence
  LRRK2 RNA guide
uuuccaaagaacuacauguc

SEQ ID NO: 61931 - RNA, 20 nt, Artificial Sequence
  LRRK2 RNA guide
uuucuaggagcuuaaaauac

SEQ ID NO: 61932 - RNA, 21 nt, Artificial Sequence
  LRRK2 RNA guide
aaagaacuacaugucacagua

SEQ ID NO: 61933 - RNA, 21 nt, Artificial Sequence
  LRRK2 RNA guide
aaauacugugacauguaguuc

SEQ ID NO: 61934 - RNA, 21 nt, Artificial Sequence
  LRRK2 RNA guide
aagaacuacaugucacaguau

SEQ ID NO: 61935 - RNA, 21 nt, Artificial Sequence
  LRRK2 RNA guide
aauacugugacauguaguucu

SEQ ID NO: 61936 - RNA, 21 nt, Artificial Sequence
  LRRK2 RNA guide
acugugacauguaguucuuug

SEQ ID NO: 61937 - RNA, 21 nt, Artificial Sequence
  LRRK2 RNA guide
agaacuacaugucacaguauu

SEQ ID NO: 61938 - RNA, 21 nt, Artificial Sequence
  LRRK2 RNA guide
auacugugacauguaguucuu

SEQ ID NO: 61939 - RNA, 21 nt, Artificial Sequence
  LRRK2 RNA guide
auuuccaaagaacuacauguc

SEQ ID NO: 61940 - RNA, 21 nt, Artificial Sequence
  LRRK2 RNA guide
caaagaacuacaugucacagu

SEQ ID NO: 61941 - RNA, 21 nt, Artificial Sequence
  LRRK2 RNA guide
ccaaagaacuacaugucacag

SEQ ID NO: 61942 - RNA, 21 nt, Artificial Sequence
  LRRK2 RNA guide
cugugacauguaguucuuugg

SEQ ID NO: 61943 - RNA, 21 nt, Artificial Sequence
  LRRK2 RNA guide
gaacuacaugucacaguauuu

SEQ ID NO: 61944 - RNA, 21 nt, Artificial Sequence
  LRRK2 RNA guide
gacauguaguucuuuggaaau

SEQ ID NO: 61945 - RNA, 21 nt, Artificial Sequence
  LRRK2 RNA guide
gugacauguaguucuuuggaa

SEQ ID NO: 61946 - RNA, 21 nt, Artificial Sequence
  LRRK2 RNA guide
uacugugacauguaguucuuu

SEQ ID NO: 61947 - RNA, 21 nt, Artificial Sequence
  LRRK2 RNA guide
uccaaagaacuacaugucaca

SEQ ID NO: 61948 - RNA, 21 nt, Artificial Sequence
  LRRK2 RNA guide
ugacauguaguucuuuggaaa

SEQ ID NO: 61949 - RNA, 21 nt, Artificial Sequence
  LRRK2 RNA guide
ugugacauguaguucuuugga

SEQ ID NO: 61950 - RNA, 21 nt, Artificial Sequence
  LRRK2 RNA guide
uuccaaagaacuacaugucac

SEQ ID NO: 61951 - RNA, 21 nt, Artificial Sequence
  LRRK2 RNA guide
uuuccaaagaacuacauguca

SEQ ID NO: 61952 - RNA, 22 nt, Artificial Sequence
  LRRK2 RNA guide
aaaauacugugacauguaguuc

SEQ ID NO: 61953 - RNA, 22 nt, Artificial Sequence
  LRRK2 RNA guide
aaagaacuacaugucacaguau

SEQ ID NO: 61954 - RNA, 22 nt, Artificial Sequence
  LRRK2 RNA guide
aaauacugugacauguaguucu

SEQ ID NO: 61955 - RNA, 22 nt, Artificial Sequence
  LRRK2 RNA guide
aagaacuacaugucacaguauu

SEQ ID NO: 61956 - RNA, 22 nt, Artificial Sequence
  LRRK2 RNA guide
aauacugugacauguaguucuu

SEQ ID NO: 61957 - RNA, 22 nt, Artificial Sequence
  LRRK2 RNA guide
aauuuccaaagaacuacauguc

SEQ ID NO: 61958 - RNA, 22 nt, Artificial Sequence
  LRRK2 RNA guide
acugugacauguaguucuuugg

SEQ ID NO: 61959 - RNA, 22 nt, Artificial Sequence
  LRRK2 RNA guide
agaacuacaugucacaguauuu

SEQ ID NO: 61960 - RNA, 22 nt, Artificial Sequence
  LRRK2 RNA guide
auacugugacauguaguucuuu

SEQ ID NO: 61961 - RNA, 22 nt, Artificial Sequence
  LRRK2 RNA guide
auuuccaaagaacuacauguca

SEQ ID NO: 61962 - RNA, 22 nt, Artificial Sequence
  LRRK2 RNA guide
caaagaacuacaugucacagua

SEQ ID NO: 61963 - RNA, 22 nt, Artificial Sequence
  LRRK2 RNA guide
ccaaagaacuacaugucacagu

SEQ ID NO: 61964 - RNA, 22 nt, Artificial Sequence
  LRRK2 RNA guide
cuacaugucacaguauuuuaag

SEQ ID NO: 61965 - RNA, 22 nt, Artificial Sequence
  LRRK2 RNA guide
cugugacauguaguucuuugga

SEQ ID NO: 61966 - RNA, 22 nt, Artificial Sequence
  LRRK2 RNA guide
gaaauuuccaaagaacuacaug

SEQ ID NO: 61967 - RNA, 22 nt, Artificial Sequence
  LRRK2 RNA guide
gaacuacaugucacaguauuuu

SEQ ID NO: 61968 - RNA, 22 nt, Artificial Sequence
  LRRK2 RNA guide
gacauguaguucuuuggaaauu

SEQ ID NO: 61969 - RNA, 22 nt, Artificial Sequence
  LRRK2 RNA guide
ggaaauuuccaaagaacuacau

SEQ ID NO: 61970 - RNA, 22 nt, Artificial Sequence
  LRRK2 RNA guide
gucacaguauuuuaagcuccua

SEQ ID NO: 61971 - RNA, 22 nt, Artificial Sequence
  LRRK2 RNA guide
gugacauguaguucuuuggaaa

SEQ ID NO: 61972 - RNA, 22 nt, Artificial Sequence
  LRRK2 RNA guide
uacugugacauguaguucuuug

SEQ ID NO: 61973 - RNA, 22 nt, Artificial Sequence
  LRRK2 RNA guide
uccaaagaacuacaugucacag

SEQ ID NO: 61974 - RNA, 22 nt, Artificial Sequence
  LRRK2 RNA guide
ugacauguaguucuuuggaaau

SEQ ID NO: 61975 - RNA, 22 nt, Artificial Sequence
  LRRK2 RNA guide
ugugacauguaguucuuuggaa

SEQ ID NO: 61976 - RNA, 22 nt, Artificial Sequence
  LRRK2 RNA guide
uuccaaagaacuacaugucaca

SEQ ID NO: 61977 - RNA, 22 nt, Artificial Sequence
  LRRK2 RNA guide
uuuccaaagaacuacaugucac

SEQ ID NO: 61978 - RNA, 20 nt, Artificial Sequence
  LRRK2 RNA guide
aaaauacugugucauguagu

SEQ ID NO: 61979 - RNA, 20 nt, Artificial Sequence
  LRRK2 RNA guide
aaagaacuacaugacacagu

SEQ ID NO: 61980 - RNA, 20 nt, Artificial Sequence
  LRRK2 RNA guide
aaauacugugucauguaguu

SEQ ID NO: 61981 - RNA, 20 nt, Artificial Sequence
  LRRK2 RNA guide
aacuacaugacacaguauuu

SEQ ID NO: 61982 - RNA, 20 nt, Artificial Sequence
  LRRK2 RNA guide
aagaacuacaugacacagua

SEQ ID NO: 61983 - RNA, 20 nt, Artificial Sequence
  LRRK2 RNA guide
aauacugugucauguaguuc

SEQ ID NO: 61984 - RNA, 20 nt, Artificial Sequence
  LRRK2 RNA guide
acaugacacaguauuuuaag

SEQ ID NO: 61985 - RNA, 20 nt, Artificial Sequence
  LRRK2 RNA guide
acuacaugacacaguauuuu

SEQ ID NO: 61986 - RNA, 20 nt, Artificial Sequence
  LRRK2 RNA guide
acugugucauguaguucuuu

SEQ ID NO: 61987 - RNA, 20 nt, Artificial Sequence
  LRRK2 RNA guide
agaacuacaugacacaguau

SEQ ID NO: 61988 - RNA, 20 nt, Artificial Sequence
  LRRK2 RNA guide
agcuuaaaauacugugucau

SEQ ID NO: 61989 - RNA, 20 nt, Artificial Sequence
  LRRK2 RNA guide
aggagcuuaaaauacugugu

SEQ ID NO: 61990 - RNA, 20 nt, Artificial Sequence
  LRRK2 RNA guide
auacugugucauguaguucu

SEQ ID NO: 61991 - RNA, 20 nt, Artificial Sequence
  LRRK2 RNA guide
augacacaguauuuuaagcu

SEQ ID NO: 61992 - RNA, 20 nt, Artificial Sequence
  LRRK2 RNA guide
auuuccaaagaacuacauga

SEQ ID NO: 61993 - RNA, 20 nt, Artificial Sequence
  LRRK2 RNA guide
caaagaacuacaugacacag

SEQ ID NO: 61994 - RNA, 20 nt, Artificial Sequence
  LRRK2 RNA guide
caugacacaguauuuuaagc

SEQ ID NO: 61995 - RNA, 20 nt, Artificial Sequence
  LRRK2 RNA guide
ccaaagaacuacaugacaca

SEQ ID NO: 61996 - RNA, 20 nt, Artificial Sequence
  LRRK2 RNA guide
cuacaugacacaguauuuua

SEQ ID NO: 61997 - RNA, 20 nt, Artificial Sequence
  LRRK2 RNA guide
cugugucauguaguucuuug

SEQ ID NO: 61998 - RNA, 20 nt, Artificial Sequence
  LRRK2 RNA guide
cuuaaaauacugugucaugu

SEQ ID NO: 61999 - RNA, 20 nt, Artificial Sequence
  LRRK2 RNA guide
gaacuacaugacacaguauu

SEQ ID NO: 62000 - RNA, 20 nt, Artificial Sequence
  LRRK2 RNA guide
gacacaguauuuuaagcucc

SEQ ID NO: 62001 - RNA, 20 nt, Artificial Sequence
  LRRK2 RNA guide
gagcuuaaaauacuguguca

SEQ ID NO: 62002 - RNA, 20 nt, Artificial Sequence
  LRRK2 RNA guide
gcuuaaaauacugugucaug

SEQ ID NO: 62003 - RNA, 20 nt, Artificial Sequence
  LRRK2 RNA guide
ggagcuuaaaauacuguguc

SEQ ID NO: 62004 - RNA, 20 nt, Artificial Sequence
  LRRK2 RNA guide
gucauguaguucuuuggaaa

SEQ ID NO: 62005 - RNA, 20 nt, Artificial Sequence
  LRRK2 RNA guide
gugucauguaguucuuugga

SEQ ID NO: 62006 - RNA, 20 nt, Artificial Sequence
  LRRK2 RNA guide
uaaaauacugugucauguag

SEQ ID NO: 62007 - RNA, 20 nt, Artificial Sequence
  LRRK2 RNA guide
uacugugucauguaguucuu

SEQ ID NO: 62008 - RNA, 20 nt, Artificial Sequence
  LRRK2 RNA guide
uccaaagaacuacaugacac

SEQ ID NO: 62009 - RNA, 20 nt, Artificial Sequence
  LRRK2 RNA guide
ugacacaguauuuuaagcuc

SEQ ID NO: 62010 - RNA, 20 nt, Artificial Sequence
  LRRK2 RNA guide
ugucauguaguucuuuggaa

SEQ ID NO: 62011 - RNA, 20 nt, Artificial Sequence
  LRRK2 RNA guide
ugugucauguaguucuuugg

SEQ ID NO: 62012 - RNA, 20 nt, Artificial Sequence
  LRRK2 RNA guide
uuccaaagaacuacaugaca

SEQ ID NO: 62013 - RNA, 20 nt, Artificial Sequence
  LRRK2 RNA guide
uuuccaaagaacuacaugac

SEQ ID NO: 62014 - RNA, 21 nt, Artificial Sequence
  LRRK2 RNA guide
aaagaacuacaugacacagua

SEQ ID NO: 62015 - RNA, 21 nt, Artificial Sequence
  LRRK2 RNA guide
aaauacugugucauguaguuc

SEQ ID NO: 62016 - RNA, 21 nt, Artificial Sequence
  LRRK2 RNA guide
aagaacuacaugacacaguau

SEQ ID NO: 62017 - RNA, 21 nt, Artificial Sequence
  LRRK2 RNA guide
aauacugugucauguaguucu

SEQ ID NO: 62018 - RNA, 21 nt, Artificial Sequence
  LRRK2 RNA guide
acaugacacaguauuuuaagc

SEQ ID NO: 62019 - RNA, 21 nt, Artificial Sequence
  LRRK2 RNA guide
acugugucauguaguucuuug

SEQ ID NO: 62020 - RNA, 21 nt, Artificial Sequence
  LRRK2 RNA guide
agaacuacaugacacaguauu

SEQ ID NO: 62021 - RNA, 21 nt, Artificial Sequence
  LRRK2 RNA guide
agcuuaaaauacugugucaug

SEQ ID NO: 62022 - RNA, 21 nt, Artificial Sequence
  LRRK2 RNA guide
aggagcuuaaaauacuguguc

SEQ ID NO: 62023 - RNA, 21 nt, Artificial Sequence
  LRRK2 RNA guide
auacugugucauguaguucuu

SEQ ID NO: 62024 - RNA, 21 nt, Artificial Sequence
  LRRK2 RNA guide
augacacaguauuuuaagcuc

SEQ ID NO: 62025 - RNA, 21 nt, Artificial Sequence
  LRRK2 RNA guide
auuuccaaagaacuacaugac

SEQ ID NO: 62026 - RNA, 21 nt, Artificial Sequence
  LRRK2 RNA guide
caaagaacuacaugacacagu

SEQ ID NO: 62027 - RNA, 21 nt, Artificial Sequence
  LRRK2 RNA guide
caugacacaguauuuuaagcu

SEQ ID NO: 62028 - RNA, 21 nt, Artificial Sequence
  LRRK2 RNA guide
ccaaagaacuacaugacacag

SEQ ID NO: 62029 - RNA, 21 nt, Artificial Sequence
  LRRK2 RNA guide
cugugucauguaguucuuugg

SEQ ID NO: 62030 - RNA, 21 nt, Artificial Sequence
  LRRK2 RNA guide
gaacuacaugacacaguauuu

SEQ ID NO: 62031 - RNA, 21 nt, Artificial Sequence
  LRRK2 RNA guide
gacacaguauuuuaagcuccu

SEQ ID NO: 62032 - RNA, 21 nt, Artificial Sequence
  LRRK2 RNA guide
gagcuuaaaauacugugucau

SEQ ID NO: 62033 - RNA, 21 nt, Artificial Sequence
  LRRK2 RNA guide
gcuuaaaauacugugucaugu

SEQ ID NO: 62034 - RNA, 21 nt, Artificial Sequence
  LRRK2 RNA guide
ggagcuuaaaauacuguguca

SEQ ID NO: 62035 - RNA, 21 nt, Artificial Sequence
  LRRK2 RNA guide
gucauguaguucuuuggaaau

SEQ ID NO: 62036 - RNA, 21 nt, Artificial Sequence
  LRRK2 RNA guide
gugucauguaguucuuuggaa

SEQ ID NO: 62037 - RNA, 21 nt, Artificial Sequence
  LRRK2 RNA guide
uacugugucauguaguucuuu

SEQ ID NO: 62038 - RNA, 21 nt, Artificial Sequence
  LRRK2 RNA guide
uaggagcuuaaaauacugugu

SEQ ID NO: 62039 - RNA, 21 nt, Artificial Sequence
  LRRK2 RNA guide
uccaaagaacuacaugacaca

SEQ ID NO: 62040 - RNA, 21 nt, Artificial Sequence
  LRRK2 RNA guide
ugacacaguauuuuaagcucc

SEQ ID NO: 62041 - RNA, 21 nt, Artificial Sequence
  LRRK2 RNA guide
ugucauguaguucuuuggaaa

SEQ ID NO: 62042 - RNA, 21 nt, Artificial Sequence
  LRRK2 RNA guide
ugugucauguaguucuuugga

SEQ ID NO: 62043 - RNA, 21 nt, Artificial Sequence
  LRRK2 RNA guide
uuccaaagaacuacaugacac

SEQ ID NO: 62044 - RNA, 21 nt, Artificial Sequence
  LRRK2 RNA guide
uuuccaaagaacuacaugaca

SEQ ID NO: 62045 - RNA, 22 nt, Artificial Sequence
  LRRK2 RNA guide
aaaauacugugucauguaguuc

SEQ ID NO: 62046 - RNA, 22 nt, Artificial Sequence
  LRRK2 RNA guide
aaagaacuacaugacacaguau

SEQ ID NO: 62047 - RNA, 22 nt, Artificial Sequence
  LRRK2 RNA guide
aaauacugugucauguaguucu

SEQ ID NO: 62048 - RNA, 22 nt, Artificial Sequence
  LRRK2 RNA guide
aagaacuacaugacacaguauu

SEQ ID NO: 62049 - RNA, 22 nt, Artificial Sequence
  LRRK2 RNA guide
aauacugugucauguaguucuu

SEQ ID NO: 62050 - RNA, 22 nt, Artificial Sequence
  LRRK2 RNA guide
aauuuccaaagaacuacaugac

SEQ ID NO: 62051 - RNA, 22 nt, Artificial Sequence
  LRRK2 RNA guide
acaugacacaguauuuuaagcu

SEQ ID NO: 62052 - RNA, 22 nt, Artificial Sequence
  LRRK2 RNA guide
acugugucauguaguucuuugg

SEQ ID NO: 62053 - RNA, 22 nt, Artificial Sequence
  LRRK2 RNA guide
agaacuacaugacacaguauuu

SEQ ID NO: 62054 - RNA, 22 nt, Artificial Sequence
  LRRK2 RNA guide
agcuuaaaauacugugucaugu

SEQ ID NO: 62055 - RNA, 22 nt, Artificial Sequence
  LRRK2 RNA guide
aggagcuuaaaauacuguguca

SEQ ID NO: 62056 - RNA, 22 nt, Artificial Sequence
  LRRK2 RNA guide
auacugugucauguaguucuuu

SEQ ID NO: 62057 - RNA, 22 nt, Artificial Sequence
  LRRK2 RNA guide
augacacaguauuuuaagcucc

SEQ ID NO: 62058 - RNA, 22 nt, Artificial Sequence
  LRRK2 RNA guide
auuuccaaagaacuacaugaca

SEQ ID NO: 62059 - RNA, 22 nt, Artificial Sequence
  LRRK2 RNA guide
caaagaacuacaugacacagua

SEQ ID NO: 62060 - RNA, 22 nt, Artificial Sequence
  LRRK2 RNA guide
caugacacaguauuuuaagcuc

SEQ ID NO: 62061 - RNA, 22 nt, Artificial Sequence
  LRRK2 RNA guide
ccaaagaacuacaugacacagu

SEQ ID NO: 62062 - RNA, 22 nt, Artificial Sequence
  LRRK2 RNA guide
cuacaugacacaguauuuuaag

SEQ ID NO: 62063 - RNA, 22 nt, Artificial Sequence
  LRRK2 RNA guide
cuaggagcuuaaaauacugugu

SEQ ID NO: 62064 - RNA, 22 nt, Artificial Sequence
  LRRK2 RNA guide
cugugucauguaguucuuugga

SEQ ID NO: 62065 - RNA, 22 nt, Artificial Sequence
  LRRK2 RNA guide
cuuaaaauacugugucauguag

SEQ ID NO: 62066 - RNA, 22 nt, Artificial Sequence
  LRRK2 RNA guide
gaacuacaugacacaguauuuu

SEQ ID NO: 62067 - RNA, 22 nt, Artificial Sequence
  LRRK2 RNA guide
gacacaguauuuuaagcuccua

SEQ ID NO: 62068 - RNA, 22 nt, Artificial Sequence
  LRRK2 RNA guide
gagcuuaaaauacugugucaug

SEQ ID NO: 62069 - RNA, 22 nt, Artificial Sequence
  LRRK2 RNA guide
gcuuaaaauacugugucaugua

SEQ ID NO: 62070 - RNA, 22 nt, Artificial Sequence
  LRRK2 RNA guide
ggagcuuaaaauacugugucau

SEQ ID NO: 62071 - RNA, 22 nt, Artificial Sequence
  LRRK2 RNA guide
gucauguaguucuuuggaaauu

SEQ ID NO: 62072 - RNA, 22 nt, Artificial Sequence
  LRRK2 RNA guide
gugucauguaguucuuuggaaa

SEQ ID NO: 62073 - RNA, 22 nt, Artificial Sequence
  LRRK2 RNA guide
uacaugacacaguauuuuaagc

SEQ ID NO: 62074 - RNA, 22 nt, Artificial Sequence
  LRRK2 RNA guide
uacugugucauguaguucuuug

SEQ ID NO: 62075 - RNA, 22 nt, Artificial Sequence
  LRRK2 RNA guide
uaggagcuuaaaauacuguguc

SEQ ID NO: 62076 - RNA, 22 nt, Artificial Sequence
  LRRK2 RNA guide
uccaaagaacuacaugacacag

SEQ ID NO: 62077 - RNA, 22 nt, Artificial Sequence
  LRRK2 RNA guide
ugacacaguauuuuaagcuccu

SEQ ID NO: 62078 - RNA, 22 nt, Artificial Sequence
  LRRK2 RNA guide
ugucauguaguucuuuggaaau

SEQ ID NO: 62079 - RNA, 22 nt, Artificial Sequence
  LRRK2 RNA guide
ugugucauguaguucuuuggaa

SEQ ID NO: 62080 - RNA, 22 nt, Artificial Sequence
  LRRK2 RNA guide
uuccaaagaacuacaugacaca

SEQ ID NO: 62081 - RNA, 22 nt, Artificial Sequence
  LRRK2 RNA guide
uuuccaaagaacuacaugacac

SEQ ID NO: 62082 - RNA, 20 nt, Artificial Sequence
  LRRK2 RNA guide
aauugcuacauggaaauuca

SEQ ID NO: 62083 - RNA, 20 nt, Artificial Sequence
  LRRK2 RNA guide
acauggaaauucacuaucua

SEQ ID NO: 62084 - RNA, 20 nt, Artificial Sequence
  LRRK2 RNA guide
agaauagauagugaauuucc

SEQ ID NO: 62085 - RNA, 20 nt, Artificial Sequence
  LRRK2 RNA guide
agauagugaauuuccaugua

SEQ ID NO: 62086 - RNA, 20 nt, Artificial Sequence
  LRRK2 RNA guide
agugaauuuccauguagcaa

SEQ ID NO: 62087 - RNA, 20 nt, Artificial Sequence
  LRRK2 RNA guide
auagauagugaauuuccaug

SEQ ID NO: 62088 - RNA, 20 nt, Artificial Sequence
  LRRK2 RNA guide
auagugaauuuccauguagc

SEQ ID NO: 62089 - RNA, 20 nt, Artificial Sequence
  LRRK2 RNA guide
auugcuacauggaaauucac

SEQ ID NO: 62090 - RNA, 20 nt, Artificial Sequence
  LRRK2 RNA guide
cauggaaauucacuaucuau

SEQ ID NO: 62091 - RNA, 20 nt, Artificial Sequence
  LRRK2 RNA guide
cuacauggaaauucacuauc

SEQ ID NO: 62092 - RNA, 20 nt, Artificial Sequence
  LRRK2 RNA guide
gaauagauagugaauuucca

SEQ ID NO: 62093 - RNA, 20 nt, Artificial Sequence
  LRRK2 RNA guide
gaauuuccauguagcaauua

SEQ ID NO: 62094 - RNA, 20 nt, Artificial Sequence
  LRRK2 RNA guide
gauagugaauuuccauguag

SEQ ID NO: 62095 - RNA, 20 nt, Artificial Sequence
  LRRK2 RNA guide
gcuacauggaaauucacuau

SEQ ID NO: 62096 - RNA, 20 nt, Artificial Sequence
  LRRK2 RNA guide
gugaauuuccauguagcaau

SEQ ID NO: 62097 - RNA, 20 nt, Artificial Sequence
  LRRK2 RNA guide
uaauugcuacauggaaauuc

SEQ ID NO: 62098 - RNA, 20 nt, Artificial Sequence
  LRRK2 RNA guide
uacauggaaauucacuaucu

SEQ ID NO: 62099 - RNA, 20 nt, Artificial Sequence
  LRRK2 RNA guide
uagauagugaauuuccaugu

SEQ ID NO: 62100 - RNA, 20 nt, Artificial Sequence
  LRRK2 RNA guide
uagugaauuuccauguagca

SEQ ID NO: 62101 - RNA, 20 nt, Artificial Sequence
  LRRK2 RNA guide
ugaauuuccauguagcaauu

SEQ ID NO: 62102 - RNA, 20 nt, Artificial Sequence
  LRRK2 RNA guide
ugcuacauggaaauucacua

SEQ ID NO: 62103 - RNA, 20 nt, Artificial Sequence
  LRRK2 RNA guide
uugcuacauggaaauucacu

SEQ ID NO: 62104 - RNA, 21 nt, Artificial Sequence
  LRRK2 RNA guide
aauugcuacauggaaauucac

SEQ ID NO: 62105 - RNA, 21 nt, Artificial Sequence
  LRRK2 RNA guide
agauagugaauuuccauguag

SEQ ID NO: 62106 - RNA, 21 nt, Artificial Sequence
  LRRK2 RNA guide
agugaauuuccauguagcaau

SEQ ID NO: 62107 - RNA, 21 nt, Artificial Sequence
  LRRK2 RNA guide
auagugaauuuccauguagca

SEQ ID NO: 62108 - RNA, 21 nt, Artificial Sequence
  LRRK2 RNA guide
auugcuacauggaaauucacu

SEQ ID NO: 62109 - RNA, 21 nt, Artificial Sequence
  LRRK2 RNA guide
cuacauggaaauucacuaucu

SEQ ID NO: 62110 - RNA, 21 nt, Artificial Sequence
  LRRK2 RNA guide
gauagugaauuuccauguagc

SEQ ID NO: 62111 - RNA, 21 nt, Artificial Sequence
  LRRK2 RNA guide
gcuacauggaaauucacuauc

SEQ ID NO: 62112 - RNA, 21 nt, Artificial Sequence
  LRRK2 RNA guide
gugaauuuccauguagcaauu

SEQ ID NO: 62113 - RNA, 21 nt, Artificial Sequence
  LRRK2 RNA guide
uagugaauuuccauguagcaa

SEQ ID NO: 62114 - RNA, 21 nt, Artificial Sequence
  LRRK2 RNA guide
ugcuacauggaaauucacuau

SEQ ID NO: 62115 - RNA, 21 nt, Artificial Sequence
  LRRK2 RNA guide
uugcuacauggaaauucacua

SEQ ID NO: 62116 - RNA, 22 nt, Artificial Sequence
  LRRK2 RNA guide
aauugcuacauggaaauucacu

SEQ ID NO: 62117 - RNA, 22 nt, Artificial Sequence
  LRRK2 RNA guide
agauagugaauuuccauguagc

SEQ ID NO: 62118 - RNA, 22 nt, Artificial Sequence
  LRRK2 RNA guide
agugaauuuccauguagcaauu

SEQ ID NO: 62119 - RNA, 22 nt, Artificial Sequence
  LRRK2 RNA guide
auagugaauuuccauguagcaa

SEQ ID NO: 62120 - RNA, 22 nt, Artificial Sequence
  LRRK2 RNA guide
auugcuacauggaaauucacua

SEQ ID NO: 62121 - RNA, 22 nt, Artificial Sequence
  LRRK2 RNA guide
cauggaaauucacuaucuauuc

SEQ ID NO: 62122 - RNA, 22 nt, Artificial Sequence
  LRRK2 RNA guide
cuacauggaaauucacuaucua

SEQ ID NO: 62123 - RNA, 22 nt, Artificial Sequence
  LRRK2 RNA guide
gaauagauagugaauuuccaug

SEQ ID NO: 62124 - RNA, 22 nt, Artificial Sequence
  LRRK2 RNA guide
gauagugaauuuccauguagca

SEQ ID NO: 62125 - RNA, 22 nt, Artificial Sequence
  LRRK2 RNA guide
gcuacauggaaauucacuaucu

SEQ ID NO: 62126 - RNA, 22 nt, Artificial Sequence
  LRRK2 RNA guide
gugaauuuccauguagcaauua

SEQ ID NO: 62127 - RNA, 22 nt, Artificial Sequence
  LRRK2 RNA guide
uaauugcuacauggaaauucac

SEQ ID NO: 62128 - RNA, 22 nt, Artificial Sequence
  LRRK2 RNA guide
uagauagugaauuuccauguag

SEQ ID NO: 62129 - RNA, 22 nt, Artificial Sequence
  LRRK2 RNA guide
uagugaauuuccauguagcaau

SEQ ID NO: 62130 - RNA, 22 nt, Artificial Sequence
  LRRK2 RNA guide
ugcuacauggaaauucacuauc

SEQ ID NO: 62131 - RNA, 22 nt, Artificial Sequence
  LRRK2 RNA guide
uugcuacauggaaauucacuau

SEQ ID NO: 62132 - RNA, 20 nt, Artificial Sequence
  LRRK2 RNA guide
aaaaauuaauugcuacgugg

SEQ ID NO: 62133 - RNA, 20 nt, Artificial Sequence
  LRRK2 RNA guide
aaaauuaauugcuacgugga

SEQ ID NO: 62134 - RNA, 20 nt, Artificial Sequence
  LRRK2 RNA guide
aaauuaauugcuacguggaa

SEQ ID NO: 62135 - RNA, 20 nt, Artificial Sequence
  LRRK2 RNA guide
aauagauagugaauuuccac

SEQ ID NO: 62136 - RNA, 20 nt, Artificial Sequence
  LRRK2 RNA guide
aauuaauugcuacguggaaa

SEQ ID NO: 62137 - RNA, 20 nt, Artificial Sequence
  LRRK2 RNA guide
aauugcuacguggaaauuca

SEQ ID NO: 62138 - RNA, 20 nt, Artificial Sequence
  LRRK2 RNA guide
aauuuccacguagcaauuaa

SEQ ID NO: 62139 - RNA, 20 nt, Artificial Sequence
  LRRK2 RNA guide
acguggaaauucacuaucua

SEQ ID NO: 62140 - RNA, 20 nt, Artificial Sequence
  LRRK2 RNA guide
agauagugaauuuccacgua

SEQ ID NO: 62141 - RNA, 20 nt, Artificial Sequence
  LRRK2 RNA guide
agugaauuuccacguagcaa

SEQ ID NO: 62142 - RNA, 20 nt, Artificial Sequence
  LRRK2 RNA guide
auagauagugaauuuccacg

SEQ ID NO: 62143 - RNA, 20 nt, Artificial Sequence
  LRRK2 RNA guide
auagugaauuuccacguagc

SEQ ID NO: 62144 - RNA, 20 nt, Artificial Sequence
  LRRK2 RNA guide
auuaauugcuacguggaaau

SEQ ID NO: 62145 - RNA, 20 nt, Artificial Sequence
  LRRK2 RNA guide
auugcuacguggaaauucac

SEQ ID NO: 62146 - RNA, 20 nt, Artificial Sequence
  LRRK2 RNA guide
auuuccacguagcaauuaau

SEQ ID NO: 62147 - RNA, 20 nt, Artificial Sequence
  LRRK2 RNA guide
ccacguagcaauuaauuuuu

SEQ ID NO: 62148 - RNA, 20 nt, Artificial Sequence
  LRRK2 RNA guide
cguggaaauucacuaucuau

SEQ ID NO: 62149 - RNA, 20 nt, Artificial Sequence
  LRRK2 RNA guide
cuacguggaaauucacuauc

SEQ ID NO: 62150 - RNA, 20 nt, Artificial Sequence
  LRRK2 RNA guide
gaauuuccacguagcaauua

SEQ ID NO: 62151 - RNA, 20 nt, Artificial Sequence
  LRRK2 RNA guide
gauagugaauuuccacguag

SEQ ID NO: 62152 - RNA, 20 nt, Artificial Sequence
  LRRK2 RNA guide
gcuacguggaaauucacuau

SEQ ID NO: 62153 - RNA, 20 nt, Artificial Sequence
  LRRK2 RNA guide
gugaauuuccacguagcaau

SEQ ID NO: 62154 - RNA, 20 nt, Artificial Sequence
  LRRK2 RNA guide
uaauugcuacguggaaauuc

SEQ ID NO: 62155 - RNA, 20 nt, Artificial Sequence
  LRRK2 RNA guide
uacguggaaauucacuaucu

SEQ ID NO: 62156 - RNA, 20 nt, Artificial Sequence
  LRRK2 RNA guide
uagauagugaauuuccacgu

SEQ ID NO: 62157 - RNA, 20 nt, Artificial Sequence
  LRRK2 RNA guide
uagugaauuuccacguagca

SEQ ID NO: 62158 - RNA, 20 nt, Artificial Sequence
  LRRK2 RNA guide
uccacguagcaauuaauuuu

SEQ ID NO: 62159 - RNA, 20 nt, Artificial Sequence
  LRRK2 RNA guide
ugaauuuccacguagcaauu

SEQ ID NO: 62160 - RNA, 20 nt, Artificial Sequence
  LRRK2 RNA guide
ugcuacguggaaauucacua

SEQ ID NO: 62161 - RNA, 20 nt, Artificial Sequence
  LRRK2 RNA guide
uuaauugcuacguggaaauu

SEQ ID NO: 62162 - RNA, 20 nt, Artificial Sequence
  LRRK2 RNA guide
uuccacguagcaauuaauuu

SEQ ID NO: 62163 - RNA, 20 nt, Artificial Sequence
  LRRK2 RNA guide
uugcuacguggaaauucacu

SEQ ID NO: 62164 - RNA, 20 nt, Artificial Sequence
  LRRK2 RNA guide
uuuccacguagcaauuaauu

SEQ ID NO: 62165 - RNA, 21 nt, Artificial Sequence
  LRRK2 RNA guide
aauagauagugaauuuccacg

SEQ ID NO: 62166 - RNA, 21 nt, Artificial Sequence
  LRRK2 RNA guide
aauugcuacguggaaauucac

SEQ ID NO: 62167 - RNA, 21 nt, Artificial Sequence
  LRRK2 RNA guide
acguggaaauucacuaucuau

SEQ ID NO: 62168 - RNA, 21 nt, Artificial Sequence
  LRRK2 RNA guide
agauagugaauuuccacguag

SEQ ID NO: 62169 - RNA, 21 nt, Artificial Sequence
  LRRK2 RNA guide
agugaauuuccacguagcaau

SEQ ID NO: 62170 - RNA, 21 nt, Artificial Sequence
  LRRK2 RNA guide
auagauagugaauuuccacgu

SEQ ID NO: 62171 - RNA, 21 nt, Artificial Sequence
  LRRK2 RNA guide
auagugaauuuccacguagca

SEQ ID NO: 62172 - RNA, 21 nt, Artificial Sequence
  LRRK2 RNA guide
auugcuacguggaaauucacu

SEQ ID NO: 62173 - RNA, 21 nt, Artificial Sequence
  LRRK2 RNA guide
cguggaaauucacuaucuauu

SEQ ID NO: 62174 - RNA, 21 nt, Artificial Sequence
  LRRK2 RNA guide
cuacguggaaauucacuaucu

SEQ ID NO: 62175 - RNA, 21 nt, Artificial Sequence
  LRRK2 RNA guide
gaauagauagugaauuuccac

SEQ ID NO: 62176 - RNA, 21 nt, Artificial Sequence
  LRRK2 RNA guide
gaauuuccacguagcaauuaa

SEQ ID NO: 62177 - RNA, 21 nt, Artificial Sequence
  LRRK2 RNA guide
gauagugaauuuccacguagc

SEQ ID NO: 62178 - RNA, 21 nt, Artificial Sequence
  LRRK2 RNA guide
gcuacguggaaauucacuauc

SEQ ID NO: 62179 - RNA, 21 nt, Artificial Sequence
  LRRK2 RNA guide
gugaauuuccacguagcaauu

SEQ ID NO: 62180 - RNA, 21 nt, Artificial Sequence
  LRRK2 RNA guide
uaauugcuacguggaaauuca

SEQ ID NO: 62181 - RNA, 21 nt, Artificial Sequence
  LRRK2 RNA guide
uacguggaaauucacuaucua

SEQ ID NO: 62182 - RNA, 21 nt, Artificial Sequence
  LRRK2 RNA guide
uagauagugaauuuccacgua

SEQ ID NO: 62183 - RNA, 21 nt, Artificial Sequence
  LRRK2 RNA guide
uagugaauuuccacguagcaa

SEQ ID NO: 62184 - RNA, 21 nt, Artificial Sequence
  LRRK2 RNA guide
ugaauuuccacguagcaauua

SEQ ID NO: 62185 - RNA, 21 nt, Artificial Sequence
  LRRK2 RNA guide
ugcuacguggaaauucacuau

SEQ ID NO: 62186 - RNA, 21 nt, Artificial Sequence
  LRRK2 RNA guide
uuaauugcuacguggaaauuc

SEQ ID NO: 62187 - RNA, 21 nt, Artificial Sequence
  LRRK2 RNA guide
uugcuacguggaaauucacua

SEQ ID NO: 62188 - RNA, 22 nt, Artificial Sequence
  LRRK2 RNA guide
aauagauagugaauuuccacgu

SEQ ID NO: 62189 - RNA, 22 nt, Artificial Sequence
  LRRK2 RNA guide
aauugcuacguggaaauucacu

SEQ ID NO: 62190 - RNA, 22 nt, Artificial Sequence
  LRRK2 RNA guide
acguggaaauucacuaucuauu

SEQ ID NO: 62191 - RNA, 22 nt, Artificial Sequence
  LRRK2 RNA guide
agaauagauagugaauuuccac

SEQ ID NO: 62192 - RNA, 22 nt, Artificial Sequence
  LRRK2 RNA guide
agauagugaauuuccacguagc

SEQ ID NO: 62193 - RNA, 22 nt, Artificial Sequence
  LRRK2 RNA guide
agugaauuuccacguagcaauu

SEQ ID NO: 62194 - RNA, 22 nt, Artificial Sequence
  LRRK2 RNA guide
auagauagugaauuuccacgua

SEQ ID NO: 62195 - RNA, 22 nt, Artificial Sequence
  LRRK2 RNA guide
auagugaauuuccacguagcaa

SEQ ID NO: 62196 - RNA, 22 nt, Artificial Sequence
  LRRK2 RNA guide
auuaauugcuacguggaaauuc

SEQ ID NO: 62197 - RNA, 22 nt, Artificial Sequence
  LRRK2 RNA guide
auugcuacguggaaauucacua

SEQ ID NO: 62198 - RNA, 22 nt, Artificial Sequence
  LRRK2 RNA guide
cguggaaauucacuaucuauuc

SEQ ID NO: 62199 - RNA, 22 nt, Artificial Sequence
  LRRK2 RNA guide
cuacguggaaauucacuaucua

SEQ ID NO: 62200 - RNA, 22 nt, Artificial Sequence
  LRRK2 RNA guide
gaauagauagugaauuuccacg

SEQ ID NO: 62201 - RNA, 22 nt, Artificial Sequence
  LRRK2 RNA guide
gaauuuccacguagcaauuaau

SEQ ID NO: 62202 - RNA, 22 nt, Artificial Sequence
  LRRK2 RNA guide
gauagugaauuuccacguagca

SEQ ID NO: 62203 - RNA, 22 nt, Artificial Sequence
  LRRK2 RNA guide
gcuacguggaaauucacuaucu

SEQ ID NO: 62204 - RNA, 22 nt, Artificial Sequence
  LRRK2 RNA guide
gugaauuuccacguagcaauua

SEQ ID NO: 62205 - RNA, 22 nt, Artificial Sequence
  LRRK2 RNA guide
uaauugcuacguggaaauucac

SEQ ID NO: 62206 - RNA, 22 nt, Artificial Sequence
  LRRK2 RNA guide
uacguggaaauucacuaucuau

SEQ ID NO: 62207 - RNA, 22 nt, Artificial Sequence
  LRRK2 RNA guide
uagauagugaauuuccacguag

SEQ ID NO: 62208 - RNA, 22 nt, Artificial Sequence
  LRRK2 RNA guide
uagugaauuuccacguagcaau

SEQ ID NO: 62209 - RNA, 22 nt, Artificial Sequence
  LRRK2 RNA guide
ugaauuuccacguagcaauuaa

SEQ ID NO: 62210 - RNA, 22 nt, Artificial Sequence
  LRRK2 RNA guide
ugcuacguggaaauucacuauc

SEQ ID NO: 62211 - RNA, 22 nt, Artificial Sequence
  LRRK2 RNA guide
uuaauugcuacguggaaauuca

SEQ ID NO: 62212 - RNA, 22 nt, Artificial Sequence
  LRRK2 RNA guide
uugcuacguggaaauucacuau

SEQ ID NO: 62213 - RNA, 20 nt, Artificial Sequence
  LRRK2 RNA guide
aagccaacuaguaacuauac

SEQ ID NO: 62214 - RNA, 20 nt, Artificial Sequence
  LRRK2 RNA guide
agccaacuaguaacuauaca

SEQ ID NO: 62215 - RNA, 20 nt, Artificial Sequence
  LRRK2 RNA guide
auaagccaacuaguaacuau

SEQ ID NO: 62216 - RNA, 20 nt, Artificial Sequence
  LRRK2 RNA guide
auguguauaguuacuaguug

SEQ ID NO: 62217 - RNA, 20 nt, Artificial Sequence
  LRRK2 RNA guide
caacuaguaacuauacacau

SEQ ID NO: 62218 - RNA, 20 nt, Artificial Sequence
  LRRK2 RNA guide
cacuuacuuuauguguauag

SEQ ID NO: 62219 - RNA, 20 nt, Artificial Sequence
  LRRK2 RNA guide
ccaacuaguaacuauacaca

SEQ ID NO: 62220 - RNA, 20 nt, Artificial Sequence
  LRRK2 RNA guide
cuauacacauaaaguaagug

SEQ ID NO: 62221 - RNA, 20 nt, Artificial Sequence
  LRRK2 RNA guide
gauaagccaacuaguaacua

SEQ ID NO: 62222 - RNA, 20 nt, Artificial Sequence
  LRRK2 RNA guide
gccaacuaguaacuauacac

SEQ ID NO: 62223 - RNA, 20 nt, Artificial Sequence
  LRRK2 RNA guide
gugauaagccaacuaguaac

SEQ ID NO: 62224 - RNA, 20 nt, Artificial Sequence
  LRRK2 RNA guide
guguauaguuacuaguuggc

SEQ ID NO: 62225 - RNA, 20 nt, Artificial Sequence
  LRRK2 RNA guide
uaagccaacuaguaacuaua

SEQ ID NO: 62226 - RNA, 20 nt, Artificial Sequence
  LRRK2 RNA guide
ugauaagccaacuaguaacu

SEQ ID NO: 62227 - RNA, 20 nt, Artificial Sequence
  LRRK2 RNA guide
uguauaguuacuaguuggcu

SEQ ID NO: 62228 - RNA, 20 nt, Artificial Sequence
  LRRK2 RNA guide
uguguauaguuacuaguugg

SEQ ID NO: 62229 - RNA, 21 nt, Artificial Sequence
  LRRK2 RNA guide
aagccaacuaguaacuauaca

SEQ ID NO: 62230 - RNA, 21 nt, Artificial Sequence
  LRRK2 RNA guide
agccaacuaguaacuauacac

SEQ ID NO: 62231 - RNA, 21 nt, Artificial Sequence
  LRRK2 RNA guide
agugauaagccaacuaguaac

SEQ ID NO: 62232 - RNA, 21 nt, Artificial Sequence
  LRRK2 RNA guide
auguguauaguuacuaguugg

SEQ ID NO: 62233 - RNA, 21 nt, Artificial Sequence
  LRRK2 RNA guide
ccaacuaguaacuauacacau

SEQ ID NO: 62234 - RNA, 21 nt, Artificial Sequence
  LRRK2 RNA guide
gauaagccaacuaguaacuau

SEQ ID NO: 62235 - RNA, 21 nt, Artificial Sequence
  LRRK2 RNA guide
gccaacuaguaacuauacaca

SEQ ID NO: 62236 - RNA, 21 nt, Artificial Sequence
  LRRK2 RNA guide
gugauaagccaacuaguaacu

SEQ ID NO: 62237 - RNA, 21 nt, Artificial Sequence
  LRRK2 RNA guide
guguauaguuacuaguuggcu

SEQ ID NO: 62238 - RNA, 21 nt, Artificial Sequence
  LRRK2 RNA guide
uaagccaacuaguaacuauac

SEQ ID NO: 62239 - RNA, 21 nt, Artificial Sequence
  LRRK2 RNA guide
ugauaagccaacuaguaacua

SEQ ID NO: 62240 - RNA, 21 nt, Artificial Sequence
  LRRK2 RNA guide
uguauaguuacuaguuggcuu

SEQ ID NO: 62241 - RNA, 21 nt, Artificial Sequence
  LRRK2 RNA guide
uguguauaguuacuaguuggc

SEQ ID NO: 62242 - RNA, 22 nt, Artificial Sequence
  LRRK2 RNA guide
aagccaacuaguaacuauacac

SEQ ID NO: 62243 - RNA, 22 nt, Artificial Sequence
  LRRK2 RNA guide
agccaacuaguaacuauacaca

SEQ ID NO: 62244 - RNA, 22 nt, Artificial Sequence
  LRRK2 RNA guide
agugauaagccaacuaguaacu

SEQ ID NO: 62245 - RNA, 22 nt, Artificial Sequence
  LRRK2 RNA guide
auaagccaacuaguaacuauac

SEQ ID NO: 62246 - RNA, 22 nt, Artificial Sequence
  LRRK2 RNA guide
auguguauaguuacuaguuggc

SEQ ID NO: 62247 - RNA, 22 nt, Artificial Sequence
  LRRK2 RNA guide
cagugauaagccaacuaguaac

SEQ ID NO: 62248 - RNA, 22 nt, Artificial Sequence
  LRRK2 RNA guide
ccaacuaguaacuauacacaua

SEQ ID NO: 62249 - RNA, 22 nt, Artificial Sequence
  LRRK2 RNA guide
gauaagccaacuaguaacuaua

SEQ ID NO: 62250 - RNA, 22 nt, Artificial Sequence
  LRRK2 RNA guide
gccaacuaguaacuauacacau

SEQ ID NO: 62251 - RNA, 22 nt, Artificial Sequence
  LRRK2 RNA guide
gugauaagccaacuaguaacua

SEQ ID NO: 62252 - RNA, 22 nt, Artificial Sequence
  LRRK2 RNA guide
guguauaguuacuaguuggcuu

SEQ ID NO: 62253 - RNA, 22 nt, Artificial Sequence
  LRRK2 RNA guide
uaagccaacuaguaacuauaca

SEQ ID NO: 62254 - RNA, 22 nt, Artificial Sequence
  LRRK2 RNA guide
uauguguauaguuacuaguugg

SEQ ID NO: 62255 - RNA, 22 nt, Artificial Sequence
  LRRK2 RNA guide
ugauaagccaacuaguaacuau

SEQ ID NO: 62256 - RNA, 22 nt, Artificial Sequence
  LRRK2 RNA guide
uguauaguuacuaguuggcuua

SEQ ID NO: 62257 - RNA, 22 nt, Artificial Sequence
  LRRK2 RNA guide
uguguauaguuacuaguuggcu

SEQ ID NO: 62258 - RNA, 20 nt, Artificial Sequence
  LRRK2 RNA guide
aagccaacuaguaacuauau

SEQ ID NO: 62259 - RNA, 20 nt, Artificial Sequence
  LRRK2 RNA guide
agccaacuaguaacuauaua

SEQ ID NO: 62260 - RNA, 20 nt, Artificial Sequence
  LRRK2 RNA guide
ccaacuaguaacuauauaca

SEQ ID NO: 62261 - RNA, 20 nt, Artificial Sequence
  LRRK2 RNA guide
gccaacuaguaacuauauac

SEQ ID NO: 62262 - RNA, 20 nt, Artificial Sequence
  LRRK2 RNA guide
guauauaguuacuaguuggc

SEQ ID NO: 62263 - RNA, 20 nt, Artificial Sequence
  LRRK2 RNA guide
uauauaguuacuaguuggcu

SEQ ID NO: 62264 - RNA, 20 nt, Artificial Sequence
  LRRK2 RNA guide
uguauauaguuacuaguugg

SEQ ID NO: 62265 - RNA, 21 nt, Artificial Sequence
  LRRK2 RNA guide
agccaacuaguaacuauauac

SEQ ID NO: 62266 - RNA, 21 nt, Artificial Sequence
  LRRK2 RNA guide
gccaacuaguaacuauauaca

SEQ ID NO: 62267 - RNA, 21 nt, Artificial Sequence
  LRRK2 RNA guide
guauauaguuacuaguuggcu

SEQ ID NO: 62268 - RNA, 21 nt, Artificial Sequence
  LRRK2 RNA guide
uguauauaguuacuaguuggc

SEQ ID NO: 62269 - RNA, 22 nt, Artificial Sequence
  LRRK2 RNA guide
aagccaacuaguaacuauauac

SEQ ID NO: 62270 - RNA, 22 nt, Artificial Sequence
  LRRK2 RNA guide
agccaacuaguaacuauauaca

SEQ ID NO: 62271 - RNA, 22 nt, Artificial Sequence
  LRRK2 RNA guide
auguauauaguuacuaguuggc

SEQ ID NO: 62272 - RNA, 22 nt, Artificial Sequence
  LRRK2 RNA guide
gccaacuaguaacuauauacau

SEQ ID NO: 62273 - RNA, 22 nt, Artificial Sequence
  LRRK2 RNA guide
guauauaguuacuaguuggcuu

SEQ ID NO: 62274 - RNA, 22 nt, Artificial Sequence
  LRRK2 RNA guide
uguauauaguuacuaguuggcu

SEQ ID NO: 62275 - RNA, 20 nt, Artificial Sequence
  LRRK2 RNA guide
aacacacacauacacaaaca

SEQ ID NO: 62276 - RNA, 20 nt, Artificial Sequence
  LRRK2 RNA guide
aagaacacacacauacacaa

SEQ ID NO: 62277 - RNA, 20 nt, Artificial Sequence
  LRRK2 RNA guide
agaacacacacauacacaaa

SEQ ID NO: 62278 - RNA, 20 nt, Artificial Sequence
  LRRK2 RNA guide
caaacacagacacacacaca

SEQ ID NO: 62279 - RNA, 20 nt, Artificial Sequence
  LRRK2 RNA guide
cuguguuuguguaugugugu

SEQ ID NO: 62280 - RNA, 20 nt, Artificial Sequence
  LRRK2 RNA guide
gaacacacacauacacaaac

SEQ ID NO: 62281 - RNA, 20 nt, Artificial Sequence
  LRRK2 RNA guide
ggagauuaaugugugugugu

SEQ ID NO: 62282 - RNA, 20 nt, Artificial Sequence
  LRRK2 RNA guide
gucuguguuuguguaugugu

SEQ ID NO: 62283 - RNA, 20 nt, Artificial Sequence
  LRRK2 RNA guide
ucuguguuuguguaugugug

SEQ ID NO: 62284 - RNA, 20 nt, Artificial Sequence
  LRRK2 RNA guide
uggagauuaaugugugugug

SEQ ID NO: 62285 - RNA, 21 nt, Artificial Sequence
  LRRK2 RNA guide
aacacacacauacacaaacac

SEQ ID NO: 62286 - RNA, 21 nt, Artificial Sequence
  LRRK2 RNA guide
aagaacacacacauacacaaa

SEQ ID NO: 62287 - RNA, 21 nt, Artificial Sequence
  LRRK2 RNA guide
acaaacacagacacacacaca

SEQ ID NO: 62288 - RNA, 21 nt, Artificial Sequence
  LRRK2 RNA guide
agaacacacacauacacaaac

SEQ ID NO: 62289 - RNA, 21 nt, Artificial Sequence
  LRRK2 RNA guide
cuguguuuguguaugugugug

SEQ ID NO: 62290 - RNA, 21 nt, Artificial Sequence
  LRRK2 RNA guide
gaacacacacauacacaaaca

SEQ ID NO: 62291 - RNA, 21 nt, Artificial Sequence
  LRRK2 RNA guide
gucuguguuuguguaugugug

SEQ ID NO: 62292 - RNA, 21 nt, Artificial Sequence
  LRRK2 RNA guide
guggagauuaaugugugugug

SEQ ID NO: 62293 - RNA, 21 nt, Artificial Sequence
  LRRK2 RNA guide
uaagaacacacacauacacaa

SEQ ID NO: 62294 - RNA, 21 nt, Artificial Sequence
  LRRK2 RNA guide
ucuguguuuguguaugugugu

SEQ ID NO: 62295 - RNA, 21 nt, Artificial Sequence
  LRRK2 RNA guide
uggagauuaaugugugugugu

SEQ ID NO: 62296 - RNA, 21 nt, Artificial Sequence
  LRRK2 RNA guide
ugucuguguuuguguaugugu

SEQ ID NO: 62297 - RNA, 22 nt, Artificial Sequence
  LRRK2 RNA guide
aacacacacauacacaaacaca

SEQ ID NO: 62298 - RNA, 22 nt, Artificial Sequence
  LRRK2 RNA guide
aagaacacacacauacacaaac

SEQ ID NO: 62299 - RNA, 22 nt, Artificial Sequence
  LRRK2 RNA guide
agaacacacacauacacaaaca

SEQ ID NO: 62300 - RNA, 22 nt, Artificial Sequence
  LRRK2 RNA guide
aguggagauuaaugugugugug

SEQ ID NO: 62301 - RNA, 22 nt, Artificial Sequence
  LRRK2 RNA guide
cacaaacacagacacacacaca

SEQ ID NO: 62302 - RNA, 22 nt, Artificial Sequence
  LRRK2 RNA guide
cuguguuuguguaugugugugu

SEQ ID NO: 62303 - RNA, 22 nt, Artificial Sequence
  LRRK2 RNA guide
gaacacacacauacacaaacac

SEQ ID NO: 62304 - RNA, 22 nt, Artificial Sequence
  LRRK2 RNA guide
gucuguguuuguguaugugugu

SEQ ID NO: 62305 - RNA, 22 nt, Artificial Sequence
  LRRK2 RNA guide
guggagauuaaugugugugugu

SEQ ID NO: 62306 - RNA, 22 nt, Artificial Sequence
  LRRK2 RNA guide
gugucuguguuuguguaugugu

SEQ ID NO: 62307 - RNA, 22 nt, Artificial Sequence
  LRRK2 RNA guide
uaagaacacacacauacacaaa

SEQ ID NO: 62308 - RNA, 22 nt, Artificial Sequence
  LRRK2 RNA guide
ucuguguuuguguaugugugug

SEQ ID NO: 62309 - RNA, 22 nt, Artificial Sequence
  LRRK2 RNA guide
ugucuguguuuguguaugugug

SEQ ID NO: 62310 - RNA, 22 nt, Artificial Sequence
  LRRK2 RNA guide
uuaagaacacacacauacacaa

SEQ ID NO: 62311 - RNA, 20 nt, Artificial Sequence
  LRRK2 RNA guide
acaaacacggacacacacac

SEQ ID NO: 62312 - RNA, 20 nt, Artificial Sequence
  LRRK2 RNA guide
acacaaacacggacacacac

SEQ ID NO: 62313 - RNA, 20 nt, Artificial Sequence
  LRRK2 RNA guide
acacacacauacacaaacac

SEQ ID NO: 62314 - RNA, 20 nt, Artificial Sequence
  LRRK2 RNA guide
acacacauacacaaacacgg

SEQ ID NO: 62315 - RNA, 20 nt, Artificial Sequence
  LRRK2 RNA guide
acacauacacaaacacggac

SEQ ID NO: 62316 - RNA, 20 nt, Artificial Sequence
  LRRK2 RNA guide
acauacacaaacacggacac

SEQ ID NO: 62317 - RNA, 20 nt, Artificial Sequence
  LRRK2 RNA guide
auacacaaacacggacacac

SEQ ID NO: 62318 - RNA, 20 nt, Artificial Sequence
  LRRK2 RNA guide
caaacacggacacacacaca

SEQ ID NO: 62319 - RNA, 20 nt, Artificial Sequence
  LRRK2 RNA guide
cacaaacacggacacacaca

SEQ ID NO: 62320 - RNA, 20 nt, Artificial Sequence
  LRRK2 RNA guide
cacacacauacacaaacacg

SEQ ID NO: 62321 - RNA, 20 nt, Artificial Sequence
  LRRK2 RNA guide
cacacauacacaaacacgga

SEQ ID NO: 62322 - RNA, 20 nt, Artificial Sequence
  LRRK2 RNA guide
cacauacacaaacacggaca

SEQ ID NO: 62323 - RNA, 20 nt, Artificial Sequence
  LRRK2 RNA guide
cauacacaaacacggacaca

SEQ ID NO: 62324 - RNA, 20 nt, Artificial Sequence
  LRRK2 RNA guide
ccguguuuguguaugugugu

SEQ ID NO: 62325 - RNA, 20 nt, Artificial Sequence
  LRRK2 RNA guide
guccguguuuguguaugugu

SEQ ID NO: 62326 - RNA, 20 nt, Artificial Sequence
  LRRK2 RNA guide
guguccguguuuguguaugu

SEQ ID NO: 62327 - RNA, 20 nt, Artificial Sequence
  LRRK2 RNA guide
guguguccguguuuguguau

SEQ ID NO: 62328 - RNA, 20 nt, Artificial Sequence
  LRRK2 RNA guide
guguguguccguguuugugu

SEQ ID NO: 62329 - RNA, 20 nt, Artificial Sequence
  LRRK2 RNA guide
guguguguguccguguuugu

SEQ ID NO: 62330 - RNA, 20 nt, Artificial Sequence
  LRRK2 RNA guide
uacacaaacacggacacaca

SEQ ID NO: 62331 - RNA, 20 nt, Artificial Sequence
  LRRK2 RNA guide
uccguguuuguguaugugug

SEQ ID NO: 62332 - RNA, 20 nt, Artificial Sequence
  LRRK2 RNA guide
uguccguguuuguguaugug

SEQ ID NO: 62333 - RNA, 20 nt, Artificial Sequence
  LRRK2 RNA guide
uguguccguguuuguguaug

SEQ ID NO: 62334 - RNA, 20 nt, Artificial Sequence
  LRRK2 RNA guide
uguguguccguguuugugua

SEQ ID NO: 62335 - RNA, 20 nt, Artificial Sequence
  LRRK2 RNA guide
uguguguguccguguuugug

SEQ ID NO: 62336 - RNA, 20 nt, Artificial Sequence
  LRRK2 RNA guide
uguguguguguccguguuug

SEQ ID NO: 62337 - RNA, 21 nt, Artificial Sequence
  LRRK2 RNA guide
acaaacacggacacacacaca

SEQ ID NO: 62338 - RNA, 21 nt, Artificial Sequence
  LRRK2 RNA guide
acacaaacacggacacacaca

SEQ ID NO: 62339 - RNA, 21 nt, Artificial Sequence
  LRRK2 RNA guide
acacacacauacacaaacacg

SEQ ID NO: 62340 - RNA, 21 nt, Artificial Sequence
  LRRK2 RNA guide
acacacauacacaaacacgga

SEQ ID NO: 62341 - RNA, 21 nt, Artificial Sequence
  LRRK2 RNA guide
acacauacacaaacacggaca

SEQ ID NO: 62342 - RNA, 21 nt, Artificial Sequence
  LRRK2 RNA guide
acauacacaaacacggacaca

SEQ ID NO: 62343 - RNA, 21 nt, Artificial Sequence
  LRRK2 RNA guide
auacacaaacacggacacaca

SEQ ID NO: 62344 - RNA, 21 nt, Artificial Sequence
  LRRK2 RNA guide
cacaaacacggacacacacac

SEQ ID NO: 62345 - RNA, 21 nt, Artificial Sequence
  LRRK2 RNA guide
cacacacauacacaaacacgg

SEQ ID NO: 62346 - RNA, 21 nt, Artificial Sequence
  LRRK2 RNA guide
cacacauacacaaacacggac

SEQ ID NO: 62347 - RNA, 21 nt, Artificial Sequence
  LRRK2 RNA guide
cacauacacaaacacggacac

SEQ ID NO: 62348 - RNA, 21 nt, Artificial Sequence
  LRRK2 RNA guide
cauacacaaacacggacacac

SEQ ID NO: 62349 - RNA, 21 nt, Artificial Sequence
  LRRK2 RNA guide
ccguguuuguguaugugugug

SEQ ID NO: 62350 - RNA, 21 nt, Artificial Sequence
  LRRK2 RNA guide
guccguguuuguguaugugug

SEQ ID NO: 62351 - RNA, 21 nt, Artificial Sequence
  LRRK2 RNA guide
guguccguguuuguguaugug

SEQ ID NO: 62352 - RNA, 21 nt, Artificial Sequence
  LRRK2 RNA guide
guguguccguguuuguguaug

SEQ ID NO: 62353 - RNA, 21 nt, Artificial Sequence
  LRRK2 RNA guide
guguguguccguguuugugua

SEQ ID NO: 62354 - RNA, 21 nt, Artificial Sequence
  LRRK2 RNA guide
guguguguguccguguuugug

SEQ ID NO: 62355 - RNA, 21 nt, Artificial Sequence
  LRRK2 RNA guide
uacacaaacacggacacacac

SEQ ID NO: 62356 - RNA, 21 nt, Artificial Sequence
  LRRK2 RNA guide
uccguguuuguguaugugugu

SEQ ID NO: 62357 - RNA, 21 nt, Artificial Sequence
  LRRK2 RNA guide
uguccguguuuguguaugugu

SEQ ID NO: 62358 - RNA, 21 nt, Artificial Sequence
  LRRK2 RNA guide
uguguccguguuuguguaugu

SEQ ID NO: 62359 - RNA, 21 nt, Artificial Sequence
  LRRK2 RNA guide
uguguguccguguuuguguau

SEQ ID NO: 62360 - RNA, 21 nt, Artificial Sequence
  LRRK2 RNA guide
uguguguguccguguuugugu

SEQ ID NO: 62361 - RNA, 21 nt, Artificial Sequence
  LRRK2 RNA guide
uguguguguguccguguuugu

SEQ ID NO: 62362 - RNA, 22 nt, Artificial Sequence
  LRRK2 RNA guide
aacacacacauacacaaacacg

SEQ ID NO: 62363 - RNA, 22 nt, Artificial Sequence
  LRRK2 RNA guide
acacaaacacggacacacacac

SEQ ID NO: 62364 - RNA, 22 nt, Artificial Sequence
  LRRK2 RNA guide
acacacacauacacaaacacgg

SEQ ID NO: 62365 - RNA, 22 nt, Artificial Sequence
  LRRK2 RNA guide
acacacauacacaaacacggac

SEQ ID NO: 62366 - RNA, 22 nt, Artificial Sequence
  LRRK2 RNA guide
acacauacacaaacacggacac

SEQ ID NO: 62367 - RNA, 22 nt, Artificial Sequence
  LRRK2 RNA guide
acauacacaaacacggacacac

SEQ ID NO: 62368 - RNA, 22 nt, Artificial Sequence
  LRRK2 RNA guide
auacacaaacacggacacacac

SEQ ID NO: 62369 - RNA, 22 nt, Artificial Sequence
  LRRK2 RNA guide
cacaaacacggacacacacaca

SEQ ID NO: 62370 - RNA, 22 nt, Artificial Sequence
  LRRK2 RNA guide
cacacacauacacaaacacgga

SEQ ID NO: 62371 - RNA, 22 nt, Artificial Sequence
  LRRK2 RNA guide
cacacauacacaaacacggaca

SEQ ID NO: 62372 - RNA, 22 nt, Artificial Sequence
  LRRK2 RNA guide
cacauacacaaacacggacaca

SEQ ID NO: 62373 - RNA, 22 nt, Artificial Sequence
  LRRK2 RNA guide
cauacacaaacacggacacaca

SEQ ID NO: 62374 - RNA, 22 nt, Artificial Sequence
  LRRK2 RNA guide
ccguguuuguguaugugugugu

SEQ ID NO: 62375 - RNA, 22 nt, Artificial Sequence
  LRRK2 RNA guide
guccguguuuguguaugugugu

SEQ ID NO: 62376 - RNA, 22 nt, Artificial Sequence
  LRRK2 RNA guide
guguccguguuuguguaugugu

SEQ ID NO: 62377 - RNA, 22 nt, Artificial Sequence
  LRRK2 RNA guide
guguguccguguuuguguaugu

SEQ ID NO: 62378 - RNA, 22 nt, Artificial Sequence
  LRRK2 RNA guide
guguguguccguguuuguguau

SEQ ID NO: 62379 - RNA, 22 nt, Artificial Sequence
  LRRK2 RNA guide
guguguguguccguguuugugu

SEQ ID NO: 62380 - RNA, 22 nt, Artificial Sequence
  LRRK2 RNA guide
uacacaaacacggacacacaca

SEQ ID NO: 62381 - RNA, 22 nt, Artificial Sequence
  LRRK2 RNA guide
uccguguuuguguaugugugug

SEQ ID NO: 62382 - RNA, 22 nt, Artificial Sequence
  LRRK2 RNA guide
uguccguguuuguguaugugug

SEQ ID NO: 62383 - RNA, 22 nt, Artificial Sequence
  LRRK2 RNA guide
uguguccguguuuguguaugug

SEQ ID NO: 62384 - RNA, 22 nt, Artificial Sequence
  LRRK2 RNA guide
uguguguccguguuuguguaug

SEQ ID NO: 62385 - RNA, 22 nt, Artificial Sequence
  LRRK2 RNA guide
uguguguguccguguuugugua

SEQ ID NO: 62386 - RNA, 22 nt, Artificial Sequence
  LRRK2 RNA guide
uguguguguguccguguuugug

SEQ ID NO: 62387 - RNA, 20 nt, Artificial Sequence
  LRRK2 RNA guide
uaagaacacacacauacaca

SEQ ID NO: 62388 - RNA, 20 nt, Artificial Sequence
  LRRK2 RNA guide
uguguuuguguaugugugug

SEQ ID NO: 62389 - RNA, 21 nt, Artificial Sequence
  LRRK2 RNA guide
uguguuuguguaugugugugu

SEQ ID NO: 62390 - RNA, 21 nt, Artificial Sequence
  LRRK2 RNA guide
uuaagaacacacacauacaca

SEQ ID NO: 62391 - RNA, 22 nt, Artificial Sequence
  LRRK2 RNA guide
uguguuuguguauguguguguu

SEQ ID NO: 62392 - RNA, 22 nt, Artificial Sequence
  LRRK2 RNA guide
uuuaagaacacacacauacaca

SEQ ID NO: 62393 - RNA, 20 nt, Artificial Sequence
  LRRK2 RNA guide
acaaacaaagacacacacac

SEQ ID NO: 62394 - RNA, 20 nt, Artificial Sequence
  LRRK2 RNA guide
acacaaacaaagacacacac

SEQ ID NO: 62395 - RNA, 20 nt, Artificial Sequence
  LRRK2 RNA guide
acacacacauacacaaacaa

SEQ ID NO: 62396 - RNA, 20 nt, Artificial Sequence
  LRRK2 RNA guide
acacacauacacaaacaaag

SEQ ID NO: 62397 - RNA, 20 nt, Artificial Sequence
  LRRK2 RNA guide
acacauacacaaacaaagac

SEQ ID NO: 62398 - RNA, 20 nt, Artificial Sequence
  LRRK2 RNA guide
acauacacaaacaaagacac

SEQ ID NO: 62399 - RNA, 20 nt, Artificial Sequence
  LRRK2 RNA guide
auacacaaacaaagacacac

SEQ ID NO: 62400 - RNA, 20 nt, Artificial Sequence
  LRRK2 RNA guide
caaacaaagacacacacaca

SEQ ID NO: 62401 - RNA, 20 nt, Artificial Sequence
  LRRK2 RNA guide
cacaaacaaagacacacaca

SEQ ID NO: 62402 - RNA, 20 nt, Artificial Sequence
  LRRK2 RNA guide
cacacacauacacaaacaaa

SEQ ID NO: 62403 - RNA, 20 nt, Artificial Sequence
  LRRK2 RNA guide
cacacauacacaaacaaaga

SEQ ID NO: 62404 - RNA, 20 nt, Artificial Sequence
  LRRK2 RNA guide
cacauacacaaacaaagaca

SEQ ID NO: 62405 - RNA, 20 nt, Artificial Sequence
  LRRK2 RNA guide
cauacacaaacaaagacaca

SEQ ID NO: 62406 - RNA, 20 nt, Artificial Sequence
  LRRK2 RNA guide
cuuuguuuguguaugugugu

SEQ ID NO: 62407 - RNA, 20 nt, Artificial Sequence
  LRRK2 RNA guide
gucuuuguuuguguaugugu

SEQ ID NO: 62408 - RNA, 20 nt, Artificial Sequence
  LRRK2 RNA guide
gugucuuuguuuguguaugu

SEQ ID NO: 62409 - RNA, 20 nt, Artificial Sequence
  LRRK2 RNA guide
gugugucuuuguuuguguau

SEQ ID NO: 62410 - RNA, 20 nt, Artificial Sequence
  LRRK2 RNA guide
gugugugucuuuguuugugu

SEQ ID NO: 62411 - RNA, 20 nt, Artificial Sequence
  LRRK2 RNA guide
gugugugugucuuuguuugu

SEQ ID NO: 62412 - RNA, 20 nt, Artificial Sequence
  LRRK2 RNA guide
uacacaaacaaagacacaca

SEQ ID NO: 62413 - RNA, 20 nt, Artificial Sequence
  LRRK2 RNA guide
ucuuuguuuguguaugugug

SEQ ID NO: 62414 - RNA, 20 nt, Artificial Sequence
  LRRK2 RNA guide
ugucuuuguuuguguaugug

SEQ ID NO: 62415 - RNA, 20 nt, Artificial Sequence
  LRRK2 RNA guide
ugugucuuuguuuguguaug

SEQ ID NO: 62416 - RNA, 20 nt, Artificial Sequence
  LRRK2 RNA guide
ugugugucuuuguuugugua

SEQ ID NO: 62417 - RNA, 20 nt, Artificial Sequence
  LRRK2 RNA guide
ugugugugucuuuguuugug

SEQ ID NO: 62418 - RNA, 20 nt, Artificial Sequence
  LRRK2 RNA guide
ugugugugugucuuuguuug

SEQ ID NO: 62419 - RNA, 20 nt, Artificial Sequence
  LRRK2 RNA guide
uuuguuuguguaugugugug

SEQ ID NO: 62420 - RNA, 21 nt, Artificial Sequence
  LRRK2 RNA guide
aacacacacauacacaaacaa

SEQ ID NO: 62421 - RNA, 21 nt, Artificial Sequence
  LRRK2 RNA guide
acaaacaaagacacacacaca

SEQ ID NO: 62422 - RNA, 21 nt, Artificial Sequence
  LRRK2 RNA guide
acacaaacaaagacacacaca

SEQ ID NO: 62423 - RNA, 21 nt, Artificial Sequence
  LRRK2 RNA guide
acacacacauacacaaacaaa

SEQ ID NO: 62424 - RNA, 21 nt, Artificial Sequence
  LRRK2 RNA guide
acacacauacacaaacaaaga

SEQ ID NO: 62425 - RNA, 21 nt, Artificial Sequence
  LRRK2 RNA guide
acacauacacaaacaaagaca

SEQ ID NO: 62426 - RNA, 21 nt, Artificial Sequence
  LRRK2 RNA guide
acauacacaaacaaagacaca

SEQ ID NO: 62427 - RNA, 21 nt, Artificial Sequence
  LRRK2 RNA guide
auacacaaacaaagacacaca

SEQ ID NO: 62428 - RNA, 21 nt, Artificial Sequence
  LRRK2 RNA guide
cacaaacaaagacacacacac

SEQ ID NO: 62429 - RNA, 21 nt, Artificial Sequence
  LRRK2 RNA guide
cacacacauacacaaacaaag

SEQ ID NO: 62430 - RNA, 21 nt, Artificial Sequence
  LRRK2 RNA guide
cacacauacacaaacaaagac

SEQ ID NO: 62431 - RNA, 21 nt, Artificial Sequence
  LRRK2 RNA guide
cacauacacaaacaaagacac

SEQ ID NO: 62432 - RNA, 21 nt, Artificial Sequence
  LRRK2 RNA guide
cauacacaaacaaagacacac

SEQ ID NO: 62433 - RNA, 21 nt, Artificial Sequence
  LRRK2 RNA guide
cuuuguuuguguaugugugug

SEQ ID NO: 62434 - RNA, 21 nt, Artificial Sequence
  LRRK2 RNA guide
gucuuuguuuguguaugugug

SEQ ID NO: 62435 - RNA, 21 nt, Artificial Sequence
  LRRK2 RNA guide
gugucuuuguuuguguaugug

SEQ ID NO: 62436 - RNA, 21 nt, Artificial Sequence
  LRRK2 RNA guide
gugugucuuuguuuguguaug

SEQ ID NO: 62437 - RNA, 21 nt, Artificial Sequence
  LRRK2 RNA guide
gugugugucuuuguuugugua

SEQ ID NO: 62438 - RNA, 21 nt, Artificial Sequence
  LRRK2 RNA guide
gugugugugucuuuguuugug

SEQ ID NO: 62439 - RNA, 21 nt, Artificial Sequence
  LRRK2 RNA guide
uacacaaacaaagacacacac

SEQ ID NO: 62440 - RNA, 21 nt, Artificial Sequence
  LRRK2 RNA guide
ucuuuguuuguguaugugugu

SEQ ID NO: 62441 - RNA, 21 nt, Artificial Sequence
  LRRK2 RNA guide
ugucuuuguuuguguaugugu

SEQ ID NO: 62442 - RNA, 21 nt, Artificial Sequence
  LRRK2 RNA guide
ugugucuuuguuuguguaugu

SEQ ID NO: 62443 - RNA, 21 nt, Artificial Sequence
  LRRK2 RNA guide
ugugugucuuuguuuguguau

SEQ ID NO: 62444 - RNA, 21 nt, Artificial Sequence
  LRRK2 RNA guide
ugugugugucuuuguuugugu

SEQ ID NO: 62445 - RNA, 21 nt, Artificial Sequence
  LRRK2 RNA guide
ugugugugugucuuuguuugu

SEQ ID NO: 62446 - RNA, 21 nt, Artificial Sequence
  LRRK2 RNA guide
uuuguuuguguaugugugugu

SEQ ID NO: 62447 - RNA, 22 nt, Artificial Sequence
  LRRK2 RNA guide
aacacacacauacacaaacaaa

SEQ ID NO: 62448 - RNA, 22 nt, Artificial Sequence
  LRRK2 RNA guide
acacaaacaaagacacacacac

SEQ ID NO: 62449 - RNA, 22 nt, Artificial Sequence
  LRRK2 RNA guide
acacacacauacacaaacaaag

SEQ ID NO: 62450 - RNA, 22 nt, Artificial Sequence
  LRRK2 RNA guide
acacacauacacaaacaaagac

SEQ ID NO: 62451 - RNA, 22 nt, Artificial Sequence
  LRRK2 RNA guide
acacauacacaaacaaagacac

SEQ ID NO: 62452 - RNA, 22 nt, Artificial Sequence
  LRRK2 RNA guide
acauacacaaacaaagacacac

SEQ ID NO: 62453 - RNA, 22 nt, Artificial Sequence
  LRRK2 RNA guide
auacacaaacaaagacacacac

SEQ ID NO: 62454 - RNA, 22 nt, Artificial Sequence
  LRRK2 RNA guide
cacaaacaaagacacacacaca

SEQ ID NO: 62455 - RNA, 22 nt, Artificial Sequence
  LRRK2 RNA guide
cacacacauacacaaacaaaga

SEQ ID NO: 62456 - RNA, 22 nt, Artificial Sequence
  LRRK2 RNA guide
cacacauacacaaacaaagaca

SEQ ID NO: 62457 - RNA, 22 nt, Artificial Sequence
  LRRK2 RNA guide
cacauacacaaacaaagacaca

SEQ ID NO: 62458 - RNA, 22 nt, Artificial Sequence
  LRRK2 RNA guide
cauacacaaacaaagacacaca

SEQ ID NO: 62459 - RNA, 22 nt, Artificial Sequence
  LRRK2 RNA guide
cuuuguuuguguaugugugugu

SEQ ID NO: 62460 - RNA, 22 nt, Artificial Sequence
  LRRK2 RNA guide
gaacacacacauacacaaacaa

SEQ ID NO: 62461 - RNA, 22 nt, Artificial Sequence
  LRRK2 RNA guide
gucuuuguuuguguaugugugu

SEQ ID NO: 62462 - RNA, 22 nt, Artificial Sequence
  LRRK2 RNA guide
gugucuuuguuuguguaugugu

SEQ ID NO: 62463 - RNA, 22 nt, Artificial Sequence
  LRRK2 RNA guide
gugugucuuuguuuguguaugu

SEQ ID NO: 62464 - RNA, 22 nt, Artificial Sequence
  LRRK2 RNA guide
gugugugucuuuguuuguguau

SEQ ID NO: 62465 - RNA, 22 nt, Artificial Sequence
  LRRK2 RNA guide
gugugugugucuuuguuugugu

SEQ ID NO: 62466 - RNA, 22 nt, Artificial Sequence
  LRRK2 RNA guide
uacacaaacaaagacacacaca

SEQ ID NO: 62467 - RNA, 22 nt, Artificial Sequence
  LRRK2 RNA guide
ucuuuguuuguguaugugugug

SEQ ID NO: 62468 - RNA, 22 nt, Artificial Sequence
  LRRK2 RNA guide
ugucuuuguuuguguaugugug

SEQ ID NO: 62469 - RNA, 22 nt, Artificial Sequence
  LRRK2 RNA guide
ugugucuuuguuuguguaugug

SEQ ID NO: 62470 - RNA, 22 nt, Artificial Sequence
  LRRK2 RNA guide
ugugugucuuuguuuguguaug

SEQ ID NO: 62471 - RNA, 22 nt, Artificial Sequence
  LRRK2 RNA guide
ugugugugucuuuguuugugua

SEQ ID NO: 62472 - RNA, 22 nt, Artificial Sequence
  LRRK2 RNA guide
ugugugugugucuuuguuugug

SEQ ID NO: 62473 - RNA, 22 nt, Artificial Sequence
  LRRK2 RNA guide
uuuguuuguguauguguguguu

SEQ ID NO: 62474 - RNA, 20 nt, Artificial Sequence
  LRRK2 RNA guide
aaaacucacuaucuucucag

SEQ ID NO: 62475 - RNA, 20 nt, Artificial Sequence
  LRRK2 RNA guide
aaacucacuaucuucucaga

SEQ ID NO: 62476 - RNA, 20 nt, Artificial Sequence
  LRRK2 RNA guide
aaauucuguugaaaacucac

SEQ ID NO: 62477 - RNA, 20 nt, Artificial Sequence
  LRRK2 RNA guide
aacucacuaucuucucagaa

SEQ ID NO: 62478 - RNA, 20 nt, Artificial Sequence
  LRRK2 RNA guide
aagauagugaguuuucaaca

SEQ ID NO: 62479 - RNA, 20 nt, Artificial Sequence
  LRRK2 RNA guide
aagcaaguucugagaagaua

SEQ ID NO: 62480 - RNA, 20 nt, Artificial Sequence
  LRRK2 RNA guide
aaguucugagaagauaguga

SEQ ID NO: 62481 - RNA, 20 nt, Artificial Sequence
  LRRK2 RNA guide
aauucuguugaaaacucacu

SEQ ID NO: 62482 - RNA, 20 nt, Artificial Sequence
  LRRK2 RNA guide
acuaucuucucagaacuugc

SEQ ID NO: 62483 - RNA, 20 nt, Artificial Sequence
  LRRK2 RNA guide
acucacuaucuucucagaac

SEQ ID NO: 62484 - RNA, 20 nt, Artificial Sequence
  LRRK2 RNA guide
agaagauagugaguuuucaa

SEQ ID NO: 62485 - RNA, 20 nt, Artificial Sequence
  LRRK2 RNA guide
agauagugaguuuucaacag

SEQ ID NO: 62486 - RNA, 20 nt, Artificial Sequence
  LRRK2 RNA guide
agcaaguucugagaagauag

SEQ ID NO: 62487 - RNA, 20 nt, Artificial Sequence
  LRRK2 RNA guide
aguucugagaagauagugag

SEQ ID NO: 62488 - RNA, 20 nt, Artificial Sequence
  LRRK2 RNA guide
auagugaguuuucaacagaa

SEQ ID NO: 62489 - RNA, 20 nt, Artificial Sequence
  LRRK2 RNA guide
auuaagcaaguucugagaag

SEQ ID NO: 62490 - RNA, 20 nt, Artificial Sequence
  LRRK2 RNA guide
auucuguugaaaacucacua

SEQ ID NO: 62491 - RNA, 20 nt, Artificial Sequence
  LRRK2 RNA guide
caaguucugagaagauagug

SEQ ID NO: 62492 - RNA, 20 nt, Artificial Sequence
  LRRK2 RNA guide
cacuaucuucucagaacuug

SEQ ID NO: 62493 - RNA, 20 nt, Artificial Sequence
  LRRK2 RNA guide
cuaucuucucagaacuugcu

SEQ ID NO: 62494 - RNA, 20 nt, Artificial Sequence
  LRRK2 RNA guide
cucacuaucuucucagaacu

SEQ ID NO: 62495 - RNA, 20 nt, Artificial Sequence
  LRRK2 RNA guide
cugagaagauagugaguuuu

SEQ ID NO: 62496 - RNA, 20 nt, Artificial Sequence
  LRRK2 RNA guide
cuguugaaaacucacuaucu

SEQ ID NO: 62497 - RNA, 20 nt, Artificial Sequence
  LRRK2 RNA guide
gaaaacucacuaucuucuca

SEQ ID NO: 62498 - RNA, 20 nt, Artificial Sequence
  LRRK2 RNA guide
gaagauagugaguuuucaac

SEQ ID NO: 62499 - RNA, 20 nt, Artificial Sequence
  LRRK2 RNA guide
gagaagauagugaguuuuca

SEQ ID NO: 62500 - RNA, 20 nt, Artificial Sequence
  LRRK2 RNA guide
gauagugaguuuucaacaga

SEQ ID NO: 62501 - RNA, 20 nt, Artificial Sequence
  LRRK2 RNA guide
gcaaguucugagaagauagu

SEQ ID NO: 62502 - RNA, 20 nt, Artificial Sequence
  LRRK2 RNA guide
guucugagaagauagugagu

SEQ ID NO: 62503 - RNA, 20 nt, Artificial Sequence
  LRRK2 RNA guide
guugaaaacucacuaucuuc

SEQ ID NO: 62504 - RNA, 20 nt, Artificial Sequence
  LRRK2 RNA guide
uaagcaaguucugagaagau

SEQ ID NO: 62505 - RNA, 20 nt, Artificial Sequence
  LRRK2 RNA guide
uaucuucucagaacuugcuu

SEQ ID NO: 62506 - RNA, 20 nt, Artificial Sequence
  LRRK2 RNA guide
uauuaagcaaguucugagaa

SEQ ID NO: 62507 - RNA, 20 nt, Artificial Sequence
  LRRK2 RNA guide
ucacuaucuucucagaacuu

SEQ ID NO: 62508 - RNA, 20 nt, Artificial Sequence
  LRRK2 RNA guide
ucugagaagauagugaguuu

SEQ ID NO: 62509 - RNA, 20 nt, Artificial Sequence
  LRRK2 RNA guide
ucuguugaaaacucacuauc

SEQ ID NO: 62510 - RNA, 20 nt, Artificial Sequence
  LRRK2 RNA guide
ugaaaacucacuaucuucuc

SEQ ID NO: 62511 - RNA, 20 nt, Artificial Sequence
  LRRK2 RNA guide
ugagaagauagugaguuuuc

SEQ ID NO: 62512 - RNA, 20 nt, Artificial Sequence
  LRRK2 RNA guide
uguugaaaacucacuaucuu

SEQ ID NO: 62513 - RNA, 20 nt, Artificial Sequence
  LRRK2 RNA guide
uuaagcaaguucugagaaga

SEQ ID NO: 62514 - RNA, 20 nt, Artificial Sequence
  LRRK2 RNA guide
uuauuaagcaaguucugaga

SEQ ID NO: 62515 - RNA, 20 nt, Artificial Sequence
  LRRK2 RNA guide
uucugagaagauagugaguu

SEQ ID NO: 62516 - RNA, 20 nt, Artificial Sequence
  LRRK2 RNA guide
uucuguugaaaacucacuau

SEQ ID NO: 62517 - RNA, 20 nt, Artificial Sequence
  LRRK2 RNA guide
uugaaaacucacuaucuucu

SEQ ID NO: 62518 - RNA, 20 nt, Artificial Sequence
  LRRK2 RNA guide
uuuauuaagcaaguucugag

SEQ ID NO: 62519 - RNA, 21 nt, Artificial Sequence
  LRRK2 RNA guide
aaaacucacuaucuucucaga

SEQ ID NO: 62520 - RNA, 21 nt, Artificial Sequence
  LRRK2 RNA guide
aaacucacuaucuucucagaa

SEQ ID NO: 62521 - RNA, 21 nt, Artificial Sequence
  LRRK2 RNA guide
aacucacuaucuucucagaac

SEQ ID NO: 62522 - RNA, 21 nt, Artificial Sequence
  LRRK2 RNA guide
aagauagugaguuuucaacag

SEQ ID NO: 62523 - RNA, 21 nt, Artificial Sequence
  LRRK2 RNA guide
aagcaaguucugagaagauag

SEQ ID NO: 62524 - RNA, 21 nt, Artificial Sequence
  LRRK2 RNA guide
aaguucugagaagauagugag

SEQ ID NO: 62525 - RNA, 21 nt, Artificial Sequence
  LRRK2 RNA guide
acuaucuucucagaacuugcu

SEQ ID NO: 62526 - RNA, 21 nt, Artificial Sequence
  LRRK2 RNA guide
acucacuaucuucucagaacu

SEQ ID NO: 62527 - RNA, 21 nt, Artificial Sequence
  LRRK2 RNA guide
agaagauagugaguuuucaac

SEQ ID NO: 62528 - RNA, 21 nt, Artificial Sequence
  LRRK2 RNA guide
agauagugaguuuucaacaga

SEQ ID NO: 62529 - RNA, 21 nt, Artificial Sequence
  LRRK2 RNA guide
agcaaguucugagaagauagu

SEQ ID NO: 62530 - RNA, 21 nt, Artificial Sequence
  LRRK2 RNA guide
aguucugagaagauagugagu

SEQ ID NO: 62531 - RNA, 21 nt, Artificial Sequence
  LRRK2 RNA guide
auuaagcaaguucugagaaga

SEQ ID NO: 62532 - RNA, 21 nt, Artificial Sequence
  LRRK2 RNA guide
caaguucugagaagauaguga

SEQ ID NO: 62533 - RNA, 21 nt, Artificial Sequence
  LRRK2 RNA guide
cacuaucuucucagaacuugc

SEQ ID NO: 62534 - RNA, 21 nt, Artificial Sequence
  LRRK2 RNA guide
cuaucuucucagaacuugcuu

SEQ ID NO: 62535 - RNA, 21 nt, Artificial Sequence
  LRRK2 RNA guide
cucacuaucuucucagaacuu

SEQ ID NO: 62536 - RNA, 21 nt, Artificial Sequence
  LRRK2 RNA guide
cugagaagauagugaguuuuc

SEQ ID NO: 62537 - RNA, 21 nt, Artificial Sequence
  LRRK2 RNA guide
cuguugaaaacucacuaucuu

SEQ ID NO: 62538 - RNA, 21 nt, Artificial Sequence
  LRRK2 RNA guide
gaaaacucacuaucuucucag

SEQ ID NO: 62539 - RNA, 21 nt, Artificial Sequence
  LRRK2 RNA guide
gaagauagugaguuuucaaca

SEQ ID NO: 62540 - RNA, 21 nt, Artificial Sequence
  LRRK2 RNA guide
gagaagauagugaguuuucaa

SEQ ID NO: 62541 - RNA, 21 nt, Artificial Sequence
  LRRK2 RNA guide
gauagugaguuuucaacagaa

SEQ ID NO: 62542 - RNA, 21 nt, Artificial Sequence
  LRRK2 RNA guide
gcaaguucugagaagauagug

SEQ ID NO: 62543 - RNA, 21 nt, Artificial Sequence
  LRRK2 RNA guide
guucugagaagauagugaguu

SEQ ID NO: 62544 - RNA, 21 nt, Artificial Sequence
  LRRK2 RNA guide
guugaaaacucacuaucuucu

SEQ ID NO: 62545 - RNA, 21 nt, Artificial Sequence
  LRRK2 RNA guide
guuuauuaagcaaguucugag

SEQ ID NO: 62546 - RNA, 21 nt, Artificial Sequence
  LRRK2 RNA guide
uaagcaaguucugagaagaua

SEQ ID NO: 62547 - RNA, 21 nt, Artificial Sequence
  LRRK2 RNA guide
uaucuucucagaacuugcuua

SEQ ID NO: 62548 - RNA, 21 nt, Artificial Sequence
  LRRK2 RNA guide
uauuaagcaaguucugagaag

SEQ ID NO: 62549 - RNA, 21 nt, Artificial Sequence
  LRRK2 RNA guide
ucacuaucuucucagaacuug

SEQ ID NO: 62550 - RNA, 21 nt, Artificial Sequence
  LRRK2 RNA guide
ucugagaagauagugaguuuu

SEQ ID NO: 62551 - RNA, 21 nt, Artificial Sequence
  LRRK2 RNA guide
ucuguugaaaacucacuaucu

SEQ ID NO: 62552 - RNA, 21 nt, Artificial Sequence
  LRRK2 RNA guide
ugaaaacucacuaucuucuca

SEQ ID NO: 62553 - RNA, 21 nt, Artificial Sequence
  LRRK2 RNA guide
ugagaagauagugaguuuuca

SEQ ID NO: 62554 - RNA, 21 nt, Artificial Sequence
  LRRK2 RNA guide
uguugaaaacucacuaucuuc

SEQ ID NO: 62555 - RNA, 21 nt, Artificial Sequence
  LRRK2 RNA guide
uuaagcaaguucugagaagau

SEQ ID NO: 62556 - RNA, 21 nt, Artificial Sequence
  LRRK2 RNA guide
uucugagaagauagugaguuu

SEQ ID NO: 62557 - RNA, 21 nt, Artificial Sequence
  LRRK2 RNA guide
uucuguugaaaacucacuauc

SEQ ID NO: 62558 - RNA, 21 nt, Artificial Sequence
  LRRK2 RNA guide
uugaaaacucacuaucuucuc

SEQ ID NO: 62559 - RNA, 22 nt, Artificial Sequence
  LRRK2 RNA guide
aaaacucacuaucuucucagaa

SEQ ID NO: 62560 - RNA, 22 nt, Artificial Sequence
  LRRK2 RNA guide
aaacucacuaucuucucagaac

SEQ ID NO: 62561 - RNA, 22 nt, Artificial Sequence
  LRRK2 RNA guide
aacucacuaucuucucagaacu

SEQ ID NO: 62562 - RNA, 22 nt, Artificial Sequence
  LRRK2 RNA guide
aagauagugaguuuucaacaga

SEQ ID NO: 62563 - RNA, 22 nt, Artificial Sequence
  LRRK2 RNA guide
aagcaaguucugagaagauagu

SEQ ID NO: 62564 - RNA, 22 nt, Artificial Sequence
  LRRK2 RNA guide
aaguucugagaagauagugagu

SEQ ID NO: 62565 - RNA, 22 nt, Artificial Sequence
  LRRK2 RNA guide
acuaucuucucagaacuugcuu

SEQ ID NO: 62566 - RNA, 22 nt, Artificial Sequence
  LRRK2 RNA guide
acucacuaucuucucagaacuu

SEQ ID NO: 62567 - RNA, 22 nt, Artificial Sequence
  LRRK2 RNA guide
agaagauagugaguuuucaaca

SEQ ID NO: 62568 - RNA, 22 nt, Artificial Sequence
  LRRK2 RNA guide
agauagugaguuuucaacagaa

SEQ ID NO: 62569 - RNA, 22 nt, Artificial Sequence
  LRRK2 RNA guide
agcaaguucugagaagauagug

SEQ ID NO: 62570 - RNA, 22 nt, Artificial Sequence
  LRRK2 RNA guide
aguucugagaagauagugaguu

SEQ ID NO: 62571 - RNA, 22 nt, Artificial Sequence
  LRRK2 RNA guide
aguuuauuaagcaaguucugag

SEQ ID NO: 62572 - RNA, 22 nt, Artificial Sequence
  LRRK2 RNA guide
auuaagcaaguucugagaagau

SEQ ID NO: 62573 - RNA, 22 nt, Artificial Sequence
  LRRK2 RNA guide
auucuguugaaaacucacuauc

SEQ ID NO: 62574 - RNA, 22 nt, Artificial Sequence
  LRRK2 RNA guide
caaguucugagaagauagugag

SEQ ID NO: 62575 - RNA, 22 nt, Artificial Sequence
  LRRK2 RNA guide
cacuaucuucucagaacuugcu

SEQ ID NO: 62576 - RNA, 22 nt, Artificial Sequence
  LRRK2 RNA guide
cuaucuucucagaacuugcuua

SEQ ID NO: 62577 - RNA, 22 nt, Artificial Sequence
  LRRK2 RNA guide
cucacuaucuucucagaacuug

SEQ ID NO: 62578 - RNA, 22 nt, Artificial Sequence
  LRRK2 RNA guide
cugagaagauagugaguuuuca

SEQ ID NO: 62579 - RNA, 22 nt, Artificial Sequence
  LRRK2 RNA guide
cuguugaaaacucacuaucuuc

SEQ ID NO: 62580 - RNA, 22 nt, Artificial Sequence
  LRRK2 RNA guide
gaaaacucacuaucuucucaga

SEQ ID NO: 62581 - RNA, 22 nt, Artificial Sequence
  LRRK2 RNA guide
gaagauagugaguuuucaacag

SEQ ID NO: 62582 - RNA, 22 nt, Artificial Sequence
  LRRK2 RNA guide
gagaagauagugaguuuucaac

SEQ ID NO: 62583 - RNA, 22 nt, Artificial Sequence
  LRRK2 RNA guide
gauagugaguuuucaacagaau

SEQ ID NO: 62584 - RNA, 22 nt, Artificial Sequence
  LRRK2 RNA guide
gcaaguucugagaagauaguga

SEQ ID NO: 62585 - RNA, 22 nt, Artificial Sequence
  LRRK2 RNA guide
guucugagaagauagugaguuu

SEQ ID NO: 62586 - RNA, 22 nt, Artificial Sequence
  LRRK2 RNA guide
guugaaaacucacuaucuucuc

SEQ ID NO: 62587 - RNA, 22 nt, Artificial Sequence
  LRRK2 RNA guide
guuuauuaagcaaguucugaga

SEQ ID NO: 62588 - RNA, 22 nt, Artificial Sequence
  LRRK2 RNA guide
uaagcaaguucugagaagauag

SEQ ID NO: 62589 - RNA, 22 nt, Artificial Sequence
  LRRK2 RNA guide
uaucuucucagaacuugcuuaa

SEQ ID NO: 62590 - RNA, 22 nt, Artificial Sequence
  LRRK2 RNA guide
uauuaagcaaguucugagaaga

SEQ ID NO: 62591 - RNA, 22 nt, Artificial Sequence
  LRRK2 RNA guide
ucacuaucuucucagaacuugc

SEQ ID NO: 62592 - RNA, 22 nt, Artificial Sequence
  LRRK2 RNA guide
ucugagaagauagugaguuuuc

SEQ ID NO: 62593 - RNA, 22 nt, Artificial Sequence
  LRRK2 RNA guide
ucuguugaaaacucacuaucuu

SEQ ID NO: 62594 - RNA, 22 nt, Artificial Sequence
  LRRK2 RNA guide
ugaaaacucacuaucuucucag

SEQ ID NO: 62595 - RNA, 22 nt, Artificial Sequence
  LRRK2 RNA guide
ugagaagauagugaguuuucaa

SEQ ID NO: 62596 - RNA, 22 nt, Artificial Sequence
  LRRK2 RNA guide
uguugaaaacucacuaucuucu

SEQ ID NO: 62597 - RNA, 22 nt, Artificial Sequence
  LRRK2 RNA guide
uuaagcaaguucugagaagaua

SEQ ID NO: 62598 - RNA, 22 nt, Artificial Sequence
  LRRK2 RNA guide
uuauuaagcaaguucugagaag

SEQ ID NO: 62599 - RNA, 22 nt, Artificial Sequence
  LRRK2 RNA guide
uucugagaagauagugaguuuu

SEQ ID NO: 62600 - RNA, 22 nt, Artificial Sequence
  LRRK2 RNA guide
uucuguugaaaacucacuaucu

SEQ ID NO: 62601 - RNA, 22 nt, Artificial Sequence
  LRRK2 RNA guide
uugaaaacucacuaucuucuca

SEQ ID NO: 62602 - RNA, 20 nt, Artificial Sequence
  LRRK2 RNA guide
aaaacucacugucuucucag

SEQ ID NO: 62603 - RNA, 20 nt, Artificial Sequence
  LRRK2 RNA guide
aaacucacugucuucucaga

SEQ ID NO: 62604 - RNA, 20 nt, Artificial Sequence
  LRRK2 RNA guide
aacucacugucuucucagaa

SEQ ID NO: 62605 - RNA, 20 nt, Artificial Sequence
  LRRK2 RNA guide
aagacagugaguuuucaaca

SEQ ID NO: 62606 - RNA, 20 nt, Artificial Sequence
  LRRK2 RNA guide
aagcaaguucugagaagaca

SEQ ID NO: 62607 - RNA, 20 nt, Artificial Sequence
  LRRK2 RNA guide
aaguucugagaagacaguga

SEQ ID NO: 62608 - RNA, 20 nt, Artificial Sequence
  LRRK2 RNA guide
acagugaguuuucaacagaa

SEQ ID NO: 62609 - RNA, 20 nt, Artificial Sequence
  LRRK2 RNA guide
acucacugucuucucagaac

SEQ ID NO: 62610 - RNA, 20 nt, Artificial Sequence
  LRRK2 RNA guide
acugucuucucagaacuugc

SEQ ID NO: 62611 - RNA, 20 nt, Artificial Sequence
  LRRK2 RNA guide
agaagacagugaguuuucaa

SEQ ID NO: 62612 - RNA, 20 nt, Artificial Sequence
  LRRK2 RNA guide
agacagugaguuuucaacag

SEQ ID NO: 62613 - RNA, 20 nt, Artificial Sequence
  LRRK2 RNA guide
agcaaguucugagaagacag

SEQ ID NO: 62614 - RNA, 20 nt, Artificial Sequence
  LRRK2 RNA guide
aguucugagaagacagugag

SEQ ID NO: 62615 - RNA, 20 nt, Artificial Sequence
  LRRK2 RNA guide
auucuguugaaaacucacug

SEQ ID NO: 62616 - RNA, 20 nt, Artificial Sequence
  LRRK2 RNA guide
caaguucugagaagacagug

SEQ ID NO: 62617 - RNA, 20 nt, Artificial Sequence
  LRRK2 RNA guide
cacugucuucucagaacuug

SEQ ID NO: 62618 - RNA, 20 nt, Artificial Sequence
  LRRK2 RNA guide
cucacugucuucucagaacu

SEQ ID NO: 62619 - RNA, 20 nt, Artificial Sequence
  LRRK2 RNA guide
cugagaagacagugaguuuu

SEQ ID NO: 62620 - RNA, 20 nt, Artificial Sequence
  LRRK2 RNA guide
cugucuucucagaacuugcu

SEQ ID NO: 62621 - RNA, 20 nt, Artificial Sequence
  LRRK2 RNA guide
cuguugaaaacucacugucu

SEQ ID NO: 62622 - RNA, 20 nt, Artificial Sequence
  LRRK2 RNA guide
gaaaacucacugucuucuca

SEQ ID NO: 62623 - RNA, 20 nt, Artificial Sequence
  LRRK2 RNA guide
gaagacagugaguuuucaac

SEQ ID NO: 62624 - RNA, 20 nt, Artificial Sequence
  LRRK2 RNA guide
gacagugaguuuucaacaga

SEQ ID NO: 62625 - RNA, 20 nt, Artificial Sequence
  LRRK2 RNA guide
gagaagacagugaguuuuca

SEQ ID NO: 62626 - RNA, 20 nt, Artificial Sequence
  LRRK2 RNA guide
gcaaguucugagaagacagu

SEQ ID NO: 62627 - RNA, 20 nt, Artificial Sequence
  LRRK2 RNA guide
guucugagaagacagugagu

SEQ ID NO: 62628 - RNA, 20 nt, Artificial Sequence
  LRRK2 RNA guide
guugaaaacucacugucuuc

SEQ ID NO: 62629 - RNA, 20 nt, Artificial Sequence
  LRRK2 RNA guide
uaagcaaguucugagaagac

SEQ ID NO: 62630 - RNA, 20 nt, Artificial Sequence
  LRRK2 RNA guide
ucacugucuucucagaacuu

SEQ ID NO: 62631 - RNA, 20 nt, Artificial Sequence
  LRRK2 RNA guide
ucugagaagacagugaguuu

SEQ ID NO: 62632 - RNA, 20 nt, Artificial Sequence
  LRRK2 RNA guide
ucuguugaaaacucacuguc

SEQ ID NO: 62633 - RNA, 20 nt, Artificial Sequence
  LRRK2 RNA guide
ugaaaacucacugucuucuc

SEQ ID NO: 62634 - RNA, 20 nt, Artificial Sequence
  LRRK2 RNA guide
ugagaagacagugaguuuuc

SEQ ID NO: 62635 - RNA, 20 nt, Artificial Sequence
  LRRK2 RNA guide
ugucuucucagaacuugcuu

SEQ ID NO: 62636 - RNA, 20 nt, Artificial Sequence
  LRRK2 RNA guide
uguugaaaacucacugucuu

SEQ ID NO: 62637 - RNA, 20 nt, Artificial Sequence
  LRRK2 RNA guide
uucugagaagacagugaguu

SEQ ID NO: 62638 - RNA, 20 nt, Artificial Sequence
  LRRK2 RNA guide
uucuguugaaaacucacugu

SEQ ID NO: 62639 - RNA, 20 nt, Artificial Sequence
  LRRK2 RNA guide
uugaaaacucacugucuucu

SEQ ID NO: 62640 - RNA, 21 nt, Artificial Sequence
  LRRK2 RNA guide
aaaacucacugucuucucaga

SEQ ID NO: 62641 - RNA, 21 nt, Artificial Sequence
  LRRK2 RNA guide
aaacucacugucuucucagaa

SEQ ID NO: 62642 - RNA, 21 nt, Artificial Sequence
  LRRK2 RNA guide
aacucacugucuucucagaac

SEQ ID NO: 62643 - RNA, 21 nt, Artificial Sequence
  LRRK2 RNA guide
aagacagugaguuuucaacag

SEQ ID NO: 62644 - RNA, 21 nt, Artificial Sequence
  LRRK2 RNA guide
aagcaaguucugagaagacag

SEQ ID NO: 62645 - RNA, 21 nt, Artificial Sequence
  LRRK2 RNA guide
aaguucugagaagacagugag

SEQ ID NO: 62646 - RNA, 21 nt, Artificial Sequence
  LRRK2 RNA guide
aauucuguugaaaacucacug

SEQ ID NO: 62647 - RNA, 21 nt, Artificial Sequence
  LRRK2 RNA guide
acagugaguuuucaacagaau

SEQ ID NO: 62648 - RNA, 21 nt, Artificial Sequence
  LRRK2 RNA guide
acucacugucuucucagaacu

SEQ ID NO: 62649 - RNA, 21 nt, Artificial Sequence
  LRRK2 RNA guide
acugucuucucagaacuugcu

SEQ ID NO: 62650 - RNA, 21 nt, Artificial Sequence
  LRRK2 RNA guide
agaagacagugaguuuucaac

SEQ ID NO: 62651 - RNA, 21 nt, Artificial Sequence
  LRRK2 RNA guide
agacagugaguuuucaacaga

SEQ ID NO: 62652 - RNA, 21 nt, Artificial Sequence
  LRRK2 RNA guide
agcaaguucugagaagacagu

SEQ ID NO: 62653 - RNA, 21 nt, Artificial Sequence
  LRRK2 RNA guide
aguucugagaagacagugagu

SEQ ID NO: 62654 - RNA, 21 nt, Artificial Sequence
  LRRK2 RNA guide
auucuguugaaaacucacugu

SEQ ID NO: 62655 - RNA, 21 nt, Artificial Sequence
  LRRK2 RNA guide
caaguucugagaagacaguga

SEQ ID NO: 62656 - RNA, 21 nt, Artificial Sequence
  LRRK2 RNA guide
cacugucuucucagaacuugc

SEQ ID NO: 62657 - RNA, 21 nt, Artificial Sequence
  LRRK2 RNA guide
cucacugucuucucagaacuu

SEQ ID NO: 62658 - RNA, 21 nt, Artificial Sequence
  LRRK2 RNA guide
cugagaagacagugaguuuuc

SEQ ID NO: 62659 - RNA, 21 nt, Artificial Sequence
  LRRK2 RNA guide
cugucuucucagaacuugcuu

SEQ ID NO: 62660 - RNA, 21 nt, Artificial Sequence
  LRRK2 RNA guide
cuguugaaaacucacugucuu

SEQ ID NO: 62661 - RNA, 21 nt, Artificial Sequence
  LRRK2 RNA guide
gaaaacucacugucuucucag

SEQ ID NO: 62662 - RNA, 21 nt, Artificial Sequence
  LRRK2 RNA guide
gaagacagugaguuuucaaca

SEQ ID NO: 62663 - RNA, 21 nt, Artificial Sequence
  LRRK2 RNA guide
gacagugaguuuucaacagaa

SEQ ID NO: 62664 - RNA, 21 nt, Artificial Sequence
  LRRK2 RNA guide
gagaagacagugaguuuucaa

SEQ ID NO: 62665 - RNA, 21 nt, Artificial Sequence
  LRRK2 RNA guide
gcaaguucugagaagacagug

SEQ ID NO: 62666 - RNA, 21 nt, Artificial Sequence
  LRRK2 RNA guide
guucugagaagacagugaguu

SEQ ID NO: 62667 - RNA, 21 nt, Artificial Sequence
  LRRK2 RNA guide
guugaaaacucacugucuucu

SEQ ID NO: 62668 - RNA, 21 nt, Artificial Sequence
  LRRK2 RNA guide
uaagcaaguucugagaagaca

SEQ ID NO: 62669 - RNA, 21 nt, Artificial Sequence
  LRRK2 RNA guide
ucacugucuucucagaacuug

SEQ ID NO: 62670 - RNA, 21 nt, Artificial Sequence
  LRRK2 RNA guide
ucugagaagacagugaguuuu

SEQ ID NO: 62671 - RNA, 21 nt, Artificial Sequence
  LRRK2 RNA guide
ucuguugaaaacucacugucu

SEQ ID NO: 62672 - RNA, 21 nt, Artificial Sequence
  LRRK2 RNA guide
ugaaaacucacugucuucuca

SEQ ID NO: 62673 - RNA, 21 nt, Artificial Sequence
  LRRK2 RNA guide
ugagaagacagugaguuuuca

SEQ ID NO: 62674 - RNA, 21 nt, Artificial Sequence
  LRRK2 RNA guide
ugucuucucagaacuugcuua

SEQ ID NO: 62675 - RNA, 21 nt, Artificial Sequence
  LRRK2 RNA guide
uguugaaaacucacugucuuc

SEQ ID NO: 62676 - RNA, 21 nt, Artificial Sequence
  LRRK2 RNA guide
uuaagcaaguucugagaagac

SEQ ID NO: 62677 - RNA, 21 nt, Artificial Sequence
  LRRK2 RNA guide
uucugagaagacagugaguuu

SEQ ID NO: 62678 - RNA, 21 nt, Artificial Sequence
  LRRK2 RNA guide
uucuguugaaaacucacuguc

SEQ ID NO: 62679 - RNA, 21 nt, Artificial Sequence
  LRRK2 RNA guide
uugaaaacucacugucuucuc

SEQ ID NO: 62680 - RNA, 22 nt, Artificial Sequence
  LRRK2 RNA guide
aaaacucacugucuucucagaa

SEQ ID NO: 62681 - RNA, 22 nt, Artificial Sequence
  LRRK2 RNA guide
aaacucacugucuucucagaac

SEQ ID NO: 62682 - RNA, 22 nt, Artificial Sequence
  LRRK2 RNA guide
aaauucuguugaaaacucacug

SEQ ID NO: 62683 - RNA, 22 nt, Artificial Sequence
  LRRK2 RNA guide
aacucacugucuucucagaacu

SEQ ID NO: 62684 - RNA, 22 nt, Artificial Sequence
  LRRK2 RNA guide
aagacagugaguuuucaacaga

SEQ ID NO: 62685 - RNA, 22 nt, Artificial Sequence
  LRRK2 RNA guide
aagcaaguucugagaagacagu

SEQ ID NO: 62686 - RNA, 22 nt, Artificial Sequence
  LRRK2 RNA guide
aaguucugagaagacagugagu

SEQ ID NO: 62687 - RNA, 22 nt, Artificial Sequence
  LRRK2 RNA guide
aauucuguugaaaacucacugu

SEQ ID NO: 62688 - RNA, 22 nt, Artificial Sequence
  LRRK2 RNA guide
acagugaguuuucaacagaauu

SEQ ID NO: 62689 - RNA, 22 nt, Artificial Sequence
  LRRK2 RNA guide
acucacugucuucucagaacuu

SEQ ID NO: 62690 - RNA, 22 nt, Artificial Sequence
  LRRK2 RNA guide
acugucuucucagaacuugcuu

SEQ ID NO: 62691 - RNA, 22 nt, Artificial Sequence
  LRRK2 RNA guide
agaagacagugaguuuucaaca

SEQ ID NO: 62692 - RNA, 22 nt, Artificial Sequence
  LRRK2 RNA guide
agacagugaguuuucaacagaa

SEQ ID NO: 62693 - RNA, 22 nt, Artificial Sequence
  LRRK2 RNA guide
agcaaguucugagaagacagug

SEQ ID NO: 62694 - RNA, 22 nt, Artificial Sequence
  LRRK2 RNA guide
aguucugagaagacagugaguu

SEQ ID NO: 62695 - RNA, 22 nt, Artificial Sequence
  LRRK2 RNA guide
auuaagcaaguucugagaagac

SEQ ID NO: 62696 - RNA, 22 nt, Artificial Sequence
  LRRK2 RNA guide
auucuguugaaaacucacuguc

SEQ ID NO: 62697 - RNA, 22 nt, Artificial Sequence
  LRRK2 RNA guide
caaguucugagaagacagugag

SEQ ID NO: 62698 - RNA, 22 nt, Artificial Sequence
  LRRK2 RNA guide
cacugucuucucagaacuugcu

SEQ ID NO: 62699 - RNA, 22 nt, Artificial Sequence
  LRRK2 RNA guide
cucacugucuucucagaacuug

SEQ ID NO: 62700 - RNA, 22 nt, Artificial Sequence
  LRRK2 RNA guide
cugagaagacagugaguuuuca

SEQ ID NO: 62701 - RNA, 22 nt, Artificial Sequence
  LRRK2 RNA guide
cugucuucucagaacuugcuua

SEQ ID NO: 62702 - RNA, 22 nt, Artificial Sequence
  LRRK2 RNA guide
cuguugaaaacucacugucuuc

SEQ ID NO: 62703 - RNA, 22 nt, Artificial Sequence
  LRRK2 RNA guide
gaaaacucacugucuucucaga

SEQ ID NO: 62704 - RNA, 22 nt, Artificial Sequence
  LRRK2 RNA guide
gaagacagugaguuuucaacag

SEQ ID NO: 62705 - RNA, 22 nt, Artificial Sequence
  LRRK2 RNA guide
gacagugaguuuucaacagaau

SEQ ID NO: 62706 - RNA, 22 nt, Artificial Sequence
  LRRK2 RNA guide
gagaagacagugaguuuucaac

SEQ ID NO: 62707 - RNA, 22 nt, Artificial Sequence
  LRRK2 RNA guide
gcaaguucugagaagacaguga

SEQ ID NO: 62708 - RNA, 22 nt, Artificial Sequence
  LRRK2 RNA guide
guucugagaagacagugaguuu

SEQ ID NO: 62709 - RNA, 22 nt, Artificial Sequence
  LRRK2 RNA guide
guugaaaacucacugucuucuc

SEQ ID NO: 62710 - RNA, 22 nt, Artificial Sequence
  LRRK2 RNA guide
uaagcaaguucugagaagacag

SEQ ID NO: 62711 - RNA, 22 nt, Artificial Sequence
  LRRK2 RNA guide
ucacugucuucucagaacuugc

SEQ ID NO: 62712 - RNA, 22 nt, Artificial Sequence
  LRRK2 RNA guide
ucugagaagacagugaguuuuc

SEQ ID NO: 62713 - RNA, 22 nt, Artificial Sequence
  LRRK2 RNA guide
ucuguugaaaacucacugucuu

SEQ ID NO: 62714 - RNA, 22 nt, Artificial Sequence
  LRRK2 RNA guide
ugaaaacucacugucuucucag

SEQ ID NO: 62715 - RNA, 22 nt, Artificial Sequence
  LRRK2 RNA guide
ugagaagacagugaguuuucaa

SEQ ID NO: 62716 - RNA, 22 nt, Artificial Sequence
  LRRK2 RNA guide
ugucuucucagaacuugcuuaa

SEQ ID NO: 62717 - RNA, 22 nt, Artificial Sequence
  LRRK2 RNA guide
uguugaaaacucacugucuucu

SEQ ID NO: 62718 - RNA, 22 nt, Artificial Sequence
  LRRK2 RNA guide
uuaagcaaguucugagaagaca

SEQ ID NO: 62719 - RNA, 22 nt, Artificial Sequence
  LRRK2 RNA guide
uucugagaagacagugaguuuu

SEQ ID NO: 62720 - RNA, 22 nt, Artificial Sequence
  LRRK2 RNA guide
uucuguugaaaacucacugucu

SEQ ID NO: 62721 - RNA, 22 nt, Artificial Sequence
  LRRK2 RNA guide
uugaaaacucacugucuucuca

SEQ ID NO: 62722 - RNA, 20 nt, Artificial Sequence
  LRRK2 RNA guide
aaaauuuccauaguauaggc

SEQ ID NO: 62723 - RNA, 20 nt, Artificial Sequence
  LRRK2 RNA guide
aaauuuccauaguauaggcu

SEQ ID NO: 62724 - RNA, 20 nt, Artificial Sequence
  LRRK2 RNA guide
aauggaugccuauguuuuag

SEQ ID NO: 62725 - RNA, 20 nt, Artificial Sequence
  LRRK2 RNA guide
aauuuccauaguauaggcua

SEQ ID NO: 62726 - RNA, 20 nt, Artificial Sequence
  LRRK2 RNA guide
acaauggaugccuauguuuu

SEQ ID NO: 62727 - RNA, 20 nt, Artificial Sequence
  LRRK2 RNA guide
agccuauacuauggaaauuu

SEQ ID NO: 62728 - RNA, 20 nt, Artificial Sequence
  LRRK2 RNA guide
aggcuaaaacauaggcaucc

SEQ ID NO: 62729 - RNA, 20 nt, Artificial Sequence
  LRRK2 RNA guide
aguauaggcuaaaacauagg

SEQ ID NO: 62730 - RNA, 20 nt, Artificial Sequence
  LRRK2 RNA guide
auaggcuaaaacauaggcau

SEQ ID NO: 62731 - RNA, 20 nt, Artificial Sequence
  LRRK2 RNA guide
augccuauguuuuagccuau

SEQ ID NO: 62732 - RNA, 20 nt, Artificial Sequence
  LRRK2 RNA guide
auggaugccuauguuuuagc

SEQ ID NO: 62733 - RNA, 20 nt, Artificial Sequence
  LRRK2 RNA guide
auguuuuagccuauacuaug

SEQ ID NO: 62734 - RNA, 20 nt, Artificial Sequence
  LRRK2 RNA guide
auuuccauaguauaggcuaa

SEQ ID NO: 62735 - RNA, 20 nt, Artificial Sequence
  LRRK2 RNA guide
caauggaugccuauguuuua

SEQ ID NO: 62736 - RNA, 20 nt, Artificial Sequence
  LRRK2 RNA guide
cacaauggaugccuauguuu

SEQ ID NO: 62737 - RNA, 20 nt, Artificial Sequence
  LRRK2 RNA guide
cauaguauaggcuaaaacau

SEQ ID NO: 62738 - RNA, 20 nt, Artificial Sequence
  LRRK2 RNA guide
ccauaguauaggcuaaaaca

SEQ ID NO: 62739 - RNA, 20 nt, Artificial Sequence
  LRRK2 RNA guide
ccuauguuuuagccuauacu

SEQ ID NO: 62740 - RNA, 20 nt, Artificial Sequence
  LRRK2 RNA guide
cuauguuuuagccuauacua

SEQ ID NO: 62741 - RNA, 20 nt, Artificial Sequence
  LRRK2 RNA guide
gaugccuauguuuuagccua

SEQ ID NO: 62742 - RNA, 20 nt, Artificial Sequence
  LRRK2 RNA guide
gccuauacuauggaaauuuu

SEQ ID NO: 62743 - RNA, 20 nt, Artificial Sequence
  LRRK2 RNA guide
gccuauguuuuagccuauac

SEQ ID NO: 62744 - RNA, 20 nt, Artificial Sequence
  LRRK2 RNA guide
ggaugccuauguuuuagccu

SEQ ID NO: 62745 - RNA, 20 nt, Artificial Sequence
  LRRK2 RNA guide
ggcuaaaacauaggcaucca

SEQ ID NO: 62746 - RNA, 20 nt, Artificial Sequence
  LRRK2 RNA guide
guaggaaaaauuuccauagu

SEQ ID NO: 62747 - RNA, 20 nt, Artificial Sequence
  LRRK2 RNA guide
guauaggcuaaaacauaggc

SEQ ID NO: 62748 - RNA, 20 nt, Artificial Sequence
  LRRK2 RNA guide
guuuuagccuauacuaugga

SEQ ID NO: 62749 - RNA, 20 nt, Artificial Sequence
  LRRK2 RNA guide
uagccuauacuauggaaauu

SEQ ID NO: 62750 - RNA, 20 nt, Artificial Sequence
  LRRK2 RNA guide
uaggcuaaaacauaggcauc

SEQ ID NO: 62751 - RNA, 20 nt, Artificial Sequence
  LRRK2 RNA guide
uaguauaggcuaaaacauag

SEQ ID NO: 62752 - RNA, 20 nt, Artificial Sequence
  LRRK2 RNA guide
uauaggcuaaaacauaggca

SEQ ID NO: 62753 - RNA, 20 nt, Artificial Sequence
  LRRK2 RNA guide
ucacaauggaugccuauguu

SEQ ID NO: 62754 - RNA, 20 nt, Artificial Sequence
  LRRK2 RNA guide
uccauaguauaggcuaaaac

SEQ ID NO: 62755 - RNA, 20 nt, Artificial Sequence
  LRRK2 RNA guide
ugccuauguuuuagccuaua

SEQ ID NO: 62756 - RNA, 20 nt, Artificial Sequence
  LRRK2 RNA guide
uggaugccuauguuuuagcc

SEQ ID NO: 62757 - RNA, 20 nt, Artificial Sequence
  LRRK2 RNA guide
uguuuuagccuauacuaugg

SEQ ID NO: 62758 - RNA, 20 nt, Artificial Sequence
  LRRK2 RNA guide
uuagccuauacuauggaaau

SEQ ID NO: 62759 - RNA, 20 nt, Artificial Sequence
  LRRK2 RNA guide
uuccauaguauaggcuaaaa

SEQ ID NO: 62760 - RNA, 20 nt, Artificial Sequence
  LRRK2 RNA guide
uuuagccuauacuauggaaa

SEQ ID NO: 62761 - RNA, 20 nt, Artificial Sequence
  LRRK2 RNA guide
uuuccauaguauaggcuaaa

SEQ ID NO: 62762 - RNA, 20 nt, Artificial Sequence
  LRRK2 RNA guide
uuuuagccuauacuauggaa

SEQ ID NO: 62763 - RNA, 21 nt, Artificial Sequence
  LRRK2 RNA guide
aauggaugccuauguuuuagc

SEQ ID NO: 62764 - RNA, 21 nt, Artificial Sequence
  LRRK2 RNA guide
acaauggaugccuauguuuua

SEQ ID NO: 62765 - RNA, 21 nt, Artificial Sequence
  LRRK2 RNA guide
aggcuaaaacauaggcaucca

SEQ ID NO: 62766 - RNA, 21 nt, Artificial Sequence
  LRRK2 RNA guide
aguauaggcuaaaacauaggc

SEQ ID NO: 62767 - RNA, 21 nt, Artificial Sequence
  LRRK2 RNA guide
auaggcuaaaacauaggcauc

SEQ ID NO: 62768 - RNA, 21 nt, Artificial Sequence
  LRRK2 RNA guide
aucacaauggaugccuauguu

SEQ ID NO: 62769 - RNA, 21 nt, Artificial Sequence
  LRRK2 RNA guide
augccuauguuuuagccuaua

SEQ ID NO: 62770 - RNA, 21 nt, Artificial Sequence
  LRRK2 RNA guide
auggaugccuauguuuuagcc

SEQ ID NO: 62771 - RNA, 21 nt, Artificial Sequence
  LRRK2 RNA guide
auguuuuagccuauacuaugg

SEQ ID NO: 62772 - RNA, 21 nt, Artificial Sequence
  LRRK2 RNA guide
caauggaugccuauguuuuag

SEQ ID NO: 62773 - RNA, 21 nt, Artificial Sequence
  LRRK2 RNA guide
cacaauggaugccuauguuuu

SEQ ID NO: 62774 - RNA, 21 nt, Artificial Sequence
  LRRK2 RNA guide
ccauaguauaggcuaaaacau

SEQ ID NO: 62775 - RNA, 21 nt, Artificial Sequence
  LRRK2 RNA guide
ccuauguuuuagccuauacua

SEQ ID NO: 62776 - RNA, 21 nt, Artificial Sequence
  LRRK2 RNA guide
gaugccuauguuuuagccuau

SEQ ID NO: 62777 - RNA, 21 nt, Artificial Sequence
  LRRK2 RNA guide
gccuauguuuuagccuauacu

SEQ ID NO: 62778 - RNA, 21 nt, Artificial Sequence
  LRRK2 RNA guide
ggaugccuauguuuuagccua

SEQ ID NO: 62779 - RNA, 21 nt, Artificial Sequence
  LRRK2 RNA guide
ggcuaaaacauaggcauccau

SEQ ID NO: 62780 - RNA, 21 nt, Artificial Sequence
  LRRK2 RNA guide
guauaggcuaaaacauaggca

SEQ ID NO: 62781 - RNA, 21 nt, Artificial Sequence
  LRRK2 RNA guide
guuuuagccuauacuauggaa

SEQ ID NO: 62782 - RNA, 21 nt, Artificial Sequence
  LRRK2 RNA guide
uaggcuaaaacauaggcaucc

SEQ ID NO: 62783 - RNA, 21 nt, Artificial Sequence
  LRRK2 RNA guide
uaguauaggcuaaaacauagg

SEQ ID NO: 62784 - RNA, 21 nt, Artificial Sequence
  LRRK2 RNA guide
uauaggcuaaaacauaggcau

SEQ ID NO: 62785 - RNA, 21 nt, Artificial Sequence
  LRRK2 RNA guide
ucacaauggaugccuauguuu

SEQ ID NO: 62786 - RNA, 21 nt, Artificial Sequence
  LRRK2 RNA guide
uccauaguauaggcuaaaaca

SEQ ID NO: 62787 - RNA, 21 nt, Artificial Sequence
  LRRK2 RNA guide
ugccuauguuuuagccuauac

SEQ ID NO: 62788 - RNA, 21 nt, Artificial Sequence
  LRRK2 RNA guide
uggaugccuauguuuuagccu

SEQ ID NO: 62789 - RNA, 21 nt, Artificial Sequence
  LRRK2 RNA guide
uguuuuagccuauacuaugga

SEQ ID NO: 62790 - RNA, 21 nt, Artificial Sequence
  LRRK2 RNA guide
uuccauaguauaggcuaaaac

SEQ ID NO: 62791 - RNA, 22 nt, Artificial Sequence
  LRRK2 RNA guide
aauggaugccuauguuuuagcc

SEQ ID NO: 62792 - RNA, 22 nt, Artificial Sequence
  LRRK2 RNA guide
acaauggaugccuauguuuuag

SEQ ID NO: 62793 - RNA, 22 nt, Artificial Sequence
  LRRK2 RNA guide
aggcuaaaacauaggcauccau

SEQ ID NO: 62794 - RNA, 22 nt, Artificial Sequence
  LRRK2 RNA guide
aguauaggcuaaaacauaggca

SEQ ID NO: 62795 - RNA, 22 nt, Artificial Sequence
  LRRK2 RNA guide
auaggcuaaaacauaggcaucc

SEQ ID NO: 62796 - RNA, 22 nt, Artificial Sequence
  LRRK2 RNA guide
auaguauaggcuaaaacauagg

SEQ ID NO: 62797 - RNA, 22 nt, Artificial Sequence
  LRRK2 RNA guide
aucacaauggaugccuauguuu

SEQ ID NO: 62798 - RNA, 22 nt, Artificial Sequence
  LRRK2 RNA guide
augccuauguuuuagccuauac

SEQ ID NO: 62799 - RNA, 22 nt, Artificial Sequence
  LRRK2 RNA guide
auggaugccuauguuuuagccu

SEQ ID NO: 62800 - RNA, 22 nt, Artificial Sequence
  LRRK2 RNA guide
auguuuuagccuauacuaugga

SEQ ID NO: 62801 - RNA, 22 nt, Artificial Sequence
  LRRK2 RNA guide
caauggaugccuauguuuuagc

SEQ ID NO: 62802 - RNA, 22 nt, Artificial Sequence
  LRRK2 RNA guide
cacaauggaugccuauguuuua

SEQ ID NO: 62803 - RNA, 22 nt, Artificial Sequence
  LRRK2 RNA guide
caguaggaaaaauuuccauagu

SEQ ID NO: 62804 - RNA, 22 nt, Artificial Sequence
  LRRK2 RNA guide
cauaguauaggcuaaaacauag

SEQ ID NO: 62805 - RNA, 22 nt, Artificial Sequence
  LRRK2 RNA guide
caucacaauggaugccuauguu

SEQ ID NO: 62806 - RNA, 22 nt, Artificial Sequence
  LRRK2 RNA guide
ccauaguauaggcuaaaacaua

SEQ ID NO: 62807 - RNA, 22 nt, Artificial Sequence
  LRRK2 RNA guide
ccuauguuuuagccuauacuau

SEQ ID NO: 62808 - RNA, 22 nt, Artificial Sequence
  LRRK2 RNA guide
cuauguuuuagccuauacuaug

SEQ ID NO: 62809 - RNA, 22 nt, Artificial Sequence
  LRRK2 RNA guide
gaaaaauuuccauaguauaggc

SEQ ID NO: 62810 - RNA, 22 nt, Artificial Sequence
  LRRK2 RNA guide
gaugccuauguuuuagccuaua

SEQ ID NO: 62811 - RNA, 22 nt, Artificial Sequence
  LRRK2 RNA guide
gccuauacuauggaaauuuuuc

SEQ ID NO: 62812 - RNA, 22 nt, Artificial Sequence
  LRRK2 RNA guide
gccuauguuuuagccuauacua

SEQ ID NO: 62813 - RNA, 22 nt, Artificial Sequence
  LRRK2 RNA guide
ggaaaaauuuccauaguauagg

SEQ ID NO: 62814 - RNA, 22 nt, Artificial Sequence
  LRRK2 RNA guide
ggaugccuauguuuuagccuau

SEQ ID NO: 62815 - RNA, 22 nt, Artificial Sequence
  LRRK2 RNA guide
ggcuaaaacauaggcauccauu

SEQ ID NO: 62816 - RNA, 22 nt, Artificial Sequence
  LRRK2 RNA guide
guauaggcuaaaacauaggcau

SEQ ID NO: 62817 - RNA, 22 nt, Artificial Sequence
  LRRK2 RNA guide
guuuuagccuauacuauggaaa

SEQ ID NO: 62818 - RNA, 22 nt, Artificial Sequence
  LRRK2 RNA guide
uaggcuaaaacauaggcaucca

SEQ ID NO: 62819 - RNA, 22 nt, Artificial Sequence
  LRRK2 RNA guide
uaguauaggcuaaaacauaggc

SEQ ID NO: 62820 - RNA, 22 nt, Artificial Sequence
  LRRK2 RNA guide
uauaggcuaaaacauaggcauc

SEQ ID NO: 62821 - RNA, 22 nt, Artificial Sequence
  LRRK2 RNA guide
uauguuuuagccuauacuaugg

SEQ ID NO: 62822 - RNA, 22 nt, Artificial Sequence
  LRRK2 RNA guide
ucacaauggaugccuauguuuu

SEQ ID NO: 62823 - RNA, 22 nt, Artificial Sequence
  LRRK2 RNA guide
uccauaguauaggcuaaaacau

SEQ ID NO: 62824 - RNA, 22 nt, Artificial Sequence
  LRRK2 RNA guide
ugccuauguuuuagccuauacu

SEQ ID NO: 62825 - RNA, 22 nt, Artificial Sequence
  LRRK2 RNA guide
uggaugccuauguuuuagccua

SEQ ID NO: 62826 - RNA, 22 nt, Artificial Sequence
  LRRK2 RNA guide
uguuuuagccuauacuauggaa

SEQ ID NO: 62827 - RNA, 22 nt, Artificial Sequence
  LRRK2 RNA guide
uuccauaguauaggcuaaaaca

SEQ ID NO: 62828 - RNA, 22 nt, Artificial Sequence
  LRRK2 RNA guide
uuuccauaguauaggcuaaaac

SEQ ID NO: 62829 - RNA, 20 nt, Artificial Sequence
  LRRK2 RNA guide
agacuaaaacauaggcaucc

SEQ ID NO: 62830 - RNA, 20 nt, Artificial Sequence
  LRRK2 RNA guide
aguauagacuaaaacauagg

SEQ ID NO: 62831 - RNA, 20 nt, Artificial Sequence
  LRRK2 RNA guide
auagacuaaaacauaggcau

SEQ ID NO: 62832 - RNA, 20 nt, Artificial Sequence
  LRRK2 RNA guide
augccuauguuuuagucuau

SEQ ID NO: 62833 - RNA, 20 nt, Artificial Sequence
  LRRK2 RNA guide
auggaugccuauguuuuagu

SEQ ID NO: 62834 - RNA, 20 nt, Artificial Sequence
  LRRK2 RNA guide
ccauaguauagacuaaaaca

SEQ ID NO: 62835 - RNA, 20 nt, Artificial Sequence
  LRRK2 RNA guide
ccuauguuuuagucuauacu

SEQ ID NO: 62836 - RNA, 20 nt, Artificial Sequence
  LRRK2 RNA guide
gacuaaaacauaggcaucca

SEQ ID NO: 62837 - RNA, 20 nt, Artificial Sequence
  LRRK2 RNA guide
gaugccuauguuuuagucua

SEQ ID NO: 62838 - RNA, 20 nt, Artificial Sequence
  LRRK2 RNA guide
gccuauguuuuagucuauac

SEQ ID NO: 62839 - RNA, 20 nt, Artificial Sequence
  LRRK2 RNA guide
ggaugccuauguuuuagucu

SEQ ID NO: 62840 - RNA, 20 nt, Artificial Sequence
  LRRK2 RNA guide
guauagacuaaaacauaggc

SEQ ID NO: 62841 - RNA, 20 nt, Artificial Sequence
  LRRK2 RNA guide
guuuuagucuauacuaugga

SEQ ID NO: 62842 - RNA, 20 nt, Artificial Sequence
  LRRK2 RNA guide
uagacuaaaacauaggcauc

SEQ ID NO: 62843 - RNA, 20 nt, Artificial Sequence
  LRRK2 RNA guide
uauagacuaaaacauaggca

SEQ ID NO: 62844 - RNA, 20 nt, Artificial Sequence
  LRRK2 RNA guide
uccauaguauagacuaaaac

SEQ ID NO: 62845 - RNA, 20 nt, Artificial Sequence
  LRRK2 RNA guide
ugccuauguuuuagucuaua

SEQ ID NO: 62846 - RNA, 20 nt, Artificial Sequence
  LRRK2 RNA guide
uggaugccuauguuuuaguc

SEQ ID NO: 62847 - RNA, 20 nt, Artificial Sequence
  LRRK2 RNA guide
uguuuuagucuauacuaugg

SEQ ID NO: 62848 - RNA, 21 nt, Artificial Sequence
  LRRK2 RNA guide
aauggaugccuauguuuuagu

SEQ ID NO: 62849 - RNA, 21 nt, Artificial Sequence
  LRRK2 RNA guide
agacuaaaacauaggcaucca

SEQ ID NO: 62850 - RNA, 21 nt, Artificial Sequence
  LRRK2 RNA guide
aguauagacuaaaacauaggc

SEQ ID NO: 62851 - RNA, 21 nt, Artificial Sequence
  LRRK2 RNA guide
auagacuaaaacauaggcauc

SEQ ID NO: 62852 - RNA, 21 nt, Artificial Sequence
  LRRK2 RNA guide
auggaugccuauguuuuaguc

SEQ ID NO: 62853 - RNA, 21 nt, Artificial Sequence
  LRRK2 RNA guide
gacuaaaacauaggcauccau

SEQ ID NO: 62854 - RNA, 21 nt, Artificial Sequence
  LRRK2 RNA guide
gaugccuauguuuuagucuau

SEQ ID NO: 62855 - RNA, 21 nt, Artificial Sequence
  LRRK2 RNA guide
gccuauguuuuagucuauacu

SEQ ID NO: 62856 - RNA, 21 nt, Artificial Sequence
  LRRK2 RNA guide
ggaugccuauguuuuagucua

SEQ ID NO: 62857 - RNA, 21 nt, Artificial Sequence
  LRRK2 RNA guide
guauagacuaaaacauaggca

SEQ ID NO: 62858 - RNA, 21 nt, Artificial Sequence
  LRRK2 RNA guide
uagacuaaaacauaggcaucc

SEQ ID NO: 62859 - RNA, 21 nt, Artificial Sequence
  LRRK2 RNA guide
ugccuauguuuuagucuauac

SEQ ID NO: 62860 - RNA, 21 nt, Artificial Sequence
  LRRK2 RNA guide
uggaugccuauguuuuagucu

SEQ ID NO: 62861 - RNA, 22 nt, Artificial Sequence
  LRRK2 RNA guide
aauggaugccuauguuuuaguc

SEQ ID NO: 62862 - RNA, 22 nt, Artificial Sequence
  LRRK2 RNA guide
agacuaaaacauaggcauccau

SEQ ID NO: 62863 - RNA, 22 nt, Artificial Sequence
  LRRK2 RNA guide
aguauagacuaaaacauaggca

SEQ ID NO: 62864 - RNA, 22 nt, Artificial Sequence
  LRRK2 RNA guide
auagacuaaaacauaggcaucc

SEQ ID NO: 62865 - RNA, 22 nt, Artificial Sequence
  LRRK2 RNA guide
augccuauguuuuagucuauac

SEQ ID NO: 62866 - RNA, 22 nt, Artificial Sequence
  LRRK2 RNA guide
auggaugccuauguuuuagucu

SEQ ID NO: 62867 - RNA, 22 nt, Artificial Sequence
  LRRK2 RNA guide
caauggaugccuauguuuuagu

SEQ ID NO: 62868 - RNA, 22 nt, Artificial Sequence
  LRRK2 RNA guide
gacuaaaacauaggcauccauu

SEQ ID NO: 62869 - RNA, 22 nt, Artificial Sequence
  LRRK2 RNA guide
gaugccuauguuuuagucuaua

SEQ ID NO: 62870 - RNA, 22 nt, Artificial Sequence
  LRRK2 RNA guide
gccuauguuuuagucuauacua

SEQ ID NO: 62871 - RNA, 22 nt, Artificial Sequence
  LRRK2 RNA guide
ggaugccuauguuuuagucuau

SEQ ID NO: 62872 - RNA, 22 nt, Artificial Sequence
  LRRK2 RNA guide
guauagacuaaaacauaggcau

SEQ ID NO: 62873 - RNA, 22 nt, Artificial Sequence
  LRRK2 RNA guide
uagacuaaaacauaggcaucca

SEQ ID NO: 62874 - RNA, 22 nt, Artificial Sequence
  LRRK2 RNA guide
uaguauagacuaaaacauaggc

SEQ ID NO: 62875 - RNA, 22 nt, Artificial Sequence
  LRRK2 RNA guide
uauagacuaaaacauaggcauc

SEQ ID NO: 62876 - RNA, 22 nt, Artificial Sequence
  LRRK2 RNA guide
ugccuauguuuuagucuauacu

SEQ ID NO: 62877 - RNA, 22 nt, Artificial Sequence
  LRRK2 RNA guide
uggaugccuauguuuuagucua

SEQ ID NO: 62878 - RNA, 20 nt, Artificial Sequence
  LRRK2 RNA guide
aaaauuggcugcauccauca

SEQ ID NO: 62879 - RNA, 20 nt, Artificial Sequence
  LRRK2 RNA guide
auggaugcagccaauuuuaa

SEQ ID NO: 62880 - RNA, 20 nt, Artificial Sequence
  LRRK2 RNA guide
auugauggaugcagccaauu

SEQ ID NO: 62881 - RNA, 20 nt, Artificial Sequence
  LRRK2 RNA guide
auugauugauggaugcagcc

SEQ ID NO: 62882 - RNA, 20 nt, Artificial Sequence
  LRRK2 RNA guide
gaugcagccaauuuuaaaaa

SEQ ID NO: 62883 - RNA, 20 nt, Artificial Sequence
  LRRK2 RNA guide
gauggaugcagccaauuuua

SEQ ID NO: 62884 - RNA, 20 nt, Artificial Sequence
  LRRK2 RNA guide
gauugauggaugcagccaau

SEQ ID NO: 62885 - RNA, 20 nt, Artificial Sequence
  LRRK2 RNA guide
ggaugcagccaauuuuaaaa

SEQ ID NO: 62886 - RNA, 20 nt, Artificial Sequence
  LRRK2 RNA guide
uaaaauuggcugcauccauc

SEQ ID NO: 62887 - RNA, 20 nt, Artificial Sequence
  LRRK2 RNA guide
ugauggaugcagccaauuuu

SEQ ID NO: 62888 - RNA, 20 nt, Artificial Sequence
  LRRK2 RNA guide
ugauugauggaugcagccaa

SEQ ID NO: 62889 - RNA, 20 nt, Artificial Sequence
  LRRK2 RNA guide
uggaugcagccaauuuuaaa

SEQ ID NO: 62890 - RNA, 20 nt, Artificial Sequence
  LRRK2 RNA guide
uuaaaauuggcugcauccau

SEQ ID NO: 62891 - RNA, 20 nt, Artificial Sequence
  LRRK2 RNA guide
uugauggaugcagccaauuu

SEQ ID NO: 62892 - RNA, 20 nt, Artificial Sequence
  LRRK2 RNA guide
uugauugauggaugcagcca

SEQ ID NO: 62893 - RNA, 20 nt, Artificial Sequence
  LRRK2 RNA guide
uuuaaaauuggcugcaucca

SEQ ID NO: 62894 - RNA, 20 nt, Artificial Sequence
  LRRK2 RNA guide
uuuuaaaauuggcugcaucc

SEQ ID NO: 62895 - RNA, 20 nt, Artificial Sequence
  LRRK2 RNA guide
uuuuuaaaauuggcugcauc

SEQ ID NO: 62896 - RNA, 21 nt, Artificial Sequence
  LRRK2 RNA guide
aaaauuggcugcauccaucaa

SEQ ID NO: 62897 - RNA, 21 nt, Artificial Sequence
  LRRK2 RNA guide
auggaugcagccaauuuuaaa

SEQ ID NO: 62898 - RNA, 21 nt, Artificial Sequence
  LRRK2 RNA guide
auugauggaugcagccaauuu

SEQ ID NO: 62899 - RNA, 21 nt, Artificial Sequence
  LRRK2 RNA guide
auugauugauggaugcagcca

SEQ ID NO: 62900 - RNA, 21 nt, Artificial Sequence
  LRRK2 RNA guide
cauugauugauggaugcagcc

SEQ ID NO: 62901 - RNA, 21 nt, Artificial Sequence
  LRRK2 RNA guide
gauggaugcagccaauuuuaa

SEQ ID NO: 62902 - RNA, 21 nt, Artificial Sequence
  LRRK2 RNA guide
gauugauggaugcagccaauu

SEQ ID NO: 62903 - RNA, 21 nt, Artificial Sequence
  LRRK2 RNA guide
ggaugcagccaauuuuaaaaa

SEQ ID NO: 62904 - RNA, 21 nt, Artificial Sequence
  LRRK2 RNA guide
uaaaauuggcugcauccauca

SEQ ID NO: 62905 - RNA, 21 nt, Artificial Sequence
  LRRK2 RNA guide
ugauggaugcagccaauuuua

SEQ ID NO: 62906 - RNA, 21 nt, Artificial Sequence
  LRRK2 RNA guide
ugauugauggaugcagccaau

SEQ ID NO: 62907 - RNA, 21 nt, Artificial Sequence
  LRRK2 RNA guide
uggaugcagccaauuuuaaaa

SEQ ID NO: 62908 - RNA, 21 nt, Artificial Sequence
  LRRK2 RNA guide
uuaaaauuggcugcauccauc

SEQ ID NO: 62909 - RNA, 21 nt, Artificial Sequence
  LRRK2 RNA guide
uugauggaugcagccaauuuu

SEQ ID NO: 62910 - RNA, 21 nt, Artificial Sequence
  LRRK2 RNA guide
uugauugauggaugcagccaa

SEQ ID NO: 62911 - RNA, 21 nt, Artificial Sequence
  LRRK2 RNA guide
uuuaaaauuggcugcauccau

SEQ ID NO: 62912 - RNA, 21 nt, Artificial Sequence
  LRRK2 RNA guide
uuuuaaaauuggcugcaucca

SEQ ID NO: 62913 - RNA, 21 nt, Artificial Sequence
  LRRK2 RNA guide
uuuuuaaaauuggcugcaucc

SEQ ID NO: 62914 - RNA, 22 nt, Artificial Sequence
  LRRK2 RNA guide
aaaauuggcugcauccaucaau

SEQ ID NO: 62915 - RNA, 22 nt, Artificial Sequence
  LRRK2 RNA guide
acauugauugauggaugcagcc

SEQ ID NO: 62916 - RNA, 22 nt, Artificial Sequence
  LRRK2 RNA guide
auggaugcagccaauuuuaaaa

SEQ ID NO: 62917 - RNA, 22 nt, Artificial Sequence
  LRRK2 RNA guide
auugauggaugcagccaauuuu

SEQ ID NO: 62918 - RNA, 22 nt, Artificial Sequence
  LRRK2 RNA guide
auugauugauggaugcagccaa

SEQ ID NO: 62919 - RNA, 22 nt, Artificial Sequence
  LRRK2 RNA guide
auuuuuaaaauuggcugcaucc

SEQ ID NO: 62920 - RNA, 22 nt, Artificial Sequence
  LRRK2 RNA guide
cauugauugauggaugcagcca

SEQ ID NO: 62921 - RNA, 22 nt, Artificial Sequence
  LRRK2 RNA guide
gauggaugcagccaauuuuaaa

SEQ ID NO: 62922 - RNA, 22 nt, Artificial Sequence
  LRRK2 RNA guide
gauugauggaugcagccaauuu

SEQ ID NO: 62923 - RNA, 22 nt, Artificial Sequence
  LRRK2 RNA guide
ggaugcagccaauuuuaaaaau

SEQ ID NO: 62924 - RNA, 22 nt, Artificial Sequence
  LRRK2 RNA guide
uaaaauuggcugcauccaucaa

SEQ ID NO: 62925 - RNA, 22 nt, Artificial Sequence
  LRRK2 RNA guide
ugauggaugcagccaauuuuaa

SEQ ID NO: 62926 - RNA, 22 nt, Artificial Sequence
  LRRK2 RNA guide
ugauugauggaugcagccaauu

SEQ ID NO: 62927 - RNA, 22 nt, Artificial Sequence
  LRRK2 RNA guide
uggaugcagccaauuuuaaaaa

SEQ ID NO: 62928 - RNA, 22 nt, Artificial Sequence
  LRRK2 RNA guide
uuaaaauuggcugcauccauca

SEQ ID NO: 62929 - RNA, 22 nt, Artificial Sequence
  LRRK2 RNA guide
uugauggaugcagccaauuuua

SEQ ID NO: 62930 - RNA, 22 nt, Artificial Sequence
  LRRK2 RNA guide
uugauugauggaugcagccaau

SEQ ID NO: 62931 - RNA, 22 nt, Artificial Sequence
  LRRK2 RNA guide
uuuaaaauuggcugcauccauc

SEQ ID NO: 62932 - RNA, 22 nt, Artificial Sequence
  LRRK2 RNA guide
uuuuaaaauuggcugcauccau

SEQ ID NO: 62933 - RNA, 22 nt, Artificial Sequence
  LRRK2 RNA guide
uuuuuaaaauuggcugcaucca

SEQ ID NO: 62934 - RNA, 20 nt, Artificial Sequence
  LRRK2 RNA guide
acaauuggcugcauccauca

SEQ ID NO: 62935 - RNA, 20 nt, Artificial Sequence
  LRRK2 RNA guide
augcagccaauuguaaaaau

SEQ ID NO: 62936 - RNA, 20 nt, Artificial Sequence
  LRRK2 RNA guide
auggaugcagccaauuguaa

SEQ ID NO: 62937 - RNA, 20 nt, Artificial Sequence
  LRRK2 RNA guide
auuuuuacaauuggcugcau

SEQ ID NO: 62938 - RNA, 20 nt, Artificial Sequence
  LRRK2 RNA guide
gaugcagccaauuguaaaaa

SEQ ID NO: 62939 - RNA, 20 nt, Artificial Sequence
  LRRK2 RNA guide
gauggaugcagccaauugua

SEQ ID NO: 62940 - RNA, 20 nt, Artificial Sequence
  LRRK2 RNA guide
gcagccaauuguaaaaauaa

SEQ ID NO: 62941 - RNA, 20 nt, Artificial Sequence
  LRRK2 RNA guide
ggaugcagccaauuguaaaa

SEQ ID NO: 62942 - RNA, 20 nt, Artificial Sequence
  LRRK2 RNA guide
uacaauuggcugcauccauc

SEQ ID NO: 62943 - RNA, 20 nt, Artificial Sequence
  LRRK2 RNA guide
uauuuuuacaauuggcugca

SEQ ID NO: 62944 - RNA, 20 nt, Artificial Sequence
  LRRK2 RNA guide
ugauggaugcagccaauugu

SEQ ID NO: 62945 - RNA, 20 nt, Artificial Sequence
  LRRK2 RNA guide
ugcagccaauuguaaaaaua

SEQ ID NO: 62946 - RNA, 20 nt, Artificial Sequence
  LRRK2 RNA guide
uggaugcagccaauuguaaa

SEQ ID NO: 62947 - RNA, 20 nt, Artificial Sequence
  LRRK2 RNA guide
uuacaauuggcugcauccau

SEQ ID NO: 62948 - RNA, 20 nt, Artificial Sequence
  LRRK2 RNA guide
uuauuuuuacaauuggcugc

SEQ ID NO: 62949 - RNA, 20 nt, Artificial Sequence
  LRRK2 RNA guide
uugauggaugcagccaauug

SEQ ID NO: 62950 - RNA, 20 nt, Artificial Sequence
  LRRK2 RNA guide
uuuacaauuggcugcaucca

SEQ ID NO: 62951 - RNA, 20 nt, Artificial Sequence
  LRRK2 RNA guide
uuuuacaauuggcugcaucc

SEQ ID NO: 62952 - RNA, 20 nt, Artificial Sequence
  LRRK2 RNA guide
uuuuuacaauuggcugcauc

SEQ ID NO: 62953 - RNA, 21 nt, Artificial Sequence
  LRRK2 RNA guide
acaauuggcugcauccaucaa

SEQ ID NO: 62954 - RNA, 21 nt, Artificial Sequence
  LRRK2 RNA guide
auggaugcagccaauuguaaa

SEQ ID NO: 62955 - RNA, 21 nt, Artificial Sequence
  LRRK2 RNA guide
auugauggaugcagccaauug

SEQ ID NO: 62956 - RNA, 21 nt, Artificial Sequence
  LRRK2 RNA guide
auuuuuacaauuggcugcauc

SEQ ID NO: 62957 - RNA, 21 nt, Artificial Sequence
  LRRK2 RNA guide
gaugcagccaauuguaaaaau

SEQ ID NO: 62958 - RNA, 21 nt, Artificial Sequence
  LRRK2 RNA guide
gauggaugcagccaauuguaa

SEQ ID NO: 62959 - RNA, 21 nt, Artificial Sequence
  LRRK2 RNA guide
ggaugcagccaauuguaaaaa

SEQ ID NO: 62960 - RNA, 21 nt, Artificial Sequence
  LRRK2 RNA guide
uacaauuggcugcauccauca

SEQ ID NO: 62961 - RNA, 21 nt, Artificial Sequence
  LRRK2 RNA guide
ugauggaugcagccaauugua

SEQ ID NO: 62962 - RNA, 21 nt, Artificial Sequence
  LRRK2 RNA guide
uggaugcagccaauuguaaaa

SEQ ID NO: 62963 - RNA, 21 nt, Artificial Sequence
  LRRK2 RNA guide
uuacaauuggcugcauccauc

SEQ ID NO: 62964 - RNA, 21 nt, Artificial Sequence
  LRRK2 RNA guide
uugauggaugcagccaauugu

SEQ ID NO: 62965 - RNA, 21 nt, Artificial Sequence
  LRRK2 RNA guide
uuuacaauuggcugcauccau

SEQ ID NO: 62966 - RNA, 21 nt, Artificial Sequence
  LRRK2 RNA guide
uuuuacaauuggcugcaucca

SEQ ID NO: 62967 - RNA, 21 nt, Artificial Sequence
  LRRK2 RNA guide
uuuuuacaauuggcugcaucc

SEQ ID NO: 62968 - RNA, 22 nt, Artificial Sequence
  LRRK2 RNA guide
acaauuggcugcauccaucaau

SEQ ID NO: 62969 - RNA, 22 nt, Artificial Sequence
  LRRK2 RNA guide
auggaugcagccaauuguaaaa

SEQ ID NO: 62970 - RNA, 22 nt, Artificial Sequence
  LRRK2 RNA guide
auugauggaugcagccaauugu

SEQ ID NO: 62971 - RNA, 22 nt, Artificial Sequence
  LRRK2 RNA guide
auuuuuacaauuggcugcaucc

SEQ ID NO: 62972 - RNA, 22 nt, Artificial Sequence
  LRRK2 RNA guide
gaugcagccaauuguaaaaaua

SEQ ID NO: 62973 - RNA, 22 nt, Artificial Sequence
  LRRK2 RNA guide
gauggaugcagccaauuguaaa

SEQ ID NO: 62974 - RNA, 22 nt, Artificial Sequence
  LRRK2 RNA guide
gauugauggaugcagccaauug

SEQ ID NO: 62975 - RNA, 22 nt, Artificial Sequence
  LRRK2 RNA guide
ggaugcagccaauuguaaaaau

SEQ ID NO: 62976 - RNA, 22 nt, Artificial Sequence
  LRRK2 RNA guide
uacaauuggcugcauccaucaa

SEQ ID NO: 62977 - RNA, 22 nt, Artificial Sequence
  LRRK2 RNA guide
uauuuuuacaauuggcugcauc

SEQ ID NO: 62978 - RNA, 22 nt, Artificial Sequence
  LRRK2 RNA guide
ugauggaugcagccaauuguaa

SEQ ID NO: 62979 - RNA, 22 nt, Artificial Sequence
  LRRK2 RNA guide
uggaugcagccaauuguaaaaa

SEQ ID NO: 62980 - RNA, 22 nt, Artificial Sequence
  LRRK2 RNA guide
uuacaauuggcugcauccauca

SEQ ID NO: 62981 - RNA, 22 nt, Artificial Sequence
  LRRK2 RNA guide
uugauggaugcagccaauugua

SEQ ID NO: 62982 - RNA, 22 nt, Artificial Sequence
  LRRK2 RNA guide
uuuacaauuggcugcauccauc

SEQ ID NO: 62983 - RNA, 22 nt, Artificial Sequence
  LRRK2 RNA guide
uuuuacaauuggcugcauccau

SEQ ID NO: 62984 - RNA, 22 nt, Artificial Sequence
  LRRK2 RNA guide
uuuuuacaauuggcugcaucca

SEQ ID NO: 62985 - RNA, 20 nt, Artificial Sequence
  LRRK2 RNA guide
aaauauuuucgguaaucccu

SEQ ID NO: 62986 - RNA, 20 nt, Artificial Sequence
  LRRK2 RNA guide
aauauuuucgguaaucccug

SEQ ID NO: 62987 - RNA, 20 nt, Artificial Sequence
  LRRK2 RNA guide
acagggauuaccgaaaauau

SEQ ID NO: 62988 - RNA, 20 nt, Artificial Sequence
  LRRK2 RNA guide
accgaaaauauuucaugcau

SEQ ID NO: 62989 - RNA, 20 nt, Artificial Sequence
  LRRK2 RNA guide
agaugcaugaaauauuuucg

SEQ ID NO: 62990 - RNA, 20 nt, Artificial Sequence
  LRRK2 RNA guide
agggauuaccgaaaauauuu

SEQ ID NO: 62991 - RNA, 20 nt, Artificial Sequence
  LRRK2 RNA guide
agugcacagggauuaccgaa

SEQ ID NO: 62992 - RNA, 20 nt, Artificial Sequence
  LRRK2 RNA guide
auauuuucgguaaucccugu

SEQ ID NO: 62993 - RNA, 20 nt, Artificial Sequence
  LRRK2 RNA guide
augcaugaaauauuuucggu

SEQ ID NO: 62994 - RNA, 20 nt, Artificial Sequence
  LRRK2 RNA guide
auguauuagugcacagggau

SEQ ID NO: 62995 - RNA, 20 nt, Artificial Sequence
  LRRK2 RNA guide
auuagugcacagggauuacc

SEQ ID NO: 62996 - RNA, 20 nt, Artificial Sequence
  LRRK2 RNA guide
auuuucgguaaucccugugc

SEQ ID NO: 62997 - RNA, 20 nt, Artificial Sequence
  LRRK2 RNA guide
cacagggauuaccgaaaaua

SEQ ID NO: 62998 - RNA, 20 nt, Artificial Sequence
  LRRK2 RNA guide
cagggauuaccgaaaauauu

SEQ ID NO: 62999 - RNA, 20 nt, Artificial Sequence
  LRRK2 RNA guide
ccgaaaauauuucaugcauc

SEQ ID NO: 63000 - RNA, 20 nt, Artificial Sequence
  LRRK2 RNA guide
cgguaaucccugugcacuaa

SEQ ID NO: 63001 - RNA, 20 nt, Artificial Sequence
  LRRK2 RNA guide
gaaauauuuucgguaauccc

SEQ ID NO: 63002 - RNA, 20 nt, Artificial Sequence
  LRRK2 RNA guide
gaugcaugaaauauuuucgg

SEQ ID NO: 63003 - RNA, 20 nt, Artificial Sequence
  LRRK2 RNA guide
gauguagaugcaugaaauau

SEQ ID NO: 63004 - RNA, 20 nt, Artificial Sequence
  LRRK2 RNA guide
gcacagggauuaccgaaaau

SEQ ID NO: 63005 - RNA, 20 nt, Artificial Sequence
  LRRK2 RNA guide
gcaugaaauauuuucgguaa

SEQ ID NO: 63006 - RNA, 20 nt, Artificial Sequence
  LRRK2 RNA guide
ggauuaccgaaaauauuuca

SEQ ID NO: 63007 - RNA, 20 nt, Artificial Sequence
  LRRK2 RNA guide
gggauuaccgaaaauauuuc

SEQ ID NO: 63008 - RNA, 20 nt, Artificial Sequence
  LRRK2 RNA guide
guauuagugcacagggauua

SEQ ID NO: 63009 - RNA, 20 nt, Artificial Sequence
  LRRK2 RNA guide
gugcacagggauuaccgaaa

SEQ ID NO: 63010 - RNA, 20 nt, Artificial Sequence
  LRRK2 RNA guide
uaccgaaaauauuucaugca

SEQ ID NO: 63011 - RNA, 20 nt, Artificial Sequence
  LRRK2 RNA guide
uagugcacagggauuaccga

SEQ ID NO: 63012 - RNA, 20 nt, Artificial Sequence
  LRRK2 RNA guide
uauguauuagugcacaggga

SEQ ID NO: 63013 - RNA, 20 nt, Artificial Sequence
  LRRK2 RNA guide
uauuagugcacagggauuac

SEQ ID NO: 63014 - RNA, 20 nt, Artificial Sequence
  LRRK2 RNA guide
uauuuucgguaaucccugug

SEQ ID NO: 63015 - RNA, 20 nt, Artificial Sequence
  LRRK2 RNA guide
ucgguaaucccugugcacua

SEQ ID NO: 63016 - RNA, 20 nt, Artificial Sequence
  LRRK2 RNA guide
ugaaauauuuucgguaaucc

SEQ ID NO: 63017 - RNA, 20 nt, Artificial Sequence
  LRRK2 RNA guide
ugcacagggauuaccgaaaa

SEQ ID NO: 63018 - RNA, 20 nt, Artificial Sequence
  LRRK2 RNA guide
ugcaugaaauauuuucggua

SEQ ID NO: 63019 - RNA, 20 nt, Artificial Sequence
  LRRK2 RNA guide
uguauuagugcacagggauu

SEQ ID NO: 63020 - RNA, 20 nt, Artificial Sequence
  LRRK2 RNA guide
uuaccgaaaauauuucaugc

SEQ ID NO: 63021 - RNA, 20 nt, Artificial Sequence
  LRRK2 RNA guide
uuagugcacagggauuaccg

SEQ ID NO: 63022 - RNA, 20 nt, Artificial Sequence
  LRRK2 RNA guide
uucgguaaucccugugcacu

SEQ ID NO: 63023 - RNA, 20 nt, Artificial Sequence
  LRRK2 RNA guide
uuucgguaaucccugugcac

SEQ ID NO: 63024 - RNA, 20 nt, Artificial Sequence
  LRRK2 RNA guide
uuuucgguaaucccugugca

SEQ ID NO: 63025 - RNA, 21 nt, Artificial Sequence
  LRRK2 RNA guide
aaauauuuucgguaaucccug

SEQ ID NO: 63026 - RNA, 21 nt, Artificial Sequence
  LRRK2 RNA guide
aauauuuucgguaaucccugu

SEQ ID NO: 63027 - RNA, 21 nt, Artificial Sequence
  LRRK2 RNA guide
acagggauuaccgaaaauauu

SEQ ID NO: 63028 - RNA, 21 nt, Artificial Sequence
  LRRK2 RNA guide
accgaaaauauuucaugcauc

SEQ ID NO: 63029 - RNA, 21 nt, Artificial Sequence
  LRRK2 RNA guide
agaugcaugaaauauuuucgg

SEQ ID NO: 63030 - RNA, 21 nt, Artificial Sequence
  LRRK2 RNA guide
agggauuaccgaaaauauuuc

SEQ ID NO: 63031 - RNA, 21 nt, Artificial Sequence
  LRRK2 RNA guide
agugcacagggauuaccgaaa

SEQ ID NO: 63032 - RNA, 21 nt, Artificial Sequence
  LRRK2 RNA guide
auauuuucgguaaucccugug

SEQ ID NO: 63033 - RNA, 21 nt, Artificial Sequence
  LRRK2 RNA guide
auguauuagugcacagggauu

SEQ ID NO: 63034 - RNA, 21 nt, Artificial Sequence
  LRRK2 RNA guide
auuagugcacagggauuaccg

SEQ ID NO: 63035 - RNA, 21 nt, Artificial Sequence
  LRRK2 RNA guide
auuuucgguaaucccugugca

SEQ ID NO: 63036 - RNA, 21 nt, Artificial Sequence
  LRRK2 RNA guide
cacagggauuaccgaaaauau

SEQ ID NO: 63037 - RNA, 21 nt, Artificial Sequence
  LRRK2 RNA guide
cagggauuaccgaaaauauuu

SEQ ID NO: 63038 - RNA, 21 nt, Artificial Sequence
  LRRK2 RNA guide
ccgaaaauauuucaugcaucu

SEQ ID NO: 63039 - RNA, 21 nt, Artificial Sequence
  LRRK2 RNA guide
cgguaaucccugugcacuaau

SEQ ID NO: 63040 - RNA, 21 nt, Artificial Sequence
  LRRK2 RNA guide
gaaauauuuucgguaaucccu

SEQ ID NO: 63041 - RNA, 21 nt, Artificial Sequence
  LRRK2 RNA guide
gaugcaugaaauauuuucggu

SEQ ID NO: 63042 - RNA, 21 nt, Artificial Sequence
  LRRK2 RNA guide
gcacagggauuaccgaaaaua

SEQ ID NO: 63043 - RNA, 21 nt, Artificial Sequence
  LRRK2 RNA guide
gggauuaccgaaaauauuuca

SEQ ID NO: 63044 - RNA, 21 nt, Artificial Sequence
  LRRK2 RNA guide
guauuagugcacagggauuac

SEQ ID NO: 63045 - RNA, 21 nt, Artificial Sequence
  LRRK2 RNA guide
gugcacagggauuaccgaaaa

SEQ ID NO: 63046 - RNA, 21 nt, Artificial Sequence
  LRRK2 RNA guide
uagugcacagggauuaccgaa

SEQ ID NO: 63047 - RNA, 21 nt, Artificial Sequence
  LRRK2 RNA guide
uauguauuagugcacagggau

SEQ ID NO: 63048 - RNA, 21 nt, Artificial Sequence
  LRRK2 RNA guide
uauuagugcacagggauuacc

SEQ ID NO: 63049 - RNA, 21 nt, Artificial Sequence
  LRRK2 RNA guide
uauuuucgguaaucccugugc

SEQ ID NO: 63050 - RNA, 21 nt, Artificial Sequence
  LRRK2 RNA guide
ucgguaaucccugugcacuaa

SEQ ID NO: 63051 - RNA, 21 nt, Artificial Sequence
  LRRK2 RNA guide
ugaaauauuuucgguaauccc

SEQ ID NO: 63052 - RNA, 21 nt, Artificial Sequence
  LRRK2 RNA guide
ugcacagggauuaccgaaaau

SEQ ID NO: 63053 - RNA, 21 nt, Artificial Sequence
  LRRK2 RNA guide
uguauuagugcacagggauua

SEQ ID NO: 63054 - RNA, 21 nt, Artificial Sequence
  LRRK2 RNA guide
uuagugcacagggauuaccga

SEQ ID NO: 63055 - RNA, 21 nt, Artificial Sequence
  LRRK2 RNA guide
uuauguauuagugcacaggga

SEQ ID NO: 63056 - RNA, 21 nt, Artificial Sequence
  LRRK2 RNA guide
uucgguaaucccugugcacua

SEQ ID NO: 63057 - RNA, 21 nt, Artificial Sequence
  LRRK2 RNA guide
uuucgguaaucccugugcacu

SEQ ID NO: 63058 - RNA, 21 nt, Artificial Sequence
  LRRK2 RNA guide
uuuucgguaaucccugugcac

SEQ ID NO: 63059 - RNA, 22 nt, Artificial Sequence
  LRRK2 RNA guide
aaauauuuucgguaaucccugu

SEQ ID NO: 63060 - RNA, 22 nt, Artificial Sequence
  LRRK2 RNA guide
aauauuuucgguaaucccugug

SEQ ID NO: 63061 - RNA, 22 nt, Artificial Sequence
  LRRK2 RNA guide
acagggauuaccgaaaauauuu

SEQ ID NO: 63062 - RNA, 22 nt, Artificial Sequence
  LRRK2 RNA guide
accgaaaauauuucaugcaucu

SEQ ID NO: 63063 - RNA, 22 nt, Artificial Sequence
  LRRK2 RNA guide
agaugcaugaaauauuuucggu

SEQ ID NO: 63064 - RNA, 22 nt, Artificial Sequence
  LRRK2 RNA guide
agggauuaccgaaaauauuuca

SEQ ID NO: 63065 - RNA, 22 nt, Artificial Sequence
  LRRK2 RNA guide
agugcacagggauuaccgaaaa

SEQ ID NO: 63066 - RNA, 22 nt, Artificial Sequence
  LRRK2 RNA guide
auauuuucgguaaucccugugc

SEQ ID NO: 63067 - RNA, 22 nt, Artificial Sequence
  LRRK2 RNA guide
augaaauauuuucgguaauccc

SEQ ID NO: 63068 - RNA, 22 nt, Artificial Sequence
  LRRK2 RNA guide
auguauuagugcacagggauua

SEQ ID NO: 63069 - RNA, 22 nt, Artificial Sequence
  LRRK2 RNA guide
auuagugcacagggauuaccga

SEQ ID NO: 63070 - RNA, 22 nt, Artificial Sequence
  LRRK2 RNA guide
auuuucgguaaucccugugcac

SEQ ID NO: 63071 - RNA, 22 nt, Artificial Sequence
  LRRK2 RNA guide
cacagggauuaccgaaaauauu

SEQ ID NO: 63072 - RNA, 22 nt, Artificial Sequence
  LRRK2 RNA guide
cagauguagaugcaugaaauau

SEQ ID NO: 63073 - RNA, 22 nt, Artificial Sequence
  LRRK2 RNA guide
cagggauuaccgaaaauauuuc

SEQ ID NO: 63074 - RNA, 22 nt, Artificial Sequence
  LRRK2 RNA guide
caugaaauauuuucgguaaucc

SEQ ID NO: 63075 - RNA, 22 nt, Artificial Sequence
  LRRK2 RNA guide
ccgaaaauauuucaugcaucua

SEQ ID NO: 63076 - RNA, 22 nt, Artificial Sequence
  LRRK2 RNA guide
cgguaaucccugugcacuaaua

SEQ ID NO: 63077 - RNA, 22 nt, Artificial Sequence
  LRRK2 RNA guide
gaaauauuuucgguaaucccug

SEQ ID NO: 63078 - RNA, 22 nt, Artificial Sequence
  LRRK2 RNA guide
gaugcaugaaauauuuucggua

SEQ ID NO: 63079 - RNA, 22 nt, Artificial Sequence
  LRRK2 RNA guide
gauuaccgaaaauauuucaugc

SEQ ID NO: 63080 - RNA, 22 nt, Artificial Sequence
  LRRK2 RNA guide
gcacagggauuaccgaaaauau

SEQ ID NO: 63081 - RNA, 22 nt, Artificial Sequence
  LRRK2 RNA guide
gcaugaaauauuuucgguaauc

SEQ ID NO: 63082 - RNA, 22 nt, Artificial Sequence
  LRRK2 RNA guide
ggauuaccgaaaauauuucaug

SEQ ID NO: 63083 - RNA, 22 nt, Artificial Sequence
  LRRK2 RNA guide
gggauuaccgaaaauauuucau

SEQ ID NO: 63084 - RNA, 22 nt, Artificial Sequence
  LRRK2 RNA guide
guagaugcaugaaauauuuucg

SEQ ID NO: 63085 - RNA, 22 nt, Artificial Sequence
  LRRK2 RNA guide
guauuagugcacagggauuacc

SEQ ID NO: 63086 - RNA, 22 nt, Artificial Sequence
  LRRK2 RNA guide
gugcacagggauuaccgaaaau

SEQ ID NO: 63087 - RNA, 22 nt, Artificial Sequence
  LRRK2 RNA guide
uaccgaaaauauuucaugcauc

SEQ ID NO: 63088 - RNA, 22 nt, Artificial Sequence
  LRRK2 RNA guide
uagaugcaugaaauauuuucgg

SEQ ID NO: 63089 - RNA, 22 nt, Artificial Sequence
  LRRK2 RNA guide
uagugcacagggauuaccgaaa

SEQ ID NO: 63090 - RNA, 22 nt, Artificial Sequence
  LRRK2 RNA guide
uauguauuagugcacagggauu

SEQ ID NO: 63091 - RNA, 22 nt, Artificial Sequence
  LRRK2 RNA guide
uauuagugcacagggauuaccg

SEQ ID NO: 63092 - RNA, 22 nt, Artificial Sequence
  LRRK2 RNA guide
uauuuucgguaaucccugugca

SEQ ID NO: 63093 - RNA, 22 nt, Artificial Sequence
  LRRK2 RNA guide
ucgguaaucccugugcacuaau

SEQ ID NO: 63094 - RNA, 22 nt, Artificial Sequence
  LRRK2 RNA guide
ugaaauauuuucgguaaucccu

SEQ ID NO: 63095 - RNA, 22 nt, Artificial Sequence
  LRRK2 RNA guide
ugcacagggauuaccgaaaaua

SEQ ID NO: 63096 - RNA, 22 nt, Artificial Sequence
  LRRK2 RNA guide
uguauuagugcacagggauuac

SEQ ID NO: 63097 - RNA, 22 nt, Artificial Sequence
  LRRK2 RNA guide
uuagugcacagggauuaccgaa

SEQ ID NO: 63098 - RNA, 22 nt, Artificial Sequence
  LRRK2 RNA guide
uuauguauuagugcacagggau

SEQ ID NO: 63099 - RNA, 22 nt, Artificial Sequence
  LRRK2 RNA guide
uucgguaaucccugugcacuaa

SEQ ID NO: 63100 - RNA, 22 nt, Artificial Sequence
  LRRK2 RNA guide
uuuauguauuagugcacaggga

SEQ ID NO: 63101 - RNA, 22 nt, Artificial Sequence
  LRRK2 RNA guide
uuucgguaaucccugugcacua

SEQ ID NO: 63102 - RNA, 22 nt, Artificial Sequence
  LRRK2 RNA guide
uuuucgguaaucccugugcacu

SEQ ID NO: 63103 - RNA, 20 nt, Artificial Sequence
  LRRK2 RNA guide
aauauuuucaguaaucccug

SEQ ID NO: 63104 - RNA, 20 nt, Artificial Sequence
  LRRK2 RNA guide
acagggauuacugaaaauau

SEQ ID NO: 63105 - RNA, 20 nt, Artificial Sequence
  LRRK2 RNA guide
agugcacagggauuacugaa

SEQ ID NO: 63106 - RNA, 20 nt, Artificial Sequence
  LRRK2 RNA guide
auauuuucaguaaucccugu

SEQ ID NO: 63107 - RNA, 20 nt, Artificial Sequence
  LRRK2 RNA guide
auuagugcacagggauuacu

SEQ ID NO: 63108 - RNA, 20 nt, Artificial Sequence
  LRRK2 RNA guide
auuuucaguaaucccugugc

SEQ ID NO: 63109 - RNA, 20 nt, Artificial Sequence
  LRRK2 RNA guide
cacagggauuacugaaaaua

SEQ ID NO: 63110 - RNA, 20 nt, Artificial Sequence
  LRRK2 RNA guide
cagggauuacugaaaauauu

SEQ ID NO: 63111 - RNA, 20 nt, Artificial Sequence
  LRRK2 RNA guide
caguaaucccugugcacuaa

SEQ ID NO: 63112 - RNA, 20 nt, Artificial Sequence
  LRRK2 RNA guide
cugaaaauauuucaugcauc

SEQ ID NO: 63113 - RNA, 20 nt, Artificial Sequence
  LRRK2 RNA guide
gaaauauuuucaguaauccc

SEQ ID NO: 63114 - RNA, 20 nt, Artificial Sequence
  LRRK2 RNA guide
gaugcaugaaauauuuucag

SEQ ID NO: 63115 - RNA, 20 nt, Artificial Sequence
  LRRK2 RNA guide
gcacagggauuacugaaaau

SEQ ID NO: 63116 - RNA, 20 nt, Artificial Sequence
  LRRK2 RNA guide
gggauuacugaaaauauuuc

SEQ ID NO: 63117 - RNA, 20 nt, Artificial Sequence
  LRRK2 RNA guide
gugcacagggauuacugaaa

SEQ ID NO: 63118 - RNA, 20 nt, Artificial Sequence
  LRRK2 RNA guide
uagugcacagggauuacuga

SEQ ID NO: 63119 - RNA, 20 nt, Artificial Sequence
  LRRK2 RNA guide
uauuuucaguaaucccugug

SEQ ID NO: 63120 - RNA, 20 nt, Artificial Sequence
  LRRK2 RNA guide
ucaguaaucccugugcacua

SEQ ID NO: 63121 - RNA, 20 nt, Artificial Sequence
  LRRK2 RNA guide
ugcacagggauuacugaaaa

SEQ ID NO: 63122 - RNA, 20 nt, Artificial Sequence
  LRRK2 RNA guide
uuagugcacagggauuacug

SEQ ID NO: 63123 - RNA, 20 nt, Artificial Sequence
  LRRK2 RNA guide
uucaguaaucccugugcacu

SEQ ID NO: 63124 - RNA, 20 nt, Artificial Sequence
  LRRK2 RNA guide
uuucaguaaucccugugcac

SEQ ID NO: 63125 - RNA, 20 nt, Artificial Sequence
  LRRK2 RNA guide
uuuucaguaaucccugugca

SEQ ID NO: 63126 - RNA, 21 nt, Artificial Sequence
  LRRK2 RNA guide
agugcacagggauuacugaaa

SEQ ID NO: 63127 - RNA, 21 nt, Artificial Sequence
  LRRK2 RNA guide
auauuuucaguaaucccugug

SEQ ID NO: 63128 - RNA, 21 nt, Artificial Sequence
  LRRK2 RNA guide
auuagugcacagggauuacug

SEQ ID NO: 63129 - RNA, 21 nt, Artificial Sequence
  LRRK2 RNA guide
auuuucaguaaucccugugca

SEQ ID NO: 63130 - RNA, 21 nt, Artificial Sequence
  LRRK2 RNA guide
cacagggauuacugaaaauau

SEQ ID NO: 63131 - RNA, 21 nt, Artificial Sequence
  LRRK2 RNA guide
caguaaucccugugcacuaau

SEQ ID NO: 63132 - RNA, 21 nt, Artificial Sequence
  LRRK2 RNA guide
gcacagggauuacugaaaaua

SEQ ID NO: 63133 - RNA, 21 nt, Artificial Sequence
  LRRK2 RNA guide
gugcacagggauuacugaaaa

SEQ ID NO: 63134 - RNA, 21 nt, Artificial Sequence
  LRRK2 RNA guide
uagugcacagggauuacugaa

SEQ ID NO: 63135 - RNA, 21 nt, Artificial Sequence
  LRRK2 RNA guide
uauuagugcacagggauuacu

SEQ ID NO: 63136 - RNA, 21 nt, Artificial Sequence
  LRRK2 RNA guide
uauuuucaguaaucccugugc

SEQ ID NO: 63137 - RNA, 21 nt, Artificial Sequence
  LRRK2 RNA guide
ucaguaaucccugugcacuaa

SEQ ID NO: 63138 - RNA, 21 nt, Artificial Sequence
  LRRK2 RNA guide
ugcacagggauuacugaaaau

SEQ ID NO: 63139 - RNA, 21 nt, Artificial Sequence
  LRRK2 RNA guide
uuagugcacagggauuacuga

SEQ ID NO: 63140 - RNA, 21 nt, Artificial Sequence
  LRRK2 RNA guide
uucaguaaucccugugcacua

SEQ ID NO: 63141 - RNA, 21 nt, Artificial Sequence
  LRRK2 RNA guide
uuucaguaaucccugugcacu

SEQ ID NO: 63142 - RNA, 21 nt, Artificial Sequence
  LRRK2 RNA guide
uuuucaguaaucccugugcac

SEQ ID NO: 63143 - RNA, 22 nt, Artificial Sequence
  LRRK2 RNA guide
aauauuuucaguaaucccugug

SEQ ID NO: 63144 - RNA, 22 nt, Artificial Sequence
  LRRK2 RNA guide
agugcacagggauuacugaaaa

SEQ ID NO: 63145 - RNA, 22 nt, Artificial Sequence
  LRRK2 RNA guide
auauuuucaguaaucccugugc

SEQ ID NO: 63146 - RNA, 22 nt, Artificial Sequence
  LRRK2 RNA guide
auuagugcacagggauuacuga

SEQ ID NO: 63147 - RNA, 22 nt, Artificial Sequence
  LRRK2 RNA guide
auuuucaguaaucccugugcac

SEQ ID NO: 63148 - RNA, 22 nt, Artificial Sequence
  LRRK2 RNA guide
cacagggauuacugaaaauauu

SEQ ID NO: 63149 - RNA, 22 nt, Artificial Sequence
  LRRK2 RNA guide
cagggauuacugaaaauauuuc

SEQ ID NO: 63150 - RNA, 22 nt, Artificial Sequence
  LRRK2 RNA guide
caguaaucccugugcacuaaua

SEQ ID NO: 63151 - RNA, 22 nt, Artificial Sequence
  LRRK2 RNA guide
gaaauauuuucaguaaucccug

SEQ ID NO: 63152 - RNA, 22 nt, Artificial Sequence
  LRRK2 RNA guide
gcacagggauuacugaaaauau

SEQ ID NO: 63153 - RNA, 22 nt, Artificial Sequence
  LRRK2 RNA guide
guauuagugcacagggauuacu

SEQ ID NO: 63154 - RNA, 22 nt, Artificial Sequence
  LRRK2 RNA guide
gugcacagggauuacugaaaau

SEQ ID NO: 63155 - RNA, 22 nt, Artificial Sequence
  LRRK2 RNA guide
uagugcacagggauuacugaaa

SEQ ID NO: 63156 - RNA, 22 nt, Artificial Sequence
  LRRK2 RNA guide
uauuagugcacagggauuacug

SEQ ID NO: 63157 - RNA, 22 nt, Artificial Sequence
  LRRK2 RNA guide
uauuuucaguaaucccugugca

SEQ ID NO: 63158 - RNA, 22 nt, Artificial Sequence
  LRRK2 RNA guide
ucaguaaucccugugcacuaau

SEQ ID NO: 63159 - RNA, 22 nt, Artificial Sequence
  LRRK2 RNA guide
ugcacagggauuacugaaaaua

SEQ ID NO: 63160 - RNA, 22 nt, Artificial Sequence
  LRRK2 RNA guide
uuagugcacagggauuacugaa

SEQ ID NO: 63161 - RNA, 22 nt, Artificial Sequence
  LRRK2 RNA guide
uucaguaaucccugugcacuaa

SEQ ID NO: 63162 - RNA, 22 nt, Artificial Sequence
  LRRK2 RNA guide
uuucaguaaucccugugcacua

SEQ ID NO: 63163 - RNA, 22 nt, Artificial Sequence
  LRRK2 RNA guide
uuuucaguaaucccugugcacu

SEQ ID NO: 63164 - RNA, 20 nt, Artificial Sequence
  LRRK2 RNA guide
aaaacacccaaccuuguuga

SEQ ID NO: 63165 - RNA, 20 nt, Artificial Sequence
  LRRK2 RNA guide
aaaaucauuugcucaacaag

SEQ ID NO: 63166 - RNA, 20 nt, Artificial Sequence
  LRRK2 RNA guide
aaacacccaaccuuguugag

SEQ ID NO: 63167 - RNA, 20 nt, Artificial Sequence
  LRRK2 RNA guide
aaaucauuugcucaacaagg

SEQ ID NO: 63168 - RNA, 20 nt, Artificial Sequence
  LRRK2 RNA guide
aacaagguuggguguuuugu

SEQ ID NO: 63169 - RNA, 20 nt, Artificial Sequence
  LRRK2 RNA guide
aacacccaaccuuguugagc

SEQ ID NO: 63170 - RNA, 20 nt, Artificial Sequence
  LRRK2 RNA guide
aaccuuguugagcaaaugau

SEQ ID NO: 63171 - RNA, 20 nt, Artificial Sequence
  LRRK2 RNA guide
aagguuggguguuuugugag

SEQ ID NO: 63172 - RNA, 20 nt, Artificial Sequence
  LRRK2 RNA guide
aaucauuugcucaacaaggu

SEQ ID NO: 63173 - RNA, 20 nt, Artificial Sequence
  LRRK2 RNA guide
acaaaacacccaaccuuguu

SEQ ID NO: 63174 - RNA, 20 nt, Artificial Sequence
  LRRK2 RNA guide
acaagguuggguguuuugug

SEQ ID NO: 63175 - RNA, 20 nt, Artificial Sequence
  LRRK2 RNA guide
acacccaaccuuguugagca

SEQ ID NO: 63176 - RNA, 20 nt, Artificial Sequence
  LRRK2 RNA guide
acagccucacaaaacaccca

SEQ ID NO: 63177 - RNA, 20 nt, Artificial Sequence
  LRRK2 RNA guide
acccaaccuuguugagcaaa

SEQ ID NO: 63178 - RNA, 20 nt, Artificial Sequence
  LRRK2 RNA guide
accuuguugagcaaaugauu

SEQ ID NO: 63179 - RNA, 20 nt, Artificial Sequence
  LRRK2 RNA guide
agcaguaaaaucauuugcuc

SEQ ID NO: 63180 - RNA, 20 nt, Artificial Sequence
  LRRK2 RNA guide
agccucacaaaacacccaac

SEQ ID NO: 63181 - RNA, 20 nt, Artificial Sequence
  LRRK2 RNA guide
aguaaaaucauuugcucaac

SEQ ID NO: 63182 - RNA, 20 nt, Artificial Sequence
  LRRK2 RNA guide
aucauuugcucaacaagguu

SEQ ID NO: 63183 - RNA, 20 nt, Artificial Sequence
  LRRK2 RNA guide
auuugcucaacaagguuggg

SEQ ID NO: 63184 - RNA, 20 nt, Artificial Sequence
  LRRK2 RNA guide
caaaacacccaaccuuguug

SEQ ID NO: 63185 - RNA, 20 nt, Artificial Sequence
  LRRK2 RNA guide
caacaagguuggguguuuug

SEQ ID NO: 63186 - RNA, 20 nt, Artificial Sequence
  LRRK2 RNA guide
caaccuuguugagcaaauga

SEQ ID NO: 63187 - RNA, 20 nt, Artificial Sequence
  LRRK2 RNA guide
caagguuggguguuuuguga

SEQ ID NO: 63188 - RNA, 20 nt, Artificial Sequence
  LRRK2 RNA guide
cacaaaacacccaaccuugu

SEQ ID NO: 63189 - RNA, 20 nt, Artificial Sequence
  LRRK2 RNA guide
cacccaaccuuguugagcaa

SEQ ID NO: 63190 - RNA, 20 nt, Artificial Sequence
  LRRK2 RNA guide
cagccucacaaaacacccaa

SEQ ID NO: 63191 - RNA, 20 nt, Artificial Sequence
  LRRK2 RNA guide
caguaaaaucauuugcucaa

SEQ ID NO: 63192 - RNA, 20 nt, Artificial Sequence
  LRRK2 RNA guide
cauuugcucaacaagguugg

SEQ ID NO: 63193 - RNA, 20 nt, Artificial Sequence
  LRRK2 RNA guide
cccaaccuuguugagcaaau

SEQ ID NO: 63194 - RNA, 20 nt, Artificial Sequence
  LRRK2 RNA guide
ccucacaaaacacccaaccu

SEQ ID NO: 63195 - RNA, 20 nt, Artificial Sequence
  LRRK2 RNA guide
ccuuguugagcaaaugauuu

SEQ ID NO: 63196 - RNA, 20 nt, Artificial Sequence
  LRRK2 RNA guide
cucaacaagguuggguguuu

SEQ ID NO: 63197 - RNA, 20 nt, Artificial Sequence
  LRRK2 RNA guide
cucacaaaacacccaaccuu

SEQ ID NO: 63198 - RNA, 20 nt, Artificial Sequence
  LRRK2 RNA guide
cuuguugagcaaaugauuuu

SEQ ID NO: 63199 - RNA, 20 nt, Artificial Sequence
  LRRK2 RNA guide
gcaguaaaaucauuugcuca

SEQ ID NO: 63200 - RNA, 20 nt, Artificial Sequence
  LRRK2 RNA guide
gccucacaaaacacccaacc

SEQ ID NO: 63201 - RNA, 20 nt, Artificial Sequence
  LRRK2 RNA guide
gcucaacaagguuggguguu

SEQ ID NO: 63202 - RNA, 20 nt, Artificial Sequence
  LRRK2 RNA guide
guaaaaucauuugcucaaca

SEQ ID NO: 63203 - RNA, 20 nt, Artificial Sequence
  LRRK2 RNA guide
uacagccucacaaaacaccc

SEQ ID NO: 63204 - RNA, 20 nt, Artificial Sequence
  LRRK2 RNA guide
ucaacaagguuggguguuuu

SEQ ID NO: 63205 - RNA, 20 nt, Artificial Sequence
  LRRK2 RNA guide
ucacaaaacacccaaccuug

SEQ ID NO: 63206 - RNA, 20 nt, Artificial Sequence
  LRRK2 RNA guide
ucauuugcucaacaagguug

SEQ ID NO: 63207 - RNA, 20 nt, Artificial Sequence
  LRRK2 RNA guide
ugcucaacaagguugggugu

SEQ ID NO: 63208 - RNA, 20 nt, Artificial Sequence
  LRRK2 RNA guide
uugcucaacaagguugggug

SEQ ID NO: 63209 - RNA, 20 nt, Artificial Sequence
  LRRK2 RNA guide
uuugcucaacaagguugggu

SEQ ID NO: 63210 - RNA, 21 nt, Artificial Sequence
  LRRK2 RNA guide
aaaacacccaaccuuguugag

SEQ ID NO: 63211 - RNA, 21 nt, Artificial Sequence
  LRRK2 RNA guide
aaaaucauuugcucaacaagg

SEQ ID NO: 63212 - RNA, 21 nt, Artificial Sequence
  LRRK2 RNA guide
aaacacccaaccuuguugagc

SEQ ID NO: 63213 - RNA, 21 nt, Artificial Sequence
  LRRK2 RNA guide
aaaucauuugcucaacaaggu

SEQ ID NO: 63214 - RNA, 21 nt, Artificial Sequence
  LRRK2 RNA guide
aacaagguuggguguuuugug

SEQ ID NO: 63215 - RNA, 21 nt, Artificial Sequence
  LRRK2 RNA guide
aacacccaaccuuguugagca

SEQ ID NO: 63216 - RNA, 21 nt, Artificial Sequence
  LRRK2 RNA guide
aaccuuguugagcaaaugauu

SEQ ID NO: 63217 - RNA, 21 nt, Artificial Sequence
  LRRK2 RNA guide
aagcaguaaaaucauuugcuc

SEQ ID NO: 63218 - RNA, 21 nt, Artificial Sequence
  LRRK2 RNA guide
aagguuggguguuuugugagg

SEQ ID NO: 63219 - RNA, 21 nt, Artificial Sequence
  LRRK2 RNA guide
aaucauuugcucaacaagguu

SEQ ID NO: 63220 - RNA, 21 nt, Artificial Sequence
  LRRK2 RNA guide
acaaaacacccaaccuuguug

SEQ ID NO: 63221 - RNA, 21 nt, Artificial Sequence
  LRRK2 RNA guide
acaagguuggguguuuuguga

SEQ ID NO: 63222 - RNA, 21 nt, Artificial Sequence
  LRRK2 RNA guide
acacccaaccuuguugagcaa

SEQ ID NO: 63223 - RNA, 21 nt, Artificial Sequence
  LRRK2 RNA guide
acagccucacaaaacacccaa

SEQ ID NO: 63224 - RNA, 21 nt, Artificial Sequence
  LRRK2 RNA guide
acccaaccuuguugagcaaau

SEQ ID NO: 63225 - RNA, 21 nt, Artificial Sequence
  LRRK2 RNA guide
accuuguugagcaaaugauuu

SEQ ID NO: 63226 - RNA, 21 nt, Artificial Sequence
  LRRK2 RNA guide
agcaguaaaaucauuugcuca

SEQ ID NO: 63227 - RNA, 21 nt, Artificial Sequence
  LRRK2 RNA guide
agccucacaaaacacccaacc

SEQ ID NO: 63228 - RNA, 21 nt, Artificial Sequence
  LRRK2 RNA guide
auacagccucacaaaacaccc

SEQ ID NO: 63229 - RNA, 21 nt, Artificial Sequence
  LRRK2 RNA guide
aucauuugcucaacaagguug

SEQ ID NO: 63230 - RNA, 21 nt, Artificial Sequence
  LRRK2 RNA guide
auuugcucaacaagguugggu

SEQ ID NO: 63231 - RNA, 21 nt, Artificial Sequence
  LRRK2 RNA guide
caaaacacccaaccuuguuga

SEQ ID NO: 63232 - RNA, 21 nt, Artificial Sequence
  LRRK2 RNA guide
caacaagguuggguguuuugu

SEQ ID NO: 63233 - RNA, 21 nt, Artificial Sequence
  LRRK2 RNA guide
caaccuuguugagcaaaugau

SEQ ID NO: 63234 - RNA, 21 nt, Artificial Sequence
  LRRK2 RNA guide
caagguuggguguuuugugag

SEQ ID NO: 63235 - RNA, 21 nt, Artificial Sequence
  LRRK2 RNA guide
cacaaaacacccaaccuuguu

SEQ ID NO: 63236 - RNA, 21 nt, Artificial Sequence
  LRRK2 RNA guide
cacccaaccuuguugagcaaa

SEQ ID NO: 63237 - RNA, 21 nt, Artificial Sequence
  LRRK2 RNA guide
cagccucacaaaacacccaac

SEQ ID NO: 63238 - RNA, 21 nt, Artificial Sequence
  LRRK2 RNA guide
caguaaaaucauuugcucaac

SEQ ID NO: 63239 - RNA, 21 nt, Artificial Sequence
  LRRK2 RNA guide
cauuugcucaacaagguuggg

SEQ ID NO: 63240 - RNA, 21 nt, Artificial Sequence
  LRRK2 RNA guide
ccaaccuuguugagcaaauga

SEQ ID NO: 63241 - RNA, 21 nt, Artificial Sequence
  LRRK2 RNA guide
cccaaccuuguugagcaaaug

SEQ ID NO: 63242 - RNA, 21 nt, Artificial Sequence
  LRRK2 RNA guide
ccucacaaaacacccaaccuu

SEQ ID NO: 63243 - RNA, 21 nt, Artificial Sequence
  LRRK2 RNA guide
ccuuguugagcaaaugauuuu

SEQ ID NO: 63244 - RNA, 21 nt, Artificial Sequence
  LRRK2 RNA guide
cucaacaagguuggguguuuu

SEQ ID NO: 63245 - RNA, 21 nt, Artificial Sequence
  LRRK2 RNA guide
cucacaaaacacccaaccuug

SEQ ID NO: 63246 - RNA, 21 nt, Artificial Sequence
  LRRK2 RNA guide
gcaguaaaaucauuugcucaa

SEQ ID NO: 63247 - RNA, 21 nt, Artificial Sequence
  LRRK2 RNA guide
gccucacaaaacacccaaccu

SEQ ID NO: 63248 - RNA, 21 nt, Artificial Sequence
  LRRK2 RNA guide
gcucaacaagguuggguguuu

SEQ ID NO: 63249 - RNA, 21 nt, Artificial Sequence
  LRRK2 RNA guide
uacagccucacaaaacaccca

SEQ ID NO: 63250 - RNA, 21 nt, Artificial Sequence
  LRRK2 RNA guide
ucaacaagguuggguguuuug

SEQ ID NO: 63251 - RNA, 21 nt, Artificial Sequence
  LRRK2 RNA guide
ucacaaaacacccaaccuugu

SEQ ID NO: 63252 - RNA, 21 nt, Artificial Sequence
  LRRK2 RNA guide
ucauuugcucaacaagguugg

SEQ ID NO: 63253 - RNA, 21 nt, Artificial Sequence
  LRRK2 RNA guide
ugcucaacaagguuggguguu

SEQ ID NO: 63254 - RNA, 21 nt, Artificial Sequence
  LRRK2 RNA guide
uugcucaacaagguugggugu

SEQ ID NO: 63255 - RNA, 21 nt, Artificial Sequence
  LRRK2 RNA guide
uuugcucaacaagguugggug

SEQ ID NO: 63256 - RNA, 22 nt, Artificial Sequence
  LRRK2 RNA guide
aaaacacccaaccuuguugagc

SEQ ID NO: 63257 - RNA, 22 nt, Artificial Sequence
  LRRK2 RNA guide
aaaaucauuugcucaacaaggu

SEQ ID NO: 63258 - RNA, 22 nt, Artificial Sequence
  LRRK2 RNA guide
aaacacccaaccuuguugagca

SEQ ID NO: 63259 - RNA, 22 nt, Artificial Sequence
  LRRK2 RNA guide
aaaucauuugcucaacaagguu

SEQ ID NO: 63260 - RNA, 22 nt, Artificial Sequence
  LRRK2 RNA guide
aacaagguuggguguuuuguga

SEQ ID NO: 63261 - RNA, 22 nt, Artificial Sequence
  LRRK2 RNA guide
aacacccaaccuuguugagcaa

SEQ ID NO: 63262 - RNA, 22 nt, Artificial Sequence
  LRRK2 RNA guide
aaccuuguugagcaaaugauuu

SEQ ID NO: 63263 - RNA, 22 nt, Artificial Sequence
  LRRK2 RNA guide
aagcaguaaaaucauuugcuca

SEQ ID NO: 63264 - RNA, 22 nt, Artificial Sequence
  LRRK2 RNA guide
aagguuggguguuuugugaggc

SEQ ID NO: 63265 - RNA, 22 nt, Artificial Sequence
  LRRK2 RNA guide
aaucauuugcucaacaagguug

SEQ ID NO: 63266 - RNA, 22 nt, Artificial Sequence
  LRRK2 RNA guide
acaaaacacccaaccuuguuga

SEQ ID NO: 63267 - RNA, 22 nt, Artificial Sequence
  LRRK2 RNA guide
acaagguuggguguuuugugag

SEQ ID NO: 63268 - RNA, 22 nt, Artificial Sequence
  LRRK2 RNA guide
acacccaaccuuguugagcaaa

SEQ ID NO: 63269 - RNA, 22 nt, Artificial Sequence
  LRRK2 RNA guide
acagccucacaaaacacccaac

SEQ ID NO: 63270 - RNA, 22 nt, Artificial Sequence
  LRRK2 RNA guide
acccaaccuuguugagcaaaug

SEQ ID NO: 63271 - RNA, 22 nt, Artificial Sequence
  LRRK2 RNA guide
accuuguugagcaaaugauuuu

SEQ ID NO: 63272 - RNA, 22 nt, Artificial Sequence
  LRRK2 RNA guide
agcaguaaaaucauuugcucaa

SEQ ID NO: 63273 - RNA, 22 nt, Artificial Sequence
  LRRK2 RNA guide
agccucacaaaacacccaaccu

SEQ ID NO: 63274 - RNA, 22 nt, Artificial Sequence
  LRRK2 RNA guide
auacagccucacaaaacaccca

SEQ ID NO: 63275 - RNA, 22 nt, Artificial Sequence
  LRRK2 RNA guide
aucauuugcucaacaagguugg

SEQ ID NO: 63276 - RNA, 22 nt, Artificial Sequence
  LRRK2 RNA guide
auuugcucaacaagguugggug

SEQ ID NO: 63277 - RNA, 22 nt, Artificial Sequence
  LRRK2 RNA guide
caaaacacccaaccuuguugag

SEQ ID NO: 63278 - RNA, 22 nt, Artificial Sequence
  LRRK2 RNA guide
caacaagguuggguguuuugug

SEQ ID NO: 63279 - RNA, 22 nt, Artificial Sequence
  LRRK2 RNA guide
caaccuuguugagcaaaugauu

SEQ ID NO: 63280 - RNA, 22 nt, Artificial Sequence
  LRRK2 RNA guide
caagguuggguguuuugugagg

SEQ ID NO: 63281 - RNA, 22 nt, Artificial Sequence
  LRRK2 RNA guide
cacaaaacacccaaccuuguug

SEQ ID NO: 63282 - RNA, 22 nt, Artificial Sequence
  LRRK2 RNA guide
cacccaaccuuguugagcaaau

SEQ ID NO: 63283 - RNA, 22 nt, Artificial Sequence
  LRRK2 RNA guide
cagccucacaaaacacccaacc

SEQ ID NO: 63284 - RNA, 22 nt, Artificial Sequence
  LRRK2 RNA guide
caguaaaaucauuugcucaaca

SEQ ID NO: 63285 - RNA, 22 nt, Artificial Sequence
  LRRK2 RNA guide
cauuugcucaacaagguugggu

SEQ ID NO: 63286 - RNA, 22 nt, Artificial Sequence
  LRRK2 RNA guide
ccaaccuuguugagcaaaugau

SEQ ID NO: 63287 - RNA, 22 nt, Artificial Sequence
  LRRK2 RNA guide
cccaaccuuguugagcaaauga

SEQ ID NO: 63288 - RNA, 22 nt, Artificial Sequence
  LRRK2 RNA guide
ccucacaaaacacccaaccuug

SEQ ID NO: 63289 - RNA, 22 nt, Artificial Sequence
  LRRK2 RNA guide
ccuuguugagcaaaugauuuua

SEQ ID NO: 63290 - RNA, 22 nt, Artificial Sequence
  LRRK2 RNA guide
cucaacaagguuggguguuuug

SEQ ID NO: 63291 - RNA, 22 nt, Artificial Sequence
  LRRK2 RNA guide
cucacaaaacacccaaccuugu

SEQ ID NO: 63292 - RNA, 22 nt, Artificial Sequence
  LRRK2 RNA guide
cuuguugagcaaaugauuuuac

SEQ ID NO: 63293 - RNA, 22 nt, Artificial Sequence
  LRRK2 RNA guide
gcaguaaaaucauuugcucaac

SEQ ID NO: 63294 - RNA, 22 nt, Artificial Sequence
  LRRK2 RNA guide
gccucacaaaacacccaaccuu

SEQ ID NO: 63295 - RNA, 22 nt, Artificial Sequence
  LRRK2 RNA guide
gcucaacaagguuggguguuuu

SEQ ID NO: 63296 - RNA, 22 nt, Artificial Sequence
  LRRK2 RNA guide
guaaaaucauuugcucaacaag

SEQ ID NO: 63297 - RNA, 22 nt, Artificial Sequence
  LRRK2 RNA guide
uaaaaucauuugcucaacaagg

SEQ ID NO: 63298 - RNA, 22 nt, Artificial Sequence
  LRRK2 RNA guide
uaagcaguaaaaucauuugcuc

SEQ ID NO: 63299 - RNA, 22 nt, Artificial Sequence
  LRRK2 RNA guide
uacagccucacaaaacacccaa

SEQ ID NO: 63300 - RNA, 22 nt, Artificial Sequence
  LRRK2 RNA guide
uauacagccucacaaaacaccc

SEQ ID NO: 63301 - RNA, 22 nt, Artificial Sequence
  LRRK2 RNA guide
ucaacaagguuggguguuuugu

SEQ ID NO: 63302 - RNA, 22 nt, Artificial Sequence
  LRRK2 RNA guide
ucacaaaacacccaaccuuguu

SEQ ID NO: 63303 - RNA, 22 nt, Artificial Sequence
  LRRK2 RNA guide
ucauuugcucaacaagguuggg

SEQ ID NO: 63304 - RNA, 22 nt, Artificial Sequence
  LRRK2 RNA guide
ugcucaacaagguuggguguuu

SEQ ID NO: 63305 - RNA, 22 nt, Artificial Sequence
  LRRK2 RNA guide
uugcucaacaagguuggguguu

SEQ ID NO: 63306 - RNA, 22 nt, Artificial Sequence
  LRRK2 RNA guide
uuugcucaacaagguugggugu

SEQ ID NO: 63307 - RNA, 20 nt, Artificial Sequence
  LRRK2 RNA guide
aaaacacccaaccauguuga

SEQ ID NO: 63308 - RNA, 20 nt, Artificial Sequence
  LRRK2 RNA guide
aaaaucauuugcucaacaug

SEQ ID NO: 63309 - RNA, 20 nt, Artificial Sequence
  LRRK2 RNA guide
aaacacccaaccauguugag

SEQ ID NO: 63310 - RNA, 20 nt, Artificial Sequence
  LRRK2 RNA guide
aaaucauuugcucaacaugg

SEQ ID NO: 63311 - RNA, 20 nt, Artificial Sequence
  LRRK2 RNA guide
aacacccaaccauguugagc

SEQ ID NO: 63312 - RNA, 20 nt, Artificial Sequence
  LRRK2 RNA guide
aacaugguuggguguuuugu

SEQ ID NO: 63313 - RNA, 20 nt, Artificial Sequence
  LRRK2 RNA guide
aaccauguugagcaaaugau

SEQ ID NO: 63314 - RNA, 20 nt, Artificial Sequence
  LRRK2 RNA guide
aaucauuugcucaacauggu

SEQ ID NO: 63315 - RNA, 20 nt, Artificial Sequence
  LRRK2 RNA guide
acaaaacacccaaccauguu

SEQ ID NO: 63316 - RNA, 20 nt, Artificial Sequence
  LRRK2 RNA guide
acacccaaccauguugagca

SEQ ID NO: 63317 - RNA, 20 nt, Artificial Sequence
  LRRK2 RNA guide
acaugguuggguguuuugug

SEQ ID NO: 63318 - RNA, 20 nt, Artificial Sequence
  LRRK2 RNA guide
accauguugagcaaaugauu

SEQ ID NO: 63319 - RNA, 20 nt, Artificial Sequence
  LRRK2 RNA guide
acccaaccauguugagcaaa

SEQ ID NO: 63320 - RNA, 20 nt, Artificial Sequence
  LRRK2 RNA guide
aucauuugcucaacaugguu

SEQ ID NO: 63321 - RNA, 20 nt, Artificial Sequence
  LRRK2 RNA guide
augguuggguguuuugugag

SEQ ID NO: 63322 - RNA, 20 nt, Artificial Sequence
  LRRK2 RNA guide
auuugcucaacaugguuggg

SEQ ID NO: 63323 - RNA, 20 nt, Artificial Sequence
  LRRK2 RNA guide
caaaacacccaaccauguug

SEQ ID NO: 63324 - RNA, 20 nt, Artificial Sequence
  LRRK2 RNA guide
caacaugguuggguguuuug

SEQ ID NO: 63325 - RNA, 20 nt, Artificial Sequence
  LRRK2 RNA guide
caaccauguugagcaaauga

SEQ ID NO: 63326 - RNA, 20 nt, Artificial Sequence
  LRRK2 RNA guide
cacaaaacacccaaccaugu

SEQ ID NO: 63327 - RNA, 20 nt, Artificial Sequence
  LRRK2 RNA guide
cacccaaccauguugagcaa

SEQ ID NO: 63328 - RNA, 20 nt, Artificial Sequence
  LRRK2 RNA guide
caugguuggguguuuuguga

SEQ ID NO: 63329 - RNA, 20 nt, Artificial Sequence
  LRRK2 RNA guide
cauguugagcaaaugauuuu

SEQ ID NO: 63330 - RNA, 20 nt, Artificial Sequence
  LRRK2 RNA guide
cauuugcucaacaugguugg

SEQ ID NO: 63331 - RNA, 20 nt, Artificial Sequence
  LRRK2 RNA guide
ccaaccauguugagcaaaug

SEQ ID NO: 63332 - RNA, 20 nt, Artificial Sequence
  LRRK2 RNA guide
ccauguugagcaaaugauuu

SEQ ID NO: 63333 - RNA, 20 nt, Artificial Sequence
  LRRK2 RNA guide
cccaaccauguugagcaaau

SEQ ID NO: 63334 - RNA, 20 nt, Artificial Sequence
  LRRK2 RNA guide
ccucacaaaacacccaacca

SEQ ID NO: 63335 - RNA, 20 nt, Artificial Sequence
  LRRK2 RNA guide
cucaacaugguuggguguuu

SEQ ID NO: 63336 - RNA, 20 nt, Artificial Sequence
  LRRK2 RNA guide
cucacaaaacacccaaccau

SEQ ID NO: 63337 - RNA, 20 nt, Artificial Sequence
  LRRK2 RNA guide
gcucaacaugguuggguguu

SEQ ID NO: 63338 - RNA, 20 nt, Artificial Sequence
  LRRK2 RNA guide
ucaacaugguuggguguuuu

SEQ ID NO: 63339 - RNA, 20 nt, Artificial Sequence
  LRRK2 RNA guide
ucacaaaacacccaaccaug

SEQ ID NO: 63340 - RNA, 20 nt, Artificial Sequence
  LRRK2 RNA guide
ucauuugcucaacaugguug

SEQ ID NO: 63341 - RNA, 20 nt, Artificial Sequence
  LRRK2 RNA guide
ugcucaacaugguugggugu

SEQ ID NO: 63342 - RNA, 20 nt, Artificial Sequence
  LRRK2 RNA guide
uugcucaacaugguugggug

SEQ ID NO: 63343 - RNA, 20 nt, Artificial Sequence
  LRRK2 RNA guide
uuugcucaacaugguugggu

SEQ ID NO: 63344 - RNA, 21 nt, Artificial Sequence
  LRRK2 RNA guide
aaaacacccaaccauguugag

SEQ ID NO: 63345 - RNA, 21 nt, Artificial Sequence
  LRRK2 RNA guide
aaaaucauuugcucaacaugg

SEQ ID NO: 63346 - RNA, 21 nt, Artificial Sequence
  LRRK2 RNA guide
aaacacccaaccauguugagc

SEQ ID NO: 63347 - RNA, 21 nt, Artificial Sequence
  LRRK2 RNA guide
aaaucauuugcucaacauggu

SEQ ID NO: 63348 - RNA, 21 nt, Artificial Sequence
  LRRK2 RNA guide
aacacccaaccauguugagca

SEQ ID NO: 63349 - RNA, 21 nt, Artificial Sequence
  LRRK2 RNA guide
aacaugguuggguguuuugug

SEQ ID NO: 63350 - RNA, 21 nt, Artificial Sequence
  LRRK2 RNA guide
aaccauguugagcaaaugauu

SEQ ID NO: 63351 - RNA, 21 nt, Artificial Sequence
  LRRK2 RNA guide
aaucauuugcucaacaugguu

SEQ ID NO: 63352 - RNA, 21 nt, Artificial Sequence
  LRRK2 RNA guide
acaaaacacccaaccauguug

SEQ ID NO: 63353 - RNA, 21 nt, Artificial Sequence
  LRRK2 RNA guide
acacccaaccauguugagcaa

SEQ ID NO: 63354 - RNA, 21 nt, Artificial Sequence
  LRRK2 RNA guide
acaugguuggguguuuuguga

SEQ ID NO: 63355 - RNA, 21 nt, Artificial Sequence
  LRRK2 RNA guide
accauguugagcaaaugauuu

SEQ ID NO: 63356 - RNA, 21 nt, Artificial Sequence
  LRRK2 RNA guide
acccaaccauguugagcaaau

SEQ ID NO: 63357 - RNA, 21 nt, Artificial Sequence
  LRRK2 RNA guide
aucauuugcucaacaugguug

SEQ ID NO: 63358 - RNA, 21 nt, Artificial Sequence
  LRRK2 RNA guide
augguuggguguuuugugagg

SEQ ID NO: 63359 - RNA, 21 nt, Artificial Sequence
  LRRK2 RNA guide
auuugcucaacaugguugggu

SEQ ID NO: 63360 - RNA, 21 nt, Artificial Sequence
  LRRK2 RNA guide
caaaacacccaaccauguuga

SEQ ID NO: 63361 - RNA, 21 nt, Artificial Sequence
  LRRK2 RNA guide
caacaugguuggguguuuugu

SEQ ID NO: 63362 - RNA, 21 nt, Artificial Sequence
  LRRK2 RNA guide
caaccauguugagcaaaugau

SEQ ID NO: 63363 - RNA, 21 nt, Artificial Sequence
  LRRK2 RNA guide
cacaaaacacccaaccauguu

SEQ ID NO: 63364 - RNA, 21 nt, Artificial Sequence
  LRRK2 RNA guide
cacccaaccauguugagcaaa

SEQ ID NO: 63365 - RNA, 21 nt, Artificial Sequence
  LRRK2 RNA guide
caugguuggguguuuugugag

SEQ ID NO: 63366 - RNA, 21 nt, Artificial Sequence
  LRRK2 RNA guide
cauuugcucaacaugguuggg

SEQ ID NO: 63367 - RNA, 21 nt, Artificial Sequence
  LRRK2 RNA guide
ccaaccauguugagcaaauga

SEQ ID NO: 63368 - RNA, 21 nt, Artificial Sequence
  LRRK2 RNA guide
ccauguugagcaaaugauuuu

SEQ ID NO: 63369 - RNA, 21 nt, Artificial Sequence
  LRRK2 RNA guide
cccaaccauguugagcaaaug

SEQ ID NO: 63370 - RNA, 21 nt, Artificial Sequence
  LRRK2 RNA guide
ccucacaaaacacccaaccau

SEQ ID NO: 63371 - RNA, 21 nt, Artificial Sequence
  LRRK2 RNA guide
cucaacaugguuggguguuuu

SEQ ID NO: 63372 - RNA, 21 nt, Artificial Sequence
  LRRK2 RNA guide
cucacaaaacacccaaccaug

SEQ ID NO: 63373 - RNA, 21 nt, Artificial Sequence
  LRRK2 RNA guide
gccucacaaaacacccaacca

SEQ ID NO: 63374 - RNA, 21 nt, Artificial Sequence
  LRRK2 RNA guide
gcucaacaugguuggguguuu

SEQ ID NO: 63375 - RNA, 21 nt, Artificial Sequence
  LRRK2 RNA guide
ucaacaugguuggguguuuug

SEQ ID NO: 63376 - RNA, 21 nt, Artificial Sequence
  LRRK2 RNA guide
ucacaaaacacccaaccaugu

SEQ ID NO: 63377 - RNA, 21 nt, Artificial Sequence
  LRRK2 RNA guide
ucauuugcucaacaugguugg

SEQ ID NO: 63378 - RNA, 21 nt, Artificial Sequence
  LRRK2 RNA guide
ugcucaacaugguuggguguu

SEQ ID NO: 63379 - RNA, 21 nt, Artificial Sequence
  LRRK2 RNA guide
uugcucaacaugguugggugu

SEQ ID NO: 63380 - RNA, 21 nt, Artificial Sequence
  LRRK2 RNA guide
uuugcucaacaugguugggug

SEQ ID NO: 63381 - RNA, 22 nt, Artificial Sequence
  LRRK2 RNA guide
aaaacacccaaccauguugagc

SEQ ID NO: 63382 - RNA, 22 nt, Artificial Sequence
  LRRK2 RNA guide
aaaaucauuugcucaacauggu

SEQ ID NO: 63383 - RNA, 22 nt, Artificial Sequence
  LRRK2 RNA guide
aaacacccaaccauguugagca

SEQ ID NO: 63384 - RNA, 22 nt, Artificial Sequence
  LRRK2 RNA guide
aaaucauuugcucaacaugguu

SEQ ID NO: 63385 - RNA, 22 nt, Artificial Sequence
  LRRK2 RNA guide
aacacccaaccauguugagcaa

SEQ ID NO: 63386 - RNA, 22 nt, Artificial Sequence
  LRRK2 RNA guide
aacaugguuggguguuuuguga

SEQ ID NO: 63387 - RNA, 22 nt, Artificial Sequence
  LRRK2 RNA guide
aaccauguugagcaaaugauuu

SEQ ID NO: 63388 - RNA, 22 nt, Artificial Sequence
  LRRK2 RNA guide
aaucauuugcucaacaugguug

SEQ ID NO: 63389 - RNA, 22 nt, Artificial Sequence
  LRRK2 RNA guide
acaaaacacccaaccauguuga

SEQ ID NO: 63390 - RNA, 22 nt, Artificial Sequence
  LRRK2 RNA guide
acacccaaccauguugagcaaa

SEQ ID NO: 63391 - RNA, 22 nt, Artificial Sequence
  LRRK2 RNA guide
acaugguuggguguuuugugag

SEQ ID NO: 63392 - RNA, 22 nt, Artificial Sequence
  LRRK2 RNA guide
accauguugagcaaaugauuuu

SEQ ID NO: 63393 - RNA, 22 nt, Artificial Sequence
  LRRK2 RNA guide
acccaaccauguugagcaaaug

SEQ ID NO: 63394 - RNA, 22 nt, Artificial Sequence
  LRRK2 RNA guide
agccucacaaaacacccaacca

SEQ ID NO: 63395 - RNA, 22 nt, Artificial Sequence
  LRRK2 RNA guide
aucauuugcucaacaugguugg

SEQ ID NO: 63396 - RNA, 22 nt, Artificial Sequence
  LRRK2 RNA guide
augguuggguguuuugugaggc

SEQ ID NO: 63397 - RNA, 22 nt, Artificial Sequence
  LRRK2 RNA guide
auuugcucaacaugguugggug

SEQ ID NO: 63398 - RNA, 22 nt, Artificial Sequence
  LRRK2 RNA guide
caaaacacccaaccauguugag

SEQ ID NO: 63399 - RNA, 22 nt, Artificial Sequence
  LRRK2 RNA guide
caacaugguuggguguuuugug

SEQ ID NO: 63400 - RNA, 22 nt, Artificial Sequence
  LRRK2 RNA guide
caaccauguugagcaaaugauu

SEQ ID NO: 63401 - RNA, 22 nt, Artificial Sequence
  LRRK2 RNA guide
cacaaaacacccaaccauguug

SEQ ID NO: 63402 - RNA, 22 nt, Artificial Sequence
  LRRK2 RNA guide
cacccaaccauguugagcaaau

SEQ ID NO: 63403 - RNA, 22 nt, Artificial Sequence
  LRRK2 RNA guide
caugguuggguguuuugugagg

SEQ ID NO: 63404 - RNA, 22 nt, Artificial Sequence
  LRRK2 RNA guide
cauguugagcaaaugauuuuac

SEQ ID NO: 63405 - RNA, 22 nt, Artificial Sequence
  LRRK2 RNA guide
cauuugcucaacaugguugggu

SEQ ID NO: 63406 - RNA, 22 nt, Artificial Sequence
  LRRK2 RNA guide
ccaaccauguugagcaaaugau

SEQ ID NO: 63407 - RNA, 22 nt, Artificial Sequence
  LRRK2 RNA guide
ccauguugagcaaaugauuuua

SEQ ID NO: 63408 - RNA, 22 nt, Artificial Sequence
  LRRK2 RNA guide
cccaaccauguugagcaaauga

SEQ ID NO: 63409 - RNA, 22 nt, Artificial Sequence
  LRRK2 RNA guide
ccucacaaaacacccaaccaug

SEQ ID NO: 63410 - RNA, 22 nt, Artificial Sequence
  LRRK2 RNA guide
cucaacaugguuggguguuuug

SEQ ID NO: 63411 - RNA, 22 nt, Artificial Sequence
  LRRK2 RNA guide
cucacaaaacacccaaccaugu

SEQ ID NO: 63412 - RNA, 22 nt, Artificial Sequence
  LRRK2 RNA guide
gccucacaaaacacccaaccau

SEQ ID NO: 63413 - RNA, 22 nt, Artificial Sequence
  LRRK2 RNA guide
gcucaacaugguuggguguuuu

SEQ ID NO: 63414 - RNA, 22 nt, Artificial Sequence
  LRRK2 RNA guide
guaaaaucauuugcucaacaug

SEQ ID NO: 63415 - RNA, 22 nt, Artificial Sequence
  LRRK2 RNA guide
uaaaaucauuugcucaacaugg

SEQ ID NO: 63416 - RNA, 22 nt, Artificial Sequence
  LRRK2 RNA guide
ucaacaugguuggguguuuugu

SEQ ID NO: 63417 - RNA, 22 nt, Artificial Sequence
  LRRK2 RNA guide
ucacaaaacacccaaccauguu

SEQ ID NO: 63418 - RNA, 22 nt, Artificial Sequence
  LRRK2 RNA guide
ucauuugcucaacaugguuggg

SEQ ID NO: 63419 - RNA, 22 nt, Artificial Sequence
  LRRK2 RNA guide
ugcucaacaugguuggguguuu

SEQ ID NO: 63420 - RNA, 22 nt, Artificial Sequence
  LRRK2 RNA guide
uugcucaacaugguuggguguu

SEQ ID NO: 63421 - RNA, 22 nt, Artificial Sequence
  LRRK2 RNA guide
uuugcucaacaugguugggugu

SEQ ID NO: 63422 - RNA, 20 nt, Artificial Sequence
  LRRK2 RNA guide
agguaaguaucuaaugaaga

SEQ ID NO: 63423 - RNA, 20 nt, Artificial Sequence
  LRRK2 RNA guide
gguaaguaucuaaugaagac

SEQ ID NO: 63424 - RNA, 20 nt, Artificial Sequence
  LRRK2 RNA guide
guaaguaucuaaugaagacu

SEQ ID NO: 63425 - RNA, 21 nt, Artificial Sequence
  LRRK2 RNA guide
agguaaguaucuaaugaagac

SEQ ID NO: 63426 - RNA, 21 nt, Artificial Sequence
  LRRK2 RNA guide
gagguaaguaucuaaugaaga

SEQ ID NO: 63427 - RNA, 21 nt, Artificial Sequence
  LRRK2 RNA guide
gguaaguaucuaaugaagacu

SEQ ID NO: 63428 - RNA, 22 nt, Artificial Sequence
  LRRK2 RNA guide
agagguaaguaucuaaugaaga

SEQ ID NO: 63429 - RNA, 22 nt, Artificial Sequence
  LRRK2 RNA guide
agguaaguaucuaaugaagacu

SEQ ID NO: 63430 - RNA, 22 nt, Artificial Sequence
  LRRK2 RNA guide
gagguaaguaucuaaugaagac

SEQ ID NO: 63431 - RNA, 22 nt, Artificial Sequence
  LRRK2 RNA guide
gguaaguaucuaaugaagacuu

SEQ ID NO: 63432 - RNA, 20 nt, Artificial Sequence
  LRRK2 RNA guide
aaucacagucaagaucugag

SEQ ID NO: 63433 - RNA, 20 nt, Artificial Sequence
  LRRK2 RNA guide
aauguaaucacagucaagau

SEQ ID NO: 63434 - RNA, 20 nt, Artificial Sequence
  LRRK2 RNA guide
acaauguaaucacagucaag

SEQ ID NO: 63435 - RNA, 20 nt, Artificial Sequence
  LRRK2 RNA guide
acagucaagaucugagugag

SEQ ID NO: 63436 - RNA, 20 nt, Artificial Sequence
  LRRK2 RNA guide
acagucccuacaauguaauc

SEQ ID NO: 63437 - RNA, 20 nt, Artificial Sequence
  LRRK2 RNA guide
acucagaucuugacugugau

SEQ ID NO: 63438 - RNA, 20 nt, Artificial Sequence
  LRRK2 RNA guide
acugugauuacauuguaggg

SEQ ID NO: 63439 - RNA, 20 nt, Artificial Sequence
  LRRK2 RNA guide
agaucuugacugugauuaca

SEQ ID NO: 63440 - RNA, 20 nt, Artificial Sequence
  LRRK2 RNA guide
aggugcucacucagaucuug

SEQ ID NO: 63441 - RNA, 20 nt, Artificial Sequence
  LRRK2 RNA guide
agucccuacaauguaaucac

SEQ ID NO: 63442 - RNA, 20 nt, Artificial Sequence
  LRRK2 RNA guide
aucacagucaagaucugagu

SEQ ID NO: 63443 - RNA, 20 nt, Artificial Sequence
  LRRK2 RNA guide
aucuugacugugauuacauu

SEQ ID NO: 63444 - RNA, 20 nt, Artificial Sequence
  LRRK2 RNA guide
auguaaucacagucaagauc

SEQ ID NO: 63445 - RNA, 20 nt, Artificial Sequence
  LRRK2 RNA guide
caauguaaucacagucaaga

SEQ ID NO: 63446 - RNA, 20 nt, Artificial Sequence
  LRRK2 RNA guide
cacagucaagaucugaguga

SEQ ID NO: 63447 - RNA, 20 nt, Artificial Sequence
  LRRK2 RNA guide
cacucagaucuugacuguga

SEQ ID NO: 63448 - RNA, 20 nt, Artificial Sequence
  LRRK2 RNA guide
cagaucuugacugugauuac

SEQ ID NO: 63449 - RNA, 20 nt, Artificial Sequence
  LRRK2 RNA guide
cagucaagaucugagugagc

SEQ ID NO: 63450 - RNA, 20 nt, Artificial Sequence
  LRRK2 RNA guide
cagucccuacaauguaauca

SEQ ID NO: 63451 - RNA, 20 nt, Artificial Sequence
  LRRK2 RNA guide
cccuacaauguaaucacagu

SEQ ID NO: 63452 - RNA, 20 nt, Artificial Sequence
  LRRK2 RNA guide
ccuacaauguaaucacaguc

SEQ ID NO: 63453 - RNA, 20 nt, Artificial Sequence
  LRRK2 RNA guide
cuacaauguaaucacaguca

SEQ ID NO: 63454 - RNA, 20 nt, Artificial Sequence
  LRRK2 RNA guide
cucacucagaucuugacugu

SEQ ID NO: 63455 - RNA, 20 nt, Artificial Sequence
  LRRK2 RNA guide
cucagaucuugacugugauu

SEQ ID NO: 63456 - RNA, 20 nt, Artificial Sequence
  LRRK2 RNA guide
cugugauuacauuguaggga

SEQ ID NO: 63457 - RNA, 20 nt, Artificial Sequence
  LRRK2 RNA guide
cuugacugugauuacauugu

SEQ ID NO: 63458 - RNA, 20 nt, Artificial Sequence
  LRRK2 RNA guide
gacugugauuacauuguagg

SEQ ID NO: 63459 - RNA, 20 nt, Artificial Sequence
  LRRK2 RNA guide
gaucuugacugugauuacau

SEQ ID NO: 63460 - RNA, 20 nt, Artificial Sequence
  LRRK2 RNA guide
gcucacucagaucuugacug

SEQ ID NO: 63461 - RNA, 20 nt, Artificial Sequence
  LRRK2 RNA guide
ggugcucacucagaucuuga

SEQ ID NO: 63462 - RNA, 20 nt, Artificial Sequence
  LRRK2 RNA guide
guaaucacagucaagaucug

SEQ ID NO: 63463 - RNA, 20 nt, Artificial Sequence
  LRRK2 RNA guide
gucccuacaauguaaucaca

SEQ ID NO: 63464 - RNA, 20 nt, Artificial Sequence
  LRRK2 RNA guide
gugcucacucagaucuugac

SEQ ID NO: 63465 - RNA, 20 nt, Artificial Sequence
  LRRK2 RNA guide
uaaucacagucaagaucuga

SEQ ID NO: 63466 - RNA, 20 nt, Artificial Sequence
  LRRK2 RNA guide
uacaauguaaucacagucaa

SEQ ID NO: 63467 - RNA, 20 nt, Artificial Sequence
  LRRK2 RNA guide
uacagucccuacaauguaau

SEQ ID NO: 63468 - RNA, 20 nt, Artificial Sequence
  LRRK2 RNA guide
uaggugcucacucagaucuu

SEQ ID NO: 63469 - RNA, 20 nt, Artificial Sequence
  LRRK2 RNA guide
ucacagucaagaucugagug

SEQ ID NO: 63470 - RNA, 20 nt, Artificial Sequence
  LRRK2 RNA guide
ucacucagaucuugacugug

SEQ ID NO: 63471 - RNA, 20 nt, Artificial Sequence
  LRRK2 RNA guide
ucagaucuugacugugauua

SEQ ID NO: 63472 - RNA, 20 nt, Artificial Sequence
  LRRK2 RNA guide
ucccuacaauguaaucacag

SEQ ID NO: 63473 - RNA, 20 nt, Artificial Sequence
  LRRK2 RNA guide
ucuugacugugauuacauug

SEQ ID NO: 63474 - RNA, 20 nt, Artificial Sequence
  LRRK2 RNA guide
ugacugugauuacauuguag

SEQ ID NO: 63475 - RNA, 20 nt, Artificial Sequence
  LRRK2 RNA guide
ugcucacucagaucuugacu

SEQ ID NO: 63476 - RNA, 20 nt, Artificial Sequence
  LRRK2 RNA guide
uguaaucacagucaagaucu

SEQ ID NO: 63477 - RNA, 20 nt, Artificial Sequence
  LRRK2 RNA guide
uuacagucccuacaauguaa

SEQ ID NO: 63478 - RNA, 20 nt, Artificial Sequence
  LRRK2 RNA guide
uuaggugcucacucagaucu

SEQ ID NO: 63479 - RNA, 20 nt, Artificial Sequence
  LRRK2 RNA guide
uugacugugauuacauugua

SEQ ID NO: 63480 - RNA, 21 nt, Artificial Sequence
  LRRK2 RNA guide
aaucacagucaagaucugagu

SEQ ID NO: 63481 - RNA, 21 nt, Artificial Sequence
  LRRK2 RNA guide
aauguaaucacagucaagauc

SEQ ID NO: 63482 - RNA, 21 nt, Artificial Sequence
  LRRK2 RNA guide
acaauguaaucacagucaaga

SEQ ID NO: 63483 - RNA, 21 nt, Artificial Sequence
  LRRK2 RNA guide
acagucaagaucugagugagc

SEQ ID NO: 63484 - RNA, 21 nt, Artificial Sequence
  LRRK2 RNA guide
acagucccuacaauguaauca

SEQ ID NO: 63485 - RNA, 21 nt, Artificial Sequence
  LRRK2 RNA guide
acucagaucuugacugugauu

SEQ ID NO: 63486 - RNA, 21 nt, Artificial Sequence
  LRRK2 RNA guide
acugugauuacauuguaggga

SEQ ID NO: 63487 - RNA, 21 nt, Artificial Sequence
  LRRK2 RNA guide
agaucuugacugugauuacau

SEQ ID NO: 63488 - RNA, 21 nt, Artificial Sequence
  LRRK2 RNA guide
aggugcucacucagaucuuga

SEQ ID NO: 63489 - RNA, 21 nt, Artificial Sequence
  LRRK2 RNA guide
agucccuacaauguaaucaca

SEQ ID NO: 63490 - RNA, 21 nt, Artificial Sequence
  LRRK2 RNA guide
aucacagucaagaucugagug

SEQ ID NO: 63491 - RNA, 21 nt, Artificial Sequence
  LRRK2 RNA guide
aucuugacugugauuacauug

SEQ ID NO: 63492 - RNA, 21 nt, Artificial Sequence
  LRRK2 RNA guide
auguaaucacagucaagaucu

SEQ ID NO: 63493 - RNA, 21 nt, Artificial Sequence
  LRRK2 RNA guide
auuacagucccuacaauguaa

SEQ ID NO: 63494 - RNA, 21 nt, Artificial Sequence
  LRRK2 RNA guide
caauguaaucacagucaagau

SEQ ID NO: 63495 - RNA, 21 nt, Artificial Sequence
  LRRK2 RNA guide
cacagucaagaucugagugag

SEQ ID NO: 63496 - RNA, 21 nt, Artificial Sequence
  LRRK2 RNA guide
cacucagaucuugacugugau

SEQ ID NO: 63497 - RNA, 21 nt, Artificial Sequence
  LRRK2 RNA guide
cagaucuugacugugauuaca

SEQ ID NO: 63498 - RNA, 21 nt, Artificial Sequence
  LRRK2 RNA guide
cagucaagaucugagugagca

SEQ ID NO: 63499 - RNA, 21 nt, Artificial Sequence
  LRRK2 RNA guide
cagucccuacaauguaaucac

SEQ ID NO: 63500 - RNA, 21 nt, Artificial Sequence
  LRRK2 RNA guide
cccuacaauguaaucacaguc

SEQ ID NO: 63501 - RNA, 21 nt, Artificial Sequence
  LRRK2 RNA guide
ccuacaauguaaucacaguca

SEQ ID NO: 63502 - RNA, 21 nt, Artificial Sequence
  LRRK2 RNA guide
cuacaauguaaucacagucaa

SEQ ID NO: 63503 - RNA, 21 nt, Artificial Sequence
  LRRK2 RNA guide
cucacucagaucuugacugug

SEQ ID NO: 63504 - RNA, 21 nt, Artificial Sequence
  LRRK2 RNA guide
cucagaucuugacugugauua

SEQ ID NO: 63505 - RNA, 21 nt, Artificial Sequence
  LRRK2 RNA guide
cugugauuacauuguagggac

SEQ ID NO: 63506 - RNA, 21 nt, Artificial Sequence
  LRRK2 RNA guide
cuuaggugcucacucagaucu

SEQ ID NO: 63507 - RNA, 21 nt, Artificial Sequence
  LRRK2 RNA guide
cuugacugugauuacauugua

SEQ ID NO: 63508 - RNA, 21 nt, Artificial Sequence
  LRRK2 RNA guide
gacugugauuacauuguaggg

SEQ ID NO: 63509 - RNA, 21 nt, Artificial Sequence
  LRRK2 RNA guide
gaucuugacugugauuacauu

SEQ ID NO: 63510 - RNA, 21 nt, Artificial Sequence
  LRRK2 RNA guide
gcucacucagaucuugacugu

SEQ ID NO: 63511 - RNA, 21 nt, Artificial Sequence
  LRRK2 RNA guide
ggugcucacucagaucuugac

SEQ ID NO: 63512 - RNA, 21 nt, Artificial Sequence
  LRRK2 RNA guide
guaaucacagucaagaucuga

SEQ ID NO: 63513 - RNA, 21 nt, Artificial Sequence
  LRRK2 RNA guide
gucccuacaauguaaucacag

SEQ ID NO: 63514 - RNA, 21 nt, Artificial Sequence
  LRRK2 RNA guide
gugcucacucagaucuugacu

SEQ ID NO: 63515 - RNA, 21 nt, Artificial Sequence
  LRRK2 RNA guide
uaaucacagucaagaucugag

SEQ ID NO: 63516 - RNA, 21 nt, Artificial Sequence
  LRRK2 RNA guide
uacaauguaaucacagucaag

SEQ ID NO: 63517 - RNA, 21 nt, Artificial Sequence
  LRRK2 RNA guide
uacagucccuacaauguaauc

SEQ ID NO: 63518 - RNA, 21 nt, Artificial Sequence
  LRRK2 RNA guide
uaggugcucacucagaucuug

SEQ ID NO: 63519 - RNA, 21 nt, Artificial Sequence
  LRRK2 RNA guide
ucacagucaagaucugaguga

SEQ ID NO: 63520 - RNA, 21 nt, Artificial Sequence
  LRRK2 RNA guide
ucacucagaucuugacuguga

SEQ ID NO: 63521 - RNA, 21 nt, Artificial Sequence
  LRRK2 RNA guide
ucagaucuugacugugauuac

SEQ ID NO: 63522 - RNA, 21 nt, Artificial Sequence
  LRRK2 RNA guide
ucccuacaauguaaucacagu

SEQ ID NO: 63523 - RNA, 21 nt, Artificial Sequence
  LRRK2 RNA guide
ucuugacugugauuacauugu

SEQ ID NO: 63524 - RNA, 21 nt, Artificial Sequence
  LRRK2 RNA guide
ugacugugauuacauuguagg

SEQ ID NO: 63525 - RNA, 21 nt, Artificial Sequence
  LRRK2 RNA guide
ugcucacucagaucuugacug

SEQ ID NO: 63526 - RNA, 21 nt, Artificial Sequence
  LRRK2 RNA guide
uguaaucacagucaagaucug

SEQ ID NO: 63527 - RNA, 21 nt, Artificial Sequence
  LRRK2 RNA guide
uuacagucccuacaauguaau

SEQ ID NO: 63528 - RNA, 21 nt, Artificial Sequence
  LRRK2 RNA guide
uuaggugcucacucagaucuu

SEQ ID NO: 63529 - RNA, 21 nt, Artificial Sequence
  LRRK2 RNA guide
uugacugugauuacauuguag

SEQ ID NO: 63530 - RNA, 22 nt, Artificial Sequence
  LRRK2 RNA guide
aaucacagucaagaucugagug

SEQ ID NO: 63531 - RNA, 22 nt, Artificial Sequence
  LRRK2 RNA guide
aauguaaucacagucaagaucu

SEQ ID NO: 63532 - RNA, 22 nt, Artificial Sequence
  LRRK2 RNA guide
aauuacagucccuacaauguaa

SEQ ID NO: 63533 - RNA, 22 nt, Artificial Sequence
  LRRK2 RNA guide
acaauguaaucacagucaagau

SEQ ID NO: 63534 - RNA, 22 nt, Artificial Sequence
  LRRK2 RNA guide
acagucaagaucugagugagca

SEQ ID NO: 63535 - RNA, 22 nt, Artificial Sequence
  LRRK2 RNA guide
acagucccuacaauguaaucac

SEQ ID NO: 63536 - RNA, 22 nt, Artificial Sequence
  LRRK2 RNA guide
acucagaucuugacugugauua

SEQ ID NO: 63537 - RNA, 22 nt, Artificial Sequence
  LRRK2 RNA guide
acugugauuacauuguagggac

SEQ ID NO: 63538 - RNA, 22 nt, Artificial Sequence
  LRRK2 RNA guide
agaucuugacugugauuacauu

SEQ ID NO: 63539 - RNA, 22 nt, Artificial Sequence
  LRRK2 RNA guide
aggugcucacucagaucuugac

SEQ ID NO: 63540 - RNA, 22 nt, Artificial Sequence
  LRRK2 RNA guide
agucccuacaauguaaucacag

SEQ ID NO: 63541 - RNA, 22 nt, Artificial Sequence
  LRRK2 RNA guide
aucacagucaagaucugaguga

SEQ ID NO: 63542 - RNA, 22 nt, Artificial Sequence
  LRRK2 RNA guide
aucuugacugugauuacauugu

SEQ ID NO: 63543 - RNA, 22 nt, Artificial Sequence
  LRRK2 RNA guide
auguaaucacagucaagaucug

SEQ ID NO: 63544 - RNA, 22 nt, Artificial Sequence
  LRRK2 RNA guide
auuacagucccuacaauguaau

SEQ ID NO: 63545 - RNA, 22 nt, Artificial Sequence
  LRRK2 RNA guide
caauguaaucacagucaagauc

SEQ ID NO: 63546 - RNA, 22 nt, Artificial Sequence
  LRRK2 RNA guide
cacagucaagaucugagugagc

SEQ ID NO: 63547 - RNA, 22 nt, Artificial Sequence
  LRRK2 RNA guide
cacucagaucuugacugugauu

SEQ ID NO: 63548 - RNA, 22 nt, Artificial Sequence
  LRRK2 RNA guide
cagaucuugacugugauuacau

SEQ ID NO: 63549 - RNA, 22 nt, Artificial Sequence
  LRRK2 RNA guide
cagucaagaucugagugagcac

SEQ ID NO: 63550 - RNA, 22 nt, Artificial Sequence
  LRRK2 RNA guide
cagucccuacaauguaaucaca

SEQ ID NO: 63551 - RNA, 22 nt, Artificial Sequence
  LRRK2 RNA guide
cccuacaauguaaucacaguca

SEQ ID NO: 63552 - RNA, 22 nt, Artificial Sequence
  LRRK2 RNA guide
ccuacaauguaaucacagucaa

SEQ ID NO: 63553 - RNA, 22 nt, Artificial Sequence
  LRRK2 RNA guide
ccuuaggugcucacucagaucu

SEQ ID NO: 63554 - RNA, 22 nt, Artificial Sequence
  LRRK2 RNA guide
cuacaauguaaucacagucaag

SEQ ID NO: 63555 - RNA, 22 nt, Artificial Sequence
  LRRK2 RNA guide
cucacucagaucuugacuguga

SEQ ID NO: 63556 - RNA, 22 nt, Artificial Sequence
  LRRK2 RNA guide
cucagaucuugacugugauuac

SEQ ID NO: 63557 - RNA, 22 nt, Artificial Sequence
  LRRK2 RNA guide
cugugauuacauuguagggacu

SEQ ID NO: 63558 - RNA, 22 nt, Artificial Sequence
  LRRK2 RNA guide
cuuaggugcucacucagaucuu

SEQ ID NO: 63559 - RNA, 22 nt, Artificial Sequence
  LRRK2 RNA guide
cuugacugugauuacauuguag

SEQ ID NO: 63560 - RNA, 22 nt, Artificial Sequence
  LRRK2 RNA guide
gacugugauuacauuguaggga

SEQ ID NO: 63561 - RNA, 22 nt, Artificial Sequence
  LRRK2 RNA guide
gaucuugacugugauuacauug

SEQ ID NO: 63562 - RNA, 22 nt, Artificial Sequence
  LRRK2 RNA guide
gcucacucagaucuugacugug

SEQ ID NO: 63563 - RNA, 22 nt, Artificial Sequence
  LRRK2 RNA guide
ggugcucacucagaucuugacu

SEQ ID NO: 63564 - RNA, 22 nt, Artificial Sequence
  LRRK2 RNA guide
guaaucacagucaagaucugag

SEQ ID NO: 63565 - RNA, 22 nt, Artificial Sequence
  LRRK2 RNA guide
gucccuacaauguaaucacagu

SEQ ID NO: 63566 - RNA, 22 nt, Artificial Sequence
  LRRK2 RNA guide
gugcucacucagaucuugacug

SEQ ID NO: 63567 - RNA, 22 nt, Artificial Sequence
  LRRK2 RNA guide
uaaucacagucaagaucugagu

SEQ ID NO: 63568 - RNA, 22 nt, Artificial Sequence
  LRRK2 RNA guide
uacaauguaaucacagucaaga

SEQ ID NO: 63569 - RNA, 22 nt, Artificial Sequence
  LRRK2 RNA guide
uacagucccuacaauguaauca

SEQ ID NO: 63570 - RNA, 22 nt, Artificial Sequence
  LRRK2 RNA guide
uaggugcucacucagaucuuga

SEQ ID NO: 63571 - RNA, 22 nt, Artificial Sequence
  LRRK2 RNA guide
ucacagucaagaucugagugag

SEQ ID NO: 63572 - RNA, 22 nt, Artificial Sequence
  LRRK2 RNA guide
ucacucagaucuugacugugau

SEQ ID NO: 63573 - RNA, 22 nt, Artificial Sequence
  LRRK2 RNA guide
ucagaucuugacugugauuaca

SEQ ID NO: 63574 - RNA, 22 nt, Artificial Sequence
  LRRK2 RNA guide
ucccuacaauguaaucacaguc

SEQ ID NO: 63575 - RNA, 22 nt, Artificial Sequence
  LRRK2 RNA guide
ucuugacugugauuacauugua

SEQ ID NO: 63576 - RNA, 22 nt, Artificial Sequence
  LRRK2 RNA guide
ugacugugauuacauuguaggg

SEQ ID NO: 63577 - RNA, 22 nt, Artificial Sequence
  LRRK2 RNA guide
ugcucacucagaucuugacugu

SEQ ID NO: 63578 - RNA, 22 nt, Artificial Sequence
  LRRK2 RNA guide
uguaaucacagucaagaucuga

SEQ ID NO: 63579 - RNA, 22 nt, Artificial Sequence
  LRRK2 RNA guide
uuacagucccuacaauguaauc

SEQ ID NO: 63580 - RNA, 22 nt, Artificial Sequence
  LRRK2 RNA guide
uuaggugcucacucagaucuug

SEQ ID NO: 63581 - RNA, 22 nt, Artificial Sequence
  LRRK2 RNA guide
uugacugugauuacauuguagg

SEQ ID NO: 63582 - RNA, 20 nt, Artificial Sequence
  LRRK2 RNA guide
aaucacggucaagaucugag

SEQ ID NO: 63583 - RNA, 20 nt, Artificial Sequence
  LRRK2 RNA guide
aauguaaucacggucaagau

SEQ ID NO: 63584 - RNA, 20 nt, Artificial Sequence
  LRRK2 RNA guide
acaauguaaucacggucaag

SEQ ID NO: 63585 - RNA, 20 nt, Artificial Sequence
  LRRK2 RNA guide
accgugauuacauuguaggg

SEQ ID NO: 63586 - RNA, 20 nt, Artificial Sequence
  LRRK2 RNA guide
acggucaagaucugagugag

SEQ ID NO: 63587 - RNA, 20 nt, Artificial Sequence
  LRRK2 RNA guide
acucagaucuugaccgugau

SEQ ID NO: 63588 - RNA, 20 nt, Artificial Sequence
  LRRK2 RNA guide
agaucuugaccgugauuaca

SEQ ID NO: 63589 - RNA, 20 nt, Artificial Sequence
  LRRK2 RNA guide
aucacggucaagaucugagu

SEQ ID NO: 63590 - RNA, 20 nt, Artificial Sequence
  LRRK2 RNA guide
aucuugaccgugauuacauu

SEQ ID NO: 63591 - RNA, 20 nt, Artificial Sequence
  LRRK2 RNA guide
auguaaucacggucaagauc

SEQ ID NO: 63592 - RNA, 20 nt, Artificial Sequence
  LRRK2 RNA guide
caauguaaucacggucaaga

SEQ ID NO: 63593 - RNA, 20 nt, Artificial Sequence
  LRRK2 RNA guide
cacggucaagaucugaguga

SEQ ID NO: 63594 - RNA, 20 nt, Artificial Sequence
  LRRK2 RNA guide
cacucagaucuugaccguga

SEQ ID NO: 63595 - RNA, 20 nt, Artificial Sequence
  LRRK2 RNA guide
cagaucuugaccgugauuac

SEQ ID NO: 63596 - RNA, 20 nt, Artificial Sequence
  LRRK2 RNA guide
cccuacaauguaaucacggu

SEQ ID NO: 63597 - RNA, 20 nt, Artificial Sequence
  LRRK2 RNA guide
ccgugauuacauuguaggga

SEQ ID NO: 63598 - RNA, 20 nt, Artificial Sequence
  LRRK2 RNA guide
ccuacaauguaaucacgguc

SEQ ID NO: 63599 - RNA, 20 nt, Artificial Sequence
  LRRK2 RNA guide
cggucaagaucugagugagc

SEQ ID NO: 63600 - RNA, 20 nt, Artificial Sequence
  LRRK2 RNA guide
cuacaauguaaucacgguca

SEQ ID NO: 63601 - RNA, 20 nt, Artificial Sequence
  LRRK2 RNA guide
cucacucagaucuugaccgu

SEQ ID NO: 63602 - RNA, 20 nt, Artificial Sequence
  LRRK2 RNA guide
cucagaucuugaccgugauu

SEQ ID NO: 63603 - RNA, 20 nt, Artificial Sequence
  LRRK2 RNA guide
cuugaccgugauuacauugu

SEQ ID NO: 63604 - RNA, 20 nt, Artificial Sequence
  LRRK2 RNA guide
gaccgugauuacauuguagg

SEQ ID NO: 63605 - RNA, 20 nt, Artificial Sequence
  LRRK2 RNA guide
gaucuugaccgugauuacau

SEQ ID NO: 63606 - RNA, 20 nt, Artificial Sequence
  LRRK2 RNA guide
gcucacucagaucuugaccg

SEQ ID NO: 63607 - RNA, 20 nt, Artificial Sequence
  LRRK2 RNA guide
guaaucacggucaagaucug

SEQ ID NO: 63608 - RNA, 20 nt, Artificial Sequence
  LRRK2 RNA guide
gucccuacaauguaaucacg

SEQ ID NO: 63609 - RNA, 20 nt, Artificial Sequence
  LRRK2 RNA guide
uaaucacggucaagaucuga

SEQ ID NO: 63610 - RNA, 20 nt, Artificial Sequence
  LRRK2 RNA guide
uacaauguaaucacggucaa

SEQ ID NO: 63611 - RNA, 20 nt, Artificial Sequence
  LRRK2 RNA guide
ucacggucaagaucugagug

SEQ ID NO: 63612 - RNA, 20 nt, Artificial Sequence
  LRRK2 RNA guide
ucacucagaucuugaccgug

SEQ ID NO: 63613 - RNA, 20 nt, Artificial Sequence
  LRRK2 RNA guide
ucagaucuugaccgugauua

SEQ ID NO: 63614 - RNA, 20 nt, Artificial Sequence
  LRRK2 RNA guide
ucccuacaauguaaucacgg

SEQ ID NO: 63615 - RNA, 20 nt, Artificial Sequence
  LRRK2 RNA guide
ucuugaccgugauuacauug

SEQ ID NO: 63616 - RNA, 20 nt, Artificial Sequence
  LRRK2 RNA guide
ugaccgugauuacauuguag

SEQ ID NO: 63617 - RNA, 20 nt, Artificial Sequence
  LRRK2 RNA guide
ugcucacucagaucuugacc

SEQ ID NO: 63618 - RNA, 20 nt, Artificial Sequence
  LRRK2 RNA guide
uguaaucacggucaagaucu

SEQ ID NO: 63619 - RNA, 20 nt, Artificial Sequence
  LRRK2 RNA guide
uugaccgugauuacauugua

SEQ ID NO: 63620 - RNA, 21 nt, Artificial Sequence
  LRRK2 RNA guide
aaucacggucaagaucugagu

SEQ ID NO: 63621 - RNA, 21 nt, Artificial Sequence
  LRRK2 RNA guide
aauguaaucacggucaagauc

SEQ ID NO: 63622 - RNA, 21 nt, Artificial Sequence
  LRRK2 RNA guide
acaauguaaucacggucaaga

SEQ ID NO: 63623 - RNA, 21 nt, Artificial Sequence
  LRRK2 RNA guide
accgugauuacauuguaggga

SEQ ID NO: 63624 - RNA, 21 nt, Artificial Sequence
  LRRK2 RNA guide
acggucaagaucugagugagc

SEQ ID NO: 63625 - RNA, 21 nt, Artificial Sequence
  LRRK2 RNA guide
acucagaucuugaccgugauu

SEQ ID NO: 63626 - RNA, 21 nt, Artificial Sequence
  LRRK2 RNA guide
agaucuugaccgugauuacau

SEQ ID NO: 63627 - RNA, 21 nt, Artificial Sequence
  LRRK2 RNA guide
agucccuacaauguaaucacg

SEQ ID NO: 63628 - RNA, 21 nt, Artificial Sequence
  LRRK2 RNA guide
aucacggucaagaucugagug

SEQ ID NO: 63629 - RNA, 21 nt, Artificial Sequence
  LRRK2 RNA guide
aucuugaccgugauuacauug

SEQ ID NO: 63630 - RNA, 21 nt, Artificial Sequence
  LRRK2 RNA guide
auguaaucacggucaagaucu

SEQ ID NO: 63631 - RNA, 21 nt, Artificial Sequence
  LRRK2 RNA guide
caauguaaucacggucaagau

SEQ ID NO: 63632 - RNA, 21 nt, Artificial Sequence
  LRRK2 RNA guide
cacggucaagaucugagugag

SEQ ID NO: 63633 - RNA, 21 nt, Artificial Sequence
  LRRK2 RNA guide
cacucagaucuugaccgugau

SEQ ID NO: 63634 - RNA, 21 nt, Artificial Sequence
  LRRK2 RNA guide
cagaucuugaccgugauuaca

SEQ ID NO: 63635 - RNA, 21 nt, Artificial Sequence
  LRRK2 RNA guide
cccuacaauguaaucacgguc

SEQ ID NO: 63636 - RNA, 21 nt, Artificial Sequence
  LRRK2 RNA guide
ccgugauuacauuguagggac

SEQ ID NO: 63637 - RNA, 21 nt, Artificial Sequence
  LRRK2 RNA guide
ccuacaauguaaucacgguca

SEQ ID NO: 63638 - RNA, 21 nt, Artificial Sequence
  LRRK2 RNA guide
cggucaagaucugagugagca

SEQ ID NO: 63639 - RNA, 21 nt, Artificial Sequence
  LRRK2 RNA guide
cuacaauguaaucacggucaa

SEQ ID NO: 63640 - RNA, 21 nt, Artificial Sequence
  LRRK2 RNA guide
cucacucagaucuugaccgug

SEQ ID NO: 63641 - RNA, 21 nt, Artificial Sequence
  LRRK2 RNA guide
cucagaucuugaccgugauua

SEQ ID NO: 63642 - RNA, 21 nt, Artificial Sequence
  LRRK2 RNA guide
cuugaccgugauuacauugua

SEQ ID NO: 63643 - RNA, 21 nt, Artificial Sequence
  LRRK2 RNA guide
gaccgugauuacauuguaggg

SEQ ID NO: 63644 - RNA, 21 nt, Artificial Sequence
  LRRK2 RNA guide
gaucuugaccgugauuacauu

SEQ ID NO: 63645 - RNA, 21 nt, Artificial Sequence
  LRRK2 RNA guide
gcucacucagaucuugaccgu

SEQ ID NO: 63646 - RNA, 21 nt, Artificial Sequence
  LRRK2 RNA guide
guaaucacggucaagaucuga

SEQ ID NO: 63647 - RNA, 21 nt, Artificial Sequence
  LRRK2 RNA guide
gucccuacaauguaaucacgg

SEQ ID NO: 63648 - RNA, 21 nt, Artificial Sequence
  LRRK2 RNA guide
gugcucacucagaucuugacc

SEQ ID NO: 63649 - RNA, 21 nt, Artificial Sequence
  LRRK2 RNA guide
uaaucacggucaagaucugag

SEQ ID NO: 63650 - RNA, 21 nt, Artificial Sequence
  LRRK2 RNA guide
uacaauguaaucacggucaag

SEQ ID NO: 63651 - RNA, 21 nt, Artificial Sequence
  LRRK2 RNA guide
ucacggucaagaucugaguga

SEQ ID NO: 63652 - RNA, 21 nt, Artificial Sequence
  LRRK2 RNA guide
ucacucagaucuugaccguga

SEQ ID NO: 63653 - RNA, 21 nt, Artificial Sequence
  LRRK2 RNA guide
ucagaucuugaccgugauuac

SEQ ID NO: 63654 - RNA, 21 nt, Artificial Sequence
  LRRK2 RNA guide
ucccuacaauguaaucacggu

SEQ ID NO: 63655 - RNA, 21 nt, Artificial Sequence
  LRRK2 RNA guide
ucuugaccgugauuacauugu

SEQ ID NO: 63656 - RNA, 21 nt, Artificial Sequence
  LRRK2 RNA guide
ugaccgugauuacauuguagg

SEQ ID NO: 63657 - RNA, 21 nt, Artificial Sequence
  LRRK2 RNA guide
ugcucacucagaucuugaccg

SEQ ID NO: 63658 - RNA, 21 nt, Artificial Sequence
  LRRK2 RNA guide
uguaaucacggucaagaucug

SEQ ID NO: 63659 - RNA, 21 nt, Artificial Sequence
  LRRK2 RNA guide
uugaccgugauuacauuguag

SEQ ID NO: 63660 - RNA, 22 nt, Artificial Sequence
  LRRK2 RNA guide
aaucacggucaagaucugagug

SEQ ID NO: 63661 - RNA, 22 nt, Artificial Sequence
  LRRK2 RNA guide
aauguaaucacggucaagaucu

SEQ ID NO: 63662 - RNA, 22 nt, Artificial Sequence
  LRRK2 RNA guide
acaauguaaucacggucaagau

SEQ ID NO: 63663 - RNA, 22 nt, Artificial Sequence
  LRRK2 RNA guide
accgugauuacauuguagggac

SEQ ID NO: 63664 - RNA, 22 nt, Artificial Sequence
  LRRK2 RNA guide
acggucaagaucugagugagca

SEQ ID NO: 63665 - RNA, 22 nt, Artificial Sequence
  LRRK2 RNA guide
acucagaucuugaccgugauua

SEQ ID NO: 63666 - RNA, 22 nt, Artificial Sequence
  LRRK2 RNA guide
agaucuugaccgugauuacauu

SEQ ID NO: 63667 - RNA, 22 nt, Artificial Sequence
  LRRK2 RNA guide
agucccuacaauguaaucacgg

SEQ ID NO: 63668 - RNA, 22 nt, Artificial Sequence
  LRRK2 RNA guide
aucacggucaagaucugaguga

SEQ ID NO: 63669 - RNA, 22 nt, Artificial Sequence
  LRRK2 RNA guide
aucuugaccgugauuacauugu

SEQ ID NO: 63670 - RNA, 22 nt, Artificial Sequence
  LRRK2 RNA guide
auguaaucacggucaagaucug

SEQ ID NO: 63671 - RNA, 22 nt, Artificial Sequence
  LRRK2 RNA guide
caauguaaucacggucaagauc

SEQ ID NO: 63672 - RNA, 22 nt, Artificial Sequence
  LRRK2 RNA guide
cacggucaagaucugagugagc

SEQ ID NO: 63673 - RNA, 22 nt, Artificial Sequence
  LRRK2 RNA guide
cacucagaucuugaccgugauu

SEQ ID NO: 63674 - RNA, 22 nt, Artificial Sequence
  LRRK2 RNA guide
cagaucuugaccgugauuacau

SEQ ID NO: 63675 - RNA, 22 nt, Artificial Sequence
  LRRK2 RNA guide
cagucccuacaauguaaucacg

SEQ ID NO: 63676 - RNA, 22 nt, Artificial Sequence
  LRRK2 RNA guide
cccuacaauguaaucacgguca

SEQ ID NO: 63677 - RNA, 22 nt, Artificial Sequence
  LRRK2 RNA guide
ccgugauuacauuguagggacu

SEQ ID NO: 63678 - RNA, 22 nt, Artificial Sequence
  LRRK2 RNA guide
ccuacaauguaaucacggucaa

SEQ ID NO: 63679 - RNA, 22 nt, Artificial Sequence
  LRRK2 RNA guide
cggucaagaucugagugagcac

SEQ ID NO: 63680 - RNA, 22 nt, Artificial Sequence
  LRRK2 RNA guide
cuacaauguaaucacggucaag

SEQ ID NO: 63681 - RNA, 22 nt, Artificial Sequence
  LRRK2 RNA guide
cucacucagaucuugaccguga

SEQ ID NO: 63682 - RNA, 22 nt, Artificial Sequence
  LRRK2 RNA guide
cucagaucuugaccgugauuac

SEQ ID NO: 63683 - RNA, 22 nt, Artificial Sequence
  LRRK2 RNA guide
cuugaccgugauuacauuguag

SEQ ID NO: 63684 - RNA, 22 nt, Artificial Sequence
  LRRK2 RNA guide
gaccgugauuacauuguaggga

SEQ ID NO: 63685 - RNA, 22 nt, Artificial Sequence
  LRRK2 RNA guide
gaucuugaccgugauuacauug

SEQ ID NO: 63686 - RNA, 22 nt, Artificial Sequence
  LRRK2 RNA guide
gcucacucagaucuugaccgug

SEQ ID NO: 63687 - RNA, 22 nt, Artificial Sequence
  LRRK2 RNA guide
ggugcucacucagaucuugacc

SEQ ID NO: 63688 - RNA, 22 nt, Artificial Sequence
  LRRK2 RNA guide
guaaucacggucaagaucugag

SEQ ID NO: 63689 - RNA, 22 nt, Artificial Sequence
  LRRK2 RNA guide
gucccuacaauguaaucacggu

SEQ ID NO: 63690 - RNA, 22 nt, Artificial Sequence
  LRRK2 RNA guide
gugcucacucagaucuugaccg

SEQ ID NO: 63691 - RNA, 22 nt, Artificial Sequence
  LRRK2 RNA guide
uaaucacggucaagaucugagu

SEQ ID NO: 63692 - RNA, 22 nt, Artificial Sequence
  LRRK2 RNA guide
uacaauguaaucacggucaaga

SEQ ID NO: 63693 - RNA, 22 nt, Artificial Sequence
  LRRK2 RNA guide
ucacggucaagaucugagugag

SEQ ID NO: 63694 - RNA, 22 nt, Artificial Sequence
  LRRK2 RNA guide
ucacucagaucuugaccgugau

SEQ ID NO: 63695 - RNA, 22 nt, Artificial Sequence
  LRRK2 RNA guide
ucagaucuugaccgugauuaca

SEQ ID NO: 63696 - RNA, 22 nt, Artificial Sequence
  LRRK2 RNA guide
ucccuacaauguaaucacgguc

SEQ ID NO: 63697 - RNA, 22 nt, Artificial Sequence
  LRRK2 RNA guide
ucuugaccgugauuacauugua

SEQ ID NO: 63698 - RNA, 22 nt, Artificial Sequence
  LRRK2 RNA guide
ugaccgugauuacauuguaggg

SEQ ID NO: 63699 - RNA, 22 nt, Artificial Sequence
  LRRK2 RNA guide
ugcucacucagaucuugaccgu

SEQ ID NO: 63700 - RNA, 22 nt, Artificial Sequence
  LRRK2 RNA guide
uguaaucacggucaagaucuga

SEQ ID NO: 63701 - RNA, 22 nt, Artificial Sequence
  LRRK2 RNA guide
uugaccgugauuacauuguagg

SEQ ID NO: 63702 - RNA, 20 nt, Artificial Sequence
  LRRK2 RNA guide
aaaugucuuaguggcugugc

SEQ ID NO: 63703 - RNA, 20 nt, Artificial Sequence
  LRRK2 RNA guide
aaugucuuaguggcugugca

SEQ ID NO: 63704 - RNA, 20 nt, Artificial Sequence
  LRRK2 RNA guide
acagccacuaagacauuuac

SEQ ID NO: 63705 - RNA, 20 nt, Artificial Sequence
  LRRK2 RNA guide
agccacuaagacauuuacaa

SEQ ID NO: 63706 - RNA, 20 nt, Artificial Sequence
  LRRK2 RNA guide
augucuuaguggcugugcaa

SEQ ID NO: 63707 - RNA, 20 nt, Artificial Sequence
  LRRK2 RNA guide
cacagccacuaagacauuua

SEQ ID NO: 63708 - RNA, 20 nt, Artificial Sequence
  LRRK2 RNA guide
cagccacuaagacauuuaca

SEQ ID NO: 63709 - RNA, 20 nt, Artificial Sequence
  LRRK2 RNA guide
ccacuaagacauuuacaaaa

SEQ ID NO: 63710 - RNA, 20 nt, Artificial Sequence
  LRRK2 RNA guide
cuguugcacagccacuaaga

SEQ ID NO: 63711 - RNA, 20 nt, Artificial Sequence
  LRRK2 RNA guide
cuuuucuguugcacagccac

SEQ ID NO: 63712 - RNA, 20 nt, Artificial Sequence
  LRRK2 RNA guide
gcacagccacuaagacauuu

SEQ ID NO: 63713 - RNA, 20 nt, Artificial Sequence
  LRRK2 RNA guide
gccacuaagacauuuacaaa

SEQ ID NO: 63714 - RNA, 20 nt, Artificial Sequence
  LRRK2 RNA guide
guaaaugucuuaguggcugu

SEQ ID NO: 63715 - RNA, 20 nt, Artificial Sequence
  LRRK2 RNA guide
gucuuaguggcugugcaaca

SEQ ID NO: 63716 - RNA, 20 nt, Artificial Sequence
  LRRK2 RNA guide
guugcacagccacuaagaca

SEQ ID NO: 63717 - RNA, 20 nt, Artificial Sequence
  LRRK2 RNA guide
uaaaugucuuaguggcugug

SEQ ID NO: 63718 - RNA, 20 nt, Artificial Sequence
  LRRK2 RNA guide
ucuguugcacagccacuaag

SEQ ID NO: 63719 - RNA, 20 nt, Artificial Sequence
  LRRK2 RNA guide
ucuuaguggcugugcaacag

SEQ ID NO: 63720 - RNA, 20 nt, Artificial Sequence
  LRRK2 RNA guide
ucuuuucuguugcacagcca

SEQ ID NO: 63721 - RNA, 20 nt, Artificial Sequence
  LRRK2 RNA guide
ugcacagccacuaagacauu

SEQ ID NO: 63722 - RNA, 20 nt, Artificial Sequence
  LRRK2 RNA guide
uguaaaugucuuaguggcug

SEQ ID NO: 63723 - RNA, 20 nt, Artificial Sequence
  LRRK2 RNA guide
ugucuuaguggcugugcaac

SEQ ID NO: 63724 - RNA, 20 nt, Artificial Sequence
  LRRK2 RNA guide
uguugcacagccacuaagac

SEQ ID NO: 63725 - RNA, 20 nt, Artificial Sequence
  LRRK2 RNA guide
uucuguugcacagccacuaa

SEQ ID NO: 63726 - RNA, 20 nt, Artificial Sequence
  LRRK2 RNA guide
uugcacagccacuaagacau

SEQ ID NO: 63727 - RNA, 20 nt, Artificial Sequence
  LRRK2 RNA guide
uuguaaaugucuuaguggcu

SEQ ID NO: 63728 - RNA, 20 nt, Artificial Sequence
  LRRK2 RNA guide
uuucuguugcacagccacua

SEQ ID NO: 63729 - RNA, 20 nt, Artificial Sequence
  LRRK2 RNA guide
uuuguaaaugucuuaguggc

SEQ ID NO: 63730 - RNA, 20 nt, Artificial Sequence
  LRRK2 RNA guide
uuuucuguugcacagccacu

SEQ ID NO: 63731 - RNA, 20 nt, Artificial Sequence
  LRRK2 RNA guide
uuuuguaaaugucuuagugg

SEQ ID NO: 63732 - RNA, 21 nt, Artificial Sequence
  LRRK2 RNA guide
aaaugucuuaguggcugugca

SEQ ID NO: 63733 - RNA, 21 nt, Artificial Sequence
  LRRK2 RNA guide
aaugucuuaguggcugugcaa

SEQ ID NO: 63734 - RNA, 21 nt, Artificial Sequence
  LRRK2 RNA guide
acagccacuaagacauuuaca

SEQ ID NO: 63735 - RNA, 21 nt, Artificial Sequence
  LRRK2 RNA guide
agccacuaagacauuuacaaa

SEQ ID NO: 63736 - RNA, 21 nt, Artificial Sequence
  LRRK2 RNA guide
augucuuaguggcugugcaac

SEQ ID NO: 63737 - RNA, 21 nt, Artificial Sequence
  LRRK2 RNA guide
cacagccacuaagacauuuac

SEQ ID NO: 63738 - RNA, 21 nt, Artificial Sequence
  LRRK2 RNA guide
cagccacuaagacauuuacaa

SEQ ID NO: 63739 - RNA, 21 nt, Artificial Sequence
  LRRK2 RNA guide
cucuuuucuguugcacagcca

SEQ ID NO: 63740 - RNA, 21 nt, Artificial Sequence
  LRRK2 RNA guide
cuguugcacagccacuaagac

SEQ ID NO: 63741 - RNA, 21 nt, Artificial Sequence
  LRRK2 RNA guide
cuuuucuguugcacagccacu

SEQ ID NO: 63742 - RNA, 21 nt, Artificial Sequence
  LRRK2 RNA guide
gcacagccacuaagacauuua

SEQ ID NO: 63743 - RNA, 21 nt, Artificial Sequence
  LRRK2 RNA guide
gccacuaagacauuuacaaaa

SEQ ID NO: 63744 - RNA, 21 nt, Artificial Sequence
  LRRK2 RNA guide
guaaaugucuuaguggcugug

SEQ ID NO: 63745 - RNA, 21 nt, Artificial Sequence
  LRRK2 RNA guide
gucuuaguggcugugcaacag

SEQ ID NO: 63746 - RNA, 21 nt, Artificial Sequence
  LRRK2 RNA guide
guugcacagccacuaagacau

SEQ ID NO: 63747 - RNA, 21 nt, Artificial Sequence
  LRRK2 RNA guide
uaaaugucuuaguggcugugc

SEQ ID NO: 63748 - RNA, 21 nt, Artificial Sequence
  LRRK2 RNA guide
ucuguugcacagccacuaaga

SEQ ID NO: 63749 - RNA, 21 nt, Artificial Sequence
  LRRK2 RNA guide
ucuuaguggcugugcaacaga

SEQ ID NO: 63750 - RNA, 21 nt, Artificial Sequence
  LRRK2 RNA guide
ucuuuucuguugcacagccac

SEQ ID NO: 63751 - RNA, 21 nt, Artificial Sequence
  LRRK2 RNA guide
ugcacagccacuaagacauuu

SEQ ID NO: 63752 - RNA, 21 nt, Artificial Sequence
  LRRK2 RNA guide
uguaaaugucuuaguggcugu

SEQ ID NO: 63753 - RNA, 21 nt, Artificial Sequence
  LRRK2 RNA guide
ugucuuaguggcugugcaaca

SEQ ID NO: 63754 - RNA, 21 nt, Artificial Sequence
  LRRK2 RNA guide
uguugcacagccacuaagaca

SEQ ID NO: 63755 - RNA, 21 nt, Artificial Sequence
  LRRK2 RNA guide
uucuguugcacagccacuaag

SEQ ID NO: 63756 - RNA, 21 nt, Artificial Sequence
  LRRK2 RNA guide
uugcacagccacuaagacauu

SEQ ID NO: 63757 - RNA, 21 nt, Artificial Sequence
  LRRK2 RNA guide
uuguaaaugucuuaguggcug

SEQ ID NO: 63758 - RNA, 21 nt, Artificial Sequence
  LRRK2 RNA guide
uuucuguugcacagccacuaa

SEQ ID NO: 63759 - RNA, 21 nt, Artificial Sequence
  LRRK2 RNA guide
uuuguaaaugucuuaguggcu

SEQ ID NO: 63760 - RNA, 21 nt, Artificial Sequence
  LRRK2 RNA guide
uuuucuguugcacagccacua

SEQ ID NO: 63761 - RNA, 21 nt, Artificial Sequence
  LRRK2 RNA guide
uuuuguaaaugucuuaguggc

SEQ ID NO: 63762 - RNA, 22 nt, Artificial Sequence
  LRRK2 RNA guide
aaaugucuuaguggcugugcaa

SEQ ID NO: 63763 - RNA, 22 nt, Artificial Sequence
  LRRK2 RNA guide
aaugucuuaguggcugugcaac

SEQ ID NO: 63764 - RNA, 22 nt, Artificial Sequence
  LRRK2 RNA guide
acagccacuaagacauuuacaa

SEQ ID NO: 63765 - RNA, 22 nt, Artificial Sequence
  LRRK2 RNA guide
agccacuaagacauuuacaaaa

SEQ ID NO: 63766 - RNA, 22 nt, Artificial Sequence
  LRRK2 RNA guide
augucuuaguggcugugcaaca

SEQ ID NO: 63767 - RNA, 22 nt, Artificial Sequence
  LRRK2 RNA guide
cacagccacuaagacauuuaca

SEQ ID NO: 63768 - RNA, 22 nt, Artificial Sequence
  LRRK2 RNA guide
cagccacuaagacauuuacaaa

SEQ ID NO: 63769 - RNA, 22 nt, Artificial Sequence
  LRRK2 RNA guide
cucuuuucuguugcacagccac

SEQ ID NO: 63770 - RNA, 22 nt, Artificial Sequence
  LRRK2 RNA guide
cuguugcacagccacuaagaca

SEQ ID NO: 63771 - RNA, 22 nt, Artificial Sequence
  LRRK2 RNA guide
cuuuucuguugcacagccacua

SEQ ID NO: 63772 - RNA, 22 nt, Artificial Sequence
  LRRK2 RNA guide
gcacagccacuaagacauuuac

SEQ ID NO: 63773 - RNA, 22 nt, Artificial Sequence
  LRRK2 RNA guide
gccacuaagacauuuacaaaaa

SEQ ID NO: 63774 - RNA, 22 nt, Artificial Sequence
  LRRK2 RNA guide
guaaaugucuuaguggcugugc

SEQ ID NO: 63775 - RNA, 22 nt, Artificial Sequence
  LRRK2 RNA guide
gucuuaguggcugugcaacaga

SEQ ID NO: 63776 - RNA, 22 nt, Artificial Sequence
  LRRK2 RNA guide
guugcacagccacuaagacauu

SEQ ID NO: 63777 - RNA, 22 nt, Artificial Sequence
  LRRK2 RNA guide
uaaaugucuuaguggcugugca

SEQ ID NO: 63778 - RNA, 22 nt, Artificial Sequence
  LRRK2 RNA guide
ucucuuuucuguugcacagcca

SEQ ID NO: 63779 - RNA, 22 nt, Artificial Sequence
  LRRK2 RNA guide
ucuguugcacagccacuaagac

SEQ ID NO: 63780 - RNA, 22 nt, Artificial Sequence
  LRRK2 RNA guide
ucuuaguggcugugcaacagaa

SEQ ID NO: 63781 - RNA, 22 nt, Artificial Sequence
  LRRK2 RNA guide
ucuuuucuguugcacagccacu

SEQ ID NO: 63782 - RNA, 22 nt, Artificial Sequence
  LRRK2 RNA guide
ugcacagccacuaagacauuua

SEQ ID NO: 63783 - RNA, 22 nt, Artificial Sequence
  LRRK2 RNA guide
uguaaaugucuuaguggcugug

SEQ ID NO: 63784 - RNA, 22 nt, Artificial Sequence
  LRRK2 RNA guide
ugucuuaguggcugugcaacag

SEQ ID NO: 63785 - RNA, 22 nt, Artificial Sequence
  LRRK2 RNA guide
uguugcacagccacuaagacau

SEQ ID NO: 63786 - RNA, 22 nt, Artificial Sequence
  LRRK2 RNA guide
uucuguugcacagccacuaaga

SEQ ID NO: 63787 - RNA, 22 nt, Artificial Sequence
  LRRK2 RNA guide
uugcacagccacuaagacauuu

SEQ ID NO: 63788 - RNA, 22 nt, Artificial Sequence
  LRRK2 RNA guide
uuguaaaugucuuaguggcugu

SEQ ID NO: 63789 - RNA, 22 nt, Artificial Sequence
  LRRK2 RNA guide
uuucuguugcacagccacuaag

SEQ ID NO: 63790 - RNA, 22 nt, Artificial Sequence
  LRRK2 RNA guide
uuuguaaaugucuuaguggcug

SEQ ID NO: 63791 - RNA, 22 nt, Artificial Sequence
  LRRK2 RNA guide
uuuucuguugcacagccacuaa

SEQ ID NO: 63792 - RNA, 22 nt, Artificial Sequence
  LRRK2 RNA guide
uuuuguaaaugucuuaguggcu

SEQ ID NO: 63793 - RNA, 22 nt, Artificial Sequence
  LRRK2 RNA guide
uuuuuguaaaugucuuaguggc

SEQ ID NO: 63794 - RNA, 20 nt, Artificial Sequence
  LRRK2 RNA guide
aaauguuuuaguggcugugc

SEQ ID NO: 63795 - RNA, 20 nt, Artificial Sequence
  LRRK2 RNA guide
aauguuuuaguggcugugca

SEQ ID NO: 63796 - RNA, 20 nt, Artificial Sequence
  LRRK2 RNA guide
acagccacuaaaacauuuac

SEQ ID NO: 63797 - RNA, 20 nt, Artificial Sequence
  LRRK2 RNA guide
agccacuaaaacauuuacaa

SEQ ID NO: 63798 - RNA, 20 nt, Artificial Sequence
  LRRK2 RNA guide
auguuuuaguggcugugcaa

SEQ ID NO: 63799 - RNA, 20 nt, Artificial Sequence
  LRRK2 RNA guide
cacagccacuaaaacauuua

SEQ ID NO: 63800 - RNA, 20 nt, Artificial Sequence
  LRRK2 RNA guide
cagccacuaaaacauuuaca

SEQ ID NO: 63801 - RNA, 20 nt, Artificial Sequence
  LRRK2 RNA guide
cuguugcacagccacuaaaa

SEQ ID NO: 63802 - RNA, 20 nt, Artificial Sequence
  LRRK2 RNA guide
gcacagccacuaaaacauuu

SEQ ID NO: 63803 - RNA, 20 nt, Artificial Sequence
  LRRK2 RNA guide
gccacuaaaacauuuacaaa

SEQ ID NO: 63804 - RNA, 20 nt, Artificial Sequence
  LRRK2 RNA guide
guaaauguuuuaguggcugu

SEQ ID NO: 63805 - RNA, 20 nt, Artificial Sequence
  LRRK2 RNA guide
guugcacagccacuaaaaca

SEQ ID NO: 63806 - RNA, 20 nt, Artificial Sequence
  LRRK2 RNA guide
guuuuaguggcugugcaaca

SEQ ID NO: 63807 - RNA, 20 nt, Artificial Sequence
  LRRK2 RNA guide
uaaauguuuuaguggcugug

SEQ ID NO: 63808 - RNA, 20 nt, Artificial Sequence
  LRRK2 RNA guide
ucuguugcacagccacuaaa

SEQ ID NO: 63809 - RNA, 20 nt, Artificial Sequence
  LRRK2 RNA guide
ugcacagccacuaaaacauu

SEQ ID NO: 63810 - RNA, 20 nt, Artificial Sequence
  LRRK2 RNA guide
uguaaauguuuuaguggcug

SEQ ID NO: 63811 - RNA, 20 nt, Artificial Sequence
  LRRK2 RNA guide
uguugcacagccacuaaaac

SEQ ID NO: 63812 - RNA, 20 nt, Artificial Sequence
  LRRK2 RNA guide
uguuuuaguggcugugcaac

SEQ ID NO: 63813 - RNA, 20 nt, Artificial Sequence
  LRRK2 RNA guide
uugcacagccacuaaaacau

SEQ ID NO: 63814 - RNA, 20 nt, Artificial Sequence
  LRRK2 RNA guide
uuguaaauguuuuaguggcu

SEQ ID NO: 63815 - RNA, 20 nt, Artificial Sequence
  LRRK2 RNA guide
uuuguaaauguuuuaguggc

SEQ ID NO: 63816 - RNA, 20 nt, Artificial Sequence
  LRRK2 RNA guide
uuuuaguggcugugcaacag

SEQ ID NO: 63817 - RNA, 21 nt, Artificial Sequence
  LRRK2 RNA guide
aaauguuuuaguggcugugca

SEQ ID NO: 63818 - RNA, 21 nt, Artificial Sequence
  LRRK2 RNA guide
aauguuuuaguggcugugcaa

SEQ ID NO: 63819 - RNA, 21 nt, Artificial Sequence
  LRRK2 RNA guide
acagccacuaaaacauuuaca

SEQ ID NO: 63820 - RNA, 21 nt, Artificial Sequence
  LRRK2 RNA guide
auguuuuaguggcugugcaac

SEQ ID NO: 63821 - RNA, 21 nt, Artificial Sequence
  LRRK2 RNA guide
cacagccacuaaaacauuuac

SEQ ID NO: 63822 - RNA, 21 nt, Artificial Sequence
  LRRK2 RNA guide
cagccacuaaaacauuuacaa

SEQ ID NO: 63823 - RNA, 21 nt, Artificial Sequence
  LRRK2 RNA guide
cuguugcacagccacuaaaac

SEQ ID NO: 63824 - RNA, 21 nt, Artificial Sequence
  LRRK2 RNA guide
gcacagccacuaaaacauuua

SEQ ID NO: 63825 - RNA, 21 nt, Artificial Sequence
  LRRK2 RNA guide
guaaauguuuuaguggcugug

SEQ ID NO: 63826 - RNA, 21 nt, Artificial Sequence
  LRRK2 RNA guide
guugcacagccacuaaaacau

SEQ ID NO: 63827 - RNA, 21 nt, Artificial Sequence
  LRRK2 RNA guide
guuuuaguggcugugcaacag

SEQ ID NO: 63828 - RNA, 21 nt, Artificial Sequence
  LRRK2 RNA guide
uaaauguuuuaguggcugugc

SEQ ID NO: 63829 - RNA, 21 nt, Artificial Sequence
  LRRK2 RNA guide
ucuguugcacagccacuaaaa

SEQ ID NO: 63830 - RNA, 21 nt, Artificial Sequence
  LRRK2 RNA guide
ugcacagccacuaaaacauuu

SEQ ID NO: 63831 - RNA, 21 nt, Artificial Sequence
  LRRK2 RNA guide
uguaaauguuuuaguggcugu

SEQ ID NO: 63832 - RNA, 21 nt, Artificial Sequence
  LRRK2 RNA guide
uguugcacagccacuaaaaca

SEQ ID NO: 63833 - RNA, 21 nt, Artificial Sequence
  LRRK2 RNA guide
uguuuuaguggcugugcaaca

SEQ ID NO: 63834 - RNA, 21 nt, Artificial Sequence
  LRRK2 RNA guide
uucuguugcacagccacuaaa

SEQ ID NO: 63835 - RNA, 21 nt, Artificial Sequence
  LRRK2 RNA guide
uugcacagccacuaaaacauu

SEQ ID NO: 63836 - RNA, 21 nt, Artificial Sequence
  LRRK2 RNA guide
uuguaaauguuuuaguggcug

SEQ ID NO: 63837 - RNA, 21 nt, Artificial Sequence
  LRRK2 RNA guide
uuuuaguggcugugcaacaga

SEQ ID NO: 63838 - RNA, 22 nt, Artificial Sequence
  LRRK2 RNA guide
aaauguuuuaguggcugugcaa

SEQ ID NO: 63839 - RNA, 22 nt, Artificial Sequence
  LRRK2 RNA guide
aauguuuuaguggcugugcaac

SEQ ID NO: 63840 - RNA, 22 nt, Artificial Sequence
  LRRK2 RNA guide
acagccacuaaaacauuuacaa

SEQ ID NO: 63841 - RNA, 22 nt, Artificial Sequence
  LRRK2 RNA guide
auguuuuaguggcugugcaaca

SEQ ID NO: 63842 - RNA, 22 nt, Artificial Sequence
  LRRK2 RNA guide
cacagccacuaaaacauuuaca

SEQ ID NO: 63843 - RNA, 22 nt, Artificial Sequence
  LRRK2 RNA guide
cagccacuaaaacauuuacaaa

SEQ ID NO: 63844 - RNA, 22 nt, Artificial Sequence
  LRRK2 RNA guide
cuguugcacagccacuaaaaca

SEQ ID NO: 63845 - RNA, 22 nt, Artificial Sequence
  LRRK2 RNA guide
gcacagccacuaaaacauuuac

SEQ ID NO: 63846 - RNA, 22 nt, Artificial Sequence
  LRRK2 RNA guide
guaaauguuuuaguggcugugc

SEQ ID NO: 63847 - RNA, 22 nt, Artificial Sequence
  LRRK2 RNA guide
guugcacagccacuaaaacauu

SEQ ID NO: 63848 - RNA, 22 nt, Artificial Sequence
  LRRK2 RNA guide
guuuuaguggcugugcaacaga

SEQ ID NO: 63849 - RNA, 22 nt, Artificial Sequence
  LRRK2 RNA guide
uaaauguuuuaguggcugugca

SEQ ID NO: 63850 - RNA, 22 nt, Artificial Sequence
  LRRK2 RNA guide
ucuguugcacagccacuaaaac

SEQ ID NO: 63851 - RNA, 22 nt, Artificial Sequence
  LRRK2 RNA guide
ugcacagccacuaaaacauuua

SEQ ID NO: 63852 - RNA, 22 nt, Artificial Sequence
  LRRK2 RNA guide
uguaaauguuuuaguggcugug

SEQ ID NO: 63853 - RNA, 22 nt, Artificial Sequence
  LRRK2 RNA guide
uguugcacagccacuaaaacau

SEQ ID NO: 63854 - RNA, 22 nt, Artificial Sequence
  LRRK2 RNA guide
uguuuuaguggcugugcaacag

SEQ ID NO: 63855 - RNA, 22 nt, Artificial Sequence
  LRRK2 RNA guide
uucuguugcacagccacuaaaa

SEQ ID NO: 63856 - RNA, 22 nt, Artificial Sequence
  LRRK2 RNA guide
uugcacagccacuaaaacauuu

SEQ ID NO: 63857 - RNA, 22 nt, Artificial Sequence
  LRRK2 RNA guide
uuguaaauguuuuaguggcugu

SEQ ID NO: 63858 - RNA, 22 nt, Artificial Sequence
  LRRK2 RNA guide
uuucuguugcacagccacuaaa

SEQ ID NO: 63859 - RNA, 22 nt, Artificial Sequence
  LRRK2 RNA guide
uuuguaaauguuuuaguggcug

SEQ ID NO: 63860 - RNA, 22 nt, Artificial Sequence
  LRRK2 RNA guide
uuuuaguggcugugcaacagaa

SEQ ID NO: 63861 - RNA, 20 nt, Artificial Sequence
  LRRK2 RNA guide
aaacaccggauuugcucuuu

SEQ ID NO: 63862 - RNA, 20 nt, Artificial Sequence
  LRRK2 RNA guide
aacaccggauuugcucuuuu

SEQ ID NO: 63863 - RNA, 20 nt, Artificial Sequence
  LRRK2 RNA guide
acaccggauuugcucuuuuu

SEQ ID NO: 63864 - RNA, 21 nt, Artificial Sequence
  LRRK2 RNA guide
aaacaccggauuugcucuuuu

SEQ ID NO: 63865 - RNA, 21 nt, Artificial Sequence
  LRRK2 RNA guide
aacaccggauuugcucuuuuu

SEQ ID NO: 63866 - RNA, 21 nt, Artificial Sequence
  LRRK2 RNA guide
acaccggauuugcucuuuuuu

SEQ ID NO: 63867 - RNA, 21 nt, Artificial Sequence
  LRRK2 RNA guide
uaaacaccggauuugcucuuu

SEQ ID NO: 63868 - RNA, 22 nt, Artificial Sequence
  LRRK2 RNA guide
aaacaccggauuugcucuuuuu

SEQ ID NO: 63869 - RNA, 22 nt, Artificial Sequence
  LRRK2 RNA guide
aacaccggauuugcucuuuuuu

SEQ ID NO: 63870 - RNA, 22 nt, Artificial Sequence
  LRRK2 RNA guide
auaaacaccggauuugcucuuu

SEQ ID NO: 63871 - RNA, 22 nt, Artificial Sequence
  LRRK2 RNA guide
uaaacaccggauuugcucuuuu

SEQ ID NO: 63872 - RNA, 20 nt, Artificial Sequence
  LRRK2 RNA guide
aaauagagacauuuugguac

SEQ ID NO: 63873 - RNA, 20 nt, Artificial Sequence
  LRRK2 RNA guide
aaaugauauuuucccuuugg

SEQ ID NO: 63874 - RNA, 20 nt, Artificial Sequence
  LRRK2 RNA guide
aauagagacauuuugguacu

SEQ ID NO: 63875 - RNA, 20 nt, Artificial Sequence
  LRRK2 RNA guide
aaugauauuuucccuuugga

SEQ ID NO: 63876 - RNA, 20 nt, Artificial Sequence
  LRRK2 RNA guide
acauuuugguacuccaaagg

SEQ ID NO: 63877 - RNA, 20 nt, Artificial Sequence
  LRRK2 RNA guide
agacauuuugguacuccaaa

SEQ ID NO: 63878 - RNA, 20 nt, Artificial Sequence
  LRRK2 RNA guide
agagacauuuugguacucca

SEQ ID NO: 63879 - RNA, 20 nt, Artificial Sequence
  LRRK2 RNA guide
aguaccaaaaugucucuauu

SEQ ID NO: 63880 - RNA, 20 nt, Artificial Sequence
  LRRK2 RNA guide
auagagacauuuugguacuc

SEQ ID NO: 63881 - RNA, 20 nt, Artificial Sequence
  LRRK2 RNA guide
auauuuucccuuuggaguac

SEQ ID NO: 63882 - RNA, 20 nt, Artificial Sequence
  LRRK2 RNA guide
augauauuuucccuuuggag

SEQ ID NO: 63883 - RNA, 20 nt, Artificial Sequence
  LRRK2 RNA guide
auuuucccuuuggaguacca

SEQ ID NO: 63884 - RNA, 20 nt, Artificial Sequence
  LRRK2 RNA guide
auuuugguacuccaaaggga

SEQ ID NO: 63885 - RNA, 20 nt, Artificial Sequence
  LRRK2 RNA guide
cauuuugguacuccaaaggg

SEQ ID NO: 63886 - RNA, 20 nt, Artificial Sequence
  LRRK2 RNA guide
cccuuuggaguaccaaaaug

SEQ ID NO: 63887 - RNA, 20 nt, Artificial Sequence
  LRRK2 RNA guide
ccuuuggaguaccaaaaugu

SEQ ID NO: 63888 - RNA, 20 nt, Artificial Sequence
  LRRK2 RNA guide
cuuuggaguaccaaaauguc

SEQ ID NO: 63889 - RNA, 20 nt, Artificial Sequence
  LRRK2 RNA guide
gacauuuugguacuccaaag

SEQ ID NO: 63890 - RNA, 20 nt, Artificial Sequence
  LRRK2 RNA guide
gagacauuuugguacuccaa

SEQ ID NO: 63891 - RNA, 20 nt, Artificial Sequence
  LRRK2 RNA guide
gaguaccaaaaugucucuau

SEQ ID NO: 63892 - RNA, 20 nt, Artificial Sequence
  LRRK2 RNA guide
gauauuuucccuuuggagua

SEQ ID NO: 63893 - RNA, 20 nt, Artificial Sequence
  LRRK2 RNA guide
ggaguaccaaaaugucucua

SEQ ID NO: 63894 - RNA, 20 nt, Artificial Sequence
  LRRK2 RNA guide
gguacuccaaagggaaaaua

SEQ ID NO: 63895 - RNA, 20 nt, Artificial Sequence
  LRRK2 RNA guide
guaccaaaaugucucuauuu

SEQ ID NO: 63896 - RNA, 20 nt, Artificial Sequence
  LRRK2 RNA guide
uagagacauuuugguacucc

SEQ ID NO: 63897 - RNA, 20 nt, Artificial Sequence
  LRRK2 RNA guide
uauuuucccuuuggaguacc

SEQ ID NO: 63898 - RNA, 20 nt, Artificial Sequence
  LRRK2 RNA guide
ucccuuuggaguaccaaaau

SEQ ID NO: 63899 - RNA, 20 nt, Artificial Sequence
  LRRK2 RNA guide
ugauauuuucccuuuggagu

SEQ ID NO: 63900 - RNA, 20 nt, Artificial Sequence
  LRRK2 RNA guide
uggaguaccaaaaugucucu

SEQ ID NO: 63901 - RNA, 20 nt, Artificial Sequence
  LRRK2 RNA guide
ugguacuccaaagggaaaau

SEQ ID NO: 63902 - RNA, 20 nt, Artificial Sequence
  LRRK2 RNA guide
uucccuuuggaguaccaaaa

SEQ ID NO: 63903 - RNA, 20 nt, Artificial Sequence
  LRRK2 RNA guide
uuggaguaccaaaaugucuc

SEQ ID NO: 63904 - RNA, 20 nt, Artificial Sequence
  LRRK2 RNA guide
uugguacuccaaagggaaaa

SEQ ID NO: 63905 - RNA, 20 nt, Artificial Sequence
  LRRK2 RNA guide
uuucccuuuggaguaccaaa

SEQ ID NO: 63906 - RNA, 20 nt, Artificial Sequence
  LRRK2 RNA guide
uuuggaguaccaaaaugucu

SEQ ID NO: 63907 - RNA, 20 nt, Artificial Sequence
  LRRK2 RNA guide
uuugguacuccaaagggaaa

SEQ ID NO: 63908 - RNA, 20 nt, Artificial Sequence
  LRRK2 RNA guide
uuuucccuuuggaguaccaa

SEQ ID NO: 63909 - RNA, 20 nt, Artificial Sequence
  LRRK2 RNA guide
uuuugguacuccaaagggaa

SEQ ID NO: 63910 - RNA, 21 nt, Artificial Sequence
  LRRK2 RNA guide
aauagagacauuuugguacuc

SEQ ID NO: 63911 - RNA, 21 nt, Artificial Sequence
  LRRK2 RNA guide
aaugauauuuucccuuuggag

SEQ ID NO: 63912 - RNA, 21 nt, Artificial Sequence
  LRRK2 RNA guide
acauuuugguacuccaaaggg

SEQ ID NO: 63913 - RNA, 21 nt, Artificial Sequence
  LRRK2 RNA guide
agacauuuugguacuccaaag

SEQ ID NO: 63914 - RNA, 21 nt, Artificial Sequence
  LRRK2 RNA guide
agagacauuuugguacuccaa

SEQ ID NO: 63915 - RNA, 21 nt, Artificial Sequence
  LRRK2 RNA guide
auagagacauuuugguacucc

SEQ ID NO: 63916 - RNA, 21 nt, Artificial Sequence
  LRRK2 RNA guide
auauuuucccuuuggaguacc

SEQ ID NO: 63917 - RNA, 21 nt, Artificial Sequence
  LRRK2 RNA guide
augauauuuucccuuuggagu

SEQ ID NO: 63918 - RNA, 21 nt, Artificial Sequence
  LRRK2 RNA guide
auuuucccuuuggaguaccaa

SEQ ID NO: 63919 - RNA, 21 nt, Artificial Sequence
  LRRK2 RNA guide
auuuugguacuccaaagggaa

SEQ ID NO: 63920 - RNA, 21 nt, Artificial Sequence
  LRRK2 RNA guide
cauuuugguacuccaaaggga

SEQ ID NO: 63921 - RNA, 21 nt, Artificial Sequence
  LRRK2 RNA guide
cccuuuggaguaccaaaaugu

SEQ ID NO: 63922 - RNA, 21 nt, Artificial Sequence
  LRRK2 RNA guide
ccuuuggaguaccaaaauguc

SEQ ID NO: 63923 - RNA, 21 nt, Artificial Sequence
  LRRK2 RNA guide
cuuuggaguaccaaaaugucu

SEQ ID NO: 63924 - RNA, 21 nt, Artificial Sequence
  LRRK2 RNA guide
gacauuuugguacuccaaagg

SEQ ID NO: 63925 - RNA, 21 nt, Artificial Sequence
  LRRK2 RNA guide
gagacauuuugguacuccaaa

SEQ ID NO: 63926 - RNA, 21 nt, Artificial Sequence
  LRRK2 RNA guide
gaguaccaaaaugucucuauu

SEQ ID NO: 63927 - RNA, 21 nt, Artificial Sequence
  LRRK2 RNA guide
gauauuuucccuuuggaguac

SEQ ID NO: 63928 - RNA, 21 nt, Artificial Sequence
  LRRK2 RNA guide
ggaguaccaaaaugucucuau

SEQ ID NO: 63929 - RNA, 21 nt, Artificial Sequence
  LRRK2 RNA guide
gguacuccaaagggaaaauau

SEQ ID NO: 63930 - RNA, 21 nt, Artificial Sequence
  LRRK2 RNA guide
uagagacauuuugguacucca

SEQ ID NO: 63931 - RNA, 21 nt, Artificial Sequence
  LRRK2 RNA guide
uauuuucccuuuggaguacca

SEQ ID NO: 63932 - RNA, 21 nt, Artificial Sequence
  LRRK2 RNA guide
ucccuuuggaguaccaaaaug

SEQ ID NO: 63933 - RNA, 21 nt, Artificial Sequence
  LRRK2 RNA guide
ugauauuuucccuuuggagua

SEQ ID NO: 63934 - RNA, 21 nt, Artificial Sequence
  LRRK2 RNA guide
uggaguaccaaaaugucucua

SEQ ID NO: 63935 - RNA, 21 nt, Artificial Sequence
  LRRK2 RNA guide
ugguacuccaaagggaaaaua

SEQ ID NO: 63936 - RNA, 21 nt, Artificial Sequence
  LRRK2 RNA guide
uucccuuuggaguaccaaaau

SEQ ID NO: 63937 - RNA, 21 nt, Artificial Sequence
  LRRK2 RNA guide
uuggaguaccaaaaugucucu

SEQ ID NO: 63938 - RNA, 21 nt, Artificial Sequence
  LRRK2 RNA guide
uugguacuccaaagggaaaau

SEQ ID NO: 63939 - RNA, 21 nt, Artificial Sequence
  LRRK2 RNA guide
uuucccuuuggaguaccaaaa

SEQ ID NO: 63940 - RNA, 21 nt, Artificial Sequence
  LRRK2 RNA guide
uuuggaguaccaaaaugucuc

SEQ ID NO: 63941 - RNA, 21 nt, Artificial Sequence
  LRRK2 RNA guide
uuugguacuccaaagggaaaa

SEQ ID NO: 63942 - RNA, 21 nt, Artificial Sequence
  LRRK2 RNA guide
uuuucccuuuggaguaccaaa

SEQ ID NO: 63943 - RNA, 21 nt, Artificial Sequence
  LRRK2 RNA guide
uuuugguacuccaaagggaaa

SEQ ID NO: 63944 - RNA, 22 nt, Artificial Sequence
  LRRK2 RNA guide
aaauagagacauuuugguacuc

SEQ ID NO: 63945 - RNA, 22 nt, Artificial Sequence
  LRRK2 RNA guide
aaaugauauuuucccuuuggag

SEQ ID NO: 63946 - RNA, 22 nt, Artificial Sequence
  LRRK2 RNA guide
aauagagacauuuugguacucc

SEQ ID NO: 63947 - RNA, 22 nt, Artificial Sequence
  LRRK2 RNA guide
aaugauauuuucccuuuggagu

SEQ ID NO: 63948 - RNA, 22 nt, Artificial Sequence
  LRRK2 RNA guide
acauuuugguacuccaaaggga

SEQ ID NO: 63949 - RNA, 22 nt, Artificial Sequence
  LRRK2 RNA guide
agacauuuugguacuccaaagg

SEQ ID NO: 63950 - RNA, 22 nt, Artificial Sequence
  LRRK2 RNA guide
agagacauuuugguacuccaaa

SEQ ID NO: 63951 - RNA, 22 nt, Artificial Sequence
  LRRK2 RNA guide
auagagacauuuugguacucca

SEQ ID NO: 63952 - RNA, 22 nt, Artificial Sequence
  LRRK2 RNA guide
auauuuucccuuuggaguacca

SEQ ID NO: 63953 - RNA, 22 nt, Artificial Sequence
  LRRK2 RNA guide
augauauuuucccuuuggagua

SEQ ID NO: 63954 - RNA, 22 nt, Artificial Sequence
  LRRK2 RNA guide
auuuucccuuuggaguaccaaa

SEQ ID NO: 63955 - RNA, 22 nt, Artificial Sequence
  LRRK2 RNA guide
auuuugguacuccaaagggaaa

SEQ ID NO: 63956 - RNA, 22 nt, Artificial Sequence
  LRRK2 RNA guide
caaaaugauauuuucccuuugg

SEQ ID NO: 63957 - RNA, 22 nt, Artificial Sequence
  LRRK2 RNA guide
cauuuugguacuccaaagggaa

SEQ ID NO: 63958 - RNA, 22 nt, Artificial Sequence
  LRRK2 RNA guide
cccuuuggaguaccaaaauguc

SEQ ID NO: 63959 - RNA, 22 nt, Artificial Sequence
  LRRK2 RNA guide
ccuuuggaguaccaaaaugucu

SEQ ID NO: 63960 - RNA, 22 nt, Artificial Sequence
  LRRK2 RNA guide
cuuuggaguaccaaaaugucuc

SEQ ID NO: 63961 - RNA, 22 nt, Artificial Sequence
  LRRK2 RNA guide
gacauuuugguacuccaaaggg

SEQ ID NO: 63962 - RNA, 22 nt, Artificial Sequence
  LRRK2 RNA guide
gagacauuuugguacuccaaag

SEQ ID NO: 63963 - RNA, 22 nt, Artificial Sequence
  LRRK2 RNA guide
gaguaccaaaaugucucuauuu

SEQ ID NO: 63964 - RNA, 22 nt, Artificial Sequence
  LRRK2 RNA guide
gauauuuucccuuuggaguacc

SEQ ID NO: 63965 - RNA, 22 nt, Artificial Sequence
  LRRK2 RNA guide
ggaguaccaaaaugucucuauu

SEQ ID NO: 63966 - RNA, 22 nt, Artificial Sequence
  LRRK2 RNA guide
gguacuccaaagggaaaauauc

SEQ ID NO: 63967 - RNA, 22 nt, Artificial Sequence
  LRRK2 RNA guide
uagagacauuuugguacuccaa

SEQ ID NO: 63968 - RNA, 22 nt, Artificial Sequence
  LRRK2 RNA guide
uauuuucccuuuggaguaccaa

SEQ ID NO: 63969 - RNA, 22 nt, Artificial Sequence
  LRRK2 RNA guide
ucccuuuggaguaccaaaaugu

SEQ ID NO: 63970 - RNA, 22 nt, Artificial Sequence
  LRRK2 RNA guide
ugauauuuucccuuuggaguac

SEQ ID NO: 63971 - RNA, 22 nt, Artificial Sequence
  LRRK2 RNA guide
uggaguaccaaaaugucucuau

SEQ ID NO: 63972 - RNA, 22 nt, Artificial Sequence
  LRRK2 RNA guide
ugguacuccaaagggaaaauau

SEQ ID NO: 63973 - RNA, 22 nt, Artificial Sequence
  LRRK2 RNA guide
uucccuuuggaguaccaaaaug

SEQ ID NO: 63974 - RNA, 22 nt, Artificial Sequence
  LRRK2 RNA guide
uuggaguaccaaaaugucucua

SEQ ID NO: 63975 - RNA, 22 nt, Artificial Sequence
  LRRK2 RNA guide
uugguacuccaaagggaaaaua

SEQ ID NO: 63976 - RNA, 22 nt, Artificial Sequence
  LRRK2 RNA guide
uuucccuuuggaguaccaaaau

SEQ ID NO: 63977 - RNA, 22 nt, Artificial Sequence
  LRRK2 RNA guide
uuuggaguaccaaaaugucucu

SEQ ID NO: 63978 - RNA, 22 nt, Artificial Sequence
  LRRK2 RNA guide
uuugguacuccaaagggaaaau

SEQ ID NO: 63979 - RNA, 22 nt, Artificial Sequence
  LRRK2 RNA guide
uuuucccuuuggaguaccaaaa

SEQ ID NO: 63980 - RNA, 22 nt, Artificial Sequence
  LRRK2 RNA guide
uuuugguacuccaaagggaaaa

SEQ ID NO: 63981 - RNA, 20 nt, Artificial Sequence
  LRRK2 RNA guide
acauuuugauacuccaaagg

SEQ ID NO: 63982 - RNA, 20 nt, Artificial Sequence
  LRRK2 RNA guide
agacauuuugauacuccaaa

SEQ ID NO: 63983 - RNA, 20 nt, Artificial Sequence
  LRRK2 RNA guide
agagacauuuugauacucca

SEQ ID NO: 63984 - RNA, 20 nt, Artificial Sequence
  LRRK2 RNA guide
auagagacauuuugauacuc

SEQ ID NO: 63985 - RNA, 20 nt, Artificial Sequence
  LRRK2 RNA guide
auauuuucccuuuggaguau

SEQ ID NO: 63986 - RNA, 20 nt, Artificial Sequence
  LRRK2 RNA guide
auuuucccuuuggaguauca

SEQ ID NO: 63987 - RNA, 20 nt, Artificial Sequence
  LRRK2 RNA guide
auuuugauacuccaaaggga

SEQ ID NO: 63988 - RNA, 20 nt, Artificial Sequence
  LRRK2 RNA guide
cauuuugauacuccaaaggg

SEQ ID NO: 63989 - RNA, 20 nt, Artificial Sequence
  LRRK2 RNA guide
cccuuuggaguaucaaaaug

SEQ ID NO: 63990 - RNA, 20 nt, Artificial Sequence
  LRRK2 RNA guide
ccuuuggaguaucaaaaugu

SEQ ID NO: 63991 - RNA, 20 nt, Artificial Sequence
  LRRK2 RNA guide
cuuuggaguaucaaaauguc

SEQ ID NO: 63992 - RNA, 20 nt, Artificial Sequence
  LRRK2 RNA guide
gacauuuugauacuccaaag

SEQ ID NO: 63993 - RNA, 20 nt, Artificial Sequence
  LRRK2 RNA guide
gagacauuuugauacuccaa

SEQ ID NO: 63994 - RNA, 20 nt, Artificial Sequence
  LRRK2 RNA guide
gaguaucaaaaugucucuau

SEQ ID NO: 63995 - RNA, 20 nt, Artificial Sequence
  LRRK2 RNA guide
gauacuccaaagggaaaaua

SEQ ID NO: 63996 - RNA, 20 nt, Artificial Sequence
  LRRK2 RNA guide
ggaguaucaaaaugucucua

SEQ ID NO: 63997 - RNA, 20 nt, Artificial Sequence
  LRRK2 RNA guide
uagagacauuuugauacucc

SEQ ID NO: 63998 - RNA, 20 nt, Artificial Sequence
  LRRK2 RNA guide
uauuuucccuuuggaguauc

SEQ ID NO: 63999 - RNA, 20 nt, Artificial Sequence
  LRRK2 RNA guide
ucccuuuggaguaucaaaau

SEQ ID NO: 64000 - RNA, 20 nt, Artificial Sequence
  LRRK2 RNA guide
ugauacuccaaagggaaaau

SEQ ID NO: 64001 - RNA, 20 nt, Artificial Sequence
  LRRK2 RNA guide
uggaguaucaaaaugucucu

SEQ ID NO: 64002 - RNA, 20 nt, Artificial Sequence
  LRRK2 RNA guide
uucccuuuggaguaucaaaa

SEQ ID NO: 64003 - RNA, 20 nt, Artificial Sequence
  LRRK2 RNA guide
uugauacuccaaagggaaaa

SEQ ID NO: 64004 - RNA, 20 nt, Artificial Sequence
  LRRK2 RNA guide
uuggaguaucaaaaugucuc

SEQ ID NO: 64005 - RNA, 20 nt, Artificial Sequence
  LRRK2 RNA guide
uuucccuuuggaguaucaaa

SEQ ID NO: 64006 - RNA, 20 nt, Artificial Sequence
  LRRK2 RNA guide
uuugauacuccaaagggaaa

SEQ ID NO: 64007 - RNA, 20 nt, Artificial Sequence
  LRRK2 RNA guide
uuuggaguaucaaaaugucu

SEQ ID NO: 64008 - RNA, 20 nt, Artificial Sequence
  LRRK2 RNA guide
uuuucccuuuggaguaucaa

SEQ ID NO: 64009 - RNA, 20 nt, Artificial Sequence
  LRRK2 RNA guide
uuuugauacuccaaagggaa

SEQ ID NO: 64010 - RNA, 21 nt, Artificial Sequence
  LRRK2 RNA guide
acauuuugauacuccaaaggg

SEQ ID NO: 64011 - RNA, 21 nt, Artificial Sequence
  LRRK2 RNA guide
agacauuuugauacuccaaag

SEQ ID NO: 64012 - RNA, 21 nt, Artificial Sequence
  LRRK2 RNA guide
agagacauuuugauacuccaa

SEQ ID NO: 64013 - RNA, 21 nt, Artificial Sequence
  LRRK2 RNA guide
auagagacauuuugauacucc

SEQ ID NO: 64014 - RNA, 21 nt, Artificial Sequence
  LRRK2 RNA guide
auauuuucccuuuggaguauc

SEQ ID NO: 64015 - RNA, 21 nt, Artificial Sequence
  LRRK2 RNA guide
auuuucccuuuggaguaucaa

SEQ ID NO: 64016 - RNA, 21 nt, Artificial Sequence
  LRRK2 RNA guide
auuuugauacuccaaagggaa

SEQ ID NO: 64017 - RNA, 21 nt, Artificial Sequence
  LRRK2 RNA guide
cauuuugauacuccaaaggga

SEQ ID NO: 64018 - RNA, 21 nt, Artificial Sequence
  LRRK2 RNA guide
cccuuuggaguaucaaaaugu

SEQ ID NO: 64019 - RNA, 21 nt, Artificial Sequence
  LRRK2 RNA guide
ccuuuggaguaucaaaauguc

SEQ ID NO: 64020 - RNA, 21 nt, Artificial Sequence
  LRRK2 RNA guide
cuuuggaguaucaaaaugucu

SEQ ID NO: 64021 - RNA, 21 nt, Artificial Sequence
  LRRK2 RNA guide
gacauuuugauacuccaaagg

SEQ ID NO: 64022 - RNA, 21 nt, Artificial Sequence
  LRRK2 RNA guide
gagacauuuugauacuccaaa

SEQ ID NO: 64023 - RNA, 21 nt, Artificial Sequence
  LRRK2 RNA guide
gauacuccaaagggaaaauau

SEQ ID NO: 64024 - RNA, 21 nt, Artificial Sequence
  LRRK2 RNA guide
gauauuuucccuuuggaguau

SEQ ID NO: 64025 - RNA, 21 nt, Artificial Sequence
  LRRK2 RNA guide
ggaguaucaaaaugucucuau

SEQ ID NO: 64026 - RNA, 21 nt, Artificial Sequence
  LRRK2 RNA guide
uagagacauuuugauacucca

SEQ ID NO: 64027 - RNA, 21 nt, Artificial Sequence
  LRRK2 RNA guide
uauuuucccuuuggaguauca

SEQ ID NO: 64028 - RNA, 21 nt, Artificial Sequence
  LRRK2 RNA guide
ucccuuuggaguaucaaaaug

SEQ ID NO: 64029 - RNA, 21 nt, Artificial Sequence
  LRRK2 RNA guide
ugauacuccaaagggaaaaua

SEQ ID NO: 64030 - RNA, 21 nt, Artificial Sequence
  LRRK2 RNA guide
uggaguaucaaaaugucucua

SEQ ID NO: 64031 - RNA, 21 nt, Artificial Sequence
  LRRK2 RNA guide
uucccuuuggaguaucaaaau

SEQ ID NO: 64032 - RNA, 21 nt, Artificial Sequence
  LRRK2 RNA guide
uugauacuccaaagggaaaau

SEQ ID NO: 64033 - RNA, 21 nt, Artificial Sequence
  LRRK2 RNA guide
uuggaguaucaaaaugucucu

SEQ ID NO: 64034 - RNA, 21 nt, Artificial Sequence
  LRRK2 RNA guide
uuucccuuuggaguaucaaaa

SEQ ID NO: 64035 - RNA, 21 nt, Artificial Sequence
  LRRK2 RNA guide
uuugauacuccaaagggaaaa

SEQ ID NO: 64036 - RNA, 21 nt, Artificial Sequence
  LRRK2 RNA guide
uuuggaguaucaaaaugucuc

SEQ ID NO: 64037 - RNA, 21 nt, Artificial Sequence
  LRRK2 RNA guide
uuuucccuuuggaguaucaaa

SEQ ID NO: 64038 - RNA, 21 nt, Artificial Sequence
  LRRK2 RNA guide
uuuugauacuccaaagggaaa

SEQ ID NO: 64039 - RNA, 22 nt, Artificial Sequence
  LRRK2 RNA guide
aauagagacauuuugauacucc

SEQ ID NO: 64040 - RNA, 22 nt, Artificial Sequence
  LRRK2 RNA guide
acauuuugauacuccaaaggga

SEQ ID NO: 64041 - RNA, 22 nt, Artificial Sequence
  LRRK2 RNA guide
agacauuuugauacuccaaagg

SEQ ID NO: 64042 - RNA, 22 nt, Artificial Sequence
  LRRK2 RNA guide
agagacauuuugauacuccaaa

SEQ ID NO: 64043 - RNA, 22 nt, Artificial Sequence
  LRRK2 RNA guide
auagagacauuuugauacucca

SEQ ID NO: 64044 - RNA, 22 nt, Artificial Sequence
  LRRK2 RNA guide
auauuuucccuuuggaguauca

SEQ ID NO: 64045 - RNA, 22 nt, Artificial Sequence
  LRRK2 RNA guide
auuuucccuuuggaguaucaaa

SEQ ID NO: 64046 - RNA, 22 nt, Artificial Sequence
  LRRK2 RNA guide
auuuugauacuccaaagggaaa

SEQ ID NO: 64047 - RNA, 22 nt, Artificial Sequence
  LRRK2 RNA guide
cauuuugauacuccaaagggaa

SEQ ID NO: 64048 - RNA, 22 nt, Artificial Sequence
  LRRK2 RNA guide
cccuuuggaguaucaaaauguc

SEQ ID NO: 64049 - RNA, 22 nt, Artificial Sequence
  LRRK2 RNA guide
ccuuuggaguaucaaaaugucu

SEQ ID NO: 64050 - RNA, 22 nt, Artificial Sequence
  LRRK2 RNA guide
cuuuggaguaucaaaaugucuc

SEQ ID NO: 64051 - RNA, 22 nt, Artificial Sequence
  LRRK2 RNA guide
gacauuuugauacuccaaaggg

SEQ ID NO: 64052 - RNA, 22 nt, Artificial Sequence
  LRRK2 RNA guide
gagacauuuugauacuccaaag

SEQ ID NO: 64053 - RNA, 22 nt, Artificial Sequence
  LRRK2 RNA guide
gauacuccaaagggaaaauauc

SEQ ID NO: 64054 - RNA, 22 nt, Artificial Sequence
  LRRK2 RNA guide
gauauuuucccuuuggaguauc

SEQ ID NO: 64055 - RNA, 22 nt, Artificial Sequence
  LRRK2 RNA guide
ggaguaucaaaaugucucuauu

SEQ ID NO: 64056 - RNA, 22 nt, Artificial Sequence
  LRRK2 RNA guide
uagagacauuuugauacuccaa

SEQ ID NO: 64057 - RNA, 22 nt, Artificial Sequence
  LRRK2 RNA guide
uauuuucccuuuggaguaucaa

SEQ ID NO: 64058 - RNA, 22 nt, Artificial Sequence
  LRRK2 RNA guide
ucccuuuggaguaucaaaaugu

SEQ ID NO: 64059 - RNA, 22 nt, Artificial Sequence
  LRRK2 RNA guide
ugauacuccaaagggaaaauau

SEQ ID NO: 64060 - RNA, 22 nt, Artificial Sequence
  LRRK2 RNA guide
ugauauuuucccuuuggaguau

SEQ ID NO: 64061 - RNA, 22 nt, Artificial Sequence
  LRRK2 RNA guide
uggaguaucaaaaugucucuau

SEQ ID NO: 64062 - RNA, 22 nt, Artificial Sequence
  LRRK2 RNA guide
uucccuuuggaguaucaaaaug

SEQ ID NO: 64063 - RNA, 22 nt, Artificial Sequence
  LRRK2 RNA guide
uugauacuccaaagggaaaaua

SEQ ID NO: 64064 - RNA, 22 nt, Artificial Sequence
  LRRK2 RNA guide
uuggaguaucaaaaugucucua

SEQ ID NO: 64065 - RNA, 22 nt, Artificial Sequence
  LRRK2 RNA guide
uuucccuuuggaguaucaaaau

SEQ ID NO: 64066 - RNA, 22 nt, Artificial Sequence
  LRRK2 RNA guide
uuugauacuccaaagggaaaau

SEQ ID NO: 64067 - RNA, 22 nt, Artificial Sequence
  LRRK2 RNA guide
uuuggaguaucaaaaugucucu

SEQ ID NO: 64068 - RNA, 22 nt, Artificial Sequence
  LRRK2 RNA guide
uuuucccuuuggaguaucaaaa

SEQ ID NO: 64069 - RNA, 22 nt, Artificial Sequence
  LRRK2 RNA guide
uuuugauacuccaaagggaaaa

SEQ ID NO: 64070 - RNA, 20 nt, Artificial Sequence
  LRRK2 RNA guide
aagcaguuuaauaugcucga

SEQ ID NO: 64071 - RNA, 20 nt, Artificial Sequence
  LRRK2 RNA guide
aauaugcucgacagaugaag

SEQ ID NO: 64072 - RNA, 20 nt, Artificial Sequence
  LRRK2 RNA guide
agcaguuuaauaugcucgac

SEQ ID NO: 64073 - RNA, 20 nt, Artificial Sequence
  LRRK2 RNA guide
aguuuaauaugcucgacaga

SEQ ID NO: 64074 - RNA, 20 nt, Artificial Sequence
  LRRK2 RNA guide
auaugcucgacagaugaaga

SEQ ID NO: 64075 - RNA, 20 nt, Artificial Sequence
  LRRK2 RNA guide
aucugucgagcauauuaaac

SEQ ID NO: 64076 - RNA, 20 nt, Artificial Sequence
  LRRK2 RNA guide
augcucgacagaugaagaaa

SEQ ID NO: 64077 - RNA, 20 nt, Artificial Sequence
  LRRK2 RNA guide
auuuucuuucuucaucuguc

SEQ ID NO: 64078 - RNA, 20 nt, Artificial Sequence
  LRRK2 RNA guide
caguuuaauaugcucgacag

SEQ ID NO: 64079 - RNA, 20 nt, Artificial Sequence
  LRRK2 RNA guide
caucugucgagcauauuaaa

SEQ ID NO: 64080 - RNA, 20 nt, Artificial Sequence
  LRRK2 RNA guide
cgacagaugaagaaagaaaa

SEQ ID NO: 64081 - RNA, 20 nt, Artificial Sequence
  LRRK2 RNA guide
cucgacagaugaagaaagaa

SEQ ID NO: 64082 - RNA, 20 nt, Artificial Sequence
  LRRK2 RNA guide
cugucgagcauauuaaacug

SEQ ID NO: 64083 - RNA, 20 nt, Artificial Sequence
  LRRK2 RNA guide
cuguuaagcaguuuaauaug

SEQ ID NO: 64084 - RNA, 20 nt, Artificial Sequence
  LRRK2 RNA guide
cuucaucugucgagcauauu

SEQ ID NO: 64085 - RNA, 20 nt, Artificial Sequence
  LRRK2 RNA guide
cuuucuucaucugucgagca

SEQ ID NO: 64086 - RNA, 20 nt, Artificial Sequence
  LRRK2 RNA guide
gauuuucuuucuucaucugu

SEQ ID NO: 64087 - RNA, 20 nt, Artificial Sequence
  LRRK2 RNA guide
gcaguuuaauaugcucgaca

SEQ ID NO: 64088 - RNA, 20 nt, Artificial Sequence
  LRRK2 RNA guide
gcucgacagaugaagaaaga

SEQ ID NO: 64089 - RNA, 20 nt, Artificial Sequence
  LRRK2 RNA guide
gcuguuaagcaguuuaauau

SEQ ID NO: 64090 - RNA, 20 nt, Artificial Sequence
  LRRK2 RNA guide
gucgagcauauuaaacugcu

SEQ ID NO: 64091 - RNA, 20 nt, Artificial Sequence
  LRRK2 RNA guide
guuaagcaguuuaauaugcu

SEQ ID NO: 64092 - RNA, 20 nt, Artificial Sequence
  LRRK2 RNA guide
guuuaauaugcucgacagau

SEQ ID NO: 64093 - RNA, 20 nt, Artificial Sequence
  LRRK2 RNA guide
uaagcaguuuaauaugcucg

SEQ ID NO: 64094 - RNA, 20 nt, Artificial Sequence
  LRRK2 RNA guide
uaauaugcucgacagaugaa

SEQ ID NO: 64095 - RNA, 20 nt, Artificial Sequence
  LRRK2 RNA guide
uaugcucgacagaugaagaa

SEQ ID NO: 64096 - RNA, 20 nt, Artificial Sequence
  LRRK2 RNA guide
ucaucugucgagcauauuaa

SEQ ID NO: 64097 - RNA, 20 nt, Artificial Sequence
  LRRK2 RNA guide
ucgacagaugaagaaagaaa

SEQ ID NO: 64098 - RNA, 20 nt, Artificial Sequence
  LRRK2 RNA guide
ucgagcauauuaaacugcuu

SEQ ID NO: 64099 - RNA, 20 nt, Artificial Sequence
  LRRK2 RNA guide
ucugucgagcauauuaaacu

SEQ ID NO: 64100 - RNA, 20 nt, Artificial Sequence
  LRRK2 RNA guide
ucuucaucugucgagcauau

SEQ ID NO: 64101 - RNA, 20 nt, Artificial Sequence
  LRRK2 RNA guide
ucuuucuucaucugucgagc

SEQ ID NO: 64102 - RNA, 20 nt, Artificial Sequence
  LRRK2 RNA guide
ugauuuucuuucuucaucug

SEQ ID NO: 64103 - RNA, 20 nt, Artificial Sequence
  LRRK2 RNA guide
ugcucgacagaugaagaaag

SEQ ID NO: 64104 - RNA, 20 nt, Artificial Sequence
  LRRK2 RNA guide
ugucgagcauauuaaacugc

SEQ ID NO: 64105 - RNA, 20 nt, Artificial Sequence
  LRRK2 RNA guide
uguuaagcaguuuaauaugc

SEQ ID NO: 64106 - RNA, 20 nt, Artificial Sequence
  LRRK2 RNA guide
uuaagcaguuuaauaugcuc

SEQ ID NO: 64107 - RNA, 20 nt, Artificial Sequence
  LRRK2 RNA guide
uuaauaugcucgacagauga

SEQ ID NO: 64108 - RNA, 20 nt, Artificial Sequence
  LRRK2 RNA guide
uucaucugucgagcauauua

SEQ ID NO: 64109 - RNA, 20 nt, Artificial Sequence
  LRRK2 RNA guide
uucuucaucugucgagcaua

SEQ ID NO: 64110 - RNA, 20 nt, Artificial Sequence
  LRRK2 RNA guide
uucuuucuucaucugucgag

SEQ ID NO: 64111 - RNA, 20 nt, Artificial Sequence
  LRRK2 RNA guide
uuuaauaugcucgacagaug

SEQ ID NO: 64112 - RNA, 20 nt, Artificial Sequence
  LRRK2 RNA guide
uuucuucaucugucgagcau

SEQ ID NO: 64113 - RNA, 20 nt, Artificial Sequence
  LRRK2 RNA guide
uuucuuucuucaucugucga

SEQ ID NO: 64114 - RNA, 20 nt, Artificial Sequence
  LRRK2 RNA guide
uuuucuuucuucaucugucg

SEQ ID NO: 64115 - RNA, 21 nt, Artificial Sequence
  LRRK2 RNA guide
aagcaguuuaauaugcucgac

SEQ ID NO: 64116 - RNA, 21 nt, Artificial Sequence
  LRRK2 RNA guide
aauaugcucgacagaugaaga

SEQ ID NO: 64117 - RNA, 21 nt, Artificial Sequence
  LRRK2 RNA guide
agcaguuuaauaugcucgaca

SEQ ID NO: 64118 - RNA, 21 nt, Artificial Sequence
  LRRK2 RNA guide
aguuuaauaugcucgacagau

SEQ ID NO: 64119 - RNA, 21 nt, Artificial Sequence
  LRRK2 RNA guide
auaugcucgacagaugaagaa

SEQ ID NO: 64120 - RNA, 21 nt, Artificial Sequence
  LRRK2 RNA guide
aucugucgagcauauuaaacu

SEQ ID NO: 64121 - RNA, 21 nt, Artificial Sequence
  LRRK2 RNA guide
augcucgacagaugaagaaag

SEQ ID NO: 64122 - RNA, 21 nt, Artificial Sequence
  LRRK2 RNA guide
auuuucuuucuucaucugucg

SEQ ID NO: 64123 - RNA, 21 nt, Artificial Sequence
  LRRK2 RNA guide
caguuuaauaugcucgacaga

SEQ ID NO: 64124 - RNA, 21 nt, Artificial Sequence
  LRRK2 RNA guide
caucugucgagcauauuaaac

SEQ ID NO: 64125 - RNA, 21 nt, Artificial Sequence
  LRRK2 RNA guide
cgacagaugaagaaagaaaau

SEQ ID NO: 64126 - RNA, 21 nt, Artificial Sequence
  LRRK2 RNA guide
cucgacagaugaagaaagaaa

SEQ ID NO: 64127 - RNA, 21 nt, Artificial Sequence
  LRRK2 RNA guide
cugucgagcauauuaaacugc

SEQ ID NO: 64128 - RNA, 21 nt, Artificial Sequence
  LRRK2 RNA guide
cuguuaagcaguuuaauaugc

SEQ ID NO: 64129 - RNA, 21 nt, Artificial Sequence
  LRRK2 RNA guide
cuucaucugucgagcauauua

SEQ ID NO: 64130 - RNA, 21 nt, Artificial Sequence
  LRRK2 RNA guide
cuuucuucaucugucgagcau

SEQ ID NO: 64131 - RNA, 21 nt, Artificial Sequence
  LRRK2 RNA guide
gauuuucuuucuucaucuguc

SEQ ID NO: 64132 - RNA, 21 nt, Artificial Sequence
  LRRK2 RNA guide
gcaguuuaauaugcucgacag

SEQ ID NO: 64133 - RNA, 21 nt, Artificial Sequence
  LRRK2 RNA guide
gcucgacagaugaagaaagaa

SEQ ID NO: 64134 - RNA, 21 nt, Artificial Sequence
  LRRK2 RNA guide
gcuguuaagcaguuuaauaug

SEQ ID NO: 64135 - RNA, 21 nt, Artificial Sequence
  LRRK2 RNA guide
gucgagcauauuaaacugcuu

SEQ ID NO: 64136 - RNA, 21 nt, Artificial Sequence
  LRRK2 RNA guide
guuaagcaguuuaauaugcuc

SEQ ID NO: 64137 - RNA, 21 nt, Artificial Sequence
  LRRK2 RNA guide
guuuaauaugcucgacagaug

SEQ ID NO: 64138 - RNA, 21 nt, Artificial Sequence
  LRRK2 RNA guide
uaagcaguuuaauaugcucga

SEQ ID NO: 64139 - RNA, 21 nt, Artificial Sequence
  LRRK2 RNA guide
uaauaugcucgacagaugaag

SEQ ID NO: 64140 - RNA, 21 nt, Artificial Sequence
  LRRK2 RNA guide
uaugcucgacagaugaagaaa

SEQ ID NO: 64141 - RNA, 21 nt, Artificial Sequence
  LRRK2 RNA guide
ucaucugucgagcauauuaaa

SEQ ID NO: 64142 - RNA, 21 nt, Artificial Sequence
  LRRK2 RNA guide
ucgacagaugaagaaagaaaa

SEQ ID NO: 64143 - RNA, 21 nt, Artificial Sequence
  LRRK2 RNA guide
ucgagcauauuaaacugcuua

SEQ ID NO: 64144 - RNA, 21 nt, Artificial Sequence
  LRRK2 RNA guide
ucugucgagcauauuaaacug

SEQ ID NO: 64145 - RNA, 21 nt, Artificial Sequence
  LRRK2 RNA guide
ucuucaucugucgagcauauu

SEQ ID NO: 64146 - RNA, 21 nt, Artificial Sequence
  LRRK2 RNA guide
ucuuucuucaucugucgagca

SEQ ID NO: 64147 - RNA, 21 nt, Artificial Sequence
  LRRK2 RNA guide
ugcucgacagaugaagaaaga

SEQ ID NO: 64148 - RNA, 21 nt, Artificial Sequence
  LRRK2 RNA guide
ugucgagcauauuaaacugcu

SEQ ID NO: 64149 - RNA, 21 nt, Artificial Sequence
  LRRK2 RNA guide
uuaagcaguuuaauaugcucg

SEQ ID NO: 64150 - RNA, 21 nt, Artificial Sequence
  LRRK2 RNA guide
uuaauaugcucgacagaugaa

SEQ ID NO: 64151 - RNA, 21 nt, Artificial Sequence
  LRRK2 RNA guide
uucaucugucgagcauauuaa

SEQ ID NO: 64152 - RNA, 21 nt, Artificial Sequence
  LRRK2 RNA guide
uucuucaucugucgagcauau

SEQ ID NO: 64153 - RNA, 21 nt, Artificial Sequence
  LRRK2 RNA guide
uucuuucuucaucugucgagc

SEQ ID NO: 64154 - RNA, 21 nt, Artificial Sequence
  LRRK2 RNA guide
uuuaauaugcucgacagauga

SEQ ID NO: 64155 - RNA, 21 nt, Artificial Sequence
  LRRK2 RNA guide
uuucuucaucugucgagcaua

SEQ ID NO: 64156 - RNA, 21 nt, Artificial Sequence
  LRRK2 RNA guide
uuucuuucuucaucugucgag

SEQ ID NO: 64157 - RNA, 21 nt, Artificial Sequence
  LRRK2 RNA guide
uuuucuuucuucaucugucga

SEQ ID NO: 64158 - RNA, 22 nt, Artificial Sequence
  LRRK2 RNA guide
aagcaguuuaauaugcucgaca

SEQ ID NO: 64159 - RNA, 22 nt, Artificial Sequence
  LRRK2 RNA guide
aauaugcucgacagaugaagaa

SEQ ID NO: 64160 - RNA, 22 nt, Artificial Sequence
  LRRK2 RNA guide
agcaguuuaauaugcucgacag

SEQ ID NO: 64161 - RNA, 22 nt, Artificial Sequence
  LRRK2 RNA guide
aguuuaauaugcucgacagaug

SEQ ID NO: 64162 - RNA, 22 nt, Artificial Sequence
  LRRK2 RNA guide
auaugcucgacagaugaagaaa

SEQ ID NO: 64163 - RNA, 22 nt, Artificial Sequence
  LRRK2 RNA guide
aucugucgagcauauuaaacug

SEQ ID NO: 64164 - RNA, 22 nt, Artificial Sequence
  LRRK2 RNA guide
augcucgacagaugaagaaaga

SEQ ID NO: 64165 - RNA, 22 nt, Artificial Sequence
  LRRK2 RNA guide
auuuucuuucuucaucugucga

SEQ ID NO: 64166 - RNA, 22 nt, Artificial Sequence
  LRRK2 RNA guide
caguuuaauaugcucgacagau

SEQ ID NO: 64167 - RNA, 22 nt, Artificial Sequence
  LRRK2 RNA guide
caucugucgagcauauuaaacu

SEQ ID NO: 64168 - RNA, 22 nt, Artificial Sequence
  LRRK2 RNA guide
cgacagaugaagaaagaaaauc

SEQ ID NO: 64169 - RNA, 22 nt, Artificial Sequence
  LRRK2 RNA guide
cucgacagaugaagaaagaaaa

SEQ ID NO: 64170 - RNA, 22 nt, Artificial Sequence
  LRRK2 RNA guide
cugucgagcauauuaaacugcu

SEQ ID NO: 64171 - RNA, 22 nt, Artificial Sequence
  LRRK2 RNA guide
cuguuaagcaguuuaauaugcu

SEQ ID NO: 64172 - RNA, 22 nt, Artificial Sequence
  LRRK2 RNA guide
cuucaucugucgagcauauuaa

SEQ ID NO: 64173 - RNA, 22 nt, Artificial Sequence
  LRRK2 RNA guide
cuuucuucaucugucgagcaua

SEQ ID NO: 64174 - RNA, 22 nt, Artificial Sequence
  LRRK2 RNA guide
gauuuucuuucuucaucugucg

SEQ ID NO: 64175 - RNA, 22 nt, Artificial Sequence
  LRRK2 RNA guide
gcaguuuaauaugcucgacaga

SEQ ID NO: 64176 - RNA, 22 nt, Artificial Sequence
  LRRK2 RNA guide
gcucgacagaugaagaaagaaa

SEQ ID NO: 64177 - RNA, 22 nt, Artificial Sequence
  LRRK2 RNA guide
gcuguuaagcaguuuaauaugc

SEQ ID NO: 64178 - RNA, 22 nt, Artificial Sequence
  LRRK2 RNA guide
gucgagcauauuaaacugcuua

SEQ ID NO: 64179 - RNA, 22 nt, Artificial Sequence
  LRRK2 RNA guide
guuaagcaguuuaauaugcucg

SEQ ID NO: 64180 - RNA, 22 nt, Artificial Sequence
  LRRK2 RNA guide
guuuaauaugcucgacagauga

SEQ ID NO: 64181 - RNA, 22 nt, Artificial Sequence
  LRRK2 RNA guide
uaagcaguuuaauaugcucgac

SEQ ID NO: 64182 - RNA, 22 nt, Artificial Sequence
  LRRK2 RNA guide
uaauaugcucgacagaugaaga

SEQ ID NO: 64183 - RNA, 22 nt, Artificial Sequence
  LRRK2 RNA guide
uaugcucgacagaugaagaaag

SEQ ID NO: 64184 - RNA, 22 nt, Artificial Sequence
  LRRK2 RNA guide
ucaucugucgagcauauuaaac

SEQ ID NO: 64185 - RNA, 22 nt, Artificial Sequence
  LRRK2 RNA guide
ucgacagaugaagaaagaaaau

SEQ ID NO: 64186 - RNA, 22 nt, Artificial Sequence
  LRRK2 RNA guide
ucgagcauauuaaacugcuuaa

SEQ ID NO: 64187 - RNA, 22 nt, Artificial Sequence
  LRRK2 RNA guide
ucugucgagcauauuaaacugc

SEQ ID NO: 64188 - RNA, 22 nt, Artificial Sequence
  LRRK2 RNA guide
ucuucaucugucgagcauauua

SEQ ID NO: 64189 - RNA, 22 nt, Artificial Sequence
  LRRK2 RNA guide
ucuuucuucaucugucgagcau

SEQ ID NO: 64190 - RNA, 22 nt, Artificial Sequence
  LRRK2 RNA guide
ugauuuucuuucuucaucuguc

SEQ ID NO: 64191 - RNA, 22 nt, Artificial Sequence
  LRRK2 RNA guide
ugcucgacagaugaagaaagaa

SEQ ID NO: 64192 - RNA, 22 nt, Artificial Sequence
  LRRK2 RNA guide
ugcuguuaagcaguuuaauaug

SEQ ID NO: 64193 - RNA, 22 nt, Artificial Sequence
  LRRK2 RNA guide
ugucgagcauauuaaacugcuu

SEQ ID NO: 64194 - RNA, 22 nt, Artificial Sequence
  LRRK2 RNA guide
uguuaagcaguuuaauaugcuc

SEQ ID NO: 64195 - RNA, 22 nt, Artificial Sequence
  LRRK2 RNA guide
uuaagcaguuuaauaugcucga

SEQ ID NO: 64196 - RNA, 22 nt, Artificial Sequence
  LRRK2 RNA guide
uuaauaugcucgacagaugaag

SEQ ID NO: 64197 - RNA, 22 nt, Artificial Sequence
  LRRK2 RNA guide
uucaucugucgagcauauuaaa

SEQ ID NO: 64198 - RNA, 22 nt, Artificial Sequence
  LRRK2 RNA guide
uucuucaucugucgagcauauu

SEQ ID NO: 64199 - RNA, 22 nt, Artificial Sequence
  LRRK2 RNA guide
uucuuucuucaucugucgagca

SEQ ID NO: 64200 - RNA, 22 nt, Artificial Sequence
  LRRK2 RNA guide
uuuaauaugcucgacagaugaa

SEQ ID NO: 64201 - RNA, 22 nt, Artificial Sequence
  LRRK2 RNA guide
uuucuucaucugucgagcauau

SEQ ID NO: 64202 - RNA, 22 nt, Artificial Sequence
  LRRK2 RNA guide
uuucuuucuucaucugucgagc

SEQ ID NO: 64203 - RNA, 22 nt, Artificial Sequence
  LRRK2 RNA guide
uuuucuuucuucaucugucgag

SEQ ID NO: 64204 - RNA, 20 nt, Artificial Sequence
  LRRK2 RNA guide
aagcaguuuaauaugcucaa

SEQ ID NO: 64205 - RNA, 20 nt, Artificial Sequence
  LRRK2 RNA guide
aauaugcucaacagaugaag

SEQ ID NO: 64206 - RNA, 20 nt, Artificial Sequence
  LRRK2 RNA guide
agcaguuuaauaugcucaac

SEQ ID NO: 64207 - RNA, 20 nt, Artificial Sequence
  LRRK2 RNA guide
aguuuaauaugcucaacaga

SEQ ID NO: 64208 - RNA, 20 nt, Artificial Sequence
  LRRK2 RNA guide
auaugcucaacagaugaaga

SEQ ID NO: 64209 - RNA, 20 nt, Artificial Sequence
  LRRK2 RNA guide
aucuguugagcauauuaaac

SEQ ID NO: 64210 - RNA, 20 nt, Artificial Sequence
  LRRK2 RNA guide
augcucaacagaugaagaaa

SEQ ID NO: 64211 - RNA, 20 nt, Artificial Sequence
  LRRK2 RNA guide
caacagaugaagaaagaaaa

SEQ ID NO: 64212 - RNA, 20 nt, Artificial Sequence
  LRRK2 RNA guide
caguuuaauaugcucaacag

SEQ ID NO: 64213 - RNA, 20 nt, Artificial Sequence
  LRRK2 RNA guide
caucuguugagcauauuaaa

SEQ ID NO: 64214 - RNA, 20 nt, Artificial Sequence
  LRRK2 RNA guide
cucaacagaugaagaaagaa

SEQ ID NO: 64215 - RNA, 20 nt, Artificial Sequence
  LRRK2 RNA guide
cuguugagcauauuaaacug

SEQ ID NO: 64216 - RNA, 20 nt, Artificial Sequence
  LRRK2 RNA guide
cuucaucuguugagcauauu

SEQ ID NO: 64217 - RNA, 20 nt, Artificial Sequence
  LRRK2 RNA guide
cuuucuucaucuguugagca

SEQ ID NO: 64218 - RNA, 20 nt, Artificial Sequence
  LRRK2 RNA guide
gcaguuuaauaugcucaaca

SEQ ID NO: 64219 - RNA, 20 nt, Artificial Sequence
  LRRK2 RNA guide
gcucaacagaugaagaaaga

SEQ ID NO: 64220 - RNA, 20 nt, Artificial Sequence
  LRRK2 RNA guide
guugagcauauuaaacugcu

SEQ ID NO: 64221 - RNA, 20 nt, Artificial Sequence
  LRRK2 RNA guide
guuuaauaugcucaacagau

SEQ ID NO: 64222 - RNA, 20 nt, Artificial Sequence
  LRRK2 RNA guide
uaagcaguuuaauaugcuca

SEQ ID NO: 64223 - RNA, 20 nt, Artificial Sequence
  LRRK2 RNA guide
uaauaugcucaacagaugaa

SEQ ID NO: 64224 - RNA, 20 nt, Artificial Sequence
  LRRK2 RNA guide
uaugcucaacagaugaagaa

SEQ ID NO: 64225 - RNA, 20 nt, Artificial Sequence
  LRRK2 RNA guide
ucaacagaugaagaaagaaa

SEQ ID NO: 64226 - RNA, 20 nt, Artificial Sequence
  LRRK2 RNA guide
ucaucuguugagcauauuaa

SEQ ID NO: 64227 - RNA, 20 nt, Artificial Sequence
  LRRK2 RNA guide
ucuguugagcauauuaaacu

SEQ ID NO: 64228 - RNA, 20 nt, Artificial Sequence
  LRRK2 RNA guide
ucuucaucuguugagcauau

SEQ ID NO: 64229 - RNA, 20 nt, Artificial Sequence
  LRRK2 RNA guide
ucuuucuucaucuguugagc

SEQ ID NO: 64230 - RNA, 20 nt, Artificial Sequence
  LRRK2 RNA guide
ugcucaacagaugaagaaag

SEQ ID NO: 64231 - RNA, 20 nt, Artificial Sequence
  LRRK2 RNA guide
uguugagcauauuaaacugc

SEQ ID NO: 64232 - RNA, 20 nt, Artificial Sequence
  LRRK2 RNA guide
uuaauaugcucaacagauga

SEQ ID NO: 64233 - RNA, 20 nt, Artificial Sequence
  LRRK2 RNA guide
uucaucuguugagcauauua

SEQ ID NO: 64234 - RNA, 20 nt, Artificial Sequence
  LRRK2 RNA guide
uucuucaucuguugagcaua

SEQ ID NO: 64235 - RNA, 20 nt, Artificial Sequence
  LRRK2 RNA guide
uucuuucuucaucuguugag

SEQ ID NO: 64236 - RNA, 20 nt, Artificial Sequence
  LRRK2 RNA guide
uugagcauauuaaacugcuu

SEQ ID NO: 64237 - RNA, 20 nt, Artificial Sequence
  LRRK2 RNA guide
uuuaauaugcucaacagaug

SEQ ID NO: 64238 - RNA, 20 nt, Artificial Sequence
  LRRK2 RNA guide
uuucuucaucuguugagcau

SEQ ID NO: 64239 - RNA, 20 nt, Artificial Sequence
  LRRK2 RNA guide
uuucuuucuucaucuguuga

SEQ ID NO: 64240 - RNA, 20 nt, Artificial Sequence
  LRRK2 RNA guide
uuuucuuucuucaucuguug

SEQ ID NO: 64241 - RNA, 21 nt, Artificial Sequence
  LRRK2 RNA guide
aagcaguuuaauaugcucaac

SEQ ID NO: 64242 - RNA, 21 nt, Artificial Sequence
  LRRK2 RNA guide
aauaugcucaacagaugaaga

SEQ ID NO: 64243 - RNA, 21 nt, Artificial Sequence
  LRRK2 RNA guide
agcaguuuaauaugcucaaca

SEQ ID NO: 64244 - RNA, 21 nt, Artificial Sequence
  LRRK2 RNA guide
auaugcucaacagaugaagaa

SEQ ID NO: 64245 - RNA, 21 nt, Artificial Sequence
  LRRK2 RNA guide
augcucaacagaugaagaaag

SEQ ID NO: 64246 - RNA, 21 nt, Artificial Sequence
  LRRK2 RNA guide
caguuuaauaugcucaacaga

SEQ ID NO: 64247 - RNA, 21 nt, Artificial Sequence
  LRRK2 RNA guide
caucuguugagcauauuaaac

SEQ ID NO: 64248 - RNA, 21 nt, Artificial Sequence
  LRRK2 RNA guide
cucaacagaugaagaaagaaa

SEQ ID NO: 64249 - RNA, 21 nt, Artificial Sequence
  LRRK2 RNA guide
cuguugagcauauuaaacugc

SEQ ID NO: 64250 - RNA, 21 nt, Artificial Sequence
  LRRK2 RNA guide
cuucaucuguugagcauauua

SEQ ID NO: 64251 - RNA, 21 nt, Artificial Sequence
  LRRK2 RNA guide
cuuucuucaucuguugagcau

SEQ ID NO: 64252 - RNA, 21 nt, Artificial Sequence
  LRRK2 RNA guide
gcaguuuaauaugcucaacag

SEQ ID NO: 64253 - RNA, 21 nt, Artificial Sequence
  LRRK2 RNA guide
gcucaacagaugaagaaagaa

SEQ ID NO: 64254 - RNA, 21 nt, Artificial Sequence
  LRRK2 RNA guide
guugagcauauuaaacugcuu

SEQ ID NO: 64255 - RNA, 21 nt, Artificial Sequence
  LRRK2 RNA guide
guuuaauaugcucaacagaug

SEQ ID NO: 64256 - RNA, 21 nt, Artificial Sequence
  LRRK2 RNA guide
uaauaugcucaacagaugaag

SEQ ID NO: 64257 - RNA, 21 nt, Artificial Sequence
  LRRK2 RNA guide
uaugcucaacagaugaagaaa

SEQ ID NO: 64258 - RNA, 21 nt, Artificial Sequence
  LRRK2 RNA guide
ucuguugagcauauuaaacug

SEQ ID NO: 64259 - RNA, 21 nt, Artificial Sequence
  LRRK2 RNA guide
ucuucaucuguugagcauauu

SEQ ID NO: 64260 - RNA, 21 nt, Artificial Sequence
  LRRK2 RNA guide
ucuuucuucaucuguugagca

SEQ ID NO: 64261 - RNA, 21 nt, Artificial Sequence
  LRRK2 RNA guide
ugcucaacagaugaagaaaga

SEQ ID NO: 64262 - RNA, 21 nt, Artificial Sequence
  LRRK2 RNA guide
uguugagcauauuaaacugcu

SEQ ID NO: 64263 - RNA, 21 nt, Artificial Sequence
  LRRK2 RNA guide
uucuucaucuguugagcauau

SEQ ID NO: 64264 - RNA, 21 nt, Artificial Sequence
  LRRK2 RNA guide
uucuuucuucaucuguugagc

SEQ ID NO: 64265 - RNA, 21 nt, Artificial Sequence
  LRRK2 RNA guide
uuucuucaucuguugagcaua

SEQ ID NO: 64266 - RNA, 21 nt, Artificial Sequence
  LRRK2 RNA guide
uuucuuucuucaucuguugag

SEQ ID NO: 64267 - RNA, 22 nt, Artificial Sequence
  LRRK2 RNA guide
aagcaguuuaauaugcucaaca

SEQ ID NO: 64268 - RNA, 22 nt, Artificial Sequence
  LRRK2 RNA guide
aauaugcucaacagaugaagaa

SEQ ID NO: 64269 - RNA, 22 nt, Artificial Sequence
  LRRK2 RNA guide
agcaguuuaauaugcucaacag

SEQ ID NO: 64270 - RNA, 22 nt, Artificial Sequence
  LRRK2 RNA guide
aguuuaauaugcucaacagaug

SEQ ID NO: 64271 - RNA, 22 nt, Artificial Sequence
  LRRK2 RNA guide
auaugcucaacagaugaagaaa

SEQ ID NO: 64272 - RNA, 22 nt, Artificial Sequence
  LRRK2 RNA guide
aucuguugagcauauuaaacug

SEQ ID NO: 64273 - RNA, 22 nt, Artificial Sequence
  LRRK2 RNA guide
augcucaacagaugaagaaaga

SEQ ID NO: 64274 - RNA, 22 nt, Artificial Sequence
  LRRK2 RNA guide
caacagaugaagaaagaaaauc

SEQ ID NO: 64275 - RNA, 22 nt, Artificial Sequence
  LRRK2 RNA guide
caguuuaauaugcucaacagau

SEQ ID NO: 64276 - RNA, 22 nt, Artificial Sequence
  LRRK2 RNA guide
caucuguugagcauauuaaacu

SEQ ID NO: 64277 - RNA, 22 nt, Artificial Sequence
  LRRK2 RNA guide
cucaacagaugaagaaagaaaa

SEQ ID NO: 64278 - RNA, 22 nt, Artificial Sequence
  LRRK2 RNA guide
cuguugagcauauuaaacugcu

SEQ ID NO: 64279 - RNA, 22 nt, Artificial Sequence
  LRRK2 RNA guide
cuucaucuguugagcauauuaa

SEQ ID NO: 64280 - RNA, 22 nt, Artificial Sequence
  LRRK2 RNA guide
cuuucuucaucuguugagcaua

SEQ ID NO: 64281 - RNA, 22 nt, Artificial Sequence
  LRRK2 RNA guide
gauuuucuuucuucaucuguug

SEQ ID NO: 64282 - RNA, 22 nt, Artificial Sequence
  LRRK2 RNA guide
gcaguuuaauaugcucaacaga

SEQ ID NO: 64283 - RNA, 22 nt, Artificial Sequence
  LRRK2 RNA guide
gcucaacagaugaagaaagaaa

SEQ ID NO: 64284 - RNA, 22 nt, Artificial Sequence
  LRRK2 RNA guide
guuaagcaguuuaauaugcuca

SEQ ID NO: 64285 - RNA, 22 nt, Artificial Sequence
  LRRK2 RNA guide
guugagcauauuaaacugcuua

SEQ ID NO: 64286 - RNA, 22 nt, Artificial Sequence
  LRRK2 RNA guide
guuuaauaugcucaacagauga

SEQ ID NO: 64287 - RNA, 22 nt, Artificial Sequence
  LRRK2 RNA guide
uaagcaguuuaauaugcucaac

SEQ ID NO: 64288 - RNA, 22 nt, Artificial Sequence
  LRRK2 RNA guide
uaauaugcucaacagaugaaga

SEQ ID NO: 64289 - RNA, 22 nt, Artificial Sequence
  LRRK2 RNA guide
uaugcucaacagaugaagaaag

SEQ ID NO: 64290 - RNA, 22 nt, Artificial Sequence
  LRRK2 RNA guide
ucaucuguugagcauauuaaac

SEQ ID NO: 64291 - RNA, 22 nt, Artificial Sequence
  LRRK2 RNA guide
ucuguugagcauauuaaacugc

SEQ ID NO: 64292 - RNA, 22 nt, Artificial Sequence
  LRRK2 RNA guide
ucuucaucuguugagcauauua

SEQ ID NO: 64293 - RNA, 22 nt, Artificial Sequence
  LRRK2 RNA guide
ucuuucuucaucuguugagcau

SEQ ID NO: 64294 - RNA, 22 nt, Artificial Sequence
  LRRK2 RNA guide
ugcucaacagaugaagaaagaa

SEQ ID NO: 64295 - RNA, 22 nt, Artificial Sequence
  LRRK2 RNA guide
uguugagcauauuaaacugcuu

SEQ ID NO: 64296 - RNA, 22 nt, Artificial Sequence
  LRRK2 RNA guide
uuaauaugcucaacagaugaag

SEQ ID NO: 64297 - RNA, 22 nt, Artificial Sequence
  LRRK2 RNA guide
uucuucaucuguugagcauauu

SEQ ID NO: 64298 - RNA, 22 nt, Artificial Sequence
  LRRK2 RNA guide
uucuuucuucaucuguugagca

SEQ ID NO: 64299 - RNA, 22 nt, Artificial Sequence
  LRRK2 RNA guide
uuucuucaucuguugagcauau

SEQ ID NO: 64300 - RNA, 22 nt, Artificial Sequence
  LRRK2 RNA guide
uuucuuucuucaucuguugagc

SEQ ID NO: 64301 - RNA, 22 nt, Artificial Sequence
  LRRK2 RNA guide
uuuucuuucuucaucuguugag

SEQ ID NO: 64302 - RNA, 20 nt, Artificial Sequence
  LRRK2 RNA guide
aauguuuucaauugcaacac

SEQ ID NO: 64303 - RNA, 20 nt, Artificial Sequence
  LRRK2 RNA guide
aguguugcaauugaaaacau

SEQ ID NO: 64304 - RNA, 20 nt, Artificial Sequence
  LRRK2 RNA guide
auguuuucaauugcaacacu

SEQ ID NO: 64305 - RNA, 20 nt, Artificial Sequence
  LRRK2 RNA guide
caauugcaacacuaaagaaa

SEQ ID NO: 64306 - RNA, 20 nt, Artificial Sequence
  LRRK2 RNA guide
cuuuaguguugcaauugaaa

SEQ ID NO: 64307 - RNA, 20 nt, Artificial Sequence
  LRRK2 RNA guide
gaauguuuucaauugcaaca

SEQ ID NO: 64308 - RNA, 20 nt, Artificial Sequence
  LRRK2 RNA guide
guguugcaauugaaaacauu

SEQ ID NO: 64309 - RNA, 20 nt, Artificial Sequence
  LRRK2 RNA guide
guugcaauugaaaacauuca

SEQ ID NO: 64310 - RNA, 20 nt, Artificial Sequence
  LRRK2 RNA guide
guuuucaauugcaacacuaa

SEQ ID NO: 64311 - RNA, 20 nt, Artificial Sequence
  LRRK2 RNA guide
uaguguugcaauugaaaaca

SEQ ID NO: 64312 - RNA, 20 nt, Artificial Sequence
  LRRK2 RNA guide
ucaauugcaacacuaaagaa

SEQ ID NO: 64313 - RNA, 20 nt, Artificial Sequence
  LRRK2 RNA guide
ucuuuaguguugcaauugaa

SEQ ID NO: 64314 - RNA, 20 nt, Artificial Sequence
  LRRK2 RNA guide
ugaauguuuucaauugcaac

SEQ ID NO: 64315 - RNA, 20 nt, Artificial Sequence
  LRRK2 RNA guide
uguugcaauugaaaacauuc

SEQ ID NO: 64316 - RNA, 20 nt, Artificial Sequence
  LRRK2 RNA guide
uguuuucaauugcaacacua

SEQ ID NO: 64317 - RNA, 20 nt, Artificial Sequence
  LRRK2 RNA guide
uuaguguugcaauugaaaac

SEQ ID NO: 64318 - RNA, 20 nt, Artificial Sequence
  LRRK2 RNA guide
uucaauugcaacacuaaaga

SEQ ID NO: 64319 - RNA, 20 nt, Artificial Sequence
  LRRK2 RNA guide
uucuuuaguguugcaauuga

SEQ ID NO: 64320 - RNA, 20 nt, Artificial Sequence
  LRRK2 RNA guide
uuucaauugcaacacuaaag

SEQ ID NO: 64321 - RNA, 20 nt, Artificial Sequence
  LRRK2 RNA guide
uuucuuuaguguugcaauug

SEQ ID NO: 64322 - RNA, 21 nt, Artificial Sequence
  LRRK2 RNA guide
gaauguuuucaauugcaacac

SEQ ID NO: 64323 - RNA, 21 nt, Artificial Sequence
  LRRK2 RNA guide
guguugcaauugaaaacauuc

SEQ ID NO: 64324 - RNA, 22 nt, Artificial Sequence
  LRRK2 RNA guide
aguguugcaauugaaaacauuc

SEQ ID NO: 64325 - RNA, 22 nt, Artificial Sequence
  LRRK2 RNA guide
cuuuaguguugcaauugaaaac

SEQ ID NO: 64326 - RNA, 22 nt, Artificial Sequence
  LRRK2 RNA guide
gaauguuuucaauugcaacacu

SEQ ID NO: 64327 - RNA, 22 nt, Artificial Sequence
  LRRK2 RNA guide
guguugcaauugaaaacauuca

SEQ ID NO: 64328 - RNA, 22 nt, Artificial Sequence
  LRRK2 RNA guide
guuuucaauugcaacacuaaag

SEQ ID NO: 64329 - RNA, 22 nt, Artificial Sequence
  LRRK2 RNA guide
ugaauguuuucaauugcaacac

SEQ ID NO: 64330 - RNA, 20 nt, Artificial Sequence
  LRRK2 RNA guide
aaugauggugaagaacauca

SEQ ID NO: 64331 - RNA, 20 nt, Artificial Sequence
  LRRK2 RNA guide
augauggugaagaacaucaa

SEQ ID NO: 64332 - RNA, 20 nt, Artificial Sequence
  LRRK2 RNA guide
auggugaagaacaucaaaaa

SEQ ID NO: 64333 - RNA, 20 nt, Artificial Sequence
  LRRK2 RNA guide
auuuuuugauguucuucacc

SEQ ID NO: 64334 - RNA, 20 nt, Artificial Sequence
  LRRK2 RNA guide
cuucaccaucauuaaaacua

SEQ ID NO: 64335 - RNA, 20 nt, Artificial Sequence
  LRRK2 RNA guide
gauggugaagaacaucaaaa

SEQ ID NO: 64336 - RNA, 20 nt, Artificial Sequence
  LRRK2 RNA guide
gauguucuucaccaucauua

SEQ ID NO: 64337 - RNA, 20 nt, Artificial Sequence
  LRRK2 RNA guide
ggugaagaacaucaaaaaau

SEQ ID NO: 64338 - RNA, 20 nt, Artificial Sequence
  LRRK2 RNA guide
gugaagaacaucaaaaaauc

SEQ ID NO: 64339 - RNA, 20 nt, Artificial Sequence
  LRRK2 RNA guide
uaaugauggugaagaacauc

SEQ ID NO: 64340 - RNA, 20 nt, Artificial Sequence
  LRRK2 RNA guide
uaguuuuaaugauggugaag

SEQ ID NO: 64341 - RNA, 20 nt, Artificial Sequence
  LRRK2 RNA guide
ucuucaccaucauuaaaacu

SEQ ID NO: 64342 - RNA, 20 nt, Artificial Sequence
  LRRK2 RNA guide
ugauggugaagaacaucaaa

SEQ ID NO: 64343 - RNA, 20 nt, Artificial Sequence
  LRRK2 RNA guide
ugauguucuucaccaucauu

SEQ ID NO: 64344 - RNA, 20 nt, Artificial Sequence
  LRRK2 RNA guide
uggugaagaacaucaaaaaa

SEQ ID NO: 64345 - RNA, 20 nt, Artificial Sequence
  LRRK2 RNA guide
uguucuucaccaucauuaaa

SEQ ID NO: 64346 - RNA, 20 nt, Artificial Sequence
  LRRK2 RNA guide
uucuucaccaucauuaaaac

SEQ ID NO: 64347 - RNA, 20 nt, Artificial Sequence
  LRRK2 RNA guide
uuugauguucuucaccauca

SEQ ID NO: 64348 - RNA, 20 nt, Artificial Sequence
  LRRK2 RNA guide
uuuugauguucuucaccauc

SEQ ID NO: 64349 - RNA, 20 nt, Artificial Sequence
  LRRK2 RNA guide
uuuuugauguucuucaccau

SEQ ID NO: 64350 - RNA, 20 nt, Artificial Sequence
  LRRK2 RNA guide
uuuuuugauguucuucacca

SEQ ID NO: 64351 - RNA, 21 nt, Artificial Sequence
  LRRK2 RNA guide
aaugauggugaagaacaucaa

SEQ ID NO: 64352 - RNA, 21 nt, Artificial Sequence
  LRRK2 RNA guide
augauggugaagaacaucaaa

SEQ ID NO: 64353 - RNA, 21 nt, Artificial Sequence
  LRRK2 RNA guide
gauggugaagaacaucaaaaa

SEQ ID NO: 64354 - RNA, 21 nt, Artificial Sequence
  LRRK2 RNA guide
gauguucuucaccaucauuaa

SEQ ID NO: 64355 - RNA, 21 nt, Artificial Sequence
  LRRK2 RNA guide
gauuuuuugauguucuucacc

SEQ ID NO: 64356 - RNA, 21 nt, Artificial Sequence
  LRRK2 RNA guide
ggugaagaacaucaaaaaauc

SEQ ID NO: 64357 - RNA, 21 nt, Artificial Sequence
  LRRK2 RNA guide
guucuucaccaucauuaaaac

SEQ ID NO: 64358 - RNA, 21 nt, Artificial Sequence
  LRRK2 RNA guide
uaaugauggugaagaacauca

SEQ ID NO: 64359 - RNA, 21 nt, Artificial Sequence
  LRRK2 RNA guide
ugauggugaagaacaucaaaa

SEQ ID NO: 64360 - RNA, 21 nt, Artificial Sequence
  LRRK2 RNA guide
ugauguucuucaccaucauua

SEQ ID NO: 64361 - RNA, 21 nt, Artificial Sequence
  LRRK2 RNA guide
uuaaugauggugaagaacauc

SEQ ID NO: 64362 - RNA, 21 nt, Artificial Sequence
  LRRK2 RNA guide
uugauguucuucaccaucauu

SEQ ID NO: 64363 - RNA, 21 nt, Artificial Sequence
  LRRK2 RNA guide
uuugauguucuucaccaucau

SEQ ID NO: 64364 - RNA, 21 nt, Artificial Sequence
  LRRK2 RNA guide
uuuugauguucuucaccauca

SEQ ID NO: 64365 - RNA, 21 nt, Artificial Sequence
  LRRK2 RNA guide
uuuuugauguucuucaccauc

SEQ ID NO: 64366 - RNA, 22 nt, Artificial Sequence
  LRRK2 RNA guide
aaugauggugaagaacaucaaa

SEQ ID NO: 64367 - RNA, 22 nt, Artificial Sequence
  LRRK2 RNA guide
agauuuuuugauguucuucacc

SEQ ID NO: 64368 - RNA, 22 nt, Artificial Sequence
  LRRK2 RNA guide
augauggugaagaacaucaaaa

SEQ ID NO: 64369 - RNA, 22 nt, Artificial Sequence
  LRRK2 RNA guide
gauggugaagaacaucaaaaaa

SEQ ID NO: 64370 - RNA, 22 nt, Artificial Sequence
  LRRK2 RNA guide
gauguucuucaccaucauuaaa

SEQ ID NO: 64371 - RNA, 22 nt, Artificial Sequence
  LRRK2 RNA guide
gauuuuuugauguucuucacca

SEQ ID NO: 64372 - RNA, 22 nt, Artificial Sequence
  LRRK2 RNA guide
ggugaagaacaucaaaaaaucu

SEQ ID NO: 64373 - RNA, 22 nt, Artificial Sequence
  LRRK2 RNA guide
guucuucaccaucauuaaaacu

SEQ ID NO: 64374 - RNA, 22 nt, Artificial Sequence
  LRRK2 RNA guide
uaaugauggugaagaacaucaa

SEQ ID NO: 64375 - RNA, 22 nt, Artificial Sequence
  LRRK2 RNA guide
ugauggugaagaacaucaaaaa

SEQ ID NO: 64376 - RNA, 22 nt, Artificial Sequence
  LRRK2 RNA guide
ugauguucuucaccaucauuaa

SEQ ID NO: 64377 - RNA, 22 nt, Artificial Sequence
  LRRK2 RNA guide
uggugaagaacaucaaaaaauc

SEQ ID NO: 64378 - RNA, 22 nt, Artificial Sequence
  LRRK2 RNA guide
uguucuucaccaucauuaaaac

SEQ ID NO: 64379 - RNA, 22 nt, Artificial Sequence
  LRRK2 RNA guide
uuaaugauggugaagaacauca

SEQ ID NO: 64380 - RNA, 22 nt, Artificial Sequence
  LRRK2 RNA guide
uugauguucuucaccaucauua

SEQ ID NO: 64381 - RNA, 22 nt, Artificial Sequence
  LRRK2 RNA guide
uuuaaugauggugaagaacauc

SEQ ID NO: 64382 - RNA, 22 nt, Artificial Sequence
  LRRK2 RNA guide
uuugauguucuucaccaucauu

SEQ ID NO: 64383 - RNA, 22 nt, Artificial Sequence
  LRRK2 RNA guide
uuuugauguucuucaccaucau

SEQ ID NO: 64384 - RNA, 22 nt, Artificial Sequence
  LRRK2 RNA guide
uuuuugauguucuucaccauca

SEQ ID NO: 64385 - RNA, 22 nt, Artificial Sequence
  LRRK2 RNA guide
uuuuuugauguucuucaccauc

SEQ ID NO: 64386 - RNA, 20 nt, Artificial Sequence
  LRRK2 RNA guide
aaugauggcgaagaacauca

SEQ ID NO: 64387 - RNA, 20 nt, Artificial Sequence
  LRRK2 RNA guide
agauuuuuugauguucuucg

SEQ ID NO: 64388 - RNA, 20 nt, Artificial Sequence
  LRRK2 RNA guide
aguuuuaaugauggcgaaga

SEQ ID NO: 64389 - RNA, 20 nt, Artificial Sequence
  LRRK2 RNA guide
auaguuuuaaugauggcgaa

SEQ ID NO: 64390 - RNA, 20 nt, Artificial Sequence
  LRRK2 RNA guide
auauaguuuuaaugauggcg

SEQ ID NO: 64391 - RNA, 20 nt, Artificial Sequence
  LRRK2 RNA guide
augauggcgaagaacaucaa

SEQ ID NO: 64392 - RNA, 20 nt, Artificial Sequence
  LRRK2 RNA guide
auggcgaagaacaucaaaaa

SEQ ID NO: 64393 - RNA, 20 nt, Artificial Sequence
  LRRK2 RNA guide
auguucuucgccaucauuaa

SEQ ID NO: 64394 - RNA, 20 nt, Artificial Sequence
  LRRK2 RNA guide
auuuuuugauguucuucgcc

SEQ ID NO: 64395 - RNA, 20 nt, Artificial Sequence
  LRRK2 RNA guide
cgccaucauuaaaacuauau

SEQ ID NO: 64396 - RNA, 20 nt, Artificial Sequence
  LRRK2 RNA guide
cuucgccaucauuaaaacua

SEQ ID NO: 64397 - RNA, 20 nt, Artificial Sequence
  LRRK2 RNA guide
gauggcgaagaacaucaaaa

SEQ ID NO: 64398 - RNA, 20 nt, Artificial Sequence
  LRRK2 RNA guide
gauguucuucgccaucauua

SEQ ID NO: 64399 - RNA, 20 nt, Artificial Sequence
  LRRK2 RNA guide
gauuuuuugauguucuucgc

SEQ ID NO: 64400 - RNA, 20 nt, Artificial Sequence
  LRRK2 RNA guide
gcgaagaacaucaaaaaauc

SEQ ID NO: 64401 - RNA, 20 nt, Artificial Sequence
  LRRK2 RNA guide
ggcgaagaacaucaaaaaau

SEQ ID NO: 64402 - RNA, 20 nt, Artificial Sequence
  LRRK2 RNA guide
guucuucgccaucauuaaaa

SEQ ID NO: 64403 - RNA, 20 nt, Artificial Sequence
  LRRK2 RNA guide
guuuuaaugauggcgaagaa

SEQ ID NO: 64404 - RNA, 20 nt, Artificial Sequence
  LRRK2 RNA guide
uaaugauggcgaagaacauc

SEQ ID NO: 64405 - RNA, 20 nt, Artificial Sequence
  LRRK2 RNA guide
uaguuuuaaugauggcgaag

SEQ ID NO: 64406 - RNA, 20 nt, Artificial Sequence
  LRRK2 RNA guide
uauaguuuuaaugauggcga

SEQ ID NO: 64407 - RNA, 20 nt, Artificial Sequence
  LRRK2 RNA guide
ucgccaucauuaaaacuaua

SEQ ID NO: 64408 - RNA, 20 nt, Artificial Sequence
  LRRK2 RNA guide
ucuucgccaucauuaaaacu

SEQ ID NO: 64409 - RNA, 20 nt, Artificial Sequence
  LRRK2 RNA guide
ugauggcgaagaacaucaaa

SEQ ID NO: 64410 - RNA, 20 nt, Artificial Sequence
  LRRK2 RNA guide
ugauguucuucgccaucauu

SEQ ID NO: 64411 - RNA, 20 nt, Artificial Sequence
  LRRK2 RNA guide
uggcgaagaacaucaaaaaa

SEQ ID NO: 64412 - RNA, 20 nt, Artificial Sequence
  LRRK2 RNA guide
uguucuucgccaucauuaaa

SEQ ID NO: 64413 - RNA, 20 nt, Artificial Sequence
  LRRK2 RNA guide
uuaaugauggcgaagaacau

SEQ ID NO: 64414 - RNA, 20 nt, Artificial Sequence
  LRRK2 RNA guide
uucgccaucauuaaaacuau

SEQ ID NO: 64415 - RNA, 20 nt, Artificial Sequence
  LRRK2 RNA guide
uucuucgccaucauuaaaac

SEQ ID NO: 64416 - RNA, 20 nt, Artificial Sequence
  LRRK2 RNA guide
uugauguucuucgccaucau

SEQ ID NO: 64417 - RNA, 20 nt, Artificial Sequence
  LRRK2 RNA guide
uuuaaugauggcgaagaaca

SEQ ID NO: 64418 - RNA, 20 nt, Artificial Sequence
  LRRK2 RNA guide
uuugauguucuucgccauca

SEQ ID NO: 64419 - RNA, 20 nt, Artificial Sequence
  LRRK2 RNA guide
uuuuaaugauggcgaagaac

SEQ ID NO: 64420 - RNA, 20 nt, Artificial Sequence
  LRRK2 RNA guide
uuuugauguucuucgccauc

SEQ ID NO: 64421 - RNA, 20 nt, Artificial Sequence
  LRRK2 RNA guide
uuuuugauguucuucgccau

SEQ ID NO: 64422 - RNA, 20 nt, Artificial Sequence
  LRRK2 RNA guide
uuuuuugauguucuucgcca

SEQ ID NO: 64423 - RNA, 21 nt, Artificial Sequence
  LRRK2 RNA guide
aaugauggcgaagaacaucaa

SEQ ID NO: 64424 - RNA, 21 nt, Artificial Sequence
  LRRK2 RNA guide
agauuuuuugauguucuucgc

SEQ ID NO: 64425 - RNA, 21 nt, Artificial Sequence
  LRRK2 RNA guide
aguuuuaaugauggcgaagaa

SEQ ID NO: 64426 - RNA, 21 nt, Artificial Sequence
  LRRK2 RNA guide
auaguuuuaaugauggcgaag

SEQ ID NO: 64427 - RNA, 21 nt, Artificial Sequence
  LRRK2 RNA guide
augauggcgaagaacaucaaa

SEQ ID NO: 64428 - RNA, 21 nt, Artificial Sequence
  LRRK2 RNA guide
auggcgaagaacaucaaaaaa

SEQ ID NO: 64429 - RNA, 21 nt, Artificial Sequence
  LRRK2 RNA guide
auguucuucgccaucauuaaa

SEQ ID NO: 64430 - RNA, 21 nt, Artificial Sequence
  LRRK2 RNA guide
auuuuuugauguucuucgcca

SEQ ID NO: 64431 - RNA, 21 nt, Artificial Sequence
  LRRK2 RNA guide
cuucgccaucauuaaaacuau

SEQ ID NO: 64432 - RNA, 21 nt, Artificial Sequence
  LRRK2 RNA guide
gauggcgaagaacaucaaaaa

SEQ ID NO: 64433 - RNA, 21 nt, Artificial Sequence
  LRRK2 RNA guide
gauguucuucgccaucauuaa

SEQ ID NO: 64434 - RNA, 21 nt, Artificial Sequence
  LRRK2 RNA guide
gauuuuuugauguucuucgcc

SEQ ID NO: 64435 - RNA, 21 nt, Artificial Sequence
  LRRK2 RNA guide
gcgaagaacaucaaaaaaucu

SEQ ID NO: 64436 - RNA, 21 nt, Artificial Sequence
  LRRK2 RNA guide
ggcgaagaacaucaaaaaauc

SEQ ID NO: 64437 - RNA, 21 nt, Artificial Sequence
  LRRK2 RNA guide
guucuucgccaucauuaaaac

SEQ ID NO: 64438 - RNA, 21 nt, Artificial Sequence
  LRRK2 RNA guide
guuuuaaugauggcgaagaac

SEQ ID NO: 64439 - RNA, 21 nt, Artificial Sequence
  LRRK2 RNA guide
uaaugauggcgaagaacauca

SEQ ID NO: 64440 - RNA, 21 nt, Artificial Sequence
  LRRK2 RNA guide
uaguuuuaaugauggcgaaga

SEQ ID NO: 64441 - RNA, 21 nt, Artificial Sequence
  LRRK2 RNA guide
ucuucgccaucauuaaaacua

SEQ ID NO: 64442 - RNA, 21 nt, Artificial Sequence
  LRRK2 RNA guide
ugauggcgaagaacaucaaaa

SEQ ID NO: 64443 - RNA, 21 nt, Artificial Sequence
  LRRK2 RNA guide
ugauguucuucgccaucauua

SEQ ID NO: 64444 - RNA, 21 nt, Artificial Sequence
  LRRK2 RNA guide
uggcgaagaacaucaaaaaau

SEQ ID NO: 64445 - RNA, 21 nt, Artificial Sequence
  LRRK2 RNA guide
uguucuucgccaucauuaaaa

SEQ ID NO: 64446 - RNA, 21 nt, Artificial Sequence
  LRRK2 RNA guide
uuaaugauggcgaagaacauc

SEQ ID NO: 64447 - RNA, 21 nt, Artificial Sequence
  LRRK2 RNA guide
uucuucgccaucauuaaaacu

SEQ ID NO: 64448 - RNA, 21 nt, Artificial Sequence
  LRRK2 RNA guide
uugauguucuucgccaucauu

SEQ ID NO: 64449 - RNA, 21 nt, Artificial Sequence
  LRRK2 RNA guide
uuuaaugauggcgaagaacau

SEQ ID NO: 64450 - RNA, 21 nt, Artificial Sequence
  LRRK2 RNA guide
uuugauguucuucgccaucau

SEQ ID NO: 64451 - RNA, 21 nt, Artificial Sequence
  LRRK2 RNA guide
uuuuaaugauggcgaagaaca

SEQ ID NO: 64452 - RNA, 21 nt, Artificial Sequence
  LRRK2 RNA guide
uuuugauguucuucgccauca

SEQ ID NO: 64453 - RNA, 21 nt, Artificial Sequence
  LRRK2 RNA guide
uuuuugauguucuucgccauc

SEQ ID NO: 64454 - RNA, 21 nt, Artificial Sequence
  LRRK2 RNA guide
uuuuuugauguucuucgccau

SEQ ID NO: 64455 - RNA, 22 nt, Artificial Sequence
  LRRK2 RNA guide
aagauuuuuugauguucuucgc

SEQ ID NO: 64456 - RNA, 22 nt, Artificial Sequence
  LRRK2 RNA guide
aaugauggcgaagaacaucaaa

SEQ ID NO: 64457 - RNA, 22 nt, Artificial Sequence
  LRRK2 RNA guide
agauuuuuugauguucuucgcc

SEQ ID NO: 64458 - RNA, 22 nt, Artificial Sequence
  LRRK2 RNA guide
aguuuuaaugauggcgaagaac

SEQ ID NO: 64459 - RNA, 22 nt, Artificial Sequence
  LRRK2 RNA guide
auaguuuuaaugauggcgaaga

SEQ ID NO: 64460 - RNA, 22 nt, Artificial Sequence
  LRRK2 RNA guide
augauggcgaagaacaucaaaa

SEQ ID NO: 64461 - RNA, 22 nt, Artificial Sequence
  LRRK2 RNA guide
auggcgaagaacaucaaaaaau

SEQ ID NO: 64462 - RNA, 22 nt, Artificial Sequence
  LRRK2 RNA guide
auguucuucgccaucauuaaaa

SEQ ID NO: 64463 - RNA, 22 nt, Artificial Sequence
  LRRK2 RNA guide
auuuuuugauguucuucgccau

SEQ ID NO: 64464 - RNA, 22 nt, Artificial Sequence
  LRRK2 RNA guide
cuucgccaucauuaaaacuaua

SEQ ID NO: 64465 - RNA, 22 nt, Artificial Sequence
  LRRK2 RNA guide
gauggcgaagaacaucaaaaaa

SEQ ID NO: 64466 - RNA, 22 nt, Artificial Sequence
  LRRK2 RNA guide
gauguucuucgccaucauuaaa

SEQ ID NO: 64467 - RNA, 22 nt, Artificial Sequence
  LRRK2 RNA guide
gauuuuuugauguucuucgcca

SEQ ID NO: 64468 - RNA, 22 nt, Artificial Sequence
  LRRK2 RNA guide
gcgaagaacaucaaaaaaucuu

SEQ ID NO: 64469 - RNA, 22 nt, Artificial Sequence
  LRRK2 RNA guide
ggcgaagaacaucaaaaaaucu

SEQ ID NO: 64470 - RNA, 22 nt, Artificial Sequence
  LRRK2 RNA guide
guucuucgccaucauuaaaacu

SEQ ID NO: 64471 - RNA, 22 nt, Artificial Sequence
  LRRK2 RNA guide
guuuuaaugauggcgaagaaca

SEQ ID NO: 64472 - RNA, 22 nt, Artificial Sequence
  LRRK2 RNA guide
uaaugauggcgaagaacaucaa

SEQ ID NO: 64473 - RNA, 22 nt, Artificial Sequence
  LRRK2 RNA guide
uaguuuuaaugauggcgaagaa

SEQ ID NO: 64474 - RNA, 22 nt, Artificial Sequence
  LRRK2 RNA guide
uauaguuuuaaugauggcgaag

SEQ ID NO: 64475 - RNA, 22 nt, Artificial Sequence
  LRRK2 RNA guide
ucuucgccaucauuaaaacuau

SEQ ID NO: 64476 - RNA, 22 nt, Artificial Sequence
  LRRK2 RNA guide
ugauggcgaagaacaucaaaaa

SEQ ID NO: 64477 - RNA, 22 nt, Artificial Sequence
  LRRK2 RNA guide
ugauguucuucgccaucauuaa

SEQ ID NO: 64478 - RNA, 22 nt, Artificial Sequence
  LRRK2 RNA guide
uggcgaagaacaucaaaaaauc

SEQ ID NO: 64479 - RNA, 22 nt, Artificial Sequence
  LRRK2 RNA guide
uguucuucgccaucauuaaaac

SEQ ID NO: 64480 - RNA, 22 nt, Artificial Sequence
  LRRK2 RNA guide
uuaaugauggcgaagaacauca

SEQ ID NO: 64481 - RNA, 22 nt, Artificial Sequence
  LRRK2 RNA guide
uucuucgccaucauuaaaacua

SEQ ID NO: 64482 - RNA, 22 nt, Artificial Sequence
  LRRK2 RNA guide
uugauguucuucgccaucauua

SEQ ID NO: 64483 - RNA, 22 nt, Artificial Sequence
  LRRK2 RNA guide
uuuaaugauggcgaagaacauc

SEQ ID NO: 64484 - RNA, 22 nt, Artificial Sequence
  LRRK2 RNA guide
uuugauguucuucgccaucauu

SEQ ID NO: 64485 - RNA, 22 nt, Artificial Sequence
  LRRK2 RNA guide
uuuuaaugauggcgaagaacau

SEQ ID NO: 64486 - RNA, 22 nt, Artificial Sequence
  LRRK2 RNA guide
uuuugauguucuucgccaucau

SEQ ID NO: 64487 - RNA, 22 nt, Artificial Sequence
  LRRK2 RNA guide
uuuuugauguucuucgccauca

SEQ ID NO: 64488 - RNA, 22 nt, Artificial Sequence
  LRRK2 RNA guide
uuuuuugauguucuucgccauc

SEQ ID NO: 64489 - RNA, 20 nt, Artificial Sequence
  LRRK2 RNA guide
cugaaucuagaauacaagau

SEQ ID NO: 64490 - RNA, 20 nt, Artificial Sequence
  LRRK2 RNA guide
ucugaaucuagaauacaaga

SEQ ID NO: 64491 - RNA, 20 nt, Artificial Sequence
  LRRK2 RNA guide
accaacaaaaucuuguauuc

SEQ ID NO: 64492 - RNA, 20 nt, Artificial Sequence
  LRRK2 RNA guide
agaauacaagauuuuguugg

SEQ ID NO: 64493 - RNA, 20 nt, Artificial Sequence
  LRRK2 RNA guide
ccaacaaaaucuuguauucu

SEQ ID NO: 64494 - RNA, 20 nt, Artificial Sequence
  LRRK2 RNA guide
gaauacaagauuuuguuggu

SEQ ID NO: 64495 - RNA, 22 nt, Artificial Sequence
  LRRK2 RNA guide
ccaacaaaaucuuguauucuag

SEQ ID NO: 64496 - RNA, 22 nt, Artificial Sequence
  LRRK2 RNA guide
cuagaauacaagauuuuguugg

SEQ ID NO: 64497 - RNA, 20 nt, Artificial Sequence
  LRRK2 RNA guide
aacaugucugccauauaaua

SEQ ID NO: 64498 - RNA, 20 nt, Artificial Sequence
  LRRK2 RNA guide
aauacauggaccuaauuuac

SEQ ID NO: 64499 - RNA, 20 nt, Artificial Sequence
  LRRK2 RNA guide
aauuuaccaacaugucugcc

SEQ ID NO: 64500 - RNA, 20 nt, Artificial Sequence
  LRRK2 RNA guide
acauggaccuaauuuaccaa

SEQ ID NO: 64501 - RNA, 20 nt, Artificial Sequence
  LRRK2 RNA guide
acaugucugccauauaauaa

SEQ ID NO: 64502 - RNA, 20 nt, Artificial Sequence
  LRRK2 RNA guide
acauguugguaaauuagguc

SEQ ID NO: 64503 - RNA, 20 nt, Artificial Sequence
  LRRK2 RNA guide
accaacaugucugccauaua

SEQ ID NO: 64504 - RNA, 20 nt, Artificial Sequence
  LRRK2 RNA guide
accuaauuuaccaacauguc

SEQ ID NO: 64505 - RNA, 20 nt, Artificial Sequence
  LRRK2 RNA guide
agacauguugguaaauuagg

SEQ ID NO: 64506 - RNA, 20 nt, Artificial Sequence
  LRRK2 RNA guide
agcuguuauuauauggcaga

SEQ ID NO: 64507 - RNA, 20 nt, Artificial Sequence
  LRRK2 RNA guide
auacauggaccuaauuuacc

SEQ ID NO: 64508 - RNA, 20 nt, Artificial Sequence
  LRRK2 RNA guide
auauggcagacauguuggua

SEQ ID NO: 64509 - RNA, 20 nt, Artificial Sequence
  LRRK2 RNA guide
auggaccuaauuuaccaaca

SEQ ID NO: 64510 - RNA, 20 nt, Artificial Sequence
  LRRK2 RNA guide
auggcagacauguugguaaa

SEQ ID NO: 64511 - RNA, 20 nt, Artificial Sequence
  LRRK2 RNA guide
auguugguaaauuaggucca

SEQ ID NO: 64512 - RNA, 20 nt, Artificial Sequence
  LRRK2 RNA guide
auuuaccaacaugucugcca

SEQ ID NO: 64513 - RNA, 20 nt, Artificial Sequence
  LRRK2 RNA guide
caacaugucugccauauaau

SEQ ID NO: 64514 - RNA, 20 nt, Artificial Sequence
  LRRK2 RNA guide
caauacauggaccuaauuua

SEQ ID NO: 64515 - RNA, 20 nt, Artificial Sequence
  LRRK2 RNA guide
cagacauguugguaaauuag

SEQ ID NO: 64516 - RNA, 20 nt, Artificial Sequence
  LRRK2 RNA guide
cagcuguuauuauauggcag

SEQ ID NO: 64517 - RNA, 20 nt, Artificial Sequence
  LRRK2 RNA guide
cauggaccuaauuuaccaac

SEQ ID NO: 64518 - RNA, 20 nt, Artificial Sequence
  LRRK2 RNA guide
cauguugguaaauuaggucc

SEQ ID NO: 64519 - RNA, 20 nt, Artificial Sequence
  LRRK2 RNA guide
ccaacaugucugccauauaa

SEQ ID NO: 64520 - RNA, 20 nt, Artificial Sequence
  LRRK2 RNA guide
ccuaauuuaccaacaugucu

SEQ ID NO: 64521 - RNA, 20 nt, Artificial Sequence
  LRRK2 RNA guide
cuaauuuaccaacaugucug

SEQ ID NO: 64522 - RNA, 20 nt, Artificial Sequence
  LRRK2 RNA guide
cuguuauuauauggcagaca

SEQ ID NO: 64523 - RNA, 20 nt, Artificial Sequence
  LRRK2 RNA guide
gacauguugguaaauuaggu

SEQ ID NO: 64524 - RNA, 20 nt, Artificial Sequence
  LRRK2 RNA guide
gaccuaauuuaccaacaugu

SEQ ID NO: 64525 - RNA, 20 nt, Artificial Sequence
  LRRK2 RNA guide
gcagacauguugguaaauua

SEQ ID NO: 64526 - RNA, 20 nt, Artificial Sequence
  LRRK2 RNA guide
gcuguuauuauauggcagac

SEQ ID NO: 64527 - RNA, 20 nt, Artificial Sequence
  LRRK2 RNA guide
ggaccuaauuuaccaacaug

SEQ ID NO: 64528 - RNA, 20 nt, Artificial Sequence
  LRRK2 RNA guide
ggcagacauguugguaaauu

SEQ ID NO: 64529 - RNA, 20 nt, Artificial Sequence
  LRRK2 RNA guide
guuauuauauggcagacaug

SEQ ID NO: 64530 - RNA, 20 nt, Artificial Sequence
  LRRK2 RNA guide
uaauuuaccaacaugucugc

SEQ ID NO: 64531 - RNA, 20 nt, Artificial Sequence
  LRRK2 RNA guide
uacauggaccuaauuuacca

SEQ ID NO: 64532 - RNA, 20 nt, Artificial Sequence
  LRRK2 RNA guide
uaccaacaugucugccauau

SEQ ID NO: 64533 - RNA, 20 nt, Artificial Sequence
  LRRK2 RNA guide
uauauggcagacauguuggu

SEQ ID NO: 64534 - RNA, 20 nt, Artificial Sequence
  LRRK2 RNA guide
uauggcagacauguugguaa

SEQ ID NO: 64535 - RNA, 20 nt, Artificial Sequence
  LRRK2 RNA guide
uauuauauggcagacauguu

SEQ ID NO: 64536 - RNA, 20 nt, Artificial Sequence
  LRRK2 RNA guide
uggaccuaauuuaccaacau

SEQ ID NO: 64537 - RNA, 20 nt, Artificial Sequence
  LRRK2 RNA guide
uggcagacauguugguaaau

SEQ ID NO: 64538 - RNA, 20 nt, Artificial Sequence
  LRRK2 RNA guide
uguugguaaauuagguccau

SEQ ID NO: 64539 - RNA, 20 nt, Artificial Sequence
  LRRK2 RNA guide
uuaccaacaugucugccaua

SEQ ID NO: 64540 - RNA, 20 nt, Artificial Sequence
  LRRK2 RNA guide
uuauauggcagacauguugg

SEQ ID NO: 64541 - RNA, 20 nt, Artificial Sequence
  LRRK2 RNA guide
uuauuauauggcagacaugu

SEQ ID NO: 64542 - RNA, 20 nt, Artificial Sequence
  LRRK2 RNA guide
uuuaccaacaugucugccau

SEQ ID NO: 64543 - RNA, 21 nt, Artificial Sequence
  LRRK2 RNA guide
aauacauggaccuaauuuacc

SEQ ID NO: 64544 - RNA, 21 nt, Artificial Sequence
  LRRK2 RNA guide
aauuuaccaacaugucugcca

SEQ ID NO: 64545 - RNA, 21 nt, Artificial Sequence
  LRRK2 RNA guide
acauggaccuaauuuaccaac

SEQ ID NO: 64546 - RNA, 21 nt, Artificial Sequence
  LRRK2 RNA guide
acaugucugccauauaauaac

SEQ ID NO: 64547 - RNA, 21 nt, Artificial Sequence
  LRRK2 RNA guide
acauguugguaaauuaggucc

SEQ ID NO: 64548 - RNA, 21 nt, Artificial Sequence
  LRRK2 RNA guide
accaacaugucugccauauaa

SEQ ID NO: 64549 - RNA, 21 nt, Artificial Sequence
  LRRK2 RNA guide
accuaauuuaccaacaugucu

SEQ ID NO: 64550 - RNA, 21 nt, Artificial Sequence
  LRRK2 RNA guide
agacauguugguaaauuaggu

SEQ ID NO: 64551 - RNA, 21 nt, Artificial Sequence
  LRRK2 RNA guide
agcuguuauuauauggcagac

SEQ ID NO: 64552 - RNA, 21 nt, Artificial Sequence
  LRRK2 RNA guide
auacauggaccuaauuuacca

SEQ ID NO: 64553 - RNA, 21 nt, Artificial Sequence
  LRRK2 RNA guide
auauggcagacauguugguaa

SEQ ID NO: 64554 - RNA, 21 nt, Artificial Sequence
  LRRK2 RNA guide
auggaccuaauuuaccaacau

SEQ ID NO: 64555 - RNA, 21 nt, Artificial Sequence
  LRRK2 RNA guide
auggcagacauguugguaaau

SEQ ID NO: 64556 - RNA, 21 nt, Artificial Sequence
  LRRK2 RNA guide
auguugguaaauuagguccau

SEQ ID NO: 64557 - RNA, 21 nt, Artificial Sequence
  LRRK2 RNA guide
auuauauggcagacauguugg

SEQ ID NO: 64558 - RNA, 21 nt, Artificial Sequence
  LRRK2 RNA guide
auuuaccaacaugucugccau

SEQ ID NO: 64559 - RNA, 21 nt, Artificial Sequence
  LRRK2 RNA guide
caacaugucugccauauaaua

SEQ ID NO: 64560 - RNA, 21 nt, Artificial Sequence
  LRRK2 RNA guide
caauacauggaccuaauuuac

SEQ ID NO: 64561 - RNA, 21 nt, Artificial Sequence
  LRRK2 RNA guide
cagacauguugguaaauuagg

SEQ ID NO: 64562 - RNA, 21 nt, Artificial Sequence
  LRRK2 RNA guide
cagcuguuauuauauggcaga

SEQ ID NO: 64563 - RNA, 21 nt, Artificial Sequence
  LRRK2 RNA guide
cauggaccuaauuuaccaaca

SEQ ID NO: 64564 - RNA, 21 nt, Artificial Sequence
  LRRK2 RNA guide
cauguugguaaauuaggucca

SEQ ID NO: 64565 - RNA, 21 nt, Artificial Sequence
  LRRK2 RNA guide
ccaacaugucugccauauaau

SEQ ID NO: 64566 - RNA, 21 nt, Artificial Sequence
  LRRK2 RNA guide
ccuaauuuaccaacaugucug

SEQ ID NO: 64567 - RNA, 21 nt, Artificial Sequence
  LRRK2 RNA guide
cuaauuuaccaacaugucugc

SEQ ID NO: 64568 - RNA, 21 nt, Artificial Sequence
  LRRK2 RNA guide
cuguuauuauauggcagacau

SEQ ID NO: 64569 - RNA, 21 nt, Artificial Sequence
  LRRK2 RNA guide
gacauguugguaaauuagguc

SEQ ID NO: 64570 - RNA, 21 nt, Artificial Sequence
  LRRK2 RNA guide
gaccuaauuuaccaacauguc

SEQ ID NO: 64571 - RNA, 21 nt, Artificial Sequence
  LRRK2 RNA guide
gcagacauguugguaaauuag

SEQ ID NO: 64572 - RNA, 21 nt, Artificial Sequence
  LRRK2 RNA guide
gcagcuguuauuauauggcag

SEQ ID NO: 64573 - RNA, 21 nt, Artificial Sequence
  LRRK2 RNA guide
gcuguuauuauauggcagaca

SEQ ID NO: 64574 - RNA, 21 nt, Artificial Sequence
  LRRK2 RNA guide
ggaccuaauuuaccaacaugu

SEQ ID NO: 64575 - RNA, 21 nt, Artificial Sequence
  LRRK2 RNA guide
ggcagacauguugguaaauua

SEQ ID NO: 64576 - RNA, 21 nt, Artificial Sequence
  LRRK2 RNA guide
guuauuauauggcagacaugu

SEQ ID NO: 64577 - RNA, 21 nt, Artificial Sequence
  LRRK2 RNA guide
uaauuuaccaacaugucugcc

SEQ ID NO: 64578 - RNA, 21 nt, Artificial Sequence
  LRRK2 RNA guide
uacauggaccuaauuuaccaa

SEQ ID NO: 64579 - RNA, 21 nt, Artificial Sequence
  LRRK2 RNA guide
uaccaacaugucugccauaua

SEQ ID NO: 64580 - RNA, 21 nt, Artificial Sequence
  LRRK2 RNA guide
uauauggcagacauguuggua

SEQ ID NO: 64581 - RNA, 21 nt, Artificial Sequence
  LRRK2 RNA guide
uauggcagacauguugguaaa

SEQ ID NO: 64582 - RNA, 21 nt, Artificial Sequence
  LRRK2 RNA guide
uauuauauggcagacauguug

SEQ ID NO: 64583 - RNA, 21 nt, Artificial Sequence
  LRRK2 RNA guide
uggaccuaauuuaccaacaug

SEQ ID NO: 64584 - RNA, 21 nt, Artificial Sequence
  LRRK2 RNA guide
uggcagacauguugguaaauu

SEQ ID NO: 64585 - RNA, 21 nt, Artificial Sequence
  LRRK2 RNA guide
uguuauuauauggcagacaug

SEQ ID NO: 64586 - RNA, 21 nt, Artificial Sequence
  LRRK2 RNA guide
uguugguaaauuagguccaug

SEQ ID NO: 64587 - RNA, 21 nt, Artificial Sequence
  LRRK2 RNA guide
uuaccaacaugucugccauau

SEQ ID NO: 64588 - RNA, 21 nt, Artificial Sequence
  LRRK2 RNA guide
uuauauggcagacauguuggu

SEQ ID NO: 64589 - RNA, 21 nt, Artificial Sequence
  LRRK2 RNA guide
uuuaccaacaugucugccaua

SEQ ID NO: 64590 - RNA, 22 nt, Artificial Sequence
  LRRK2 RNA guide
aacaugucugccauauaauaac

SEQ ID NO: 64591 - RNA, 22 nt, Artificial Sequence
  LRRK2 RNA guide
aauacauggaccuaauuuacca

SEQ ID NO: 64592 - RNA, 22 nt, Artificial Sequence
  LRRK2 RNA guide
aauuuaccaacaugucugccau

SEQ ID NO: 64593 - RNA, 22 nt, Artificial Sequence
  LRRK2 RNA guide
acaauacauggaccuaauuuac

SEQ ID NO: 64594 - RNA, 22 nt, Artificial Sequence
  LRRK2 RNA guide
acauggaccuaauuuaccaaca

SEQ ID NO: 64595 - RNA, 22 nt, Artificial Sequence
  LRRK2 RNA guide
acaugucugccauauaauaaca

SEQ ID NO: 64596 - RNA, 22 nt, Artificial Sequence
  LRRK2 RNA guide
acauguugguaaauuaggucca

SEQ ID NO: 64597 - RNA, 22 nt, Artificial Sequence
  LRRK2 RNA guide
accaacaugucugccauauaau

SEQ ID NO: 64598 - RNA, 22 nt, Artificial Sequence
  LRRK2 RNA guide
accuaauuuaccaacaugucug

SEQ ID NO: 64599 - RNA, 22 nt, Artificial Sequence
  LRRK2 RNA guide
agacauguugguaaauuagguc

SEQ ID NO: 64600 - RNA, 22 nt, Artificial Sequence
  LRRK2 RNA guide
agcuguuauuauauggcagaca

SEQ ID NO: 64601 - RNA, 22 nt, Artificial Sequence
  LRRK2 RNA guide
auacauggaccuaauuuaccaa

SEQ ID NO: 64602 - RNA, 22 nt, Artificial Sequence
  LRRK2 RNA guide
auauggcagacauguugguaaa

SEQ ID NO: 64603 - RNA, 22 nt, Artificial Sequence
  LRRK2 RNA guide
auggaccuaauuuaccaacaug

SEQ ID NO: 64604 - RNA, 22 nt, Artificial Sequence
  LRRK2 RNA guide
auggcagacauguugguaaauu

SEQ ID NO: 64605 - RNA, 22 nt, Artificial Sequence
  LRRK2 RNA guide
auguugguaaauuagguccaug

SEQ ID NO: 64606 - RNA, 22 nt, Artificial Sequence
  LRRK2 RNA guide
auuauauggcagacauguuggu

SEQ ID NO: 64607 - RNA, 22 nt, Artificial Sequence
  LRRK2 RNA guide
auuuaccaacaugucugccaua

SEQ ID NO: 64608 - RNA, 22 nt, Artificial Sequence
  LRRK2 RNA guide
caacaugucugccauauaauaa

SEQ ID NO: 64609 - RNA, 22 nt, Artificial Sequence
  LRRK2 RNA guide
caauacauggaccuaauuuacc

SEQ ID NO: 64610 - RNA, 22 nt, Artificial Sequence
  LRRK2 RNA guide
cagacauguugguaaauuaggu

SEQ ID NO: 64611 - RNA, 22 nt, Artificial Sequence
  LRRK2 RNA guide
cagcuguuauuauauggcagac

SEQ ID NO: 64612 - RNA, 22 nt, Artificial Sequence
  LRRK2 RNA guide
cauggaccuaauuuaccaacau

SEQ ID NO: 64613 - RNA, 22 nt, Artificial Sequence
  LRRK2 RNA guide
cauguugguaaauuagguccau

SEQ ID NO: 64614 - RNA, 22 nt, Artificial Sequence
  LRRK2 RNA guide
ccaacaugucugccauauaaua

SEQ ID NO: 64615 - RNA, 22 nt, Artificial Sequence
  LRRK2 RNA guide
ccuaauuuaccaacaugucugc

SEQ ID NO: 64616 - RNA, 22 nt, Artificial Sequence
  LRRK2 RNA guide
cuaauuuaccaacaugucugcc

SEQ ID NO: 64617 - RNA, 22 nt, Artificial Sequence
  LRRK2 RNA guide
cuguuauuauauggcagacaug

SEQ ID NO: 64618 - RNA, 22 nt, Artificial Sequence
  LRRK2 RNA guide
gacaauacauggaccuaauuua

SEQ ID NO: 64619 - RNA, 22 nt, Artificial Sequence
  LRRK2 RNA guide
gacauguugguaaauuaggucc

SEQ ID NO: 64620 - RNA, 22 nt, Artificial Sequence
  LRRK2 RNA guide
gaccuaauuuaccaacaugucu

SEQ ID NO: 64621 - RNA, 22 nt, Artificial Sequence
  LRRK2 RNA guide
gcagacauguugguaaauuagg

SEQ ID NO: 64622 - RNA, 22 nt, Artificial Sequence
  LRRK2 RNA guide
gcagcuguuauuauauggcaga

SEQ ID NO: 64623 - RNA, 22 nt, Artificial Sequence
  LRRK2 RNA guide
gcuguuauuauauggcagacau

SEQ ID NO: 64624 - RNA, 22 nt, Artificial Sequence
  LRRK2 RNA guide
ggaccuaauuuaccaacauguc

SEQ ID NO: 64625 - RNA, 22 nt, Artificial Sequence
  LRRK2 RNA guide
ggcagacauguugguaaauuag

SEQ ID NO: 64626 - RNA, 22 nt, Artificial Sequence
  LRRK2 RNA guide
guuauuauauggcagacauguu

SEQ ID NO: 64627 - RNA, 22 nt, Artificial Sequence
  LRRK2 RNA guide
uaauuuaccaacaugucugcca

SEQ ID NO: 64628 - RNA, 22 nt, Artificial Sequence
  LRRK2 RNA guide
uacauggaccuaauuuaccaac

SEQ ID NO: 64629 - RNA, 22 nt, Artificial Sequence
  LRRK2 RNA guide
uaccaacaugucugccauauaa

SEQ ID NO: 64630 - RNA, 22 nt, Artificial Sequence
  LRRK2 RNA guide
uauauggcagacauguugguaa

SEQ ID NO: 64631 - RNA, 22 nt, Artificial Sequence
  LRRK2 RNA guide
uauggcagacauguugguaaau

SEQ ID NO: 64632 - RNA, 22 nt, Artificial Sequence
  LRRK2 RNA guide
uauuauauggcagacauguugg

SEQ ID NO: 64633 - RNA, 22 nt, Artificial Sequence
  LRRK2 RNA guide
ugcagcuguuauuauauggcag

SEQ ID NO: 64634 - RNA, 22 nt, Artificial Sequence
  LRRK2 RNA guide
uggaccuaauuuaccaacaugu

SEQ ID NO: 64635 - RNA, 22 nt, Artificial Sequence
  LRRK2 RNA guide
uggcagacauguugguaaauua

SEQ ID NO: 64636 - RNA, 22 nt, Artificial Sequence
  LRRK2 RNA guide
uguuauuauauggcagacaugu

SEQ ID NO: 64637 - RNA, 22 nt, Artificial Sequence
  LRRK2 RNA guide
uguugguaaauuagguccaugu

SEQ ID NO: 64638 - RNA, 22 nt, Artificial Sequence
  LRRK2 RNA guide
uuaccaacaugucugccauaua

SEQ ID NO: 64639 - RNA, 22 nt, Artificial Sequence
  LRRK2 RNA guide
uuauauggcagacauguuggua

SEQ ID NO: 64640 - RNA, 22 nt, Artificial Sequence
  LRRK2 RNA guide
uuauuauauggcagacauguug

SEQ ID NO: 64641 - RNA, 22 nt, Artificial Sequence
  LRRK2 RNA guide
uuuaccaacaugucugccauau

SEQ ID NO: 64642 - RNA, 20 nt, Artificial Sequence
  LRRK2 RNA guide
aacgucugccauauaauaac

SEQ ID NO: 64643 - RNA, 20 nt, Artificial Sequence
  LRRK2 RNA guide
aauuuaccaacgucugccau

SEQ ID NO: 64644 - RNA, 20 nt, Artificial Sequence
  LRRK2 RNA guide
accaacgucugccauauaau

SEQ ID NO: 64645 - RNA, 20 nt, Artificial Sequence
  LRRK2 RNA guide
accuaauuuaccaacgucug

SEQ ID NO: 64646 - RNA, 20 nt, Artificial Sequence
  LRRK2 RNA guide
acgucugccauauaauaaca

SEQ ID NO: 64647 - RNA, 20 nt, Artificial Sequence
  LRRK2 RNA guide
acguugguaaauuaggucca

SEQ ID NO: 64648 - RNA, 20 nt, Artificial Sequence
  LRRK2 RNA guide
agacguugguaaauuagguc

SEQ ID NO: 64649 - RNA, 20 nt, Artificial Sequence
  LRRK2 RNA guide
auauggcagacguugguaaa

SEQ ID NO: 64650 - RNA, 20 nt, Artificial Sequence
  LRRK2 RNA guide
auggaccuaauuuaccaacg

SEQ ID NO: 64651 - RNA, 20 nt, Artificial Sequence
  LRRK2 RNA guide
auggcagacguugguaaauu

SEQ ID NO: 64652 - RNA, 20 nt, Artificial Sequence
  LRRK2 RNA guide
auuauauggcagacguuggu

SEQ ID NO: 64653 - RNA, 20 nt, Artificial Sequence
  LRRK2 RNA guide
auuuaccaacgucugccaua

SEQ ID NO: 64654 - RNA, 20 nt, Artificial Sequence
  LRRK2 RNA guide
caacgucugccauauaauaa

SEQ ID NO: 64655 - RNA, 20 nt, Artificial Sequence
  LRRK2 RNA guide
cagacguugguaaauuaggu

SEQ ID NO: 64656 - RNA, 20 nt, Artificial Sequence
  LRRK2 RNA guide
ccaacgucugccauauaaua

SEQ ID NO: 64657 - RNA, 20 nt, Artificial Sequence
  LRRK2 RNA guide
ccuaauuuaccaacgucugc

SEQ ID NO: 64658 - RNA, 20 nt, Artificial Sequence
  LRRK2 RNA guide
cguugguaaauuagguccau

SEQ ID NO: 64659 - RNA, 20 nt, Artificial Sequence
  LRRK2 RNA guide
cuaauuuaccaacgucugcc

SEQ ID NO: 64660 - RNA, 20 nt, Artificial Sequence
  LRRK2 RNA guide
cuguuauuauauggcagacg

SEQ ID NO: 64661 - RNA, 20 nt, Artificial Sequence
  LRRK2 RNA guide
gaccuaauuuaccaacgucu

SEQ ID NO: 64662 - RNA, 20 nt, Artificial Sequence
  LRRK2 RNA guide
gacguugguaaauuaggucc

SEQ ID NO: 64663 - RNA, 20 nt, Artificial Sequence
  LRRK2 RNA guide
gcagacguugguaaauuagg

SEQ ID NO: 64664 - RNA, 20 nt, Artificial Sequence
  LRRK2 RNA guide
gcagcuguuauuauauggca

SEQ ID NO: 64665 - RNA, 20 nt, Artificial Sequence
  LRRK2 RNA guide
ggaccuaauuuaccaacguc

SEQ ID NO: 64666 - RNA, 20 nt, Artificial Sequence
  LRRK2 RNA guide
ggcagacguugguaaauuag

SEQ ID NO: 64667 - RNA, 20 nt, Artificial Sequence
  LRRK2 RNA guide
guuauuauauggcagacguu

SEQ ID NO: 64668 - RNA, 20 nt, Artificial Sequence
  LRRK2 RNA guide
uaauuuaccaacgucugcca

SEQ ID NO: 64669 - RNA, 20 nt, Artificial Sequence
  LRRK2 RNA guide
uaccaacgucugccauauaa

SEQ ID NO: 64670 - RNA, 20 nt, Artificial Sequence
  LRRK2 RNA guide
uauauggcagacguugguaa

SEQ ID NO: 64671 - RNA, 20 nt, Artificial Sequence
  LRRK2 RNA guide
uauggcagacguugguaaau

SEQ ID NO: 64672 - RNA, 20 nt, Artificial Sequence
  LRRK2 RNA guide
uauuauauggcagacguugg

SEQ ID NO: 64673 - RNA, 20 nt, Artificial Sequence
  LRRK2 RNA guide
ugcagcuguuauuauauggc

SEQ ID NO: 64674 - RNA, 20 nt, Artificial Sequence
  LRRK2 RNA guide
uggaccuaauuuaccaacgu

SEQ ID NO: 64675 - RNA, 20 nt, Artificial Sequence
  LRRK2 RNA guide
uggcagacguugguaaauua

SEQ ID NO: 64676 - RNA, 20 nt, Artificial Sequence
  LRRK2 RNA guide
uguuauuauauggcagacgu

SEQ ID NO: 64677 - RNA, 20 nt, Artificial Sequence
  LRRK2 RNA guide
uuaccaacgucugccauaua

SEQ ID NO: 64678 - RNA, 20 nt, Artificial Sequence
  LRRK2 RNA guide
uuauauggcagacguuggua

SEQ ID NO: 64679 - RNA, 20 nt, Artificial Sequence
  LRRK2 RNA guide
uuauuauauggcagacguug

SEQ ID NO: 64680 - RNA, 20 nt, Artificial Sequence
  LRRK2 RNA guide
uuuaccaacgucugccauau

SEQ ID NO: 64681 - RNA, 21 nt, Artificial Sequence
  LRRK2 RNA guide
aacgucugccauauaauaaca

SEQ ID NO: 64682 - RNA, 21 nt, Artificial Sequence
  LRRK2 RNA guide
aauuuaccaacgucugccaua

SEQ ID NO: 64683 - RNA, 21 nt, Artificial Sequence
  LRRK2 RNA guide
accaacgucugccauauaaua

SEQ ID NO: 64684 - RNA, 21 nt, Artificial Sequence
  LRRK2 RNA guide
accuaauuuaccaacgucugc

SEQ ID NO: 64685 - RNA, 21 nt, Artificial Sequence
  LRRK2 RNA guide
acgucugccauauaauaacag

SEQ ID NO: 64686 - RNA, 21 nt, Artificial Sequence
  LRRK2 RNA guide
acguugguaaauuagguccau

SEQ ID NO: 64687 - RNA, 21 nt, Artificial Sequence
  LRRK2 RNA guide
agacguugguaaauuaggucc

SEQ ID NO: 64688 - RNA, 21 nt, Artificial Sequence
  LRRK2 RNA guide
auauggcagacguugguaaau

SEQ ID NO: 64689 - RNA, 21 nt, Artificial Sequence
  LRRK2 RNA guide
auggaccuaauuuaccaacgu

SEQ ID NO: 64690 - RNA, 21 nt, Artificial Sequence
  LRRK2 RNA guide
auggcagacguugguaaauua

SEQ ID NO: 64691 - RNA, 21 nt, Artificial Sequence
  LRRK2 RNA guide
auuauauggcagacguuggua

SEQ ID NO: 64692 - RNA, 21 nt, Artificial Sequence
  LRRK2 RNA guide
auuuaccaacgucugccauau

SEQ ID NO: 64693 - RNA, 21 nt, Artificial Sequence
  LRRK2 RNA guide
caacgucugccauauaauaac

SEQ ID NO: 64694 - RNA, 21 nt, Artificial Sequence
  LRRK2 RNA guide
cagacguugguaaauuagguc

SEQ ID NO: 64695 - RNA, 21 nt, Artificial Sequence
  LRRK2 RNA guide
cauggaccuaauuuaccaacg

SEQ ID NO: 64696 - RNA, 21 nt, Artificial Sequence
  LRRK2 RNA guide
ccaacgucugccauauaauaa

SEQ ID NO: 64697 - RNA, 21 nt, Artificial Sequence
  LRRK2 RNA guide
ccuaauuuaccaacgucugcc

SEQ ID NO: 64698 - RNA, 21 nt, Artificial Sequence
  LRRK2 RNA guide
cguugguaaauuagguccaug

SEQ ID NO: 64699 - RNA, 21 nt, Artificial Sequence
  LRRK2 RNA guide
cuaauuuaccaacgucugcca

SEQ ID NO: 64700 - RNA, 21 nt, Artificial Sequence
  LRRK2 RNA guide
cugcagcuguuauuauauggc

SEQ ID NO: 64701 - RNA, 21 nt, Artificial Sequence
  LRRK2 RNA guide
cuguuauuauauggcagacgu

SEQ ID NO: 64702 - RNA, 21 nt, Artificial Sequence
  LRRK2 RNA guide
gaccuaauuuaccaacgucug

SEQ ID NO: 64703 - RNA, 21 nt, Artificial Sequence
  LRRK2 RNA guide
gacguugguaaauuaggucca

SEQ ID NO: 64704 - RNA, 21 nt, Artificial Sequence
  LRRK2 RNA guide
gcagacguugguaaauuaggu

SEQ ID NO: 64705 - RNA, 21 nt, Artificial Sequence
  LRRK2 RNA guide
gcuguuauuauauggcagacg

SEQ ID NO: 64706 - RNA, 21 nt, Artificial Sequence
  LRRK2 RNA guide
ggaccuaauuuaccaacgucu

SEQ ID NO: 64707 - RNA, 21 nt, Artificial Sequence
  LRRK2 RNA guide
ggcagacguugguaaauuagg

SEQ ID NO: 64708 - RNA, 21 nt, Artificial Sequence
  LRRK2 RNA guide
guuauuauauggcagacguug

SEQ ID NO: 64709 - RNA, 21 nt, Artificial Sequence
  LRRK2 RNA guide
uaauuuaccaacgucugccau

SEQ ID NO: 64710 - RNA, 21 nt, Artificial Sequence
  LRRK2 RNA guide
uaccaacgucugccauauaau

SEQ ID NO: 64711 - RNA, 21 nt, Artificial Sequence
  LRRK2 RNA guide
uauauggcagacguugguaaa

SEQ ID NO: 64712 - RNA, 21 nt, Artificial Sequence
  LRRK2 RNA guide
uauggcagacguugguaaauu

SEQ ID NO: 64713 - RNA, 21 nt, Artificial Sequence
  LRRK2 RNA guide
uauuauauggcagacguuggu

SEQ ID NO: 64714 - RNA, 21 nt, Artificial Sequence
  LRRK2 RNA guide
ugcagcuguuauuauauggca

SEQ ID NO: 64715 - RNA, 21 nt, Artificial Sequence
  LRRK2 RNA guide
uggaccuaauuuaccaacguc

SEQ ID NO: 64716 - RNA, 21 nt, Artificial Sequence
  LRRK2 RNA guide
uggcagacguugguaaauuag

SEQ ID NO: 64717 - RNA, 21 nt, Artificial Sequence
  LRRK2 RNA guide
uguuauuauauggcagacguu

SEQ ID NO: 64718 - RNA, 21 nt, Artificial Sequence
  LRRK2 RNA guide
uuaccaacgucugccauauaa

SEQ ID NO: 64719 - RNA, 21 nt, Artificial Sequence
  LRRK2 RNA guide
uuauauggcagacguugguaa

SEQ ID NO: 64720 - RNA, 21 nt, Artificial Sequence
  LRRK2 RNA guide
uuauuauauggcagacguugg

SEQ ID NO: 64721 - RNA, 21 nt, Artificial Sequence
  LRRK2 RNA guide
uuuaccaacgucugccauaua

SEQ ID NO: 64722 - RNA, 22 nt, Artificial Sequence
  LRRK2 RNA guide
aacgucugccauauaauaacag

SEQ ID NO: 64723 - RNA, 22 nt, Artificial Sequence
  LRRK2 RNA guide
aauuuaccaacgucugccauau

SEQ ID NO: 64724 - RNA, 22 nt, Artificial Sequence
  LRRK2 RNA guide
acauggaccuaauuuaccaacg

SEQ ID NO: 64725 - RNA, 22 nt, Artificial Sequence
  LRRK2 RNA guide
accaacgucugccauauaauaa

SEQ ID NO: 64726 - RNA, 22 nt, Artificial Sequence
  LRRK2 RNA guide
accuaauuuaccaacgucugcc

SEQ ID NO: 64727 - RNA, 22 nt, Artificial Sequence
  LRRK2 RNA guide
acgucugccauauaauaacagc

SEQ ID NO: 64728 - RNA, 22 nt, Artificial Sequence
  LRRK2 RNA guide
acguugguaaauuagguccaug

SEQ ID NO: 64729 - RNA, 22 nt, Artificial Sequence
  LRRK2 RNA guide
agacguugguaaauuaggucca

SEQ ID NO: 64730 - RNA, 22 nt, Artificial Sequence
  LRRK2 RNA guide
agcuguuauuauauggcagacg

SEQ ID NO: 64731 - RNA, 22 nt, Artificial Sequence
  LRRK2 RNA guide
auauggcagacguugguaaauu

SEQ ID NO: 64732 - RNA, 22 nt, Artificial Sequence
  LRRK2 RNA guide
auggaccuaauuuaccaacguc

SEQ ID NO: 64733 - RNA, 22 nt, Artificial Sequence
  LRRK2 RNA guide
auggcagacguugguaaauuag

SEQ ID NO: 64734 - RNA, 22 nt, Artificial Sequence
  LRRK2 RNA guide
auuauauggcagacguugguaa

SEQ ID NO: 64735 - RNA, 22 nt, Artificial Sequence
  LRRK2 RNA guide
auuuaccaacgucugccauaua

SEQ ID NO: 64736 - RNA, 22 nt, Artificial Sequence
  LRRK2 RNA guide
caacgucugccauauaauaaca

SEQ ID NO: 64737 - RNA, 22 nt, Artificial Sequence
  LRRK2 RNA guide
cagacguugguaaauuaggucc

SEQ ID NO: 64738 - RNA, 22 nt, Artificial Sequence
  LRRK2 RNA guide
cauggaccuaauuuaccaacgu

SEQ ID NO: 64739 - RNA, 22 nt, Artificial Sequence
  LRRK2 RNA guide
ccaacgucugccauauaauaac

SEQ ID NO: 64740 - RNA, 22 nt, Artificial Sequence
  LRRK2 RNA guide
ccuaauuuaccaacgucugcca

SEQ ID NO: 64741 - RNA, 22 nt, Artificial Sequence
  LRRK2 RNA guide
cguugguaaauuagguccaugu

SEQ ID NO: 64742 - RNA, 22 nt, Artificial Sequence
  LRRK2 RNA guide
cuaauuuaccaacgucugccau

SEQ ID NO: 64743 - RNA, 22 nt, Artificial Sequence
  LRRK2 RNA guide
cugcagcuguuauuauauggca

SEQ ID NO: 64744 - RNA, 22 nt, Artificial Sequence
  LRRK2 RNA guide
cuguuauuauauggcagacguu

SEQ ID NO: 64745 - RNA, 22 nt, Artificial Sequence
  LRRK2 RNA guide
gaccuaauuuaccaacgucugc

SEQ ID NO: 64746 - RNA, 22 nt, Artificial Sequence
  LRRK2 RNA guide
gacguugguaaauuagguccau

SEQ ID NO: 64747 - RNA, 22 nt, Artificial Sequence
  LRRK2 RNA guide
gcagacguugguaaauuagguc

SEQ ID NO: 64748 - RNA, 22 nt, Artificial Sequence
  LRRK2 RNA guide
gcugcagcuguuauuauauggc

SEQ ID NO: 64749 - RNA, 22 nt, Artificial Sequence
  LRRK2 RNA guide
gcuguuauuauauggcagacgu

SEQ ID NO: 64750 - RNA, 22 nt, Artificial Sequence
  LRRK2 RNA guide
ggaccuaauuuaccaacgucug

SEQ ID NO: 64751 - RNA, 22 nt, Artificial Sequence
  LRRK2 RNA guide
ggcagacguugguaaauuaggu

SEQ ID NO: 64752 - RNA, 22 nt, Artificial Sequence
  LRRK2 RNA guide
guuauuauauggcagacguugg

SEQ ID NO: 64753 - RNA, 22 nt, Artificial Sequence
  LRRK2 RNA guide
uaauuuaccaacgucugccaua

SEQ ID NO: 64754 - RNA, 22 nt, Artificial Sequence
  LRRK2 RNA guide
uaccaacgucugccauauaaua

SEQ ID NO: 64755 - RNA, 22 nt, Artificial Sequence
  LRRK2 RNA guide
uauauggcagacguugguaaau

SEQ ID NO: 64756 - RNA, 22 nt, Artificial Sequence
  LRRK2 RNA guide
uauggcagacguugguaaauua

SEQ ID NO: 64757 - RNA, 22 nt, Artificial Sequence
  LRRK2 RNA guide
uauuauauggcagacguuggua

SEQ ID NO: 64758 - RNA, 22 nt, Artificial Sequence
  LRRK2 RNA guide
uggaccuaauuuaccaacgucu

SEQ ID NO: 64759 - RNA, 22 nt, Artificial Sequence
  LRRK2 RNA guide
uggcagacguugguaaauuagg

SEQ ID NO: 64760 - RNA, 22 nt, Artificial Sequence
  LRRK2 RNA guide
uguuauuauauggcagacguug

SEQ ID NO: 64761 - RNA, 22 nt, Artificial Sequence
  LRRK2 RNA guide
uuaccaacgucugccauauaau

SEQ ID NO: 64762 - RNA, 22 nt, Artificial Sequence
  LRRK2 RNA guide
uuauauggcagacguugguaaa

SEQ ID NO: 64763 - RNA, 22 nt, Artificial Sequence
  LRRK2 RNA guide
uuauuauauggcagacguuggu

SEQ ID NO: 64764 - RNA, 22 nt, Artificial Sequence
  LRRK2 RNA guide
uuuaccaacgucugccauauaa

SEQ ID NO: 64765 - RNA, 20 nt, Artificial Sequence
  LRRK2 RNA guide
aaaagcagagaguagauaac

SEQ ID NO: 64766 - RNA, 20 nt, Artificial Sequence
  LRRK2 RNA guide
aaagcagagaguagauaacu

SEQ ID NO: 64767 - RNA, 20 nt, Artificial Sequence
  LRRK2 RNA guide
aaaguuaucuacucucugcu

SEQ ID NO: 64768 - RNA, 20 nt, Artificial Sequence
  LRRK2 RNA guide
aagcagagaguagauaacuu

SEQ ID NO: 64769 - RNA, 20 nt, Artificial Sequence
  LRRK2 RNA guide
aaguuaucuacucucugcuu

SEQ ID NO: 64770 - RNA, 20 nt, Artificial Sequence
  LRRK2 RNA guide
aauguggcaaaagcagagag

SEQ ID NO: 64771 - RNA, 20 nt, Artificial Sequence
  LRRK2 RNA guide
acaucugacuagaaaguuau

SEQ ID NO: 64772 - RNA, 20 nt, Artificial Sequence
  LRRK2 RNA guide
accagacaucugacuagaaa

SEQ ID NO: 64773 - RNA, 20 nt, Artificial Sequence
  LRRK2 RNA guide
acuagaaaguuaucuacucu

SEQ ID NO: 64774 - RNA, 20 nt, Artificial Sequence
  LRRK2 RNA guide
agaaaguuaucuacucucug

SEQ ID NO: 64775 - RNA, 20 nt, Artificial Sequence
  LRRK2 RNA guide
agacaucugacuagaaaguu

SEQ ID NO: 64776 - RNA, 20 nt, Artificial Sequence
  LRRK2 RNA guide
agagaguagauaacuuucua

SEQ ID NO: 64777 - RNA, 20 nt, Artificial Sequence
  LRRK2 RNA guide
agaguagauaacuuucuagu

SEQ ID NO: 64778 - RNA, 20 nt, Artificial Sequence
  LRRK2 RNA guide
agauaacuuucuagucagau

SEQ ID NO: 64779 - RNA, 20 nt, Artificial Sequence
  LRRK2 RNA guide
agcagagaguagauaacuuu

SEQ ID NO: 64780 - RNA, 20 nt, Artificial Sequence
  LRRK2 RNA guide
aguagauaacuuucuaguca

SEQ ID NO: 64781 - RNA, 20 nt, Artificial Sequence
  LRRK2 RNA guide
aguuaucuacucucugcuuu

SEQ ID NO: 64782 - RNA, 20 nt, Artificial Sequence
  LRRK2 RNA guide
aucuacucucugcuuuugcc

SEQ ID NO: 64783 - RNA, 20 nt, Artificial Sequence
  LRRK2 RNA guide
aucugacuagaaaguuaucu

SEQ ID NO: 64784 - RNA, 20 nt, Artificial Sequence
  LRRK2 RNA guide
auguggcaaaagcagagagu

SEQ ID NO: 64785 - RNA, 20 nt, Artificial Sequence
  LRRK2 RNA guide
caaaagcagagaguagauaa

SEQ ID NO: 64786 - RNA, 20 nt, Artificial Sequence
  LRRK2 RNA guide
cagacaucugacuagaaagu

SEQ ID NO: 64787 - RNA, 20 nt, Artificial Sequence
  LRRK2 RNA guide
cagagaguagauaacuuucu

SEQ ID NO: 64788 - RNA, 20 nt, Artificial Sequence
  LRRK2 RNA guide
caucugacuagaaaguuauc

SEQ ID NO: 64789 - RNA, 20 nt, Artificial Sequence
  LRRK2 RNA guide
ccagacaucugacuagaaag

SEQ ID NO: 64790 - RNA, 20 nt, Artificial Sequence
  LRRK2 RNA guide
cuagaaaguuaucuacucuc

SEQ ID NO: 64791 - RNA, 20 nt, Artificial Sequence
  LRRK2 RNA guide
cugacuagaaaguuaucuac

SEQ ID NO: 64792 - RNA, 20 nt, Artificial Sequence
  LRRK2 RNA guide
gaaaguuaucuacucucugc

SEQ ID NO: 64793 - RNA, 20 nt, Artificial Sequence
  LRRK2 RNA guide
gaauguggcaaaagcagaga

SEQ ID NO: 64794 - RNA, 20 nt, Artificial Sequence
  LRRK2 RNA guide
gacaucugacuagaaaguua

SEQ ID NO: 64795 - RNA, 20 nt, Artificial Sequence
  LRRK2 RNA guide
gacuagaaaguuaucuacuc

SEQ ID NO: 64796 - RNA, 20 nt, Artificial Sequence
  LRRK2 RNA guide
gagaguagauaacuuucuag

SEQ ID NO: 64797 - RNA, 20 nt, Artificial Sequence
  LRRK2 RNA guide
gaguagauaacuuucuaguc

SEQ ID NO: 64798 - RNA, 20 nt, Artificial Sequence
  LRRK2 RNA guide
gauaacuuucuagucagaug

SEQ ID NO: 64799 - RNA, 20 nt, Artificial Sequence
  LRRK2 RNA guide
gcaaaagcagagaguagaua

SEQ ID NO: 64800 - RNA, 20 nt, Artificial Sequence
  LRRK2 RNA guide
gcagagaguagauaacuuuc

SEQ ID NO: 64801 - RNA, 20 nt, Artificial Sequence
  LRRK2 RNA guide
ggcaaaagcagagaguagau

SEQ ID NO: 64802 - RNA, 20 nt, Artificial Sequence
  LRRK2 RNA guide
guagauaacuuucuagucag

SEQ ID NO: 64803 - RNA, 20 nt, Artificial Sequence
  LRRK2 RNA guide
guggcaaaagcagagaguag

SEQ ID NO: 64804 - RNA, 20 nt, Artificial Sequence
  LRRK2 RNA guide
guuaucuacucucugcuuuu

SEQ ID NO: 64805 - RNA, 20 nt, Artificial Sequence
  LRRK2 RNA guide
uagaaaguuaucuacucucu

SEQ ID NO: 64806 - RNA, 20 nt, Artificial Sequence
  LRRK2 RNA guide
uagauaacuuucuagucaga

SEQ ID NO: 64807 - RNA, 20 nt, Artificial Sequence
  LRRK2 RNA guide
uaucuacucucugcuuuugc

SEQ ID NO: 64808 - RNA, 20 nt, Artificial Sequence
  LRRK2 RNA guide
ucugacuagaaaguuaucua

SEQ ID NO: 64809 - RNA, 20 nt, Artificial Sequence
  LRRK2 RNA guide
ugacuagaaaguuaucuacu

SEQ ID NO: 64810 - RNA, 20 nt, Artificial Sequence
  LRRK2 RNA guide
uggcaaaagcagagaguaga

SEQ ID NO: 64811 - RNA, 20 nt, Artificial Sequence
  LRRK2 RNA guide
uguggcaaaagcagagagua

SEQ ID NO: 64812 - RNA, 20 nt, Artificial Sequence
  LRRK2 RNA guide
uuaucuacucucugcuuuug

SEQ ID NO: 64813 - RNA, 21 nt, Artificial Sequence
  LRRK2 RNA guide
aaaagcagagaguagauaacu

SEQ ID NO: 64814 - RNA, 21 nt, Artificial Sequence
  LRRK2 RNA guide
aaagcagagaguagauaacuu

SEQ ID NO: 64815 - RNA, 21 nt, Artificial Sequence
  LRRK2 RNA guide
aaaguuaucuacucucugcuu

SEQ ID NO: 64816 - RNA, 21 nt, Artificial Sequence
  LRRK2 RNA guide
aagcagagaguagauaacuuu

SEQ ID NO: 64817 - RNA, 21 nt, Artificial Sequence
  LRRK2 RNA guide
aaguuaucuacucucugcuuu

SEQ ID NO: 64818 - RNA, 21 nt, Artificial Sequence
  LRRK2 RNA guide
aauguggcaaaagcagagagu

SEQ ID NO: 64819 - RNA, 21 nt, Artificial Sequence
  LRRK2 RNA guide
acaucugacuagaaaguuauc

SEQ ID NO: 64820 - RNA, 21 nt, Artificial Sequence
  LRRK2 RNA guide
accagacaucugacuagaaag

SEQ ID NO: 64821 - RNA, 21 nt, Artificial Sequence
  LRRK2 RNA guide
acuagaaaguuaucuacucuc

SEQ ID NO: 64822 - RNA, 21 nt, Artificial Sequence
  LRRK2 RNA guide
agaaaguuaucuacucucugc

SEQ ID NO: 64823 - RNA, 21 nt, Artificial Sequence
  LRRK2 RNA guide
agacaucugacuagaaaguua

SEQ ID NO: 64824 - RNA, 21 nt, Artificial Sequence
  LRRK2 RNA guide
agagaguagauaacuuucuag

SEQ ID NO: 64825 - RNA, 21 nt, Artificial Sequence
  LRRK2 RNA guide
agaguagauaacuuucuaguc

SEQ ID NO: 64826 - RNA, 21 nt, Artificial Sequence
  LRRK2 RNA guide
agauaacuuucuagucagaug

SEQ ID NO: 64827 - RNA, 21 nt, Artificial Sequence
  LRRK2 RNA guide
agcagagaguagauaacuuuc

SEQ ID NO: 64828 - RNA, 21 nt, Artificial Sequence
  LRRK2 RNA guide
aguagauaacuuucuagucag

SEQ ID NO: 64829 - RNA, 21 nt, Artificial Sequence
  LRRK2 RNA guide
aguuaucuacucucugcuuuu

SEQ ID NO: 64830 - RNA, 21 nt, Artificial Sequence
  LRRK2 RNA guide
aucuacucucugcuuuugcca

SEQ ID NO: 64831 - RNA, 21 nt, Artificial Sequence
  LRRK2 RNA guide
auguggcaaaagcagagagua

SEQ ID NO: 64832 - RNA, 21 nt, Artificial Sequence
  LRRK2 RNA guide
caaaagcagagaguagauaac

SEQ ID NO: 64833 - RNA, 21 nt, Artificial Sequence
  LRRK2 RNA guide
cagacaucugacuagaaaguu

SEQ ID NO: 64834 - RNA, 21 nt, Artificial Sequence
  LRRK2 RNA guide
cagagaguagauaacuuucua

SEQ ID NO: 64835 - RNA, 21 nt, Artificial Sequence
  LRRK2 RNA guide
caucugacuagaaaguuaucu

SEQ ID NO: 64836 - RNA, 21 nt, Artificial Sequence
  LRRK2 RNA guide
ccagacaucugacuagaaagu

SEQ ID NO: 64837 - RNA, 21 nt, Artificial Sequence
  LRRK2 RNA guide
cuagaaaguuaucuacucucu

SEQ ID NO: 64838 - RNA, 21 nt, Artificial Sequence
  LRRK2 RNA guide
cugacuagaaaguuaucuacu

SEQ ID NO: 64839 - RNA, 21 nt, Artificial Sequence
  LRRK2 RNA guide
gaaaguuaucuacucucugcu

SEQ ID NO: 64840 - RNA, 21 nt, Artificial Sequence
  LRRK2 RNA guide
gaauguggcaaaagcagagag

SEQ ID NO: 64841 - RNA, 21 nt, Artificial Sequence
  LRRK2 RNA guide
gacaucugacuagaaaguuau

SEQ ID NO: 64842 - RNA, 21 nt, Artificial Sequence
  LRRK2 RNA guide
gacuagaaaguuaucuacucu

SEQ ID NO: 64843 - RNA, 21 nt, Artificial Sequence
  LRRK2 RNA guide
gagaguagauaacuuucuagu

SEQ ID NO: 64844 - RNA, 21 nt, Artificial Sequence
  LRRK2 RNA guide
gaguagauaacuuucuaguca

SEQ ID NO: 64845 - RNA, 21 nt, Artificial Sequence
  LRRK2 RNA guide
gauaacuuucuagucagaugu

SEQ ID NO: 64846 - RNA, 21 nt, Artificial Sequence
  LRRK2 RNA guide
gcaaaagcagagaguagauaa

SEQ ID NO: 64847 - RNA, 21 nt, Artificial Sequence
  LRRK2 RNA guide
gcagagaguagauaacuuucu

SEQ ID NO: 64848 - RNA, 21 nt, Artificial Sequence
  LRRK2 RNA guide
ggcaaaagcagagaguagaua

SEQ ID NO: 64849 - RNA, 21 nt, Artificial Sequence
  LRRK2 RNA guide
guagauaacuuucuagucaga

SEQ ID NO: 64850 - RNA, 21 nt, Artificial Sequence
  LRRK2 RNA guide
guggcaaaagcagagaguaga

SEQ ID NO: 64851 - RNA, 21 nt, Artificial Sequence
  LRRK2 RNA guide
guuaucuacucucugcuuuug

SEQ ID NO: 64852 - RNA, 21 nt, Artificial Sequence
  LRRK2 RNA guide
uaccagacaucugacuagaaa

SEQ ID NO: 64853 - RNA, 21 nt, Artificial Sequence
  LRRK2 RNA guide
uagaaaguuaucuacucucug

SEQ ID NO: 64854 - RNA, 21 nt, Artificial Sequence
  LRRK2 RNA guide
uaucuacucucugcuuuugcc

SEQ ID NO: 64855 - RNA, 21 nt, Artificial Sequence
  LRRK2 RNA guide
ucugacuagaaaguuaucuac

SEQ ID NO: 64856 - RNA, 21 nt, Artificial Sequence
  LRRK2 RNA guide
ugaauguggcaaaagcagaga

SEQ ID NO: 64857 - RNA, 21 nt, Artificial Sequence
  LRRK2 RNA guide
ugacuagaaaguuaucuacuc

SEQ ID NO: 64858 - RNA, 21 nt, Artificial Sequence
  LRRK2 RNA guide
uggcaaaagcagagaguagau

SEQ ID NO: 64859 - RNA, 21 nt, Artificial Sequence
  LRRK2 RNA guide
uguggcaaaagcagagaguag

SEQ ID NO: 64860 - RNA, 21 nt, Artificial Sequence
  LRRK2 RNA guide
uuaucuacucucugcuuuugc

SEQ ID NO: 64861 - RNA, 22 nt, Artificial Sequence
  LRRK2 RNA guide
aaaagcagagaguagauaacuu

SEQ ID NO: 64862 - RNA, 22 nt, Artificial Sequence
  LRRK2 RNA guide
aaagcagagaguagauaacuuu

SEQ ID NO: 64863 - RNA, 22 nt, Artificial Sequence
  LRRK2 RNA guide
aaaguuaucuacucucugcuuu

SEQ ID NO: 64864 - RNA, 22 nt, Artificial Sequence
  LRRK2 RNA guide
aagcagagaguagauaacuuuc

SEQ ID NO: 64865 - RNA, 22 nt, Artificial Sequence
  LRRK2 RNA guide
aaguuaucuacucucugcuuuu

SEQ ID NO: 64866 - RNA, 22 nt, Artificial Sequence
  LRRK2 RNA guide
aauguggcaaaagcagagagua

SEQ ID NO: 64867 - RNA, 22 nt, Artificial Sequence
  LRRK2 RNA guide
acaucugacuagaaaguuaucu

SEQ ID NO: 64868 - RNA, 22 nt, Artificial Sequence
  LRRK2 RNA guide
accagacaucugacuagaaagu

SEQ ID NO: 64869 - RNA, 22 nt, Artificial Sequence
  LRRK2 RNA guide
acuagaaaguuaucuacucucu

SEQ ID NO: 64870 - RNA, 22 nt, Artificial Sequence
  LRRK2 RNA guide
agaaaguuaucuacucucugcu

SEQ ID NO: 64871 - RNA, 22 nt, Artificial Sequence
  LRRK2 RNA guide
agacaucugacuagaaaguuau

SEQ ID NO: 64872 - RNA, 22 nt, Artificial Sequence
  LRRK2 RNA guide
agagaguagauaacuuucuagu

SEQ ID NO: 64873 - RNA, 22 nt, Artificial Sequence
  LRRK2 RNA guide
agaguagauaacuuucuaguca

SEQ ID NO: 64874 - RNA, 22 nt, Artificial Sequence
  LRRK2 RNA guide
agauaacuuucuagucagaugu

SEQ ID NO: 64875 - RNA, 22 nt, Artificial Sequence
  LRRK2 RNA guide
agcagagaguagauaacuuucu

SEQ ID NO: 64876 - RNA, 22 nt, Artificial Sequence
  LRRK2 RNA guide
aguagauaacuuucuagucaga

SEQ ID NO: 64877 - RNA, 22 nt, Artificial Sequence
  LRRK2 RNA guide
aguuaucuacucucugcuuuug

SEQ ID NO: 64878 - RNA, 22 nt, Artificial Sequence
  LRRK2 RNA guide
aucuacucucugcuuuugccac

SEQ ID NO: 64879 - RNA, 22 nt, Artificial Sequence
  LRRK2 RNA guide
aucugacuagaaaguuaucuac

SEQ ID NO: 64880 - RNA, 22 nt, Artificial Sequence
  LRRK2 RNA guide
augaauguggcaaaagcagaga

SEQ ID NO: 64881 - RNA, 22 nt, Artificial Sequence
  LRRK2 RNA guide
auguggcaaaagcagagaguag

SEQ ID NO: 64882 - RNA, 22 nt, Artificial Sequence
  LRRK2 RNA guide
caaaagcagagaguagauaacu

SEQ ID NO: 64883 - RNA, 22 nt, Artificial Sequence
  LRRK2 RNA guide
cagacaucugacuagaaaguua

SEQ ID NO: 64884 - RNA, 22 nt, Artificial Sequence
  LRRK2 RNA guide
cagagaguagauaacuuucuag

SEQ ID NO: 64885 - RNA, 22 nt, Artificial Sequence
  LRRK2 RNA guide
caucugacuagaaaguuaucua

SEQ ID NO: 64886 - RNA, 22 nt, Artificial Sequence
  LRRK2 RNA guide
ccagacaucugacuagaaaguu

SEQ ID NO: 64887 - RNA, 22 nt, Artificial Sequence
  LRRK2 RNA guide
cuaccagacaucugacuagaaa

SEQ ID NO: 64888 - RNA, 22 nt, Artificial Sequence
  LRRK2 RNA guide
cuagaaaguuaucuacucucug

SEQ ID NO: 64889 - RNA, 22 nt, Artificial Sequence
  LRRK2 RNA guide
cugacuagaaaguuaucuacuc

SEQ ID NO: 64890 - RNA, 22 nt, Artificial Sequence
  LRRK2 RNA guide
gaaaguuaucuacucucugcuu

SEQ ID NO: 64891 - RNA, 22 nt, Artificial Sequence
  LRRK2 RNA guide
gaauguggcaaaagcagagagu

SEQ ID NO: 64892 - RNA, 22 nt, Artificial Sequence
  LRRK2 RNA guide
gacaucugacuagaaaguuauc

SEQ ID NO: 64893 - RNA, 22 nt, Artificial Sequence
  LRRK2 RNA guide
gacuagaaaguuaucuacucuc

SEQ ID NO: 64894 - RNA, 22 nt, Artificial Sequence
  LRRK2 RNA guide
gagaguagauaacuuucuaguc

SEQ ID NO: 64895 - RNA, 22 nt, Artificial Sequence
  LRRK2 RNA guide
gaguagauaacuuucuagucag

SEQ ID NO: 64896 - RNA, 22 nt, Artificial Sequence
  LRRK2 RNA guide
gauaacuuucuagucagauguc

SEQ ID NO: 64897 - RNA, 22 nt, Artificial Sequence
  LRRK2 RNA guide
gcaaaagcagagaguagauaac

SEQ ID NO: 64898 - RNA, 22 nt, Artificial Sequence
  LRRK2 RNA guide
gcagagaguagauaacuuucua

SEQ ID NO: 64899 - RNA, 22 nt, Artificial Sequence
  LRRK2 RNA guide
ggcaaaagcagagaguagauaa

SEQ ID NO: 64900 - RNA, 22 nt, Artificial Sequence
  LRRK2 RNA guide
guagauaacuuucuagucagau

SEQ ID NO: 64901 - RNA, 22 nt, Artificial Sequence
  LRRK2 RNA guide
guggcaaaagcagagaguagau

SEQ ID NO: 64902 - RNA, 22 nt, Artificial Sequence
  LRRK2 RNA guide
guuaucuacucucugcuuuugc

SEQ ID NO: 64903 - RNA, 22 nt, Artificial Sequence
  LRRK2 RNA guide
uaccagacaucugacuagaaag

SEQ ID NO: 64904 - RNA, 22 nt, Artificial Sequence
  LRRK2 RNA guide
uagaaaguuaucuacucucugc

SEQ ID NO: 64905 - RNA, 22 nt, Artificial Sequence
  LRRK2 RNA guide
uagauaacuuucuagucagaug

SEQ ID NO: 64906 - RNA, 22 nt, Artificial Sequence
  LRRK2 RNA guide
uaucuacucucugcuuuugcca

SEQ ID NO: 64907 - RNA, 22 nt, Artificial Sequence
  LRRK2 RNA guide
ucugacuagaaaguuaucuacu

SEQ ID NO: 64908 - RNA, 22 nt, Artificial Sequence
  LRRK2 RNA guide
ugaauguggcaaaagcagagag

SEQ ID NO: 64909 - RNA, 22 nt, Artificial Sequence
  LRRK2 RNA guide
ugacuagaaaguuaucuacucu

SEQ ID NO: 64910 - RNA, 22 nt, Artificial Sequence
  LRRK2 RNA guide
uggcaaaagcagagaguagaua

SEQ ID NO: 64911 - RNA, 22 nt, Artificial Sequence
  LRRK2 RNA guide
uguggcaaaagcagagaguaga

SEQ ID NO: 64912 - RNA, 22 nt, Artificial Sequence
  LRRK2 RNA guide
uuaucuacucucugcuuuugcc

SEQ ID NO: 64913 - RNA, 20 nt, Artificial Sequence
  LRRK2 RNA guide
aaaagcagagaguagguaac

SEQ ID NO: 64914 - RNA, 20 nt, Artificial Sequence
  LRRK2 RNA guide
aaagcagagaguagguaacu

SEQ ID NO: 64915 - RNA, 20 nt, Artificial Sequence
  LRRK2 RNA guide
aaaguuaccuacucucugcu

SEQ ID NO: 64916 - RNA, 20 nt, Artificial Sequence
  LRRK2 RNA guide
aagcagagaguagguaacuu

SEQ ID NO: 64917 - RNA, 20 nt, Artificial Sequence
  LRRK2 RNA guide
aaguuaccuacucucugcuu

SEQ ID NO: 64918 - RNA, 20 nt, Artificial Sequence
  LRRK2 RNA guide
acaucugacuagaaaguuac

SEQ ID NO: 64919 - RNA, 20 nt, Artificial Sequence
  LRRK2 RNA guide
accuacucucugcuuuugcc

SEQ ID NO: 64920 - RNA, 20 nt, Artificial Sequence
  LRRK2 RNA guide
acuagaaaguuaccuacucu

SEQ ID NO: 64921 - RNA, 20 nt, Artificial Sequence
  LRRK2 RNA guide
agaaaguuaccuacucucug

SEQ ID NO: 64922 - RNA, 20 nt, Artificial Sequence
  LRRK2 RNA guide
agagaguagguaacuuucua

SEQ ID NO: 64923 - RNA, 20 nt, Artificial Sequence
  LRRK2 RNA guide
agaguagguaacuuucuagu

SEQ ID NO: 64924 - RNA, 20 nt, Artificial Sequence
  LRRK2 RNA guide
agcagagaguagguaacuuu

SEQ ID NO: 64925 - RNA, 20 nt, Artificial Sequence
  LRRK2 RNA guide
agguaacuuucuagucagau

SEQ ID NO: 64926 - RNA, 20 nt, Artificial Sequence
  LRRK2 RNA guide
aguagguaacuuucuaguca

SEQ ID NO: 64927 - RNA, 20 nt, Artificial Sequence
  LRRK2 RNA guide
aguuaccuacucucugcuuu

SEQ ID NO: 64928 - RNA, 20 nt, Artificial Sequence
  LRRK2 RNA guide
aucugacuagaaaguuaccu

SEQ ID NO: 64929 - RNA, 20 nt, Artificial Sequence
  LRRK2 RNA guide
caaaagcagagaguagguaa

SEQ ID NO: 64930 - RNA, 20 nt, Artificial Sequence
  LRRK2 RNA guide
cagagaguagguaacuuucu

SEQ ID NO: 64931 - RNA, 20 nt, Artificial Sequence
  LRRK2 RNA guide
caucugacuagaaaguuacc

SEQ ID NO: 64932 - RNA, 20 nt, Artificial Sequence
  LRRK2 RNA guide
cuagaaaguuaccuacucuc

SEQ ID NO: 64933 - RNA, 20 nt, Artificial Sequence
  LRRK2 RNA guide
cugacuagaaaguuaccuac

SEQ ID NO: 64934 - RNA, 20 nt, Artificial Sequence
  LRRK2 RNA guide
gaaaguuaccuacucucugc

SEQ ID NO: 64935 - RNA, 20 nt, Artificial Sequence
  LRRK2 RNA guide
gacuagaaaguuaccuacuc

SEQ ID NO: 64936 - RNA, 20 nt, Artificial Sequence
  LRRK2 RNA guide
gagaguagguaacuuucuag

SEQ ID NO: 64937 - RNA, 20 nt, Artificial Sequence
  LRRK2 RNA guide
gaguagguaacuuucuaguc

SEQ ID NO: 64938 - RNA, 20 nt, Artificial Sequence
  LRRK2 RNA guide
gcaaaagcagagaguaggua

SEQ ID NO: 64939 - RNA, 20 nt, Artificial Sequence
  LRRK2 RNA guide
gcagagaguagguaacuuuc

SEQ ID NO: 64940 - RNA, 20 nt, Artificial Sequence
  LRRK2 RNA guide
ggcaaaagcagagaguaggu

SEQ ID NO: 64941 - RNA, 20 nt, Artificial Sequence
  LRRK2 RNA guide
gguaacuuucuagucagaug

SEQ ID NO: 64942 - RNA, 20 nt, Artificial Sequence
  LRRK2 RNA guide
guagguaacuuucuagucag

SEQ ID NO: 64943 - RNA, 20 nt, Artificial Sequence
  LRRK2 RNA guide
guuaccuacucucugcuuuu

SEQ ID NO: 64944 - RNA, 20 nt, Artificial Sequence
  LRRK2 RNA guide
uaccuacucucugcuuuugc

SEQ ID NO: 64945 - RNA, 20 nt, Artificial Sequence
  LRRK2 RNA guide
uagaaaguuaccuacucucu

SEQ ID NO: 64946 - RNA, 20 nt, Artificial Sequence
  LRRK2 RNA guide
uagguaacuuucuagucaga

SEQ ID NO: 64947 - RNA, 20 nt, Artificial Sequence
  LRRK2 RNA guide
ucugacuagaaaguuaccua

SEQ ID NO: 64948 - RNA, 20 nt, Artificial Sequence
  LRRK2 RNA guide
ugacuagaaaguuaccuacu

SEQ ID NO: 64949 - RNA, 20 nt, Artificial Sequence
  LRRK2 RNA guide
uggcaaaagcagagaguagg

SEQ ID NO: 64950 - RNA, 20 nt, Artificial Sequence
  LRRK2 RNA guide
uuaccuacucucugcuuuug

SEQ ID NO: 64951 - RNA, 21 nt, Artificial Sequence
  LRRK2 RNA guide
aaaagcagagaguagguaacu

SEQ ID NO: 64952 - RNA, 21 nt, Artificial Sequence
  LRRK2 RNA guide
aaagcagagaguagguaacuu

SEQ ID NO: 64953 - RNA, 21 nt, Artificial Sequence
  LRRK2 RNA guide
aaaguuaccuacucucugcuu

SEQ ID NO: 64954 - RNA, 21 nt, Artificial Sequence
  LRRK2 RNA guide
aagcagagaguagguaacuuu

SEQ ID NO: 64955 - RNA, 21 nt, Artificial Sequence
  LRRK2 RNA guide
aaguuaccuacucucugcuuu

SEQ ID NO: 64956 - RNA, 21 nt, Artificial Sequence
  LRRK2 RNA guide
acaucugacuagaaaguuacc

SEQ ID NO: 64957 - RNA, 21 nt, Artificial Sequence
  LRRK2 RNA guide
accuacucucugcuuuugcca

SEQ ID NO: 64958 - RNA, 21 nt, Artificial Sequence
  LRRK2 RNA guide
acuagaaaguuaccuacucuc

SEQ ID NO: 64959 - RNA, 21 nt, Artificial Sequence
  LRRK2 RNA guide
agaaaguuaccuacucucugc

SEQ ID NO: 64960 - RNA, 21 nt, Artificial Sequence
  LRRK2 RNA guide
agagaguagguaacuuucuag

SEQ ID NO: 64961 - RNA, 21 nt, Artificial Sequence
  LRRK2 RNA guide
agaguagguaacuuucuaguc

SEQ ID NO: 64962 - RNA, 21 nt, Artificial Sequence
  LRRK2 RNA guide
agcagagaguagguaacuuuc

SEQ ID NO: 64963 - RNA, 21 nt, Artificial Sequence
  LRRK2 RNA guide
agguaacuuucuagucagaug

SEQ ID NO: 64964 - RNA, 21 nt, Artificial Sequence
  LRRK2 RNA guide
aguagguaacuuucuagucag

SEQ ID NO: 64965 - RNA, 21 nt, Artificial Sequence
  LRRK2 RNA guide
aguuaccuacucucugcuuuu

SEQ ID NO: 64966 - RNA, 21 nt, Artificial Sequence
  LRRK2 RNA guide
aucugacuagaaaguuaccua

SEQ ID NO: 64967 - RNA, 21 nt, Artificial Sequence
  LRRK2 RNA guide
caaaagcagagaguagguaac

SEQ ID NO: 64968 - RNA, 21 nt, Artificial Sequence
  LRRK2 RNA guide
cagagaguagguaacuuucua

SEQ ID NO: 64969 - RNA, 21 nt, Artificial Sequence
  LRRK2 RNA guide
caucugacuagaaaguuaccu

SEQ ID NO: 64970 - RNA, 21 nt, Artificial Sequence
  LRRK2 RNA guide
cuagaaaguuaccuacucucu

SEQ ID NO: 64971 - RNA, 21 nt, Artificial Sequence
  LRRK2 RNA guide
cugacuagaaaguuaccuacu

SEQ ID NO: 64972 - RNA, 21 nt, Artificial Sequence
  LRRK2 RNA guide
gaaaguuaccuacucucugcu

SEQ ID NO: 64973 - RNA, 21 nt, Artificial Sequence
  LRRK2 RNA guide
gacaucugacuagaaaguuac

SEQ ID NO: 64974 - RNA, 21 nt, Artificial Sequence
  LRRK2 RNA guide
gacuagaaaguuaccuacucu

SEQ ID NO: 64975 - RNA, 21 nt, Artificial Sequence
  LRRK2 RNA guide
gagaguagguaacuuucuagu

SEQ ID NO: 64976 - RNA, 21 nt, Artificial Sequence
  LRRK2 RNA guide
gaguagguaacuuucuaguca

SEQ ID NO: 64977 - RNA, 21 nt, Artificial Sequence
  LRRK2 RNA guide
gcaaaagcagagaguagguaa

SEQ ID NO: 64978 - RNA, 21 nt, Artificial Sequence
  LRRK2 RNA guide
gcagagaguagguaacuuucu

SEQ ID NO: 64979 - RNA, 21 nt, Artificial Sequence
  LRRK2 RNA guide
ggcaaaagcagagaguaggua

SEQ ID NO: 64980 - RNA, 21 nt, Artificial Sequence
  LRRK2 RNA guide
gguaacuuucuagucagaugu

SEQ ID NO: 64981 - RNA, 21 nt, Artificial Sequence
  LRRK2 RNA guide
guagguaacuuucuagucaga

SEQ ID NO: 64982 - RNA, 21 nt, Artificial Sequence
  LRRK2 RNA guide
guggcaaaagcagagaguagg

SEQ ID NO: 64983 - RNA, 21 nt, Artificial Sequence
  LRRK2 RNA guide
guuaccuacucucugcuuuug

SEQ ID NO: 64984 - RNA, 21 nt, Artificial Sequence
  LRRK2 RNA guide
uaccuacucucugcuuuugcc

SEQ ID NO: 64985 - RNA, 21 nt, Artificial Sequence
  LRRK2 RNA guide
uagaaaguuaccuacucucug

SEQ ID NO: 64986 - RNA, 21 nt, Artificial Sequence
  LRRK2 RNA guide
uagguaacuuucuagucagau

SEQ ID NO: 64987 - RNA, 21 nt, Artificial Sequence
  LRRK2 RNA guide
ucugacuagaaaguuaccuac

SEQ ID NO: 64988 - RNA, 21 nt, Artificial Sequence
  LRRK2 RNA guide
ugacuagaaaguuaccuacuc

SEQ ID NO: 64989 - RNA, 21 nt, Artificial Sequence
  LRRK2 RNA guide
uggcaaaagcagagaguaggu

SEQ ID NO: 64990 - RNA, 21 nt, Artificial Sequence
  LRRK2 RNA guide
uuaccuacucucugcuuuugc

SEQ ID NO: 64991 - RNA, 22 nt, Artificial Sequence
  LRRK2 RNA guide
aaaagcagagaguagguaacuu

SEQ ID NO: 64992 - RNA, 22 nt, Artificial Sequence
  LRRK2 RNA guide
aaagcagagaguagguaacuuu

SEQ ID NO: 64993 - RNA, 22 nt, Artificial Sequence
  LRRK2 RNA guide
aaaguuaccuacucucugcuuu

SEQ ID NO: 64994 - RNA, 22 nt, Artificial Sequence
  LRRK2 RNA guide
aagcagagaguagguaacuuuc

SEQ ID NO: 64995 - RNA, 22 nt, Artificial Sequence
  LRRK2 RNA guide
aaguuaccuacucucugcuuuu

SEQ ID NO: 64996 - RNA, 22 nt, Artificial Sequence
  LRRK2 RNA guide
acaucugacuagaaaguuaccu

SEQ ID NO: 64997 - RNA, 22 nt, Artificial Sequence
  LRRK2 RNA guide
accuacucucugcuuuugccac

SEQ ID NO: 64998 - RNA, 22 nt, Artificial Sequence
  LRRK2 RNA guide
acuagaaaguuaccuacucucu

SEQ ID NO: 64999 - RNA, 22 nt, Artificial Sequence
  LRRK2 RNA guide
agaaaguuaccuacucucugcu

SEQ ID NO: 65000 - RNA, 22 nt, Artificial Sequence
  LRRK2 RNA guide
agacaucugacuagaaaguuac

SEQ ID NO: 65001 - RNA, 22 nt, Artificial Sequence
  LRRK2 RNA guide
agagaguagguaacuuucuagu

SEQ ID NO: 65002 - RNA, 22 nt, Artificial Sequence
  LRRK2 RNA guide
agaguagguaacuuucuaguca

SEQ ID NO: 65003 - RNA, 22 nt, Artificial Sequence
  LRRK2 RNA guide
agcagagaguagguaacuuucu

SEQ ID NO: 65004 - RNA, 22 nt, Artificial Sequence
  LRRK2 RNA guide
agguaacuuucuagucagaugu

SEQ ID NO: 65005 - RNA, 22 nt, Artificial Sequence
  LRRK2 RNA guide
aguagguaacuuucuagucaga

SEQ ID NO: 65006 - RNA, 22 nt, Artificial Sequence
  LRRK2 RNA guide
aguuaccuacucucugcuuuug

SEQ ID NO: 65007 - RNA, 22 nt, Artificial Sequence
  LRRK2 RNA guide
aucugacuagaaaguuaccuac

SEQ ID NO: 65008 - RNA, 22 nt, Artificial Sequence
  LRRK2 RNA guide
caaaagcagagaguagguaacu

SEQ ID NO: 65009 - RNA, 22 nt, Artificial Sequence
  LRRK2 RNA guide
cagagaguagguaacuuucuag

SEQ ID NO: 65010 - RNA, 22 nt, Artificial Sequence
  LRRK2 RNA guide
caucugacuagaaaguuaccua

SEQ ID NO: 65011 - RNA, 22 nt, Artificial Sequence
  LRRK2 RNA guide
cuagaaaguuaccuacucucug

SEQ ID NO: 65012 - RNA, 22 nt, Artificial Sequence
  LRRK2 RNA guide
cugacuagaaaguuaccuacuc

SEQ ID NO: 65013 - RNA, 22 nt, Artificial Sequence
  LRRK2 RNA guide
gaaaguuaccuacucucugcuu

SEQ ID NO: 65014 - RNA, 22 nt, Artificial Sequence
  LRRK2 RNA guide
gacaucugacuagaaaguuacc

SEQ ID NO: 65015 - RNA, 22 nt, Artificial Sequence
  LRRK2 RNA guide
gacuagaaaguuaccuacucuc

SEQ ID NO: 65016 - RNA, 22 nt, Artificial Sequence
  LRRK2 RNA guide
gagaguagguaacuuucuaguc

SEQ ID NO: 65017 - RNA, 22 nt, Artificial Sequence
  LRRK2 RNA guide
gaguagguaacuuucuagucag

SEQ ID NO: 65018 - RNA, 22 nt, Artificial Sequence
  LRRK2 RNA guide
gcaaaagcagagaguagguaac

SEQ ID NO: 65019 - RNA, 22 nt, Artificial Sequence
  LRRK2 RNA guide
gcagagaguagguaacuuucua

SEQ ID NO: 65020 - RNA, 22 nt, Artificial Sequence
  LRRK2 RNA guide
ggcaaaagcagagaguagguaa

SEQ ID NO: 65021 - RNA, 22 nt, Artificial Sequence
  LRRK2 RNA guide
gguaacuuucuagucagauguc

SEQ ID NO: 65022 - RNA, 22 nt, Artificial Sequence
  LRRK2 RNA guide
guagguaacuuucuagucagau

SEQ ID NO: 65023 - RNA, 22 nt, Artificial Sequence
  LRRK2 RNA guide
guggcaaaagcagagaguaggu

SEQ ID NO: 65024 - RNA, 22 nt, Artificial Sequence
  LRRK2 RNA guide
guuaccuacucucugcuuuugc

SEQ ID NO: 65025 - RNA, 22 nt, Artificial Sequence
  LRRK2 RNA guide
uaccuacucucugcuuuugcca

SEQ ID NO: 65026 - RNA, 22 nt, Artificial Sequence
  LRRK2 RNA guide
uagaaaguuaccuacucucugc

SEQ ID NO: 65027 - RNA, 22 nt, Artificial Sequence
  LRRK2 RNA guide
uagguaacuuucuagucagaug

SEQ ID NO: 65028 - RNA, 22 nt, Artificial Sequence
  LRRK2 RNA guide
ucugacuagaaaguuaccuacu

SEQ ID NO: 65029 - RNA, 22 nt, Artificial Sequence
  LRRK2 RNA guide
ugacuagaaaguuaccuacucu

SEQ ID NO: 65030 - RNA, 22 nt, Artificial Sequence
  LRRK2 RNA guide
uggcaaaagcagagaguaggua

SEQ ID NO: 65031 - RNA, 22 nt, Artificial Sequence
  LRRK2 RNA guide
uguggcaaaagcagagaguagg

SEQ ID NO: 65032 - RNA, 22 nt, Artificial Sequence
  LRRK2 RNA guide
uuaccuacucucugcuuuugcc

SEQ ID NO: 65033 - RNA, 20 nt, Artificial Sequence
  LRRK2 RNA guide
aaaguauuugaguaugucac

SEQ ID NO: 65034 - RNA, 20 nt, Artificial Sequence
  LRRK2 RNA guide
aaguauuugaguaugucacc

SEQ ID NO: 65035 - RNA, 20 nt, Artificial Sequence
  LRRK2 RNA guide
acauggugacauacucaaau

SEQ ID NO: 65036 - RNA, 20 nt, Artificial Sequence
  LRRK2 RNA guide
aguauuugaguaugucacca

SEQ ID NO: 65037 - RNA, 20 nt, Artificial Sequence
  LRRK2 RNA guide
auggugacauacucaaauac

SEQ ID NO: 65038 - RNA, 20 nt, Artificial Sequence
  LRRK2 RNA guide
cauggugacauacucaaaua

SEQ ID NO: 65039 - RNA, 20 nt, Artificial Sequence
  LRRK2 RNA guide
ggugacauacucaaauacuu

SEQ ID NO: 65040 - RNA, 20 nt, Artificial Sequence
  LRRK2 RNA guide
gugacauacucaaauacuuu

SEQ ID NO: 65041 - RNA, 20 nt, Artificial Sequence
  LRRK2 RNA guide
guuacauggugacauacuca

SEQ ID NO: 65042 - RNA, 20 nt, Artificial Sequence
  LRRK2 RNA guide
uacauggugacauacucaaa

SEQ ID NO: 65043 - RNA, 20 nt, Artificial Sequence
  LRRK2 RNA guide
uggugacauacucaaauacu

SEQ ID NO: 65044 - RNA, 20 nt, Artificial Sequence
  LRRK2 RNA guide
uuacauggugacauacucaa

SEQ ID NO: 65045 - RNA, 21 nt, Artificial Sequence
  LRRK2 RNA guide
aaaguauuugaguaugucacc

SEQ ID NO: 65046 - RNA, 21 nt, Artificial Sequence
  LRRK2 RNA guide
aaguauuugaguaugucacca

SEQ ID NO: 65047 - RNA, 21 nt, Artificial Sequence
  LRRK2 RNA guide
acauggugacauacucaaaua

SEQ ID NO: 65048 - RNA, 21 nt, Artificial Sequence
  LRRK2 RNA guide
aguauuugaguaugucaccau

SEQ ID NO: 65049 - RNA, 21 nt, Artificial Sequence
  LRRK2 RNA guide
auggugacauacucaaauacu

SEQ ID NO: 65050 - RNA, 21 nt, Artificial Sequence
  LRRK2 RNA guide
cauggugacauacucaaauac

SEQ ID NO: 65051 - RNA, 21 nt, Artificial Sequence
  LRRK2 RNA guide
ggugacauacucaaauacuuu

SEQ ID NO: 65052 - RNA, 21 nt, Artificial Sequence
  LRRK2 RNA guide
guuacauggugacauacucaa

SEQ ID NO: 65053 - RNA, 21 nt, Artificial Sequence
  LRRK2 RNA guide
uacauggugacauacucaaau

SEQ ID NO: 65054 - RNA, 21 nt, Artificial Sequence
  LRRK2 RNA guide
uggugacauacucaaauacuu

SEQ ID NO: 65055 - RNA, 21 nt, Artificial Sequence
  LRRK2 RNA guide
uguuacauggugacauacuca

SEQ ID NO: 65056 - RNA, 21 nt, Artificial Sequence
  LRRK2 RNA guide
uuacauggugacauacucaaa

SEQ ID NO: 65057 - RNA, 22 nt, Artificial Sequence
  LRRK2 RNA guide
aaaaguauuugaguaugucacc

SEQ ID NO: 65058 - RNA, 22 nt, Artificial Sequence
  LRRK2 RNA guide
aaaguauuugaguaugucacca

SEQ ID NO: 65059 - RNA, 22 nt, Artificial Sequence
  LRRK2 RNA guide
aaguauuugaguaugucaccau

SEQ ID NO: 65060 - RNA, 22 nt, Artificial Sequence
  LRRK2 RNA guide
acauggugacauacucaaauac

SEQ ID NO: 65061 - RNA, 22 nt, Artificial Sequence
  LRRK2 RNA guide
aguauuugaguaugucaccaug

SEQ ID NO: 65062 - RNA, 22 nt, Artificial Sequence
  LRRK2 RNA guide
auggugacauacucaaauacuu

SEQ ID NO: 65063 - RNA, 22 nt, Artificial Sequence
  LRRK2 RNA guide
cauggugacauacucaaauacu

SEQ ID NO: 65064 - RNA, 22 nt, Artificial Sequence
  LRRK2 RNA guide
ggugacauacucaaauacuuuu

SEQ ID NO: 65065 - RNA, 22 nt, Artificial Sequence
  LRRK2 RNA guide
guguuacauggugacauacuca

SEQ ID NO: 65066 - RNA, 22 nt, Artificial Sequence
  LRRK2 RNA guide
guuacauggugacauacucaaa

SEQ ID NO: 65067 - RNA, 22 nt, Artificial Sequence
  LRRK2 RNA guide
uacauggugacauacucaaaua

SEQ ID NO: 65068 - RNA, 22 nt, Artificial Sequence
  LRRK2 RNA guide
uggugacauacucaaauacuuu

SEQ ID NO: 65069 - RNA, 22 nt, Artificial Sequence
  LRRK2 RNA guide
uguuacauggugacauacucaa

SEQ ID NO: 65070 - RNA, 22 nt, Artificial Sequence
  LRRK2 RNA guide
uuacauggugacauacucaaau

SEQ ID NO: 65071 - RNA, 20 nt, Artificial Sequence
  LRRK2 RNA guide
aaaaaugauaaccgaggagc

SEQ ID NO: 65072 - RNA, 20 nt, Artificial Sequence
  LRRK2 RNA guide
aaaaugauaaccgaggagcc

SEQ ID NO: 65073 - RNA, 20 nt, Artificial Sequence
  LRRK2 RNA guide
aaaugauaaccgaggagcca

SEQ ID NO: 65074 - RNA, 20 nt, Artificial Sequence
  LRRK2 RNA guide
aaccgaggagccagacagau

SEQ ID NO: 65075 - RNA, 20 nt, Artificial Sequence
  LRRK2 RNA guide
aaugauaaccgaggagccag

SEQ ID NO: 65076 - RNA, 20 nt, Artificial Sequence
  LRRK2 RNA guide
accgaggagccagacagauc

SEQ ID NO: 65077 - RNA, 20 nt, Artificial Sequence
  LRRK2 RNA guide
auaaccgaggagccagacag

SEQ ID NO: 65078 - RNA, 20 nt, Artificial Sequence
  LRRK2 RNA guide
aucugucuggcuccucgguu

SEQ ID NO: 65079 - RNA, 20 nt, Artificial Sequence
  LRRK2 RNA guide
augauaaccgaggagccaga

SEQ ID NO: 65080 - RNA, 20 nt, Artificial Sequence
  LRRK2 RNA guide
augcugugaucugucuggcu

SEQ ID NO: 65081 - RNA, 20 nt, Artificial Sequence
  LRRK2 RNA guide
ccgaggagccagacagauca

SEQ ID NO: 65082 - RNA, 20 nt, Artificial Sequence
  LRRK2 RNA guide
ccucgguuaucauuuuuaaa

SEQ ID NO: 65083 - RNA, 20 nt, Artificial Sequence
  LRRK2 RNA guide
cuccucgguuaucauuuuua

SEQ ID NO: 65084 - RNA, 20 nt, Artificial Sequence
  LRRK2 RNA guide
cuggcuccucgguuaucauu

SEQ ID NO: 65085 - RNA, 20 nt, Artificial Sequence
  LRRK2 RNA guide
cugucuggcuccucgguuau

SEQ ID NO: 65086 - RNA, 20 nt, Artificial Sequence
  LRRK2 RNA guide
cugugaucugucuggcuccu

SEQ ID NO: 65087 - RNA, 20 nt, Artificial Sequence
  LRRK2 RNA guide
gauaaccgaggagccagaca

SEQ ID NO: 65088 - RNA, 20 nt, Artificial Sequence
  LRRK2 RNA guide
gaucugucuggcuccucggu

SEQ ID NO: 65089 - RNA, 20 nt, Artificial Sequence
  LRRK2 RNA guide
gcuccucgguuaucauuuuu

SEQ ID NO: 65090 - RNA, 20 nt, Artificial Sequence
  LRRK2 RNA guide
gcugugaucugucuggcucc

SEQ ID NO: 65091 - RNA, 20 nt, Artificial Sequence
  LRRK2 RNA guide
ggcuccucgguuaucauuuu

SEQ ID NO: 65092 - RNA, 20 nt, Artificial Sequence
  LRRK2 RNA guide
gucuggcuccucgguuauca

SEQ ID NO: 65093 - RNA, 20 nt, Artificial Sequence
  LRRK2 RNA guide
gugaucugucuggcuccucg

SEQ ID NO: 65094 - RNA, 20 nt, Artificial Sequence
  LRRK2 RNA guide
uaaaaaugauaaccgaggag

SEQ ID NO: 65095 - RNA, 20 nt, Artificial Sequence
  LRRK2 RNA guide
uaaccgaggagccagacaga

SEQ ID NO: 65096 - RNA, 20 nt, Artificial Sequence
  LRRK2 RNA guide
uccucgguuaucauuuuuaa

SEQ ID NO: 65097 - RNA, 20 nt, Artificial Sequence
  LRRK2 RNA guide
ucuggcuccucgguuaucau

SEQ ID NO: 65098 - RNA, 20 nt, Artificial Sequence
  LRRK2 RNA guide
ucugucuggcuccucgguua

SEQ ID NO: 65099 - RNA, 20 nt, Artificial Sequence
  LRRK2 RNA guide
ugauaaccgaggagccagac

SEQ ID NO: 65100 - RNA, 20 nt, Artificial Sequence
  LRRK2 RNA guide
ugaucugucuggcuccucgg

SEQ ID NO: 65101 - RNA, 20 nt, Artificial Sequence
  LRRK2 RNA guide
ugcugugaucugucuggcuc

SEQ ID NO: 65102 - RNA, 20 nt, Artificial Sequence
  LRRK2 RNA guide
uggcuccucgguuaucauuu

SEQ ID NO: 65103 - RNA, 20 nt, Artificial Sequence
  LRRK2 RNA guide
ugucuggcuccucgguuauc

SEQ ID NO: 65104 - RNA, 20 nt, Artificial Sequence
  LRRK2 RNA guide
ugugaucugucuggcuccuc

SEQ ID NO: 65105 - RNA, 20 nt, Artificial Sequence
  LRRK2 RNA guide
uuaaaaaugauaaccgagga

SEQ ID NO: 65106 - RNA, 20 nt, Artificial Sequence
  LRRK2 RNA guide
uuuaaaaaugauaaccgagg

SEQ ID NO: 65107 - RNA, 21 nt, Artificial Sequence
  LRRK2 RNA guide
aaaaaugauaaccgaggagcc

SEQ ID NO: 65108 - RNA, 21 nt, Artificial Sequence
  LRRK2 RNA guide
aaaaugauaaccgaggagcca

SEQ ID NO: 65109 - RNA, 21 nt, Artificial Sequence
  LRRK2 RNA guide
aaaugauaaccgaggagccag

SEQ ID NO: 65110 - RNA, 21 nt, Artificial Sequence
  LRRK2 RNA guide
aaccgaggagccagacagauc

SEQ ID NO: 65111 - RNA, 21 nt, Artificial Sequence
  LRRK2 RNA guide
aaugauaaccgaggagccaga

SEQ ID NO: 65112 - RNA, 21 nt, Artificial Sequence
  LRRK2 RNA guide
accgaggagccagacagauca

SEQ ID NO: 65113 - RNA, 21 nt, Artificial Sequence
  LRRK2 RNA guide
auaaccgaggagccagacaga

SEQ ID NO: 65114 - RNA, 21 nt, Artificial Sequence
  LRRK2 RNA guide
aucugucuggcuccucgguua

SEQ ID NO: 65115 - RNA, 21 nt, Artificial Sequence
  LRRK2 RNA guide
augauaaccgaggagccagac

SEQ ID NO: 65116 - RNA, 21 nt, Artificial Sequence
  LRRK2 RNA guide
augcugugaucugucuggcuc

SEQ ID NO: 65117 - RNA, 21 nt, Artificial Sequence
  LRRK2 RNA guide
ccgaggagccagacagaucac

SEQ ID NO: 65118 - RNA, 21 nt, Artificial Sequence
  LRRK2 RNA guide
cuccucgguuaucauuuuuaa

SEQ ID NO: 65119 - RNA, 21 nt, Artificial Sequence
  LRRK2 RNA guide
cuggcuccucgguuaucauuu

SEQ ID NO: 65120 - RNA, 21 nt, Artificial Sequence
  LRRK2 RNA guide
cugucuggcuccucgguuauc

SEQ ID NO: 65121 - RNA, 21 nt, Artificial Sequence
  LRRK2 RNA guide
cugugaucugucuggcuccuc

SEQ ID NO: 65122 - RNA, 21 nt, Artificial Sequence
  LRRK2 RNA guide
gauaaccgaggagccagacag

SEQ ID NO: 65123 - RNA, 21 nt, Artificial Sequence
  LRRK2 RNA guide
gaucugucuggcuccucgguu

SEQ ID NO: 65124 - RNA, 21 nt, Artificial Sequence
  LRRK2 RNA guide
gaugcugugaucugucuggcu

SEQ ID NO: 65125 - RNA, 21 nt, Artificial Sequence
  LRRK2 RNA guide
gcuccucgguuaucauuuuua

SEQ ID NO: 65126 - RNA, 21 nt, Artificial Sequence
  LRRK2 RNA guide
gcugugaucugucuggcuccu

SEQ ID NO: 65127 - RNA, 21 nt, Artificial Sequence
  LRRK2 RNA guide
ggcuccucgguuaucauuuuu

SEQ ID NO: 65128 - RNA, 21 nt, Artificial Sequence
  LRRK2 RNA guide
gucuggcuccucgguuaucau

SEQ ID NO: 65129 - RNA, 21 nt, Artificial Sequence
  LRRK2 RNA guide
gugaucugucuggcuccucgg

SEQ ID NO: 65130 - RNA, 21 nt, Artificial Sequence
  LRRK2 RNA guide
uaaaaaugauaaccgaggagc

SEQ ID NO: 65131 - RNA, 21 nt, Artificial Sequence
  LRRK2 RNA guide
uaaccgaggagccagacagau

SEQ ID NO: 65132 - RNA, 21 nt, Artificial Sequence
  LRRK2 RNA guide
ucuggcuccucgguuaucauu

SEQ ID NO: 65133 - RNA, 21 nt, Artificial Sequence
  LRRK2 RNA guide
ucugucuggcuccucgguuau

SEQ ID NO: 65134 - RNA, 21 nt, Artificial Sequence
  LRRK2 RNA guide
ugauaaccgaggagccagaca

SEQ ID NO: 65135 - RNA, 21 nt, Artificial Sequence
  LRRK2 RNA guide
ugaucugucuggcuccucggu

SEQ ID NO: 65136 - RNA, 21 nt, Artificial Sequence
  LRRK2 RNA guide
ugcugugaucugucuggcucc

SEQ ID NO: 65137 - RNA, 21 nt, Artificial Sequence
  LRRK2 RNA guide
uggcuccucgguuaucauuuu

SEQ ID NO: 65138 - RNA, 21 nt, Artificial Sequence
  LRRK2 RNA guide
ugucuggcuccucgguuauca

SEQ ID NO: 65139 - RNA, 21 nt, Artificial Sequence
  LRRK2 RNA guide
ugugaucugucuggcuccucg

SEQ ID NO: 65140 - RNA, 21 nt, Artificial Sequence
  LRRK2 RNA guide
uuaaaaaugauaaccgaggag

SEQ ID NO: 65141 - RNA, 22 nt, Artificial Sequence
  LRRK2 RNA guide
aaaaaugauaaccgaggagcca

SEQ ID NO: 65142 - RNA, 22 nt, Artificial Sequence
  LRRK2 RNA guide
aaaaugauaaccgaggagccag

SEQ ID NO: 65143 - RNA, 22 nt, Artificial Sequence
  LRRK2 RNA guide
aaaugauaaccgaggagccaga

SEQ ID NO: 65144 - RNA, 22 nt, Artificial Sequence
  LRRK2 RNA guide
aaccgaggagccagacagauca

SEQ ID NO: 65145 - RNA, 22 nt, Artificial Sequence
  LRRK2 RNA guide
aaugauaaccgaggagccagac

SEQ ID NO: 65146 - RNA, 22 nt, Artificial Sequence
  LRRK2 RNA guide
accgaggagccagacagaucac

SEQ ID NO: 65147 - RNA, 22 nt, Artificial Sequence
  LRRK2 RNA guide
auaaccgaggagccagacagau

SEQ ID NO: 65148 - RNA, 22 nt, Artificial Sequence
  LRRK2 RNA guide
aucugucuggcuccucgguuau

SEQ ID NO: 65149 - RNA, 22 nt, Artificial Sequence
  LRRK2 RNA guide
augauaaccgaggagccagaca

SEQ ID NO: 65150 - RNA, 22 nt, Artificial Sequence
  LRRK2 RNA guide
augcugugaucugucuggcucc

SEQ ID NO: 65151 - RNA, 22 nt, Artificial Sequence
  LRRK2 RNA guide
ccgaggagccagacagaucaca

SEQ ID NO: 65152 - RNA, 22 nt, Artificial Sequence
  LRRK2 RNA guide
cgaugcugugaucugucuggcu

SEQ ID NO: 65153 - RNA, 22 nt, Artificial Sequence
  LRRK2 RNA guide
cuccucgguuaucauuuuuaaa

SEQ ID NO: 65154 - RNA, 22 nt, Artificial Sequence
  LRRK2 RNA guide
cuggcuccucgguuaucauuuu

SEQ ID NO: 65155 - RNA, 22 nt, Artificial Sequence
  LRRK2 RNA guide
cugucuggcuccucgguuauca

SEQ ID NO: 65156 - RNA, 22 nt, Artificial Sequence
  LRRK2 RNA guide
cugugaucugucuggcuccucg

SEQ ID NO: 65157 - RNA, 22 nt, Artificial Sequence
  LRRK2 RNA guide
gauaaccgaggagccagacaga

SEQ ID NO: 65158 - RNA, 22 nt, Artificial Sequence
  LRRK2 RNA guide
gaucugucuggcuccucgguua

SEQ ID NO: 65159 - RNA, 22 nt, Artificial Sequence
  LRRK2 RNA guide
gaugcugugaucugucuggcuc

SEQ ID NO: 65160 - RNA, 22 nt, Artificial Sequence
  LRRK2 RNA guide
gcuccucgguuaucauuuuuaa

SEQ ID NO: 65161 - RNA, 22 nt, Artificial Sequence
  LRRK2 RNA guide
gcugugaucugucuggcuccuc

SEQ ID NO: 65162 - RNA, 22 nt, Artificial Sequence
  LRRK2 RNA guide
ggcuccucgguuaucauuuuua

SEQ ID NO: 65163 - RNA, 22 nt, Artificial Sequence
  LRRK2 RNA guide
gucuggcuccucgguuaucauu

SEQ ID NO: 65164 - RNA, 22 nt, Artificial Sequence
  LRRK2 RNA guide
gugaucugucuggcuccucggu

SEQ ID NO: 65165 - RNA, 22 nt, Artificial Sequence
  LRRK2 RNA guide
uaaaaaugauaaccgaggagcc

SEQ ID NO: 65166 - RNA, 22 nt, Artificial Sequence
  LRRK2 RNA guide
uaaccgaggagccagacagauc

SEQ ID NO: 65167 - RNA, 22 nt, Artificial Sequence
  LRRK2 RNA guide
ucuggcuccucgguuaucauuu

SEQ ID NO: 65168 - RNA, 22 nt, Artificial Sequence
  LRRK2 RNA guide
ucugucuggcuccucgguuauc

SEQ ID NO: 65169 - RNA, 22 nt, Artificial Sequence
  LRRK2 RNA guide
ugauaaccgaggagccagacag

SEQ ID NO: 65170 - RNA, 22 nt, Artificial Sequence
  LRRK2 RNA guide
ugaucugucuggcuccucgguu

SEQ ID NO: 65171 - RNA, 22 nt, Artificial Sequence
  LRRK2 RNA guide
ugcugugaucugucuggcuccu

SEQ ID NO: 65172 - RNA, 22 nt, Artificial Sequence
  LRRK2 RNA guide
uggcuccucgguuaucauuuuu

SEQ ID NO: 65173 - RNA, 22 nt, Artificial Sequence
  LRRK2 RNA guide
ugucuggcuccucgguuaucau

SEQ ID NO: 65174 - RNA, 22 nt, Artificial Sequence
  LRRK2 RNA guide
ugugaucugucuggcuccucgg

SEQ ID NO: 65175 - RNA, 22 nt, Artificial Sequence
  LRRK2 RNA guide
uuaaaaaugauaaccgaggagc

SEQ ID NO: 65176 - RNA, 22 nt, Artificial Sequence
  LRRK2 RNA guide
uuuaaaaaugauaaccgaggag

SEQ ID NO: 65177 - RNA, 20 nt, Artificial Sequence
  LRRK2 RNA guide
aaaaaugauaacugaggagc

SEQ ID NO: 65178 - RNA, 20 nt, Artificial Sequence
  LRRK2 RNA guide
aaaaugauaacugaggagcc

SEQ ID NO: 65179 - RNA, 20 nt, Artificial Sequence
  LRRK2 RNA guide
aaaugauaacugaggagcca

SEQ ID NO: 65180 - RNA, 20 nt, Artificial Sequence
  LRRK2 RNA guide
aacugaggagccagacagau

SEQ ID NO: 65181 - RNA, 20 nt, Artificial Sequence
  LRRK2 RNA guide
aaugauaacugaggagccag

SEQ ID NO: 65182 - RNA, 20 nt, Artificial Sequence
  LRRK2 RNA guide
acugaggagccagacagauc

SEQ ID NO: 65183 - RNA, 20 nt, Artificial Sequence
  LRRK2 RNA guide
auaacugaggagccagacag

SEQ ID NO: 65184 - RNA, 20 nt, Artificial Sequence
  LRRK2 RNA guide
aucugucuggcuccucaguu

SEQ ID NO: 65185 - RNA, 20 nt, Artificial Sequence
  LRRK2 RNA guide
augauaacugaggagccaga

SEQ ID NO: 65186 - RNA, 20 nt, Artificial Sequence
  LRRK2 RNA guide
cuccucaguuaucauuuuua

SEQ ID NO: 65187 - RNA, 20 nt, Artificial Sequence
  LRRK2 RNA guide
cugaggagccagacagauca

SEQ ID NO: 65188 - RNA, 20 nt, Artificial Sequence
  LRRK2 RNA guide
cuggcuccucaguuaucauu

SEQ ID NO: 65189 - RNA, 20 nt, Artificial Sequence
  LRRK2 RNA guide
cugucuggcuccucaguuau

SEQ ID NO: 65190 - RNA, 20 nt, Artificial Sequence
  LRRK2 RNA guide
gauaacugaggagccagaca

SEQ ID NO: 65191 - RNA, 20 nt, Artificial Sequence
  LRRK2 RNA guide
gaucugucuggcuccucagu

SEQ ID NO: 65192 - RNA, 20 nt, Artificial Sequence
  LRRK2 RNA guide
gcuccucaguuaucauuuuu

SEQ ID NO: 65193 - RNA, 20 nt, Artificial Sequence
  LRRK2 RNA guide
ggcuccucaguuaucauuuu

SEQ ID NO: 65194 - RNA, 20 nt, Artificial Sequence
  LRRK2 RNA guide
gucuggcuccucaguuauca

SEQ ID NO: 65195 - RNA, 20 nt, Artificial Sequence
  LRRK2 RNA guide
gugaucugucuggcuccuca

SEQ ID NO: 65196 - RNA, 20 nt, Artificial Sequence
  LRRK2 RNA guide
uaaaaaugauaacugaggag

SEQ ID NO: 65197 - RNA, 20 nt, Artificial Sequence
  LRRK2 RNA guide
uaacugaggagccagacaga

SEQ ID NO: 65198 - RNA, 20 nt, Artificial Sequence
  LRRK2 RNA guide
ucuggcuccucaguuaucau

SEQ ID NO: 65199 - RNA, 20 nt, Artificial Sequence
  LRRK2 RNA guide
ucugucuggcuccucaguua

SEQ ID NO: 65200 - RNA, 20 nt, Artificial Sequence
  LRRK2 RNA guide
ugauaacugaggagccagac

SEQ ID NO: 65201 - RNA, 20 nt, Artificial Sequence
  LRRK2 RNA guide
ugaucugucuggcuccucag

SEQ ID NO: 65202 - RNA, 20 nt, Artificial Sequence
  LRRK2 RNA guide
uggcuccucaguuaucauuu

SEQ ID NO: 65203 - RNA, 20 nt, Artificial Sequence
  LRRK2 RNA guide
ugucuggcuccucaguuauc

SEQ ID NO: 65204 - RNA, 21 nt, Artificial Sequence
  LRRK2 RNA guide
aaaaaugauaacugaggagcc

SEQ ID NO: 65205 - RNA, 21 nt, Artificial Sequence
  LRRK2 RNA guide
aaaaugauaacugaggagcca

SEQ ID NO: 65206 - RNA, 21 nt, Artificial Sequence
  LRRK2 RNA guide
aaaugauaacugaggagccag

SEQ ID NO: 65207 - RNA, 21 nt, Artificial Sequence
  LRRK2 RNA guide
aacugaggagccagacagauc

SEQ ID NO: 65208 - RNA, 21 nt, Artificial Sequence
  LRRK2 RNA guide
aaugauaacugaggagccaga

SEQ ID NO: 65209 - RNA, 21 nt, Artificial Sequence
  LRRK2 RNA guide
acugaggagccagacagauca

SEQ ID NO: 65210 - RNA, 21 nt, Artificial Sequence
  LRRK2 RNA guide
auaacugaggagccagacaga

SEQ ID NO: 65211 - RNA, 21 nt, Artificial Sequence
  LRRK2 RNA guide
aucugucuggcuccucaguua

SEQ ID NO: 65212 - RNA, 21 nt, Artificial Sequence
  LRRK2 RNA guide
augauaacugaggagccagac

SEQ ID NO: 65213 - RNA, 21 nt, Artificial Sequence
  LRRK2 RNA guide
cugaggagccagacagaucac

SEQ ID NO: 65214 - RNA, 21 nt, Artificial Sequence
  LRRK2 RNA guide
cuggcuccucaguuaucauuu

SEQ ID NO: 65215 - RNA, 21 nt, Artificial Sequence
  LRRK2 RNA guide
cugucuggcuccucaguuauc

SEQ ID NO: 65216 - RNA, 21 nt, Artificial Sequence
  LRRK2 RNA guide
gauaacugaggagccagacag

SEQ ID NO: 65217 - RNA, 21 nt, Artificial Sequence
  LRRK2 RNA guide
gaucugucuggcuccucaguu

SEQ ID NO: 65218 - RNA, 21 nt, Artificial Sequence
  LRRK2 RNA guide
gcuccucaguuaucauuuuua

SEQ ID NO: 65219 - RNA, 21 nt, Artificial Sequence
  LRRK2 RNA guide
ggcuccucaguuaucauuuuu

SEQ ID NO: 65220 - RNA, 21 nt, Artificial Sequence
  LRRK2 RNA guide
gucuggcuccucaguuaucau

SEQ ID NO: 65221 - RNA, 21 nt, Artificial Sequence
  LRRK2 RNA guide
gugaucugucuggcuccucag

SEQ ID NO: 65222 - RNA, 21 nt, Artificial Sequence
  LRRK2 RNA guide
uaaaaaugauaacugaggagc

SEQ ID NO: 65223 - RNA, 21 nt, Artificial Sequence
  LRRK2 RNA guide
uaacugaggagccagacagau

SEQ ID NO: 65224 - RNA, 21 nt, Artificial Sequence
  LRRK2 RNA guide
ucuggcuccucaguuaucauu

SEQ ID NO: 65225 - RNA, 21 nt, Artificial Sequence
  LRRK2 RNA guide
ucugucuggcuccucaguuau

SEQ ID NO: 65226 - RNA, 21 nt, Artificial Sequence
  LRRK2 RNA guide
ugauaacugaggagccagaca

SEQ ID NO: 65227 - RNA, 21 nt, Artificial Sequence
  LRRK2 RNA guide
ugaucugucuggcuccucagu

SEQ ID NO: 65228 - RNA, 21 nt, Artificial Sequence
  LRRK2 RNA guide
uggcuccucaguuaucauuuu

SEQ ID NO: 65229 - RNA, 21 nt, Artificial Sequence
  LRRK2 RNA guide
ugucuggcuccucaguuauca

SEQ ID NO: 65230 - RNA, 21 nt, Artificial Sequence
  LRRK2 RNA guide
ugugaucugucuggcuccuca

SEQ ID NO: 65231 - RNA, 22 nt, Artificial Sequence
  LRRK2 RNA guide
aaaaaugauaacugaggagcca

SEQ ID NO: 65232 - RNA, 22 nt, Artificial Sequence
  LRRK2 RNA guide
aaaaugauaacugaggagccag

SEQ ID NO: 65233 - RNA, 22 nt, Artificial Sequence
  LRRK2 RNA guide
aaaugauaacugaggagccaga

SEQ ID NO: 65234 - RNA, 22 nt, Artificial Sequence
  LRRK2 RNA guide
aacugaggagccagacagauca

SEQ ID NO: 65235 - RNA, 22 nt, Artificial Sequence
  LRRK2 RNA guide
aaugauaacugaggagccagac

SEQ ID NO: 65236 - RNA, 22 nt, Artificial Sequence
  LRRK2 RNA guide
acugaggagccagacagaucac

SEQ ID NO: 65237 - RNA, 22 nt, Artificial Sequence
  LRRK2 RNA guide
auaacugaggagccagacagau

SEQ ID NO: 65238 - RNA, 22 nt, Artificial Sequence
  LRRK2 RNA guide
aucugucuggcuccucaguuau

SEQ ID NO: 65239 - RNA, 22 nt, Artificial Sequence
  LRRK2 RNA guide
augauaacugaggagccagaca

SEQ ID NO: 65240 - RNA, 22 nt, Artificial Sequence
  LRRK2 RNA guide
cugaggagccagacagaucaca

SEQ ID NO: 65241 - RNA, 22 nt, Artificial Sequence
  LRRK2 RNA guide
cuggcuccucaguuaucauuuu

SEQ ID NO: 65242 - RNA, 22 nt, Artificial Sequence
  LRRK2 RNA guide
cugucuggcuccucaguuauca

SEQ ID NO: 65243 - RNA, 22 nt, Artificial Sequence
  LRRK2 RNA guide
cugugaucugucuggcuccuca

SEQ ID NO: 65244 - RNA, 22 nt, Artificial Sequence
  LRRK2 RNA guide
gauaacugaggagccagacaga

SEQ ID NO: 65245 - RNA, 22 nt, Artificial Sequence
  LRRK2 RNA guide
gaucugucuggcuccucaguua

SEQ ID NO: 65246 - RNA, 22 nt, Artificial Sequence
  LRRK2 RNA guide
gcuccucaguuaucauuuuuaa

SEQ ID NO: 65247 - RNA, 22 nt, Artificial Sequence
  LRRK2 RNA guide
ggcuccucaguuaucauuuuua

SEQ ID NO: 65248 - RNA, 22 nt, Artificial Sequence
  LRRK2 RNA guide
gucuggcuccucaguuaucauu

SEQ ID NO: 65249 - RNA, 22 nt, Artificial Sequence
  LRRK2 RNA guide
gugaucugucuggcuccucagu

SEQ ID NO: 65250 - RNA, 22 nt, Artificial Sequence
  LRRK2 RNA guide
uaaaaaugauaacugaggagcc

SEQ ID NO: 65251 - RNA, 22 nt, Artificial Sequence
  LRRK2 RNA guide
uaacugaggagccagacagauc

SEQ ID NO: 65252 - RNA, 22 nt, Artificial Sequence
  LRRK2 RNA guide
ucuggcuccucaguuaucauuu

SEQ ID NO: 65253 - RNA, 22 nt, Artificial Sequence
  LRRK2 RNA guide
ucugucuggcuccucaguuauc

SEQ ID NO: 65254 - RNA, 22 nt, Artificial Sequence
  LRRK2 RNA guide
ugauaacugaggagccagacag

SEQ ID NO: 65255 - RNA, 22 nt, Artificial Sequence
  LRRK2 RNA guide
ugaucugucuggcuccucaguu

SEQ ID NO: 65256 - RNA, 22 nt, Artificial Sequence
  LRRK2 RNA guide
uggcuccucaguuaucauuuuu

SEQ ID NO: 65257 - RNA, 22 nt, Artificial Sequence
  LRRK2 RNA guide
ugucuggcuccucaguuaucau

SEQ ID NO: 65258 - RNA, 22 nt, Artificial Sequence
  LRRK2 RNA guide
ugugaucugucuggcuccucag

SEQ ID NO: 65259 - RNA, 22 nt, Artificial Sequence
  LRRK2 RNA guide
uuaaaaaugauaacugaggagc

SEQ ID NO: 65260 - RNA, 20 nt, Artificial Sequence
  LRRK2 RNA guide
aaaguuguccaaaauuugag

SEQ ID NO: 65261 - RNA, 20 nt, Artificial Sequence
  LRRK2 RNA guide
aaguuguccaaaauuugaga

SEQ ID NO: 65262 - RNA, 20 nt, Artificial Sequence
  LRRK2 RNA guide
aauuuuggacaacuuuuugc

SEQ ID NO: 65263 - RNA, 20 nt, Artificial Sequence
  LRRK2 RNA guide
agcaaaaaguuguccaaaau

SEQ ID NO: 65264 - RNA, 20 nt, Artificial Sequence
  LRRK2 RNA guide
agcuuuaaauaucaugucuc

SEQ ID NO: 65265 - RNA, 20 nt, Artificial Sequence
  LRRK2 RNA guide
aguuguccaaaauuugagac

SEQ ID NO: 65266 - RNA, 20 nt, Artificial Sequence
  LRRK2 RNA guide
aucaugucucaaauuuugga

SEQ ID NO: 65267 - RNA, 20 nt, Artificial Sequence
  LRRK2 RNA guide
augucucaaauuuuggacaa

SEQ ID NO: 65268 - RNA, 20 nt, Artificial Sequence
  LRRK2 RNA guide
auuagcaaaaaguuguccaa

SEQ ID NO: 65269 - RNA, 20 nt, Artificial Sequence
  LRRK2 RNA guide
auuuuggacaacuuuuugcu

SEQ ID NO: 65270 - RNA, 20 nt, Artificial Sequence
  LRRK2 RNA guide
caugucucaaauuuuggaca

SEQ ID NO: 65271 - RNA, 20 nt, Artificial Sequence
  LRRK2 RNA guide
ccaaaauuugagacaugaua

SEQ ID NO: 65272 - RNA, 20 nt, Artificial Sequence
  LRRK2 RNA guide
gcaaaaaguuguccaaaauu

SEQ ID NO: 65273 - RNA, 20 nt, Artificial Sequence
  LRRK2 RNA guide
gcuuuaaauaucaugucuca

SEQ ID NO: 65274 - RNA, 20 nt, Artificial Sequence
  LRRK2 RNA guide
guccaaaauuugagacauga

SEQ ID NO: 65275 - RNA, 20 nt, Artificial Sequence
  LRRK2 RNA guide
gucucaaauuuuggacaacu

SEQ ID NO: 65276 - RNA, 20 nt, Artificial Sequence
  LRRK2 RNA guide
guuguccaaaauuugagaca

SEQ ID NO: 65277 - RNA, 20 nt, Artificial Sequence
  LRRK2 RNA guide
uagcaaaaaguuguccaaaa

SEQ ID NO: 65278 - RNA, 20 nt, Artificial Sequence
  LRRK2 RNA guide
uaucaugucucaaauuuugg

SEQ ID NO: 65279 - RNA, 20 nt, Artificial Sequence
  LRRK2 RNA guide
uauuagcaaaaaguugucca

SEQ ID NO: 65280 - RNA, 20 nt, Artificial Sequence
  LRRK2 RNA guide
ucaugucucaaauuuuggac

SEQ ID NO: 65281 - RNA, 20 nt, Artificial Sequence
  LRRK2 RNA guide
uccaaaauuugagacaugau

SEQ ID NO: 65282 - RNA, 20 nt, Artificial Sequence
  LRRK2 RNA guide
ucucaaauuuuggacaacuu

SEQ ID NO: 65283 - RNA, 20 nt, Artificial Sequence
  LRRK2 RNA guide
uguccaaaauuugagacaug

SEQ ID NO: 65284 - RNA, 20 nt, Artificial Sequence
  LRRK2 RNA guide
ugucucaaauuuuggacaac

SEQ ID NO: 65285 - RNA, 20 nt, Artificial Sequence
  LRRK2 RNA guide
uuagcaaaaaguuguccaaa

SEQ ID NO: 65286 - RNA, 20 nt, Artificial Sequence
  LRRK2 RNA guide
uuauuagcaaaaaguugucc

SEQ ID NO: 65287 - RNA, 20 nt, Artificial Sequence
  LRRK2 RNA guide
uuguccaaaauuugagacau

SEQ ID NO: 65288 - RNA, 20 nt, Artificial Sequence
  LRRK2 RNA guide
uuuuggacaacuuuuugcua

SEQ ID NO: 65289 - RNA, 21 nt, Artificial Sequence
  LRRK2 RNA guide
aaguuguccaaaauuugagac

SEQ ID NO: 65290 - RNA, 21 nt, Artificial Sequence
  LRRK2 RNA guide
aguuguccaaaauuugagaca

SEQ ID NO: 65291 - RNA, 21 nt, Artificial Sequence
  LRRK2 RNA guide
aucaugucucaaauuuuggac

SEQ ID NO: 65292 - RNA, 21 nt, Artificial Sequence
  LRRK2 RNA guide
augucucaaauuuuggacaac

SEQ ID NO: 65293 - RNA, 21 nt, Artificial Sequence
  LRRK2 RNA guide
caugucucaaauuuuggacaa

SEQ ID NO: 65294 - RNA, 21 nt, Artificial Sequence
  LRRK2 RNA guide
guccaaaauuugagacaugau

SEQ ID NO: 65295 - RNA, 21 nt, Artificial Sequence
  LRRK2 RNA guide
gucucaaauuuuggacaacuu

SEQ ID NO: 65296 - RNA, 21 nt, Artificial Sequence
  LRRK2 RNA guide
guuguccaaaauuugagacau

SEQ ID NO: 65297 - RNA, 21 nt, Artificial Sequence
  LRRK2 RNA guide
ucaugucucaaauuuuggaca

SEQ ID NO: 65298 - RNA, 21 nt, Artificial Sequence
  LRRK2 RNA guide
uguccaaaauuugagacauga

SEQ ID NO: 65299 - RNA, 21 nt, Artificial Sequence
  LRRK2 RNA guide
ugucucaaauuuuggacaacu

SEQ ID NO: 65300 - RNA, 21 nt, Artificial Sequence
  LRRK2 RNA guide
uuguccaaaauuugagacaug

SEQ ID NO: 65301 - RNA, 22 nt, Artificial Sequence
  LRRK2 RNA guide
aaaguuguccaaaauuugagac

SEQ ID NO: 65302 - RNA, 22 nt, Artificial Sequence
  LRRK2 RNA guide
aaguuguccaaaauuugagaca

SEQ ID NO: 65303 - RNA, 22 nt, Artificial Sequence
  LRRK2 RNA guide
aguuguccaaaauuugagacau

SEQ ID NO: 65304 - RNA, 22 nt, Artificial Sequence
  LRRK2 RNA guide
aucaugucucaaauuuuggaca

SEQ ID NO: 65305 - RNA, 22 nt, Artificial Sequence
  LRRK2 RNA guide
augucucaaauuuuggacaacu

SEQ ID NO: 65306 - RNA, 22 nt, Artificial Sequence
  LRRK2 RNA guide
caaauuuuggacaacuuuuugc

SEQ ID NO: 65307 - RNA, 22 nt, Artificial Sequence
  LRRK2 RNA guide
caugucucaaauuuuggacaac

SEQ ID NO: 65308 - RNA, 22 nt, Artificial Sequence
  LRRK2 RNA guide
gcaaaaaguuguccaaaauuug

SEQ ID NO: 65309 - RNA, 22 nt, Artificial Sequence
  LRRK2 RNA guide
guccaaaauuugagacaugaua

SEQ ID NO: 65310 - RNA, 22 nt, Artificial Sequence
  LRRK2 RNA guide
gucucaaauuuuggacaacuuu

SEQ ID NO: 65311 - RNA, 22 nt, Artificial Sequence
  LRRK2 RNA guide
guuguccaaaauuugagacaug

SEQ ID NO: 65312 - RNA, 22 nt, Artificial Sequence
  LRRK2 RNA guide
uaucaugucucaaauuuuggac

SEQ ID NO: 65313 - RNA, 22 nt, Artificial Sequence
  LRRK2 RNA guide
ucaugucucaaauuuuggacaa

SEQ ID NO: 65314 - RNA, 22 nt, Artificial Sequence
  LRRK2 RNA guide
uguccaaaauuugagacaugau

SEQ ID NO: 65315 - RNA, 22 nt, Artificial Sequence
  LRRK2 RNA guide
ugucucaaauuuuggacaacuu

SEQ ID NO: 65316 - RNA, 22 nt, Artificial Sequence
  LRRK2 RNA guide
uuguccaaaauuugagacauga

SEQ ID NO: 65317 - RNA, 20 nt, Artificial Sequence
  LRRK2 RNA guide
aaaguuguccaauauuugag

SEQ ID NO: 65318 - RNA, 20 nt, Artificial Sequence
  LRRK2 RNA guide
aaguuguccaauauuugaga

SEQ ID NO: 65319 - RNA, 20 nt, Artificial Sequence
  LRRK2 RNA guide
aauauuggacaacuuuuugc

SEQ ID NO: 65320 - RNA, 20 nt, Artificial Sequence
  LRRK2 RNA guide
agcaaaaaguuguccaauau

SEQ ID NO: 65321 - RNA, 20 nt, Artificial Sequence
  LRRK2 RNA guide
aguuguccaauauuugagac

SEQ ID NO: 65322 - RNA, 20 nt, Artificial Sequence
  LRRK2 RNA guide
auauuggacaacuuuuugcu

SEQ ID NO: 65323 - RNA, 20 nt, Artificial Sequence
  LRRK2 RNA guide
aucaugucucaaauauugga

SEQ ID NO: 65324 - RNA, 20 nt, Artificial Sequence
  LRRK2 RNA guide
augucucaaauauuggacaa

SEQ ID NO: 65325 - RNA, 20 nt, Artificial Sequence
  LRRK2 RNA guide
caugucucaaauauuggaca

SEQ ID NO: 65326 - RNA, 20 nt, Artificial Sequence
  LRRK2 RNA guide
ccaauauuugagacaugaua

SEQ ID NO: 65327 - RNA, 20 nt, Artificial Sequence
  LRRK2 RNA guide
cucaaauauuggacaacuuu

SEQ ID NO: 65328 - RNA, 20 nt, Artificial Sequence
  LRRK2 RNA guide
gcaaaaaguuguccaauauu

SEQ ID NO: 65329 - RNA, 20 nt, Artificial Sequence
  LRRK2 RNA guide
guccaauauuugagacauga

SEQ ID NO: 65330 - RNA, 20 nt, Artificial Sequence
  LRRK2 RNA guide
gucucaaauauuggacaacu

SEQ ID NO: 65331 - RNA, 20 nt, Artificial Sequence
  LRRK2 RNA guide
guuguccaauauuugagaca

SEQ ID NO: 65332 - RNA, 20 nt, Artificial Sequence
  LRRK2 RNA guide
uagcaaaaaguuguccaaua

SEQ ID NO: 65333 - RNA, 20 nt, Artificial Sequence
  LRRK2 RNA guide
uaucaugucucaaauauugg

SEQ ID NO: 65334 - RNA, 20 nt, Artificial Sequence
  LRRK2 RNA guide
uauuggacaacuuuuugcua

SEQ ID NO: 65335 - RNA, 20 nt, Artificial Sequence
  LRRK2 RNA guide
ucaugucucaaauauuggac

SEQ ID NO: 65336 - RNA, 20 nt, Artificial Sequence
  LRRK2 RNA guide
uccaauauuugagacaugau

SEQ ID NO: 65337 - RNA, 20 nt, Artificial Sequence
  LRRK2 RNA guide
ucucaaauauuggacaacuu

SEQ ID NO: 65338 - RNA, 20 nt, Artificial Sequence
  LRRK2 RNA guide
uguccaauauuugagacaug

SEQ ID NO: 65339 - RNA, 20 nt, Artificial Sequence
  LRRK2 RNA guide
ugucucaaauauuggacaac

SEQ ID NO: 65340 - RNA, 20 nt, Artificial Sequence
  LRRK2 RNA guide
uuagcaaaaaguuguccaau

SEQ ID NO: 65341 - RNA, 20 nt, Artificial Sequence
  LRRK2 RNA guide
uuguccaauauuugagacau

SEQ ID NO: 65342 - RNA, 21 nt, Artificial Sequence
  LRRK2 RNA guide
aaguuguccaauauuugagac

SEQ ID NO: 65343 - RNA, 21 nt, Artificial Sequence
  LRRK2 RNA guide
aguuguccaauauuugagaca

SEQ ID NO: 65344 - RNA, 21 nt, Artificial Sequence
  LRRK2 RNA guide
aucaugucucaaauauuggac

SEQ ID NO: 65345 - RNA, 21 nt, Artificial Sequence
  LRRK2 RNA guide
augucucaaauauuggacaac

SEQ ID NO: 65346 - RNA, 21 nt, Artificial Sequence
  LRRK2 RNA guide
caugucucaaauauuggacaa

SEQ ID NO: 65347 - RNA, 21 nt, Artificial Sequence
  LRRK2 RNA guide
guccaauauuugagacaugau

SEQ ID NO: 65348 - RNA, 21 nt, Artificial Sequence
  LRRK2 RNA guide
gucucaaauauuggacaacuu

SEQ ID NO: 65349 - RNA, 21 nt, Artificial Sequence
  LRRK2 RNA guide
guuguccaauauuugagacau

SEQ ID NO: 65350 - RNA, 21 nt, Artificial Sequence
  LRRK2 RNA guide
ucaugucucaaauauuggaca

SEQ ID NO: 65351 - RNA, 21 nt, Artificial Sequence
  LRRK2 RNA guide
uguccaauauuugagacauga

SEQ ID NO: 65352 - RNA, 21 nt, Artificial Sequence
  LRRK2 RNA guide
ugucucaaauauuggacaacu

SEQ ID NO: 65353 - RNA, 21 nt, Artificial Sequence
  LRRK2 RNA guide
uuguccaauauuugagacaug

SEQ ID NO: 65354 - RNA, 22 nt, Artificial Sequence
  LRRK2 RNA guide
aaaguuguccaauauuugagac

SEQ ID NO: 65355 - RNA, 22 nt, Artificial Sequence
  LRRK2 RNA guide
aaguuguccaauauuugagaca

SEQ ID NO: 65356 - RNA, 22 nt, Artificial Sequence
  LRRK2 RNA guide
aguuguccaauauuugagacau

SEQ ID NO: 65357 - RNA, 22 nt, Artificial Sequence
  LRRK2 RNA guide
aucaugucucaaauauuggaca

SEQ ID NO: 65358 - RNA, 22 nt, Artificial Sequence
  LRRK2 RNA guide
augucucaaauauuggacaacu

SEQ ID NO: 65359 - RNA, 22 nt, Artificial Sequence
  LRRK2 RNA guide
caaauauuggacaacuuuuugc

SEQ ID NO: 65360 - RNA, 22 nt, Artificial Sequence
  LRRK2 RNA guide
caugucucaaauauuggacaac

SEQ ID NO: 65361 - RNA, 22 nt, Artificial Sequence
  LRRK2 RNA guide
gcaaaaaguuguccaauauuug

SEQ ID NO: 65362 - RNA, 22 nt, Artificial Sequence
  LRRK2 RNA guide
guccaauauuugagacaugaua

SEQ ID NO: 65363 - RNA, 22 nt, Artificial Sequence
  LRRK2 RNA guide
gucucaaauauuggacaacuuu

SEQ ID NO: 65364 - RNA, 22 nt, Artificial Sequence
  LRRK2 RNA guide
guuguccaauauuugagacaug

SEQ ID NO: 65365 - RNA, 22 nt, Artificial Sequence
  LRRK2 RNA guide
uaucaugucucaaauauuggac

SEQ ID NO: 65366 - RNA, 22 nt, Artificial Sequence
  LRRK2 RNA guide
ucaugucucaaauauuggacaa

SEQ ID NO: 65367 - RNA, 22 nt, Artificial Sequence
  LRRK2 RNA guide
uguccaauauuugagacaugau

SEQ ID NO: 65368 - RNA, 22 nt, Artificial Sequence
  LRRK2 RNA guide
ugucucaaauauuggacaacuu

SEQ ID NO: 65369 - RNA, 22 nt, Artificial Sequence
  LRRK2 RNA guide
uuguccaauauuugagacauga

SEQ ID NO: 65370 - RNA, 20 nt, Artificial Sequence
  LRRK2 RNA guide
cuucaacuccugaccucgug

SEQ ID NO: 65371 - RNA, 20 nt, Artificial Sequence
  LRRK2 RNA guide
gguguaucacgaggucagga

SEQ ID NO: 65372 - RNA, 20 nt, Artificial Sequence
  LRRK2 RNA guide
guaucacgaggucaggaguu

SEQ ID NO: 65373 - RNA, 20 nt, Artificial Sequence
  LRRK2 RNA guide
guguaucacgaggucaggag

SEQ ID NO: 65374 - RNA, 20 nt, Artificial Sequence
  LRRK2 RNA guide
ucaacuccugaccucgugau

SEQ ID NO: 65375 - RNA, 20 nt, Artificial Sequence
  LRRK2 RNA guide
ucuucaacuccugaccucgu

SEQ ID NO: 65376 - RNA, 20 nt, Artificial Sequence
  LRRK2 RNA guide
uguaucacgaggucaggagu

SEQ ID NO: 65377 - RNA, 20 nt, Artificial Sequence
  LRRK2 RNA guide
uucaacuccugaccucguga

SEQ ID NO: 65378 - RNA, 21 nt, Artificial Sequence
  LRRK2 RNA guide
cuucaacuccugaccucguga

SEQ ID NO: 65379 - RNA, 21 nt, Artificial Sequence
  LRRK2 RNA guide
ggguguaucacgaggucagga

SEQ ID NO: 65380 - RNA, 21 nt, Artificial Sequence
  LRRK2 RNA guide
gguguaucacgaggucaggag

SEQ ID NO: 65381 - RNA, 21 nt, Artificial Sequence
  LRRK2 RNA guide
guaucacgaggucaggaguug

SEQ ID NO: 65382 - RNA, 21 nt, Artificial Sequence
  LRRK2 RNA guide
gucuucaacuccugaccucgu

SEQ ID NO: 65383 - RNA, 21 nt, Artificial Sequence
  LRRK2 RNA guide
guguaucacgaggucaggagu

SEQ ID NO: 65384 - RNA, 21 nt, Artificial Sequence
  LRRK2 RNA guide
ucaacuccugaccucgugaua

SEQ ID NO: 65385 - RNA, 21 nt, Artificial Sequence
  LRRK2 RNA guide
ucuucaacuccugaccucgug

SEQ ID NO: 65386 - RNA, 21 nt, Artificial Sequence
  LRRK2 RNA guide
uguaucacgaggucaggaguu

SEQ ID NO: 65387 - RNA, 21 nt, Artificial Sequence
  LRRK2 RNA guide
uucaacuccugaccucgugau

SEQ ID NO: 65388 - RNA, 22 nt, Artificial Sequence
  LRRK2 RNA guide
cuucaacuccugaccucgugau

SEQ ID NO: 65389 - RNA, 22 nt, Artificial Sequence
  LRRK2 RNA guide
ggguguaucacgaggucaggag

SEQ ID NO: 65390 - RNA, 22 nt, Artificial Sequence
  LRRK2 RNA guide
ggucuucaacuccugaccucgu

SEQ ID NO: 65391 - RNA, 22 nt, Artificial Sequence
  LRRK2 RNA guide
gguguaucacgaggucaggagu

SEQ ID NO: 65392 - RNA, 22 nt, Artificial Sequence
  LRRK2 RNA guide
guaucacgaggucaggaguuga

SEQ ID NO: 65393 - RNA, 22 nt, Artificial Sequence
  LRRK2 RNA guide
gucuucaacuccugaccucgug

SEQ ID NO: 65394 - RNA, 22 nt, Artificial Sequence
  LRRK2 RNA guide
guguaucacgaggucaggaguu

SEQ ID NO: 65395 - RNA, 22 nt, Artificial Sequence
  LRRK2 RNA guide
ucaacuccugaccucgugauac

SEQ ID NO: 65396 - RNA, 22 nt, Artificial Sequence
  LRRK2 RNA guide
ucuucaacuccugaccucguga

SEQ ID NO: 65397 - RNA, 22 nt, Artificial Sequence
  LRRK2 RNA guide
uggguguaucacgaggucagga

SEQ ID NO: 65398 - RNA, 22 nt, Artificial Sequence
  LRRK2 RNA guide
uguaucacgaggucaggaguug

SEQ ID NO: 65399 - RNA, 22 nt, Artificial Sequence
  LRRK2 RNA guide
uucaacuccugaccucgugaua

SEQ ID NO: 65400 - RNA, 20 nt, Artificial Sequence
  LRRK2 RNA guide
agcuccugaccucgugauac

SEQ ID NO: 65401 - RNA, 20 nt, Artificial Sequence
  LRRK2 RNA guide
agcugaagaccagccugacc

SEQ ID NO: 65402 - RNA, 20 nt, Artificial Sequence
  LRRK2 RNA guide
aucuuggucaggcuggucuu

SEQ ID NO: 65403 - RNA, 20 nt, Artificial Sequence
  LRRK2 RNA guide
cagcuccugaccucgugaua

SEQ ID NO: 65404 - RNA, 20 nt, Artificial Sequence
  LRRK2 RNA guide
caucuuggucaggcuggucu

SEQ ID NO: 65405 - RNA, 20 nt, Artificial Sequence
  LRRK2 RNA guide
ccaucuuggucaggcugguc

SEQ ID NO: 65406 - RNA, 20 nt, Artificial Sequence
  LRRK2 RNA guide
cuucagcuccugaccucgug

SEQ ID NO: 65407 - RNA, 20 nt, Artificial Sequence
  LRRK2 RNA guide
cuuggucaggcuggucuuca

SEQ ID NO: 65408 - RNA, 20 nt, Artificial Sequence
  LRRK2 RNA guide
gagcugaagaccagccugac

SEQ ID NO: 65409 - RNA, 20 nt, Artificial Sequence
  LRRK2 RNA guide
gcugaagaccagccugacca

SEQ ID NO: 65410 - RNA, 20 nt, Artificial Sequence
  LRRK2 RNA guide
ggagcugaagaccagccuga

SEQ ID NO: 65411 - RNA, 20 nt, Artificial Sequence
  LRRK2 RNA guide
ggguguaucacgaggucagg

SEQ ID NO: 65412 - RNA, 20 nt, Artificial Sequence
  LRRK2 RNA guide
guaucacgaggucaggagcu

SEQ ID NO: 65413 - RNA, 20 nt, Artificial Sequence
  LRRK2 RNA guide
gucuucagcuccugaccucg

SEQ ID NO: 65414 - RNA, 20 nt, Artificial Sequence
  LRRK2 RNA guide
guggguguaucacgagguca

SEQ ID NO: 65415 - RNA, 20 nt, Artificial Sequence
  LRRK2 RNA guide
uaucacgaggucaggagcug

SEQ ID NO: 65416 - RNA, 20 nt, Artificial Sequence
  LRRK2 RNA guide
ucagcuccugaccucgugau

SEQ ID NO: 65417 - RNA, 20 nt, Artificial Sequence
  LRRK2 RNA guide
ucuucagcuccugaccucgu

SEQ ID NO: 65418 - RNA, 20 nt, Artificial Sequence
  LRRK2 RNA guide
ucuuggucaggcuggucuuc

SEQ ID NO: 65419 - RNA, 20 nt, Artificial Sequence
  LRRK2 RNA guide
uggguguaucacgaggucag

SEQ ID NO: 65420 - RNA, 20 nt, Artificial Sequence
  LRRK2 RNA guide
uguaucacgaggucaggagc

SEQ ID NO: 65421 - RNA, 20 nt, Artificial Sequence
  LRRK2 RNA guide
uucagcuccugaccucguga

SEQ ID NO: 65422 - RNA, 21 nt, Artificial Sequence
  LRRK2 RNA guide
accaucuuggucaggcugguc

SEQ ID NO: 65423 - RNA, 21 nt, Artificial Sequence
  LRRK2 RNA guide
agcuccugaccucgugauaca

SEQ ID NO: 65424 - RNA, 21 nt, Artificial Sequence
  LRRK2 RNA guide
agcugaagaccagccugacca

SEQ ID NO: 65425 - RNA, 21 nt, Artificial Sequence
  LRRK2 RNA guide
aggagcugaagaccagccuga

SEQ ID NO: 65426 - RNA, 21 nt, Artificial Sequence
  LRRK2 RNA guide
aucuuggucaggcuggucuuc

SEQ ID NO: 65427 - RNA, 21 nt, Artificial Sequence
  LRRK2 RNA guide
cagcuccugaccucgugauac

SEQ ID NO: 65428 - RNA, 21 nt, Artificial Sequence
  LRRK2 RNA guide
caucuuggucaggcuggucuu

SEQ ID NO: 65429 - RNA, 21 nt, Artificial Sequence
  LRRK2 RNA guide
ccaucuuggucaggcuggucu

SEQ ID NO: 65430 - RNA, 21 nt, Artificial Sequence
  LRRK2 RNA guide
cuucagcuccugaccucguga

SEQ ID NO: 65431 - RNA, 21 nt, Artificial Sequence
  LRRK2 RNA guide
cuuggucaggcuggucuucag

SEQ ID NO: 65432 - RNA, 21 nt, Artificial Sequence
  LRRK2 RNA guide
gagcugaagaccagccugacc

SEQ ID NO: 65433 - RNA, 21 nt, Artificial Sequence
  LRRK2 RNA guide
gcugaagaccagccugaccaa

SEQ ID NO: 65434 - RNA, 21 nt, Artificial Sequence
  LRRK2 RNA guide
ggagcugaagaccagccugac

SEQ ID NO: 65435 - RNA, 21 nt, Artificial Sequence
  LRRK2 RNA guide
ggucuucagcuccugaccucg

SEQ ID NO: 65436 - RNA, 21 nt, Artificial Sequence
  LRRK2 RNA guide
gguggguguaucacgagguca

SEQ ID NO: 65437 - RNA, 21 nt, Artificial Sequence
  LRRK2 RNA guide
guaucacgaggucaggagcug

SEQ ID NO: 65438 - RNA, 21 nt, Artificial Sequence
  LRRK2 RNA guide
gucuucagcuccugaccucgu

SEQ ID NO: 65439 - RNA, 21 nt, Artificial Sequence
  LRRK2 RNA guide
guggguguaucacgaggucag

SEQ ID NO: 65440 - RNA, 21 nt, Artificial Sequence
  LRRK2 RNA guide
guguaucacgaggucaggagc

SEQ ID NO: 65441 - RNA, 21 nt, Artificial Sequence
  LRRK2 RNA guide
uaucacgaggucaggagcuga

SEQ ID NO: 65442 - RNA, 21 nt, Artificial Sequence
  LRRK2 RNA guide
ucagcuccugaccucgugaua

SEQ ID NO: 65443 - RNA, 21 nt, Artificial Sequence
  LRRK2 RNA guide
ucuucagcuccugaccucgug

SEQ ID NO: 65444 - RNA, 21 nt, Artificial Sequence
  LRRK2 RNA guide
ucuuggucaggcuggucuuca

SEQ ID NO: 65445 - RNA, 21 nt, Artificial Sequence
  LRRK2 RNA guide
uggguguaucacgaggucagg

SEQ ID NO: 65446 - RNA, 21 nt, Artificial Sequence
  LRRK2 RNA guide
uguaucacgaggucaggagcu

SEQ ID NO: 65447 - RNA, 21 nt, Artificial Sequence
  LRRK2 RNA guide
uucagcuccugaccucgugau

SEQ ID NO: 65448 - RNA, 22 nt, Artificial Sequence
  LRRK2 RNA guide
accaucuuggucaggcuggucu

SEQ ID NO: 65449 - RNA, 22 nt, Artificial Sequence
  LRRK2 RNA guide
agcuccugaccucgugauacac

SEQ ID NO: 65450 - RNA, 22 nt, Artificial Sequence
  LRRK2 RNA guide
agcugaagaccagccugaccaa

SEQ ID NO: 65451 - RNA, 22 nt, Artificial Sequence
  LRRK2 RNA guide
aggagcugaagaccagccugac

SEQ ID NO: 65452 - RNA, 22 nt, Artificial Sequence
  LRRK2 RNA guide
agguggguguaucacgagguca

SEQ ID NO: 65453 - RNA, 22 nt, Artificial Sequence
  LRRK2 RNA guide
aucuuggucaggcuggucuuca

SEQ ID NO: 65454 - RNA, 22 nt, Artificial Sequence
  LRRK2 RNA guide
caccaucuuggucaggcugguc

SEQ ID NO: 65455 - RNA, 22 nt, Artificial Sequence
  LRRK2 RNA guide
cagcuccugaccucgugauaca

SEQ ID NO: 65456 - RNA, 22 nt, Artificial Sequence
  LRRK2 RNA guide
caggagcugaagaccagccuga

SEQ ID NO: 65457 - RNA, 22 nt, Artificial Sequence
  LRRK2 RNA guide
caucuuggucaggcuggucuuc

SEQ ID NO: 65458 - RNA, 22 nt, Artificial Sequence
  LRRK2 RNA guide
ccaucuuggucaggcuggucuu

SEQ ID NO: 65459 - RNA, 22 nt, Artificial Sequence
  LRRK2 RNA guide
cuucagcuccugaccucgugau

SEQ ID NO: 65460 - RNA, 22 nt, Artificial Sequence
  LRRK2 RNA guide
cuuggucaggcuggucuucagc

SEQ ID NO: 65461 - RNA, 22 nt, Artificial Sequence
  LRRK2 RNA guide
gagcugaagaccagccugacca

SEQ ID NO: 65462 - RNA, 22 nt, Artificial Sequence
  LRRK2 RNA guide
gcugaagaccagccugaccaag

SEQ ID NO: 65463 - RNA, 22 nt, Artificial Sequence
  LRRK2 RNA guide
ggagcugaagaccagccugacc

SEQ ID NO: 65464 - RNA, 22 nt, Artificial Sequence
  LRRK2 RNA guide
ggucuucagcuccugaccucgu

SEQ ID NO: 65465 - RNA, 22 nt, Artificial Sequence
  LRRK2 RNA guide
gguggguguaucacgaggucag

SEQ ID NO: 65466 - RNA, 22 nt, Artificial Sequence
  LRRK2 RNA guide
gguguaucacgaggucaggagc

SEQ ID NO: 65467 - RNA, 22 nt, Artificial Sequence
  LRRK2 RNA guide
guaucacgaggucaggagcuga

SEQ ID NO: 65468 - RNA, 22 nt, Artificial Sequence
  LRRK2 RNA guide
gucuucagcuccugaccucgug

SEQ ID NO: 65469 - RNA, 22 nt, Artificial Sequence
  LRRK2 RNA guide
guggguguaucacgaggucagg

SEQ ID NO: 65470 - RNA, 22 nt, Artificial Sequence
  LRRK2 RNA guide
guguaucacgaggucaggagcu

SEQ ID NO: 65471 - RNA, 22 nt, Artificial Sequence
  LRRK2 RNA guide
uaucacgaggucaggagcugaa

SEQ ID NO: 65472 - RNA, 22 nt, Artificial Sequence
  LRRK2 RNA guide
ucagcuccugaccucgugauac

SEQ ID NO: 65473 - RNA, 22 nt, Artificial Sequence
  LRRK2 RNA guide
ucuucagcuccugaccucguga

SEQ ID NO: 65474 - RNA, 22 nt, Artificial Sequence
  LRRK2 RNA guide
ucuuggucaggcuggucuucag

SEQ ID NO: 65475 - RNA, 22 nt, Artificial Sequence
  LRRK2 RNA guide
uggucuucagcuccugaccucg

SEQ ID NO: 65476 - RNA, 22 nt, Artificial Sequence
  LRRK2 RNA guide
uguaucacgaggucaggagcug

SEQ ID NO: 65477 - RNA, 22 nt, Artificial Sequence
  LRRK2 RNA guide
uucagcuccugaccucgugaua

SEQ ID NO: 65478 - RNA, 20 nt, Artificial Sequence
  LRRK2 RNA guide
aaccuucuccagauuacucu

SEQ ID NO: 65479 - RNA, 20 nt, Artificial Sequence
  LRRK2 RNA guide
accuucuccagauuacucua

SEQ ID NO: 65480 - RNA, 20 nt, Artificial Sequence
  LRRK2 RNA guide
acuccagcaucuuuauauua

SEQ ID NO: 65481 - RNA, 20 nt, Artificial Sequence
  LRRK2 RNA guide
acucuaauauaaagaugcug

SEQ ID NO: 65482 - RNA, 20 nt, Artificial Sequence
  LRRK2 RNA guide
agaguaaucuggagaagguu

SEQ ID NO: 65483 - RNA, 20 nt, Artificial Sequence
  LRRK2 RNA guide
aggcauaaccuucuccagau

SEQ ID NO: 65484 - RNA, 20 nt, Artificial Sequence
  LRRK2 RNA guide
auaaccuucuccagauuacu

SEQ ID NO: 65485 - RNA, 20 nt, Artificial Sequence
  LRRK2 RNA guide
auauuagaguaaucuggaga

SEQ ID NO: 65486 - RNA, 20 nt, Artificial Sequence
  LRRK2 RNA guide
auuagaguaaucuggagaag

SEQ ID NO: 65487 - RNA, 20 nt, Artificial Sequence
  LRRK2 RNA guide
cagcaucuuuauauuagagu

SEQ ID NO: 65488 - RNA, 20 nt, Artificial Sequence
  LRRK2 RNA guide
cauaaccuucuccagauuac

SEQ ID NO: 65489 - RNA, 20 nt, Artificial Sequence
  LRRK2 RNA guide
ccagcaucuuuauauuagag

SEQ ID NO: 65490 - RNA, 20 nt, Artificial Sequence
  LRRK2 RNA guide
ccuucuccagauuacucuaa

SEQ ID NO: 65491 - RNA, 20 nt, Artificial Sequence
  LRRK2 RNA guide
cgacuccagcaucuuuauau

SEQ ID NO: 65492 - RNA, 20 nt, Artificial Sequence
  LRRK2 RNA guide
cuccagauuacucuaauaua

SEQ ID NO: 65493 - RNA, 20 nt, Artificial Sequence
  LRRK2 RNA guide
cuccagcaucuuuauauuag

SEQ ID NO: 65494 - RNA, 20 nt, Artificial Sequence
  LRRK2 RNA guide
cucuaauauaaagaugcugg

SEQ ID NO: 65495 - RNA, 20 nt, Artificial Sequence
  LRRK2 RNA guide
cuucuccagauuacucuaau

SEQ ID NO: 65496 - RNA, 20 nt, Artificial Sequence
  LRRK2 RNA guide
gacuccagcaucuuuauauu

SEQ ID NO: 65497 - RNA, 20 nt, Artificial Sequence
  LRRK2 RNA guide
gaggcauaaccuucuccaga

SEQ ID NO: 65498 - RNA, 20 nt, Artificial Sequence
  LRRK2 RNA guide
gaguaaucuggagaagguua

SEQ ID NO: 65499 - RNA, 20 nt, Artificial Sequence
  LRRK2 RNA guide
gcauaaccuucuccagauua

SEQ ID NO: 65500 - RNA, 20 nt, Artificial Sequence
  LRRK2 RNA guide
gcgacuccagcaucuuuaua

SEQ ID NO: 65501 - RNA, 20 nt, Artificial Sequence
  LRRK2 RNA guide
ggcauaaccuucuccagauu

SEQ ID NO: 65502 - RNA, 20 nt, Artificial Sequence
  LRRK2 RNA guide
uaaccuucuccagauuacuc

SEQ ID NO: 65503 - RNA, 20 nt, Artificial Sequence
  LRRK2 RNA guide
uagaguaaucuggagaaggu

SEQ ID NO: 65504 - RNA, 20 nt, Artificial Sequence
  LRRK2 RNA guide
uauauuagaguaaucuggag

SEQ ID NO: 65505 - RNA, 20 nt, Artificial Sequence
  LRRK2 RNA guide
uauuagaguaaucuggagaa

SEQ ID NO: 65506 - RNA, 20 nt, Artificial Sequence
  LRRK2 RNA guide
uccagcaucuuuauauuaga

SEQ ID NO: 65507 - RNA, 20 nt, Artificial Sequence
  LRRK2 RNA guide
ucuccagauuacucuaauau

SEQ ID NO: 65508 - RNA, 20 nt, Artificial Sequence
  LRRK2 RNA guide
uuagaguaaucuggagaagg

SEQ ID NO: 65509 - RNA, 20 nt, Artificial Sequence
  LRRK2 RNA guide
uucuccagauuacucuaaua

SEQ ID NO: 65510 - RNA, 21 nt, Artificial Sequence
  LRRK2 RNA guide
aaccuucuccagauuacucua

SEQ ID NO: 65511 - RNA, 21 nt, Artificial Sequence
  LRRK2 RNA guide
accuucuccagauuacucuaa

SEQ ID NO: 65512 - RNA, 21 nt, Artificial Sequence
  LRRK2 RNA guide
acuccagcaucuuuauauuag

SEQ ID NO: 65513 - RNA, 21 nt, Artificial Sequence
  LRRK2 RNA guide
acucuaauauaaagaugcugg

SEQ ID NO: 65514 - RNA, 21 nt, Artificial Sequence
  LRRK2 RNA guide
agaggcauaaccuucuccaga

SEQ ID NO: 65515 - RNA, 21 nt, Artificial Sequence
  LRRK2 RNA guide
agaguaaucuggagaagguua

SEQ ID NO: 65516 - RNA, 21 nt, Artificial Sequence
  LRRK2 RNA guide
agcgacuccagcaucuuuaua

SEQ ID NO: 65517 - RNA, 21 nt, Artificial Sequence
  LRRK2 RNA guide
aggcauaaccuucuccagauu

SEQ ID NO: 65518 - RNA, 21 nt, Artificial Sequence
  LRRK2 RNA guide
auaaccuucuccagauuacuc

SEQ ID NO: 65519 - RNA, 21 nt, Artificial Sequence
  LRRK2 RNA guide
auuagaguaaucuggagaagg

SEQ ID NO: 65520 - RNA, 21 nt, Artificial Sequence
  LRRK2 RNA guide
cauaaccuucuccagauuacu

SEQ ID NO: 65521 - RNA, 21 nt, Artificial Sequence
  LRRK2 RNA guide
ccagcaucuuuauauuagagu

SEQ ID NO: 65522 - RNA, 21 nt, Artificial Sequence
  LRRK2 RNA guide
ccuucuccagauuacucuaau

SEQ ID NO: 65523 - RNA, 21 nt, Artificial Sequence
  LRRK2 RNA guide
cgacuccagcaucuuuauauu

SEQ ID NO: 65524 - RNA, 21 nt, Artificial Sequence
  LRRK2 RNA guide
cuccagcaucuuuauauuaga

SEQ ID NO: 65525 - RNA, 21 nt, Artificial Sequence
  LRRK2 RNA guide
cucuaauauaaagaugcugga

SEQ ID NO: 65526 - RNA, 21 nt, Artificial Sequence
  LRRK2 RNA guide
cuucuccagauuacucuaaua

SEQ ID NO: 65527 - RNA, 21 nt, Artificial Sequence
  LRRK2 RNA guide
gacuccagcaucuuuauauua

SEQ ID NO: 65528 - RNA, 21 nt, Artificial Sequence
  LRRK2 RNA guide
gaggcauaaccuucuccagau

SEQ ID NO: 65529 - RNA, 21 nt, Artificial Sequence
  LRRK2 RNA guide
gaguaaucuggagaagguuau

SEQ ID NO: 65530 - RNA, 21 nt, Artificial Sequence
  LRRK2 RNA guide
gcauaaccuucuccagauuac

SEQ ID NO: 65531 - RNA, 21 nt, Artificial Sequence
  LRRK2 RNA guide
gcgacuccagcaucuuuauau

SEQ ID NO: 65532 - RNA, 21 nt, Artificial Sequence
  LRRK2 RNA guide
ggcauaaccuucuccagauua

SEQ ID NO: 65533 - RNA, 21 nt, Artificial Sequence
  LRRK2 RNA guide
uaaccuucuccagauuacucu

SEQ ID NO: 65534 - RNA, 21 nt, Artificial Sequence
  LRRK2 RNA guide
uagaguaaucuggagaagguu

SEQ ID NO: 65535 - RNA, 21 nt, Artificial Sequence
  LRRK2 RNA guide
uauuagaguaaucuggagaag

SEQ ID NO: 65536 - RNA, 21 nt, Artificial Sequence
  LRRK2 RNA guide
uccagcaucuuuauauuagag

SEQ ID NO: 65537 - RNA, 21 nt, Artificial Sequence
  LRRK2 RNA guide
uuagaguaaucuggagaaggu

SEQ ID NO: 65538 - RNA, 22 nt, Artificial Sequence
  LRRK2 RNA guide
aaccuucuccagauuacucuaa

SEQ ID NO: 65539 - RNA, 22 nt, Artificial Sequence
  LRRK2 RNA guide
accuucuccagauuacucuaau

SEQ ID NO: 65540 - RNA, 22 nt, Artificial Sequence
  LRRK2 RNA guide
acuccagcaucuuuauauuaga

SEQ ID NO: 65541 - RNA, 22 nt, Artificial Sequence
  LRRK2 RNA guide
acucuaauauaaagaugcugga

SEQ ID NO: 65542 - RNA, 22 nt, Artificial Sequence
  LRRK2 RNA guide
agaggcauaaccuucuccagau

SEQ ID NO: 65543 - RNA, 22 nt, Artificial Sequence
  LRRK2 RNA guide
agaguaaucuggagaagguuau

SEQ ID NO: 65544 - RNA, 22 nt, Artificial Sequence
  LRRK2 RNA guide
agcgacuccagcaucuuuauau

SEQ ID NO: 65545 - RNA, 22 nt, Artificial Sequence
  LRRK2 RNA guide
aggcauaaccuucuccagauua

SEQ ID NO: 65546 - RNA, 22 nt, Artificial Sequence
  LRRK2 RNA guide
auaaccuucuccagauuacucu

SEQ ID NO: 65547 - RNA, 22 nt, Artificial Sequence
  LRRK2 RNA guide
auauuagaguaaucuggagaag

SEQ ID NO: 65548 - RNA, 22 nt, Artificial Sequence
  LRRK2 RNA guide
auuagaguaaucuggagaaggu

SEQ ID NO: 65549 - RNA, 22 nt, Artificial Sequence
  LRRK2 RNA guide
cauaaccuucuccagauuacuc

SEQ ID NO: 65550 - RNA, 22 nt, Artificial Sequence
  LRRK2 RNA guide
ccagcaucuuuauauuagagua

SEQ ID NO: 65551 - RNA, 22 nt, Artificial Sequence
  LRRK2 RNA guide
ccuucuccagauuacucuaaua

SEQ ID NO: 65552 - RNA, 22 nt, Artificial Sequence
  LRRK2 RNA guide
cgacuccagcaucuuuauauua

SEQ ID NO: 65553 - RNA, 22 nt, Artificial Sequence
  LRRK2 RNA guide
cuccagcaucuuuauauuagag

SEQ ID NO: 65554 - RNA, 22 nt, Artificial Sequence
  LRRK2 RNA guide
cucuaauauaaagaugcuggag

SEQ ID NO: 65555 - RNA, 22 nt, Artificial Sequence
  LRRK2 RNA guide
cuucuccagauuacucuaauau

SEQ ID NO: 65556 - RNA, 22 nt, Artificial Sequence
  LRRK2 RNA guide
gacuccagcaucuuuauauuag

SEQ ID NO: 65557 - RNA, 22 nt, Artificial Sequence
  LRRK2 RNA guide
gagaggcauaaccuucuccaga

SEQ ID NO: 65558 - RNA, 22 nt, Artificial Sequence
  LRRK2 RNA guide
gaggcauaaccuucuccagauu

SEQ ID NO: 65559 - RNA, 22 nt, Artificial Sequence
  LRRK2 RNA guide
gaguaaucuggagaagguuaug

SEQ ID NO: 65560 - RNA, 22 nt, Artificial Sequence
  LRRK2 RNA guide
gcauaaccuucuccagauuacu

SEQ ID NO: 65561 - RNA, 22 nt, Artificial Sequence
  LRRK2 RNA guide
gcgacuccagcaucuuuauauu

SEQ ID NO: 65562 - RNA, 22 nt, Artificial Sequence
  LRRK2 RNA guide
ggcauaaccuucuccagauuac

SEQ ID NO: 65563 - RNA, 22 nt, Artificial Sequence
  LRRK2 RNA guide
uaaccuucuccagauuacucua

SEQ ID NO: 65564 - RNA, 22 nt, Artificial Sequence
  LRRK2 RNA guide
uacucuaauauaaagaugcugg

SEQ ID NO: 65565 - RNA, 22 nt, Artificial Sequence
  LRRK2 RNA guide
uagaguaaucuggagaagguua

SEQ ID NO: 65566 - RNA, 22 nt, Artificial Sequence
  LRRK2 RNA guide
uagcgacuccagcaucuuuaua

SEQ ID NO: 65567 - RNA, 22 nt, Artificial Sequence
  LRRK2 RNA guide
uauuagaguaaucuggagaagg

SEQ ID NO: 65568 - RNA, 22 nt, Artificial Sequence
  LRRK2 RNA guide
uccagcaucuuuauauuagagu

SEQ ID NO: 65569 - RNA, 22 nt, Artificial Sequence
  LRRK2 RNA guide
uuagaguaaucuggagaagguu

SEQ ID NO: 65570 - RNA, 20 nt, Artificial Sequence
  LRRK2 RNA guide
aaccuucuccagauuacgcu

SEQ ID NO: 65571 - RNA, 20 nt, Artificial Sequence
  LRRK2 RNA guide
accuucuccagauuacgcua

SEQ ID NO: 65572 - RNA, 20 nt, Artificial Sequence
  LRRK2 RNA guide
acgcuaauauaaagaugcug

SEQ ID NO: 65573 - RNA, 20 nt, Artificial Sequence
  LRRK2 RNA guide
agcaucuuuauauuagcgua

SEQ ID NO: 65574 - RNA, 20 nt, Artificial Sequence
  LRRK2 RNA guide
agcguaaucuggagaagguu

SEQ ID NO: 65575 - RNA, 20 nt, Artificial Sequence
  LRRK2 RNA guide
auaaccuucuccagauuacg

SEQ ID NO: 65576 - RNA, 20 nt, Artificial Sequence
  LRRK2 RNA guide
auauuagcguaaucuggaga

SEQ ID NO: 65577 - RNA, 20 nt, Artificial Sequence
  LRRK2 RNA guide
auuagcguaaucuggagaag

SEQ ID NO: 65578 - RNA, 20 nt, Artificial Sequence
  LRRK2 RNA guide
cagauuacgcuaauauaaag

SEQ ID NO: 65579 - RNA, 20 nt, Artificial Sequence
  LRRK2 RNA guide
cagcaucuuuauauuagcgu

SEQ ID NO: 65580 - RNA, 20 nt, Artificial Sequence
  LRRK2 RNA guide
ccagauuacgcuaauauaaa

SEQ ID NO: 65581 - RNA, 20 nt, Artificial Sequence
  LRRK2 RNA guide
ccagcaucuuuauauuagcg

SEQ ID NO: 65582 - RNA, 20 nt, Artificial Sequence
  LRRK2 RNA guide
ccuucuccagauuacgcuaa

SEQ ID NO: 65583 - RNA, 20 nt, Artificial Sequence
  LRRK2 RNA guide
cgcuaauauaaagaugcugg

SEQ ID NO: 65584 - RNA, 20 nt, Artificial Sequence
  LRRK2 RNA guide
cuccagauuacgcuaauaua

SEQ ID NO: 65585 - RNA, 20 nt, Artificial Sequence
  LRRK2 RNA guide
cuucuccagauuacgcuaau

SEQ ID NO: 65586 - RNA, 20 nt, Artificial Sequence
  LRRK2 RNA guide
cuuuauauuagcguaaucug

SEQ ID NO: 65587 - RNA, 20 nt, Artificial Sequence
  LRRK2 RNA guide
gcaucuuuauauuagcguaa

SEQ ID NO: 65588 - RNA, 20 nt, Artificial Sequence
  LRRK2 RNA guide
gcguaaucuggagaagguua

SEQ ID NO: 65589 - RNA, 20 nt, Artificial Sequence
  LRRK2 RNA guide
uaaccuucuccagauuacgc

SEQ ID NO: 65590 - RNA, 20 nt, Artificial Sequence
  LRRK2 RNA guide
uacgcuaauauaaagaugcu

SEQ ID NO: 65591 - RNA, 20 nt, Artificial Sequence
  LRRK2 RNA guide
uagcguaaucuggagaaggu

SEQ ID NO: 65592 - RNA, 20 nt, Artificial Sequence
  LRRK2 RNA guide
uauauuagcguaaucuggag

SEQ ID NO: 65593 - RNA, 20 nt, Artificial Sequence
  LRRK2 RNA guide
uauuagcguaaucuggagaa

SEQ ID NO: 65594 - RNA, 20 nt, Artificial Sequence
  LRRK2 RNA guide
uccagauuacgcuaauauaa

SEQ ID NO: 65595 - RNA, 20 nt, Artificial Sequence
  LRRK2 RNA guide
uccagcaucuuuauauuagc

SEQ ID NO: 65596 - RNA, 20 nt, Artificial Sequence
  LRRK2 RNA guide
ucuccagauuacgcuaauau

SEQ ID NO: 65597 - RNA, 20 nt, Artificial Sequence
  LRRK2 RNA guide
uuacgcuaauauaaagaugc

SEQ ID NO: 65598 - RNA, 20 nt, Artificial Sequence
  LRRK2 RNA guide
uuagcguaaucuggagaagg

SEQ ID NO: 65599 - RNA, 20 nt, Artificial Sequence
  LRRK2 RNA guide
uuauauuagcguaaucugga

SEQ ID NO: 65600 - RNA, 20 nt, Artificial Sequence
  LRRK2 RNA guide
uucuccagauuacgcuaaua

SEQ ID NO: 65601 - RNA, 20 nt, Artificial Sequence
  LRRK2 RNA guide
uuuauauuagcguaaucugg

SEQ ID NO: 65602 - RNA, 21 nt, Artificial Sequence
  LRRK2 RNA guide
aaccuucuccagauuacgcua

SEQ ID NO: 65603 - RNA, 21 nt, Artificial Sequence
  LRRK2 RNA guide
accuucuccagauuacgcuaa

SEQ ID NO: 65604 - RNA, 21 nt, Artificial Sequence
  LRRK2 RNA guide
acgcuaauauaaagaugcugg

SEQ ID NO: 65605 - RNA, 21 nt, Artificial Sequence
  LRRK2 RNA guide
agcguaaucuggagaagguua

SEQ ID NO: 65606 - RNA, 21 nt, Artificial Sequence
  LRRK2 RNA guide
auaaccuucuccagauuacgc

SEQ ID NO: 65607 - RNA, 21 nt, Artificial Sequence
  LRRK2 RNA guide
auauuagcguaaucuggagaa

SEQ ID NO: 65608 - RNA, 21 nt, Artificial Sequence
  LRRK2 RNA guide
auuagcguaaucuggagaagg

SEQ ID NO: 65609 - RNA, 21 nt, Artificial Sequence
  LRRK2 RNA guide
cagcaucuuuauauuagcgua

SEQ ID NO: 65610 - RNA, 21 nt, Artificial Sequence
  LRRK2 RNA guide
cauaaccuucuccagauuacg

SEQ ID NO: 65611 - RNA, 21 nt, Artificial Sequence
  LRRK2 RNA guide
ccagauuacgcuaauauaaag

SEQ ID NO: 65612 - RNA, 21 nt, Artificial Sequence
  LRRK2 RNA guide
ccagcaucuuuauauuagcgu

SEQ ID NO: 65613 - RNA, 21 nt, Artificial Sequence
  LRRK2 RNA guide
ccuucuccagauuacgcuaau

SEQ ID NO: 65614 - RNA, 21 nt, Artificial Sequence
  LRRK2 RNA guide
cgcuaauauaaagaugcugga

SEQ ID NO: 65615 - RNA, 21 nt, Artificial Sequence
  LRRK2 RNA guide
cuccagauuacgcuaauauaa

SEQ ID NO: 65616 - RNA, 21 nt, Artificial Sequence
  LRRK2 RNA guide
cuccagcaucuuuauauuagc

SEQ ID NO: 65617 - RNA, 21 nt, Artificial Sequence
  LRRK2 RNA guide
cuucuccagauuacgcuaaua

SEQ ID NO: 65618 - RNA, 21 nt, Artificial Sequence
  LRRK2 RNA guide
cuuuauauuagcguaaucugg

SEQ ID NO: 65619 - RNA, 21 nt, Artificial Sequence
  LRRK2 RNA guide
gcguaaucuggagaagguuau

SEQ ID NO: 65620 - RNA, 21 nt, Artificial Sequence
  LRRK2 RNA guide
uaaccuucuccagauuacgcu

SEQ ID NO: 65621 - RNA, 21 nt, Artificial Sequence
  LRRK2 RNA guide
uacgcuaauauaaagaugcug

SEQ ID NO: 65622 - RNA, 21 nt, Artificial Sequence
  LRRK2 RNA guide
uagcguaaucuggagaagguu

SEQ ID NO: 65623 - RNA, 21 nt, Artificial Sequence
  LRRK2 RNA guide
uauauuagcguaaucuggaga

SEQ ID NO: 65624 - RNA, 21 nt, Artificial Sequence
  LRRK2 RNA guide
uauuagcguaaucuggagaag

SEQ ID NO: 65625 - RNA, 21 nt, Artificial Sequence
  LRRK2 RNA guide
uccagcaucuuuauauuagcg

SEQ ID NO: 65626 - RNA, 21 nt, Artificial Sequence
  LRRK2 RNA guide
ucuccagauuacgcuaauaua

SEQ ID NO: 65627 - RNA, 21 nt, Artificial Sequence
  LRRK2 RNA guide
uuagcguaaucuggagaaggu

SEQ ID NO: 65628 - RNA, 21 nt, Artificial Sequence
  LRRK2 RNA guide
uuauauuagcguaaucuggag

SEQ ID NO: 65629 - RNA, 21 nt, Artificial Sequence
  LRRK2 RNA guide
uucuccagauuacgcuaauau

SEQ ID NO: 65630 - RNA, 22 nt, Artificial Sequence
  LRRK2 RNA guide
aaccuucuccagauuacgcuaa

SEQ ID NO: 65631 - RNA, 22 nt, Artificial Sequence
  LRRK2 RNA guide
accuucuccagauuacgcuaau

SEQ ID NO: 65632 - RNA, 22 nt, Artificial Sequence
  LRRK2 RNA guide
acgcuaauauaaagaugcugga

SEQ ID NO: 65633 - RNA, 22 nt, Artificial Sequence
  LRRK2 RNA guide
acuccagcaucuuuauauuagc

SEQ ID NO: 65634 - RNA, 22 nt, Artificial Sequence
  LRRK2 RNA guide
agcguaaucuggagaagguuau

SEQ ID NO: 65635 - RNA, 22 nt, Artificial Sequence
  LRRK2 RNA guide
auaaccuucuccagauuacgcu

SEQ ID NO: 65636 - RNA, 22 nt, Artificial Sequence
  LRRK2 RNA guide
auauuagcguaaucuggagaag

SEQ ID NO: 65637 - RNA, 22 nt, Artificial Sequence
  LRRK2 RNA guide
auuagcguaaucuggagaaggu

SEQ ID NO: 65638 - RNA, 22 nt, Artificial Sequence
  LRRK2 RNA guide
cagcaucuuuauauuagcguaa

SEQ ID NO: 65639 - RNA, 22 nt, Artificial Sequence
  LRRK2 RNA guide
cauaaccuucuccagauuacgc

SEQ ID NO: 65640 - RNA, 22 nt, Artificial Sequence
  LRRK2 RNA guide
ccagauuacgcuaauauaaaga

SEQ ID NO: 65641 - RNA, 22 nt, Artificial Sequence
  LRRK2 RNA guide
ccagcaucuuuauauuagcgua

SEQ ID NO: 65642 - RNA, 22 nt, Artificial Sequence
  LRRK2 RNA guide
ccuucuccagauuacgcuaaua

SEQ ID NO: 65643 - RNA, 22 nt, Artificial Sequence
  LRRK2 RNA guide
cgcuaauauaaagaugcuggag

SEQ ID NO: 65644 - RNA, 22 nt, Artificial Sequence
  LRRK2 RNA guide
cuccagauuacgcuaauauaaa

SEQ ID NO: 65645 - RNA, 22 nt, Artificial Sequence
  LRRK2 RNA guide
cuccagcaucuuuauauuagcg

SEQ ID NO: 65646 - RNA, 22 nt, Artificial Sequence
  LRRK2 RNA guide
cuucuccagauuacgcuaauau

SEQ ID NO: 65647 - RNA, 22 nt, Artificial Sequence
  LRRK2 RNA guide
cuuuauauuagcguaaucugga

SEQ ID NO: 65648 - RNA, 22 nt, Artificial Sequence
  LRRK2 RNA guide
gauuacgcuaauauaaagaugc

SEQ ID NO: 65649 - RNA, 22 nt, Artificial Sequence
  LRRK2 RNA guide
gcauaaccuucuccagauuacg

SEQ ID NO: 65650 - RNA, 22 nt, Artificial Sequence
  LRRK2 RNA guide
gcaucuuuauauuagcguaauc

SEQ ID NO: 65651 - RNA, 22 nt, Artificial Sequence
  LRRK2 RNA guide
gcguaaucuggagaagguuaug

SEQ ID NO: 65652 - RNA, 22 nt, Artificial Sequence
  LRRK2 RNA guide
uaaccuucuccagauuacgcua

SEQ ID NO: 65653 - RNA, 22 nt, Artificial Sequence
  LRRK2 RNA guide
uacgcuaauauaaagaugcugg

SEQ ID NO: 65654 - RNA, 22 nt, Artificial Sequence
  LRRK2 RNA guide
uagcguaaucuggagaagguua

SEQ ID NO: 65655 - RNA, 22 nt, Artificial Sequence
  LRRK2 RNA guide
uauauuagcguaaucuggagaa

SEQ ID NO: 65656 - RNA, 22 nt, Artificial Sequence
  LRRK2 RNA guide
uauuagcguaaucuggagaagg

SEQ ID NO: 65657 - RNA, 22 nt, Artificial Sequence
  LRRK2 RNA guide
uccagauuacgcuaauauaaag

SEQ ID NO: 65658 - RNA, 22 nt, Artificial Sequence
  LRRK2 RNA guide
uccagcaucuuuauauuagcgu

SEQ ID NO: 65659 - RNA, 22 nt, Artificial Sequence
  LRRK2 RNA guide
ucuccagauuacgcuaauauaa

SEQ ID NO: 65660 - RNA, 22 nt, Artificial Sequence
  LRRK2 RNA guide
ucuuuauauuagcguaaucugg

SEQ ID NO: 65661 - RNA, 22 nt, Artificial Sequence
  LRRK2 RNA guide
uuacgcuaauauaaagaugcug

SEQ ID NO: 65662 - RNA, 22 nt, Artificial Sequence
  LRRK2 RNA guide
uuagcguaaucuggagaagguu

SEQ ID NO: 65663 - RNA, 22 nt, Artificial Sequence
  LRRK2 RNA guide
uuauauuagcguaaucuggaga

SEQ ID NO: 65664 - RNA, 22 nt, Artificial Sequence
  LRRK2 RNA guide
uucuccagauuacgcuaauaua

SEQ ID NO: 65665 - RNA, 22 nt, Artificial Sequence
  LRRK2 RNA guide
uuuauauuagcguaaucuggag

SEQ ID NO: 65666 - RNA, 20 nt, Artificial Sequence
  LRRK2 RNA guide
aaauuuuccuaaccccucaa

SEQ ID NO: 65667 - RNA, 20 nt, Artificial Sequence
  LRRK2 RNA guide
aaccccucaaaucacaccac

SEQ ID NO: 65668 - RNA, 20 nt, Artificial Sequence
  LRRK2 RNA guide
aaggaaauuuuccuaacccc

SEQ ID NO: 65669 - RNA, 20 nt, Artificial Sequence
  LRRK2 RNA guide
aaggcaaggaaauuuuccua

SEQ ID NO: 65670 - RNA, 20 nt, Artificial Sequence
  LRRK2 RNA guide
aauuuuccuaaccccucaaa

SEQ ID NO: 65671 - RNA, 20 nt, Artificial Sequence
  LRRK2 RNA guide
accccucaaaucacaccacu

SEQ ID NO: 65672 - RNA, 20 nt, Artificial Sequence
  LRRK2 RNA guide
acuucaguggugugauuuga

SEQ ID NO: 65673 - RNA, 20 nt, Artificial Sequence
  LRRK2 RNA guide
aggaaauuuuccuaaccccu

SEQ ID NO: 65674 - RNA, 20 nt, Artificial Sequence
  LRRK2 RNA guide
aggcaaggaaauuuuccuaa

SEQ ID NO: 65675 - RNA, 20 nt, Artificial Sequence
  LRRK2 RNA guide
agggguuaggaaaauuuccu

SEQ ID NO: 65676 - RNA, 20 nt, Artificial Sequence
  LRRK2 RNA guide
aguggugugauuugaggggu

SEQ ID NO: 65677 - RNA, 20 nt, Artificial Sequence
  LRRK2 RNA guide
auuugagggguuaggaaaau

SEQ ID NO: 65678 - RNA, 20 nt, Artificial Sequence
  LRRK2 RNA guide
auuuuccuaaccccucaaau

SEQ ID NO: 65679 - RNA, 20 nt, Artificial Sequence
  LRRK2 RNA guide
caaggaaauuuuccuaaccc

SEQ ID NO: 65680 - RNA, 20 nt, Artificial Sequence
  LRRK2 RNA guide
cacuucaguggugugauuug

SEQ ID NO: 65681 - RNA, 20 nt, Artificial Sequence
  LRRK2 RNA guide
caguggugugauuugagggg

SEQ ID NO: 65682 - RNA, 20 nt, Artificial Sequence
  LRRK2 RNA guide
ccacuucaguggugugauuu

SEQ ID NO: 65683 - RNA, 20 nt, Artificial Sequence
  LRRK2 RNA guide
ccccucaaaucacaccacug

SEQ ID NO: 65684 - RNA, 20 nt, Artificial Sequence
  LRRK2 RNA guide
cccucaaaucacaccacuga

SEQ ID NO: 65685 - RNA, 20 nt, Artificial Sequence
  LRRK2 RNA guide
ccuaaccccucaaaucacac

SEQ ID NO: 65686 - RNA, 20 nt, Artificial Sequence
  LRRK2 RNA guide
cuaaccccucaaaucacacc

SEQ ID NO: 65687 - RNA, 20 nt, Artificial Sequence
  LRRK2 RNA guide
cuucaguggugugauuugag

SEQ ID NO: 65688 - RNA, 20 nt, Artificial Sequence
  LRRK2 RNA guide
gaaauuuuccuaaccccuca

SEQ ID NO: 65689 - RNA, 20 nt, Artificial Sequence
  LRRK2 RNA guide
gaaggcaaggaaauuuuccu

SEQ ID NO: 65690 - RNA, 20 nt, Artificial Sequence
  LRRK2 RNA guide
gagggguuaggaaaauuucc

SEQ ID NO: 65691 - RNA, 20 nt, Artificial Sequence
  LRRK2 RNA guide
gauuugagggguuaggaaaa

SEQ ID NO: 65692 - RNA, 20 nt, Artificial Sequence
  LRRK2 RNA guide
gcaaggaaauuuuccuaacc

SEQ ID NO: 65693 - RNA, 20 nt, Artificial Sequence
  LRRK2 RNA guide
ggaaauuuuccuaaccccuc

SEQ ID NO: 65694 - RNA, 20 nt, Artificial Sequence
  LRRK2 RNA guide
ggcaaggaaauuuuccuaac

SEQ ID NO: 65695 - RNA, 20 nt, Artificial Sequence
  LRRK2 RNA guide
gggguuaggaaaauuuccuu

SEQ ID NO: 65696 - RNA, 20 nt, Artificial Sequence
  LRRK2 RNA guide
ggugugauuugagggguuag

SEQ ID NO: 65697 - RNA, 20 nt, Artificial Sequence
  LRRK2 RNA guide
gugauuugagggguuaggaa

SEQ ID NO: 65698 - RNA, 20 nt, Artificial Sequence
  LRRK2 RNA guide
guggugugauuugagggguu

SEQ ID NO: 65699 - RNA, 20 nt, Artificial Sequence
  LRRK2 RNA guide
gugugauuugagggguuagg

SEQ ID NO: 65700 - RNA, 20 nt, Artificial Sequence
  LRRK2 RNA guide
uaaccccucaaaucacacca

SEQ ID NO: 65701 - RNA, 20 nt, Artificial Sequence
  LRRK2 RNA guide
ucaguggugugauuugaggg

SEQ ID NO: 65702 - RNA, 20 nt, Artificial Sequence
  LRRK2 RNA guide
uccacuucaguggugugauu

SEQ ID NO: 65703 - RNA, 20 nt, Artificial Sequence
  LRRK2 RNA guide
uccuaaccccucaaaucaca

SEQ ID NO: 65704 - RNA, 20 nt, Artificial Sequence
  LRRK2 RNA guide
ugagggguuaggaaaauuuc

SEQ ID NO: 65705 - RNA, 20 nt, Artificial Sequence
  LRRK2 RNA guide
ugauuugagggguuaggaaa

SEQ ID NO: 65706 - RNA, 20 nt, Artificial Sequence
  LRRK2 RNA guide
uggugugauuugagggguua

SEQ ID NO: 65707 - RNA, 20 nt, Artificial Sequence
  LRRK2 RNA guide
ugugauuugagggguuagga

SEQ ID NO: 65708 - RNA, 20 nt, Artificial Sequence
  LRRK2 RNA guide
uucaguggugugauuugagg

SEQ ID NO: 65709 - RNA, 20 nt, Artificial Sequence
  LRRK2 RNA guide
uuccuaaccccucaaaucac

SEQ ID NO: 65710 - RNA, 20 nt, Artificial Sequence
  LRRK2 RNA guide
uugagggguuaggaaaauuu

SEQ ID NO: 65711 - RNA, 20 nt, Artificial Sequence
  LRRK2 RNA guide
uuuccuaaccccucaaauca

SEQ ID NO: 65712 - RNA, 20 nt, Artificial Sequence
  LRRK2 RNA guide
uuugagggguuaggaaaauu

SEQ ID NO: 65713 - RNA, 20 nt, Artificial Sequence
  LRRK2 RNA guide
uuuuccuaaccccucaaauc

SEQ ID NO: 65714 - RNA, 21 nt, Artificial Sequence
  LRRK2 RNA guide
aaauuuuccuaaccccucaaa

SEQ ID NO: 65715 - RNA, 21 nt, Artificial Sequence
  LRRK2 RNA guide
aaccccucaaaucacaccacu

SEQ ID NO: 65716 - RNA, 21 nt, Artificial Sequence
  LRRK2 RNA guide
aaggaaauuuuccuaaccccu

SEQ ID NO: 65717 - RNA, 21 nt, Artificial Sequence
  LRRK2 RNA guide
aaggcaaggaaauuuuccuaa

SEQ ID NO: 65718 - RNA, 21 nt, Artificial Sequence
  LRRK2 RNA guide
aauuuuccuaaccccucaaau

SEQ ID NO: 65719 - RNA, 21 nt, Artificial Sequence
  LRRK2 RNA guide
accccucaaaucacaccacug

SEQ ID NO: 65720 - RNA, 21 nt, Artificial Sequence
  LRRK2 RNA guide
acuucaguggugugauuugag

SEQ ID NO: 65721 - RNA, 21 nt, Artificial Sequence
  LRRK2 RNA guide
aggaaauuuuccuaaccccuc

SEQ ID NO: 65722 - RNA, 21 nt, Artificial Sequence
  LRRK2 RNA guide
aggcaaggaaauuuuccuaac

SEQ ID NO: 65723 - RNA, 21 nt, Artificial Sequence
  LRRK2 RNA guide
agggguuaggaaaauuuccuu

SEQ ID NO: 65724 - RNA, 21 nt, Artificial Sequence
  LRRK2 RNA guide
aguggugugauuugagggguu

SEQ ID NO: 65725 - RNA, 21 nt, Artificial Sequence
  LRRK2 RNA guide
auuugagggguuaggaaaauu

SEQ ID NO: 65726 - RNA, 21 nt, Artificial Sequence
  LRRK2 RNA guide
auuuuccuaaccccucaaauc

SEQ ID NO: 65727 - RNA, 21 nt, Artificial Sequence
  LRRK2 RNA guide
caaggaaauuuuccuaacccc

SEQ ID NO: 65728 - RNA, 21 nt, Artificial Sequence
  LRRK2 RNA guide
cacuucaguggugugauuuga

SEQ ID NO: 65729 - RNA, 21 nt, Artificial Sequence
  LRRK2 RNA guide
caguggugugauuugaggggu

SEQ ID NO: 65730 - RNA, 21 nt, Artificial Sequence
  LRRK2 RNA guide
ccacuucaguggugugauuug

SEQ ID NO: 65731 - RNA, 21 nt, Artificial Sequence
  LRRK2 RNA guide
ccccucaaaucacaccacuga

SEQ ID NO: 65732 - RNA, 21 nt, Artificial Sequence
  LRRK2 RNA guide
cccucaaaucacaccacugaa

SEQ ID NO: 65733 - RNA, 21 nt, Artificial Sequence
  LRRK2 RNA guide
ccuaaccccucaaaucacacc

SEQ ID NO: 65734 - RNA, 21 nt, Artificial Sequence
  LRRK2 RNA guide
cuaaccccucaaaucacacca

SEQ ID NO: 65735 - RNA, 21 nt, Artificial Sequence
  LRRK2 RNA guide
cuucaguggugugauuugagg

SEQ ID NO: 65736 - RNA, 21 nt, Artificial Sequence
  LRRK2 RNA guide
gaaauuuuccuaaccccucaa

SEQ ID NO: 65737 - RNA, 21 nt, Artificial Sequence
  LRRK2 RNA guide
gaaggcaaggaaauuuuccua

SEQ ID NO: 65738 - RNA, 21 nt, Artificial Sequence
  LRRK2 RNA guide
gagggguuaggaaaauuuccu

SEQ ID NO: 65739 - RNA, 21 nt, Artificial Sequence
  LRRK2 RNA guide
gauuugagggguuaggaaaau

SEQ ID NO: 65740 - RNA, 21 nt, Artificial Sequence
  LRRK2 RNA guide
gcaaggaaauuuuccuaaccc

SEQ ID NO: 65741 - RNA, 21 nt, Artificial Sequence
  LRRK2 RNA guide
ggaaauuuuccuaaccccuca

SEQ ID NO: 65742 - RNA, 21 nt, Artificial Sequence
  LRRK2 RNA guide
ggcaaggaaauuuuccuaacc

SEQ ID NO: 65743 - RNA, 21 nt, Artificial Sequence
  LRRK2 RNA guide
gggguuaggaaaauuuccuug

SEQ ID NO: 65744 - RNA, 21 nt, Artificial Sequence
  LRRK2 RNA guide
ggugugauuugagggguuagg

SEQ ID NO: 65745 - RNA, 21 nt, Artificial Sequence
  LRRK2 RNA guide
gugauuugagggguuaggaaa

SEQ ID NO: 65746 - RNA, 21 nt, Artificial Sequence
  LRRK2 RNA guide
guggugugauuugagggguua

SEQ ID NO: 65747 - RNA, 21 nt, Artificial Sequence
  LRRK2 RNA guide
gugugauuugagggguuagga

SEQ ID NO: 65748 - RNA, 21 nt, Artificial Sequence
  LRRK2 RNA guide
uaaccccucaaaucacaccac

SEQ ID NO: 65749 - RNA, 21 nt, Artificial Sequence
  LRRK2 RNA guide
ucaguggugugauuugagggg

SEQ ID NO: 65750 - RNA, 21 nt, Artificial Sequence
  LRRK2 RNA guide
uccacuucaguggugugauuu

SEQ ID NO: 65751 - RNA, 21 nt, Artificial Sequence
  LRRK2 RNA guide
uccuaaccccucaaaucacac

SEQ ID NO: 65752 - RNA, 21 nt, Artificial Sequence
  LRRK2 RNA guide
ugaaggcaaggaaauuuuccu

SEQ ID NO: 65753 - RNA, 21 nt, Artificial Sequence
  LRRK2 RNA guide
ugagggguuaggaaaauuucc

SEQ ID NO: 65754 - RNA, 21 nt, Artificial Sequence
  LRRK2 RNA guide
ugauuugagggguuaggaaaa

SEQ ID NO: 65755 - RNA, 21 nt, Artificial Sequence
  LRRK2 RNA guide
uggugugauuugagggguuag

SEQ ID NO: 65756 - RNA, 21 nt, Artificial Sequence
  LRRK2 RNA guide
ugugauuugagggguuaggaa

SEQ ID NO: 65757 - RNA, 21 nt, Artificial Sequence
  LRRK2 RNA guide
uucaguggugugauuugaggg

SEQ ID NO: 65758 - RNA, 21 nt, Artificial Sequence
  LRRK2 RNA guide
uuccacuucaguggugugauu

SEQ ID NO: 65759 - RNA, 21 nt, Artificial Sequence
  LRRK2 RNA guide
uuccuaaccccucaaaucaca

SEQ ID NO: 65760 - RNA, 21 nt, Artificial Sequence
  LRRK2 RNA guide
uugagggguuaggaaaauuuc

SEQ ID NO: 65761 - RNA, 21 nt, Artificial Sequence
  LRRK2 RNA guide
uuuccuaaccccucaaaucac

SEQ ID NO: 65762 - RNA, 21 nt, Artificial Sequence
  LRRK2 RNA guide
uuugagggguuaggaaaauuu

SEQ ID NO: 65763 - RNA, 21 nt, Artificial Sequence
  LRRK2 RNA guide
uuuuccuaaccccucaaauca

SEQ ID NO: 65764 - RNA, 22 nt, Artificial Sequence
  LRRK2 RNA guide
aaauuuuccuaaccccucaaau

SEQ ID NO: 65765 - RNA, 22 nt, Artificial Sequence
  LRRK2 RNA guide
aaccccucaaaucacaccacug

SEQ ID NO: 65766 - RNA, 22 nt, Artificial Sequence
  LRRK2 RNA guide
aaggaaauuuuccuaaccccuc

SEQ ID NO: 65767 - RNA, 22 nt, Artificial Sequence
  LRRK2 RNA guide
aaggcaaggaaauuuuccuaac

SEQ ID NO: 65768 - RNA, 22 nt, Artificial Sequence
  LRRK2 RNA guide
aauuuuccuaaccccucaaauc

SEQ ID NO: 65769 - RNA, 22 nt, Artificial Sequence
  LRRK2 RNA guide
accccucaaaucacaccacuga

SEQ ID NO: 65770 - RNA, 22 nt, Artificial Sequence
  LRRK2 RNA guide
acuucaguggugugauuugagg

SEQ ID NO: 65771 - RNA, 22 nt, Artificial Sequence
  LRRK2 RNA guide
aggaaauuuuccuaaccccuca

SEQ ID NO: 65772 - RNA, 22 nt, Artificial Sequence
  LRRK2 RNA guide
aggcaaggaaauuuuccuaacc

SEQ ID NO: 65773 - RNA, 22 nt, Artificial Sequence
  LRRK2 RNA guide
agggguuaggaaaauuuccuug

SEQ ID NO: 65774 - RNA, 22 nt, Artificial Sequence
  LRRK2 RNA guide
aguggugugauuugagggguua

SEQ ID NO: 65775 - RNA, 22 nt, Artificial Sequence
  LRRK2 RNA guide
auuugagggguuaggaaaauuu

SEQ ID NO: 65776 - RNA, 22 nt, Artificial Sequence
  LRRK2 RNA guide
auuuuccuaaccccucaaauca

SEQ ID NO: 65777 - RNA, 22 nt, Artificial Sequence
  LRRK2 RNA guide
caaggaaauuuuccuaaccccu

SEQ ID NO: 65778 - RNA, 22 nt, Artificial Sequence
  LRRK2 RNA guide
cacuucaguggugugauuugag

SEQ ID NO: 65779 - RNA, 22 nt, Artificial Sequence
  LRRK2 RNA guide
caguggugugauuugagggguu

SEQ ID NO: 65780 - RNA, 22 nt, Artificial Sequence
  LRRK2 RNA guide
ccacuucaguggugugauuuga

SEQ ID NO: 65781 - RNA, 22 nt, Artificial Sequence
  LRRK2 RNA guide
ccccucaaaucacaccacugaa

SEQ ID NO: 65782 - RNA, 22 nt, Artificial Sequence
  LRRK2 RNA guide
cccucaaaucacaccacugaag

SEQ ID NO: 65783 - RNA, 22 nt, Artificial Sequence
  LRRK2 RNA guide
ccuaaccccucaaaucacacca

SEQ ID NO: 65784 - RNA, 22 nt, Artificial Sequence
  LRRK2 RNA guide
cuaaccccucaaaucacaccac

SEQ ID NO: 65785 - RNA, 22 nt, Artificial Sequence
  LRRK2 RNA guide
cuucaguggugugauuugaggg

SEQ ID NO: 65786 - RNA, 22 nt, Artificial Sequence
  LRRK2 RNA guide
gaaauuuuccuaaccccucaaa

SEQ ID NO: 65787 - RNA, 22 nt, Artificial Sequence
  LRRK2 RNA guide
gaaggcaaggaaauuuuccuaa

SEQ ID NO: 65788 - RNA, 22 nt, Artificial Sequence
  LRRK2 RNA guide
gagggguuaggaaaauuuccuu

SEQ ID NO: 65789 - RNA, 22 nt, Artificial Sequence
  LRRK2 RNA guide
gauuugagggguuaggaaaauu

SEQ ID NO: 65790 - RNA, 22 nt, Artificial Sequence
  LRRK2 RNA guide
gcaaggaaauuuuccuaacccc

SEQ ID NO: 65791 - RNA, 22 nt, Artificial Sequence
  LRRK2 RNA guide
ggaaauuuuccuaaccccucaa

SEQ ID NO: 65792 - RNA, 22 nt, Artificial Sequence
  LRRK2 RNA guide
ggcaaggaaauuuuccuaaccc

SEQ ID NO: 65793 - RNA, 22 nt, Artificial Sequence
  LRRK2 RNA guide
gggguuaggaaaauuuccuugc

SEQ ID NO: 65794 - RNA, 22 nt, Artificial Sequence
  LRRK2 RNA guide
ggugugauuugagggguuagga

SEQ ID NO: 65795 - RNA, 22 nt, Artificial Sequence
  LRRK2 RNA guide
gugauuugagggguuaggaaaa

SEQ ID NO: 65796 - RNA, 22 nt, Artificial Sequence
  LRRK2 RNA guide
guggugugauuugagggguuag

SEQ ID NO: 65797 - RNA, 22 nt, Artificial Sequence
  LRRK2 RNA guide
gugugauuugagggguuaggaa

SEQ ID NO: 65798 - RNA, 22 nt, Artificial Sequence
  LRRK2 RNA guide
uaaccccucaaaucacaccacu

SEQ ID NO: 65799 - RNA, 22 nt, Artificial Sequence
  LRRK2 RNA guide
ucaguggugugauuugaggggu

SEQ ID NO: 65800 - RNA, 22 nt, Artificial Sequence
  LRRK2 RNA guide
uccacuucaguggugugauuug

SEQ ID NO: 65801 - RNA, 22 nt, Artificial Sequence
  LRRK2 RNA guide
uccuaaccccucaaaucacacc

SEQ ID NO: 65802 - RNA, 22 nt, Artificial Sequence
  LRRK2 RNA guide
ugaaggcaaggaaauuuuccua

SEQ ID NO: 65803 - RNA, 22 nt, Artificial Sequence
  LRRK2 RNA guide
ugagggguuaggaaaauuuccu

SEQ ID NO: 65804 - RNA, 22 nt, Artificial Sequence
  LRRK2 RNA guide
ugauuugagggguuaggaaaau

SEQ ID NO: 65805 - RNA, 22 nt, Artificial Sequence
  LRRK2 RNA guide
uggugugauuugagggguuagg

SEQ ID NO: 65806 - RNA, 22 nt, Artificial Sequence
  LRRK2 RNA guide
ugugauuugagggguuaggaaa

SEQ ID NO: 65807 - RNA, 22 nt, Artificial Sequence
  LRRK2 RNA guide
uucaguggugugauuugagggg

SEQ ID NO: 65808 - RNA, 22 nt, Artificial Sequence
  LRRK2 RNA guide
uuccacuucaguggugugauuu

SEQ ID NO: 65809 - RNA, 22 nt, Artificial Sequence
  LRRK2 RNA guide
uuccuaaccccucaaaucacac

SEQ ID NO: 65810 - RNA, 22 nt, Artificial Sequence
  LRRK2 RNA guide
uugaaggcaaggaaauuuuccu

SEQ ID NO: 65811 - RNA, 22 nt, Artificial Sequence
  LRRK2 RNA guide
uugagggguuaggaaaauuucc

SEQ ID NO: 65812 - RNA, 22 nt, Artificial Sequence
  LRRK2 RNA guide
uuuccacuucaguggugugauu

SEQ ID NO: 65813 - RNA, 22 nt, Artificial Sequence
  LRRK2 RNA guide
uuuccuaaccccucaaaucaca

SEQ ID NO: 65814 - RNA, 22 nt, Artificial Sequence
  LRRK2 RNA guide
uuugagggguuaggaaaauuuc

SEQ ID NO: 65815 - RNA, 22 nt, Artificial Sequence
  LRRK2 RNA guide
uuuuccuaaccccucaaaucac

SEQ ID NO: 65816 - RNA, 20 nt, Artificial Sequence
  LRRK2 RNA guide
aaauuuuccuaaccgcucaa

SEQ ID NO: 65817 - RNA, 20 nt, Artificial Sequence
  LRRK2 RNA guide
aaccgcucaaaucacaccac

SEQ ID NO: 65818 - RNA, 20 nt, Artificial Sequence
  LRRK2 RNA guide
aaggaaauuuuccuaaccgc

SEQ ID NO: 65819 - RNA, 20 nt, Artificial Sequence
  LRRK2 RNA guide
aauuuuccuaaccgcucaaa

SEQ ID NO: 65820 - RNA, 20 nt, Artificial Sequence
  LRRK2 RNA guide
accgcucaaaucacaccacu

SEQ ID NO: 65821 - RNA, 20 nt, Artificial Sequence
  LRRK2 RNA guide
agcgguuaggaaaauuuccu

SEQ ID NO: 65822 - RNA, 20 nt, Artificial Sequence
  LRRK2 RNA guide
aggaaauuuuccuaaccgcu

SEQ ID NO: 65823 - RNA, 20 nt, Artificial Sequence
  LRRK2 RNA guide
aguggugugauuugagcggu

SEQ ID NO: 65824 - RNA, 20 nt, Artificial Sequence
  LRRK2 RNA guide
auuugagcgguuaggaaaau

SEQ ID NO: 65825 - RNA, 20 nt, Artificial Sequence
  LRRK2 RNA guide
auuuuccuaaccgcucaaau

SEQ ID NO: 65826 - RNA, 20 nt, Artificial Sequence
  LRRK2 RNA guide
caaggaaauuuuccuaaccg

SEQ ID NO: 65827 - RNA, 20 nt, Artificial Sequence
  LRRK2 RNA guide
caguggugugauuugagcgg

SEQ ID NO: 65828 - RNA, 20 nt, Artificial Sequence
  LRRK2 RNA guide
ccgcucaaaucacaccacug

SEQ ID NO: 65829 - RNA, 20 nt, Artificial Sequence
  LRRK2 RNA guide
ccuaaccgcucaaaucacac

SEQ ID NO: 65830 - RNA, 20 nt, Artificial Sequence
  LRRK2 RNA guide
cgcucaaaucacaccacuga

SEQ ID NO: 65831 - RNA, 20 nt, Artificial Sequence
  LRRK2 RNA guide
cuaaccgcucaaaucacacc

SEQ ID NO: 65832 - RNA, 20 nt, Artificial Sequence
  LRRK2 RNA guide
gaaauuuuccuaaccgcuca

SEQ ID NO: 65833 - RNA, 20 nt, Artificial Sequence
  LRRK2 RNA guide
gagcgguuaggaaaauuucc

SEQ ID NO: 65834 - RNA, 20 nt, Artificial Sequence
  LRRK2 RNA guide
gauuugagcgguuaggaaaa

SEQ ID NO: 65835 - RNA, 20 nt, Artificial Sequence
  LRRK2 RNA guide
gcgguuaggaaaauuuccuu

SEQ ID NO: 65836 - RNA, 20 nt, Artificial Sequence
  LRRK2 RNA guide
ggaaauuuuccuaaccgcuc

SEQ ID NO: 65837 - RNA, 20 nt, Artificial Sequence
  LRRK2 RNA guide
ggugugauuugagcgguuag

SEQ ID NO: 65838 - RNA, 20 nt, Artificial Sequence
  LRRK2 RNA guide
gugauuugagcgguuaggaa

SEQ ID NO: 65839 - RNA, 20 nt, Artificial Sequence
  LRRK2 RNA guide
guggugugauuugagcgguu

SEQ ID NO: 65840 - RNA, 20 nt, Artificial Sequence
  LRRK2 RNA guide
gugugauuugagcgguuagg

SEQ ID NO: 65841 - RNA, 20 nt, Artificial Sequence
  LRRK2 RNA guide
uaaccgcucaaaucacacca

SEQ ID NO: 65842 - RNA, 20 nt, Artificial Sequence
  LRRK2 RNA guide
ucaguggugugauuugagcg

SEQ ID NO: 65843 - RNA, 20 nt, Artificial Sequence
  LRRK2 RNA guide
uccuaaccgcucaaaucaca

SEQ ID NO: 65844 - RNA, 20 nt, Artificial Sequence
  LRRK2 RNA guide
ugagcgguuaggaaaauuuc

SEQ ID NO: 65845 - RNA, 20 nt, Artificial Sequence
  LRRK2 RNA guide
ugauuugagcgguuaggaaa

SEQ ID NO: 65846 - RNA, 20 nt, Artificial Sequence
  LRRK2 RNA guide
uggugugauuugagcgguua

SEQ ID NO: 65847 - RNA, 20 nt, Artificial Sequence
  LRRK2 RNA guide
ugugauuugagcgguuagga

SEQ ID NO: 65848 - RNA, 20 nt, Artificial Sequence
  LRRK2 RNA guide
uucaguggugugauuugagc

SEQ ID NO: 65849 - RNA, 20 nt, Artificial Sequence
  LRRK2 RNA guide
uuccuaaccgcucaaaucac

SEQ ID NO: 65850 - RNA, 20 nt, Artificial Sequence
  LRRK2 RNA guide
uugagcgguuaggaaaauuu

SEQ ID NO: 65851 - RNA, 20 nt, Artificial Sequence
  LRRK2 RNA guide
uuuccuaaccgcucaaauca

SEQ ID NO: 65852 - RNA, 20 nt, Artificial Sequence
  LRRK2 RNA guide
uuugagcgguuaggaaaauu

SEQ ID NO: 65853 - RNA, 20 nt, Artificial Sequence
  LRRK2 RNA guide
uuuuccuaaccgcucaaauc

SEQ ID NO: 65854 - RNA, 21 nt, Artificial Sequence
  LRRK2 RNA guide
aaauuuuccuaaccgcucaaa

SEQ ID NO: 65855 - RNA, 21 nt, Artificial Sequence
  LRRK2 RNA guide
aaccgcucaaaucacaccacu

SEQ ID NO: 65856 - RNA, 21 nt, Artificial Sequence
  LRRK2 RNA guide
aaggaaauuuuccuaaccgcu

SEQ ID NO: 65857 - RNA, 21 nt, Artificial Sequence
  LRRK2 RNA guide
aauuuuccuaaccgcucaaau

SEQ ID NO: 65858 - RNA, 21 nt, Artificial Sequence
  LRRK2 RNA guide
accgcucaaaucacaccacug

SEQ ID NO: 65859 - RNA, 21 nt, Artificial Sequence
  LRRK2 RNA guide
agcgguuaggaaaauuuccuu

SEQ ID NO: 65860 - RNA, 21 nt, Artificial Sequence
  LRRK2 RNA guide
aggaaauuuuccuaaccgcuc

SEQ ID NO: 65861 - RNA, 21 nt, Artificial Sequence
  LRRK2 RNA guide
aguggugugauuugagcgguu

SEQ ID NO: 65862 - RNA, 21 nt, Artificial Sequence
  LRRK2 RNA guide
auuugagcgguuaggaaaauu

SEQ ID NO: 65863 - RNA, 21 nt, Artificial Sequence
  LRRK2 RNA guide
auuuuccuaaccgcucaaauc

SEQ ID NO: 65864 - RNA, 21 nt, Artificial Sequence
  LRRK2 RNA guide
caaggaaauuuuccuaaccgc

SEQ ID NO: 65865 - RNA, 21 nt, Artificial Sequence
  LRRK2 RNA guide
caguggugugauuugagcggu

SEQ ID NO: 65866 - RNA, 21 nt, Artificial Sequence
  LRRK2 RNA guide
ccgcucaaaucacaccacuga

SEQ ID NO: 65867 - RNA, 21 nt, Artificial Sequence
  LRRK2 RNA guide
ccuaaccgcucaaaucacacc

SEQ ID NO: 65868 - RNA, 21 nt, Artificial Sequence
  LRRK2 RNA guide
cgcucaaaucacaccacugaa

SEQ ID NO: 65869 - RNA, 21 nt, Artificial Sequence
  LRRK2 RNA guide
cuaaccgcucaaaucacacca

SEQ ID NO: 65870 - RNA, 21 nt, Artificial Sequence
  LRRK2 RNA guide
cuucaguggugugauuugagc

SEQ ID NO: 65871 - RNA, 21 nt, Artificial Sequence
  LRRK2 RNA guide
gaaauuuuccuaaccgcucaa

SEQ ID NO: 65872 - RNA, 21 nt, Artificial Sequence
  LRRK2 RNA guide
gagcgguuaggaaaauuuccu

SEQ ID NO: 65873 - RNA, 21 nt, Artificial Sequence
  LRRK2 RNA guide
gauuugagcgguuaggaaaau

SEQ ID NO: 65874 - RNA, 21 nt, Artificial Sequence
  LRRK2 RNA guide
gcaaggaaauuuuccuaaccg

SEQ ID NO: 65875 - RNA, 21 nt, Artificial Sequence
  LRRK2 RNA guide
gcgguuaggaaaauuuccuug

SEQ ID NO: 65876 - RNA, 21 nt, Artificial Sequence
  LRRK2 RNA guide
ggaaauuuuccuaaccgcuca

SEQ ID NO: 65877 - RNA, 21 nt, Artificial Sequence
  LRRK2 RNA guide
ggugugauuugagcgguuagg

SEQ ID NO: 65878 - RNA, 21 nt, Artificial Sequence
  LRRK2 RNA guide
gugauuugagcgguuaggaaa

SEQ ID NO: 65879 - RNA, 21 nt, Artificial Sequence
  LRRK2 RNA guide
guggugugauuugagcgguua

SEQ ID NO: 65880 - RNA, 21 nt, Artificial Sequence
  LRRK2 RNA guide
gugugauuugagcgguuagga

SEQ ID NO: 65881 - RNA, 21 nt, Artificial Sequence
  LRRK2 RNA guide
uaaccgcucaaaucacaccac

SEQ ID NO: 65882 - RNA, 21 nt, Artificial Sequence
  LRRK2 RNA guide
ucaguggugugauuugagcgg

SEQ ID NO: 65883 - RNA, 21 nt, Artificial Sequence
  LRRK2 RNA guide
uccuaaccgcucaaaucacac

SEQ ID NO: 65884 - RNA, 21 nt, Artificial Sequence
  LRRK2 RNA guide
ugagcgguuaggaaaauuucc

SEQ ID NO: 65885 - RNA, 21 nt, Artificial Sequence
  LRRK2 RNA guide
ugauuugagcgguuaggaaaa

SEQ ID NO: 65886 - RNA, 21 nt, Artificial Sequence
  LRRK2 RNA guide
uggugugauuugagcgguuag

SEQ ID NO: 65887 - RNA, 21 nt, Artificial Sequence
  LRRK2 RNA guide
ugugauuugagcgguuaggaa

SEQ ID NO: 65888 - RNA, 21 nt, Artificial Sequence
  LRRK2 RNA guide
uucaguggugugauuugagcg

SEQ ID NO: 65889 - RNA, 21 nt, Artificial Sequence
  LRRK2 RNA guide
uuccuaaccgcucaaaucaca

SEQ ID NO: 65890 - RNA, 21 nt, Artificial Sequence
  LRRK2 RNA guide
uugagcgguuaggaaaauuuc

SEQ ID NO: 65891 - RNA, 21 nt, Artificial Sequence
  LRRK2 RNA guide
uuuccuaaccgcucaaaucac

SEQ ID NO: 65892 - RNA, 21 nt, Artificial Sequence
  LRRK2 RNA guide
uuugagcgguuaggaaaauuu

SEQ ID NO: 65893 - RNA, 21 nt, Artificial Sequence
  LRRK2 RNA guide
uuuuccuaaccgcucaaauca

SEQ ID NO: 65894 - RNA, 22 nt, Artificial Sequence
  LRRK2 RNA guide
aaauuuuccuaaccgcucaaau

SEQ ID NO: 65895 - RNA, 22 nt, Artificial Sequence
  LRRK2 RNA guide
aaccgcucaaaucacaccacug

SEQ ID NO: 65896 - RNA, 22 nt, Artificial Sequence
  LRRK2 RNA guide
aaggaaauuuuccuaaccgcuc

SEQ ID NO: 65897 - RNA, 22 nt, Artificial Sequence
  LRRK2 RNA guide
aauuuuccuaaccgcucaaauc

SEQ ID NO: 65898 - RNA, 22 nt, Artificial Sequence
  LRRK2 RNA guide
accgcucaaaucacaccacuga

SEQ ID NO: 65899 - RNA, 22 nt, Artificial Sequence
  LRRK2 RNA guide
acuucaguggugugauuugagc

SEQ ID NO: 65900 - RNA, 22 nt, Artificial Sequence
  LRRK2 RNA guide
agcgguuaggaaaauuuccuug

SEQ ID NO: 65901 - RNA, 22 nt, Artificial Sequence
  LRRK2 RNA guide
aggaaauuuuccuaaccgcuca

SEQ ID NO: 65902 - RNA, 22 nt, Artificial Sequence
  LRRK2 RNA guide
aguggugugauuugagcgguua

SEQ ID NO: 65903 - RNA, 22 nt, Artificial Sequence
  LRRK2 RNA guide
auuugagcgguuaggaaaauuu

SEQ ID NO: 65904 - RNA, 22 nt, Artificial Sequence
  LRRK2 RNA guide
auuuuccuaaccgcucaaauca

SEQ ID NO: 65905 - RNA, 22 nt, Artificial Sequence
  LRRK2 RNA guide
caaggaaauuuuccuaaccgcu

SEQ ID NO: 65906 - RNA, 22 nt, Artificial Sequence
  LRRK2 RNA guide
caguggugugauuugagcgguu

SEQ ID NO: 65907 - RNA, 22 nt, Artificial Sequence
  LRRK2 RNA guide
ccgcucaaaucacaccacugaa

SEQ ID NO: 65908 - RNA, 22 nt, Artificial Sequence
  LRRK2 RNA guide
ccuaaccgcucaaaucacacca

SEQ ID NO: 65909 - RNA, 22 nt, Artificial Sequence
  LRRK2 RNA guide
cgcucaaaucacaccacugaag

SEQ ID NO: 65910 - RNA, 22 nt, Artificial Sequence
  LRRK2 RNA guide
cuaaccgcucaaaucacaccac

SEQ ID NO: 65911 - RNA, 22 nt, Artificial Sequence
  LRRK2 RNA guide
cuucaguggugugauuugagcg

SEQ ID NO: 65912 - RNA, 22 nt, Artificial Sequence
  LRRK2 RNA guide
gaaauuuuccuaaccgcucaaa

SEQ ID NO: 65913 - RNA, 22 nt, Artificial Sequence
  LRRK2 RNA guide
gagcgguuaggaaaauuuccuu

SEQ ID NO: 65914 - RNA, 22 nt, Artificial Sequence
  LRRK2 RNA guide
gauuugagcgguuaggaaaauu

SEQ ID NO: 65915 - RNA, 22 nt, Artificial Sequence
  LRRK2 RNA guide
gcaaggaaauuuuccuaaccgc

SEQ ID NO: 65916 - RNA, 22 nt, Artificial Sequence
  LRRK2 RNA guide
gcgguuaggaaaauuuccuugc

SEQ ID NO: 65917 - RNA, 22 nt, Artificial Sequence
  LRRK2 RNA guide
ggaaauuuuccuaaccgcucaa

SEQ ID NO: 65918 - RNA, 22 nt, Artificial Sequence
  LRRK2 RNA guide
ggcaaggaaauuuuccuaaccg

SEQ ID NO: 65919 - RNA, 22 nt, Artificial Sequence
  LRRK2 RNA guide
ggugugauuugagcgguuagga

SEQ ID NO: 65920 - RNA, 22 nt, Artificial Sequence
  LRRK2 RNA guide
gugauuugagcgguuaggaaaa

SEQ ID NO: 65921 - RNA, 22 nt, Artificial Sequence
  LRRK2 RNA guide
guggugugauuugagcgguuag

SEQ ID NO: 65922 - RNA, 22 nt, Artificial Sequence
  LRRK2 RNA guide
gugugauuugagcgguuaggaa

SEQ ID NO: 65923 - RNA, 22 nt, Artificial Sequence
  LRRK2 RNA guide
uaaccgcucaaaucacaccacu

SEQ ID NO: 65924 - RNA, 22 nt, Artificial Sequence
  LRRK2 RNA guide
ucaguggugugauuugagcggu

SEQ ID NO: 65925 - RNA, 22 nt, Artificial Sequence
  LRRK2 RNA guide
uccuaaccgcucaaaucacacc

SEQ ID NO: 65926 - RNA, 22 nt, Artificial Sequence
  LRRK2 RNA guide
ugagcgguuaggaaaauuuccu

SEQ ID NO: 65927 - RNA, 22 nt, Artificial Sequence
  LRRK2 RNA guide
ugauuugagcgguuaggaaaau

SEQ ID NO: 65928 - RNA, 22 nt, Artificial Sequence
  LRRK2 RNA guide
uggugugauuugagcgguuagg

SEQ ID NO: 65929 - RNA, 22 nt, Artificial Sequence
  LRRK2 RNA guide
ugugauuugagcgguuaggaaa

SEQ ID NO: 65930 - RNA, 22 nt, Artificial Sequence
  LRRK2 RNA guide
uucaguggugugauuugagcgg

SEQ ID NO: 65931 - RNA, 22 nt, Artificial Sequence
  LRRK2 RNA guide
uuccuaaccgcucaaaucacac

SEQ ID NO: 65932 - RNA, 22 nt, Artificial Sequence
  LRRK2 RNA guide
uugagcgguuaggaaaauuucc

SEQ ID NO: 65933 - RNA, 22 nt, Artificial Sequence
  LRRK2 RNA guide
uuuccuaaccgcucaaaucaca

SEQ ID NO: 65934 - RNA, 22 nt, Artificial Sequence
  LRRK2 RNA guide
uuugagcgguuaggaaaauuuc

SEQ ID NO: 65935 - RNA, 22 nt, Artificial Sequence
  LRRK2 RNA guide
uuuuccuaaccgcucaaaucac

SEQ ID NO: 65936 - RNA, 20 nt, Artificial Sequence
  LRRK2 RNA guide
aucucugccgggcgcagugg

SEQ ID NO: 65937 - RNA, 21 nt, Artificial Sequence
  LRRK2 RNA guide
aaucucugccgggcgcagugg

SEQ ID NO: 65938 - RNA, 21 nt, Artificial Sequence
  LRRK2 RNA guide
aucucugccgggcgcaguggc

SEQ ID NO: 65939 - RNA, 21 nt, Artificial Sequence
  LRRK2 RNA guide
caugagccacugcgcccggca

SEQ ID NO: 65940 - RNA, 22 nt, Artificial Sequence
  LRRK2 RNA guide
aaaucucugccgggcgcagugg

SEQ ID NO: 65941 - RNA, 22 nt, Artificial Sequence
  LRRK2 RNA guide
aaucucugccgggcgcaguggc

SEQ ID NO: 65942 - RNA, 22 nt, Artificial Sequence
  LRRK2 RNA guide
aucucugccgggcgcaguggcu

SEQ ID NO: 65943 - RNA, 22 nt, Artificial Sequence
  LRRK2 RNA guide
caugagccacugcgcccggcag

SEQ ID NO: 65944 - RNA, 22 nt, Artificial Sequence
  LRRK2 RNA guide
gcaugagccacugcgcccggca

SEQ ID NO: 65945 - RNA, 21 nt, Artificial Sequence
  LRRK2 RNA guide
cgugagccacugcgcccggca

SEQ ID NO: 65946 - RNA, 22 nt, Artificial Sequence
  LRRK2 RNA guide
cgugagccacugcgcccggcag

SEQ ID NO: 65947 - RNA, 22 nt, Artificial Sequence
  LRRK2 RNA guide
gcgugagccacugcgcccggca

SEQ ID NO: 65948 - RNA, 20 nt, Artificial Sequence
  LRRK2 RNA guide
aaaaaacaacuagaaguccc

SEQ ID NO: 65949 - RNA, 20 nt, Artificial Sequence
  LRRK2 RNA guide
aaaaacaacuagaagucccu

SEQ ID NO: 65950 - RNA, 20 nt, Artificial Sequence
  LRRK2 RNA guide
aaaacaacuagaagucccua

SEQ ID NO: 65951 - RNA, 20 nt, Artificial Sequence
  LRRK2 RNA guide
agggacuucuaguuguuuuu

SEQ ID NO: 65952 - RNA, 20 nt, Artificial Sequence
  LRRK2 RNA guide
aguagggacuucuaguuguu

SEQ ID NO: 65953 - RNA, 20 nt, Artificial Sequence
  LRRK2 RNA guide
gaguagggacuucuaguugu

SEQ ID NO: 65954 - RNA, 20 nt, Artificial Sequence
  LRRK2 RNA guide
ggaguagggacuucuaguug

SEQ ID NO: 65955 - RNA, 20 nt, Artificial Sequence
  LRRK2 RNA guide
gggacuucuaguuguuuuuu

SEQ ID NO: 65956 - RNA, 20 nt, Artificial Sequence
  LRRK2 RNA guide
guagggacuucuaguuguuu

SEQ ID NO: 65957 - RNA, 20 nt, Artificial Sequence
  LRRK2 RNA guide
uagggacuucuaguuguuuu

SEQ ID NO: 65958 - RNA, 20 nt, Artificial Sequence
  LRRK2 RNA guide
uggaguagggacuucuaguu

SEQ ID NO: 65959 - RNA, 20 nt, Artificial Sequence
  LRRK2 RNA guide
uuggaguagggacuucuagu

SEQ ID NO: 65960 - RNA, 21 nt, Artificial Sequence
  LRRK2 RNA guide
aaaaaacaacuagaagucccu

SEQ ID NO: 65961 - RNA, 21 nt, Artificial Sequence
  LRRK2 RNA guide
aaaaacaacuagaagucccua

SEQ ID NO: 65962 - RNA, 21 nt, Artificial Sequence
  LRRK2 RNA guide
aaaacaacuagaagucccuac

SEQ ID NO: 65963 - RNA, 21 nt, Artificial Sequence
  LRRK2 RNA guide
agggacuucuaguuguuuuuu

SEQ ID NO: 65964 - RNA, 21 nt, Artificial Sequence
  LRRK2 RNA guide
aguagggacuucuaguuguuu

SEQ ID NO: 65965 - RNA, 21 nt, Artificial Sequence
  LRRK2 RNA guide
gaguagggacuucuaguuguu

SEQ ID NO: 65966 - RNA, 21 nt, Artificial Sequence
  LRRK2 RNA guide
ggaguagggacuucuaguugu

SEQ ID NO: 65967 - RNA, 21 nt, Artificial Sequence
  LRRK2 RNA guide
guagggacuucuaguuguuuu

SEQ ID NO: 65968 - RNA, 21 nt, Artificial Sequence
  LRRK2 RNA guide
guuggaguagggacuucuagu

SEQ ID NO: 65969 - RNA, 21 nt, Artificial Sequence
  LRRK2 RNA guide
uagggacuucuaguuguuuuu

SEQ ID NO: 65970 - RNA, 21 nt, Artificial Sequence
  LRRK2 RNA guide
uggaguagggacuucuaguug

SEQ ID NO: 65971 - RNA, 21 nt, Artificial Sequence
  LRRK2 RNA guide
uuggaguagggacuucuaguu

SEQ ID NO: 65972 - RNA, 22 nt, Artificial Sequence
  LRRK2 RNA guide
aaaaaacaacuagaagucccua

SEQ ID NO: 65973 - RNA, 22 nt, Artificial Sequence
  LRRK2 RNA guide
aaaaacaacuagaagucccuac

SEQ ID NO: 65974 - RNA, 22 nt, Artificial Sequence
  LRRK2 RNA guide
aaaacaacuagaagucccuacu

SEQ ID NO: 65975 - RNA, 22 nt, Artificial Sequence
  LRRK2 RNA guide
aguagggacuucuaguuguuuu

SEQ ID NO: 65976 - RNA, 22 nt, Artificial Sequence
  LRRK2 RNA guide
aguuggaguagggacuucuagu

SEQ ID NO: 65977 - RNA, 22 nt, Artificial Sequence
  LRRK2 RNA guide
gaguagggacuucuaguuguuu

SEQ ID NO: 65978 - RNA, 22 nt, Artificial Sequence
  LRRK2 RNA guide
ggaguagggacuucuaguuguu

SEQ ID NO: 65979 - RNA, 22 nt, Artificial Sequence
  LRRK2 RNA guide
guagggacuucuaguuguuuuu

SEQ ID NO: 65980 - RNA, 22 nt, Artificial Sequence
  LRRK2 RNA guide
guuggaguagggacuucuaguu

SEQ ID NO: 65981 - RNA, 22 nt, Artificial Sequence
  LRRK2 RNA guide
uagggacuucuaguuguuuuuu

SEQ ID NO: 65982 - RNA, 22 nt, Artificial Sequence
  LRRK2 RNA guide
uggaguagggacuucuaguugu

SEQ ID NO: 65983 - RNA, 22 nt, Artificial Sequence
  LRRK2 RNA guide
uuggaguagggacuucuaguug

SEQ ID NO: 65984 - RNA, 20 nt, Artificial Sequence
  LRRK2 RNA guide
aaaaacaacaacuagaaguc

SEQ ID NO: 65985 - RNA, 20 nt, Artificial Sequence
  LRRK2 RNA guide
aaaacaacaacuagaagucc

SEQ ID NO: 65986 - RNA, 20 nt, Artificial Sequence
  LRRK2 RNA guide
aaacaacaacuagaaguccc

SEQ ID NO: 65987 - RNA, 20 nt, Artificial Sequence
  LRRK2 RNA guide
aacaacaacuagaagucccu

SEQ ID NO: 65988 - RNA, 20 nt, Artificial Sequence
  LRRK2 RNA guide
acaacaacuagaagucccua

SEQ ID NO: 65989 - RNA, 20 nt, Artificial Sequence
  LRRK2 RNA guide
agggacuucuaguuguuguu

SEQ ID NO: 65990 - RNA, 20 nt, Artificial Sequence
  LRRK2 RNA guide
gacuucuaguuguuguuuuu

SEQ ID NO: 65991 - RNA, 20 nt, Artificial Sequence
  LRRK2 RNA guide
ggacuucuaguuguuguuuu

SEQ ID NO: 65992 - RNA, 20 nt, Artificial Sequence
  LRRK2 RNA guide
gggacuucuaguuguuguuu

SEQ ID NO: 65993 - RNA, 20 nt, Artificial Sequence
  LRRK2 RNA guide
guagggacuucuaguuguug

SEQ ID NO: 65994 - RNA, 20 nt, Artificial Sequence
  LRRK2 RNA guide
uagggacuucuaguuguugu

SEQ ID NO: 65995 - RNA, 21 nt, Artificial Sequence
  LRRK2 RNA guide
aaaaacaacaacuagaagucc

SEQ ID NO: 65996 - RNA, 21 nt, Artificial Sequence
  LRRK2 RNA guide
aaaacaacaacuagaaguccc

SEQ ID NO: 65997 - RNA, 21 nt, Artificial Sequence
  LRRK2 RNA guide
aaacaacaacuagaagucccu

SEQ ID NO: 65998 - RNA, 21 nt, Artificial Sequence
  LRRK2 RNA guide
aacaacaacuagaagucccua

SEQ ID NO: 65999 - RNA, 21 nt, Artificial Sequence
  LRRK2 RNA guide
acaacaacuagaagucccuac

SEQ ID NO: 66000 - RNA, 21 nt, Artificial Sequence
  LRRK2 RNA guide
agggacuucuaguuguuguuu

SEQ ID NO: 66001 - RNA, 21 nt, Artificial Sequence
  LRRK2 RNA guide
aguagggacuucuaguuguug

SEQ ID NO: 66002 - RNA, 21 nt, Artificial Sequence
  LRRK2 RNA guide
ggacuucuaguuguuguuuuu

SEQ ID NO: 66003 - RNA, 21 nt, Artificial Sequence
  LRRK2 RNA guide
gggacuucuaguuguuguuuu

SEQ ID NO: 66004 - RNA, 21 nt, Artificial Sequence
  LRRK2 RNA guide
guagggacuucuaguuguugu

SEQ ID NO: 66005 - RNA, 21 nt, Artificial Sequence
  LRRK2 RNA guide
uagggacuucuaguuguuguu

SEQ ID NO: 66006 - RNA, 22 nt, Artificial Sequence
  LRRK2 RNA guide
aaaaaacaacaacuagaagucc

SEQ ID NO: 66007 - RNA, 22 nt, Artificial Sequence
  LRRK2 RNA guide
aaaaacaacaacuagaaguccc

SEQ ID NO: 66008 - RNA, 22 nt, Artificial Sequence
  LRRK2 RNA guide
aaaacaacaacuagaagucccu

SEQ ID NO: 66009 - RNA, 22 nt, Artificial Sequence
  LRRK2 RNA guide
aaacaacaacuagaagucccua

SEQ ID NO: 66010 - RNA, 22 nt, Artificial Sequence
  LRRK2 RNA guide
aacaacaacuagaagucccuac

SEQ ID NO: 66011 - RNA, 22 nt, Artificial Sequence
  LRRK2 RNA guide
acaacaacuagaagucccuacu

SEQ ID NO: 66012 - RNA, 22 nt, Artificial Sequence
  LRRK2 RNA guide
agggacuucuaguuguuguuuu

SEQ ID NO: 66013 - RNA, 22 nt, Artificial Sequence
  LRRK2 RNA guide
aguagggacuucuaguuguugu

SEQ ID NO: 66014 - RNA, 22 nt, Artificial Sequence
  LRRK2 RNA guide
gaguagggacuucuaguuguug

SEQ ID NO: 66015 - RNA, 22 nt, Artificial Sequence
  LRRK2 RNA guide
ggacuucuaguuguuguuuuuu

SEQ ID NO: 66016 - RNA, 22 nt, Artificial Sequence
  LRRK2 RNA guide
gggacuucuaguuguuguuuuu

SEQ ID NO: 66017 - RNA, 22 nt, Artificial Sequence
  LRRK2 RNA guide
guagggacuucuaguuguuguu

SEQ ID NO: 66018 - RNA, 22 nt, Artificial Sequence
  LRRK2 RNA guide
uagggacuucuaguuguuguuu

SEQ ID NO: 66019 - RNA, 20 nt, Artificial Sequence
  LRRK2 RNA guide
aaacaacuagaagucccuac

SEQ ID NO: 66020 - RNA, 20 nt, Artificial Sequence
  LRRK2 RNA guide
aacaacuagaagucccuacu

SEQ ID NO: 66021 - RNA, 20 nt, Artificial Sequence
  LRRK2 RNA guide
aguuggaguagggacuucua

SEQ ID NO: 66022 - RNA, 20 nt, Artificial Sequence
  LRRK2 RNA guide
guuggaguagggacuucuag

SEQ ID NO: 66023 - RNA, 21 nt, Artificial Sequence
  LRRK2 RNA guide
aaacaacuagaagucccuacu

SEQ ID NO: 66024 - RNA, 21 nt, Artificial Sequence
  LRRK2 RNA guide
aacaacuagaagucccuacuc

SEQ ID NO: 66025 - RNA, 21 nt, Artificial Sequence
  LRRK2 RNA guide
aaguuggaguagggacuucua

SEQ ID NO: 66026 - RNA, 21 nt, Artificial Sequence
  LRRK2 RNA guide
aguuggaguagggacuucuag

SEQ ID NO: 66027 - RNA, 22 nt, Artificial Sequence
  LRRK2 RNA guide
aaacaacuagaagucccuacuc

SEQ ID NO: 66028 - RNA, 22 nt, Artificial Sequence
  LRRK2 RNA guide
aacaacuagaagucccuacucc

SEQ ID NO: 66029 - RNA, 22 nt, Artificial Sequence
  LRRK2 RNA guide
aaguuggaguagggacuucuag

SEQ ID NO: 66030 - RNA, 22 nt, Artificial Sequence
  LRRK2 RNA guide
caaguuggaguagggacuucua

SEQ ID NO: 66031 - RNA, 20 nt, Artificial Sequence
  LRRK2 RNA guide
aaaaaaccaacuagaagucc

SEQ ID NO: 66032 - RNA, 20 nt, Artificial Sequence
  LRRK2 RNA guide
aaaaaccaacuagaaguccc

SEQ ID NO: 66033 - RNA, 20 nt, Artificial Sequence
  LRRK2 RNA guide
aaaaccaacuagaagucccu

SEQ ID NO: 66034 - RNA, 20 nt, Artificial Sequence
  LRRK2 RNA guide
aaaccaacuagaagucccua

SEQ ID NO: 66035 - RNA, 20 nt, Artificial Sequence
  LRRK2 RNA guide
aaccaacuagaagucccuac

SEQ ID NO: 66036 - RNA, 20 nt, Artificial Sequence
  LRRK2 RNA guide
accaacuagaagucccuacu

SEQ ID NO: 66037 - RNA, 20 nt, Artificial Sequence
  LRRK2 RNA guide
agggacuucuaguugguuuu

SEQ ID NO: 66038 - RNA, 20 nt, Artificial Sequence
  LRRK2 RNA guide
aguagggacuucuaguuggu

SEQ ID NO: 66039 - RNA, 20 nt, Artificial Sequence
  LRRK2 RNA guide
gaguagggacuucuaguugg

SEQ ID NO: 66040 - RNA, 20 nt, Artificial Sequence
  LRRK2 RNA guide
ggacuucuaguugguuuuuu

SEQ ID NO: 66041 - RNA, 20 nt, Artificial Sequence
  LRRK2 RNA guide
gggacuucuaguugguuuuu

SEQ ID NO: 66042 - RNA, 20 nt, Artificial Sequence
  LRRK2 RNA guide
guagggacuucuaguugguu

SEQ ID NO: 66043 - RNA, 20 nt, Artificial Sequence
  LRRK2 RNA guide
uagggacuucuaguugguuu

SEQ ID NO: 66044 - RNA, 21 nt, Artificial Sequence
  LRRK2 RNA guide
aaaaaaccaacuagaaguccc

SEQ ID NO: 66045 - RNA, 21 nt, Artificial Sequence
  LRRK2 RNA guide
aaaaaccaacuagaagucccu

SEQ ID NO: 66046 - RNA, 21 nt, Artificial Sequence
  LRRK2 RNA guide
aaaaccaacuagaagucccua

SEQ ID NO: 66047 - RNA, 21 nt, Artificial Sequence
  LRRK2 RNA guide
aaaccaacuagaagucccuac

SEQ ID NO: 66048 - RNA, 21 nt, Artificial Sequence
  LRRK2 RNA guide
aaccaacuagaagucccuacu

SEQ ID NO: 66049 - RNA, 21 nt, Artificial Sequence
  LRRK2 RNA guide
accaacuagaagucccuacuc

SEQ ID NO: 66050 - RNA, 21 nt, Artificial Sequence
  LRRK2 RNA guide
agggacuucuaguugguuuuu

SEQ ID NO: 66051 - RNA, 21 nt, Artificial Sequence
  LRRK2 RNA guide
aguagggacuucuaguugguu

SEQ ID NO: 66052 - RNA, 21 nt, Artificial Sequence
  LRRK2 RNA guide
gaguagggacuucuaguuggu

SEQ ID NO: 66053 - RNA, 21 nt, Artificial Sequence
  LRRK2 RNA guide
ggaguagggacuucuaguugg

SEQ ID NO: 66054 - RNA, 21 nt, Artificial Sequence
  LRRK2 RNA guide
gggacuucuaguugguuuuuu

SEQ ID NO: 66055 - RNA, 21 nt, Artificial Sequence
  LRRK2 RNA guide
guagggacuucuaguugguuu

SEQ ID NO: 66056 - RNA, 21 nt, Artificial Sequence
  LRRK2 RNA guide
uagggacuucuaguugguuuu

SEQ ID NO: 66057 - RNA, 22 nt, Artificial Sequence
  LRRK2 RNA guide
aaaaaaccaacuagaagucccu

SEQ ID NO: 66058 - RNA, 22 nt, Artificial Sequence
  LRRK2 RNA guide
aaaaaccaacuagaagucccua

SEQ ID NO: 66059 - RNA, 22 nt, Artificial Sequence
  LRRK2 RNA guide
aaaaccaacuagaagucccuac

SEQ ID NO: 66060 - RNA, 22 nt, Artificial Sequence
  LRRK2 RNA guide
aaaccaacuagaagucccuacu

SEQ ID NO: 66061 - RNA, 22 nt, Artificial Sequence
  LRRK2 RNA guide
aaccaacuagaagucccuacuc

SEQ ID NO: 66062 - RNA, 22 nt, Artificial Sequence
  LRRK2 RNA guide
accaacuagaagucccuacucc

SEQ ID NO: 66063 - RNA, 22 nt, Artificial Sequence
  LRRK2 RNA guide
agggacuucuaguugguuuuuu

SEQ ID NO: 66064 - RNA, 22 nt, Artificial Sequence
  LRRK2 RNA guide
aguagggacuucuaguugguuu

SEQ ID NO: 66065 - RNA, 22 nt, Artificial Sequence
  LRRK2 RNA guide
gaguagggacuucuaguugguu

SEQ ID NO: 66066 - RNA, 22 nt, Artificial Sequence
  LRRK2 RNA guide
ggaguagggacuucuaguuggu

SEQ ID NO: 66067 - RNA, 22 nt, Artificial Sequence
  LRRK2 RNA guide
guagggacuucuaguugguuuu

SEQ ID NO: 66068 - RNA, 22 nt, Artificial Sequence
  LRRK2 RNA guide
uagggacuucuaguugguuuuu

SEQ ID NO: 66069 - RNA, 22 nt, Artificial Sequence
  LRRK2 RNA guide
uggaguagggacuucuaguugg

SEQ ID NO: 66070 - RNA, 20 nt, Artificial Sequence
  LRRK2 RNA guide
acccuugaagagcucugcua

SEQ ID NO: 66071 - RNA, 20 nt, Artificial Sequence
  LRRK2 RNA guide
agagcucugcuacuccauca

SEQ ID NO: 66072 - RNA, 20 nt, Artificial Sequence
  LRRK2 RNA guide
agagcucuucaaggguaugg

SEQ ID NO: 66073 - RNA, 20 nt, Artificial Sequence
  LRRK2 RNA guide
agaugauggaguagcagagc

SEQ ID NO: 66074 - RNA, 20 nt, Artificial Sequence
  LRRK2 RNA guide
agcagagcucuucaagggua

SEQ ID NO: 66075 - RNA, 20 nt, Artificial Sequence
  LRRK2 RNA guide
agcucugcuacuccaucauc

SEQ ID NO: 66076 - RNA, 20 nt, Artificial Sequence
  LRRK2 RNA guide
agcucuucaaggguauggag

SEQ ID NO: 66077 - RNA, 20 nt, Artificial Sequence
  LRRK2 RNA guide
aggccuccauacccuugaag

SEQ ID NO: 66078 - RNA, 20 nt, Artificial Sequence
  LRRK2 RNA guide
aguagcagagcucuucaagg

SEQ ID NO: 66079 - RNA, 20 nt, Artificial Sequence
  LRRK2 RNA guide
auacccuugaagagcucugc

SEQ ID NO: 66080 - RNA, 20 nt, Artificial Sequence
  LRRK2 RNA guide
augauggaguagcagagcuc

SEQ ID NO: 66081 - RNA, 20 nt, Artificial Sequence
  LRRK2 RNA guide
auggaguagcagagcucuuc

SEQ ID NO: 66082 - RNA, 20 nt, Artificial Sequence
  LRRK2 RNA guide
auugagaugauggaguagca

SEQ ID NO: 66083 - RNA, 20 nt, Artificial Sequence
  LRRK2 RNA guide
cagagcucuucaaggguaug

SEQ ID NO: 66084 - RNA, 20 nt, Artificial Sequence
  LRRK2 RNA guide
caggccuccauacccuugaa

SEQ ID NO: 66085 - RNA, 20 nt, Artificial Sequence
  LRRK2 RNA guide
cauacccuugaagagcucug

SEQ ID NO: 66086 - RNA, 20 nt, Artificial Sequence
  LRRK2 RNA guide
ccauacccuugaagagcucu

SEQ ID NO: 66087 - RNA, 20 nt, Artificial Sequence
  LRRK2 RNA guide
cccuugaagagcucugcuac

SEQ ID NO: 66088 - RNA, 20 nt, Artificial Sequence
  LRRK2 RNA guide
ccuccauacccuugaagagc

SEQ ID NO: 66089 - RNA, 20 nt, Artificial Sequence
  LRRK2 RNA guide
ccuugaagagcucugcuacu

SEQ ID NO: 66090 - RNA, 20 nt, Artificial Sequence
  LRRK2 RNA guide
cuccauacccuugaagagcu

SEQ ID NO: 66091 - RNA, 20 nt, Artificial Sequence
  LRRK2 RNA guide
cuugaagagcucugcuacuc

SEQ ID NO: 66092 - RNA, 20 nt, Artificial Sequence
  LRRK2 RNA guide
gaagagcucugcuacuccau

SEQ ID NO: 66093 - RNA, 20 nt, Artificial Sequence
  LRRK2 RNA guide
gagaugauggaguagcagag

SEQ ID NO: 66094 - RNA, 20 nt, Artificial Sequence
  LRRK2 RNA guide
gagcucugcuacuccaucau

SEQ ID NO: 66095 - RNA, 20 nt, Artificial Sequence
  LRRK2 RNA guide
gagcucuucaaggguaugga

SEQ ID NO: 66096 - RNA, 20 nt, Artificial Sequence
  LRRK2 RNA guide
gaguagcagagcucuucaag

SEQ ID NO: 66097 - RNA, 20 nt, Artificial Sequence
  LRRK2 RNA guide
gaugauggaguagcagagcu

SEQ ID NO: 66098 - RNA, 20 nt, Artificial Sequence
  LRRK2 RNA guide
gauggaguagcagagcucuu

SEQ ID NO: 66099 - RNA, 20 nt, Artificial Sequence
  LRRK2 RNA guide
gauugagaugauggaguagc

SEQ ID NO: 66100 - RNA, 20 nt, Artificial Sequence
  LRRK2 RNA guide
gcagagcucuucaaggguau

SEQ ID NO: 66101 - RNA, 20 nt, Artificial Sequence
  LRRK2 RNA guide
gccuccauacccuugaagag

SEQ ID NO: 66102 - RNA, 20 nt, Artificial Sequence
  LRRK2 RNA guide
gcucugcuacuccaucaucu

SEQ ID NO: 66103 - RNA, 20 nt, Artificial Sequence
  LRRK2 RNA guide
ggaguagcagagcucuucaa

SEQ ID NO: 66104 - RNA, 20 nt, Artificial Sequence
  LRRK2 RNA guide
ggauugagaugauggaguag

SEQ ID NO: 66105 - RNA, 20 nt, Artificial Sequence
  LRRK2 RNA guide
ggccuccauacccuugaaga

SEQ ID NO: 66106 - RNA, 20 nt, Artificial Sequence
  LRRK2 RNA guide
guagcagagcucuucaaggg

SEQ ID NO: 66107 - RNA, 20 nt, Artificial Sequence
  LRRK2 RNA guide
uacccuugaagagcucugcu

SEQ ID NO: 66108 - RNA, 20 nt, Artificial Sequence
  LRRK2 RNA guide
uagcagagcucuucaagggu

SEQ ID NO: 66109 - RNA, 20 nt, Artificial Sequence
  LRRK2 RNA guide
ucaggccuccauacccuuga

SEQ ID NO: 66110 - RNA, 20 nt, Artificial Sequence
  LRRK2 RNA guide
uccauacccuugaagagcuc

SEQ ID NO: 66111 - RNA, 20 nt, Artificial Sequence
  LRRK2 RNA guide
ugaagagcucugcuacucca

SEQ ID NO: 66112 - RNA, 20 nt, Artificial Sequence
  LRRK2 RNA guide
ugagaugauggaguagcaga

SEQ ID NO: 66113 - RNA, 20 nt, Artificial Sequence
  LRRK2 RNA guide
ugauggaguagcagagcucu

SEQ ID NO: 66114 - RNA, 20 nt, Artificial Sequence
  LRRK2 RNA guide
uggaguagcagagcucuuca

SEQ ID NO: 66115 - RNA, 20 nt, Artificial Sequence
  LRRK2 RNA guide
uugaagagcucugcuacucc

SEQ ID NO: 66116 - RNA, 20 nt, Artificial Sequence
  LRRK2 RNA guide
uugagaugauggaguagcag

SEQ ID NO: 66117 - RNA, 21 nt, Artificial Sequence
  LRRK2 RNA guide
aagagcucugcuacuccauca

SEQ ID NO: 66118 - RNA, 21 nt, Artificial Sequence
  LRRK2 RNA guide
acccuugaagagcucugcuac

SEQ ID NO: 66119 - RNA, 21 nt, Artificial Sequence
  LRRK2 RNA guide
agagcucugcuacuccaucau

SEQ ID NO: 66120 - RNA, 21 nt, Artificial Sequence
  LRRK2 RNA guide
agagcucuucaaggguaugga

SEQ ID NO: 66121 - RNA, 21 nt, Artificial Sequence
  LRRK2 RNA guide
agaugauggaguagcagagcu

SEQ ID NO: 66122 - RNA, 21 nt, Artificial Sequence
  LRRK2 RNA guide
agcagagcucuucaaggguau

SEQ ID NO: 66123 - RNA, 21 nt, Artificial Sequence
  LRRK2 RNA guide
agcucugcuacuccaucaucu

SEQ ID NO: 66124 - RNA, 21 nt, Artificial Sequence
  LRRK2 RNA guide
agcucuucaaggguauggagg

SEQ ID NO: 66125 - RNA, 21 nt, Artificial Sequence
  LRRK2 RNA guide
aggccuccauacccuugaaga

SEQ ID NO: 66126 - RNA, 21 nt, Artificial Sequence
  LRRK2 RNA guide
aguagcagagcucuucaaggg

SEQ ID NO: 66127 - RNA, 21 nt, Artificial Sequence
  LRRK2 RNA guide
auacccuugaagagcucugcu

SEQ ID NO: 66128 - RNA, 21 nt, Artificial Sequence
  LRRK2 RNA guide
augauggaguagcagagcucu

SEQ ID NO: 66129 - RNA, 21 nt, Artificial Sequence
  LRRK2 RNA guide
auggaguagcagagcucuuca

SEQ ID NO: 66130 - RNA, 21 nt, Artificial Sequence
  LRRK2 RNA guide
auugagaugauggaguagcag

SEQ ID NO: 66131 - RNA, 21 nt, Artificial Sequence
  LRRK2 RNA guide
cagagcucuucaaggguaugg

SEQ ID NO: 66132 - RNA, 21 nt, Artificial Sequence
  LRRK2 RNA guide
caggccuccauacccuugaag

SEQ ID NO: 66133 - RNA, 21 nt, Artificial Sequence
  LRRK2 RNA guide
cauacccuugaagagcucugc

SEQ ID NO: 66134 - RNA, 21 nt, Artificial Sequence
  LRRK2 RNA guide
ccauacccuugaagagcucug

SEQ ID NO: 66135 - RNA, 21 nt, Artificial Sequence
  LRRK2 RNA guide
cccuugaagagcucugcuacu

SEQ ID NO: 66136 - RNA, 21 nt, Artificial Sequence
  LRRK2 RNA guide
ccuccauacccuugaagagcu

SEQ ID NO: 66137 - RNA, 21 nt, Artificial Sequence
  LRRK2 RNA guide
ccuugaagagcucugcuacuc

SEQ ID NO: 66138 - RNA, 21 nt, Artificial Sequence
  LRRK2 RNA guide
cuccauacccuugaagagcuc

SEQ ID NO: 66139 - RNA, 21 nt, Artificial Sequence
  LRRK2 RNA guide
cuugaagagcucugcuacucc

SEQ ID NO: 66140 - RNA, 21 nt, Artificial Sequence
  LRRK2 RNA guide
gaagagcucugcuacuccauc

SEQ ID NO: 66141 - RNA, 21 nt, Artificial Sequence
  LRRK2 RNA guide
gagaugauggaguagcagagc

SEQ ID NO: 66142 - RNA, 21 nt, Artificial Sequence
  LRRK2 RNA guide
gagcucugcuacuccaucauc

SEQ ID NO: 66143 - RNA, 21 nt, Artificial Sequence
  LRRK2 RNA guide
gagcucuucaaggguauggag

SEQ ID NO: 66144 - RNA, 21 nt, Artificial Sequence
  LRRK2 RNA guide
gaguagcagagcucuucaagg

SEQ ID NO: 66145 - RNA, 21 nt, Artificial Sequence
  LRRK2 RNA guide
gaugauggaguagcagagcuc

SEQ ID NO: 66146 - RNA, 21 nt, Artificial Sequence
  LRRK2 RNA guide
gauggaguagcagagcucuuc

SEQ ID NO: 66147 - RNA, 21 nt, Artificial Sequence
  LRRK2 RNA guide
gauugagaugauggaguagca

SEQ ID NO: 66148 - RNA, 21 nt, Artificial Sequence
  LRRK2 RNA guide
gcagagcucuucaaggguaug

SEQ ID NO: 66149 - RNA, 21 nt, Artificial Sequence
  LRRK2 RNA guide
gccuccauacccuugaagagc

SEQ ID NO: 66150 - RNA, 21 nt, Artificial Sequence
  LRRK2 RNA guide
gcucugcuacuccaucaucuc

SEQ ID NO: 66151 - RNA, 21 nt, Artificial Sequence
  LRRK2 RNA guide
ggaguagcagagcucuucaag

SEQ ID NO: 66152 - RNA, 21 nt, Artificial Sequence
  LRRK2 RNA guide
ggauugagaugauggaguagc

SEQ ID NO: 66153 - RNA, 21 nt, Artificial Sequence
  LRRK2 RNA guide
ggccuccauacccuugaagag

SEQ ID NO: 66154 - RNA, 21 nt, Artificial Sequence
  LRRK2 RNA guide
gggauugagaugauggaguag

SEQ ID NO: 66155 - RNA, 21 nt, Artificial Sequence
  LRRK2 RNA guide
guagcagagcucuucaagggu

SEQ ID NO: 66156 - RNA, 21 nt, Artificial Sequence
  LRRK2 RNA guide
uacccuugaagagcucugcua

SEQ ID NO: 66157 - RNA, 21 nt, Artificial Sequence
  LRRK2 RNA guide
uagcagagcucuucaagggua

SEQ ID NO: 66158 - RNA, 21 nt, Artificial Sequence
  LRRK2 RNA guide
ucaggccuccauacccuugaa

SEQ ID NO: 66159 - RNA, 21 nt, Artificial Sequence
  LRRK2 RNA guide
uccauacccuugaagagcucu

SEQ ID NO: 66160 - RNA, 21 nt, Artificial Sequence
  LRRK2 RNA guide
ugaagagcucugcuacuccau

SEQ ID NO: 66161 - RNA, 21 nt, Artificial Sequence
  LRRK2 RNA guide
ugagaugauggaguagcagag

SEQ ID NO: 66162 - RNA, 21 nt, Artificial Sequence
  LRRK2 RNA guide
ugauggaguagcagagcucuu

SEQ ID NO: 66163 - RNA, 21 nt, Artificial Sequence
  LRRK2 RNA guide
uggaguagcagagcucuucaa

SEQ ID NO: 66164 - RNA, 21 nt, Artificial Sequence
  LRRK2 RNA guide
uucaggccuccauacccuuga

SEQ ID NO: 66165 - RNA, 21 nt, Artificial Sequence
  LRRK2 RNA guide
uugaagagcucugcuacucca

SEQ ID NO: 66166 - RNA, 21 nt, Artificial Sequence
  LRRK2 RNA guide
uugagaugauggaguagcaga

SEQ ID NO: 66167 - RNA, 22 nt, Artificial Sequence
  LRRK2 RNA guide
aagagcucugcuacuccaucau

SEQ ID NO: 66168 - RNA, 22 nt, Artificial Sequence
  LRRK2 RNA guide
acccuugaagagcucugcuacu

SEQ ID NO: 66169 - RNA, 22 nt, Artificial Sequence
  LRRK2 RNA guide
agagcucugcuacuccaucauc

SEQ ID NO: 66170 - RNA, 22 nt, Artificial Sequence
  LRRK2 RNA guide
agagcucuucaaggguauggag

SEQ ID NO: 66171 - RNA, 22 nt, Artificial Sequence
  LRRK2 RNA guide
agaugauggaguagcagagcuc

SEQ ID NO: 66172 - RNA, 22 nt, Artificial Sequence
  LRRK2 RNA guide
agcagagcucuucaaggguaug

SEQ ID NO: 66173 - RNA, 22 nt, Artificial Sequence
  LRRK2 RNA guide
agcucugcuacuccaucaucuc

SEQ ID NO: 66174 - RNA, 22 nt, Artificial Sequence
  LRRK2 RNA guide
agcucuucaaggguauggaggc

SEQ ID NO: 66175 - RNA, 22 nt, Artificial Sequence
  LRRK2 RNA guide
aggccuccauacccuugaagag

SEQ ID NO: 66176 - RNA, 22 nt, Artificial Sequence
  LRRK2 RNA guide
aguagcagagcucuucaagggu

SEQ ID NO: 66177 - RNA, 22 nt, Artificial Sequence
  LRRK2 RNA guide
auacccuugaagagcucugcua

SEQ ID NO: 66178 - RNA, 22 nt, Artificial Sequence
  LRRK2 RNA guide
augauggaguagcagagcucuu

SEQ ID NO: 66179 - RNA, 22 nt, Artificial Sequence
  LRRK2 RNA guide
auggaguagcagagcucuucaa

SEQ ID NO: 66180 - RNA, 22 nt, Artificial Sequence
  LRRK2 RNA guide
auugagaugauggaguagcaga

SEQ ID NO: 66181 - RNA, 22 nt, Artificial Sequence
  LRRK2 RNA guide
cagagcucuucaaggguaugga

SEQ ID NO: 66182 - RNA, 22 nt, Artificial Sequence
  LRRK2 RNA guide
caggccuccauacccuugaaga

SEQ ID NO: 66183 - RNA, 22 nt, Artificial Sequence
  LRRK2 RNA guide
cauacccuugaagagcucugcu

SEQ ID NO: 66184 - RNA, 22 nt, Artificial Sequence
  LRRK2 RNA guide
ccauacccuugaagagcucugc

SEQ ID NO: 66185 - RNA, 22 nt, Artificial Sequence
  LRRK2 RNA guide
cccuugaagagcucugcuacuc

SEQ ID NO: 66186 - RNA, 22 nt, Artificial Sequence
  LRRK2 RNA guide
ccuccauacccuugaagagcuc

SEQ ID NO: 66187 - RNA, 22 nt, Artificial Sequence
  LRRK2 RNA guide
ccuugaagagcucugcuacucc

SEQ ID NO: 66188 - RNA, 22 nt, Artificial Sequence
  LRRK2 RNA guide
cuccauacccuugaagagcucu

SEQ ID NO: 66189 - RNA, 22 nt, Artificial Sequence
  LRRK2 RNA guide
cuucaggccuccauacccuuga

SEQ ID NO: 66190 - RNA, 22 nt, Artificial Sequence
  LRRK2 RNA guide
cuugaagagcucugcuacucca

SEQ ID NO: 66191 - RNA, 22 nt, Artificial Sequence
  LRRK2 RNA guide
gaagagcucugcuacuccauca

SEQ ID NO: 66192 - RNA, 22 nt, Artificial Sequence
  LRRK2 RNA guide
gagaugauggaguagcagagcu

SEQ ID NO: 66193 - RNA, 22 nt, Artificial Sequence
  LRRK2 RNA guide
gagcucugcuacuccaucaucu

SEQ ID NO: 66194 - RNA, 22 nt, Artificial Sequence
  LRRK2 RNA guide
gagcucuucaaggguauggagg

SEQ ID NO: 66195 - RNA, 22 nt, Artificial Sequence
  LRRK2 RNA guide
gaguagcagagcucuucaaggg

SEQ ID NO: 66196 - RNA, 22 nt, Artificial Sequence
  LRRK2 RNA guide
gaugauggaguagcagagcucu

SEQ ID NO: 66197 - RNA, 22 nt, Artificial Sequence
  LRRK2 RNA guide
gauggaguagcagagcucuuca

SEQ ID NO: 66198 - RNA, 22 nt, Artificial Sequence
  LRRK2 RNA guide
gauugagaugauggaguagcag

SEQ ID NO: 66199 - RNA, 22 nt, Artificial Sequence
  LRRK2 RNA guide
gcagagcucuucaaggguaugg

SEQ ID NO: 66200 - RNA, 22 nt, Artificial Sequence
  LRRK2 RNA guide
gccuccauacccuugaagagcu

SEQ ID NO: 66201 - RNA, 22 nt, Artificial Sequence
  LRRK2 RNA guide
gcucugcuacuccaucaucuca

SEQ ID NO: 66202 - RNA, 22 nt, Artificial Sequence
  LRRK2 RNA guide
ggaguagcagagcucuucaagg

SEQ ID NO: 66203 - RNA, 22 nt, Artificial Sequence
  LRRK2 RNA guide
ggauugagaugauggaguagca

SEQ ID NO: 66204 - RNA, 22 nt, Artificial Sequence
  LRRK2 RNA guide
ggccuccauacccuugaagagc

SEQ ID NO: 66205 - RNA, 22 nt, Artificial Sequence
  LRRK2 RNA guide
gggauugagaugauggaguagc

SEQ ID NO: 66206 - RNA, 22 nt, Artificial Sequence
  LRRK2 RNA guide
ggggauugagaugauggaguag

SEQ ID NO: 66207 - RNA, 22 nt, Artificial Sequence
  LRRK2 RNA guide
guagcagagcucuucaagggua

SEQ ID NO: 66208 - RNA, 22 nt, Artificial Sequence
  LRRK2 RNA guide
uacccuugaagagcucugcuac

SEQ ID NO: 66209 - RNA, 22 nt, Artificial Sequence
  LRRK2 RNA guide
uagcagagcucuucaaggguau

SEQ ID NO: 66210 - RNA, 22 nt, Artificial Sequence
  LRRK2 RNA guide
ucaggccuccauacccuugaag

SEQ ID NO: 66211 - RNA, 22 nt, Artificial Sequence
  LRRK2 RNA guide
uccauacccuugaagagcucug

SEQ ID NO: 66212 - RNA, 22 nt, Artificial Sequence
  LRRK2 RNA guide
ugaagagcucugcuacuccauc

SEQ ID NO: 66213 - RNA, 22 nt, Artificial Sequence
  LRRK2 RNA guide
ugagaugauggaguagcagagc

SEQ ID NO: 66214 - RNA, 22 nt, Artificial Sequence
  LRRK2 RNA guide
ugauggaguagcagagcucuuc

SEQ ID NO: 66215 - RNA, 22 nt, Artificial Sequence
  LRRK2 RNA guide
uggaguagcagagcucuucaag

SEQ ID NO: 66216 - RNA, 22 nt, Artificial Sequence
  LRRK2 RNA guide
uucaggccuccauacccuugaa

SEQ ID NO: 66217 - RNA, 22 nt, Artificial Sequence
  LRRK2 RNA guide
uugaagagcucugcuacuccau

SEQ ID NO: 66218 - RNA, 22 nt, Artificial Sequence
  LRRK2 RNA guide
uugagaugauggaguagcagag

SEQ ID NO: 66219 - RNA, 20 nt, Artificial Sequence
  LRRK2 RNA guide
aacucuucaaggguauggag

SEQ ID NO: 66220 - RNA, 20 nt, Artificial Sequence
  LRRK2 RNA guide
aagaguucugcuacuccauc

SEQ ID NO: 66221 - RNA, 20 nt, Artificial Sequence
  LRRK2 RNA guide
acccuugaagaguucugcua

SEQ ID NO: 66222 - RNA, 20 nt, Artificial Sequence
  LRRK2 RNA guide
agaacucuucaaggguaugg

SEQ ID NO: 66223 - RNA, 20 nt, Artificial Sequence
  LRRK2 RNA guide
agaguucugcuacuccauca

SEQ ID NO: 66224 - RNA, 20 nt, Artificial Sequence
  LRRK2 RNA guide
agaugauggaguagcagaac

SEQ ID NO: 66225 - RNA, 20 nt, Artificial Sequence
  LRRK2 RNA guide
agcagaacucuucaagggua

SEQ ID NO: 66226 - RNA, 20 nt, Artificial Sequence
  LRRK2 RNA guide
aguagcagaacucuucaagg

SEQ ID NO: 66227 - RNA, 20 nt, Artificial Sequence
  LRRK2 RNA guide
aguucugcuacuccaucauc

SEQ ID NO: 66228 - RNA, 20 nt, Artificial Sequence
  LRRK2 RNA guide
auacccuugaagaguucugc

SEQ ID NO: 66229 - RNA, 20 nt, Artificial Sequence
  LRRK2 RNA guide
augauggaguagcagaacuc

SEQ ID NO: 66230 - RNA, 20 nt, Artificial Sequence
  LRRK2 RNA guide
auggaguagcagaacucuuc

SEQ ID NO: 66231 - RNA, 20 nt, Artificial Sequence
  LRRK2 RNA guide
cagaacucuucaaggguaug

SEQ ID NO: 66232 - RNA, 20 nt, Artificial Sequence
  LRRK2 RNA guide
cauacccuugaagaguucug

SEQ ID NO: 66233 - RNA, 20 nt, Artificial Sequence
  LRRK2 RNA guide
ccauacccuugaagaguucu

SEQ ID NO: 66234 - RNA, 20 nt, Artificial Sequence
  LRRK2 RNA guide
cccuugaagaguucugcuac

SEQ ID NO: 66235 - RNA, 20 nt, Artificial Sequence
  LRRK2 RNA guide
ccuccauacccuugaagagu

SEQ ID NO: 66236 - RNA, 20 nt, Artificial Sequence
  LRRK2 RNA guide
ccuugaagaguucugcuacu

SEQ ID NO: 66237 - RNA, 20 nt, Artificial Sequence
  LRRK2 RNA guide
cuccauacccuugaagaguu

SEQ ID NO: 66238 - RNA, 20 nt, Artificial Sequence
  LRRK2 RNA guide
cuugaagaguucugcuacuc

SEQ ID NO: 66239 - RNA, 20 nt, Artificial Sequence
  LRRK2 RNA guide
gaacucuucaaggguaugga

SEQ ID NO: 66240 - RNA, 20 nt, Artificial Sequence
  LRRK2 RNA guide
gaagaguucugcuacuccau

SEQ ID NO: 66241 - RNA, 20 nt, Artificial Sequence
  LRRK2 RNA guide
gagaugauggaguagcagaa

SEQ ID NO: 66242 - RNA, 20 nt, Artificial Sequence
  LRRK2 RNA guide
gaguagcagaacucuucaag

SEQ ID NO: 66243 - RNA, 20 nt, Artificial Sequence
  LRRK2 RNA guide
gaguucugcuacuccaucau

SEQ ID NO: 66244 - RNA, 20 nt, Artificial Sequence
  LRRK2 RNA guide
gaugauggaguagcagaacu

SEQ ID NO: 66245 - RNA, 20 nt, Artificial Sequence
  LRRK2 RNA guide
gauggaguagcagaacucuu

SEQ ID NO: 66246 - RNA, 20 nt, Artificial Sequence
  LRRK2 RNA guide
gcagaacucuucaaggguau

SEQ ID NO: 66247 - RNA, 20 nt, Artificial Sequence
  LRRK2 RNA guide
ggaguagcagaacucuucaa

SEQ ID NO: 66248 - RNA, 20 nt, Artificial Sequence
  LRRK2 RNA guide
guagcagaacucuucaaggg

SEQ ID NO: 66249 - RNA, 20 nt, Artificial Sequence
  LRRK2 RNA guide
guucugcuacuccaucaucu

SEQ ID NO: 66250 - RNA, 20 nt, Artificial Sequence
  LRRK2 RNA guide
uacccuugaagaguucugcu

SEQ ID NO: 66251 - RNA, 20 nt, Artificial Sequence
  LRRK2 RNA guide
uagcagaacucuucaagggu

SEQ ID NO: 66252 - RNA, 20 nt, Artificial Sequence
  LRRK2 RNA guide
uccauacccuugaagaguuc

SEQ ID NO: 66253 - RNA, 20 nt, Artificial Sequence
  LRRK2 RNA guide
ugaagaguucugcuacucca

SEQ ID NO: 66254 - RNA, 20 nt, Artificial Sequence
  LRRK2 RNA guide
ugauggaguagcagaacucu

SEQ ID NO: 66255 - RNA, 20 nt, Artificial Sequence
  LRRK2 RNA guide
uggaguagcagaacucuuca

SEQ ID NO: 66256 - RNA, 20 nt, Artificial Sequence
  LRRK2 RNA guide
uugaagaguucugcuacucc

SEQ ID NO: 66257 - RNA, 21 nt, Artificial Sequence
  LRRK2 RNA guide
aacucuucaaggguauggagg

SEQ ID NO: 66258 - RNA, 21 nt, Artificial Sequence
  LRRK2 RNA guide
aagaguucugcuacuccauca

SEQ ID NO: 66259 - RNA, 21 nt, Artificial Sequence
  LRRK2 RNA guide
acccuugaagaguucugcuac

SEQ ID NO: 66260 - RNA, 21 nt, Artificial Sequence
  LRRK2 RNA guide
agaacucuucaaggguaugga

SEQ ID NO: 66261 - RNA, 21 nt, Artificial Sequence
  LRRK2 RNA guide
agaguucugcuacuccaucau

SEQ ID NO: 66262 - RNA, 21 nt, Artificial Sequence
  LRRK2 RNA guide
agaugauggaguagcagaacu

SEQ ID NO: 66263 - RNA, 21 nt, Artificial Sequence
  LRRK2 RNA guide
agcagaacucuucaaggguau

SEQ ID NO: 66264 - RNA, 21 nt, Artificial Sequence
  LRRK2 RNA guide
aguagcagaacucuucaaggg

SEQ ID NO: 66265 - RNA, 21 nt, Artificial Sequence
  LRRK2 RNA guide
aguucugcuacuccaucaucu

SEQ ID NO: 66266 - RNA, 21 nt, Artificial Sequence
  LRRK2 RNA guide
auacccuugaagaguucugcu

SEQ ID NO: 66267 - RNA, 21 nt, Artificial Sequence
  LRRK2 RNA guide
augauggaguagcagaacucu

SEQ ID NO: 66268 - RNA, 21 nt, Artificial Sequence
  LRRK2 RNA guide
auggaguagcagaacucuuca

SEQ ID NO: 66269 - RNA, 21 nt, Artificial Sequence
  LRRK2 RNA guide
cagaacucuucaaggguaugg

SEQ ID NO: 66270 - RNA, 21 nt, Artificial Sequence
  LRRK2 RNA guide
cauacccuugaagaguucugc

SEQ ID NO: 66271 - RNA, 21 nt, Artificial Sequence
  LRRK2 RNA guide
ccauacccuugaagaguucug

SEQ ID NO: 66272 - RNA, 21 nt, Artificial Sequence
  LRRK2 RNA guide
cccuugaagaguucugcuacu

SEQ ID NO: 66273 - RNA, 21 nt, Artificial Sequence
  LRRK2 RNA guide
ccuccauacccuugaagaguu

SEQ ID NO: 66274 - RNA, 21 nt, Artificial Sequence
  LRRK2 RNA guide
ccuugaagaguucugcuacuc

SEQ ID NO: 66275 - RNA, 21 nt, Artificial Sequence
  LRRK2 RNA guide
cuccauacccuugaagaguuc

SEQ ID NO: 66276 - RNA, 21 nt, Artificial Sequence
  LRRK2 RNA guide
cuugaagaguucugcuacucc

SEQ ID NO: 66277 - RNA, 21 nt, Artificial Sequence
  LRRK2 RNA guide
gaacucuucaaggguauggag

SEQ ID NO: 66278 - RNA, 21 nt, Artificial Sequence
  LRRK2 RNA guide
gaagaguucugcuacuccauc

SEQ ID NO: 66279 - RNA, 21 nt, Artificial Sequence
  LRRK2 RNA guide
gagaugauggaguagcagaac

SEQ ID NO: 66280 - RNA, 21 nt, Artificial Sequence
  LRRK2 RNA guide
gaguagcagaacucuucaagg

SEQ ID NO: 66281 - RNA, 21 nt, Artificial Sequence
  LRRK2 RNA guide
gaguucugcuacuccaucauc

SEQ ID NO: 66282 - RNA, 21 nt, Artificial Sequence
  LRRK2 RNA guide
gaugauggaguagcagaacuc

SEQ ID NO: 66283 - RNA, 21 nt, Artificial Sequence
  LRRK2 RNA guide
gauggaguagcagaacucuuc

SEQ ID NO: 66284 - RNA, 21 nt, Artificial Sequence
  LRRK2 RNA guide
gcagaacucuucaaggguaug

SEQ ID NO: 66285 - RNA, 21 nt, Artificial Sequence
  LRRK2 RNA guide
gccuccauacccuugaagagu

SEQ ID NO: 66286 - RNA, 21 nt, Artificial Sequence
  LRRK2 RNA guide
ggaguagcagaacucuucaag

SEQ ID NO: 66287 - RNA, 21 nt, Artificial Sequence
  LRRK2 RNA guide
guagcagaacucuucaagggu

SEQ ID NO: 66288 - RNA, 21 nt, Artificial Sequence
  LRRK2 RNA guide
guucugcuacuccaucaucuc

SEQ ID NO: 66289 - RNA, 21 nt, Artificial Sequence
  LRRK2 RNA guide
uacccuugaagaguucugcua

SEQ ID NO: 66290 - RNA, 21 nt, Artificial Sequence
  LRRK2 RNA guide
uagcagaacucuucaagggua

SEQ ID NO: 66291 - RNA, 21 nt, Artificial Sequence
  LRRK2 RNA guide
uccauacccuugaagaguucu

SEQ ID NO: 66292 - RNA, 21 nt, Artificial Sequence
  LRRK2 RNA guide
ugaagaguucugcuacuccau

SEQ ID NO: 66293 - RNA, 21 nt, Artificial Sequence
  LRRK2 RNA guide
ugagaugauggaguagcagaa

SEQ ID NO: 66294 - RNA, 21 nt, Artificial Sequence
  LRRK2 RNA guide
ugauggaguagcagaacucuu

SEQ ID NO: 66295 - RNA, 21 nt, Artificial Sequence
  LRRK2 RNA guide
uggaguagcagaacucuucaa

SEQ ID NO: 66296 - RNA, 21 nt, Artificial Sequence
  LRRK2 RNA guide
uugaagaguucugcuacucca

SEQ ID NO: 66297 - RNA, 22 nt, Artificial Sequence
  LRRK2 RNA guide
aacucuucaaggguauggaggc

SEQ ID NO: 66298 - RNA, 22 nt, Artificial Sequence
  LRRK2 RNA guide
aagaguucugcuacuccaucau

SEQ ID NO: 66299 - RNA, 22 nt, Artificial Sequence
  LRRK2 RNA guide
acccuugaagaguucugcuacu

SEQ ID NO: 66300 - RNA, 22 nt, Artificial Sequence
  LRRK2 RNA guide
agaacucuucaaggguauggag

SEQ ID NO: 66301 - RNA, 22 nt, Artificial Sequence
  LRRK2 RNA guide
agaguucugcuacuccaucauc

SEQ ID NO: 66302 - RNA, 22 nt, Artificial Sequence
  LRRK2 RNA guide
agaugauggaguagcagaacuc

SEQ ID NO: 66303 - RNA, 22 nt, Artificial Sequence
  LRRK2 RNA guide
agcagaacucuucaaggguaug

SEQ ID NO: 66304 - RNA, 22 nt, Artificial Sequence
  LRRK2 RNA guide
aguagcagaacucuucaagggu

SEQ ID NO: 66305 - RNA, 22 nt, Artificial Sequence
  LRRK2 RNA guide
aguucugcuacuccaucaucuc

SEQ ID NO: 66306 - RNA, 22 nt, Artificial Sequence
  LRRK2 RNA guide
auacccuugaagaguucugcua

SEQ ID NO: 66307 - RNA, 22 nt, Artificial Sequence
  LRRK2 RNA guide
augauggaguagcagaacucuu

SEQ ID NO: 66308 - RNA, 22 nt, Artificial Sequence
  LRRK2 RNA guide
auggaguagcagaacucuucaa

SEQ ID NO: 66309 - RNA, 22 nt, Artificial Sequence
  LRRK2 RNA guide
cagaacucuucaaggguaugga

SEQ ID NO: 66310 - RNA, 22 nt, Artificial Sequence
  LRRK2 RNA guide
cauacccuugaagaguucugcu

SEQ ID NO: 66311 - RNA, 22 nt, Artificial Sequence
  LRRK2 RNA guide
ccauacccuugaagaguucugc

SEQ ID NO: 66312 - RNA, 22 nt, Artificial Sequence
  LRRK2 RNA guide
cccuugaagaguucugcuacuc

SEQ ID NO: 66313 - RNA, 22 nt, Artificial Sequence
  LRRK2 RNA guide
ccuccauacccuugaagaguuc

SEQ ID NO: 66314 - RNA, 22 nt, Artificial Sequence
  LRRK2 RNA guide
ccuugaagaguucugcuacucc

SEQ ID NO: 66315 - RNA, 22 nt, Artificial Sequence
  LRRK2 RNA guide
cuccauacccuugaagaguucu

SEQ ID NO: 66316 - RNA, 22 nt, Artificial Sequence
  LRRK2 RNA guide
cuugaagaguucugcuacucca

SEQ ID NO: 66317 - RNA, 22 nt, Artificial Sequence
  LRRK2 RNA guide
gaacucuucaaggguauggagg

SEQ ID NO: 66318 - RNA, 22 nt, Artificial Sequence
  LRRK2 RNA guide
gaagaguucugcuacuccauca

SEQ ID NO: 66319 - RNA, 22 nt, Artificial Sequence
  LRRK2 RNA guide
gagaugauggaguagcagaacu

SEQ ID NO: 66320 - RNA, 22 nt, Artificial Sequence
  LRRK2 RNA guide
gaguagcagaacucuucaaggg

SEQ ID NO: 66321 - RNA, 22 nt, Artificial Sequence
  LRRK2 RNA guide
gaguucugcuacuccaucaucu

SEQ ID NO: 66322 - RNA, 22 nt, Artificial Sequence
  LRRK2 RNA guide
gaugauggaguagcagaacucu

SEQ ID NO: 66323 - RNA, 22 nt, Artificial Sequence
  LRRK2 RNA guide
gauggaguagcagaacucuuca

SEQ ID NO: 66324 - RNA, 22 nt, Artificial Sequence
  LRRK2 RNA guide
gcagaacucuucaaggguaugg

SEQ ID NO: 66325 - RNA, 22 nt, Artificial Sequence
  LRRK2 RNA guide
gccuccauacccuugaagaguu

SEQ ID NO: 66326 - RNA, 22 nt, Artificial Sequence
  LRRK2 RNA guide
ggaguagcagaacucuucaagg

SEQ ID NO: 66327 - RNA, 22 nt, Artificial Sequence
  LRRK2 RNA guide
ggccuccauacccuugaagagu

SEQ ID NO: 66328 - RNA, 22 nt, Artificial Sequence
  LRRK2 RNA guide
guagcagaacucuucaagggua

SEQ ID NO: 66329 - RNA, 22 nt, Artificial Sequence
  LRRK2 RNA guide
guucugcuacuccaucaucuca

SEQ ID NO: 66330 - RNA, 22 nt, Artificial Sequence
  LRRK2 RNA guide
uacccuugaagaguucugcuac

SEQ ID NO: 66331 - RNA, 22 nt, Artificial Sequence
  LRRK2 RNA guide
uagcagaacucuucaaggguau

SEQ ID NO: 66332 - RNA, 22 nt, Artificial Sequence
  LRRK2 RNA guide
uccauacccuugaagaguucug

SEQ ID NO: 66333 - RNA, 22 nt, Artificial Sequence
  LRRK2 RNA guide
ugaagaguucugcuacuccauc

SEQ ID NO: 66334 - RNA, 22 nt, Artificial Sequence
  LRRK2 RNA guide
ugagaugauggaguagcagaac

SEQ ID NO: 66335 - RNA, 22 nt, Artificial Sequence
  LRRK2 RNA guide
ugauggaguagcagaacucuuc

SEQ ID NO: 66336 - RNA, 22 nt, Artificial Sequence
  LRRK2 RNA guide
uggaguagcagaacucuucaag

SEQ ID NO: 66337 - RNA, 22 nt, Artificial Sequence
  LRRK2 RNA guide
uugaagaguucugcuacuccau

SEQ ID NO: 66338 - RNA, 22 nt, Artificial Sequence
  LRRK2 RNA guide
uugagaugauggaguagcagaa

SEQ ID NO: 66339 - RNA, 20 nt, Artificial Sequence
  LRRK2 RNA guide
aaaacacuguaucugagaau

SEQ ID NO: 66340 - RNA, 20 nt, Artificial Sequence
  LRRK2 RNA guide
aaacaaaacacuguaucuga

SEQ ID NO: 66341 - RNA, 20 nt, Artificial Sequence
  LRRK2 RNA guide
aaacacuguaucugagaauc

SEQ ID NO: 66342 - RNA, 20 nt, Artificial Sequence
  LRRK2 RNA guide
aacaaaacacuguaucugag

SEQ ID NO: 66343 - RNA, 20 nt, Artificial Sequence
  LRRK2 RNA guide
aacacuguaucugagaaucc

SEQ ID NO: 66344 - RNA, 20 nt, Artificial Sequence
  LRRK2 RNA guide
aaggauucucagauacagug

SEQ ID NO: 66345 - RNA, 20 nt, Artificial Sequence
  LRRK2 RNA guide
acaaaacacuguaucugaga

SEQ ID NO: 66346 - RNA, 20 nt, Artificial Sequence
  LRRK2 RNA guide
acaguguuuuguuucucaac

SEQ ID NO: 66347 - RNA, 20 nt, Artificial Sequence
  LRRK2 RNA guide
agaaacaaaacacuguaucu

SEQ ID NO: 66348 - RNA, 20 nt, Artificial Sequence
  LRRK2 RNA guide
agauacaguguuuuguuucu

SEQ ID NO: 66349 - RNA, 20 nt, Artificial Sequence
  LRRK2 RNA guide
aguguuuuguuucucaacag

SEQ ID NO: 66350 - RNA, 20 nt, Artificial Sequence
  LRRK2 RNA guide
auaaggauucucagauacag

SEQ ID NO: 66351 - RNA, 20 nt, Artificial Sequence
  LRRK2 RNA guide
auacaguguuuuguuucuca

SEQ ID NO: 66352 - RNA, 20 nt, Artificial Sequence
  LRRK2 RNA guide
auucucagauacaguguuuu

SEQ ID NO: 66353 - RNA, 20 nt, Artificial Sequence
  LRRK2 RNA guide
auuucuccuguugagaaaca

SEQ ID NO: 66354 - RNA, 20 nt, Artificial Sequence
  LRRK2 RNA guide
caaaacacuguaucugagaa

SEQ ID NO: 66355 - RNA, 20 nt, Artificial Sequence
  LRRK2 RNA guide
cagauacaguguuuuguuuc

SEQ ID NO: 66356 - RNA, 20 nt, Artificial Sequence
  LRRK2 RNA guide
caguguuuuguuucucaaca

SEQ ID NO: 66357 - RNA, 20 nt, Artificial Sequence
  LRRK2 RNA guide
ccuguugagaaacaaaacac

SEQ ID NO: 66358 - RNA, 20 nt, Artificial Sequence
  LRRK2 RNA guide
cucagauacaguguuuuguu

SEQ ID NO: 66359 - RNA, 20 nt, Artificial Sequence
  LRRK2 RNA guide
cuccuguugagaaacaaaac

SEQ ID NO: 66360 - RNA, 20 nt, Artificial Sequence
  LRRK2 RNA guide
cuguugagaaacaaaacacu

SEQ ID NO: 66361 - RNA, 20 nt, Artificial Sequence
  LRRK2 RNA guide
gaaacaaaacacuguaucug

SEQ ID NO: 66362 - RNA, 20 nt, Artificial Sequence
  LRRK2 RNA guide
gagaaacaaaacacuguauc

SEQ ID NO: 66363 - RNA, 20 nt, Artificial Sequence
  LRRK2 RNA guide
gauacaguguuuuguuucuc

SEQ ID NO: 66364 - RNA, 20 nt, Artificial Sequence
  LRRK2 RNA guide
gauucucagauacaguguuu

SEQ ID NO: 66365 - RNA, 20 nt, Artificial Sequence
  LRRK2 RNA guide
ggauucucagauacaguguu

SEQ ID NO: 66366 - RNA, 20 nt, Artificial Sequence
  LRRK2 RNA guide
guguuuuguuucucaacagg

SEQ ID NO: 66367 - RNA, 20 nt, Artificial Sequence
  LRRK2 RNA guide
guugagaaacaaaacacugu

SEQ ID NO: 66368 - RNA, 20 nt, Artificial Sequence
  LRRK2 RNA guide
guuuuguuucucaacaggag

SEQ ID NO: 66369 - RNA, 20 nt, Artificial Sequence
  LRRK2 RNA guide
uaaggauucucagauacagu

SEQ ID NO: 66370 - RNA, 20 nt, Artificial Sequence
  LRRK2 RNA guide
uacaguguuuuguuucucaa

SEQ ID NO: 66371 - RNA, 20 nt, Artificial Sequence
  LRRK2 RNA guide
uauaaggauucucagauaca

SEQ ID NO: 66372 - RNA, 20 nt, Artificial Sequence
  LRRK2 RNA guide
uauuucuccuguugagaaac

SEQ ID NO: 66373 - RNA, 20 nt, Artificial Sequence
  LRRK2 RNA guide
ucagauacaguguuuuguuu

SEQ ID NO: 66374 - RNA, 20 nt, Artificial Sequence
  LRRK2 RNA guide
uccuguugagaaacaaaaca

SEQ ID NO: 66375 - RNA, 20 nt, Artificial Sequence
  LRRK2 RNA guide
ucucagauacaguguuuugu

SEQ ID NO: 66376 - RNA, 20 nt, Artificial Sequence
  LRRK2 RNA guide
ucuccuguugagaaacaaaa

SEQ ID NO: 66377 - RNA, 20 nt, Artificial Sequence
  LRRK2 RNA guide
ugagaaacaaaacacuguau

SEQ ID NO: 66378 - RNA, 20 nt, Artificial Sequence
  LRRK2 RNA guide
uguugagaaacaaaacacug

SEQ ID NO: 66379 - RNA, 20 nt, Artificial Sequence
  LRRK2 RNA guide
uguuuuguuucucaacagga

SEQ ID NO: 66380 - RNA, 20 nt, Artificial Sequence
  LRRK2 RNA guide
uuauaaggauucucagauac

SEQ ID NO: 66381 - RNA, 20 nt, Artificial Sequence
  LRRK2 RNA guide
uuauuucuccuguugagaaa

SEQ ID NO: 66382 - RNA, 20 nt, Artificial Sequence
  LRRK2 RNA guide
uucucagauacaguguuuug

SEQ ID NO: 66383 - RNA, 20 nt, Artificial Sequence
  LRRK2 RNA guide
uucuccuguugagaaacaaa

SEQ ID NO: 66384 - RNA, 20 nt, Artificial Sequence
  LRRK2 RNA guide
uugagaaacaaaacacugua

SEQ ID NO: 66385 - RNA, 20 nt, Artificial Sequence
  LRRK2 RNA guide
uuucuccuguugagaaacaa

SEQ ID NO: 66386 - RNA, 21 nt, Artificial Sequence
  LRRK2 RNA guide
aaaacacuguaucugagaauc

SEQ ID NO: 66387 - RNA, 21 nt, Artificial Sequence
  LRRK2 RNA guide
aaacaaaacacuguaucugag

SEQ ID NO: 66388 - RNA, 21 nt, Artificial Sequence
  LRRK2 RNA guide
aaacacuguaucugagaaucc

SEQ ID NO: 66389 - RNA, 21 nt, Artificial Sequence
  LRRK2 RNA guide
aacaaaacacuguaucugaga

SEQ ID NO: 66390 - RNA, 21 nt, Artificial Sequence
  LRRK2 RNA guide
aacacuguaucugagaauccu

SEQ ID NO: 66391 - RNA, 21 nt, Artificial Sequence
  LRRK2 RNA guide
aaggauucucagauacagugu

SEQ ID NO: 66392 - RNA, 21 nt, Artificial Sequence
  LRRK2 RNA guide
acaaaacacuguaucugagaa

SEQ ID NO: 66393 - RNA, 21 nt, Artificial Sequence
  LRRK2 RNA guide
acaguguuuuguuucucaaca

SEQ ID NO: 66394 - RNA, 21 nt, Artificial Sequence
  LRRK2 RNA guide
agaaacaaaacacuguaucug

SEQ ID NO: 66395 - RNA, 21 nt, Artificial Sequence
  LRRK2 RNA guide
agauacaguguuuuguuucuc

SEQ ID NO: 66396 - RNA, 21 nt, Artificial Sequence
  LRRK2 RNA guide
aggauucucagauacaguguu

SEQ ID NO: 66397 - RNA, 21 nt, Artificial Sequence
  LRRK2 RNA guide
aguguuuuguuucucaacagg

SEQ ID NO: 66398 - RNA, 21 nt, Artificial Sequence
  LRRK2 RNA guide
auaaggauucucagauacagu

SEQ ID NO: 66399 - RNA, 21 nt, Artificial Sequence
  LRRK2 RNA guide
auucucagauacaguguuuug

SEQ ID NO: 66400 - RNA, 21 nt, Artificial Sequence
  LRRK2 RNA guide
auuucuccuguugagaaacaa

SEQ ID NO: 66401 - RNA, 21 nt, Artificial Sequence
  LRRK2 RNA guide
caaaacacuguaucugagaau

SEQ ID NO: 66402 - RNA, 21 nt, Artificial Sequence
  LRRK2 RNA guide
cagauacaguguuuuguuucu

SEQ ID NO: 66403 - RNA, 21 nt, Artificial Sequence
  LRRK2 RNA guide
caguguuuuguuucucaacag

SEQ ID NO: 66404 - RNA, 21 nt, Artificial Sequence
  LRRK2 RNA guide
ccuguugagaaacaaaacacu

SEQ ID NO: 66405 - RNA, 21 nt, Artificial Sequence
  LRRK2 RNA guide
cucagauacaguguuuuguuu

SEQ ID NO: 66406 - RNA, 21 nt, Artificial Sequence
  LRRK2 RNA guide
cuccuguugagaaacaaaaca

SEQ ID NO: 66407 - RNA, 21 nt, Artificial Sequence
  LRRK2 RNA guide
cuguugagaaacaaaacacug

SEQ ID NO: 66408 - RNA, 21 nt, Artificial Sequence
  LRRK2 RNA guide
gaaacaaaacacuguaucuga

SEQ ID NO: 66409 - RNA, 21 nt, Artificial Sequence
  LRRK2 RNA guide
gagaaacaaaacacuguaucu

SEQ ID NO: 66410 - RNA, 21 nt, Artificial Sequence
  LRRK2 RNA guide
gauacaguguuuuguuucuca

SEQ ID NO: 66411 - RNA, 21 nt, Artificial Sequence
  LRRK2 RNA guide
gauucucagauacaguguuuu

SEQ ID NO: 66412 - RNA, 21 nt, Artificial Sequence
  LRRK2 RNA guide
ggauucucagauacaguguuu

SEQ ID NO: 66413 - RNA, 21 nt, Artificial Sequence
  LRRK2 RNA guide
guguuuuguuucucaacagga

SEQ ID NO: 66414 - RNA, 21 nt, Artificial Sequence
  LRRK2 RNA guide
guuauuucuccuguugagaaa

SEQ ID NO: 66415 - RNA, 21 nt, Artificial Sequence
  LRRK2 RNA guide
guugagaaacaaaacacugua

SEQ ID NO: 66416 - RNA, 21 nt, Artificial Sequence
  LRRK2 RNA guide
guuuuguuucucaacaggaga

SEQ ID NO: 66417 - RNA, 21 nt, Artificial Sequence
  LRRK2 RNA guide
uaaggauucucagauacagug

SEQ ID NO: 66418 - RNA, 21 nt, Artificial Sequence
  LRRK2 RNA guide
uacaguguuuuguuucucaac

SEQ ID NO: 66419 - RNA, 21 nt, Artificial Sequence
  LRRK2 RNA guide
uauaaggauucucagauacag

SEQ ID NO: 66420 - RNA, 21 nt, Artificial Sequence
  LRRK2 RNA guide
uauuucuccuguugagaaaca

SEQ ID NO: 66421 - RNA, 21 nt, Artificial Sequence
  LRRK2 RNA guide
ucagauacaguguuuuguuuc

SEQ ID NO: 66422 - RNA, 21 nt, Artificial Sequence
  LRRK2 RNA guide
uccuguugagaaacaaaacac

SEQ ID NO: 66423 - RNA, 21 nt, Artificial Sequence
  LRRK2 RNA guide
ucucagauacaguguuuuguu

SEQ ID NO: 66424 - RNA, 21 nt, Artificial Sequence
  LRRK2 RNA guide
ucuccuguugagaaacaaaac

SEQ ID NO: 66425 - RNA, 21 nt, Artificial Sequence
  LRRK2 RNA guide
ugagaaacaaaacacuguauc

SEQ ID NO: 66426 - RNA, 21 nt, Artificial Sequence
  LRRK2 RNA guide
uguugagaaacaaaacacugu

SEQ ID NO: 66427 - RNA, 21 nt, Artificial Sequence
  LRRK2 RNA guide
uguuuuguuucucaacaggag

SEQ ID NO: 66428 - RNA, 21 nt, Artificial Sequence
  LRRK2 RNA guide
uuauuucuccuguugagaaac

SEQ ID NO: 66429 - RNA, 21 nt, Artificial Sequence
  LRRK2 RNA guide
uucucagauacaguguuuugu

SEQ ID NO: 66430 - RNA, 21 nt, Artificial Sequence
  LRRK2 RNA guide
uucuccuguugagaaacaaaa

SEQ ID NO: 66431 - RNA, 21 nt, Artificial Sequence
  LRRK2 RNA guide
uuucuccuguugagaaacaaa

SEQ ID NO: 66432 - RNA, 22 nt, Artificial Sequence
  LRRK2 RNA guide
aaaacacuguaucugagaaucc

SEQ ID NO: 66433 - RNA, 22 nt, Artificial Sequence
  LRRK2 RNA guide
aaacaaaacacuguaucugaga

SEQ ID NO: 66434 - RNA, 22 nt, Artificial Sequence
  LRRK2 RNA guide
aaacacuguaucugagaauccu

SEQ ID NO: 66435 - RNA, 22 nt, Artificial Sequence
  LRRK2 RNA guide
aacaaaacacuguaucugagaa

SEQ ID NO: 66436 - RNA, 22 nt, Artificial Sequence
  LRRK2 RNA guide
aacacuguaucugagaauccuu

SEQ ID NO: 66437 - RNA, 22 nt, Artificial Sequence
  LRRK2 RNA guide
aaggauucucagauacaguguu

SEQ ID NO: 66438 - RNA, 22 nt, Artificial Sequence
  LRRK2 RNA guide
acaaaacacuguaucugagaau

SEQ ID NO: 66439 - RNA, 22 nt, Artificial Sequence
  LRRK2 RNA guide
acaguguuuuguuucucaacag

SEQ ID NO: 66440 - RNA, 22 nt, Artificial Sequence
  LRRK2 RNA guide
agaaacaaaacacuguaucuga

SEQ ID NO: 66441 - RNA, 22 nt, Artificial Sequence
  LRRK2 RNA guide
agauacaguguuuuguuucuca

SEQ ID NO: 66442 - RNA, 22 nt, Artificial Sequence
  LRRK2 RNA guide
aggauucucagauacaguguuu

SEQ ID NO: 66443 - RNA, 22 nt, Artificial Sequence
  LRRK2 RNA guide
aguguuuuguuucucaacagga

SEQ ID NO: 66444 - RNA, 22 nt, Artificial Sequence
  LRRK2 RNA guide
auaaggauucucagauacagug

SEQ ID NO: 66445 - RNA, 22 nt, Artificial Sequence
  LRRK2 RNA guide
auacaguguuuuguuucucaac

SEQ ID NO: 66446 - RNA, 22 nt, Artificial Sequence
  LRRK2 RNA guide
auucucagauacaguguuuugu

SEQ ID NO: 66447 - RNA, 22 nt, Artificial Sequence
  LRRK2 RNA guide
auuucuccuguugagaaacaaa

SEQ ID NO: 66448 - RNA, 22 nt, Artificial Sequence
  LRRK2 RNA guide
caaaacacuguaucugagaauc

SEQ ID NO: 66449 - RNA, 22 nt, Artificial Sequence
  LRRK2 RNA guide
cagauacaguguuuuguuucuc

SEQ ID NO: 66450 - RNA, 22 nt, Artificial Sequence
  LRRK2 RNA guide
caguguuuuguuucucaacagg

SEQ ID NO: 66451 - RNA, 22 nt, Artificial Sequence
  LRRK2 RNA guide
ccuguugagaaacaaaacacug

SEQ ID NO: 66452 - RNA, 22 nt, Artificial Sequence
  LRRK2 RNA guide
cucagauacaguguuuuguuuc

SEQ ID NO: 66453 - RNA, 22 nt, Artificial Sequence
  LRRK2 RNA guide
cuccuguugagaaacaaaacac

SEQ ID NO: 66454 - RNA, 22 nt, Artificial Sequence
  LRRK2 RNA guide
cuguugagaaacaaaacacugu

SEQ ID NO: 66455 - RNA, 22 nt, Artificial Sequence
  LRRK2 RNA guide
gaaacaaaacacuguaucugag

SEQ ID NO: 66456 - RNA, 22 nt, Artificial Sequence
  LRRK2 RNA guide
gagaaacaaaacacuguaucug

SEQ ID NO: 66457 - RNA, 22 nt, Artificial Sequence
  LRRK2 RNA guide
gauacaguguuuuguuucucaa

SEQ ID NO: 66458 - RNA, 22 nt, Artificial Sequence
  LRRK2 RNA guide
gauuauaaggauucucagauac

SEQ ID NO: 66459 - RNA, 22 nt, Artificial Sequence
  LRRK2 RNA guide
gauucucagauacaguguuuug

SEQ ID NO: 66460 - RNA, 22 nt, Artificial Sequence
  LRRK2 RNA guide
ggauucucagauacaguguuuu

SEQ ID NO: 66461 - RNA, 22 nt, Artificial Sequence
  LRRK2 RNA guide
guguuuuguuucucaacaggag

SEQ ID NO: 66462 - RNA, 22 nt, Artificial Sequence
  LRRK2 RNA guide
guuauuucuccuguugagaaac

SEQ ID NO: 66463 - RNA, 22 nt, Artificial Sequence
  LRRK2 RNA guide
guugagaaacaaaacacuguau

SEQ ID NO: 66464 - RNA, 22 nt, Artificial Sequence
  LRRK2 RNA guide
guuuuguuucucaacaggagaa

SEQ ID NO: 66465 - RNA, 22 nt, Artificial Sequence
  LRRK2 RNA guide
uaaggauucucagauacagugu

SEQ ID NO: 66466 - RNA, 22 nt, Artificial Sequence
  LRRK2 RNA guide
uacaguguuuuguuucucaaca

SEQ ID NO: 66467 - RNA, 22 nt, Artificial Sequence
  LRRK2 RNA guide
uauaaggauucucagauacagu

SEQ ID NO: 66468 - RNA, 22 nt, Artificial Sequence
  LRRK2 RNA guide
uauuucuccuguugagaaacaa

SEQ ID NO: 66469 - RNA, 22 nt, Artificial Sequence
  LRRK2 RNA guide
ucagauacaguguuuuguuucu

SEQ ID NO: 66470 - RNA, 22 nt, Artificial Sequence
  LRRK2 RNA guide
uccuguugagaaacaaaacacu

SEQ ID NO: 66471 - RNA, 22 nt, Artificial Sequence
  LRRK2 RNA guide
ucucagauacaguguuuuguuu

SEQ ID NO: 66472 - RNA, 22 nt, Artificial Sequence
  LRRK2 RNA guide
ucuccuguugagaaacaaaaca

SEQ ID NO: 66473 - RNA, 22 nt, Artificial Sequence
  LRRK2 RNA guide
ugagaaacaaaacacuguaucu

SEQ ID NO: 66474 - RNA, 22 nt, Artificial Sequence
  LRRK2 RNA guide
uguuauuucuccuguugagaaa

SEQ ID NO: 66475 - RNA, 22 nt, Artificial Sequence
  LRRK2 RNA guide
uguugagaaacaaaacacugua

SEQ ID NO: 66476 - RNA, 22 nt, Artificial Sequence
  LRRK2 RNA guide
uguuuuguuucucaacaggaga

SEQ ID NO: 66477 - RNA, 22 nt, Artificial Sequence
  LRRK2 RNA guide
uuauaaggauucucagauacag

SEQ ID NO: 66478 - RNA, 22 nt, Artificial Sequence
  LRRK2 RNA guide
uuauuucuccuguugagaaaca

SEQ ID NO: 66479 - RNA, 22 nt, Artificial Sequence
  LRRK2 RNA guide
uucucagauacaguguuuuguu

SEQ ID NO: 66480 - RNA, 22 nt, Artificial Sequence
  LRRK2 RNA guide
uucuccuguugagaaacaaaac

SEQ ID NO: 66481 - RNA, 22 nt, Artificial Sequence
  LRRK2 RNA guide
uugagaaacaaaacacuguauc

SEQ ID NO: 66482 - RNA, 22 nt, Artificial Sequence
  LRRK2 RNA guide
uuucuccuguugagaaacaaaa

SEQ ID NO: 66483 - RNA, 20 nt, Artificial Sequence
  LRRK2 RNA guide
aaacaaagcacuguaucuga

SEQ ID NO: 66484 - RNA, 20 nt, Artificial Sequence
  LRRK2 RNA guide
aaagcacuguaucugagaau

SEQ ID NO: 66485 - RNA, 20 nt, Artificial Sequence
  LRRK2 RNA guide
aacaaagcacuguaucugag

SEQ ID NO: 66486 - RNA, 20 nt, Artificial Sequence
  LRRK2 RNA guide
aagcacuguaucugagaauc

SEQ ID NO: 66487 - RNA, 20 nt, Artificial Sequence
  LRRK2 RNA guide
acaaagcacuguaucugaga

SEQ ID NO: 66488 - RNA, 20 nt, Artificial Sequence
  LRRK2 RNA guide
acagugcuuuguuucucaac

SEQ ID NO: 66489 - RNA, 20 nt, Artificial Sequence
  LRRK2 RNA guide
agaaacaaagcacuguaucu

SEQ ID NO: 66490 - RNA, 20 nt, Artificial Sequence
  LRRK2 RNA guide
agauacagugcuuuguuucu

SEQ ID NO: 66491 - RNA, 20 nt, Artificial Sequence
  LRRK2 RNA guide
agcacuguaucugagaaucc

SEQ ID NO: 66492 - RNA, 20 nt, Artificial Sequence
  LRRK2 RNA guide
aggauucucagauacagugc

SEQ ID NO: 66493 - RNA, 20 nt, Artificial Sequence
  LRRK2 RNA guide
agugcuuuguuucucaacag

SEQ ID NO: 66494 - RNA, 20 nt, Artificial Sequence
  LRRK2 RNA guide
auacagugcuuuguuucuca

SEQ ID NO: 66495 - RNA, 20 nt, Artificial Sequence
  LRRK2 RNA guide
auucucagauacagugcuuu

SEQ ID NO: 66496 - RNA, 20 nt, Artificial Sequence
  LRRK2 RNA guide
caaagcacuguaucugagaa

SEQ ID NO: 66497 - RNA, 20 nt, Artificial Sequence
  LRRK2 RNA guide
cagauacagugcuuuguuuc

SEQ ID NO: 66498 - RNA, 20 nt, Artificial Sequence
  LRRK2 RNA guide
cagugcuuuguuucucaaca

SEQ ID NO: 66499 - RNA, 20 nt, Artificial Sequence
  LRRK2 RNA guide
ccuguugagaaacaaagcac

SEQ ID NO: 66500 - RNA, 20 nt, Artificial Sequence
  LRRK2 RNA guide
cucagauacagugcuuuguu

SEQ ID NO: 66501 - RNA, 20 nt, Artificial Sequence
  LRRK2 RNA guide
cuccuguugagaaacaaagc

SEQ ID NO: 66502 - RNA, 20 nt, Artificial Sequence
  LRRK2 RNA guide
cuguugagaaacaaagcacu

SEQ ID NO: 66503 - RNA, 20 nt, Artificial Sequence
  LRRK2 RNA guide
gaaacaaagcacuguaucug

SEQ ID NO: 66504 - RNA, 20 nt, Artificial Sequence
  LRRK2 RNA guide
gagaaacaaagcacuguauc

SEQ ID NO: 66505 - RNA, 20 nt, Artificial Sequence
  LRRK2 RNA guide
gauacagugcuuuguuucuc

SEQ ID NO: 66506 - RNA, 20 nt, Artificial Sequence
  LRRK2 RNA guide
gauucucagauacagugcuu

SEQ ID NO: 66507 - RNA, 20 nt, Artificial Sequence
  LRRK2 RNA guide
gcuuuguuucucaacaggag

SEQ ID NO: 66508 - RNA, 20 nt, Artificial Sequence
  LRRK2 RNA guide
ggauucucagauacagugcu

SEQ ID NO: 66509 - RNA, 20 nt, Artificial Sequence
  LRRK2 RNA guide
gugcuuuguuucucaacagg

SEQ ID NO: 66510 - RNA, 20 nt, Artificial Sequence
  LRRK2 RNA guide
guugagaaacaaagcacugu

SEQ ID NO: 66511 - RNA, 20 nt, Artificial Sequence
  LRRK2 RNA guide
uacagugcuuuguuucucaa

SEQ ID NO: 66512 - RNA, 20 nt, Artificial Sequence
  LRRK2 RNA guide
ucagauacagugcuuuguuu

SEQ ID NO: 66513 - RNA, 20 nt, Artificial Sequence
  LRRK2 RNA guide
uccuguugagaaacaaagca

SEQ ID NO: 66514 - RNA, 20 nt, Artificial Sequence
  LRRK2 RNA guide
ucucagauacagugcuuugu

SEQ ID NO: 66515 - RNA, 20 nt, Artificial Sequence
  LRRK2 RNA guide
ucuccuguugagaaacaaag

SEQ ID NO: 66516 - RNA, 20 nt, Artificial Sequence
  LRRK2 RNA guide
ugagaaacaaagcacuguau

SEQ ID NO: 66517 - RNA, 20 nt, Artificial Sequence
  LRRK2 RNA guide
ugcuuuguuucucaacagga

SEQ ID NO: 66518 - RNA, 20 nt, Artificial Sequence
  LRRK2 RNA guide
uguugagaaacaaagcacug

SEQ ID NO: 66519 - RNA, 20 nt, Artificial Sequence
  LRRK2 RNA guide
uucucagauacagugcuuug

SEQ ID NO: 66520 - RNA, 20 nt, Artificial Sequence
  LRRK2 RNA guide
uugagaaacaaagcacugua

SEQ ID NO: 66521 - RNA, 21 nt, Artificial Sequence
  LRRK2 RNA guide
aaacaaagcacuguaucugag

SEQ ID NO: 66522 - RNA, 21 nt, Artificial Sequence
  LRRK2 RNA guide
aaagcacuguaucugagaauc

SEQ ID NO: 66523 - RNA, 21 nt, Artificial Sequence
  LRRK2 RNA guide
aacaaagcacuguaucugaga

SEQ ID NO: 66524 - RNA, 21 nt, Artificial Sequence
  LRRK2 RNA guide
aagcacuguaucugagaaucc

SEQ ID NO: 66525 - RNA, 21 nt, Artificial Sequence
  LRRK2 RNA guide
aaggauucucagauacagugc

SEQ ID NO: 66526 - RNA, 21 nt, Artificial Sequence
  LRRK2 RNA guide
acaaagcacuguaucugagaa

SEQ ID NO: 66527 - RNA, 21 nt, Artificial Sequence
  LRRK2 RNA guide
acagugcuuuguuucucaaca

SEQ ID NO: 66528 - RNA, 21 nt, Artificial Sequence
  LRRK2 RNA guide
agaaacaaagcacuguaucug

SEQ ID NO: 66529 - RNA, 21 nt, Artificial Sequence
  LRRK2 RNA guide
agauacagugcuuuguuucuc

SEQ ID NO: 66530 - RNA, 21 nt, Artificial Sequence
  LRRK2 RNA guide
agcacuguaucugagaauccu

SEQ ID NO: 66531 - RNA, 21 nt, Artificial Sequence
  LRRK2 RNA guide
aggauucucagauacagugcu

SEQ ID NO: 66532 - RNA, 21 nt, Artificial Sequence
  LRRK2 RNA guide
agugcuuuguuucucaacagg

SEQ ID NO: 66533 - RNA, 21 nt, Artificial Sequence
  LRRK2 RNA guide
auacagugcuuuguuucucaa

SEQ ID NO: 66534 - RNA, 21 nt, Artificial Sequence
  LRRK2 RNA guide
auucucagauacagugcuuug

SEQ ID NO: 66535 - RNA, 21 nt, Artificial Sequence
  LRRK2 RNA guide
caaagcacuguaucugagaau

SEQ ID NO: 66536 - RNA, 21 nt, Artificial Sequence
  LRRK2 RNA guide
cagauacagugcuuuguuucu

SEQ ID NO: 66537 - RNA, 21 nt, Artificial Sequence
  LRRK2 RNA guide
cagugcuuuguuucucaacag

SEQ ID NO: 66538 - RNA, 21 nt, Artificial Sequence
  LRRK2 RNA guide
ccuguugagaaacaaagcacu

SEQ ID NO: 66539 - RNA, 21 nt, Artificial Sequence
  LRRK2 RNA guide
cucagauacagugcuuuguuu

SEQ ID NO: 66540 - RNA, 21 nt, Artificial Sequence
  LRRK2 RNA guide
cuccuguugagaaacaaagca

SEQ ID NO: 66541 - RNA, 21 nt, Artificial Sequence
  LRRK2 RNA guide
cuguugagaaacaaagcacug

SEQ ID NO: 66542 - RNA, 21 nt, Artificial Sequence
  LRRK2 RNA guide
gaaacaaagcacuguaucuga

SEQ ID NO: 66543 - RNA, 21 nt, Artificial Sequence
  LRRK2 RNA guide
gagaaacaaagcacuguaucu

SEQ ID NO: 66544 - RNA, 21 nt, Artificial Sequence
  LRRK2 RNA guide
gauacagugcuuuguuucuca

SEQ ID NO: 66545 - RNA, 21 nt, Artificial Sequence
  LRRK2 RNA guide
gauucucagauacagugcuuu

SEQ ID NO: 66546 - RNA, 21 nt, Artificial Sequence
  LRRK2 RNA guide
gcuuuguuucucaacaggaga

SEQ ID NO: 66547 - RNA, 21 nt, Artificial Sequence
  LRRK2 RNA guide
ggauucucagauacagugcuu

SEQ ID NO: 66548 - RNA, 21 nt, Artificial Sequence
  LRRK2 RNA guide
gugcuuuguuucucaacagga

SEQ ID NO: 66549 - RNA, 21 nt, Artificial Sequence
  LRRK2 RNA guide
guugagaaacaaagcacugua

SEQ ID NO: 66550 - RNA, 21 nt, Artificial Sequence
  LRRK2 RNA guide
uacagugcuuuguuucucaac

SEQ ID NO: 66551 - RNA, 21 nt, Artificial Sequence
  LRRK2 RNA guide
ucagauacagugcuuuguuuc

SEQ ID NO: 66552 - RNA, 21 nt, Artificial Sequence
  LRRK2 RNA guide
uccuguugagaaacaaagcac

SEQ ID NO: 66553 - RNA, 21 nt, Artificial Sequence
  LRRK2 RNA guide
ucucagauacagugcuuuguu

SEQ ID NO: 66554 - RNA, 21 nt, Artificial Sequence
  LRRK2 RNA guide
ucuccuguugagaaacaaagc

SEQ ID NO: 66555 - RNA, 21 nt, Artificial Sequence
  LRRK2 RNA guide
ugagaaacaaagcacuguauc

SEQ ID NO: 66556 - RNA, 21 nt, Artificial Sequence
  LRRK2 RNA guide
ugcuuuguuucucaacaggag

SEQ ID NO: 66557 - RNA, 21 nt, Artificial Sequence
  LRRK2 RNA guide
uguugagaaacaaagcacugu

SEQ ID NO: 66558 - RNA, 21 nt, Artificial Sequence
  LRRK2 RNA guide
uucucagauacagugcuuugu

SEQ ID NO: 66559 - RNA, 21 nt, Artificial Sequence
  LRRK2 RNA guide
uucuccuguugagaaacaaag

SEQ ID NO: 66560 - RNA, 21 nt, Artificial Sequence
  LRRK2 RNA guide
uugagaaacaaagcacuguau

SEQ ID NO: 66561 - RNA, 22 nt, Artificial Sequence
  LRRK2 RNA guide
aaacaaagcacuguaucugaga

SEQ ID NO: 66562 - RNA, 22 nt, Artificial Sequence
  LRRK2 RNA guide
aaagcacuguaucugagaaucc

SEQ ID NO: 66563 - RNA, 22 nt, Artificial Sequence
  LRRK2 RNA guide
aacaaagcacuguaucugagaa

SEQ ID NO: 66564 - RNA, 22 nt, Artificial Sequence
  LRRK2 RNA guide
aagcacuguaucugagaauccu

SEQ ID NO: 66565 - RNA, 22 nt, Artificial Sequence
  LRRK2 RNA guide
aaggauucucagauacagugcu

SEQ ID NO: 66566 - RNA, 22 nt, Artificial Sequence
  LRRK2 RNA guide
acaaagcacuguaucugagaau

SEQ ID NO: 66567 - RNA, 22 nt, Artificial Sequence
  LRRK2 RNA guide
acagugcuuuguuucucaacag

SEQ ID NO: 66568 - RNA, 22 nt, Artificial Sequence
  LRRK2 RNA guide
agaaacaaagcacuguaucuga

SEQ ID NO: 66569 - RNA, 22 nt, Artificial Sequence
  LRRK2 RNA guide
agauacagugcuuuguuucuca

SEQ ID NO: 66570 - RNA, 22 nt, Artificial Sequence
  LRRK2 RNA guide
agcacuguaucugagaauccuu

SEQ ID NO: 66571 - RNA, 22 nt, Artificial Sequence
  LRRK2 RNA guide
aggauucucagauacagugcuu

SEQ ID NO: 66572 - RNA, 22 nt, Artificial Sequence
  LRRK2 RNA guide
agugcuuuguuucucaacagga

SEQ ID NO: 66573 - RNA, 22 nt, Artificial Sequence
  LRRK2 RNA guide
auacagugcuuuguuucucaac

SEQ ID NO: 66574 - RNA, 22 nt, Artificial Sequence
  LRRK2 RNA guide
auucucagauacagugcuuugu

SEQ ID NO: 66575 - RNA, 22 nt, Artificial Sequence
  LRRK2 RNA guide
caaagcacuguaucugagaauc

SEQ ID NO: 66576 - RNA, 22 nt, Artificial Sequence
  LRRK2 RNA guide
cagauacagugcuuuguuucuc

SEQ ID NO: 66577 - RNA, 22 nt, Artificial Sequence
  LRRK2 RNA guide
cagugcuuuguuucucaacagg

SEQ ID NO: 66578 - RNA, 22 nt, Artificial Sequence
  LRRK2 RNA guide
ccuguugagaaacaaagcacug

SEQ ID NO: 66579 - RNA, 22 nt, Artificial Sequence
  LRRK2 RNA guide
cucagauacagugcuuuguuuc

SEQ ID NO: 66580 - RNA, 22 nt, Artificial Sequence
  LRRK2 RNA guide
cuccuguugagaaacaaagcac

SEQ ID NO: 66581 - RNA, 22 nt, Artificial Sequence
  LRRK2 RNA guide
cuguugagaaacaaagcacugu

SEQ ID NO: 66582 - RNA, 22 nt, Artificial Sequence
  LRRK2 RNA guide
gaaacaaagcacuguaucugag

SEQ ID NO: 66583 - RNA, 22 nt, Artificial Sequence
  LRRK2 RNA guide
gagaaacaaagcacuguaucug

SEQ ID NO: 66584 - RNA, 22 nt, Artificial Sequence
  LRRK2 RNA guide
gauacagugcuuuguuucucaa

SEQ ID NO: 66585 - RNA, 22 nt, Artificial Sequence
  LRRK2 RNA guide
gauucucagauacagugcuuug

SEQ ID NO: 66586 - RNA, 22 nt, Artificial Sequence
  LRRK2 RNA guide
gcuuuguuucucaacaggagaa

SEQ ID NO: 66587 - RNA, 22 nt, Artificial Sequence
  LRRK2 RNA guide
ggauucucagauacagugcuuu

SEQ ID NO: 66588 - RNA, 22 nt, Artificial Sequence
  LRRK2 RNA guide
gugcuuuguuucucaacaggag

SEQ ID NO: 66589 - RNA, 22 nt, Artificial Sequence
  LRRK2 RNA guide
guugagaaacaaagcacuguau

SEQ ID NO: 66590 - RNA, 22 nt, Artificial Sequence
  LRRK2 RNA guide
uaaggauucucagauacagugc

SEQ ID NO: 66591 - RNA, 22 nt, Artificial Sequence
  LRRK2 RNA guide
uacagugcuuuguuucucaaca

SEQ ID NO: 66592 - RNA, 22 nt, Artificial Sequence
  LRRK2 RNA guide
ucagauacagugcuuuguuucu

SEQ ID NO: 66593 - RNA, 22 nt, Artificial Sequence
  LRRK2 RNA guide
uccuguugagaaacaaagcacu

SEQ ID NO: 66594 - RNA, 22 nt, Artificial Sequence
  LRRK2 RNA guide
ucucagauacagugcuuuguuu

SEQ ID NO: 66595 - RNA, 22 nt, Artificial Sequence
  LRRK2 RNA guide
ucuccuguugagaaacaaagca

SEQ ID NO: 66596 - RNA, 22 nt, Artificial Sequence
  LRRK2 RNA guide
ugagaaacaaagcacuguaucu

SEQ ID NO: 66597 - RNA, 22 nt, Artificial Sequence
  LRRK2 RNA guide
ugcuuuguuucucaacaggaga

SEQ ID NO: 66598 - RNA, 22 nt, Artificial Sequence
  LRRK2 RNA guide
uguugagaaacaaagcacugua

SEQ ID NO: 66599 - RNA, 22 nt, Artificial Sequence
  LRRK2 RNA guide
uucucagauacagugcuuuguu

SEQ ID NO: 66600 - RNA, 22 nt, Artificial Sequence
  LRRK2 RNA guide
uucuccuguugagaaacaaagc

SEQ ID NO: 66601 - RNA, 22 nt, Artificial Sequence
  LRRK2 RNA guide
uugagaaacaaagcacuguauc

SEQ ID NO: 66602 - RNA, 22 nt, Artificial Sequence
  LRRK2 RNA guide
uuucuccuguugagaaacaaag

SEQ ID NO: 66603 - RNA, 20 nt, Artificial Sequence
  LRRK2 RNA guide
aacagcaagguucuaaagua

SEQ ID NO: 66604 - RNA, 20 nt, Artificial Sequence
  LRRK2 RNA guide
aaccuugcuguucaaaaugu

SEQ ID NO: 66605 - RNA, 20 nt, Artificial Sequence
  LRRK2 RNA guide
acagcaagguucuaaaguaa

SEQ ID NO: 66606 - RNA, 20 nt, Artificial Sequence
  LRRK2 RNA guide
acauuuugaacagcaagguu

SEQ ID NO: 66607 - RNA, 20 nt, Artificial Sequence
  LRRK2 RNA guide
accuugcuguucaaaaugug

SEQ ID NO: 66608 - RNA, 20 nt, Artificial Sequence
  LRRK2 RNA guide
acuuuagaaccuugcuguuc

SEQ ID NO: 66609 - RNA, 20 nt, Artificial Sequence
  LRRK2 RNA guide
agaaccuugcuguucaaaau

SEQ ID NO: 66610 - RNA, 20 nt, Artificial Sequence
  LRRK2 RNA guide
agcaagguucuaaaguaaaa

SEQ ID NO: 66611 - RNA, 20 nt, Artificial Sequence
  LRRK2 RNA guide
agcacauuuugaacagcaag

SEQ ID NO: 66612 - RNA, 20 nt, Artificial Sequence
  LRRK2 RNA guide
auggagcacauuuugaacag

SEQ ID NO: 66613 - RNA, 20 nt, Artificial Sequence
  LRRK2 RNA guide
auuuugaacagcaagguucu

SEQ ID NO: 66614 - RNA, 20 nt, Artificial Sequence
  LRRK2 RNA guide
cacauuuugaacagcaaggu

SEQ ID NO: 66615 - RNA, 20 nt, Artificial Sequence
  LRRK2 RNA guide
cagcaagguucuaaaguaaa

SEQ ID NO: 66616 - RNA, 20 nt, Artificial Sequence
  LRRK2 RNA guide
cauggagcacauuuugaaca

SEQ ID NO: 66617 - RNA, 20 nt, Artificial Sequence
  LRRK2 RNA guide
cauuuugaacagcaagguuc

SEQ ID NO: 66618 - RNA, 20 nt, Artificial Sequence
  LRRK2 RNA guide
ccauggagcacauuuugaac

SEQ ID NO: 66619 - RNA, 20 nt, Artificial Sequence
  LRRK2 RNA guide
ccucuuuuuacuuuagaacc

SEQ ID NO: 66620 - RNA, 20 nt, Artificial Sequence
  LRRK2 RNA guide
ccuugcuguucaaaaugugc

SEQ ID NO: 66621 - RNA, 20 nt, Artificial Sequence
  LRRK2 RNA guide
cucuuuuuacuuuagaaccu

SEQ ID NO: 66622 - RNA, 20 nt, Artificial Sequence
  LRRK2 RNA guide
cuugcuguucaaaaugugcu

SEQ ID NO: 66623 - RNA, 20 nt, Artificial Sequence
  LRRK2 RNA guide
cuuuagaaccuugcuguuca

SEQ ID NO: 66624 - RNA, 20 nt, Artificial Sequence
  LRRK2 RNA guide
cuuuuuacuuuagaaccuug

SEQ ID NO: 66625 - RNA, 20 nt, Artificial Sequence
  LRRK2 RNA guide
gaacagcaagguucuaaagu

SEQ ID NO: 66626 - RNA, 20 nt, Artificial Sequence
  LRRK2 RNA guide
gaaccuugcuguucaaaaug

SEQ ID NO: 66627 - RNA, 20 nt, Artificial Sequence
  LRRK2 RNA guide
gagcacauuuugaacagcaa

SEQ ID NO: 66628 - RNA, 20 nt, Artificial Sequence
  LRRK2 RNA guide
gcacauuuugaacagcaagg

SEQ ID NO: 66629 - RNA, 20 nt, Artificial Sequence
  LRRK2 RNA guide
gcuguucaaaaugugcucca

SEQ ID NO: 66630 - RNA, 20 nt, Artificial Sequence
  LRRK2 RNA guide
ggagcacauuuugaacagca

SEQ ID NO: 66631 - RNA, 20 nt, Artificial Sequence
  LRRK2 RNA guide
guccauggagcacauuuuga

SEQ ID NO: 66632 - RNA, 20 nt, Artificial Sequence
  LRRK2 RNA guide
uacuuuagaaccuugcuguu

SEQ ID NO: 66633 - RNA, 20 nt, Artificial Sequence
  LRRK2 RNA guide
uagaaccuugcuguucaaaa

SEQ ID NO: 66634 - RNA, 20 nt, Artificial Sequence
  LRRK2 RNA guide
uccauggagcacauuuugaa

SEQ ID NO: 66635 - RNA, 20 nt, Artificial Sequence
  LRRK2 RNA guide
uccucuuuuuacuuuagaac

SEQ ID NO: 66636 - RNA, 20 nt, Artificial Sequence
  LRRK2 RNA guide
ugaacagcaagguucuaaag

SEQ ID NO: 66637 - RNA, 20 nt, Artificial Sequence
  LRRK2 RNA guide
ugcuguucaaaaugugcucc

SEQ ID NO: 66638 - RNA, 20 nt, Artificial Sequence
  LRRK2 RNA guide
uggagcacauuuugaacagc

SEQ ID NO: 66639 - RNA, 20 nt, Artificial Sequence
  LRRK2 RNA guide
uguccauggagcacauuuug

SEQ ID NO: 66640 - RNA, 20 nt, Artificial Sequence
  LRRK2 RNA guide
uuacuuuagaaccuugcugu

SEQ ID NO: 66641 - RNA, 20 nt, Artificial Sequence
  LRRK2 RNA guide
uuagaaccuugcuguucaaa

SEQ ID NO: 66642 - RNA, 20 nt, Artificial Sequence
  LRRK2 RNA guide
uugaacagcaagguucuaaa

SEQ ID NO: 66643 - RNA, 20 nt, Artificial Sequence
  LRRK2 RNA guide
uugcuguucaaaaugugcuc

SEQ ID NO: 66644 - RNA, 20 nt, Artificial Sequence
  LRRK2 RNA guide
uuuacuuuagaaccuugcug

SEQ ID NO: 66645 - RNA, 20 nt, Artificial Sequence
  LRRK2 RNA guide
uuuagaaccuugcuguucaa

SEQ ID NO: 66646 - RNA, 20 nt, Artificial Sequence
  LRRK2 RNA guide
uuugaacagcaagguucuaa

SEQ ID NO: 66647 - RNA, 20 nt, Artificial Sequence
  LRRK2 RNA guide
uuuuacuuuagaaccuugcu

SEQ ID NO: 66648 - RNA, 20 nt, Artificial Sequence
  LRRK2 RNA guide
uuuugaacagcaagguucua

SEQ ID NO: 66649 - RNA, 20 nt, Artificial Sequence
  LRRK2 RNA guide
uuuuuacuuuagaaccuugc

SEQ ID NO: 66650 - RNA, 21 nt, Artificial Sequence
  LRRK2 RNA guide
aacagcaagguucuaaaguaa

SEQ ID NO: 66651 - RNA, 21 nt, Artificial Sequence
  LRRK2 RNA guide
aaccuugcuguucaaaaugug

SEQ ID NO: 66652 - RNA, 21 nt, Artificial Sequence
  LRRK2 RNA guide
acagcaagguucuaaaguaaa

SEQ ID NO: 66653 - RNA, 21 nt, Artificial Sequence
  LRRK2 RNA guide
acauuuugaacagcaagguuc

SEQ ID NO: 66654 - RNA, 21 nt, Artificial Sequence
  LRRK2 RNA guide
accuugcuguucaaaaugugc

SEQ ID NO: 66655 - RNA, 21 nt, Artificial Sequence
  LRRK2 RNA guide
acuuuagaaccuugcuguuca

SEQ ID NO: 66656 - RNA, 21 nt, Artificial Sequence
  LRRK2 RNA guide
agaaccuugcuguucaaaaug

SEQ ID NO: 66657 - RNA, 21 nt, Artificial Sequence
  LRRK2 RNA guide
agcacauuuugaacagcaagg

SEQ ID NO: 66658 - RNA, 21 nt, Artificial Sequence
  LRRK2 RNA guide
auggagcacauuuugaacagc

SEQ ID NO: 66659 - RNA, 21 nt, Artificial Sequence
  LRRK2 RNA guide
auuuugaacagcaagguucua

SEQ ID NO: 66660 - RNA, 21 nt, Artificial Sequence
  LRRK2 RNA guide
cacauuuugaacagcaagguu

SEQ ID NO: 66661 - RNA, 21 nt, Artificial Sequence
  LRRK2 RNA guide
cagcaagguucuaaaguaaaa

SEQ ID NO: 66662 - RNA, 21 nt, Artificial Sequence
  LRRK2 RNA guide
cauggagcacauuuugaacag

SEQ ID NO: 66663 - RNA, 21 nt, Artificial Sequence
  LRRK2 RNA guide
cauuuugaacagcaagguucu

SEQ ID NO: 66664 - RNA, 21 nt, Artificial Sequence
  LRRK2 RNA guide
ccauggagcacauuuugaaca

SEQ ID NO: 66665 - RNA, 21 nt, Artificial Sequence
  LRRK2 RNA guide
ccucuuuuuacuuuagaaccu

SEQ ID NO: 66666 - RNA, 21 nt, Artificial Sequence
  LRRK2 RNA guide
ccuugcuguucaaaaugugcu

SEQ ID NO: 66667 - RNA, 21 nt, Artificial Sequence
  LRRK2 RNA guide
cuccucuuuuuacuuuagaac

SEQ ID NO: 66668 - RNA, 21 nt, Artificial Sequence
  LRRK2 RNA guide
cuugcuguucaaaaugugcuc

SEQ ID NO: 66669 - RNA, 21 nt, Artificial Sequence
  LRRK2 RNA guide
cuuuagaaccuugcuguucaa

SEQ ID NO: 66670 - RNA, 21 nt, Artificial Sequence
  LRRK2 RNA guide
cuuuuuacuuuagaaccuugc

SEQ ID NO: 66671 - RNA, 21 nt, Artificial Sequence
  LRRK2 RNA guide
gaacagcaagguucuaaagua

SEQ ID NO: 66672 - RNA, 21 nt, Artificial Sequence
  LRRK2 RNA guide
gaaccuugcuguucaaaaugu

SEQ ID NO: 66673 - RNA, 21 nt, Artificial Sequence
  LRRK2 RNA guide
gagcacauuuugaacagcaag

SEQ ID NO: 66674 - RNA, 21 nt, Artificial Sequence
  LRRK2 RNA guide
gcacauuuugaacagcaaggu

SEQ ID NO: 66675 - RNA, 21 nt, Artificial Sequence
  LRRK2 RNA guide
gcuguucaaaaugugcuccau

SEQ ID NO: 66676 - RNA, 21 nt, Artificial Sequence
  LRRK2 RNA guide
ggagcacauuuugaacagcaa

SEQ ID NO: 66677 - RNA, 21 nt, Artificial Sequence
  LRRK2 RNA guide
guccauggagcacauuuugaa

SEQ ID NO: 66678 - RNA, 21 nt, Artificial Sequence
  LRRK2 RNA guide
uacuuuagaaccuugcuguuc

SEQ ID NO: 66679 - RNA, 21 nt, Artificial Sequence
  LRRK2 RNA guide
uagaaccuugcuguucaaaau

SEQ ID NO: 66680 - RNA, 21 nt, Artificial Sequence
  LRRK2 RNA guide
uccauggagcacauuuugaac

SEQ ID NO: 66681 - RNA, 21 nt, Artificial Sequence
  LRRK2 RNA guide
uccucuuuuuacuuuagaacc

SEQ ID NO: 66682 - RNA, 21 nt, Artificial Sequence
  LRRK2 RNA guide
ugaacagcaagguucuaaagu

SEQ ID NO: 66683 - RNA, 21 nt, Artificial Sequence
  LRRK2 RNA guide
ugcuguucaaaaugugcucca

SEQ ID NO: 66684 - RNA, 21 nt, Artificial Sequence
  LRRK2 RNA guide
uggagcacauuuugaacagca

SEQ ID NO: 66685 - RNA, 21 nt, Artificial Sequence
  LRRK2 RNA guide
uguccauggagcacauuuuga

SEQ ID NO: 66686 - RNA, 21 nt, Artificial Sequence
  LRRK2 RNA guide
uuacuuuagaaccuugcuguu

SEQ ID NO: 66687 - RNA, 21 nt, Artificial Sequence
  LRRK2 RNA guide
uuagaaccuugcuguucaaaa

SEQ ID NO: 66688 - RNA, 21 nt, Artificial Sequence
  LRRK2 RNA guide
uugaacagcaagguucuaaag

SEQ ID NO: 66689 - RNA, 21 nt, Artificial Sequence
  LRRK2 RNA guide
uugcuguucaaaaugugcucc

SEQ ID NO: 66690 - RNA, 21 nt, Artificial Sequence
  LRRK2 RNA guide
uuguccauggagcacauuuug

SEQ ID NO: 66691 - RNA, 21 nt, Artificial Sequence
  LRRK2 RNA guide
uuuacuuuagaaccuugcugu

SEQ ID NO: 66692 - RNA, 21 nt, Artificial Sequence
  LRRK2 RNA guide
uuuagaaccuugcuguucaaa

SEQ ID NO: 66693 - RNA, 21 nt, Artificial Sequence
  LRRK2 RNA guide
uuugaacagcaagguucuaaa

SEQ ID NO: 66694 - RNA, 21 nt, Artificial Sequence
  LRRK2 RNA guide
uuuuacuuuagaaccuugcug

SEQ ID NO: 66695 - RNA, 21 nt, Artificial Sequence
  LRRK2 RNA guide
uuuugaacagcaagguucuaa

SEQ ID NO: 66696 - RNA, 22 nt, Artificial Sequence
  LRRK2 RNA guide
aacagcaagguucuaaaguaaa

SEQ ID NO: 66697 - RNA, 22 nt, Artificial Sequence
  LRRK2 RNA guide
aaccuugcuguucaaaaugugc

SEQ ID NO: 66698 - RNA, 22 nt, Artificial Sequence
  LRRK2 RNA guide
acagcaagguucuaaaguaaaa

SEQ ID NO: 66699 - RNA, 22 nt, Artificial Sequence
  LRRK2 RNA guide
acauuuugaacagcaagguucu

SEQ ID NO: 66700 - RNA, 22 nt, Artificial Sequence
  LRRK2 RNA guide
accuugcuguucaaaaugugcu

SEQ ID NO: 66701 - RNA, 22 nt, Artificial Sequence
  LRRK2 RNA guide
acuccucuuuuuacuuuagaac

SEQ ID NO: 66702 - RNA, 22 nt, Artificial Sequence
  LRRK2 RNA guide
acuuuagaaccuugcuguucaa

SEQ ID NO: 66703 - RNA, 22 nt, Artificial Sequence
  LRRK2 RNA guide
agaaccuugcuguucaaaaugu

SEQ ID NO: 66704 - RNA, 22 nt, Artificial Sequence
  LRRK2 RNA guide
agcaagguucuaaaguaaaaag

SEQ ID NO: 66705 - RNA, 22 nt, Artificial Sequence
  LRRK2 RNA guide
agcacauuuugaacagcaaggu

SEQ ID NO: 66706 - RNA, 22 nt, Artificial Sequence
  LRRK2 RNA guide
auggagcacauuuugaacagca

SEQ ID NO: 66707 - RNA, 22 nt, Artificial Sequence
  LRRK2 RNA guide
auuuugaacagcaagguucuaa

SEQ ID NO: 66708 - RNA, 22 nt, Artificial Sequence
  LRRK2 RNA guide
cacauuuugaacagcaagguuc

SEQ ID NO: 66709 - RNA, 22 nt, Artificial Sequence
  LRRK2 RNA guide
cagcaagguucuaaaguaaaaa

SEQ ID NO: 66710 - RNA, 22 nt, Artificial Sequence
  LRRK2 RNA guide
cauggagcacauuuugaacagc

SEQ ID NO: 66711 - RNA, 22 nt, Artificial Sequence
  LRRK2 RNA guide
cauuuugaacagcaagguucua

SEQ ID NO: 66712 - RNA, 22 nt, Artificial Sequence
  LRRK2 RNA guide
ccauggagcacauuuugaacag

SEQ ID NO: 66713 - RNA, 22 nt, Artificial Sequence
  LRRK2 RNA guide
ccucuuuuuacuuuagaaccuu

SEQ ID NO: 66714 - RNA, 22 nt, Artificial Sequence
  LRRK2 RNA guide
ccuugcuguucaaaaugugcuc

SEQ ID NO: 66715 - RNA, 22 nt, Artificial Sequence
  LRRK2 RNA guide
cuccucuuuuuacuuuagaacc

SEQ ID NO: 66716 - RNA, 22 nt, Artificial Sequence
  LRRK2 RNA guide
cucuuuuuacuuuagaaccuug

SEQ ID NO: 66717 - RNA, 22 nt, Artificial Sequence
  LRRK2 RNA guide
cuugcuguucaaaaugugcucc

SEQ ID NO: 66718 - RNA, 22 nt, Artificial Sequence
  LRRK2 RNA guide
cuuguccauggagcacauuuug

SEQ ID NO: 66719 - RNA, 22 nt, Artificial Sequence
  LRRK2 RNA guide
cuuuagaaccuugcuguucaaa

SEQ ID NO: 66720 - RNA, 22 nt, Artificial Sequence
  LRRK2 RNA guide
cuuuuuacuuuagaaccuugcu

SEQ ID NO: 66721 - RNA, 22 nt, Artificial Sequence
  LRRK2 RNA guide
gaacagcaagguucuaaaguaa

SEQ ID NO: 66722 - RNA, 22 nt, Artificial Sequence
  LRRK2 RNA guide
gaaccuugcuguucaaaaugug

SEQ ID NO: 66723 - RNA, 22 nt, Artificial Sequence
  LRRK2 RNA guide
gagcacauuuugaacagcaagg

SEQ ID NO: 66724 - RNA, 22 nt, Artificial Sequence
  LRRK2 RNA guide
gcacauuuugaacagcaagguu

SEQ ID NO: 66725 - RNA, 22 nt, Artificial Sequence
  LRRK2 RNA guide
gcuguucaaaaugugcuccaug

SEQ ID NO: 66726 - RNA, 22 nt, Artificial Sequence
  LRRK2 RNA guide
ggagcacauuuugaacagcaag

SEQ ID NO: 66727 - RNA, 22 nt, Artificial Sequence
  LRRK2 RNA guide
guccauggagcacauuuugaac

SEQ ID NO: 66728 - RNA, 22 nt, Artificial Sequence
  LRRK2 RNA guide
uacuuuagaaccuugcuguuca

SEQ ID NO: 66729 - RNA, 22 nt, Artificial Sequence
  LRRK2 RNA guide
uagaaccuugcuguucaaaaug

SEQ ID NO: 66730 - RNA, 22 nt, Artificial Sequence
  LRRK2 RNA guide
uccauggagcacauuuugaaca

SEQ ID NO: 66731 - RNA, 22 nt, Artificial Sequence
  LRRK2 RNA guide
uccucuuuuuacuuuagaaccu

SEQ ID NO: 66732 - RNA, 22 nt, Artificial Sequence
  LRRK2 RNA guide
ucuuuuuacuuuagaaccuugc

SEQ ID NO: 66733 - RNA, 22 nt, Artificial Sequence
  LRRK2 RNA guide
ugaacagcaagguucuaaagua

SEQ ID NO: 66734 - RNA, 22 nt, Artificial Sequence
  LRRK2 RNA guide
ugcuguucaaaaugugcuccau

SEQ ID NO: 66735 - RNA, 22 nt, Artificial Sequence
  LRRK2 RNA guide
uggagcacauuuugaacagcaa

SEQ ID NO: 66736 - RNA, 22 nt, Artificial Sequence
  LRRK2 RNA guide
uguccauggagcacauuuugaa

SEQ ID NO: 66737 - RNA, 22 nt, Artificial Sequence
  LRRK2 RNA guide
uuacuuuagaaccuugcuguuc

SEQ ID NO: 66738 - RNA, 22 nt, Artificial Sequence
  LRRK2 RNA guide
uuagaaccuugcuguucaaaau

SEQ ID NO: 66739 - RNA, 22 nt, Artificial Sequence
  LRRK2 RNA guide
uugaacagcaagguucuaaagu

SEQ ID NO: 66740 - RNA, 22 nt, Artificial Sequence
  LRRK2 RNA guide
uugcuguucaaaaugugcucca

SEQ ID NO: 66741 - RNA, 22 nt, Artificial Sequence
  LRRK2 RNA guide
uuguccauggagcacauuuuga

SEQ ID NO: 66742 - RNA, 22 nt, Artificial Sequence
  LRRK2 RNA guide
uuuacuuuagaaccuugcuguu

SEQ ID NO: 66743 - RNA, 22 nt, Artificial Sequence
  LRRK2 RNA guide
uuuagaaccuugcuguucaaaa

SEQ ID NO: 66744 - RNA, 22 nt, Artificial Sequence
  LRRK2 RNA guide
uuugaacagcaagguucuaaag

SEQ ID NO: 66745 - RNA, 22 nt, Artificial Sequence
  LRRK2 RNA guide
uuuuacuuuagaaccuugcugu

SEQ ID NO: 66746 - RNA, 22 nt, Artificial Sequence
  LRRK2 RNA guide
uuuugaacagcaagguucuaaa

SEQ ID NO: 66747 - RNA, 22 nt, Artificial Sequence
  LRRK2 RNA guide
uuuuuacuuuagaaccuugcug

SEQ ID NO: 66748 - RNA, 20 nt, Artificial Sequence
  LRRK2 RNA guide
aacaucaagguucuaaagua

SEQ ID NO: 66749 - RNA, 20 nt, Artificial Sequence
  LRRK2 RNA guide
aaccuugauguucaaaaugu

SEQ ID NO: 66750 - RNA, 20 nt, Artificial Sequence
  LRRK2 RNA guide
acaucaagguucuaaaguaa

SEQ ID NO: 66751 - RNA, 20 nt, Artificial Sequence
  LRRK2 RNA guide
acauuuugaacaucaagguu

SEQ ID NO: 66752 - RNA, 20 nt, Artificial Sequence
  LRRK2 RNA guide
accuugauguucaaaaugug

SEQ ID NO: 66753 - RNA, 20 nt, Artificial Sequence
  LRRK2 RNA guide
acuuuagaaccuugauguuc

SEQ ID NO: 66754 - RNA, 20 nt, Artificial Sequence
  LRRK2 RNA guide
agaaccuugauguucaaaau

SEQ ID NO: 66755 - RNA, 20 nt, Artificial Sequence
  LRRK2 RNA guide
agcacauuuugaacaucaag

SEQ ID NO: 66756 - RNA, 20 nt, Artificial Sequence
  LRRK2 RNA guide
auggagcacauuuugaacau

SEQ ID NO: 66757 - RNA, 20 nt, Artificial Sequence
  LRRK2 RNA guide
auuuugaacaucaagguucu

SEQ ID NO: 66758 - RNA, 20 nt, Artificial Sequence
  LRRK2 RNA guide
cacauuuugaacaucaaggu

SEQ ID NO: 66759 - RNA, 20 nt, Artificial Sequence
  LRRK2 RNA guide
caucaagguucuaaaguaaa

SEQ ID NO: 66760 - RNA, 20 nt, Artificial Sequence
  LRRK2 RNA guide
cauuuugaacaucaagguuc

SEQ ID NO: 66761 - RNA, 20 nt, Artificial Sequence
  LRRK2 RNA guide
ccuugauguucaaaaugugc

SEQ ID NO: 66762 - RNA, 20 nt, Artificial Sequence
  LRRK2 RNA guide
cuugauguucaaaaugugcu

SEQ ID NO: 66763 - RNA, 20 nt, Artificial Sequence
  LRRK2 RNA guide
cuuuagaaccuugauguuca

SEQ ID NO: 66764 - RNA, 20 nt, Artificial Sequence
  LRRK2 RNA guide
gaacaucaagguucuaaagu

SEQ ID NO: 66765 - RNA, 20 nt, Artificial Sequence
  LRRK2 RNA guide
gaaccuugauguucaaaaug

SEQ ID NO: 66766 - RNA, 20 nt, Artificial Sequence
  LRRK2 RNA guide
gagcacauuuugaacaucaa

SEQ ID NO: 66767 - RNA, 20 nt, Artificial Sequence
  LRRK2 RNA guide
gauguucaaaaugugcucca

SEQ ID NO: 66768 - RNA, 20 nt, Artificial Sequence
  LRRK2 RNA guide
gcacauuuugaacaucaagg

SEQ ID NO: 66769 - RNA, 20 nt, Artificial Sequence
  LRRK2 RNA guide
ggagcacauuuugaacauca

SEQ ID NO: 66770 - RNA, 20 nt, Artificial Sequence
  LRRK2 RNA guide
uacuuuagaaccuugauguu

SEQ ID NO: 66771 - RNA, 20 nt, Artificial Sequence
  LRRK2 RNA guide
uagaaccuugauguucaaaa

SEQ ID NO: 66772 - RNA, 20 nt, Artificial Sequence
  LRRK2 RNA guide
ugaacaucaagguucuaaag

SEQ ID NO: 66773 - RNA, 20 nt, Artificial Sequence
  LRRK2 RNA guide
ugauguucaaaaugugcucc

SEQ ID NO: 66774 - RNA, 20 nt, Artificial Sequence
  LRRK2 RNA guide
uggagcacauuuugaacauc

SEQ ID NO: 66775 - RNA, 20 nt, Artificial Sequence
  LRRK2 RNA guide
uuacuuuagaaccuugaugu

SEQ ID NO: 66776 - RNA, 20 nt, Artificial Sequence
  LRRK2 RNA guide
uuagaaccuugauguucaaa

SEQ ID NO: 66777 - RNA, 20 nt, Artificial Sequence
  LRRK2 RNA guide
uugaacaucaagguucuaaa

SEQ ID NO: 66778 - RNA, 20 nt, Artificial Sequence
  LRRK2 RNA guide
uugauguucaaaaugugcuc

SEQ ID NO: 66779 - RNA, 20 nt, Artificial Sequence
  LRRK2 RNA guide
uuuacuuuagaaccuugaug

SEQ ID NO: 66780 - RNA, 20 nt, Artificial Sequence
  LRRK2 RNA guide
uuuagaaccuugauguucaa

SEQ ID NO: 66781 - RNA, 20 nt, Artificial Sequence
  LRRK2 RNA guide
uuugaacaucaagguucuaa

SEQ ID NO: 66782 - RNA, 20 nt, Artificial Sequence
  LRRK2 RNA guide
uuuugaacaucaagguucua

SEQ ID NO: 66783 - RNA, 21 nt, Artificial Sequence
  LRRK2 RNA guide
aaccuugauguucaaaaugug

SEQ ID NO: 66784 - RNA, 21 nt, Artificial Sequence
  LRRK2 RNA guide
acauuuugaacaucaagguuc

SEQ ID NO: 66785 - RNA, 21 nt, Artificial Sequence
  LRRK2 RNA guide
accuugauguucaaaaugugc

SEQ ID NO: 66786 - RNA, 21 nt, Artificial Sequence
  LRRK2 RNA guide
acuuuagaaccuugauguuca

SEQ ID NO: 66787 - RNA, 21 nt, Artificial Sequence
  LRRK2 RNA guide
agaaccuugauguucaaaaug

SEQ ID NO: 66788 - RNA, 21 nt, Artificial Sequence
  LRRK2 RNA guide
agcacauuuugaacaucaagg

SEQ ID NO: 66789 - RNA, 21 nt, Artificial Sequence
  LRRK2 RNA guide
auggagcacauuuugaacauc

SEQ ID NO: 66790 - RNA, 21 nt, Artificial Sequence
  LRRK2 RNA guide
cacauuuugaacaucaagguu

SEQ ID NO: 66791 - RNA, 21 nt, Artificial Sequence
  LRRK2 RNA guide
cauggagcacauuuugaacau

SEQ ID NO: 66792 - RNA, 21 nt, Artificial Sequence
  LRRK2 RNA guide
cauuuugaacaucaagguucu

SEQ ID NO: 66793 - RNA, 21 nt, Artificial Sequence
  LRRK2 RNA guide
ccuugauguucaaaaugugcu

SEQ ID NO: 66794 - RNA, 21 nt, Artificial Sequence
  LRRK2 RNA guide
cuugauguucaaaaugugcuc

SEQ ID NO: 66795 - RNA, 21 nt, Artificial Sequence
  LRRK2 RNA guide
cuuuagaaccuugauguucaa

SEQ ID NO: 66796 - RNA, 21 nt, Artificial Sequence
  LRRK2 RNA guide
gaacaucaagguucuaaagua

SEQ ID NO: 66797 - RNA, 21 nt, Artificial Sequence
  LRRK2 RNA guide
gaaccuugauguucaaaaugu

SEQ ID NO: 66798 - RNA, 21 nt, Artificial Sequence
  LRRK2 RNA guide
gagcacauuuugaacaucaag

SEQ ID NO: 66799 - RNA, 21 nt, Artificial Sequence
  LRRK2 RNA guide
gauguucaaaaugugcuccau

SEQ ID NO: 66800 - RNA, 21 nt, Artificial Sequence
  LRRK2 RNA guide
gcacauuuugaacaucaaggu

SEQ ID NO: 66801 - RNA, 21 nt, Artificial Sequence
  LRRK2 RNA guide
ggagcacauuuugaacaucaa

SEQ ID NO: 66802 - RNA, 21 nt, Artificial Sequence
  LRRK2 RNA guide
uacuuuagaaccuugauguuc

SEQ ID NO: 66803 - RNA, 21 nt, Artificial Sequence
  LRRK2 RNA guide
ugaacaucaagguucuaaagu

SEQ ID NO: 66804 - RNA, 21 nt, Artificial Sequence
  LRRK2 RNA guide
ugauguucaaaaugugcucca

SEQ ID NO: 66805 - RNA, 21 nt, Artificial Sequence
  LRRK2 RNA guide
uggagcacauuuugaacauca

SEQ ID NO: 66806 - RNA, 21 nt, Artificial Sequence
  LRRK2 RNA guide
uugaacaucaagguucuaaag

SEQ ID NO: 66807 - RNA, 21 nt, Artificial Sequence
  LRRK2 RNA guide
uugauguucaaaaugugcucc

SEQ ID NO: 66808 - RNA, 22 nt, Artificial Sequence
  LRRK2 RNA guide
aaccuugauguucaaaaugugc

SEQ ID NO: 66809 - RNA, 22 nt, Artificial Sequence
  LRRK2 RNA guide
acauuuugaacaucaagguucu

SEQ ID NO: 66810 - RNA, 22 nt, Artificial Sequence
  LRRK2 RNA guide
accuugauguucaaaaugugcu

SEQ ID NO: 66811 - RNA, 22 nt, Artificial Sequence
  LRRK2 RNA guide
acuuuagaaccuugauguucaa

SEQ ID NO: 66812 - RNA, 22 nt, Artificial Sequence
  LRRK2 RNA guide
agaaccuugauguucaaaaugu

SEQ ID NO: 66813 - RNA, 22 nt, Artificial Sequence
  LRRK2 RNA guide
agcacauuuugaacaucaaggu

SEQ ID NO: 66814 - RNA, 22 nt, Artificial Sequence
  LRRK2 RNA guide
auggagcacauuuugaacauca

SEQ ID NO: 66815 - RNA, 22 nt, Artificial Sequence
  LRRK2 RNA guide
cacauuuugaacaucaagguuc

SEQ ID NO: 66816 - RNA, 22 nt, Artificial Sequence
  LRRK2 RNA guide
cauggagcacauuuugaacauc

SEQ ID NO: 66817 - RNA, 22 nt, Artificial Sequence
  LRRK2 RNA guide
cauuuugaacaucaagguucua

SEQ ID NO: 66818 - RNA, 22 nt, Artificial Sequence
  LRRK2 RNA guide
ccauggagcacauuuugaacau

SEQ ID NO: 66819 - RNA, 22 nt, Artificial Sequence
  LRRK2 RNA guide
ccuugauguucaaaaugugcuc

SEQ ID NO: 66820 - RNA, 22 nt, Artificial Sequence
  LRRK2 RNA guide
cuugauguucaaaaugugcucc

SEQ ID NO: 66821 - RNA, 22 nt, Artificial Sequence
  LRRK2 RNA guide
cuuuagaaccuugauguucaaa

SEQ ID NO: 66822 - RNA, 22 nt, Artificial Sequence
  LRRK2 RNA guide
gaacaucaagguucuaaaguaa

SEQ ID NO: 66823 - RNA, 22 nt, Artificial Sequence
  LRRK2 RNA guide
gaaccuugauguucaaaaugug

SEQ ID NO: 66824 - RNA, 22 nt, Artificial Sequence
  LRRK2 RNA guide
gagcacauuuugaacaucaagg

SEQ ID NO: 66825 - RNA, 22 nt, Artificial Sequence
  LRRK2 RNA guide
gauguucaaaaugugcuccaug

SEQ ID NO: 66826 - RNA, 22 nt, Artificial Sequence
  LRRK2 RNA guide
gcacauuuugaacaucaagguu

SEQ ID NO: 66827 - RNA, 22 nt, Artificial Sequence
  LRRK2 RNA guide
ggagcacauuuugaacaucaag

SEQ ID NO: 66828 - RNA, 22 nt, Artificial Sequence
  LRRK2 RNA guide
uacuuuagaaccuugauguuca

SEQ ID NO: 66829 - RNA, 22 nt, Artificial Sequence
  LRRK2 RNA guide
uagaaccuugauguucaaaaug

SEQ ID NO: 66830 - RNA, 22 nt, Artificial Sequence
  LRRK2 RNA guide
ugaacaucaagguucuaaagua

SEQ ID NO: 66831 - RNA, 22 nt, Artificial Sequence
  LRRK2 RNA guide
ugauguucaaaaugugcuccau

SEQ ID NO: 66832 - RNA, 22 nt, Artificial Sequence
  LRRK2 RNA guide
uggagcacauuuugaacaucaa

SEQ ID NO: 66833 - RNA, 22 nt, Artificial Sequence
  LRRK2 RNA guide
uuacuuuagaaccuugauguuc

SEQ ID NO: 66834 - RNA, 22 nt, Artificial Sequence
  LRRK2 RNA guide
uugaacaucaagguucuaaagu

SEQ ID NO: 66835 - RNA, 22 nt, Artificial Sequence
  LRRK2 RNA guide
uugauguucaaaaugugcucca

SEQ ID NO: 66836 - RNA, 22 nt, Artificial Sequence
  LRRK2 RNA guide
uuugaacaucaagguucuaaag

SEQ ID NO: 66837 - RNA, 20 nt, Artificial Sequence
  LRRK2 RNA guide
aaaacagaaggcgaagucag

SEQ ID NO: 66838 - RNA, 20 nt, Artificial Sequence
  LRRK2 RNA guide
aaacagaaggcgaagucagg

SEQ ID NO: 66839 - RNA, 20 nt, Artificial Sequence
  LRRK2 RNA guide
aacagaaggcgaagucagga

SEQ ID NO: 66840 - RNA, 20 nt, Artificial Sequence
  LRRK2 RNA guide
aagaaaacagaaggcgaagu

SEQ ID NO: 66841 - RNA, 20 nt, Artificial Sequence
  LRRK2 RNA guide
aagccuagcaagcuccugac

SEQ ID NO: 66842 - RNA, 20 nt, Artificial Sequence
  LRRK2 RNA guide
aagcuccugacuucgccuuc

SEQ ID NO: 66843 - RNA, 20 nt, Artificial Sequence
  LRRK2 RNA guide
aaggcgaagucaggagcuug

SEQ ID NO: 66844 - RNA, 20 nt, Artificial Sequence
  LRRK2 RNA guide
aauacucugaagaaaacaga

SEQ ID NO: 66845 - RNA, 20 nt, Artificial Sequence
  LRRK2 RNA guide
acucugaagaaaacagaagg

SEQ ID NO: 66846 - RNA, 20 nt, Artificial Sequence
  LRRK2 RNA guide
acuucgccuucuguuuucuu

SEQ ID NO: 66847 - RNA, 20 nt, Artificial Sequence
  LRRK2 RNA guide
agaaaacagaaggcgaaguc

SEQ ID NO: 66848 - RNA, 20 nt, Artificial Sequence
  LRRK2 RNA guide
agaaggcgaagucaggagcu

SEQ ID NO: 66849 - RNA, 20 nt, Artificial Sequence
  LRRK2 RNA guide
agcaagcuccugacuucgcc

SEQ ID NO: 66850 - RNA, 20 nt, Artificial Sequence
  LRRK2 RNA guide
agccuagcaagcuccugacu

SEQ ID NO: 66851 - RNA, 20 nt, Artificial Sequence
  LRRK2 RNA guide
agcuccugacuucgccuucu

SEQ ID NO: 66852 - RNA, 20 nt, Artificial Sequence
  LRRK2 RNA guide
aggcgaagucaggagcuugc

SEQ ID NO: 66853 - RNA, 20 nt, Artificial Sequence
  LRRK2 RNA guide
auacucugaagaaaacagaa

SEQ ID NO: 66854 - RNA, 20 nt, Artificial Sequence
  LRRK2 RNA guide
caagcuccugacuucgccuu

SEQ ID NO: 66855 - RNA, 20 nt, Artificial Sequence
  LRRK2 RNA guide
cagaaggcgaagucaggagc

SEQ ID NO: 66856 - RNA, 20 nt, Artificial Sequence
  LRRK2 RNA guide
ccuagcaagcuccugacuuc

SEQ ID NO: 66857 - RNA, 20 nt, Artificial Sequence
  LRRK2 RNA guide
ccugacuucgccuucuguuu

SEQ ID NO: 66858 - RNA, 20 nt, Artificial Sequence
  LRRK2 RNA guide
cgaagucaggagcuugcuag

SEQ ID NO: 66859 - RNA, 20 nt, Artificial Sequence
  LRRK2 RNA guide
cuagcaagcuccugacuucg

SEQ ID NO: 66860 - RNA, 20 nt, Artificial Sequence
  LRRK2 RNA guide
cuccugacuucgccuucugu

SEQ ID NO: 66861 - RNA, 20 nt, Artificial Sequence
  LRRK2 RNA guide
cucugaagaaaacagaaggc

SEQ ID NO: 66862 - RNA, 20 nt, Artificial Sequence
  LRRK2 RNA guide
cugaagaaaacagaaggcga

SEQ ID NO: 66863 - RNA, 20 nt, Artificial Sequence
  LRRK2 RNA guide
cugacuucgccuucuguuuu

SEQ ID NO: 66864 - RNA, 20 nt, Artificial Sequence
  LRRK2 RNA guide
cuucgccuucuguuuucuuc

SEQ ID NO: 66865 - RNA, 20 nt, Artificial Sequence
  LRRK2 RNA guide
gaaaacagaaggcgaaguca

SEQ ID NO: 66866 - RNA, 20 nt, Artificial Sequence
  LRRK2 RNA guide
gaagaaaacagaaggcgaag

SEQ ID NO: 66867 - RNA, 20 nt, Artificial Sequence
  LRRK2 RNA guide
gaagccuagcaagcuccuga

SEQ ID NO: 66868 - RNA, 20 nt, Artificial Sequence
  LRRK2 RNA guide
gaaggcgaagucaggagcuu

SEQ ID NO: 66869 - RNA, 20 nt, Artificial Sequence
  LRRK2 RNA guide
gacuucgccuucuguuuucu

SEQ ID NO: 66870 - RNA, 20 nt, Artificial Sequence
  LRRK2 RNA guide
gcaagcuccugacuucgccu

SEQ ID NO: 66871 - RNA, 20 nt, Artificial Sequence
  LRRK2 RNA guide
gccuagcaagcuccugacuu

SEQ ID NO: 66872 - RNA, 20 nt, Artificial Sequence
  LRRK2 RNA guide
gcgaagucaggagcuugcua

SEQ ID NO: 66873 - RNA, 20 nt, Artificial Sequence
  LRRK2 RNA guide
gcuccugacuucgccuucug

SEQ ID NO: 66874 - RNA, 20 nt, Artificial Sequence
  LRRK2 RNA guide
ggcgaagucaggagcuugcu

SEQ ID NO: 66875 - RNA, 20 nt, Artificial Sequence
  LRRK2 RNA guide
uacucugaagaaaacagaag

SEQ ID NO: 66876 - RNA, 20 nt, Artificial Sequence
  LRRK2 RNA guide
uagcaagcuccugacuucgc

SEQ ID NO: 66877 - RNA, 20 nt, Artificial Sequence
  LRRK2 RNA guide
uccugacuucgccuucuguu

SEQ ID NO: 66878 - RNA, 20 nt, Artificial Sequence
  LRRK2 RNA guide
ucgccuucuguuuucuucag

SEQ ID NO: 66879 - RNA, 20 nt, Artificial Sequence
  LRRK2 RNA guide
ucugaagaaaacagaaggcg

SEQ ID NO: 66880 - RNA, 20 nt, Artificial Sequence
  LRRK2 RNA guide
ugaagaaaacagaaggcgaa

SEQ ID NO: 66881 - RNA, 20 nt, Artificial Sequence
  LRRK2 RNA guide
ugaagccuagcaagcuccug

SEQ ID NO: 66882 - RNA, 20 nt, Artificial Sequence
  LRRK2 RNA guide
ugacuucgccuucuguuuuc

SEQ ID NO: 66883 - RNA, 20 nt, Artificial Sequence
  LRRK2 RNA guide
uucgccuucuguuuucuuca

SEQ ID NO: 66884 - RNA, 21 nt, Artificial Sequence
  LRRK2 RNA guide
aaaacagaaggcgaagucagg

SEQ ID NO: 66885 - RNA, 21 nt, Artificial Sequence
  LRRK2 RNA guide
aaacagaaggcgaagucagga

SEQ ID NO: 66886 - RNA, 21 nt, Artificial Sequence
  LRRK2 RNA guide
aacagaaggcgaagucaggag

SEQ ID NO: 66887 - RNA, 21 nt, Artificial Sequence
  LRRK2 RNA guide
aagaaaacagaaggcgaaguc

SEQ ID NO: 66888 - RNA, 21 nt, Artificial Sequence
  LRRK2 RNA guide
aagccuagcaagcuccugacu

SEQ ID NO: 66889 - RNA, 21 nt, Artificial Sequence
  LRRK2 RNA guide
aagcuccugacuucgccuucu

SEQ ID NO: 66890 - RNA, 21 nt, Artificial Sequence
  LRRK2 RNA guide
aaggcgaagucaggagcuugc

SEQ ID NO: 66891 - RNA, 21 nt, Artificial Sequence
  LRRK2 RNA guide
acagaaggcgaagucaggagc

SEQ ID NO: 66892 - RNA, 21 nt, Artificial Sequence
  LRRK2 RNA guide
acucugaagaaaacagaaggc

SEQ ID NO: 66893 - RNA, 21 nt, Artificial Sequence
  LRRK2 RNA guide
acuucgccuucuguuuucuuc

SEQ ID NO: 66894 - RNA, 21 nt, Artificial Sequence
  LRRK2 RNA guide
agaaaacagaaggcgaaguca

SEQ ID NO: 66895 - RNA, 21 nt, Artificial Sequence
  LRRK2 RNA guide
agaaggcgaagucaggagcuu

SEQ ID NO: 66896 - RNA, 21 nt, Artificial Sequence
  LRRK2 RNA guide
agcaagcuccugacuucgccu

SEQ ID NO: 66897 - RNA, 21 nt, Artificial Sequence
  LRRK2 RNA guide
agccuagcaagcuccugacuu

SEQ ID NO: 66898 - RNA, 21 nt, Artificial Sequence
  LRRK2 RNA guide
agcuccugacuucgccuucug

SEQ ID NO: 66899 - RNA, 21 nt, Artificial Sequence
  LRRK2 RNA guide
aggcgaagucaggagcuugcu

SEQ ID NO: 66900 - RNA, 21 nt, Artificial Sequence
  LRRK2 RNA guide
auacucugaagaaaacagaag

SEQ ID NO: 66901 - RNA, 21 nt, Artificial Sequence
  LRRK2 RNA guide
caagcuccugacuucgccuuc

SEQ ID NO: 66902 - RNA, 21 nt, Artificial Sequence
  LRRK2 RNA guide
cagaaggcgaagucaggagcu

SEQ ID NO: 66903 - RNA, 21 nt, Artificial Sequence
  LRRK2 RNA guide
ccuagcaagcuccugacuucg

SEQ ID NO: 66904 - RNA, 21 nt, Artificial Sequence
  LRRK2 RNA guide
ccugacuucgccuucuguuuu

SEQ ID NO: 66905 - RNA, 21 nt, Artificial Sequence
  LRRK2 RNA guide
cgaagucaggagcuugcuagg

SEQ ID NO: 66906 - RNA, 21 nt, Artificial Sequence
  LRRK2 RNA guide
cuagcaagcuccugacuucgc

SEQ ID NO: 66907 - RNA, 21 nt, Artificial Sequence
  LRRK2 RNA guide
cuccugacuucgccuucuguu

SEQ ID NO: 66908 - RNA, 21 nt, Artificial Sequence
  LRRK2 RNA guide
cucugaagaaaacagaaggcg

SEQ ID NO: 66909 - RNA, 21 nt, Artificial Sequence
  LRRK2 RNA guide
cugaagaaaacagaaggcgaa

SEQ ID NO: 66910 - RNA, 21 nt, Artificial Sequence
  LRRK2 RNA guide
cugacuucgccuucuguuuuc

SEQ ID NO: 66911 - RNA, 21 nt, Artificial Sequence
  LRRK2 RNA guide
cuucgccuucuguuuucuuca

SEQ ID NO: 66912 - RNA, 21 nt, Artificial Sequence
  LRRK2 RNA guide
gaaaacagaaggcgaagucag

SEQ ID NO: 66913 - RNA, 21 nt, Artificial Sequence
  LRRK2 RNA guide
gaagaaaacagaaggcgaagu

SEQ ID NO: 66914 - RNA, 21 nt, Artificial Sequence
  LRRK2 RNA guide
gaagccuagcaagcuccugac

SEQ ID NO: 66915 - RNA, 21 nt, Artificial Sequence
  LRRK2 RNA guide
gaaggcgaagucaggagcuug

SEQ ID NO: 66916 - RNA, 21 nt, Artificial Sequence
  LRRK2 RNA guide
gacuucgccuucuguuuucuu

SEQ ID NO: 66917 - RNA, 21 nt, Artificial Sequence
  LRRK2 RNA guide
gcaagcuccugacuucgccuu

SEQ ID NO: 66918 - RNA, 21 nt, Artificial Sequence
  LRRK2 RNA guide
gccuagcaagcuccugacuuc

SEQ ID NO: 66919 - RNA, 21 nt, Artificial Sequence
  LRRK2 RNA guide
gcgaagucaggagcuugcuag

SEQ ID NO: 66920 - RNA, 21 nt, Artificial Sequence
  LRRK2 RNA guide
gcuccugacuucgccuucugu

SEQ ID NO: 66921 - RNA, 21 nt, Artificial Sequence
  LRRK2 RNA guide
ggcgaagucaggagcuugcua

SEQ ID NO: 66922 - RNA, 21 nt, Artificial Sequence
  LRRK2 RNA guide
uacucugaagaaaacagaagg

SEQ ID NO: 66923 - RNA, 21 nt, Artificial Sequence
  LRRK2 RNA guide
uagcaagcuccugacuucgcc

SEQ ID NO: 66924 - RNA, 21 nt, Artificial Sequence
  LRRK2 RNA guide
uccugacuucgccuucuguuu

SEQ ID NO: 66925 - RNA, 21 nt, Artificial Sequence
  LRRK2 RNA guide
ucgccuucuguuuucuucaga

SEQ ID NO: 66926 - RNA, 21 nt, Artificial Sequence
  LRRK2 RNA guide
ucugaagaaaacagaaggcga

SEQ ID NO: 66927 - RNA, 21 nt, Artificial Sequence
  LRRK2 RNA guide
ugaagaaaacagaaggcgaag

SEQ ID NO: 66928 - RNA, 21 nt, Artificial Sequence
  LRRK2 RNA guide
ugaagccuagcaagcuccuga

SEQ ID NO: 66929 - RNA, 21 nt, Artificial Sequence
  LRRK2 RNA guide
ugacuucgccuucuguuuucu

SEQ ID NO: 66930 - RNA, 21 nt, Artificial Sequence
  LRRK2 RNA guide
uucgccuucuguuuucuucag

SEQ ID NO: 66931 - RNA, 21 nt, Artificial Sequence
  LRRK2 RNA guide
uugaagccuagcaagcuccug

SEQ ID NO: 66932 - RNA, 22 nt, Artificial Sequence
  LRRK2 RNA guide
aaaacagaaggcgaagucagga

SEQ ID NO: 66933 - RNA, 22 nt, Artificial Sequence
  LRRK2 RNA guide
aaacagaaggcgaagucaggag

SEQ ID NO: 66934 - RNA, 22 nt, Artificial Sequence
  LRRK2 RNA guide
aacagaaggcgaagucaggagc

SEQ ID NO: 66935 - RNA, 22 nt, Artificial Sequence
  LRRK2 RNA guide
aagaaaacagaaggcgaaguca

SEQ ID NO: 66936 - RNA, 22 nt, Artificial Sequence
  LRRK2 RNA guide
aagccuagcaagcuccugacuu

SEQ ID NO: 66937 - RNA, 22 nt, Artificial Sequence
  LRRK2 RNA guide
aagcuccugacuucgccuucug

SEQ ID NO: 66938 - RNA, 22 nt, Artificial Sequence
  LRRK2 RNA guide
aaggcgaagucaggagcuugcu

SEQ ID NO: 66939 - RNA, 22 nt, Artificial Sequence
  LRRK2 RNA guide
aauacucugaagaaaacagaag

SEQ ID NO: 66940 - RNA, 22 nt, Artificial Sequence
  LRRK2 RNA guide
acagaaggcgaagucaggagcu

SEQ ID NO: 66941 - RNA, 22 nt, Artificial Sequence
  LRRK2 RNA guide
acucugaagaaaacagaaggcg

SEQ ID NO: 66942 - RNA, 22 nt, Artificial Sequence
  LRRK2 RNA guide
acuucgccuucuguuuucuuca

SEQ ID NO: 66943 - RNA, 22 nt, Artificial Sequence
  LRRK2 RNA guide
agaaaacagaaggcgaagucag

SEQ ID NO: 66944 - RNA, 22 nt, Artificial Sequence
  LRRK2 RNA guide
agaaggcgaagucaggagcuug

SEQ ID NO: 66945 - RNA, 22 nt, Artificial Sequence
  LRRK2 RNA guide
agcaagcuccugacuucgccuu

SEQ ID NO: 66946 - RNA, 22 nt, Artificial Sequence
  LRRK2 RNA guide
agccuagcaagcuccugacuuc

SEQ ID NO: 66947 - RNA, 22 nt, Artificial Sequence
  LRRK2 RNA guide
agcuccugacuucgccuucugu

SEQ ID NO: 66948 - RNA, 22 nt, Artificial Sequence
  LRRK2 RNA guide
aggcgaagucaggagcuugcua

SEQ ID NO: 66949 - RNA, 22 nt, Artificial Sequence
  LRRK2 RNA guide
auacucugaagaaaacagaagg

SEQ ID NO: 66950 - RNA, 22 nt, Artificial Sequence
  LRRK2 RNA guide
caagcuccugacuucgccuucu

SEQ ID NO: 66951 - RNA, 22 nt, Artificial Sequence
  LRRK2 RNA guide
cagaaggcgaagucaggagcuu

SEQ ID NO: 66952 - RNA, 22 nt, Artificial Sequence
  LRRK2 RNA guide
ccuagcaagcuccugacuucgc

SEQ ID NO: 66953 - RNA, 22 nt, Artificial Sequence
  LRRK2 RNA guide
ccugacuucgccuucuguuuuc

SEQ ID NO: 66954 - RNA, 22 nt, Artificial Sequence
  LRRK2 RNA guide
cgaagucaggagcuugcuaggc

SEQ ID NO: 66955 - RNA, 22 nt, Artificial Sequence
  LRRK2 RNA guide
cuagcaagcuccugacuucgcc

SEQ ID NO: 66956 - RNA, 22 nt, Artificial Sequence
  LRRK2 RNA guide
cuccugacuucgccuucuguuu

SEQ ID NO: 66957 - RNA, 22 nt, Artificial Sequence
  LRRK2 RNA guide
cucugaagaaaacagaaggcga

SEQ ID NO: 66958 - RNA, 22 nt, Artificial Sequence
  LRRK2 RNA guide
cugaagaaaacagaaggcgaag

SEQ ID NO: 66959 - RNA, 22 nt, Artificial Sequence
  LRRK2 RNA guide
cugacuucgccuucuguuuucu

SEQ ID NO: 66960 - RNA, 22 nt, Artificial Sequence
  LRRK2 RNA guide
cuucgccuucuguuuucuucag

SEQ ID NO: 66961 - RNA, 22 nt, Artificial Sequence
  LRRK2 RNA guide
cuugaagccuagcaagcuccug

SEQ ID NO: 66962 - RNA, 22 nt, Artificial Sequence
  LRRK2 RNA guide
gaaaacagaaggcgaagucagg

SEQ ID NO: 66963 - RNA, 22 nt, Artificial Sequence
  LRRK2 RNA guide
gaagaaaacagaaggcgaaguc

SEQ ID NO: 66964 - RNA, 22 nt, Artificial Sequence
  LRRK2 RNA guide
gaagccuagcaagcuccugacu

SEQ ID NO: 66965 - RNA, 22 nt, Artificial Sequence
  LRRK2 RNA guide
gaaggcgaagucaggagcuugc

SEQ ID NO: 66966 - RNA, 22 nt, Artificial Sequence
  LRRK2 RNA guide
gacuucgccuucuguuuucuuc

SEQ ID NO: 66967 - RNA, 22 nt, Artificial Sequence
  LRRK2 RNA guide
gcaagcuccugacuucgccuuc

SEQ ID NO: 66968 - RNA, 22 nt, Artificial Sequence
  LRRK2 RNA guide
gccuagcaagcuccugacuucg

SEQ ID NO: 66969 - RNA, 22 nt, Artificial Sequence
  LRRK2 RNA guide
gcgaagucaggagcuugcuagg

SEQ ID NO: 66970 - RNA, 22 nt, Artificial Sequence
  LRRK2 RNA guide
gcuccugacuucgccuucuguu

SEQ ID NO: 66971 - RNA, 22 nt, Artificial Sequence
  LRRK2 RNA guide
ggcgaagucaggagcuugcuag

SEQ ID NO: 66972 - RNA, 22 nt, Artificial Sequence
  LRRK2 RNA guide
uacucugaagaaaacagaaggc

SEQ ID NO: 66973 - RNA, 22 nt, Artificial Sequence
  LRRK2 RNA guide
uagcaagcuccugacuucgccu

SEQ ID NO: 66974 - RNA, 22 nt, Artificial Sequence
  LRRK2 RNA guide
uccugacuucgccuucuguuuu

SEQ ID NO: 66975 - RNA, 22 nt, Artificial Sequence
  LRRK2 RNA guide
ucgccuucuguuuucuucagag

SEQ ID NO: 66976 - RNA, 22 nt, Artificial Sequence
  LRRK2 RNA guide
ucugaagaaaacagaaggcgaa

SEQ ID NO: 66977 - RNA, 22 nt, Artificial Sequence
  LRRK2 RNA guide
ugaagaaaacagaaggcgaagu

SEQ ID NO: 66978 - RNA, 22 nt, Artificial Sequence
  LRRK2 RNA guide
ugaagccuagcaagcuccugac

SEQ ID NO: 66979 - RNA, 22 nt, Artificial Sequence
  LRRK2 RNA guide
ugacuucgccuucuguuuucuu

SEQ ID NO: 66980 - RNA, 22 nt, Artificial Sequence
  LRRK2 RNA guide
uucgccuucuguuuucuucaga

SEQ ID NO: 66981 - RNA, 22 nt, Artificial Sequence
  LRRK2 RNA guide
uugaagccuagcaagcuccuga

SEQ ID NO: 66982 - RNA, 20 nt, Artificial Sequence
  LRRK2 RNA guide
aaaacagaaggcaaagucag

SEQ ID NO: 66983 - RNA, 20 nt, Artificial Sequence
  LRRK2 RNA guide
aaacagaaggcaaagucagg

SEQ ID NO: 66984 - RNA, 20 nt, Artificial Sequence
  LRRK2 RNA guide
aacagaaggcaaagucagga

SEQ ID NO: 66985 - RNA, 20 nt, Artificial Sequence
  LRRK2 RNA guide
aagaaaacagaaggcaaagu

SEQ ID NO: 66986 - RNA, 20 nt, Artificial Sequence
  LRRK2 RNA guide
aagcuccugacuuugccuuc

SEQ ID NO: 66987 - RNA, 20 nt, Artificial Sequence
  LRRK2 RNA guide
aaggcaaagucaggagcuug

SEQ ID NO: 66988 - RNA, 20 nt, Artificial Sequence
  LRRK2 RNA guide
acagaaggcaaagucaggag

SEQ ID NO: 66989 - RNA, 20 nt, Artificial Sequence
  LRRK2 RNA guide
acuuugccuucuguuuucuu

SEQ ID NO: 66990 - RNA, 20 nt, Artificial Sequence
  LRRK2 RNA guide
agaaaacagaaggcaaaguc

SEQ ID NO: 66991 - RNA, 20 nt, Artificial Sequence
  LRRK2 RNA guide
agaaggcaaagucaggagcu

SEQ ID NO: 66992 - RNA, 20 nt, Artificial Sequence
  LRRK2 RNA guide
agcaagcuccugacuuugcc

SEQ ID NO: 66993 - RNA, 20 nt, Artificial Sequence
  LRRK2 RNA guide
agcuccugacuuugccuucu

SEQ ID NO: 66994 - RNA, 20 nt, Artificial Sequence
  LRRK2 RNA guide
aggcaaagucaggagcuugc

SEQ ID NO: 66995 - RNA, 20 nt, Artificial Sequence
  LRRK2 RNA guide
caaagucaggagcuugcuag

SEQ ID NO: 66996 - RNA, 20 nt, Artificial Sequence
  LRRK2 RNA guide
caagcuccugacuuugccuu

SEQ ID NO: 66997 - RNA, 20 nt, Artificial Sequence
  LRRK2 RNA guide
cagaaggcaaagucaggagc

SEQ ID NO: 66998 - RNA, 20 nt, Artificial Sequence
  LRRK2 RNA guide
ccuagcaagcuccugacuuu

SEQ ID NO: 66999 - RNA, 20 nt, Artificial Sequence
  LRRK2 RNA guide
ccugacuuugccuucuguuu

SEQ ID NO: 67000 - RNA, 20 nt, Artificial Sequence
  LRRK2 RNA guide
cuagcaagcuccugacuuug

SEQ ID NO: 67001 - RNA, 20 nt, Artificial Sequence
  LRRK2 RNA guide
cuccugacuuugccuucugu

SEQ ID NO: 67002 - RNA, 20 nt, Artificial Sequence
  LRRK2 RNA guide
cugaagaaaacagaaggcaa

SEQ ID NO: 67003 - RNA, 20 nt, Artificial Sequence
  LRRK2 RNA guide
cugacuuugccuucuguuuu

SEQ ID NO: 67004 - RNA, 20 nt, Artificial Sequence
  LRRK2 RNA guide
cuuugccuucuguuuucuuc

SEQ ID NO: 67005 - RNA, 20 nt, Artificial Sequence
  LRRK2 RNA guide
gaaaacagaaggcaaaguca

SEQ ID NO: 67006 - RNA, 20 nt, Artificial Sequence
  LRRK2 RNA guide
gaagaaaacagaaggcaaag

SEQ ID NO: 67007 - RNA, 20 nt, Artificial Sequence
  LRRK2 RNA guide
gaaggcaaagucaggagcuu

SEQ ID NO: 67008 - RNA, 20 nt, Artificial Sequence
  LRRK2 RNA guide
gacuuugccuucuguuuucu

SEQ ID NO: 67009 - RNA, 20 nt, Artificial Sequence
  LRRK2 RNA guide
gcaaagucaggagcuugcua

SEQ ID NO: 67010 - RNA, 20 nt, Artificial Sequence
  LRRK2 RNA guide
gcaagcuccugacuuugccu

SEQ ID NO: 67011 - RNA, 20 nt, Artificial Sequence
  LRRK2 RNA guide
gcuccugacuuugccuucug

SEQ ID NO: 67012 - RNA, 20 nt, Artificial Sequence
  LRRK2 RNA guide
ggcaaagucaggagcuugcu

SEQ ID NO: 67013 - RNA, 20 nt, Artificial Sequence
  LRRK2 RNA guide
uagcaagcuccugacuuugc

SEQ ID NO: 67014 - RNA, 20 nt, Artificial Sequence
  LRRK2 RNA guide
uccugacuuugccuucuguu

SEQ ID NO: 67015 - RNA, 20 nt, Artificial Sequence
  LRRK2 RNA guide
ucugaagaaaacagaaggca

SEQ ID NO: 67016 - RNA, 20 nt, Artificial Sequence
  LRRK2 RNA guide
ugaagaaaacagaaggcaaa

SEQ ID NO: 67017 - RNA, 20 nt, Artificial Sequence
  LRRK2 RNA guide
ugacuuugccuucuguuuuc

SEQ ID NO: 67018 - RNA, 20 nt, Artificial Sequence
  LRRK2 RNA guide
uugccuucuguuuucuucag

SEQ ID NO: 67019 - RNA, 20 nt, Artificial Sequence
  LRRK2 RNA guide
uuugccuucuguuuucuuca

SEQ ID NO: 67020 - RNA, 21 nt, Artificial Sequence
  LRRK2 RNA guide
aaaacagaaggcaaagucagg

SEQ ID NO: 67021 - RNA, 21 nt, Artificial Sequence
  LRRK2 RNA guide
aaacagaaggcaaagucagga

SEQ ID NO: 67022 - RNA, 21 nt, Artificial Sequence
  LRRK2 RNA guide
aacagaaggcaaagucaggag

SEQ ID NO: 67023 - RNA, 21 nt, Artificial Sequence
  LRRK2 RNA guide
aagaaaacagaaggcaaaguc

SEQ ID NO: 67024 - RNA, 21 nt, Artificial Sequence
  LRRK2 RNA guide
aagcuccugacuuugccuucu

SEQ ID NO: 67025 - RNA, 21 nt, Artificial Sequence
  LRRK2 RNA guide
aaggcaaagucaggagcuugc

SEQ ID NO: 67026 - RNA, 21 nt, Artificial Sequence
  LRRK2 RNA guide
acagaaggcaaagucaggagc

SEQ ID NO: 67027 - RNA, 21 nt, Artificial Sequence
  LRRK2 RNA guide
acuuugccuucuguuuucuuc

SEQ ID NO: 67028 - RNA, 21 nt, Artificial Sequence
  LRRK2 RNA guide
agaaaacagaaggcaaaguca

SEQ ID NO: 67029 - RNA, 21 nt, Artificial Sequence
  LRRK2 RNA guide
agaaggcaaagucaggagcuu

SEQ ID NO: 67030 - RNA, 21 nt, Artificial Sequence
  LRRK2 RNA guide
agcaagcuccugacuuugccu

SEQ ID NO: 67031 - RNA, 21 nt, Artificial Sequence
  LRRK2 RNA guide
agcuccugacuuugccuucug

SEQ ID NO: 67032 - RNA, 21 nt, Artificial Sequence
  LRRK2 RNA guide
aggcaaagucaggagcuugcu

SEQ ID NO: 67033 - RNA, 21 nt, Artificial Sequence
  LRRK2 RNA guide
caaagucaggagcuugcuagg

SEQ ID NO: 67034 - RNA, 21 nt, Artificial Sequence
  LRRK2 RNA guide
caagcuccugacuuugccuuc

SEQ ID NO: 67035 - RNA, 21 nt, Artificial Sequence
  LRRK2 RNA guide
cagaaggcaaagucaggagcu

SEQ ID NO: 67036 - RNA, 21 nt, Artificial Sequence
  LRRK2 RNA guide
ccuagcaagcuccugacuuug

SEQ ID NO: 67037 - RNA, 21 nt, Artificial Sequence
  LRRK2 RNA guide
ccugacuuugccuucuguuuu

SEQ ID NO: 67038 - RNA, 21 nt, Artificial Sequence
  LRRK2 RNA guide
cuagcaagcuccugacuuugc

SEQ ID NO: 67039 - RNA, 21 nt, Artificial Sequence
  LRRK2 RNA guide
cuccugacuuugccuucuguu

SEQ ID NO: 67040 - RNA, 21 nt, Artificial Sequence
  LRRK2 RNA guide
cucugaagaaaacagaaggca

SEQ ID NO: 67041 - RNA, 21 nt, Artificial Sequence
  LRRK2 RNA guide
cugaagaaaacagaaggcaaa

SEQ ID NO: 67042 - RNA, 21 nt, Artificial Sequence
  LRRK2 RNA guide
cugacuuugccuucuguuuuc

SEQ ID NO: 67043 - RNA, 21 nt, Artificial Sequence
  LRRK2 RNA guide
cuuugccuucuguuuucuuca

SEQ ID NO: 67044 - RNA, 21 nt, Artificial Sequence
  LRRK2 RNA guide
gaaaacagaaggcaaagucag

SEQ ID NO: 67045 - RNA, 21 nt, Artificial Sequence
  LRRK2 RNA guide
gaagaaaacagaaggcaaagu

SEQ ID NO: 67046 - RNA, 21 nt, Artificial Sequence
  LRRK2 RNA guide
gaaggcaaagucaggagcuug

SEQ ID NO: 67047 - RNA, 21 nt, Artificial Sequence
  LRRK2 RNA guide
gacuuugccuucuguuuucuu

SEQ ID NO: 67048 - RNA, 21 nt, Artificial Sequence
  LRRK2 RNA guide
gcaaagucaggagcuugcuag

SEQ ID NO: 67049 - RNA, 21 nt, Artificial Sequence
  LRRK2 RNA guide
gcaagcuccugacuuugccuu

SEQ ID NO: 67050 - RNA, 21 nt, Artificial Sequence
  LRRK2 RNA guide
gccuagcaagcuccugacuuu

SEQ ID NO: 67051 - RNA, 21 nt, Artificial Sequence
  LRRK2 RNA guide
gcuccugacuuugccuucugu

SEQ ID NO: 67052 - RNA, 21 nt, Artificial Sequence
  LRRK2 RNA guide
ggcaaagucaggagcuugcua

SEQ ID NO: 67053 - RNA, 21 nt, Artificial Sequence
  LRRK2 RNA guide
uagcaagcuccugacuuugcc

SEQ ID NO: 67054 - RNA, 21 nt, Artificial Sequence
  LRRK2 RNA guide
uccugacuuugccuucuguuu

SEQ ID NO: 67055 - RNA, 21 nt, Artificial Sequence
  LRRK2 RNA guide
ucugaagaaaacagaaggcaa

SEQ ID NO: 67056 - RNA, 21 nt, Artificial Sequence
  LRRK2 RNA guide
ugaagaaaacagaaggcaaag

SEQ ID NO: 67057 - RNA, 21 nt, Artificial Sequence
  LRRK2 RNA guide
ugacuuugccuucuguuuucu

SEQ ID NO: 67058 - RNA, 21 nt, Artificial Sequence
  LRRK2 RNA guide
uugccuucuguuuucuucaga

SEQ ID NO: 67059 - RNA, 21 nt, Artificial Sequence
  LRRK2 RNA guide
uuugccuucuguuuucuucag

SEQ ID NO: 67060 - RNA, 22 nt, Artificial Sequence
  LRRK2 RNA guide
aaaacagaaggcaaagucagga

SEQ ID NO: 67061 - RNA, 22 nt, Artificial Sequence
  LRRK2 RNA guide
aaacagaaggcaaagucaggag

SEQ ID NO: 67062 - RNA, 22 nt, Artificial Sequence
  LRRK2 RNA guide
aacagaaggcaaagucaggagc

SEQ ID NO: 67063 - RNA, 22 nt, Artificial Sequence
  LRRK2 RNA guide
aagaaaacagaaggcaaaguca

SEQ ID NO: 67064 - RNA, 22 nt, Artificial Sequence
  LRRK2 RNA guide
aagcuccugacuuugccuucug

SEQ ID NO: 67065 - RNA, 22 nt, Artificial Sequence
  LRRK2 RNA guide
aaggcaaagucaggagcuugcu

SEQ ID NO: 67066 - RNA, 22 nt, Artificial Sequence
  LRRK2 RNA guide
acagaaggcaaagucaggagcu

SEQ ID NO: 67067 - RNA, 22 nt, Artificial Sequence
  LRRK2 RNA guide
acucugaagaaaacagaaggca

SEQ ID NO: 67068 - RNA, 22 nt, Artificial Sequence
  LRRK2 RNA guide
acuuugccuucuguuuucuuca

SEQ ID NO: 67069 - RNA, 22 nt, Artificial Sequence
  LRRK2 RNA guide
agaaaacagaaggcaaagucag

SEQ ID NO: 67070 - RNA, 22 nt, Artificial Sequence
  LRRK2 RNA guide
agaaggcaaagucaggagcuug

SEQ ID NO: 67071 - RNA, 22 nt, Artificial Sequence
  LRRK2 RNA guide
agcaagcuccugacuuugccuu

SEQ ID NO: 67072 - RNA, 22 nt, Artificial Sequence
  LRRK2 RNA guide
agccuagcaagcuccugacuuu

SEQ ID NO: 67073 - RNA, 22 nt, Artificial Sequence
  LRRK2 RNA guide
agcuccugacuuugccuucugu

SEQ ID NO: 67074 - RNA, 22 nt, Artificial Sequence
  LRRK2 RNA guide
aggcaaagucaggagcuugcua

SEQ ID NO: 67075 - RNA, 22 nt, Artificial Sequence
  LRRK2 RNA guide
caaagucaggagcuugcuaggc

SEQ ID NO: 67076 - RNA, 22 nt, Artificial Sequence
  LRRK2 RNA guide
caagcuccugacuuugccuucu

SEQ ID NO: 67077 - RNA, 22 nt, Artificial Sequence
  LRRK2 RNA guide
cagaaggcaaagucaggagcuu

SEQ ID NO: 67078 - RNA, 22 nt, Artificial Sequence
  LRRK2 RNA guide
ccuagcaagcuccugacuuugc

SEQ ID NO: 67079 - RNA, 22 nt, Artificial Sequence
  LRRK2 RNA guide
ccugacuuugccuucuguuuuc

SEQ ID NO: 67080 - RNA, 22 nt, Artificial Sequence
  LRRK2 RNA guide
cuagcaagcuccugacuuugcc

SEQ ID NO: 67081 - RNA, 22 nt, Artificial Sequence
  LRRK2 RNA guide
cuccugacuuugccuucuguuu

SEQ ID NO: 67082 - RNA, 22 nt, Artificial Sequence
  LRRK2 RNA guide
cucugaagaaaacagaaggcaa

SEQ ID NO: 67083 - RNA, 22 nt, Artificial Sequence
  LRRK2 RNA guide
cugaagaaaacagaaggcaaag

SEQ ID NO: 67084 - RNA, 22 nt, Artificial Sequence
  LRRK2 RNA guide
cugacuuugccuucuguuuucu

SEQ ID NO: 67085 - RNA, 22 nt, Artificial Sequence
  LRRK2 RNA guide
cuuugccuucuguuuucuucag

SEQ ID NO: 67086 - RNA, 22 nt, Artificial Sequence
  LRRK2 RNA guide
gaaaacagaaggcaaagucagg

SEQ ID NO: 67087 - RNA, 22 nt, Artificial Sequence
  LRRK2 RNA guide
gaagaaaacagaaggcaaaguc

SEQ ID NO: 67088 - RNA, 22 nt, Artificial Sequence
  LRRK2 RNA guide
gaaggcaaagucaggagcuugc

SEQ ID NO: 67089 - RNA, 22 nt, Artificial Sequence
  LRRK2 RNA guide
gacuuugccuucuguuuucuuc

SEQ ID NO: 67090 - RNA, 22 nt, Artificial Sequence
  LRRK2 RNA guide
gcaaagucaggagcuugcuagg

SEQ ID NO: 67091 - RNA, 22 nt, Artificial Sequence
  LRRK2 RNA guide
gcaagcuccugacuuugccuuc

SEQ ID NO: 67092 - RNA, 22 nt, Artificial Sequence
  LRRK2 RNA guide
gccuagcaagcuccugacuuug

SEQ ID NO: 67093 - RNA, 22 nt, Artificial Sequence
  LRRK2 RNA guide
gcuccugacuuugccuucuguu

SEQ ID NO: 67094 - RNA, 22 nt, Artificial Sequence
  LRRK2 RNA guide
ggcaaagucaggagcuugcuag

SEQ ID NO: 67095 - RNA, 22 nt, Artificial Sequence
  LRRK2 RNA guide
uagcaagcuccugacuuugccu

SEQ ID NO: 67096 - RNA, 22 nt, Artificial Sequence
  LRRK2 RNA guide
uccugacuuugccuucuguuuu

SEQ ID NO: 67097 - RNA, 22 nt, Artificial Sequence
  LRRK2 RNA guide
ucugaagaaaacagaaggcaaa

SEQ ID NO: 67098 - RNA, 22 nt, Artificial Sequence
  LRRK2 RNA guide
ugaagaaaacagaaggcaaagu

SEQ ID NO: 67099 - RNA, 22 nt, Artificial Sequence
  LRRK2 RNA guide
ugacuuugccuucuguuuucuu

SEQ ID NO: 67100 - RNA, 22 nt, Artificial Sequence
  LRRK2 RNA guide
uugccuucuguuuucuucagag

SEQ ID NO: 67101 - RNA, 22 nt, Artificial Sequence
  LRRK2 RNA guide
uuugccuucuguuuucuucaga

SEQ ID NO: 67102 - RNA, 20 nt, Artificial Sequence
  LRRK2 RNA guide
aaccuucaaucaaauuagca

SEQ ID NO: 67103 - RNA, 20 nt, Artificial Sequence
  LRRK2 RNA guide
aagauuucuaaccuucaauc

SEQ ID NO: 67104 - RNA, 20 nt, Artificial Sequence
  LRRK2 RNA guide
accuucaaucaaauuagcaa

SEQ ID NO: 67105 - RNA, 20 nt, Artificial Sequence
  LRRK2 RNA guide
agauuucuaaccuucaauca

SEQ ID NO: 67106 - RNA, 20 nt, Artificial Sequence
  LRRK2 RNA guide
aucucacauugcuaauuuga

SEQ ID NO: 67107 - RNA, 20 nt, Artificial Sequence
  LRRK2 RNA guide
auugcuaauuugauugaagg

SEQ ID NO: 67108 - RNA, 20 nt, Artificial Sequence
  LRRK2 RNA guide
cacauugcuaauuugauuga

SEQ ID NO: 67109 - RNA, 20 nt, Artificial Sequence
  LRRK2 RNA guide
cauugcuaauuugauugaag

SEQ ID NO: 67110 - RNA, 20 nt, Artificial Sequence
  LRRK2 RNA guide
ccuucaaucaaauuagcaau

SEQ ID NO: 67111 - RNA, 20 nt, Artificial Sequence
  LRRK2 RNA guide
cuaaccuucaaucaaauuag

SEQ ID NO: 67112 - RNA, 20 nt, Artificial Sequence
  LRRK2 RNA guide
cuaauuugauugaagguuag

SEQ ID NO: 67113 - RNA, 20 nt, Artificial Sequence
  LRRK2 RNA guide
cucacauugcuaauuugauu

SEQ ID NO: 67114 - RNA, 20 nt, Artificial Sequence
  LRRK2 RNA guide
cuucaaucaaauuagcaaug

SEQ ID NO: 67115 - RNA, 20 nt, Artificial Sequence
  LRRK2 RNA guide
gaagguuagaaaucuuaaac

SEQ ID NO: 67116 - RNA, 20 nt, Artificial Sequence
  LRRK2 RNA guide
gauugaagguuagaaaucuu

SEQ ID NO: 67117 - RNA, 20 nt, Artificial Sequence
  LRRK2 RNA guide
gauuucuaaccuucaaucaa

SEQ ID NO: 67118 - RNA, 20 nt, Artificial Sequence
  LRRK2 RNA guide
gcuaauuugauugaagguua

SEQ ID NO: 67119 - RNA, 20 nt, Artificial Sequence
  LRRK2 RNA guide
guuuaagauuucuaaccuuc

SEQ ID NO: 67120 - RNA, 20 nt, Artificial Sequence
  LRRK2 RNA guide
uaaccuucaaucaaauuagc

SEQ ID NO: 67121 - RNA, 20 nt, Artificial Sequence
  LRRK2 RNA guide
ucacauugcuaauuugauug

SEQ ID NO: 67122 - RNA, 20 nt, Artificial Sequence
  LRRK2 RNA guide
ucucacauugcuaauuugau

SEQ ID NO: 67123 - RNA, 20 nt, Artificial Sequence
  LRRK2 RNA guide
ugauugaagguuagaaaucu

SEQ ID NO: 67124 - RNA, 20 nt, Artificial Sequence
  LRRK2 RNA guide
ugcuaauuugauugaagguu

SEQ ID NO: 67125 - RNA, 20 nt, Artificial Sequence
  LRRK2 RNA guide
uugauugaagguuagaaauc

SEQ ID NO: 67126 - RNA, 20 nt, Artificial Sequence
  LRRK2 RNA guide
uugcuaauuugauugaaggu

SEQ ID NO: 67127 - RNA, 21 nt, Artificial Sequence
  LRRK2 RNA guide
cauugcuaauuugauugaagg

SEQ ID NO: 67128 - RNA, 21 nt, Artificial Sequence
  LRRK2 RNA guide
ccuucaaucaaauuagcaaug

SEQ ID NO: 67129 - RNA, 21 nt, Artificial Sequence
  LRRK2 RNA guide
cuaaccuucaaucaaauuagc

SEQ ID NO: 67130 - RNA, 21 nt, Artificial Sequence
  LRRK2 RNA guide
cucacauugcuaauuugauug

SEQ ID NO: 67131 - RNA, 21 nt, Artificial Sequence
  LRRK2 RNA guide
gaucucacauugcuaauuuga

SEQ ID NO: 67132 - RNA, 21 nt, Artificial Sequence
  LRRK2 RNA guide
gcuaauuugauugaagguuag

SEQ ID NO: 67133 - RNA, 22 nt, Artificial Sequence
  LRRK2 RNA guide
acauugcuaauuugauugaagg

SEQ ID NO: 67134 - RNA, 22 nt, Artificial Sequence
  LRRK2 RNA guide
accuucaaucaaauuagcaaug

SEQ ID NO: 67135 - RNA, 22 nt, Artificial Sequence
  LRRK2 RNA guide
cacauugcuaauuugauugaag

SEQ ID NO: 67136 - RNA, 22 nt, Artificial Sequence
  LRRK2 RNA guide
cauugcuaauuugauugaaggu

SEQ ID NO: 67137 - RNA, 22 nt, Artificial Sequence
  LRRK2 RNA guide
ccuucaaucaaauuagcaaugu

SEQ ID NO: 67138 - RNA, 22 nt, Artificial Sequence
  LRRK2 RNA guide
cuaaccuucaaucaaauuagca

SEQ ID NO: 67139 - RNA, 22 nt, Artificial Sequence
  LRRK2 RNA guide
cucacauugcuaauuugauuga

SEQ ID NO: 67140 - RNA, 22 nt, Artificial Sequence
  LRRK2 RNA guide
cuucaaucaaauuagcaaugug

SEQ ID NO: 67141 - RNA, 22 nt, Artificial Sequence
  LRRK2 RNA guide
gaucucacauugcuaauuugau

SEQ ID NO: 67142 - RNA, 22 nt, Artificial Sequence
  LRRK2 RNA guide
gcuaauuugauugaagguuaga

SEQ ID NO: 67143 - RNA, 22 nt, Artificial Sequence
  LRRK2 RNA guide
ucuaaccuucaaucaaauuagc

SEQ ID NO: 67144 - RNA, 22 nt, Artificial Sequence
  LRRK2 RNA guide
ucucacauugcuaauuugauug

SEQ ID NO: 67145 - RNA, 22 nt, Artificial Sequence
  LRRK2 RNA guide
ugaucucacauugcuaauuuga

SEQ ID NO: 67146 - RNA, 22 nt, Artificial Sequence
  LRRK2 RNA guide
ugcuaauuugauugaagguuag

SEQ ID NO: 67147 - RNA, 20 nt, Artificial Sequence
  LRRK2 RNA guide
cuaacuucaaucaaauuagc

SEQ ID NO: 67148 - RNA, 20 nt, Artificial Sequence
  LRRK2 RNA guide
gcuaauuugauugaaguuag

SEQ ID NO: 67149 - RNA, 20 nt, Artificial Sequence
  LRRK2 RNA guide
acauaacaauagagaaucca

SEQ ID NO: 67150 - RNA, 20 nt, Artificial Sequence
  LRRK2 RNA guide
agucaaauggauucucuauu

SEQ ID NO: 67151 - RNA, 20 nt, Artificial Sequence
  LRRK2 RNA guide
auggauucucuauuguuaug

SEQ ID NO: 67152 - RNA, 20 nt, Artificial Sequence
  LRRK2 RNA guide
caaauggauucucuauuguu

SEQ ID NO: 67153 - RNA, 20 nt, Artificial Sequence
  LRRK2 RNA guide
cauaacaauagagaauccau

SEQ ID NO: 67154 - RNA, 20 nt, Artificial Sequence
  LRRK2 RNA guide
ggauucucuauuguuaugua

SEQ ID NO: 67155 - RNA, 20 nt, Artificial Sequence
  LRRK2 RNA guide
gucaaauggauucucuauug

SEQ ID NO: 67156 - RNA, 20 nt, Artificial Sequence
  LRRK2 RNA guide
uacauaacaauagagaaucc

SEQ ID NO: 67157 - RNA, 20 nt, Artificial Sequence
  LRRK2 RNA guide
ucaaauggauucucuauugu

SEQ ID NO: 67158 - RNA, 20 nt, Artificial Sequence
  LRRK2 RNA guide
uggauucucuauuguuaugu

SEQ ID NO: 67159 - RNA, 21 nt, Artificial Sequence
  LRRK2 RNA guide
agucaaauggauucucuauug

SEQ ID NO: 67160 - RNA, 21 nt, Artificial Sequence
  LRRK2 RNA guide
gucaaauggauucucuauugu

SEQ ID NO: 67161 - RNA, 22 nt, Artificial Sequence
  LRRK2 RNA guide
aagucaaauggauucucuauug

SEQ ID NO: 67162 - RNA, 22 nt, Artificial Sequence
  LRRK2 RNA guide
agucaaauggauucucuauugu

SEQ ID NO: 67163 - RNA, 22 nt, Artificial Sequence
  LRRK2 RNA guide
gucaaauggauucucuauuguu

SEQ ID NO: 67164 - RNA, 20 nt, Artificial Sequence
  LRRK2 RNA guide
acuuaacaauagagaaucca

SEQ ID NO: 67165 - RNA, 20 nt, Artificial Sequence
  LRRK2 RNA guide
auggauucucuauuguuaag

SEQ ID NO: 67166 - RNA, 20 nt, Artificial Sequence
  LRRK2 RNA guide
cuuaacaauagagaauccau

SEQ ID NO: 67167 - RNA, 20 nt, Artificial Sequence
  LRRK2 RNA guide
ggauucucuauuguuaagua

SEQ ID NO: 67168 - RNA, 20 nt, Artificial Sequence
  LRRK2 RNA guide
uacuuaacaauagagaaucc

SEQ ID NO: 67169 - RNA, 20 nt, Artificial Sequence
  LRRK2 RNA guide
uggauucucuauuguuaagu

SEQ ID NO: 67170 - RNA, 20 nt, Artificial Sequence
  LRRK2 RNA guide
aaagagggcgaggaaacuaa

SEQ ID NO: 67171 - RNA, 20 nt, Artificial Sequence
  LRRK2 RNA guide
aagagggcgaggaaacuaac

SEQ ID NO: 67172 - RNA, 20 nt, Artificial Sequence
  LRRK2 RNA guide
aaucaaagagggcgaggaaa

SEQ ID NO: 67173 - RNA, 20 nt, Artificial Sequence
  LRRK2 RNA guide
aaucuaugaguuaguuuccu

SEQ ID NO: 67174 - RNA, 20 nt, Artificial Sequence
  LRRK2 RNA guide
agagggcgaggaaacuaacu

SEQ ID NO: 67175 - RNA, 20 nt, Artificial Sequence
  LRRK2 RNA guide
agaguaaucaaagagggcga

SEQ ID NO: 67176 - RNA, 20 nt, Artificial Sequence
  LRRK2 RNA guide
agggcgaggaaacuaacuca

SEQ ID NO: 67177 - RNA, 20 nt, Artificial Sequence
  LRRK2 RNA guide
aguaaucaaagagggcgagg

SEQ ID NO: 67178 - RNA, 20 nt, Artificial Sequence
  LRRK2 RNA guide
aguuaguuuccucgcccucu

SEQ ID NO: 67179 - RNA, 20 nt, Artificial Sequence
  LRRK2 RNA guide
aguuuccucgcccucuuuga

SEQ ID NO: 67180 - RNA, 20 nt, Artificial Sequence
  LRRK2 RNA guide
aucaaagagggcgaggaaac

SEQ ID NO: 67181 - RNA, 20 nt, Artificial Sequence
  LRRK2 RNA guide
aucuaugaguuaguuuccuc

SEQ ID NO: 67182 - RNA, 20 nt, Artificial Sequence
  LRRK2 RNA guide
augaguuaguuuccucgccc

SEQ ID NO: 67183 - RNA, 20 nt, Artificial Sequence
  LRRK2 RNA guide
auugagaguaaucaaagagg

SEQ ID NO: 67184 - RNA, 20 nt, Artificial Sequence
  LRRK2 RNA guide
caaagagggcgaggaaacua

SEQ ID NO: 67185 - RNA, 20 nt, Artificial Sequence
  LRRK2 RNA guide
ccucgcccucuuugauuacu

SEQ ID NO: 67186 - RNA, 20 nt, Artificial Sequence
  LRRK2 RNA guide
cgaggaaacuaacucauaga

SEQ ID NO: 67187 - RNA, 20 nt, Artificial Sequence
  LRRK2 RNA guide
cuaugaguuaguuuccucgc

SEQ ID NO: 67188 - RNA, 20 nt, Artificial Sequence
  LRRK2 RNA guide
cucgcccucuuugauuacuc

SEQ ID NO: 67189 - RNA, 20 nt, Artificial Sequence
  LRRK2 RNA guide
gagaguaaucaaagagggcg

SEQ ID NO: 67190 - RNA, 20 nt, Artificial Sequence
  LRRK2 RNA guide
gaguaaucaaagagggcgag

SEQ ID NO: 67191 - RNA, 20 nt, Artificial Sequence
  LRRK2 RNA guide
gaguuaguuuccucgcccuc

SEQ ID NO: 67192 - RNA, 20 nt, Artificial Sequence
  LRRK2 RNA guide
gcgaggaaacuaacucauag

SEQ ID NO: 67193 - RNA, 20 nt, Artificial Sequence
  LRRK2 RNA guide
ggcgaggaaacuaacucaua

SEQ ID NO: 67194 - RNA, 20 nt, Artificial Sequence
  LRRK2 RNA guide
gggcgaggaaacuaacucau

SEQ ID NO: 67195 - RNA, 20 nt, Artificial Sequence
  LRRK2 RNA guide
guaaucaaagagggcgagga

SEQ ID NO: 67196 - RNA, 20 nt, Artificial Sequence
  LRRK2 RNA guide
guuaguuuccucgcccucuu

SEQ ID NO: 67197 - RNA, 20 nt, Artificial Sequence
  LRRK2 RNA guide
guuuccucgcccucuuugau

SEQ ID NO: 67198 - RNA, 20 nt, Artificial Sequence
  LRRK2 RNA guide
uaaucaaagagggcgaggaa

SEQ ID NO: 67199 - RNA, 20 nt, Artificial Sequence
  LRRK2 RNA guide
uaaucuaugaguuaguuucc

SEQ ID NO: 67200 - RNA, 20 nt, Artificial Sequence
  LRRK2 RNA guide
uaguuuccucgcccucuuug

SEQ ID NO: 67201 - RNA, 20 nt, Artificial Sequence
  LRRK2 RNA guide
uaugaguuaguuuccucgcc

SEQ ID NO: 67202 - RNA, 20 nt, Artificial Sequence
  LRRK2 RNA guide
uauugagaguaaucaaagag

SEQ ID NO: 67203 - RNA, 20 nt, Artificial Sequence
  LRRK2 RNA guide
ucaaagagggcgaggaaacu

SEQ ID NO: 67204 - RNA, 20 nt, Artificial Sequence
  LRRK2 RNA guide
uccucgcccucuuugauuac

SEQ ID NO: 67205 - RNA, 20 nt, Artificial Sequence
  LRRK2 RNA guide
ucgcccucuuugauuacucu

SEQ ID NO: 67206 - RNA, 20 nt, Artificial Sequence
  LRRK2 RNA guide
ucuaugaguuaguuuccucg

SEQ ID NO: 67207 - RNA, 20 nt, Artificial Sequence
  LRRK2 RNA guide
ugagaguaaucaaagagggc

SEQ ID NO: 67208 - RNA, 20 nt, Artificial Sequence
  LRRK2 RNA guide
ugaguuaguuuccucgcccu

SEQ ID NO: 67209 - RNA, 20 nt, Artificial Sequence
  LRRK2 RNA guide
uuaguuuccucgcccucuuu

SEQ ID NO: 67210 - RNA, 20 nt, Artificial Sequence
  LRRK2 RNA guide
uuccucgcccucuuugauua

SEQ ID NO: 67211 - RNA, 20 nt, Artificial Sequence
  LRRK2 RNA guide
uugagaguaaucaaagaggg

SEQ ID NO: 67212 - RNA, 20 nt, Artificial Sequence
  LRRK2 RNA guide
uuuccucgcccucuuugauu

SEQ ID NO: 67213 - RNA, 21 nt, Artificial Sequence
  LRRK2 RNA guide
aaagagggcgaggaaacuaac

SEQ ID NO: 67214 - RNA, 21 nt, Artificial Sequence
  LRRK2 RNA guide
aagagggcgaggaaacuaacu

SEQ ID NO: 67215 - RNA, 21 nt, Artificial Sequence
  LRRK2 RNA guide
aaucaaagagggcgaggaaac

SEQ ID NO: 67216 - RNA, 21 nt, Artificial Sequence
  LRRK2 RNA guide
aaucuaugaguuaguuuccuc

SEQ ID NO: 67217 - RNA, 21 nt, Artificial Sequence
  LRRK2 RNA guide
agagggcgaggaaacuaacuc

SEQ ID NO: 67218 - RNA, 21 nt, Artificial Sequence
  LRRK2 RNA guide
agaguaaucaaagagggcgag

SEQ ID NO: 67219 - RNA, 21 nt, Artificial Sequence
  LRRK2 RNA guide
agggcgaggaaacuaacucau

SEQ ID NO: 67220 - RNA, 21 nt, Artificial Sequence
  LRRK2 RNA guide
aguaaucaaagagggcgagga

SEQ ID NO: 67221 - RNA, 21 nt, Artificial Sequence
  LRRK2 RNA guide
aguuaguuuccucgcccucuu

SEQ ID NO: 67222 - RNA, 21 nt, Artificial Sequence
  LRRK2 RNA guide
aguuuccucgcccucuuugau

SEQ ID NO: 67223 - RNA, 21 nt, Artificial Sequence
  LRRK2 RNA guide
aucaaagagggcgaggaaacu

SEQ ID NO: 67224 - RNA, 21 nt, Artificial Sequence
  LRRK2 RNA guide
aucuaugaguuaguuuccucg

SEQ ID NO: 67225 - RNA, 21 nt, Artificial Sequence
  LRRK2 RNA guide
augaguuaguuuccucgcccu

SEQ ID NO: 67226 - RNA, 21 nt, Artificial Sequence
  LRRK2 RNA guide
auugagaguaaucaaagaggg

SEQ ID NO: 67227 - RNA, 21 nt, Artificial Sequence
  LRRK2 RNA guide
caaagagggcgaggaaacuaa

SEQ ID NO: 67228 - RNA, 21 nt, Artificial Sequence
  LRRK2 RNA guide
ccucgcccucuuugauuacuc

SEQ ID NO: 67229 - RNA, 21 nt, Artificial Sequence
  LRRK2 RNA guide
cgaggaaacuaacucauagau

SEQ ID NO: 67230 - RNA, 21 nt, Artificial Sequence
  LRRK2 RNA guide
cuaugaguuaguuuccucgcc

SEQ ID NO: 67231 - RNA, 21 nt, Artificial Sequence
  LRRK2 RNA guide
cucgcccucuuugauuacucu

SEQ ID NO: 67232 - RNA, 21 nt, Artificial Sequence
  LRRK2 RNA guide
gagaguaaucaaagagggcga

SEQ ID NO: 67233 - RNA, 21 nt, Artificial Sequence
  LRRK2 RNA guide
gagggcgaggaaacuaacuca

SEQ ID NO: 67234 - RNA, 21 nt, Artificial Sequence
  LRRK2 RNA guide
gaguaaucaaagagggcgagg

SEQ ID NO: 67235 - RNA, 21 nt, Artificial Sequence
  LRRK2 RNA guide
gaguuaguuuccucgcccucu

SEQ ID NO: 67236 - RNA, 21 nt, Artificial Sequence
  LRRK2 RNA guide
gcgaggaaacuaacucauaga

SEQ ID NO: 67237 - RNA, 21 nt, Artificial Sequence
  LRRK2 RNA guide
ggcgaggaaacuaacucauag

SEQ ID NO: 67238 - RNA, 21 nt, Artificial Sequence
  LRRK2 RNA guide
gggcgaggaaacuaacucaua

SEQ ID NO: 67239 - RNA, 21 nt, Artificial Sequence
  LRRK2 RNA guide
guaaucaaagagggcgaggaa

SEQ ID NO: 67240 - RNA, 21 nt, Artificial Sequence
  LRRK2 RNA guide
guuaguuuccucgcccucuuu

SEQ ID NO: 67241 - RNA, 21 nt, Artificial Sequence
  LRRK2 RNA guide
guuuccucgcccucuuugauu

SEQ ID NO: 67242 - RNA, 21 nt, Artificial Sequence
  LRRK2 RNA guide
uaaucaaagagggcgaggaaa

SEQ ID NO: 67243 - RNA, 21 nt, Artificial Sequence
  LRRK2 RNA guide
uaguuuccucgcccucuuuga

SEQ ID NO: 67244 - RNA, 21 nt, Artificial Sequence
  LRRK2 RNA guide
uaugaguuaguuuccucgccc

SEQ ID NO: 67245 - RNA, 21 nt, Artificial Sequence
  LRRK2 RNA guide
uauugagaguaaucaaagagg

SEQ ID NO: 67246 - RNA, 21 nt, Artificial Sequence
  LRRK2 RNA guide
ucaaagagggcgaggaaacua

SEQ ID NO: 67247 - RNA, 21 nt, Artificial Sequence
  LRRK2 RNA guide
uccucgcccucuuugauuacu

SEQ ID NO: 67248 - RNA, 21 nt, Artificial Sequence
  LRRK2 RNA guide
ucgcccucuuugauuacucuc

SEQ ID NO: 67249 - RNA, 21 nt, Artificial Sequence
  LRRK2 RNA guide
ucuaugaguuaguuuccucgc

SEQ ID NO: 67250 - RNA, 21 nt, Artificial Sequence
  LRRK2 RNA guide
ugagaguaaucaaagagggcg

SEQ ID NO: 67251 - RNA, 21 nt, Artificial Sequence
  LRRK2 RNA guide
ugaguuaguuuccucgcccuc

SEQ ID NO: 67252 - RNA, 21 nt, Artificial Sequence
  LRRK2 RNA guide
uuaguuuccucgcccucuuug

SEQ ID NO: 67253 - RNA, 21 nt, Artificial Sequence
  LRRK2 RNA guide
uuccucgcccucuuugauuac

SEQ ID NO: 67254 - RNA, 21 nt, Artificial Sequence
  LRRK2 RNA guide
uugagaguaaucaaagagggc

SEQ ID NO: 67255 - RNA, 21 nt, Artificial Sequence
  LRRK2 RNA guide
uuuccucgcccucuuugauua

SEQ ID NO: 67256 - RNA, 22 nt, Artificial Sequence
  LRRK2 RNA guide
aaagagggcgaggaaacuaacu

SEQ ID NO: 67257 - RNA, 22 nt, Artificial Sequence
  LRRK2 RNA guide
aagagggcgaggaaacuaacuc

SEQ ID NO: 67258 - RNA, 22 nt, Artificial Sequence
  LRRK2 RNA guide
aaucaaagagggcgaggaaacu

SEQ ID NO: 67259 - RNA, 22 nt, Artificial Sequence
  LRRK2 RNA guide
aaucuaugaguuaguuuccucg

SEQ ID NO: 67260 - RNA, 22 nt, Artificial Sequence
  LRRK2 RNA guide
agagggcgaggaaacuaacuca

SEQ ID NO: 67261 - RNA, 22 nt, Artificial Sequence
  LRRK2 RNA guide
agaguaaucaaagagggcgagg

SEQ ID NO: 67262 - RNA, 22 nt, Artificial Sequence
  LRRK2 RNA guide
agggcgaggaaacuaacucaua

SEQ ID NO: 67263 - RNA, 22 nt, Artificial Sequence
  LRRK2 RNA guide
aguaaucaaagagggcgaggaa

SEQ ID NO: 67264 - RNA, 22 nt, Artificial Sequence
  LRRK2 RNA guide
aguuaguuuccucgcccucuuu

SEQ ID NO: 67265 - RNA, 22 nt, Artificial Sequence
  LRRK2 RNA guide
aguuuccucgcccucuuugauu

SEQ ID NO: 67266 - RNA, 22 nt, Artificial Sequence
  LRRK2 RNA guide
auauugagaguaaucaaagagg

SEQ ID NO: 67267 - RNA, 22 nt, Artificial Sequence
  LRRK2 RNA guide
aucaaagagggcgaggaaacua

SEQ ID NO: 67268 - RNA, 22 nt, Artificial Sequence
  LRRK2 RNA guide
aucuaugaguuaguuuccucgc

SEQ ID NO: 67269 - RNA, 22 nt, Artificial Sequence
  LRRK2 RNA guide
augaguuaguuuccucgcccuc

SEQ ID NO: 67270 - RNA, 22 nt, Artificial Sequence
  LRRK2 RNA guide
auugagaguaaucaaagagggc

SEQ ID NO: 67271 - RNA, 22 nt, Artificial Sequence
  LRRK2 RNA guide
caaagagggcgaggaaacuaac

SEQ ID NO: 67272 - RNA, 22 nt, Artificial Sequence
  LRRK2 RNA guide
ccucgcccucuuugauuacucu

SEQ ID NO: 67273 - RNA, 22 nt, Artificial Sequence
  LRRK2 RNA guide
cgaggaaacuaacucauagauu

SEQ ID NO: 67274 - RNA, 22 nt, Artificial Sequence
  LRRK2 RNA guide
cuaugaguuaguuuccucgccc

SEQ ID NO: 67275 - RNA, 22 nt, Artificial Sequence
  LRRK2 RNA guide
cucgcccucuuugauuacucuc

SEQ ID NO: 67276 - RNA, 22 nt, Artificial Sequence
  LRRK2 RNA guide
gagaguaaucaaagagggcgag

SEQ ID NO: 67277 - RNA, 22 nt, Artificial Sequence
  LRRK2 RNA guide
gagggcgaggaaacuaacucau

SEQ ID NO: 67278 - RNA, 22 nt, Artificial Sequence
  LRRK2 RNA guide
gaguaaucaaagagggcgagga

SEQ ID NO: 67279 - RNA, 22 nt, Artificial Sequence
  LRRK2 RNA guide
gaguuaguuuccucgcccucuu

SEQ ID NO: 67280 - RNA, 22 nt, Artificial Sequence
  LRRK2 RNA guide
gcgaggaaacuaacucauagau

SEQ ID NO: 67281 - RNA, 22 nt, Artificial Sequence
  LRRK2 RNA guide
ggcgaggaaacuaacucauaga

SEQ ID NO: 67282 - RNA, 22 nt, Artificial Sequence
  LRRK2 RNA guide
gggcgaggaaacuaacucauag

SEQ ID NO: 67283 - RNA, 22 nt, Artificial Sequence
  LRRK2 RNA guide
guaaucaaagagggcgaggaaa

SEQ ID NO: 67284 - RNA, 22 nt, Artificial Sequence
  LRRK2 RNA guide
guuaguuuccucgcccucuuug

SEQ ID NO: 67285 - RNA, 22 nt, Artificial Sequence
  LRRK2 RNA guide
guuuccucgcccucuuugauua

SEQ ID NO: 67286 - RNA, 22 nt, Artificial Sequence
  LRRK2 RNA guide
uaaucaaagagggcgaggaaac

SEQ ID NO: 67287 - RNA, 22 nt, Artificial Sequence
  LRRK2 RNA guide
uaaucuaugaguuaguuuccuc

SEQ ID NO: 67288 - RNA, 22 nt, Artificial Sequence
  LRRK2 RNA guide
uaguuuccucgcccucuuugau

SEQ ID NO: 67289 - RNA, 22 nt, Artificial Sequence
  LRRK2 RNA guide
uaugaguuaguuuccucgcccu

SEQ ID NO: 67290 - RNA, 22 nt, Artificial Sequence
  LRRK2 RNA guide
uauugagaguaaucaaagaggg

SEQ ID NO: 67291 - RNA, 22 nt, Artificial Sequence
  LRRK2 RNA guide
ucaaagagggcgaggaaacuaa

SEQ ID NO: 67292 - RNA, 22 nt, Artificial Sequence
  LRRK2 RNA guide
uccucgcccucuuugauuacuc

SEQ ID NO: 67293 - RNA, 22 nt, Artificial Sequence
  LRRK2 RNA guide
ucgcccucuuugauuacucuca

SEQ ID NO: 67294 - RNA, 22 nt, Artificial Sequence
  LRRK2 RNA guide
ucuaugaguuaguuuccucgcc

SEQ ID NO: 67295 - RNA, 22 nt, Artificial Sequence
  LRRK2 RNA guide
ugagaguaaucaaagagggcga

SEQ ID NO: 67296 - RNA, 22 nt, Artificial Sequence
  LRRK2 RNA guide
ugaguuaguuuccucgcccucu

SEQ ID NO: 67297 - RNA, 22 nt, Artificial Sequence
  LRRK2 RNA guide
uuaguuuccucgcccucuuuga

SEQ ID NO: 67298 - RNA, 22 nt, Artificial Sequence
  LRRK2 RNA guide
uuccucgcccucuuugauuacu

SEQ ID NO: 67299 - RNA, 22 nt, Artificial Sequence
  LRRK2 RNA guide
uugagaguaaucaaagagggcg

SEQ ID NO: 67300 - RNA, 22 nt, Artificial Sequence
  LRRK2 RNA guide
uuuccucgcccucuuugauuac

SEQ ID NO: 67301 - RNA, 20 nt, Artificial Sequence
  LRRK2 RNA guide
aaagagggcaaggaaacuaa

SEQ ID NO: 67302 - RNA, 20 nt, Artificial Sequence
  LRRK2 RNA guide
aagagggcaaggaaacuaac

SEQ ID NO: 67303 - RNA, 20 nt, Artificial Sequence
  LRRK2 RNA guide
aaucaaagagggcaaggaaa

SEQ ID NO: 67304 - RNA, 20 nt, Artificial Sequence
  LRRK2 RNA guide
agagggcaaggaaacuaacu

SEQ ID NO: 67305 - RNA, 20 nt, Artificial Sequence
  LRRK2 RNA guide
agaguaaucaaagagggcaa

SEQ ID NO: 67306 - RNA, 20 nt, Artificial Sequence
  LRRK2 RNA guide
agggcaaggaaacuaacuca

SEQ ID NO: 67307 - RNA, 20 nt, Artificial Sequence
  LRRK2 RNA guide
aguaaucaaagagggcaagg

SEQ ID NO: 67308 - RNA, 20 nt, Artificial Sequence
  LRRK2 RNA guide
aguuaguuuccuugcccucu

SEQ ID NO: 67309 - RNA, 20 nt, Artificial Sequence
  LRRK2 RNA guide
aguuuccuugcccucuuuga

SEQ ID NO: 67310 - RNA, 20 nt, Artificial Sequence
  LRRK2 RNA guide
aucaaagagggcaaggaaac

SEQ ID NO: 67311 - RNA, 20 nt, Artificial Sequence
  LRRK2 RNA guide
aucuaugaguuaguuuccuu

SEQ ID NO: 67312 - RNA, 20 nt, Artificial Sequence
  LRRK2 RNA guide
augaguuaguuuccuugccc

SEQ ID NO: 67313 - RNA, 20 nt, Artificial Sequence
  LRRK2 RNA guide
caaagagggcaaggaaacua

SEQ ID NO: 67314 - RNA, 20 nt, Artificial Sequence
  LRRK2 RNA guide
caaggaaacuaacucauaga

SEQ ID NO: 67315 - RNA, 20 nt, Artificial Sequence
  LRRK2 RNA guide
ccuugcccucuuugauuacu

SEQ ID NO: 67316 - RNA, 20 nt, Artificial Sequence
  LRRK2 RNA guide
cuaugaguuaguuuccuugc

SEQ ID NO: 67317 - RNA, 20 nt, Artificial Sequence
  LRRK2 RNA guide
cuugcccucuuugauuacuc

SEQ ID NO: 67318 - RNA, 20 nt, Artificial Sequence
  LRRK2 RNA guide
gagaguaaucaaagagggca

SEQ ID NO: 67319 - RNA, 20 nt, Artificial Sequence
  LRRK2 RNA guide
gagggcaaggaaacuaacuc

SEQ ID NO: 67320 - RNA, 20 nt, Artificial Sequence
  LRRK2 RNA guide
gaguaaucaaagagggcaag

SEQ ID NO: 67321 - RNA, 20 nt, Artificial Sequence
  LRRK2 RNA guide
gaguuaguuuccuugcccuc

SEQ ID NO: 67322 - RNA, 20 nt, Artificial Sequence
  LRRK2 RNA guide
gcaaggaaacuaacucauag

SEQ ID NO: 67323 - RNA, 20 nt, Artificial Sequence
  LRRK2 RNA guide
ggcaaggaaacuaacucaua

SEQ ID NO: 67324 - RNA, 20 nt, Artificial Sequence
  LRRK2 RNA guide
gggcaaggaaacuaacucau

SEQ ID NO: 67325 - RNA, 20 nt, Artificial Sequence
  LRRK2 RNA guide
guaaucaaagagggcaagga

SEQ ID NO: 67326 - RNA, 20 nt, Artificial Sequence
  LRRK2 RNA guide
guuaguuuccuugcccucuu

SEQ ID NO: 67327 - RNA, 20 nt, Artificial Sequence
  LRRK2 RNA guide
guuuccuugcccucuuugau

SEQ ID NO: 67328 - RNA, 20 nt, Artificial Sequence
  LRRK2 RNA guide
uaaucaaagagggcaaggaa

SEQ ID NO: 67329 - RNA, 20 nt, Artificial Sequence
  LRRK2 RNA guide
uaguuuccuugcccucuuug

SEQ ID NO: 67330 - RNA, 20 nt, Artificial Sequence
  LRRK2 RNA guide
uaugaguuaguuuccuugcc

SEQ ID NO: 67331 - RNA, 20 nt, Artificial Sequence
  LRRK2 RNA guide
ucaaagagggcaaggaaacu

SEQ ID NO: 67332 - RNA, 20 nt, Artificial Sequence
  LRRK2 RNA guide
uccuugcccucuuugauuac

SEQ ID NO: 67333 - RNA, 20 nt, Artificial Sequence
  LRRK2 RNA guide
ucuaugaguuaguuuccuug

SEQ ID NO: 67334 - RNA, 20 nt, Artificial Sequence
  LRRK2 RNA guide
ugaguuaguuuccuugcccu

SEQ ID NO: 67335 - RNA, 20 nt, Artificial Sequence
  LRRK2 RNA guide
uuaguuuccuugcccucuuu

SEQ ID NO: 67336 - RNA, 20 nt, Artificial Sequence
  LRRK2 RNA guide
uuccuugcccucuuugauua

SEQ ID NO: 67337 - RNA, 20 nt, Artificial Sequence
  LRRK2 RNA guide
uugcccucuuugauuacucu

SEQ ID NO: 67338 - RNA, 20 nt, Artificial Sequence
  LRRK2 RNA guide
uuuccuugcccucuuugauu

SEQ ID NO: 67339 - RNA, 21 nt, Artificial Sequence
  LRRK2 RNA guide
aaagagggcaaggaaacuaac

SEQ ID NO: 67340 - RNA, 21 nt, Artificial Sequence
  LRRK2 RNA guide
aagagggcaaggaaacuaacu

SEQ ID NO: 67341 - RNA, 21 nt, Artificial Sequence
  LRRK2 RNA guide
aaucaaagagggcaaggaaac

SEQ ID NO: 67342 - RNA, 21 nt, Artificial Sequence
  LRRK2 RNA guide
agagggcaaggaaacuaacuc

SEQ ID NO: 67343 - RNA, 21 nt, Artificial Sequence
  LRRK2 RNA guide
agaguaaucaaagagggcaag

SEQ ID NO: 67344 - RNA, 21 nt, Artificial Sequence
  LRRK2 RNA guide
agggcaaggaaacuaacucau

SEQ ID NO: 67345 - RNA, 21 nt, Artificial Sequence
  LRRK2 RNA guide
aguaaucaaagagggcaagga

SEQ ID NO: 67346 - RNA, 21 nt, Artificial Sequence
  LRRK2 RNA guide
aguuaguuuccuugcccucuu

SEQ ID NO: 67347 - RNA, 21 nt, Artificial Sequence
  LRRK2 RNA guide
aguuuccuugcccucuuugau

SEQ ID NO: 67348 - RNA, 21 nt, Artificial Sequence
  LRRK2 RNA guide
aucaaagagggcaaggaaacu

SEQ ID NO: 67349 - RNA, 21 nt, Artificial Sequence
  LRRK2 RNA guide
aucuaugaguuaguuuccuug

SEQ ID NO: 67350 - RNA, 21 nt, Artificial Sequence
  LRRK2 RNA guide
augaguuaguuuccuugcccu

SEQ ID NO: 67351 - RNA, 21 nt, Artificial Sequence
  LRRK2 RNA guide
caaagagggcaaggaaacuaa

SEQ ID NO: 67352 - RNA, 21 nt, Artificial Sequence
  LRRK2 RNA guide
caaggaaacuaacucauagau

SEQ ID NO: 67353 - RNA, 21 nt, Artificial Sequence
  LRRK2 RNA guide
ccuugcccucuuugauuacuc

SEQ ID NO: 67354 - RNA, 21 nt, Artificial Sequence
  LRRK2 RNA guide
cuaugaguuaguuuccuugcc

SEQ ID NO: 67355 - RNA, 21 nt, Artificial Sequence
  LRRK2 RNA guide
cuugcccucuuugauuacucu

SEQ ID NO: 67356 - RNA, 21 nt, Artificial Sequence
  LRRK2 RNA guide
gagaguaaucaaagagggcaa

SEQ ID NO: 67357 - RNA, 21 nt, Artificial Sequence
  LRRK2 RNA guide
gagggcaaggaaacuaacuca

SEQ ID NO: 67358 - RNA, 21 nt, Artificial Sequence
  LRRK2 RNA guide
gaguaaucaaagagggcaagg

SEQ ID NO: 67359 - RNA, 21 nt, Artificial Sequence
  LRRK2 RNA guide
gaguuaguuuccuugcccucu

SEQ ID NO: 67360 - RNA, 21 nt, Artificial Sequence
  LRRK2 RNA guide
gcaaggaaacuaacucauaga

SEQ ID NO: 67361 - RNA, 21 nt, Artificial Sequence
  LRRK2 RNA guide
ggcaaggaaacuaacucauag

SEQ ID NO: 67362 - RNA, 21 nt, Artificial Sequence
  LRRK2 RNA guide
gggcaaggaaacuaacucaua

SEQ ID NO: 67363 - RNA, 21 nt, Artificial Sequence
  LRRK2 RNA guide
guaaucaaagagggcaaggaa

SEQ ID NO: 67364 - RNA, 21 nt, Artificial Sequence
  LRRK2 RNA guide
guuaguuuccuugcccucuuu

SEQ ID NO: 67365 - RNA, 21 nt, Artificial Sequence
  LRRK2 RNA guide
guuuccuugcccucuuugauu

SEQ ID NO: 67366 - RNA, 21 nt, Artificial Sequence
  LRRK2 RNA guide
uaaucaaagagggcaaggaaa

SEQ ID NO: 67367 - RNA, 21 nt, Artificial Sequence
  LRRK2 RNA guide
uaguuuccuugcccucuuuga

SEQ ID NO: 67368 - RNA, 21 nt, Artificial Sequence
  LRRK2 RNA guide
uaugaguuaguuuccuugccc

SEQ ID NO: 67369 - RNA, 21 nt, Artificial Sequence
  LRRK2 RNA guide
ucaaagagggcaaggaaacua

SEQ ID NO: 67370 - RNA, 21 nt, Artificial Sequence
  LRRK2 RNA guide
uccuugcccucuuugauuacu

SEQ ID NO: 67371 - RNA, 21 nt, Artificial Sequence
  LRRK2 RNA guide
ucuaugaguuaguuuccuugc

SEQ ID NO: 67372 - RNA, 21 nt, Artificial Sequence
  LRRK2 RNA guide
ugagaguaaucaaagagggca

SEQ ID NO: 67373 - RNA, 21 nt, Artificial Sequence
  LRRK2 RNA guide
ugaguuaguuuccuugcccuc

SEQ ID NO: 67374 - RNA, 21 nt, Artificial Sequence
  LRRK2 RNA guide
uuaguuuccuugcccucuuug

SEQ ID NO: 67375 - RNA, 21 nt, Artificial Sequence
  LRRK2 RNA guide
uuccuugcccucuuugauuac

SEQ ID NO: 67376 - RNA, 21 nt, Artificial Sequence
  LRRK2 RNA guide
uugcccucuuugauuacucuc

SEQ ID NO: 67377 - RNA, 21 nt, Artificial Sequence
  LRRK2 RNA guide
uuuccuugcccucuuugauua

SEQ ID NO: 67378 - RNA, 22 nt, Artificial Sequence
  LRRK2 RNA guide
aaagagggcaaggaaacuaacu

SEQ ID NO: 67379 - RNA, 22 nt, Artificial Sequence
  LRRK2 RNA guide
aagagggcaaggaaacuaacuc

SEQ ID NO: 67380 - RNA, 22 nt, Artificial Sequence
  LRRK2 RNA guide
aaucaaagagggcaaggaaacu

SEQ ID NO: 67381 - RNA, 22 nt, Artificial Sequence
  LRRK2 RNA guide
aaucuaugaguuaguuuccuug

SEQ ID NO: 67382 - RNA, 22 nt, Artificial Sequence
  LRRK2 RNA guide
agagggcaaggaaacuaacuca

SEQ ID NO: 67383 - RNA, 22 nt, Artificial Sequence
  LRRK2 RNA guide
agaguaaucaaagagggcaagg

SEQ ID NO: 67384 - RNA, 22 nt, Artificial Sequence
  LRRK2 RNA guide
agggcaaggaaacuaacucaua

SEQ ID NO: 67385 - RNA, 22 nt, Artificial Sequence
  LRRK2 RNA guide
aguaaucaaagagggcaaggaa

SEQ ID NO: 67386 - RNA, 22 nt, Artificial Sequence
  LRRK2 RNA guide
aguuaguuuccuugcccucuuu

SEQ ID NO: 67387 - RNA, 22 nt, Artificial Sequence
  LRRK2 RNA guide
aguuuccuugcccucuuugauu

SEQ ID NO: 67388 - RNA, 22 nt, Artificial Sequence
  LRRK2 RNA guide
aucaaagagggcaaggaaacua

SEQ ID NO: 67389 - RNA, 22 nt, Artificial Sequence
  LRRK2 RNA guide
aucuaugaguuaguuuccuugc

SEQ ID NO: 67390 - RNA, 22 nt, Artificial Sequence
  LRRK2 RNA guide
augaguuaguuuccuugcccuc

SEQ ID NO: 67391 - RNA, 22 nt, Artificial Sequence
  LRRK2 RNA guide
caaagagggcaaggaaacuaac

SEQ ID NO: 67392 - RNA, 22 nt, Artificial Sequence
  LRRK2 RNA guide
caaggaaacuaacucauagauu

SEQ ID NO: 67393 - RNA, 22 nt, Artificial Sequence
  LRRK2 RNA guide
ccuugcccucuuugauuacucu

SEQ ID NO: 67394 - RNA, 22 nt, Artificial Sequence
  LRRK2 RNA guide
cuaugaguuaguuuccuugccc

SEQ ID NO: 67395 - RNA, 22 nt, Artificial Sequence
  LRRK2 RNA guide
cuugcccucuuugauuacucuc

SEQ ID NO: 67396 - RNA, 22 nt, Artificial Sequence
  LRRK2 RNA guide
gagaguaaucaaagagggcaag

SEQ ID NO: 67397 - RNA, 22 nt, Artificial Sequence
  LRRK2 RNA guide
gagggcaaggaaacuaacucau

SEQ ID NO: 67398 - RNA, 22 nt, Artificial Sequence
  LRRK2 RNA guide
gaguaaucaaagagggcaagga

SEQ ID NO: 67399 - RNA, 22 nt, Artificial Sequence
  LRRK2 RNA guide
gaguuaguuuccuugcccucuu

SEQ ID NO: 67400 - RNA, 22 nt, Artificial Sequence
  LRRK2 RNA guide
gcaaggaaacuaacucauagau

SEQ ID NO: 67401 - RNA, 22 nt, Artificial Sequence
  LRRK2 RNA guide
ggcaaggaaacuaacucauaga

SEQ ID NO: 67402 - RNA, 22 nt, Artificial Sequence
  LRRK2 RNA guide
gggcaaggaaacuaacucauag

SEQ ID NO: 67403 - RNA, 22 nt, Artificial Sequence
  LRRK2 RNA guide
guaaucaaagagggcaaggaaa

SEQ ID NO: 67404 - RNA, 22 nt, Artificial Sequence
  LRRK2 RNA guide
guuaguuuccuugcccucuuug

SEQ ID NO: 67405 - RNA, 22 nt, Artificial Sequence
  LRRK2 RNA guide
guuuccuugcccucuuugauua

SEQ ID NO: 67406 - RNA, 22 nt, Artificial Sequence
  LRRK2 RNA guide
uaaucaaagagggcaaggaaac

SEQ ID NO: 67407 - RNA, 22 nt, Artificial Sequence
  LRRK2 RNA guide
uaguuuccuugcccucuuugau

SEQ ID NO: 67408 - RNA, 22 nt, Artificial Sequence
  LRRK2 RNA guide
uaugaguuaguuuccuugcccu

SEQ ID NO: 67409 - RNA, 22 nt, Artificial Sequence
  LRRK2 RNA guide
ucaaagagggcaaggaaacuaa

SEQ ID NO: 67410 - RNA, 22 nt, Artificial Sequence
  LRRK2 RNA guide
uccuugcccucuuugauuacuc

SEQ ID NO: 67411 - RNA, 22 nt, Artificial Sequence
  LRRK2 RNA guide
ucuaugaguuaguuuccuugcc

SEQ ID NO: 67412 - RNA, 22 nt, Artificial Sequence
  LRRK2 RNA guide
ugagaguaaucaaagagggcaa

SEQ ID NO: 67413 - RNA, 22 nt, Artificial Sequence
  LRRK2 RNA guide
ugaguuaguuuccuugcccucu

SEQ ID NO: 67414 - RNA, 22 nt, Artificial Sequence
  LRRK2 RNA guide
uuaguuuccuugcccucuuuga

SEQ ID NO: 67415 - RNA, 22 nt, Artificial Sequence
  LRRK2 RNA guide
uuccuugcccucuuugauuacu

SEQ ID NO: 67416 - RNA, 22 nt, Artificial Sequence
  LRRK2 RNA guide
uugagaguaaucaaagagggca

SEQ ID NO: 67417 - RNA, 22 nt, Artificial Sequence
  LRRK2 RNA guide
uugcccucuuugauuacucuca

SEQ ID NO: 67418 - RNA, 22 nt, Artificial Sequence
  LRRK2 RNA guide
uuuccuugcccucuuugauuac

SEQ ID NO: 67419 - RNA, 20 nt, Artificial Sequence
  LRRK2 RNA guide
aaauguuuucaguccuuaca

SEQ ID NO: 67420 - RNA, 20 nt, Artificial Sequence
  LRRK2 RNA guide
aacauguaaggacugaaaac

SEQ ID NO: 67421 - RNA, 20 nt, Artificial Sequence
  LRRK2 RNA guide
aaggacugaaaacauuuacc

SEQ ID NO: 67422 - RNA, 20 nt, Artificial Sequence
  LRRK2 RNA guide
aauguuuucaguccuuacau

SEQ ID NO: 67423 - RNA, 20 nt, Artificial Sequence
  LRRK2 RNA guide
acauguaaggacugaaaaca

SEQ ID NO: 67424 - RNA, 20 nt, Artificial Sequence
  LRRK2 RNA guide
acugaaaacauuuaccucac

SEQ ID NO: 67425 - RNA, 20 nt, Artificial Sequence
  LRRK2 RNA guide
aggacugaaaacauuuaccu

SEQ ID NO: 67426 - RNA, 20 nt, Artificial Sequence
  LRRK2 RNA guide
agguaaauguuuucaguccu

SEQ ID NO: 67427 - RNA, 20 nt, Artificial Sequence
  LRRK2 RNA guide
agguguuugugagguaaaug

SEQ ID NO: 67428 - RNA, 20 nt, Artificial Sequence
  LRRK2 RNA guide
auguaaggacugaaaacauu

SEQ ID NO: 67429 - RNA, 20 nt, Artificial Sequence
  LRRK2 RNA guide
auguuuucaguccuuacaug

SEQ ID NO: 67430 - RNA, 20 nt, Artificial Sequence
  LRRK2 RNA guide
cauguaaggacugaaaacau

SEQ ID NO: 67431 - RNA, 20 nt, Artificial Sequence
  LRRK2 RNA guide
cugaaaacauuuaccucaca

SEQ ID NO: 67432 - RNA, 20 nt, Artificial Sequence
  LRRK2 RNA guide
gacugaaaacauuuaccuca

SEQ ID NO: 67433 - RNA, 20 nt, Artificial Sequence
  LRRK2 RNA guide
gagguaaauguuuucagucc

SEQ ID NO: 67434 - RNA, 20 nt, Artificial Sequence
  LRRK2 RNA guide
ggacugaaaacauuuaccuc

SEQ ID NO: 67435 - RNA, 20 nt, Artificial Sequence
  LRRK2 RNA guide
gguaaauguuuucaguccuu

SEQ ID NO: 67436 - RNA, 20 nt, Artificial Sequence
  LRRK2 RNA guide
gguguuugugagguaaaugu

SEQ ID NO: 67437 - RNA, 20 nt, Artificial Sequence
  LRRK2 RNA guide
guaaauguuuucaguccuua

SEQ ID NO: 67438 - RNA, 20 nt, Artificial Sequence
  LRRK2 RNA guide
guaaggacugaaaacauuua

SEQ ID NO: 67439 - RNA, 20 nt, Artificial Sequence
  LRRK2 RNA guide
gugagguaaauguuuucagu

SEQ ID NO: 67440 - RNA, 20 nt, Artificial Sequence
  LRRK2 RNA guide
guguuugugagguaaauguu

SEQ ID NO: 67441 - RNA, 20 nt, Artificial Sequence
  LRRK2 RNA guide
guuugugagguaaauguuuu

SEQ ID NO: 67442 - RNA, 20 nt, Artificial Sequence
  LRRK2 RNA guide
guuuucaguccuuacauguu

SEQ ID NO: 67443 - RNA, 20 nt, Artificial Sequence
  LRRK2 RNA guide
uaaauguuuucaguccuuac

SEQ ID NO: 67444 - RNA, 20 nt, Artificial Sequence
  LRRK2 RNA guide
uaacauguaaggacugaaaa

SEQ ID NO: 67445 - RNA, 20 nt, Artificial Sequence
  LRRK2 RNA guide
uaaggacugaaaacauuuac

SEQ ID NO: 67446 - RNA, 20 nt, Artificial Sequence
  LRRK2 RNA guide
ucaguccuuacauguuaaaa

SEQ ID NO: 67447 - RNA, 20 nt, Artificial Sequence
  LRRK2 RNA guide
ugaaaacauuuaccucacaa

SEQ ID NO: 67448 - RNA, 20 nt, Artificial Sequence
  LRRK2 RNA guide
ugagguaaauguuuucaguc

SEQ ID NO: 67449 - RNA, 20 nt, Artificial Sequence
  LRRK2 RNA guide
uguaaggacugaaaacauuu

SEQ ID NO: 67450 - RNA, 20 nt, Artificial Sequence
  LRRK2 RNA guide
ugugagguaaauguuuucag

SEQ ID NO: 67451 - RNA, 20 nt, Artificial Sequence
  LRRK2 RNA guide
uguuugugagguaaauguuu

SEQ ID NO: 67452 - RNA, 20 nt, Artificial Sequence
  LRRK2 RNA guide
uguuuucaguccuuacaugu

SEQ ID NO: 67453 - RNA, 20 nt, Artificial Sequence
  LRRK2 RNA guide
uucaguccuuacauguuaaa

SEQ ID NO: 67454 - RNA, 20 nt, Artificial Sequence
  LRRK2 RNA guide
uugugagguaaauguuuuca

SEQ ID NO: 67455 - RNA, 20 nt, Artificial Sequence
  LRRK2 RNA guide
uuuaacauguaaggacugaa

SEQ ID NO: 67456 - RNA, 20 nt, Artificial Sequence
  LRRK2 RNA guide
uuucaguccuuacauguuaa

SEQ ID NO: 67457 - RNA, 20 nt, Artificial Sequence
  LRRK2 RNA guide
uuugugagguaaauguuuuc

SEQ ID NO: 67458 - RNA, 20 nt, Artificial Sequence
  LRRK2 RNA guide
uuuuaacauguaaggacuga

SEQ ID NO: 67459 - RNA, 20 nt, Artificial Sequence
  LRRK2 RNA guide
uuuucaguccuuacauguua

SEQ ID NO: 67460 - RNA, 20 nt, Artificial Sequence
  LRRK2 RNA guide
uuuuuaacauguaaggacug

SEQ ID NO: 67461 - RNA, 21 nt, Artificial Sequence
  LRRK2 RNA guide
aacauguaaggacugaaaaca

SEQ ID NO: 67462 - RNA, 21 nt, Artificial Sequence
  LRRK2 RNA guide
aaggacugaaaacauuuaccu

SEQ ID NO: 67463 - RNA, 21 nt, Artificial Sequence
  LRRK2 RNA guide
aagguguuugugagguaaaug

SEQ ID NO: 67464 - RNA, 21 nt, Artificial Sequence
  LRRK2 RNA guide
aauguuuucaguccuuacaug

SEQ ID NO: 67465 - RNA, 21 nt, Artificial Sequence
  LRRK2 RNA guide
acauguaaggacugaaaacau

SEQ ID NO: 67466 - RNA, 21 nt, Artificial Sequence
  LRRK2 RNA guide
acugaaaacauuuaccucaca

SEQ ID NO: 67467 - RNA, 21 nt, Artificial Sequence
  LRRK2 RNA guide
aggacugaaaacauuuaccuc

SEQ ID NO: 67468 - RNA, 21 nt, Artificial Sequence
  LRRK2 RNA guide
agguaaauguuuucaguccuu

SEQ ID NO: 67469 - RNA, 21 nt, Artificial Sequence
  LRRK2 RNA guide
agguguuugugagguaaaugu

SEQ ID NO: 67470 - RNA, 21 nt, Artificial Sequence
  LRRK2 RNA guide
auguuuucaguccuuacaugu

SEQ ID NO: 67471 - RNA, 21 nt, Artificial Sequence
  LRRK2 RNA guide
cauguaaggacugaaaacauu

SEQ ID NO: 67472 - RNA, 21 nt, Artificial Sequence
  LRRK2 RNA guide
cugaaaacauuuaccucacaa

SEQ ID NO: 67473 - RNA, 21 nt, Artificial Sequence
  LRRK2 RNA guide
gacugaaaacauuuaccucac

SEQ ID NO: 67474 - RNA, 21 nt, Artificial Sequence
  LRRK2 RNA guide
gagguaaauguuuucaguccu

SEQ ID NO: 67475 - RNA, 21 nt, Artificial Sequence
  LRRK2 RNA guide
ggacugaaaacauuuaccuca

SEQ ID NO: 67476 - RNA, 21 nt, Artificial Sequence
  LRRK2 RNA guide
gguaaauguuuucaguccuua

SEQ ID NO: 67477 - RNA, 21 nt, Artificial Sequence
  LRRK2 RNA guide
gguguuugugagguaaauguu

SEQ ID NO: 67478 - RNA, 21 nt, Artificial Sequence
  LRRK2 RNA guide
guaaauguuuucaguccuuac

SEQ ID NO: 67479 - RNA, 21 nt, Artificial Sequence
  LRRK2 RNA guide
guaaggacugaaaacauuuac

SEQ ID NO: 67480 - RNA, 21 nt, Artificial Sequence
  LRRK2 RNA guide
gugagguaaauguuuucaguc

SEQ ID NO: 67481 - RNA, 21 nt, Artificial Sequence
  LRRK2 RNA guide
guguuugugagguaaauguuu

SEQ ID NO: 67482 - RNA, 21 nt, Artificial Sequence
  LRRK2 RNA guide
guuugugagguaaauguuuuc

SEQ ID NO: 67483 - RNA, 21 nt, Artificial Sequence
  LRRK2 RNA guide
guuuucaguccuuacauguua

SEQ ID NO: 67484 - RNA, 21 nt, Artificial Sequence
  LRRK2 RNA guide
uaacauguaaggacugaaaac

SEQ ID NO: 67485 - RNA, 21 nt, Artificial Sequence
  LRRK2 RNA guide
uaaggacugaaaacauuuacc

SEQ ID NO: 67486 - RNA, 21 nt, Artificial Sequence
  LRRK2 RNA guide
ugagguaaauguuuucagucc

SEQ ID NO: 67487 - RNA, 21 nt, Artificial Sequence
  LRRK2 RNA guide
ugugagguaaauguuuucagu

SEQ ID NO: 67488 - RNA, 21 nt, Artificial Sequence
  LRRK2 RNA guide
uguuuucaguccuuacauguu

SEQ ID NO: 67489 - RNA, 21 nt, Artificial Sequence
  LRRK2 RNA guide
uugugagguaaauguuuucag

SEQ ID NO: 67490 - RNA, 22 nt, Artificial Sequence
  LRRK2 RNA guide
aaagguguuugugagguaaaug

SEQ ID NO: 67491 - RNA, 22 nt, Artificial Sequence
  LRRK2 RNA guide
aaauguuuucaguccuuacaug

SEQ ID NO: 67492 - RNA, 22 nt, Artificial Sequence
  LRRK2 RNA guide
aacauguaaggacugaaaacau

SEQ ID NO: 67493 - RNA, 22 nt, Artificial Sequence
  LRRK2 RNA guide
aaggacugaaaacauuuaccuc

SEQ ID NO: 67494 - RNA, 22 nt, Artificial Sequence
  LRRK2 RNA guide
aagguguuugugagguaaaugu

SEQ ID NO: 67495 - RNA, 22 nt, Artificial Sequence
  LRRK2 RNA guide
aauguuuucaguccuuacaugu

SEQ ID NO: 67496 - RNA, 22 nt, Artificial Sequence
  LRRK2 RNA guide
acauguaaggacugaaaacauu

SEQ ID NO: 67497 - RNA, 22 nt, Artificial Sequence
  LRRK2 RNA guide
acugaaaacauuuaccucacaa

SEQ ID NO: 67498 - RNA, 22 nt, Artificial Sequence
  LRRK2 RNA guide
aggacugaaaacauuuaccuca

SEQ ID NO: 67499 - RNA, 22 nt, Artificial Sequence
  LRRK2 RNA guide
agguaaauguuuucaguccuua

SEQ ID NO: 67500 - RNA, 22 nt, Artificial Sequence
  LRRK2 RNA guide
agguguuugugagguaaauguu

SEQ ID NO: 67501 - RNA, 22 nt, Artificial Sequence
  LRRK2 RNA guide
auguuuucaguccuuacauguu

SEQ ID NO: 67502 - RNA, 22 nt, Artificial Sequence
  LRRK2 RNA guide
cauguaaggacugaaaacauuu

SEQ ID NO: 67503 - RNA, 22 nt, Artificial Sequence
  LRRK2 RNA guide
cugaaaacauuuaccucacaaa

SEQ ID NO: 67504 - RNA, 22 nt, Artificial Sequence
  LRRK2 RNA guide
gacugaaaacauuuaccucaca

SEQ ID NO: 67505 - RNA, 22 nt, Artificial Sequence
  LRRK2 RNA guide
gagguaaauguuuucaguccuu

SEQ ID NO: 67506 - RNA, 22 nt, Artificial Sequence
  LRRK2 RNA guide
ggacugaaaacauuuaccucac

SEQ ID NO: 67507 - RNA, 22 nt, Artificial Sequence
  LRRK2 RNA guide
gguaaauguuuucaguccuuac

SEQ ID NO: 67508 - RNA, 22 nt, Artificial Sequence
  LRRK2 RNA guide
gguguuugugagguaaauguuu

SEQ ID NO: 67509 - RNA, 22 nt, Artificial Sequence
  LRRK2 RNA guide
guaaauguuuucaguccuuaca

SEQ ID NO: 67510 - RNA, 22 nt, Artificial Sequence
  LRRK2 RNA guide
guaaggacugaaaacauuuacc

SEQ ID NO: 67511 - RNA, 22 nt, Artificial Sequence
  LRRK2 RNA guide
gugagguaaauguuuucagucc

SEQ ID NO: 67512 - RNA, 22 nt, Artificial Sequence
  LRRK2 RNA guide
guguuugugagguaaauguuuu

SEQ ID NO: 67513 - RNA, 22 nt, Artificial Sequence
  LRRK2 RNA guide
guuugugagguaaauguuuuca

SEQ ID NO: 67514 - RNA, 22 nt, Artificial Sequence
  LRRK2 RNA guide
guuuucaguccuuacauguuaa

SEQ ID NO: 67515 - RNA, 22 nt, Artificial Sequence
  LRRK2 RNA guide
uaacauguaaggacugaaaaca

SEQ ID NO: 67516 - RNA, 22 nt, Artificial Sequence
  LRRK2 RNA guide
uaaggacugaaaacauuuaccu

SEQ ID NO: 67517 - RNA, 22 nt, Artificial Sequence
  LRRK2 RNA guide
ugaaaacauuuaccucacaaac

SEQ ID NO: 67518 - RNA, 22 nt, Artificial Sequence
  LRRK2 RNA guide
ugagguaaauguuuucaguccu

SEQ ID NO: 67519 - RNA, 22 nt, Artificial Sequence
  LRRK2 RNA guide
uguaaggacugaaaacauuuac

SEQ ID NO: 67520 - RNA, 22 nt, Artificial Sequence
  LRRK2 RNA guide
ugugagguaaauguuuucaguc

SEQ ID NO: 67521 - RNA, 22 nt, Artificial Sequence
  LRRK2 RNA guide
uguuugugagguaaauguuuuc

SEQ ID NO: 67522 - RNA, 22 nt, Artificial Sequence
  LRRK2 RNA guide
uguuuucaguccuuacauguua

SEQ ID NO: 67523 - RNA, 22 nt, Artificial Sequence
  LRRK2 RNA guide
uuaacauguaaggacugaaaac

SEQ ID NO: 67524 - RNA, 22 nt, Artificial Sequence
  LRRK2 RNA guide
uugugagguaaauguuuucagu

SEQ ID NO: 67525 - RNA, 22 nt, Artificial Sequence
  LRRK2 RNA guide
uuugugagguaaauguuuucag

SEQ ID NO: 67526 - RNA, 20 nt, Artificial Sequence
  LRRK2 RNA guide
aacauguaaggacuaaaaac

SEQ ID NO: 67527 - RNA, 20 nt, Artificial Sequence
  LRRK2 RNA guide
aaggacuaaaaacauuuacc

SEQ ID NO: 67528 - RNA, 20 nt, Artificial Sequence
  LRRK2 RNA guide
acauguaaggacuaaaaaca

SEQ ID NO: 67529 - RNA, 20 nt, Artificial Sequence
  LRRK2 RNA guide
acuaaaaacauuuaccucac

SEQ ID NO: 67530 - RNA, 20 nt, Artificial Sequence
  LRRK2 RNA guide
aggacuaaaaacauuuaccu

SEQ ID NO: 67531 - RNA, 20 nt, Artificial Sequence
  LRRK2 RNA guide
agguaaauguuuuuaguccu

SEQ ID NO: 67532 - RNA, 20 nt, Artificial Sequence
  LRRK2 RNA guide
auguuuuuaguccuuacaug

SEQ ID NO: 67533 - RNA, 20 nt, Artificial Sequence
  LRRK2 RNA guide
cauguaaggacuaaaaacau

SEQ ID NO: 67534 - RNA, 20 nt, Artificial Sequence
  LRRK2 RNA guide
cuaaaaacauuuaccucaca

SEQ ID NO: 67535 - RNA, 20 nt, Artificial Sequence
  LRRK2 RNA guide
gacuaaaaacauuuaccuca

SEQ ID NO: 67536 - RNA, 20 nt, Artificial Sequence
  LRRK2 RNA guide
gagguaaauguuuuuagucc

SEQ ID NO: 67537 - RNA, 20 nt, Artificial Sequence
  LRRK2 RNA guide
ggacuaaaaacauuuaccuc

SEQ ID NO: 67538 - RNA, 20 nt, Artificial Sequence
  LRRK2 RNA guide
gguaaauguuuuuaguccuu

SEQ ID NO: 67539 - RNA, 20 nt, Artificial Sequence
  LRRK2 RNA guide
gugagguaaauguuuuuagu

SEQ ID NO: 67540 - RNA, 20 nt, Artificial Sequence
  LRRK2 RNA guide
guuuuuaguccuuacauguu

SEQ ID NO: 67541 - RNA, 20 nt, Artificial Sequence
  LRRK2 RNA guide
ugagguaaauguuuuuaguc

SEQ ID NO: 67542 - RNA, 20 nt, Artificial Sequence
  LRRK2 RNA guide
ugugagguaaauguuuuuag

SEQ ID NO: 67543 - RNA, 20 nt, Artificial Sequence
  LRRK2 RNA guide
uguuuuuaguccuuacaugu

SEQ ID NO: 67544 - RNA, 21 nt, Artificial Sequence
  LRRK2 RNA guide
aggacuaaaaacauuuaccuc

SEQ ID NO: 67545 - RNA, 21 nt, Artificial Sequence
  LRRK2 RNA guide
gacuaaaaacauuuaccucac

SEQ ID NO: 67546 - RNA, 21 nt, Artificial Sequence
  LRRK2 RNA guide
gagguaaauguuuuuaguccu

SEQ ID NO: 67547 - RNA, 21 nt, Artificial Sequence
  LRRK2 RNA guide
ggacuaaaaacauuuaccuca

SEQ ID NO: 67548 - RNA, 21 nt, Artificial Sequence
  LRRK2 RNA guide
gugagguaaauguuuuuaguc

SEQ ID NO: 67549 - RNA, 21 nt, Artificial Sequence
  LRRK2 RNA guide
ugagguaaauguuuuuagucc

SEQ ID NO: 67550 - RNA, 22 nt, Artificial Sequence
  LRRK2 RNA guide
aaggacuaaaaacauuuaccuc

SEQ ID NO: 67551 - RNA, 22 nt, Artificial Sequence
  LRRK2 RNA guide
aggacuaaaaacauuuaccuca

SEQ ID NO: 67552 - RNA, 22 nt, Artificial Sequence
  LRRK2 RNA guide
gacuaaaaacauuuaccucaca

SEQ ID NO: 67553 - RNA, 22 nt, Artificial Sequence
  LRRK2 RNA guide
gagguaaauguuuuuaguccuu

SEQ ID NO: 67554 - RNA, 22 nt, Artificial Sequence
  LRRK2 RNA guide
ggacuaaaaacauuuaccucac

SEQ ID NO: 67555 - RNA, 22 nt, Artificial Sequence
  LRRK2 RNA guide
gguaaauguuuuuaguccuuac

SEQ ID NO: 67556 - RNA, 22 nt, Artificial Sequence
  LRRK2 RNA guide
guaaggacuaaaaacauuuacc

SEQ ID NO: 67557 - RNA, 22 nt, Artificial Sequence
  LRRK2 RNA guide
gugagguaaauguuuuuagucc

SEQ ID NO: 67558 - RNA, 22 nt, Artificial Sequence
  LRRK2 RNA guide
ugagguaaauguuuuuaguccu

SEQ ID NO: 67559 - RNA, 22 nt, Artificial Sequence
  LRRK2 RNA guide
ugugagguaaauguuuuuaguc

SEQ ID NO: 67560 - RNA, 20 nt, Artificial Sequence
  LRRK2 RNA guide
aaacccagucaaggcucugc

SEQ ID NO: 67561 - RNA, 20 nt, Artificial Sequence
  LRRK2 RNA guide
aacccagucaaggcucugcu

SEQ ID NO: 67562 - RNA, 20 nt, Artificial Sequence
  LRRK2 RNA guide
aagcagagccuugacugggu

SEQ ID NO: 67563 - RNA, 20 nt, Artificial Sequence
  LRRK2 RNA guide
aagcuaaacccagucaaggc

SEQ ID NO: 67564 - RNA, 20 nt, Artificial Sequence
  LRRK2 RNA guide
acccagucaaggcucugcuu

SEQ ID NO: 67565 - RNA, 20 nt, Artificial Sequence
  LRRK2 RNA guide
agaagcagagccuugacugg

SEQ ID NO: 67566 - RNA, 20 nt, Artificial Sequence
  LRRK2 RNA guide
agagaagcagagccuugacu

SEQ ID NO: 67567 - RNA, 20 nt, Artificial Sequence
  LRRK2 RNA guide
agagccuugacuggguuuag

SEQ ID NO: 67568 - RNA, 20 nt, Artificial Sequence
  LRRK2 RNA guide
agcagagccuugacuggguu

SEQ ID NO: 67569 - RNA, 20 nt, Artificial Sequence
  LRRK2 RNA guide
agccuugacuggguuuagcu

SEQ ID NO: 67570 - RNA, 20 nt, Artificial Sequence
  LRRK2 RNA guide
agcuaaacccagucaaggcu

SEQ ID NO: 67571 - RNA, 20 nt, Artificial Sequence
  LRRK2 RNA guide
aggcuccagagaagcagagc

SEQ ID NO: 67572 - RNA, 20 nt, Artificial Sequence
  LRRK2 RNA guide
aguaagcuaaacccagucaa

SEQ ID NO: 67573 - RNA, 20 nt, Artificial Sequence
  LRRK2 RNA guide
aguaguaagcuaaacccagu

SEQ ID NO: 67574 - RNA, 20 nt, Artificial Sequence
  LRRK2 RNA guide
agucaaggcucugcuucucu

SEQ ID NO: 67575 - RNA, 20 nt, Artificial Sequence
  LRRK2 RNA guide
auaggcuccagagaagcaga

SEQ ID NO: 67576 - RNA, 20 nt, Artificial Sequence
  LRRK2 RNA guide
auaguaguaagcuaaaccca

SEQ ID NO: 67577 - RNA, 20 nt, Artificial Sequence
  LRRK2 RNA guide
caaggcucugcuucucugga

SEQ ID NO: 67578 - RNA, 20 nt, Artificial Sequence
  LRRK2 RNA guide
cagagaagcagagccuugac

SEQ ID NO: 67579 - RNA, 20 nt, Artificial Sequence
  LRRK2 RNA guide
cagagccuugacuggguuua

SEQ ID NO: 67580 - RNA, 20 nt, Artificial Sequence
  LRRK2 RNA guide
cagucaaggcucugcuucuc

SEQ ID NO: 67581 - RNA, 20 nt, Artificial Sequence
  LRRK2 RNA guide
ccagagaagcagagccuuga

SEQ ID NO: 67582 - RNA, 20 nt, Artificial Sequence
  LRRK2 RNA guide
ccagucaaggcucugcuucu

SEQ ID NO: 67583 - RNA, 20 nt, Artificial Sequence
  LRRK2 RNA guide
cccagucaaggcucugcuuc

SEQ ID NO: 67584 - RNA, 20 nt, Artificial Sequence
  LRRK2 RNA guide
ccuugacuggguuuagcuua

SEQ ID NO: 67585 - RNA, 20 nt, Artificial Sequence
  LRRK2 RNA guide
cuaaacccagucaaggcucu

SEQ ID NO: 67586 - RNA, 20 nt, Artificial Sequence
  LRRK2 RNA guide
cuccagagaagcagagccuu

SEQ ID NO: 67587 - RNA, 20 nt, Artificial Sequence
  LRRK2 RNA guide
cuugacuggguuuagcuuac

SEQ ID NO: 67588 - RNA, 20 nt, Artificial Sequence
  LRRK2 RNA guide
gaagcagagccuugacuggg

SEQ ID NO: 67589 - RNA, 20 nt, Artificial Sequence
  LRRK2 RNA guide
gagaagcagagccuugacug

SEQ ID NO: 67590 - RNA, 20 nt, Artificial Sequence
  LRRK2 RNA guide
gagccuugacuggguuuagc

SEQ ID NO: 67591 - RNA, 20 nt, Artificial Sequence
  LRRK2 RNA guide
gcagagccuugacuggguuu

SEQ ID NO: 67592 - RNA, 20 nt, Artificial Sequence
  LRRK2 RNA guide
gccuugacuggguuuagcuu

SEQ ID NO: 67593 - RNA, 20 nt, Artificial Sequence
  LRRK2 RNA guide
gcuaaacccagucaaggcuc

SEQ ID NO: 67594 - RNA, 20 nt, Artificial Sequence
  LRRK2 RNA guide
gcuccagagaagcagagccu

SEQ ID NO: 67595 - RNA, 20 nt, Artificial Sequence
  LRRK2 RNA guide
ggcuccagagaagcagagcc

SEQ ID NO: 67596 - RNA, 20 nt, Artificial Sequence
  LRRK2 RNA guide
guaagcuaaacccagucaag

SEQ ID NO: 67597 - RNA, 20 nt, Artificial Sequence
  LRRK2 RNA guide
guaguaagcuaaacccaguc

SEQ ID NO: 67598 - RNA, 20 nt, Artificial Sequence
  LRRK2 RNA guide
gucaaggcucugcuucucug

SEQ ID NO: 67599 - RNA, 20 nt, Artificial Sequence
  LRRK2 RNA guide
uaaacccagucaaggcucug

SEQ ID NO: 67600 - RNA, 20 nt, Artificial Sequence
  LRRK2 RNA guide
uaagcuaaacccagucaagg

SEQ ID NO: 67601 - RNA, 20 nt, Artificial Sequence
  LRRK2 RNA guide
uaggcuccagagaagcagag

SEQ ID NO: 67602 - RNA, 20 nt, Artificial Sequence
  LRRK2 RNA guide
uaguaagcuaaacccaguca

SEQ ID NO: 67603 - RNA, 20 nt, Artificial Sequence
  LRRK2 RNA guide
uaguaguaagcuaaacccag

SEQ ID NO: 67604 - RNA, 20 nt, Artificial Sequence
  LRRK2 RNA guide
uauaguaguaagcuaaaccc

SEQ ID NO: 67605 - RNA, 20 nt, Artificial Sequence
  LRRK2 RNA guide
ucaaggcucugcuucucugg

SEQ ID NO: 67606 - RNA, 20 nt, Artificial Sequence
  LRRK2 RNA guide
uccagagaagcagagccuug

SEQ ID NO: 67607 - RNA, 20 nt, Artificial Sequence
  LRRK2 RNA guide
uugacuggguuuagcuuacu

SEQ ID NO: 67608 - RNA, 21 nt, Artificial Sequence
  LRRK2 RNA guide
aaacccagucaaggcucugcu

SEQ ID NO: 67609 - RNA, 21 nt, Artificial Sequence
  LRRK2 RNA guide
aacccagucaaggcucugcuu

SEQ ID NO: 67610 - RNA, 21 nt, Artificial Sequence
  LRRK2 RNA guide
aagcagagccuugacuggguu

SEQ ID NO: 67611 - RNA, 21 nt, Artificial Sequence
  LRRK2 RNA guide
aagcuaaacccagucaaggcu

SEQ ID NO: 67612 - RNA, 21 nt, Artificial Sequence
  LRRK2 RNA guide
acccagucaaggcucugcuuc

SEQ ID NO: 67613 - RNA, 21 nt, Artificial Sequence
  LRRK2 RNA guide
agaagcagagccuugacuggg

SEQ ID NO: 67614 - RNA, 21 nt, Artificial Sequence
  LRRK2 RNA guide
agagaagcagagccuugacug

SEQ ID NO: 67615 - RNA, 21 nt, Artificial Sequence
  LRRK2 RNA guide
agagccuugacuggguuuagc

SEQ ID NO: 67616 - RNA, 21 nt, Artificial Sequence
  LRRK2 RNA guide
agcagagccuugacuggguuu

SEQ ID NO: 67617 - RNA, 21 nt, Artificial Sequence
  LRRK2 RNA guide
agccuugacuggguuuagcuu

SEQ ID NO: 67618 - RNA, 21 nt, Artificial Sequence
  LRRK2 RNA guide
agcuaaacccagucaaggcuc

SEQ ID NO: 67619 - RNA, 21 nt, Artificial Sequence
  LRRK2 RNA guide
aggcuccagagaagcagagcc

SEQ ID NO: 67620 - RNA, 21 nt, Artificial Sequence
  LRRK2 RNA guide
aguaagcuaaacccagucaag

SEQ ID NO: 67621 - RNA, 21 nt, Artificial Sequence
  LRRK2 RNA guide
aguaguaagcuaaacccaguc

SEQ ID NO: 67622 - RNA, 21 nt, Artificial Sequence
  LRRK2 RNA guide
agucaaggcucugcuucucug

SEQ ID NO: 67623 - RNA, 21 nt, Artificial Sequence
  LRRK2 RNA guide
auaggcuccagagaagcagag

SEQ ID NO: 67624 - RNA, 21 nt, Artificial Sequence
  LRRK2 RNA guide
auaguaguaagcuaaacccag

SEQ ID NO: 67625 - RNA, 21 nt, Artificial Sequence
  LRRK2 RNA guide
auauaguaguaagcuaaaccc

SEQ ID NO: 67626 - RNA, 21 nt, Artificial Sequence
  LRRK2 RNA guide
caaggcucugcuucucuggag

SEQ ID NO: 67627 - RNA, 21 nt, Artificial Sequence
  LRRK2 RNA guide
cagagaagcagagccuugacu

SEQ ID NO: 67628 - RNA, 21 nt, Artificial Sequence
  LRRK2 RNA guide
cagagccuugacuggguuuag

SEQ ID NO: 67629 - RNA, 21 nt, Artificial Sequence
  LRRK2 RNA guide
cagucaaggcucugcuucucu

SEQ ID NO: 67630 - RNA, 21 nt, Artificial Sequence
  LRRK2 RNA guide
ccagagaagcagagccuugac

SEQ ID NO: 67631 - RNA, 21 nt, Artificial Sequence
  LRRK2 RNA guide
ccagucaaggcucugcuucuc

SEQ ID NO: 67632 - RNA, 21 nt, Artificial Sequence
  LRRK2 RNA guide
cccagucaaggcucugcuucu

SEQ ID NO: 67633 - RNA, 21 nt, Artificial Sequence
  LRRK2 RNA guide
ccuugacuggguuuagcuuac

SEQ ID NO: 67634 - RNA, 21 nt, Artificial Sequence
  LRRK2 RNA guide
cuaaacccagucaaggcucug

SEQ ID NO: 67635 - RNA, 21 nt, Artificial Sequence
  LRRK2 RNA guide
cuccagagaagcagagccuug

SEQ ID NO: 67636 - RNA, 21 nt, Artificial Sequence
  LRRK2 RNA guide
cuugacuggguuuagcuuacu

SEQ ID NO: 67637 - RNA, 21 nt, Artificial Sequence
  LRRK2 RNA guide
gaagcagagccuugacugggu

SEQ ID NO: 67638 - RNA, 21 nt, Artificial Sequence
  LRRK2 RNA guide
gagaagcagagccuugacugg

SEQ ID NO: 67639 - RNA, 21 nt, Artificial Sequence
  LRRK2 RNA guide
gagccuugacuggguuuagcu

SEQ ID NO: 67640 - RNA, 21 nt, Artificial Sequence
  LRRK2 RNA guide
gcagagccuugacuggguuua

SEQ ID NO: 67641 - RNA, 21 nt, Artificial Sequence
  LRRK2 RNA guide
gccuugacuggguuuagcuua

SEQ ID NO: 67642 - RNA, 21 nt, Artificial Sequence
  LRRK2 RNA guide
gcuaaacccagucaaggcucu

SEQ ID NO: 67643 - RNA, 21 nt, Artificial Sequence
  LRRK2 RNA guide
gcuccagagaagcagagccuu

SEQ ID NO: 67644 - RNA, 21 nt, Artificial Sequence
  LRRK2 RNA guide
ggcuccagagaagcagagccu

SEQ ID NO: 67645 - RNA, 21 nt, Artificial Sequence
  LRRK2 RNA guide
guaagcuaaacccagucaagg

SEQ ID NO: 67646 - RNA, 21 nt, Artificial Sequence
  LRRK2 RNA guide
guaguaagcuaaacccaguca

SEQ ID NO: 67647 - RNA, 21 nt, Artificial Sequence
  LRRK2 RNA guide
gucaaggcucugcuucucugg

SEQ ID NO: 67648 - RNA, 21 nt, Artificial Sequence
  LRRK2 RNA guide
uaaacccagucaaggcucugc

SEQ ID NO: 67649 - RNA, 21 nt, Artificial Sequence
  LRRK2 RNA guide
uaagcuaaacccagucaaggc

SEQ ID NO: 67650 - RNA, 21 nt, Artificial Sequence
  LRRK2 RNA guide
uaggcuccagagaagcagagc

SEQ ID NO: 67651 - RNA, 21 nt, Artificial Sequence
  LRRK2 RNA guide
uaguaagcuaaacccagucaa

SEQ ID NO: 67652 - RNA, 21 nt, Artificial Sequence
  LRRK2 RNA guide
uaguaguaagcuaaacccagu

SEQ ID NO: 67653 - RNA, 21 nt, Artificial Sequence
  LRRK2 RNA guide
uauaggcuccagagaagcaga

SEQ ID NO: 67654 - RNA, 21 nt, Artificial Sequence
  LRRK2 RNA guide
uauaguaguaagcuaaaccca

SEQ ID NO: 67655 - RNA, 21 nt, Artificial Sequence
  LRRK2 RNA guide
ucaaggcucugcuucucugga

SEQ ID NO: 67656 - RNA, 21 nt, Artificial Sequence
  LRRK2 RNA guide
uccagagaagcagagccuuga

SEQ ID NO: 67657 - RNA, 21 nt, Artificial Sequence
  LRRK2 RNA guide
uugacuggguuuagcuuacua

SEQ ID NO: 67658 - RNA, 22 nt, Artificial Sequence
  LRRK2 RNA guide
aaacccagucaaggcucugcuu

SEQ ID NO: 67659 - RNA, 22 nt, Artificial Sequence
  LRRK2 RNA guide
aacccagucaaggcucugcuuc

SEQ ID NO: 67660 - RNA, 22 nt, Artificial Sequence
  LRRK2 RNA guide
aagcagagccuugacuggguuu

SEQ ID NO: 67661 - RNA, 22 nt, Artificial Sequence
  LRRK2 RNA guide
aagcuaaacccagucaaggcuc

SEQ ID NO: 67662 - RNA, 22 nt, Artificial Sequence
  LRRK2 RNA guide
acccagucaaggcucugcuucu

SEQ ID NO: 67663 - RNA, 22 nt, Artificial Sequence
  LRRK2 RNA guide
agaagcagagccuugacugggu

SEQ ID NO: 67664 - RNA, 22 nt, Artificial Sequence
  LRRK2 RNA guide
agagaagcagagccuugacugg

SEQ ID NO: 67665 - RNA, 22 nt, Artificial Sequence
  LRRK2 RNA guide
agagccuugacuggguuuagcu

SEQ ID NO: 67666 - RNA, 22 nt, Artificial Sequence
  LRRK2 RNA guide
agcagagccuugacuggguuua

SEQ ID NO: 67667 - RNA, 22 nt, Artificial Sequence
  LRRK2 RNA guide
agccuugacuggguuuagcuua

SEQ ID NO: 67668 - RNA, 22 nt, Artificial Sequence
  LRRK2 RNA guide
agcuaaacccagucaaggcucu

SEQ ID NO: 67669 - RNA, 22 nt, Artificial Sequence
  LRRK2 RNA guide
aggcuccagagaagcagagccu

SEQ ID NO: 67670 - RNA, 22 nt, Artificial Sequence
  LRRK2 RNA guide
aguaagcuaaacccagucaagg

SEQ ID NO: 67671 - RNA, 22 nt, Artificial Sequence
  LRRK2 RNA guide
aguaguaagcuaaacccaguca

SEQ ID NO: 67672 - RNA, 22 nt, Artificial Sequence
  LRRK2 RNA guide
agucaaggcucugcuucucugg

SEQ ID NO: 67673 - RNA, 22 nt, Artificial Sequence
  LRRK2 RNA guide
auaggcuccagagaagcagagc

SEQ ID NO: 67674 - RNA, 22 nt, Artificial Sequence
  LRRK2 RNA guide
auaguaguaagcuaaacccagu

SEQ ID NO: 67675 - RNA, 22 nt, Artificial Sequence
  LRRK2 RNA guide
auauaggcuccagagaagcaga

SEQ ID NO: 67676 - RNA, 22 nt, Artificial Sequence
  LRRK2 RNA guide
auauaguaguaagcuaaaccca

SEQ ID NO: 67677 - RNA, 22 nt, Artificial Sequence
  LRRK2 RNA guide
caaggcucugcuucucuggagc

SEQ ID NO: 67678 - RNA, 22 nt, Artificial Sequence
  LRRK2 RNA guide
cagagaagcagagccuugacug

SEQ ID NO: 67679 - RNA, 22 nt, Artificial Sequence
  LRRK2 RNA guide
cagagccuugacuggguuuagc

SEQ ID NO: 67680 - RNA, 22 nt, Artificial Sequence
  LRRK2 RNA guide
cagucaaggcucugcuucucug

SEQ ID NO: 67681 - RNA, 22 nt, Artificial Sequence
  LRRK2 RNA guide
ccagagaagcagagccuugacu

SEQ ID NO: 67682 - RNA, 22 nt, Artificial Sequence
  LRRK2 RNA guide
ccagucaaggcucugcuucucu

SEQ ID NO: 67683 - RNA, 22 nt, Artificial Sequence
  LRRK2 RNA guide
cccagucaaggcucugcuucuc

SEQ ID NO: 67684 - RNA, 22 nt, Artificial Sequence
  LRRK2 RNA guide
ccuugacuggguuuagcuuacu

SEQ ID NO: 67685 - RNA, 22 nt, Artificial Sequence
  LRRK2 RNA guide
cuaaacccagucaaggcucugc

SEQ ID NO: 67686 - RNA, 22 nt, Artificial Sequence
  LRRK2 RNA guide
cuccagagaagcagagccuuga

SEQ ID NO: 67687 - RNA, 22 nt, Artificial Sequence
  LRRK2 RNA guide
cuugacuggguuuagcuuacua

SEQ ID NO: 67688 - RNA, 22 nt, Artificial Sequence
  LRRK2 RNA guide
gaagcagagccuugacuggguu

SEQ ID NO: 67689 - RNA, 22 nt, Artificial Sequence
  LRRK2 RNA guide
gagaagcagagccuugacuggg

SEQ ID NO: 67690 - RNA, 22 nt, Artificial Sequence
  LRRK2 RNA guide
gagccuugacuggguuuagcuu

SEQ ID NO: 67691 - RNA, 22 nt, Artificial Sequence
  LRRK2 RNA guide
gcagagccuugacuggguuuag

SEQ ID NO: 67692 - RNA, 22 nt, Artificial Sequence
  LRRK2 RNA guide
gccuugacuggguuuagcuuac

SEQ ID NO: 67693 - RNA, 22 nt, Artificial Sequence
  LRRK2 RNA guide
gcuaaacccagucaaggcucug

SEQ ID NO: 67694 - RNA, 22 nt, Artificial Sequence
  LRRK2 RNA guide
gcuccagagaagcagagccuug

SEQ ID NO: 67695 - RNA, 22 nt, Artificial Sequence
  LRRK2 RNA guide
ggcuccagagaagcagagccuu

SEQ ID NO: 67696 - RNA, 22 nt, Artificial Sequence
  LRRK2 RNA guide
guaagcuaaacccagucaaggc

SEQ ID NO: 67697 - RNA, 22 nt, Artificial Sequence
  LRRK2 RNA guide
guaguaagcuaaacccagucaa

SEQ ID NO: 67698 - RNA, 22 nt, Artificial Sequence
  LRRK2 RNA guide
gucaaggcucugcuucucugga

SEQ ID NO: 67699 - RNA, 22 nt, Artificial Sequence
  LRRK2 RNA guide
uaaacccagucaaggcucugcu

SEQ ID NO: 67700 - RNA, 22 nt, Artificial Sequence
  LRRK2 RNA guide
uaagcuaaacccagucaaggcu

SEQ ID NO: 67701 - RNA, 22 nt, Artificial Sequence
  LRRK2 RNA guide
uaggcuccagagaagcagagcc

SEQ ID NO: 67702 - RNA, 22 nt, Artificial Sequence
  LRRK2 RNA guide
uaguaagcuaaacccagucaag

SEQ ID NO: 67703 - RNA, 22 nt, Artificial Sequence
  LRRK2 RNA guide
uaguaguaagcuaaacccaguc

SEQ ID NO: 67704 - RNA, 22 nt, Artificial Sequence
  LRRK2 RNA guide
uauaggcuccagagaagcagag

SEQ ID NO: 67705 - RNA, 22 nt, Artificial Sequence
  LRRK2 RNA guide
uauaguaguaagcuaaacccag

SEQ ID NO: 67706 - RNA, 22 nt, Artificial Sequence
  LRRK2 RNA guide
uauauaguaguaagcuaaaccc

SEQ ID NO: 67707 - RNA, 22 nt, Artificial Sequence
  LRRK2 RNA guide
ucaaggcucugcuucucuggag

SEQ ID NO: 67708 - RNA, 22 nt, Artificial Sequence
  LRRK2 RNA guide
uccagagaagcagagccuugac

SEQ ID NO: 67709 - RNA, 22 nt, Artificial Sequence
  LRRK2 RNA guide
uugacuggguuuagcuuacuac

SEQ ID NO: 67710 - RNA, 20 nt, Artificial Sequence
  LRRK2 RNA guide
aaacccaguccaggcucugc

SEQ ID NO: 67711 - RNA, 20 nt, Artificial Sequence
  LRRK2 RNA guide
aacccaguccaggcucugcu

SEQ ID NO: 67712 - RNA, 20 nt, Artificial Sequence
  LRRK2 RNA guide
aagcagagccuggacugggu

SEQ ID NO: 67713 - RNA, 20 nt, Artificial Sequence
  LRRK2 RNA guide
aagcuaaacccaguccaggc

SEQ ID NO: 67714 - RNA, 20 nt, Artificial Sequence
  LRRK2 RNA guide
acccaguccaggcucugcuu

SEQ ID NO: 67715 - RNA, 20 nt, Artificial Sequence
  LRRK2 RNA guide
agaagcagagccuggacugg

SEQ ID NO: 67716 - RNA, 20 nt, Artificial Sequence
  LRRK2 RNA guide
agagaagcagagccuggacu

SEQ ID NO: 67717 - RNA, 20 nt, Artificial Sequence
  LRRK2 RNA guide
agagccuggacuggguuuag

SEQ ID NO: 67718 - RNA, 20 nt, Artificial Sequence
  LRRK2 RNA guide
agcagagccuggacuggguu

SEQ ID NO: 67719 - RNA, 20 nt, Artificial Sequence
  LRRK2 RNA guide
agccuggacuggguuuagcu

SEQ ID NO: 67720 - RNA, 20 nt, Artificial Sequence
  LRRK2 RNA guide
agcuaaacccaguccaggcu

SEQ ID NO: 67721 - RNA, 20 nt, Artificial Sequence
  LRRK2 RNA guide
aguaagcuaaacccagucca

SEQ ID NO: 67722 - RNA, 20 nt, Artificial Sequence
  LRRK2 RNA guide
aguccaggcucugcuucucu

SEQ ID NO: 67723 - RNA, 20 nt, Artificial Sequence
  LRRK2 RNA guide
cagagaagcagagccuggac

SEQ ID NO: 67724 - RNA, 20 nt, Artificial Sequence
  LRRK2 RNA guide
cagagccuggacuggguuua

SEQ ID NO: 67725 - RNA, 20 nt, Artificial Sequence
  LRRK2 RNA guide
caguccaggcucugcuucuc

SEQ ID NO: 67726 - RNA, 20 nt, Artificial Sequence
  LRRK2 RNA guide
ccagagaagcagagccugga

SEQ ID NO: 67727 - RNA, 20 nt, Artificial Sequence
  LRRK2 RNA guide
ccaggcucugcuucucugga

SEQ ID NO: 67728 - RNA, 20 nt, Artificial Sequence
  LRRK2 RNA guide
ccaguccaggcucugcuucu

SEQ ID NO: 67729 - RNA, 20 nt, Artificial Sequence
  LRRK2 RNA guide
cccaguccaggcucugcuuc

SEQ ID NO: 67730 - RNA, 20 nt, Artificial Sequence
  LRRK2 RNA guide
ccuggacuggguuuagcuua

SEQ ID NO: 67731 - RNA, 20 nt, Artificial Sequence
  LRRK2 RNA guide
cuaaacccaguccaggcucu

SEQ ID NO: 67732 - RNA, 20 nt, Artificial Sequence
  LRRK2 RNA guide
cuccagagaagcagagccug

SEQ ID NO: 67733 - RNA, 20 nt, Artificial Sequence
  LRRK2 RNA guide
cuggacuggguuuagcuuac

SEQ ID NO: 67734 - RNA, 20 nt, Artificial Sequence
  LRRK2 RNA guide
gaagcagagccuggacuggg

SEQ ID NO: 67735 - RNA, 20 nt, Artificial Sequence
  LRRK2 RNA guide
gagaagcagagccuggacug

SEQ ID NO: 67736 - RNA, 20 nt, Artificial Sequence
  LRRK2 RNA guide
gagccuggacuggguuuagc

SEQ ID NO: 67737 - RNA, 20 nt, Artificial Sequence
  LRRK2 RNA guide
gcagagccuggacuggguuu

SEQ ID NO: 67738 - RNA, 20 nt, Artificial Sequence
  LRRK2 RNA guide
gccuggacuggguuuagcuu

SEQ ID NO: 67739 - RNA, 20 nt, Artificial Sequence
  LRRK2 RNA guide
gcuaaacccaguccaggcuc

SEQ ID NO: 67740 - RNA, 20 nt, Artificial Sequence
  LRRK2 RNA guide
guaagcuaaacccaguccag

SEQ ID NO: 67741 - RNA, 20 nt, Artificial Sequence
  LRRK2 RNA guide
guccaggcucugcuucucug

SEQ ID NO: 67742 - RNA, 20 nt, Artificial Sequence
  LRRK2 RNA guide
uaaacccaguccaggcucug

SEQ ID NO: 67743 - RNA, 20 nt, Artificial Sequence
  LRRK2 RNA guide
uaagcuaaacccaguccagg

SEQ ID NO: 67744 - RNA, 20 nt, Artificial Sequence
  LRRK2 RNA guide
uaguaagcuaaacccagucc

SEQ ID NO: 67745 - RNA, 20 nt, Artificial Sequence
  LRRK2 RNA guide
uccagagaagcagagccugg

SEQ ID NO: 67746 - RNA, 20 nt, Artificial Sequence
  LRRK2 RNA guide
uccaggcucugcuucucugg

SEQ ID NO: 67747 - RNA, 20 nt, Artificial Sequence
  LRRK2 RNA guide
uggacuggguuuagcuuacu

SEQ ID NO: 67748 - RNA, 21 nt, Artificial Sequence
  LRRK2 RNA guide
aaacccaguccaggcucugcu

SEQ ID NO: 67749 - RNA, 21 nt, Artificial Sequence
  LRRK2 RNA guide
aacccaguccaggcucugcuu

SEQ ID NO: 67750 - RNA, 21 nt, Artificial Sequence
  LRRK2 RNA guide
aagcagagccuggacuggguu

SEQ ID NO: 67751 - RNA, 21 nt, Artificial Sequence
  LRRK2 RNA guide
aagcuaaacccaguccaggcu

SEQ ID NO: 67752 - RNA, 21 nt, Artificial Sequence
  LRRK2 RNA guide
acccaguccaggcucugcuuc

SEQ ID NO: 67753 - RNA, 21 nt, Artificial Sequence
  LRRK2 RNA guide
agaagcagagccuggacuggg

SEQ ID NO: 67754 - RNA, 21 nt, Artificial Sequence
  LRRK2 RNA guide
agagaagcagagccuggacug

SEQ ID NO: 67755 - RNA, 21 nt, Artificial Sequence
  LRRK2 RNA guide
agagccuggacuggguuuagc

SEQ ID NO: 67756 - RNA, 21 nt, Artificial Sequence
  LRRK2 RNA guide
agcagagccuggacuggguuu

SEQ ID NO: 67757 - RNA, 21 nt, Artificial Sequence
  LRRK2 RNA guide
agccuggacuggguuuagcuu

SEQ ID NO: 67758 - RNA, 21 nt, Artificial Sequence
  LRRK2 RNA guide
agcuaaacccaguccaggcuc

SEQ ID NO: 67759 - RNA, 21 nt, Artificial Sequence
  LRRK2 RNA guide
aguaagcuaaacccaguccag

SEQ ID NO: 67760 - RNA, 21 nt, Artificial Sequence
  LRRK2 RNA guide
aguccaggcucugcuucucug

SEQ ID NO: 67761 - RNA, 21 nt, Artificial Sequence
  LRRK2 RNA guide
cagagaagcagagccuggacu

SEQ ID NO: 67762 - RNA, 21 nt, Artificial Sequence
  LRRK2 RNA guide
cagagccuggacuggguuuag

SEQ ID NO: 67763 - RNA, 21 nt, Artificial Sequence
  LRRK2 RNA guide
caguccaggcucugcuucucu

SEQ ID NO: 67764 - RNA, 21 nt, Artificial Sequence
  LRRK2 RNA guide
ccagagaagcagagccuggac

SEQ ID NO: 67765 - RNA, 21 nt, Artificial Sequence
  LRRK2 RNA guide
ccaggcucugcuucucuggag

SEQ ID NO: 67766 - RNA, 21 nt, Artificial Sequence
  LRRK2 RNA guide
ccaguccaggcucugcuucuc

SEQ ID NO: 67767 - RNA, 21 nt, Artificial Sequence
  LRRK2 RNA guide
cccaguccaggcucugcuucu

SEQ ID NO: 67768 - RNA, 21 nt, Artificial Sequence
  LRRK2 RNA guide
ccuggacuggguuuagcuuac

SEQ ID NO: 67769 - RNA, 21 nt, Artificial Sequence
  LRRK2 RNA guide
cuaaacccaguccaggcucug

SEQ ID NO: 67770 - RNA, 21 nt, Artificial Sequence
  LRRK2 RNA guide
cuccagagaagcagagccugg

SEQ ID NO: 67771 - RNA, 21 nt, Artificial Sequence
  LRRK2 RNA guide
cuggacuggguuuagcuuacu

SEQ ID NO: 67772 - RNA, 21 nt, Artificial Sequence
  LRRK2 RNA guide
gaagcagagccuggacugggu

SEQ ID NO: 67773 - RNA, 21 nt, Artificial Sequence
  LRRK2 RNA guide
gagaagcagagccuggacugg

SEQ ID NO: 67774 - RNA, 21 nt, Artificial Sequence
  LRRK2 RNA guide
gagccuggacuggguuuagcu

SEQ ID NO: 67775 - RNA, 21 nt, Artificial Sequence
  LRRK2 RNA guide
gcagagccuggacuggguuua

SEQ ID NO: 67776 - RNA, 21 nt, Artificial Sequence
  LRRK2 RNA guide
gccuggacuggguuuagcuua

SEQ ID NO: 67777 - RNA, 21 nt, Artificial Sequence
  LRRK2 RNA guide
gcuaaacccaguccaggcucu

SEQ ID NO: 67778 - RNA, 21 nt, Artificial Sequence
  LRRK2 RNA guide
gcuccagagaagcagagccug

SEQ ID NO: 67779 - RNA, 21 nt, Artificial Sequence
  LRRK2 RNA guide
guaagcuaaacccaguccagg

SEQ ID NO: 67780 - RNA, 21 nt, Artificial Sequence
  LRRK2 RNA guide
guaguaagcuaaacccagucc

SEQ ID NO: 67781 - RNA, 21 nt, Artificial Sequence
  LRRK2 RNA guide
guccaggcucugcuucucugg

SEQ ID NO: 67782 - RNA, 21 nt, Artificial Sequence
  LRRK2 RNA guide
uaaacccaguccaggcucugc

SEQ ID NO: 67783 - RNA, 21 nt, Artificial Sequence
  LRRK2 RNA guide
uaagcuaaacccaguccaggc

SEQ ID NO: 67784 - RNA, 21 nt, Artificial Sequence
  LRRK2 RNA guide
uaguaagcuaaacccagucca

SEQ ID NO: 67785 - RNA, 21 nt, Artificial Sequence
  LRRK2 RNA guide
uccagagaagcagagccugga

SEQ ID NO: 67786 - RNA, 21 nt, Artificial Sequence
  LRRK2 RNA guide
uccaggcucugcuucucugga

SEQ ID NO: 67787 - RNA, 21 nt, Artificial Sequence
  LRRK2 RNA guide
uggacuggguuuagcuuacua

SEQ ID NO: 67788 - RNA, 22 nt, Artificial Sequence
  LRRK2 RNA guide
aaacccaguccaggcucugcuu

SEQ ID NO: 67789 - RNA, 22 nt, Artificial Sequence
  LRRK2 RNA guide
aacccaguccaggcucugcuuc

SEQ ID NO: 67790 - RNA, 22 nt, Artificial Sequence
  LRRK2 RNA guide
aagcagagccuggacuggguuu

SEQ ID NO: 67791 - RNA, 22 nt, Artificial Sequence
  LRRK2 RNA guide
aagcuaaacccaguccaggcuc

SEQ ID NO: 67792 - RNA, 22 nt, Artificial Sequence
  LRRK2 RNA guide
acccaguccaggcucugcuucu

SEQ ID NO: 67793 - RNA, 22 nt, Artificial Sequence
  LRRK2 RNA guide
agaagcagagccuggacugggu

SEQ ID NO: 67794 - RNA, 22 nt, Artificial Sequence
  LRRK2 RNA guide
agagaagcagagccuggacugg

SEQ ID NO: 67795 - RNA, 22 nt, Artificial Sequence
  LRRK2 RNA guide
agagccuggacuggguuuagcu

SEQ ID NO: 67796 - RNA, 22 nt, Artificial Sequence
  LRRK2 RNA guide
agcagagccuggacuggguuua

SEQ ID NO: 67797 - RNA, 22 nt, Artificial Sequence
  LRRK2 RNA guide
agccuggacuggguuuagcuua

SEQ ID NO: 67798 - RNA, 22 nt, Artificial Sequence
  LRRK2 RNA guide
agcuaaacccaguccaggcucu

SEQ ID NO: 67799 - RNA, 22 nt, Artificial Sequence
  LRRK2 RNA guide
aguaagcuaaacccaguccagg

SEQ ID NO: 67800 - RNA, 22 nt, Artificial Sequence
  LRRK2 RNA guide
aguaguaagcuaaacccagucc

SEQ ID NO: 67801 - RNA, 22 nt, Artificial Sequence
  LRRK2 RNA guide
aguccaggcucugcuucucugg

SEQ ID NO: 67802 - RNA, 22 nt, Artificial Sequence
  LRRK2 RNA guide
cagagaagcagagccuggacug

SEQ ID NO: 67803 - RNA, 22 nt, Artificial Sequence
  LRRK2 RNA guide
cagagccuggacuggguuuagc

SEQ ID NO: 67804 - RNA, 22 nt, Artificial Sequence
  LRRK2 RNA guide
caguccaggcucugcuucucug

SEQ ID NO: 67805 - RNA, 22 nt, Artificial Sequence
  LRRK2 RNA guide
ccagagaagcagagccuggacu

SEQ ID NO: 67806 - RNA, 22 nt, Artificial Sequence
  LRRK2 RNA guide
ccaggcucugcuucucuggagc

SEQ ID NO: 67807 - RNA, 22 nt, Artificial Sequence
  LRRK2 RNA guide
ccaguccaggcucugcuucucu

SEQ ID NO: 67808 - RNA, 22 nt, Artificial Sequence
  LRRK2 RNA guide
cccaguccaggcucugcuucuc

SEQ ID NO: 67809 - RNA, 22 nt, Artificial Sequence
  LRRK2 RNA guide
ccuggacuggguuuagcuuacu

SEQ ID NO: 67810 - RNA, 22 nt, Artificial Sequence
  LRRK2 RNA guide
cuaaacccaguccaggcucugc

SEQ ID NO: 67811 - RNA, 22 nt, Artificial Sequence
  LRRK2 RNA guide
cuccagagaagcagagccugga

SEQ ID NO: 67812 - RNA, 22 nt, Artificial Sequence
  LRRK2 RNA guide
cuggacuggguuuagcuuacua

SEQ ID NO: 67813 - RNA, 22 nt, Artificial Sequence
  LRRK2 RNA guide
gaagcagagccuggacuggguu

SEQ ID NO: 67814 - RNA, 22 nt, Artificial Sequence
  LRRK2 RNA guide
gagaagcagagccuggacuggg

SEQ ID NO: 67815 - RNA, 22 nt, Artificial Sequence
  LRRK2 RNA guide
gagccuggacuggguuuagcuu

SEQ ID NO: 67816 - RNA, 22 nt, Artificial Sequence
  LRRK2 RNA guide
gcagagccuggacuggguuuag

SEQ ID NO: 67817 - RNA, 22 nt, Artificial Sequence
  LRRK2 RNA guide
gccuggacuggguuuagcuuac

SEQ ID NO: 67818 - RNA, 22 nt, Artificial Sequence
  LRRK2 RNA guide
gcuaaacccaguccaggcucug

SEQ ID NO: 67819 - RNA, 22 nt, Artificial Sequence
  LRRK2 RNA guide
gcuccagagaagcagagccugg

SEQ ID NO: 67820 - RNA, 22 nt, Artificial Sequence
  LRRK2 RNA guide
ggcuccagagaagcagagccug

SEQ ID NO: 67821 - RNA, 22 nt, Artificial Sequence
  LRRK2 RNA guide
guaagcuaaacccaguccaggc

SEQ ID NO: 67822 - RNA, 22 nt, Artificial Sequence
  LRRK2 RNA guide
guaguaagcuaaacccagucca

SEQ ID NO: 67823 - RNA, 22 nt, Artificial Sequence
  LRRK2 RNA guide
guccaggcucugcuucucugga

SEQ ID NO: 67824 - RNA, 22 nt, Artificial Sequence
  LRRK2 RNA guide
uaaacccaguccaggcucugcu

SEQ ID NO: 67825 - RNA, 22 nt, Artificial Sequence
  LRRK2 RNA guide
uaagcuaaacccaguccaggcu

SEQ ID NO: 67826 - RNA, 22 nt, Artificial Sequence
  LRRK2 RNA guide
uaguaagcuaaacccaguccag

SEQ ID NO: 67827 - RNA, 22 nt, Artificial Sequence
  LRRK2 RNA guide
uccagagaagcagagccuggac

SEQ ID NO: 67828 - RNA, 22 nt, Artificial Sequence
  LRRK2 RNA guide
uccaggcucugcuucucuggag

SEQ ID NO: 67829 - RNA, 22 nt, Artificial Sequence
  LRRK2 RNA guide
uggacuggguuuagcuuacuac

SEQ ID NO: 67830 - RNA, 20 nt, Artificial Sequence
  LRRK2 RNA guide
aaaaggcuugucaucuaaca

SEQ ID NO: 67831 - RNA, 20 nt, Artificial Sequence
  LRRK2 RNA guide
aaaggcuugucaucuaacau

SEQ ID NO: 67832 - RNA, 20 nt, Artificial Sequence
  LRRK2 RNA guide
aacauggaugauagacccaa

SEQ ID NO: 67833 - RNA, 20 nt, Artificial Sequence
  LRRK2 RNA guide
aagaguauauguuagaugac

SEQ ID NO: 67834 - RNA, 20 nt, Artificial Sequence
  LRRK2 RNA guide
aagccuuuugggucuaucau

SEQ ID NO: 67835 - RNA, 20 nt, Artificial Sequence
  LRRK2 RNA guide
aaggcuugucaucuaacaua

SEQ ID NO: 67836 - RNA, 20 nt, Artificial Sequence
  LRRK2 RNA guide
acaagccuuuugggucuauc

SEQ ID NO: 67837 - RNA, 20 nt, Artificial Sequence
  LRRK2 RNA guide
acauggaugauagacccaaa

SEQ ID NO: 67838 - RNA, 20 nt, Artificial Sequence
  LRRK2 RNA guide
acccaaaaggcuugucaucu

SEQ ID NO: 67839 - RNA, 20 nt, Artificial Sequence
  LRRK2 RNA guide
agacccaaaaggcuugucau

SEQ ID NO: 67840 - RNA, 20 nt, Artificial Sequence
  LRRK2 RNA guide
agaguauauguuagaugaca

SEQ ID NO: 67841 - RNA, 20 nt, Artificial Sequence
  LRRK2 RNA guide
agaugacaagccuuuugggu

SEQ ID NO: 67842 - RNA, 20 nt, Artificial Sequence
  LRRK2 RNA guide
agccuuuugggucuaucauc

SEQ ID NO: 67843 - RNA, 20 nt, Artificial Sequence
  LRRK2 RNA guide
aggcuugucaucuaacauau

SEQ ID NO: 67844 - RNA, 20 nt, Artificial Sequence
  LRRK2 RNA guide
aguauauguuagaugacaag

SEQ ID NO: 67845 - RNA, 20 nt, Artificial Sequence
  LRRK2 RNA guide
auagacccaaaaggcuuguc

SEQ ID NO: 67846 - RNA, 20 nt, Artificial Sequence
  LRRK2 RNA guide
auauguuagaugacaagccu

SEQ ID NO: 67847 - RNA, 20 nt, Artificial Sequence
  LRRK2 RNA guide
augacaagccuuuugggucu

SEQ ID NO: 67848 - RNA, 20 nt, Artificial Sequence
  LRRK2 RNA guide
augauagacccaaaaggcuu

SEQ ID NO: 67849 - RNA, 20 nt, Artificial Sequence
  LRRK2 RNA guide
auggaugauagacccaaaag

SEQ ID NO: 67850 - RNA, 20 nt, Artificial Sequence
  LRRK2 RNA guide
auguuagaugacaagccuuu

SEQ ID NO: 67851 - RNA, 20 nt, Artificial Sequence
  LRRK2 RNA guide
caaaaggcuugucaucuaac

SEQ ID NO: 67852 - RNA, 20 nt, Artificial Sequence
  LRRK2 RNA guide
caagaguauauguuagauga

SEQ ID NO: 67853 - RNA, 20 nt, Artificial Sequence
  LRRK2 RNA guide
caagccuuuugggucuauca

SEQ ID NO: 67854 - RNA, 20 nt, Artificial Sequence
  LRRK2 RNA guide
cauggaugauagacccaaaa

SEQ ID NO: 67855 - RNA, 20 nt, Artificial Sequence
  LRRK2 RNA guide
ccaaaaggcuugucaucuaa

SEQ ID NO: 67856 - RNA, 20 nt, Artificial Sequence
  LRRK2 RNA guide
ccaagaguauauguuagaug

SEQ ID NO: 67857 - RNA, 20 nt, Artificial Sequence
  LRRK2 RNA guide
cccaaaaggcuugucaucua

SEQ ID NO: 67858 - RNA, 20 nt, Artificial Sequence
  LRRK2 RNA guide
gacaagccuuuugggucuau

SEQ ID NO: 67859 - RNA, 20 nt, Artificial Sequence
  LRRK2 RNA guide
gacccaaaaggcuugucauc

SEQ ID NO: 67860 - RNA, 20 nt, Artificial Sequence
  LRRK2 RNA guide
gaguauauguuagaugacaa

SEQ ID NO: 67861 - RNA, 20 nt, Artificial Sequence
  LRRK2 RNA guide
gauagacccaaaaggcuugu

SEQ ID NO: 67862 - RNA, 20 nt, Artificial Sequence
  LRRK2 RNA guide
gaugacaagccuuuuggguc

SEQ ID NO: 67863 - RNA, 20 nt, Artificial Sequence
  LRRK2 RNA guide
gaugauagacccaaaaggcu

SEQ ID NO: 67864 - RNA, 20 nt, Artificial Sequence
  LRRK2 RNA guide
gcuugucaucuaacauauac

SEQ ID NO: 67865 - RNA, 20 nt, Artificial Sequence
  LRRK2 RNA guide
ggaugauagacccaaaaggc

SEQ ID NO: 67866 - RNA, 20 nt, Artificial Sequence
  LRRK2 RNA guide
ggcuugucaucuaacauaua

SEQ ID NO: 67867 - RNA, 20 nt, Artificial Sequence
  LRRK2 RNA guide
guauauguuagaugacaagc

SEQ ID NO: 67868 - RNA, 20 nt, Artificial Sequence
  LRRK2 RNA guide
guuagaugacaagccuuuug

SEQ ID NO: 67869 - RNA, 20 nt, Artificial Sequence
  LRRK2 RNA guide
uagacccaaaaggcuuguca

SEQ ID NO: 67870 - RNA, 20 nt, Artificial Sequence
  LRRK2 RNA guide
uagaugacaagccuuuuggg

SEQ ID NO: 67871 - RNA, 20 nt, Artificial Sequence
  LRRK2 RNA guide
uauauguuagaugacaagcc

SEQ ID NO: 67872 - RNA, 20 nt, Artificial Sequence
  LRRK2 RNA guide
uauguuagaugacaagccuu

SEQ ID NO: 67873 - RNA, 20 nt, Artificial Sequence
  LRRK2 RNA guide
ugacaagccuuuugggucua

SEQ ID NO: 67874 - RNA, 20 nt, Artificial Sequence
  LRRK2 RNA guide
ugauagacccaaaaggcuug

SEQ ID NO: 67875 - RNA, 20 nt, Artificial Sequence
  LRRK2 RNA guide
uggaugauagacccaaaagg

SEQ ID NO: 67876 - RNA, 20 nt, Artificial Sequence
  LRRK2 RNA guide
uguuagaugacaagccuuuu

SEQ ID NO: 67877 - RNA, 20 nt, Artificial Sequence
  LRRK2 RNA guide
uuagaugacaagccuuuugg

SEQ ID NO: 67878 - RNA, 21 nt, Artificial Sequence
  LRRK2 RNA guide
aaaaggcuugucaucuaacau

SEQ ID NO: 67879 - RNA, 21 nt, Artificial Sequence
  LRRK2 RNA guide
aaacauggaugauagacccaa

SEQ ID NO: 67880 - RNA, 21 nt, Artificial Sequence
  LRRK2 RNA guide
aaaggcuugucaucuaacaua

SEQ ID NO: 67881 - RNA, 21 nt, Artificial Sequence
  LRRK2 RNA guide
aacauggaugauagacccaaa

SEQ ID NO: 67882 - RNA, 21 nt, Artificial Sequence
  LRRK2 RNA guide
aagccuuuugggucuaucauc

SEQ ID NO: 67883 - RNA, 21 nt, Artificial Sequence
  LRRK2 RNA guide
aaggcuugucaucuaacauau

SEQ ID NO: 67884 - RNA, 21 nt, Artificial Sequence
  LRRK2 RNA guide
acaagccuuuugggucuauca

SEQ ID NO: 67885 - RNA, 21 nt, Artificial Sequence
  LRRK2 RNA guide
acauggaugauagacccaaaa

SEQ ID NO: 67886 - RNA, 21 nt, Artificial Sequence
  LRRK2 RNA guide
acccaaaaggcuugucaucua

SEQ ID NO: 67887 - RNA, 21 nt, Artificial Sequence
  LRRK2 RNA guide
agacccaaaaggcuugucauc

SEQ ID NO: 67888 - RNA, 21 nt, Artificial Sequence
  LRRK2 RNA guide
agaugacaagccuuuuggguc

SEQ ID NO: 67889 - RNA, 21 nt, Artificial Sequence
  LRRK2 RNA guide
agccuuuugggucuaucaucc

SEQ ID NO: 67890 - RNA, 21 nt, Artificial Sequence
  LRRK2 RNA guide
aggcuugucaucuaacauaua

SEQ ID NO: 67891 - RNA, 21 nt, Artificial Sequence
  LRRK2 RNA guide
aguauauguuagaugacaagc

SEQ ID NO: 67892 - RNA, 21 nt, Artificial Sequence
  LRRK2 RNA guide
auagacccaaaaggcuuguca

SEQ ID NO: 67893 - RNA, 21 nt, Artificial Sequence
  LRRK2 RNA guide
auauguuagaugacaagccuu

SEQ ID NO: 67894 - RNA, 21 nt, Artificial Sequence
  LRRK2 RNA guide
augacaagccuuuugggucua

SEQ ID NO: 67895 - RNA, 21 nt, Artificial Sequence
  LRRK2 RNA guide
augauagacccaaaaggcuug

SEQ ID NO: 67896 - RNA, 21 nt, Artificial Sequence
  LRRK2 RNA guide
auggaugauagacccaaaagg

SEQ ID NO: 67897 - RNA, 21 nt, Artificial Sequence
  LRRK2 RNA guide
auguuagaugacaagccuuuu

SEQ ID NO: 67898 - RNA, 21 nt, Artificial Sequence
  LRRK2 RNA guide
caaaaggcuugucaucuaaca

SEQ ID NO: 67899 - RNA, 21 nt, Artificial Sequence
  LRRK2 RNA guide
caagaguauauguuagaugac

SEQ ID NO: 67900 - RNA, 21 nt, Artificial Sequence
  LRRK2 RNA guide
caagccuuuugggucuaucau

SEQ ID NO: 67901 - RNA, 21 nt, Artificial Sequence
  LRRK2 RNA guide
cauggaugauagacccaaaag

SEQ ID NO: 67902 - RNA, 21 nt, Artificial Sequence
  LRRK2 RNA guide
ccaaaaggcuugucaucuaac

SEQ ID NO: 67903 - RNA, 21 nt, Artificial Sequence
  LRRK2 RNA guide
ccaagaguauauguuagauga

SEQ ID NO: 67904 - RNA, 21 nt, Artificial Sequence
  LRRK2 RNA guide
cccaaaaggcuugucaucuaa

SEQ ID NO: 67905 - RNA, 21 nt, Artificial Sequence
  LRRK2 RNA guide
gacaagccuuuugggucuauc

SEQ ID NO: 67906 - RNA, 21 nt, Artificial Sequence
  LRRK2 RNA guide
gacccaaaaggcuugucaucu

SEQ ID NO: 67907 - RNA, 21 nt, Artificial Sequence
  LRRK2 RNA guide
gaguauauguuagaugacaag

SEQ ID NO: 67908 - RNA, 21 nt, Artificial Sequence
  LRRK2 RNA guide
gauagacccaaaaggcuuguc

SEQ ID NO: 67909 - RNA, 21 nt, Artificial Sequence
  LRRK2 RNA guide
gaugacaagccuuuugggucu

SEQ ID NO: 67910 - RNA, 21 nt, Artificial Sequence
  LRRK2 RNA guide
gaugauagacccaaaaggcuu

SEQ ID NO: 67911 - RNA, 21 nt, Artificial Sequence
  LRRK2 RNA guide
gcuugucaucuaacauauacu

SEQ ID NO: 67912 - RNA, 21 nt, Artificial Sequence
  LRRK2 RNA guide
ggaugauagacccaaaaggcu

SEQ ID NO: 67913 - RNA, 21 nt, Artificial Sequence
  LRRK2 RNA guide
ggcuugucaucuaacauauac

SEQ ID NO: 67914 - RNA, 21 nt, Artificial Sequence
  LRRK2 RNA guide
guauauguuagaugacaagcc

SEQ ID NO: 67915 - RNA, 21 nt, Artificial Sequence
  LRRK2 RNA guide
guuagaugacaagccuuuugg

SEQ ID NO: 67916 - RNA, 21 nt, Artificial Sequence
  LRRK2 RNA guide
uagacccaaaaggcuugucau

SEQ ID NO: 67917 - RNA, 21 nt, Artificial Sequence
  LRRK2 RNA guide
uagaugacaagccuuuugggu

SEQ ID NO: 67918 - RNA, 21 nt, Artificial Sequence
  LRRK2 RNA guide
uauauguuagaugacaagccu

SEQ ID NO: 67919 - RNA, 21 nt, Artificial Sequence
  LRRK2 RNA guide
uauguuagaugacaagccuuu

SEQ ID NO: 67920 - RNA, 21 nt, Artificial Sequence
  LRRK2 RNA guide
uccaagaguauauguuagaug

SEQ ID NO: 67921 - RNA, 21 nt, Artificial Sequence
  LRRK2 RNA guide
ugacaagccuuuugggucuau

SEQ ID NO: 67922 - RNA, 21 nt, Artificial Sequence
  LRRK2 RNA guide
ugauagacccaaaaggcuugu

SEQ ID NO: 67923 - RNA, 21 nt, Artificial Sequence
  LRRK2 RNA guide
uggaugauagacccaaaaggc

SEQ ID NO: 67924 - RNA, 21 nt, Artificial Sequence
  LRRK2 RNA guide
uguuagaugacaagccuuuug

SEQ ID NO: 67925 - RNA, 21 nt, Artificial Sequence
  LRRK2 RNA guide
uuagaugacaagccuuuuggg

SEQ ID NO: 67926 - RNA, 22 nt, Artificial Sequence
  LRRK2 RNA guide
aaaaggcuugucaucuaacaua

SEQ ID NO: 67927 - RNA, 22 nt, Artificial Sequence
  LRRK2 RNA guide
aaacauggaugauagacccaaa

SEQ ID NO: 67928 - RNA, 22 nt, Artificial Sequence
  LRRK2 RNA guide
aaaggcuugucaucuaacauau

SEQ ID NO: 67929 - RNA, 22 nt, Artificial Sequence
  LRRK2 RNA guide
aacauggaugauagacccaaaa

SEQ ID NO: 67930 - RNA, 22 nt, Artificial Sequence
  LRRK2 RNA guide
aagccuuuugggucuaucaucc

SEQ ID NO: 67931 - RNA, 22 nt, Artificial Sequence
  LRRK2 RNA guide
aaggcuugucaucuaacauaua

SEQ ID NO: 67932 - RNA, 22 nt, Artificial Sequence
  LRRK2 RNA guide
acaagccuuuugggucuaucau

SEQ ID NO: 67933 - RNA, 22 nt, Artificial Sequence
  LRRK2 RNA guide
acauggaugauagacccaaaag

SEQ ID NO: 67934 - RNA, 22 nt, Artificial Sequence
  LRRK2 RNA guide
acccaaaaggcuugucaucuaa

SEQ ID NO: 67935 - RNA, 22 nt, Artificial Sequence
  LRRK2 RNA guide
agacccaaaaggcuugucaucu

SEQ ID NO: 67936 - RNA, 22 nt, Artificial Sequence
  LRRK2 RNA guide
agaguauauguuagaugacaag

SEQ ID NO: 67937 - RNA, 22 nt, Artificial Sequence
  LRRK2 RNA guide
agaugacaagccuuuugggucu

SEQ ID NO: 67938 - RNA, 22 nt, Artificial Sequence
  LRRK2 RNA guide
agccuuuugggucuaucaucca

SEQ ID NO: 67939 - RNA, 22 nt, Artificial Sequence
  LRRK2 RNA guide
aggcuugucaucuaacauauac

SEQ ID NO: 67940 - RNA, 22 nt, Artificial Sequence
  LRRK2 RNA guide
aguauauguuagaugacaagcc

SEQ ID NO: 67941 - RNA, 22 nt, Artificial Sequence
  LRRK2 RNA guide
auagacccaaaaggcuugucau

SEQ ID NO: 67942 - RNA, 22 nt, Artificial Sequence
  LRRK2 RNA guide
auauguuagaugacaagccuuu

SEQ ID NO: 67943 - RNA, 22 nt, Artificial Sequence
  LRRK2 RNA guide
augacaagccuuuugggucuau

SEQ ID NO: 67944 - RNA, 22 nt, Artificial Sequence
  LRRK2 RNA guide
augauagacccaaaaggcuugu

SEQ ID NO: 67945 - RNA, 22 nt, Artificial Sequence
  LRRK2 RNA guide
auggaugauagacccaaaaggc

SEQ ID NO: 67946 - RNA, 22 nt, Artificial Sequence
  LRRK2 RNA guide
auguuagaugacaagccuuuug

SEQ ID NO: 67947 - RNA, 22 nt, Artificial Sequence
  LRRK2 RNA guide
caaaaggcuugucaucuaacau

SEQ ID NO: 67948 - RNA, 22 nt, Artificial Sequence
  LRRK2 RNA guide
caaacauggaugauagacccaa

SEQ ID NO: 67949 - RNA, 22 nt, Artificial Sequence
  LRRK2 RNA guide
caagaguauauguuagaugaca

SEQ ID NO: 67950 - RNA, 22 nt, Artificial Sequence
  LRRK2 RNA guide
caagccuuuugggucuaucauc

SEQ ID NO: 67951 - RNA, 22 nt, Artificial Sequence
  LRRK2 RNA guide
cauggaugauagacccaaaagg

SEQ ID NO: 67952 - RNA, 22 nt, Artificial Sequence
  LRRK2 RNA guide
ccaaaaggcuugucaucuaaca

SEQ ID NO: 67953 - RNA, 22 nt, Artificial Sequence
  LRRK2 RNA guide
ccaagaguauauguuagaugac

SEQ ID NO: 67954 - RNA, 22 nt, Artificial Sequence
  LRRK2 RNA guide
cccaaaaggcuugucaucuaac

SEQ ID NO: 67955 - RNA, 22 nt, Artificial Sequence
  LRRK2 RNA guide
cuccaagaguauauguuagaug

SEQ ID NO: 67956 - RNA, 22 nt, Artificial Sequence
  LRRK2 RNA guide
gacaagccuuuugggucuauca

SEQ ID NO: 67957 - RNA, 22 nt, Artificial Sequence
  LRRK2 RNA guide
gacccaaaaggcuugucaucua

SEQ ID NO: 67958 - RNA, 22 nt, Artificial Sequence
  LRRK2 RNA guide
gaguauauguuagaugacaagc

SEQ ID NO: 67959 - RNA, 22 nt, Artificial Sequence
  LRRK2 RNA guide
gauagacccaaaaggcuuguca

SEQ ID NO: 67960 - RNA, 22 nt, Artificial Sequence
  LRRK2 RNA guide
gaugacaagccuuuugggucua

SEQ ID NO: 67961 - RNA, 22 nt, Artificial Sequence
  LRRK2 RNA guide
gaugauagacccaaaaggcuug

SEQ ID NO: 67962 - RNA, 22 nt, Artificial Sequence
  LRRK2 RNA guide
gcuugucaucuaacauauacuc

SEQ ID NO: 67963 - RNA, 22 nt, Artificial Sequence
  LRRK2 RNA guide
ggaugauagacccaaaaggcuu

SEQ ID NO: 67964 - RNA, 22 nt, Artificial Sequence
  LRRK2 RNA guide
ggcuugucaucuaacauauacu

SEQ ID NO: 67965 - RNA, 22 nt, Artificial Sequence
  LRRK2 RNA guide
guauauguuagaugacaagccu

SEQ ID NO: 67966 - RNA, 22 nt, Artificial Sequence
  LRRK2 RNA guide
guuagaugacaagccuuuuggg

SEQ ID NO: 67967 - RNA, 22 nt, Artificial Sequence
  LRRK2 RNA guide
uagacccaaaaggcuugucauc

SEQ ID NO: 67968 - RNA, 22 nt, Artificial Sequence
  LRRK2 RNA guide
uagaugacaagccuuuuggguc

SEQ ID NO: 67969 - RNA, 22 nt, Artificial Sequence
  LRRK2 RNA guide
uauauguuagaugacaagccuu

SEQ ID NO: 67970 - RNA, 22 nt, Artificial Sequence
  LRRK2 RNA guide
uauguuagaugacaagccuuuu

SEQ ID NO: 67971 - RNA, 22 nt, Artificial Sequence
  LRRK2 RNA guide
uccaagaguauauguuagauga

SEQ ID NO: 67972 - RNA, 22 nt, Artificial Sequence
  LRRK2 RNA guide
ugacaagccuuuugggucuauc

SEQ ID NO: 67973 - RNA, 22 nt, Artificial Sequence
  LRRK2 RNA guide
ugauagacccaaaaggcuuguc

SEQ ID NO: 67974 - RNA, 22 nt, Artificial Sequence
  LRRK2 RNA guide
uggaugauagacccaaaaggcu

SEQ ID NO: 67975 - RNA, 22 nt, Artificial Sequence
  LRRK2 RNA guide
uguuagaugacaagccuuuugg

SEQ ID NO: 67976 - RNA, 22 nt, Artificial Sequence
  LRRK2 RNA guide
uuagaugacaagccuuuugggu

SEQ ID NO: 67977 - RNA, 20 nt, Artificial Sequence
  LRRK2 RNA guide
aaaagguuugucaucuaaca

SEQ ID NO: 67978 - RNA, 20 nt, Artificial Sequence
  LRRK2 RNA guide
aaaccuuuugggucuaucau

SEQ ID NO: 67979 - RNA, 20 nt, Artificial Sequence
  LRRK2 RNA guide
aaagguuugucaucuaacau

SEQ ID NO: 67980 - RNA, 20 nt, Artificial Sequence
  LRRK2 RNA guide
aaccuuuugggucuaucauc

SEQ ID NO: 67981 - RNA, 20 nt, Artificial Sequence
  LRRK2 RNA guide
aagguuugucaucuaacaua

SEQ ID NO: 67982 - RNA, 20 nt, Artificial Sequence
  LRRK2 RNA guide
acaaaccuuuugggucuauc

SEQ ID NO: 67983 - RNA, 20 nt, Artificial Sequence
  LRRK2 RNA guide
acccaaaagguuugucaucu

SEQ ID NO: 67984 - RNA, 20 nt, Artificial Sequence
  LRRK2 RNA guide
agacccaaaagguuugucau

SEQ ID NO: 67985 - RNA, 20 nt, Artificial Sequence
  LRRK2 RNA guide
agaugacaaaccuuuugggu

SEQ ID NO: 67986 - RNA, 20 nt, Artificial Sequence
  LRRK2 RNA guide
agguuugucaucuaacauau

SEQ ID NO: 67987 - RNA, 20 nt, Artificial Sequence
  LRRK2 RNA guide
auagacccaaaagguuuguc

SEQ ID NO: 67988 - RNA, 20 nt, Artificial Sequence
  LRRK2 RNA guide
auauguuagaugacaaaccu

SEQ ID NO: 67989 - RNA, 20 nt, Artificial Sequence
  LRRK2 RNA guide
augacaaaccuuuugggucu

SEQ ID NO: 67990 - RNA, 20 nt, Artificial Sequence
  LRRK2 RNA guide
augauagacccaaaagguuu

SEQ ID NO: 67991 - RNA, 20 nt, Artificial Sequence
  LRRK2 RNA guide
auguuagaugacaaaccuuu

SEQ ID NO: 67992 - RNA, 20 nt, Artificial Sequence
  LRRK2 RNA guide
caaaagguuugucaucuaac

SEQ ID NO: 67993 - RNA, 20 nt, Artificial Sequence
  LRRK2 RNA guide
caaaccuuuugggucuauca

SEQ ID NO: 67994 - RNA, 20 nt, Artificial Sequence
  LRRK2 RNA guide
ccaaaagguuugucaucuaa

SEQ ID NO: 67995 - RNA, 20 nt, Artificial Sequence
  LRRK2 RNA guide
cccaaaagguuugucaucua

SEQ ID NO: 67996 - RNA, 20 nt, Artificial Sequence
  LRRK2 RNA guide
gacaaaccuuuugggucuau

SEQ ID NO: 67997 - RNA, 20 nt, Artificial Sequence
  LRRK2 RNA guide
gacccaaaagguuugucauc

SEQ ID NO: 67998 - RNA, 20 nt, Artificial Sequence
  LRRK2 RNA guide
gauagacccaaaagguuugu

SEQ ID NO: 67999 - RNA, 20 nt, Artificial Sequence
  LRRK2 RNA guide
gaugacaaaccuuuuggguc

SEQ ID NO: 68000 - RNA, 20 nt, Artificial Sequence
  LRRK2 RNA guide
gaugauagacccaaaagguu

SEQ ID NO: 68001 - RNA, 20 nt, Artificial Sequence
  LRRK2 RNA guide
ggaugauagacccaaaaggu

SEQ ID NO: 68002 - RNA, 20 nt, Artificial Sequence
  LRRK2 RNA guide
gguuugucaucuaacauaua

SEQ ID NO: 68003 - RNA, 20 nt, Artificial Sequence
  LRRK2 RNA guide
guauauguuagaugacaaac

SEQ ID NO: 68004 - RNA, 20 nt, Artificial Sequence
  LRRK2 RNA guide
guuagaugacaaaccuuuug

SEQ ID NO: 68005 - RNA, 20 nt, Artificial Sequence
  LRRK2 RNA guide
guuugucaucuaacauauac

SEQ ID NO: 68006 - RNA, 20 nt, Artificial Sequence
  LRRK2 RNA guide
uagacccaaaagguuuguca

SEQ ID NO: 68007 - RNA, 20 nt, Artificial Sequence
  LRRK2 RNA guide
uagaugacaaaccuuuuggg

SEQ ID NO: 68008 - RNA, 20 nt, Artificial Sequence
  LRRK2 RNA guide
uauauguuagaugacaaacc

SEQ ID NO: 68009 - RNA, 20 nt, Artificial Sequence
  LRRK2 RNA guide
uauguuagaugacaaaccuu

SEQ ID NO: 68010 - RNA, 20 nt, Artificial Sequence
  LRRK2 RNA guide
ugacaaaccuuuugggucua

SEQ ID NO: 68011 - RNA, 20 nt, Artificial Sequence
  LRRK2 RNA guide
ugauagacccaaaagguuug

SEQ ID NO: 68012 - RNA, 20 nt, Artificial Sequence
  LRRK2 RNA guide
uguuagaugacaaaccuuuu

SEQ ID NO: 68013 - RNA, 20 nt, Artificial Sequence
  LRRK2 RNA guide
uuagaugacaaaccuuuugg

SEQ ID NO: 68014 - RNA, 21 nt, Artificial Sequence
  LRRK2 RNA guide
aaaccuuuugggucuaucauc

SEQ ID NO: 68015 - RNA, 21 nt, Artificial Sequence
  LRRK2 RNA guide
aaccuuuugggucuaucaucc

SEQ ID NO: 68016 - RNA, 21 nt, Artificial Sequence
  LRRK2 RNA guide
acaaaccuuuugggucuauca

SEQ ID NO: 68017 - RNA, 21 nt, Artificial Sequence
  LRRK2 RNA guide
acccaaaagguuugucaucua

SEQ ID NO: 68018 - RNA, 21 nt, Artificial Sequence
  LRRK2 RNA guide
agacccaaaagguuugucauc

SEQ ID NO: 68019 - RNA, 21 nt, Artificial Sequence
  LRRK2 RNA guide
agaugacaaaccuuuuggguc

SEQ ID NO: 68020 - RNA, 21 nt, Artificial Sequence
  LRRK2 RNA guide
auagacccaaaagguuuguca

SEQ ID NO: 68021 - RNA, 21 nt, Artificial Sequence
  LRRK2 RNA guide
augacaaaccuuuugggucua

SEQ ID NO: 68022 - RNA, 21 nt, Artificial Sequence
  LRRK2 RNA guide
augauagacccaaaagguuug

SEQ ID NO: 68023 - RNA, 21 nt, Artificial Sequence
  LRRK2 RNA guide
caaaagguuugucaucuaaca

SEQ ID NO: 68024 - RNA, 21 nt, Artificial Sequence
  LRRK2 RNA guide
caaaccuuuugggucuaucau

SEQ ID NO: 68025 - RNA, 21 nt, Artificial Sequence
  LRRK2 RNA guide
ccaaaagguuugucaucuaac

SEQ ID NO: 68026 - RNA, 21 nt, Artificial Sequence
  LRRK2 RNA guide
cccaaaagguuugucaucuaa

SEQ ID NO: 68027 - RNA, 21 nt, Artificial Sequence
  LRRK2 RNA guide
gacaaaccuuuugggucuauc

SEQ ID NO: 68028 - RNA, 21 nt, Artificial Sequence
  LRRK2 RNA guide
gacccaaaagguuugucaucu

SEQ ID NO: 68029 - RNA, 21 nt, Artificial Sequence
  LRRK2 RNA guide
gauagacccaaaagguuuguc

SEQ ID NO: 68030 - RNA, 21 nt, Artificial Sequence
  LRRK2 RNA guide
gaugacaaaccuuuugggucu

SEQ ID NO: 68031 - RNA, 21 nt, Artificial Sequence
  LRRK2 RNA guide
gaugauagacccaaaagguuu

SEQ ID NO: 68032 - RNA, 21 nt, Artificial Sequence
  LRRK2 RNA guide
ggaugauagacccaaaagguu

SEQ ID NO: 68033 - RNA, 21 nt, Artificial Sequence
  LRRK2 RNA guide
gguuugucaucuaacauauac

SEQ ID NO: 68034 - RNA, 21 nt, Artificial Sequence
  LRRK2 RNA guide
guauauguuagaugacaaacc

SEQ ID NO: 68035 - RNA, 21 nt, Artificial Sequence
  LRRK2 RNA guide
guuagaugacaaaccuuuugg

SEQ ID NO: 68036 - RNA, 21 nt, Artificial Sequence
  LRRK2 RNA guide
uagacccaaaagguuugucau

SEQ ID NO: 68037 - RNA, 21 nt, Artificial Sequence
  LRRK2 RNA guide
uagaugacaaaccuuuugggu

SEQ ID NO: 68038 - RNA, 21 nt, Artificial Sequence
  LRRK2 RNA guide
ugacaaaccuuuugggucuau

SEQ ID NO: 68039 - RNA, 21 nt, Artificial Sequence
  LRRK2 RNA guide
ugauagacccaaaagguuugu

SEQ ID NO: 68040 - RNA, 21 nt, Artificial Sequence
  LRRK2 RNA guide
uggaugauagacccaaaaggu

SEQ ID NO: 68041 - RNA, 21 nt, Artificial Sequence
  LRRK2 RNA guide
uguuagaugacaaaccuuuug

SEQ ID NO: 68042 - RNA, 21 nt, Artificial Sequence
  LRRK2 RNA guide
uuagaugacaaaccuuuuggg

SEQ ID NO: 68043 - RNA, 22 nt, Artificial Sequence
  LRRK2 RNA guide
aaaccuuuugggucuaucaucc

SEQ ID NO: 68044 - RNA, 22 nt, Artificial Sequence
  LRRK2 RNA guide
aaccuuuugggucuaucaucca

SEQ ID NO: 68045 - RNA, 22 nt, Artificial Sequence
  LRRK2 RNA guide
acaaaccuuuugggucuaucau

SEQ ID NO: 68046 - RNA, 22 nt, Artificial Sequence
  LRRK2 RNA guide
acccaaaagguuugucaucuaa

SEQ ID NO: 68047 - RNA, 22 nt, Artificial Sequence
  LRRK2 RNA guide
agacccaaaagguuugucaucu

SEQ ID NO: 68048 - RNA, 22 nt, Artificial Sequence
  LRRK2 RNA guide
agaugacaaaccuuuugggucu

SEQ ID NO: 68049 - RNA, 22 nt, Artificial Sequence
  LRRK2 RNA guide
agguuugucaucuaacauauac

SEQ ID NO: 68050 - RNA, 22 nt, Artificial Sequence
  LRRK2 RNA guide
aguauauguuagaugacaaacc

SEQ ID NO: 68051 - RNA, 22 nt, Artificial Sequence
  LRRK2 RNA guide
auagacccaaaagguuugucau

SEQ ID NO: 68052 - RNA, 22 nt, Artificial Sequence
  LRRK2 RNA guide
augacaaaccuuuugggucuau

SEQ ID NO: 68053 - RNA, 22 nt, Artificial Sequence
  LRRK2 RNA guide
augauagacccaaaagguuugu

SEQ ID NO: 68054 - RNA, 22 nt, Artificial Sequence
  LRRK2 RNA guide
auggaugauagacccaaaaggu

SEQ ID NO: 68055 - RNA, 22 nt, Artificial Sequence
  LRRK2 RNA guide
auguuagaugacaaaccuuuug

SEQ ID NO: 68056 - RNA, 22 nt, Artificial Sequence
  LRRK2 RNA guide
caaaagguuugucaucuaacau

SEQ ID NO: 68057 - RNA, 22 nt, Artificial Sequence
  LRRK2 RNA guide
caaaccuuuugggucuaucauc

SEQ ID NO: 68058 - RNA, 22 nt, Artificial Sequence
  LRRK2 RNA guide
ccaaaagguuugucaucuaaca

SEQ ID NO: 68059 - RNA, 22 nt, Artificial Sequence
  LRRK2 RNA guide
cccaaaagguuugucaucuaac

SEQ ID NO: 68060 - RNA, 22 nt, Artificial Sequence
  LRRK2 RNA guide
gacaaaccuuuugggucuauca

SEQ ID NO: 68061 - RNA, 22 nt, Artificial Sequence
  LRRK2 RNA guide
gacccaaaagguuugucaucua

SEQ ID NO: 68062 - RNA, 22 nt, Artificial Sequence
  LRRK2 RNA guide
gaguauauguuagaugacaaac

SEQ ID NO: 68063 - RNA, 22 nt, Artificial Sequence
  LRRK2 RNA guide
gauagacccaaaagguuuguca

SEQ ID NO: 68064 - RNA, 22 nt, Artificial Sequence
  LRRK2 RNA guide
gaugacaaaccuuuugggucua

SEQ ID NO: 68065 - RNA, 22 nt, Artificial Sequence
  LRRK2 RNA guide
gaugauagacccaaaagguuug

SEQ ID NO: 68066 - RNA, 22 nt, Artificial Sequence
  LRRK2 RNA guide
ggaugauagacccaaaagguuu

SEQ ID NO: 68067 - RNA, 22 nt, Artificial Sequence
  LRRK2 RNA guide
gguuugucaucuaacauauacu

SEQ ID NO: 68068 - RNA, 22 nt, Artificial Sequence
  LRRK2 RNA guide
guauauguuagaugacaaaccu

SEQ ID NO: 68069 - RNA, 22 nt, Artificial Sequence
  LRRK2 RNA guide
guuagaugacaaaccuuuuggg

SEQ ID NO: 68070 - RNA, 22 nt, Artificial Sequence
  LRRK2 RNA guide
guuugucaucuaacauauacuc

SEQ ID NO: 68071 - RNA, 22 nt, Artificial Sequence
  LRRK2 RNA guide
uagacccaaaagguuugucauc

SEQ ID NO: 68072 - RNA, 22 nt, Artificial Sequence
  LRRK2 RNA guide
uagaugacaaaccuuuuggguc

SEQ ID NO: 68073 - RNA, 22 nt, Artificial Sequence
  LRRK2 RNA guide
ugacaaaccuuuugggucuauc

SEQ ID NO: 68074 - RNA, 22 nt, Artificial Sequence
  LRRK2 RNA guide
ugauagacccaaaagguuuguc

SEQ ID NO: 68075 - RNA, 22 nt, Artificial Sequence
  LRRK2 RNA guide
uggaugauagacccaaaagguu

SEQ ID NO: 68076 - RNA, 22 nt, Artificial Sequence
  LRRK2 RNA guide
uguuagaugacaaaccuuuugg

SEQ ID NO: 68077 - RNA, 22 nt, Artificial Sequence
  LRRK2 RNA guide
uuagaugacaaaccuuuugggu

SEQ ID NO: 68078 - RNA, 20 nt, Artificial Sequence
  LRRK2 RNA guide
aauugaguaguuuuggguga

SEQ ID NO: 68079 - RNA, 20 nt, Artificial Sequence
  LRRK2 RNA guide
acgaagucacccaaaacuac

SEQ ID NO: 68080 - RNA, 20 nt, Artificial Sequence
  LRRK2 RNA guide
acuuacuucauacgaaguca

SEQ ID NO: 68081 - RNA, 20 nt, Artificial Sequence
  LRRK2 RNA guide
acuucauacgaagucaccca

SEQ ID NO: 68082 - RNA, 20 nt, Artificial Sequence
  LRRK2 RNA guide
acuucguaugaaguaaguac

SEQ ID NO: 68083 - RNA, 20 nt, Artificial Sequence
  LRRK2 RNA guide
agaguacuuacuucauacga

SEQ ID NO: 68084 - RNA, 20 nt, Artificial Sequence
  LRRK2 RNA guide
aguacuuacuucauacgaag

SEQ ID NO: 68085 - RNA, 20 nt, Artificial Sequence
  LRRK2 RNA guide
aguaguuuugggugacuucg

SEQ ID NO: 68086 - RNA, 20 nt, Artificial Sequence
  LRRK2 RNA guide
aguuuugggugacuucguau

SEQ ID NO: 68087 - RNA, 20 nt, Artificial Sequence
  LRRK2 RNA guide
auacgaagucacccaaaacu

SEQ ID NO: 68088 - RNA, 20 nt, Artificial Sequence
  LRRK2 RNA guide
auagaguacuuacuucauac

SEQ ID NO: 68089 - RNA, 20 nt, Artificial Sequence
  LRRK2 RNA guide
aucaauagaguacuuacuuc

SEQ ID NO: 68090 - RNA, 20 nt, Artificial Sequence
  LRRK2 RNA guide
auugaguaguuuugggugac

SEQ ID NO: 68091 - RNA, 20 nt, Artificial Sequence
  LRRK2 RNA guide
caauagaguacuuacuucau

SEQ ID NO: 68092 - RNA, 20 nt, Artificial Sequence
  LRRK2 RNA guide
cauacgaagucacccaaaac

SEQ ID NO: 68093 - RNA, 20 nt, Artificial Sequence
  LRRK2 RNA guide
cguaugaaguaaguacucua

SEQ ID NO: 68094 - RNA, 20 nt, Artificial Sequence
  LRRK2 RNA guide
cuuacuucauacgaagucac

SEQ ID NO: 68095 - RNA, 20 nt, Artificial Sequence
  LRRK2 RNA guide
cuucauacgaagucacccaa

SEQ ID NO: 68096 - RNA, 20 nt, Artificial Sequence
  LRRK2 RNA guide
cuucguaugaaguaaguacu

SEQ ID NO: 68097 - RNA, 20 nt, Artificial Sequence
  LRRK2 RNA guide
gacuucguaugaaguaagua

SEQ ID NO: 68098 - RNA, 20 nt, Artificial Sequence
  LRRK2 RNA guide
gaguacuuacuucauacgaa

SEQ ID NO: 68099 - RNA, 20 nt, Artificial Sequence
  LRRK2 RNA guide
gaguaguuuugggugacuuc

SEQ ID NO: 68100 - RNA, 20 nt, Artificial Sequence
  LRRK2 RNA guide
gggugacuucguaugaagua

SEQ ID NO: 68101 - RNA, 20 nt, Artificial Sequence
  LRRK2 RNA guide
ggugacuucguaugaaguaa

SEQ ID NO: 68102 - RNA, 20 nt, Artificial Sequence
  LRRK2 RNA guide
guacuuacuucauacgaagu

SEQ ID NO: 68103 - RNA, 20 nt, Artificial Sequence
  LRRK2 RNA guide
guaguuuugggugacuucgu

SEQ ID NO: 68104 - RNA, 20 nt, Artificial Sequence
  LRRK2 RNA guide
gugacuucguaugaaguaag

SEQ ID NO: 68105 - RNA, 20 nt, Artificial Sequence
  LRRK2 RNA guide
guuuugggugacuucguaug

SEQ ID NO: 68106 - RNA, 20 nt, Artificial Sequence
  LRRK2 RNA guide
uacgaagucacccaaaacua

SEQ ID NO: 68107 - RNA, 20 nt, Artificial Sequence
  LRRK2 RNA guide
uacuuacuucauacgaaguc

SEQ ID NO: 68108 - RNA, 20 nt, Artificial Sequence
  LRRK2 RNA guide
uacuucauacgaagucaccc

SEQ ID NO: 68109 - RNA, 20 nt, Artificial Sequence
  LRRK2 RNA guide
uagaguacuuacuucauacg

SEQ ID NO: 68110 - RNA, 20 nt, Artificial Sequence
  LRRK2 RNA guide
uaguuuugggugacuucgua

SEQ ID NO: 68111 - RNA, 20 nt, Artificial Sequence
  LRRK2 RNA guide
ucaauagaguacuuacuuca

SEQ ID NO: 68112 - RNA, 20 nt, Artificial Sequence
  LRRK2 RNA guide
ucauacgaagucacccaaaa

SEQ ID NO: 68113 - RNA, 20 nt, Artificial Sequence
  LRRK2 RNA guide
ucguaugaaguaaguacucu

SEQ ID NO: 68114 - RNA, 20 nt, Artificial Sequence
  LRRK2 RNA guide
ugacuucguaugaaguaagu

SEQ ID NO: 68115 - RNA, 20 nt, Artificial Sequence
  LRRK2 RNA guide
ugaguaguuuugggugacuu

SEQ ID NO: 68116 - RNA, 20 nt, Artificial Sequence
  LRRK2 RNA guide
ugggugacuucguaugaagu

SEQ ID NO: 68117 - RNA, 20 nt, Artificial Sequence
  LRRK2 RNA guide
uuacuucauacgaagucacc

SEQ ID NO: 68118 - RNA, 20 nt, Artificial Sequence
  LRRK2 RNA guide
uucauacgaagucacccaaa

SEQ ID NO: 68119 - RNA, 20 nt, Artificial Sequence
  LRRK2 RNA guide
uucguaugaaguaaguacuc

SEQ ID NO: 68120 - RNA, 20 nt, Artificial Sequence
  LRRK2 RNA guide
uugaguaguuuugggugacu

SEQ ID NO: 68121 - RNA, 20 nt, Artificial Sequence
  LRRK2 RNA guide
uugggugacuucguaugaag

SEQ ID NO: 68122 - RNA, 20 nt, Artificial Sequence
  LRRK2 RNA guide
uuugggugacuucguaugaa

SEQ ID NO: 68123 - RNA, 20 nt, Artificial Sequence
  LRRK2 RNA guide
uuuugggugacuucguauga

SEQ ID NO: 68124 - RNA, 21 nt, Artificial Sequence
  LRRK2 RNA guide
aaauugaguaguuuuggguga

SEQ ID NO: 68125 - RNA, 21 nt, Artificial Sequence
  LRRK2 RNA guide
aauugaguaguuuugggugac

SEQ ID NO: 68126 - RNA, 21 nt, Artificial Sequence
  LRRK2 RNA guide
acgaagucacccaaaacuacu

SEQ ID NO: 68127 - RNA, 21 nt, Artificial Sequence
  LRRK2 RNA guide
acuuacuucauacgaagucac

SEQ ID NO: 68128 - RNA, 21 nt, Artificial Sequence
  LRRK2 RNA guide
acuucauacgaagucacccaa

SEQ ID NO: 68129 - RNA, 21 nt, Artificial Sequence
  LRRK2 RNA guide
acuucguaugaaguaaguacu

SEQ ID NO: 68130 - RNA, 21 nt, Artificial Sequence
  LRRK2 RNA guide
agaguacuuacuucauacgaa

SEQ ID NO: 68131 - RNA, 21 nt, Artificial Sequence
  LRRK2 RNA guide
aguacuuacuucauacgaagu

SEQ ID NO: 68132 - RNA, 21 nt, Artificial Sequence
  LRRK2 RNA guide
aguaguuuugggugacuucgu

SEQ ID NO: 68133 - RNA, 21 nt, Artificial Sequence
  LRRK2 RNA guide
aguuuugggugacuucguaug

SEQ ID NO: 68134 - RNA, 21 nt, Artificial Sequence
  LRRK2 RNA guide
auacgaagucacccaaaacua

SEQ ID NO: 68135 - RNA, 21 nt, Artificial Sequence
  LRRK2 RNA guide
auagaguacuuacuucauacg

SEQ ID NO: 68136 - RNA, 21 nt, Artificial Sequence
  LRRK2 RNA guide
auugaguaguuuugggugacu

SEQ ID NO: 68137 - RNA, 21 nt, Artificial Sequence
  LRRK2 RNA guide
cauacgaagucacccaaaacu

SEQ ID NO: 68138 - RNA, 21 nt, Artificial Sequence
  LRRK2 RNA guide
cguaugaaguaaguacucuau

SEQ ID NO: 68139 - RNA, 21 nt, Artificial Sequence
  LRRK2 RNA guide
cuuacuucauacgaagucacc

SEQ ID NO: 68140 - RNA, 21 nt, Artificial Sequence
  LRRK2 RNA guide
cuucauacgaagucacccaaa

SEQ ID NO: 68141 - RNA, 21 nt, Artificial Sequence
  LRRK2 RNA guide
cuucguaugaaguaaguacuc

SEQ ID NO: 68142 - RNA, 21 nt, Artificial Sequence
  LRRK2 RNA guide
gacuucguaugaaguaaguac

SEQ ID NO: 68143 - RNA, 21 nt, Artificial Sequence
  LRRK2 RNA guide
gaguacuuacuucauacgaag

SEQ ID NO: 68144 - RNA, 21 nt, Artificial Sequence
  LRRK2 RNA guide
gaguaguuuugggugacuucg

SEQ ID NO: 68145 - RNA, 21 nt, Artificial Sequence
  LRRK2 RNA guide
gggugacuucguaugaaguaa

SEQ ID NO: 68146 - RNA, 21 nt, Artificial Sequence
  LRRK2 RNA guide
ggugacuucguaugaaguaag

SEQ ID NO: 68147 - RNA, 21 nt, Artificial Sequence
  LRRK2 RNA guide
guacuuacuucauacgaaguc

SEQ ID NO: 68148 - RNA, 21 nt, Artificial Sequence
  LRRK2 RNA guide
guaguuuugggugacuucgua

SEQ ID NO: 68149 - RNA, 21 nt, Artificial Sequence
  LRRK2 RNA guide
gugacuucguaugaaguaagu

SEQ ID NO: 68150 - RNA, 21 nt, Artificial Sequence
  LRRK2 RNA guide
guuuugggugacuucguauga

SEQ ID NO: 68151 - RNA, 21 nt, Artificial Sequence
  LRRK2 RNA guide
uacgaagucacccaaaacuac

SEQ ID NO: 68152 - RNA, 21 nt, Artificial Sequence
  LRRK2 RNA guide
uacuuacuucauacgaaguca

SEQ ID NO: 68153 - RNA, 21 nt, Artificial Sequence
  LRRK2 RNA guide
uacuucauacgaagucaccca

SEQ ID NO: 68154 - RNA, 21 nt, Artificial Sequence
  LRRK2 RNA guide
uagaguacuuacuucauacga

SEQ ID NO: 68155 - RNA, 21 nt, Artificial Sequence
  LRRK2 RNA guide
uaguuuugggugacuucguau

SEQ ID NO: 68156 - RNA, 21 nt, Artificial Sequence
  LRRK2 RNA guide
ucauacgaagucacccaaaac

SEQ ID NO: 68157 - RNA, 21 nt, Artificial Sequence
  LRRK2 RNA guide
ucguaugaaguaaguacucua

SEQ ID NO: 68158 - RNA, 21 nt, Artificial Sequence
  LRRK2 RNA guide
ugacuucguaugaaguaagua

SEQ ID NO: 68159 - RNA, 21 nt, Artificial Sequence
  LRRK2 RNA guide
ugaguaguuuugggugacuuc

SEQ ID NO: 68160 - RNA, 21 nt, Artificial Sequence
  LRRK2 RNA guide
ugggugacuucguaugaagua

SEQ ID NO: 68161 - RNA, 21 nt, Artificial Sequence
  LRRK2 RNA guide
uuacuucauacgaagucaccc

SEQ ID NO: 68162 - RNA, 21 nt, Artificial Sequence
  LRRK2 RNA guide
uucauacgaagucacccaaaa

SEQ ID NO: 68163 - RNA, 21 nt, Artificial Sequence
  LRRK2 RNA guide
uucguaugaaguaaguacucu

SEQ ID NO: 68164 - RNA, 21 nt, Artificial Sequence
  LRRK2 RNA guide
uugaguaguuuugggugacuu

SEQ ID NO: 68165 - RNA, 21 nt, Artificial Sequence
  LRRK2 RNA guide
uugggugacuucguaugaagu

SEQ ID NO: 68166 - RNA, 21 nt, Artificial Sequence
  LRRK2 RNA guide
uuugggugacuucguaugaag

SEQ ID NO: 68167 - RNA, 21 nt, Artificial Sequence
  LRRK2 RNA guide
uuuugggugacuucguaugaa

SEQ ID NO: 68168 - RNA, 22 nt, Artificial Sequence
  LRRK2 RNA guide
aaauugaguaguuuugggugac

SEQ ID NO: 68169 - RNA, 22 nt, Artificial Sequence
  LRRK2 RNA guide
aauagaguacuuacuucauacg

SEQ ID NO: 68170 - RNA, 22 nt, Artificial Sequence
  LRRK2 RNA guide
aauugaguaguuuugggugacu

SEQ ID NO: 68171 - RNA, 22 nt, Artificial Sequence
  LRRK2 RNA guide
acgaagucacccaaaacuacuc

SEQ ID NO: 68172 - RNA, 22 nt, Artificial Sequence
  LRRK2 RNA guide
acuuacuucauacgaagucacc

SEQ ID NO: 68173 - RNA, 22 nt, Artificial Sequence
  LRRK2 RNA guide
acuucauacgaagucacccaaa

SEQ ID NO: 68174 - RNA, 22 nt, Artificial Sequence
  LRRK2 RNA guide
acuucguaugaaguaaguacuc

SEQ ID NO: 68175 - RNA, 22 nt, Artificial Sequence
  LRRK2 RNA guide
agaguacuuacuucauacgaag

SEQ ID NO: 68176 - RNA, 22 nt, Artificial Sequence
  LRRK2 RNA guide
aguacuuacuucauacgaaguc

SEQ ID NO: 68177 - RNA, 22 nt, Artificial Sequence
  LRRK2 RNA guide
aguaguuuugggugacuucgua

SEQ ID NO: 68178 - RNA, 22 nt, Artificial Sequence
  LRRK2 RNA guide
aguuuugggugacuucguauga

SEQ ID NO: 68179 - RNA, 22 nt, Artificial Sequence
  LRRK2 RNA guide
auacgaagucacccaaaacuac

SEQ ID NO: 68180 - RNA, 22 nt, Artificial Sequence
  LRRK2 RNA guide
auagaguacuuacuucauacga

SEQ ID NO: 68181 - RNA, 22 nt, Artificial Sequence
  LRRK2 RNA guide
auugaguaguuuugggugacuu

SEQ ID NO: 68182 - RNA, 22 nt, Artificial Sequence
  LRRK2 RNA guide
caaauugaguaguuuuggguga

SEQ ID NO: 68183 - RNA, 22 nt, Artificial Sequence
  LRRK2 RNA guide
caauagaguacuuacuucauac

SEQ ID NO: 68184 - RNA, 22 nt, Artificial Sequence
  LRRK2 RNA guide
caaucaauagaguacuuacuuc

SEQ ID NO: 68185 - RNA, 22 nt, Artificial Sequence
  LRRK2 RNA guide
cauacgaagucacccaaaacua

SEQ ID NO: 68186 - RNA, 22 nt, Artificial Sequence
  LRRK2 RNA guide
cguaugaaguaaguacucuauu

SEQ ID NO: 68187 - RNA, 22 nt, Artificial Sequence
  LRRK2 RNA guide
cuuacuucauacgaagucaccc

SEQ ID NO: 68188 - RNA, 22 nt, Artificial Sequence
  LRRK2 RNA guide
cuucauacgaagucacccaaaa

SEQ ID NO: 68189 - RNA, 22 nt, Artificial Sequence
  LRRK2 RNA guide
cuucguaugaaguaaguacucu

SEQ ID NO: 68190 - RNA, 22 nt, Artificial Sequence
  LRRK2 RNA guide
gacuucguaugaaguaaguacu

SEQ ID NO: 68191 - RNA, 22 nt, Artificial Sequence
  LRRK2 RNA guide
gaguacuuacuucauacgaagu

SEQ ID NO: 68192 - RNA, 22 nt, Artificial Sequence
  LRRK2 RNA guide
gaguaguuuugggugacuucgu

SEQ ID NO: 68193 - RNA, 22 nt, Artificial Sequence
  LRRK2 RNA guide
gggugacuucguaugaaguaag

SEQ ID NO: 68194 - RNA, 22 nt, Artificial Sequence
  LRRK2 RNA guide
ggugacuucguaugaaguaagu

SEQ ID NO: 68195 - RNA, 22 nt, Artificial Sequence
  LRRK2 RNA guide
guacuuacuucauacgaaguca

SEQ ID NO: 68196 - RNA, 22 nt, Artificial Sequence
  LRRK2 RNA guide
guaguuuugggugacuucguau

SEQ ID NO: 68197 - RNA, 22 nt, Artificial Sequence
  LRRK2 RNA guide
gugacuucguaugaaguaagua

SEQ ID NO: 68198 - RNA, 22 nt, Artificial Sequence
  LRRK2 RNA guide
guuuugggugacuucguaugaa

SEQ ID NO: 68199 - RNA, 22 nt, Artificial Sequence
  LRRK2 RNA guide
uacgaagucacccaaaacuacu

SEQ ID NO: 68200 - RNA, 22 nt, Artificial Sequence
  LRRK2 RNA guide
uacuuacuucauacgaagucac

SEQ ID NO: 68201 - RNA, 22 nt, Artificial Sequence
  LRRK2 RNA guide
uacuucauacgaagucacccaa

SEQ ID NO: 68202 - RNA, 22 nt, Artificial Sequence
  LRRK2 RNA guide
uagaguacuuacuucauacgaa

SEQ ID NO: 68203 - RNA, 22 nt, Artificial Sequence
  LRRK2 RNA guide
uaguuuugggugacuucguaug

SEQ ID NO: 68204 - RNA, 22 nt, Artificial Sequence
  LRRK2 RNA guide
ucauacgaagucacccaaaacu

SEQ ID NO: 68205 - RNA, 22 nt, Artificial Sequence
  LRRK2 RNA guide
ucguaugaaguaaguacucuau

SEQ ID NO: 68206 - RNA, 22 nt, Artificial Sequence
  LRRK2 RNA guide
ugacuucguaugaaguaaguac

SEQ ID NO: 68207 - RNA, 22 nt, Artificial Sequence
  LRRK2 RNA guide
ugaguaguuuugggugacuucg

SEQ ID NO: 68208 - RNA, 22 nt, Artificial Sequence
  LRRK2 RNA guide
ugggugacuucguaugaaguaa

SEQ ID NO: 68209 - RNA, 22 nt, Artificial Sequence
  LRRK2 RNA guide
uuacuucauacgaagucaccca

SEQ ID NO: 68210 - RNA, 22 nt, Artificial Sequence
  LRRK2 RNA guide
uucauacgaagucacccaaaac

SEQ ID NO: 68211 - RNA, 22 nt, Artificial Sequence
  LRRK2 RNA guide
uucguaugaaguaaguacucua

SEQ ID NO: 68212 - RNA, 22 nt, Artificial Sequence
  LRRK2 RNA guide
uugaguaguuuugggugacuuc

SEQ ID NO: 68213 - RNA, 22 nt, Artificial Sequence
  LRRK2 RNA guide
uugggugacuucguaugaagua

SEQ ID NO: 68214 - RNA, 22 nt, Artificial Sequence
  LRRK2 RNA guide
uuugggugacuucguaugaagu

SEQ ID NO: 68215 - RNA, 22 nt, Artificial Sequence
  LRRK2 RNA guide
uuuugggugacuucguaugaag

SEQ ID NO: 68216 - RNA, 20 nt, Artificial Sequence
  LRRK2 RNA guide
aagaagucacccaaaacuac

SEQ ID NO: 68217 - RNA, 20 nt, Artificial Sequence
  LRRK2 RNA guide
acuuacuucauaagaaguca

SEQ ID NO: 68218 - RNA, 20 nt, Artificial Sequence
  LRRK2 RNA guide
acuucauaagaagucaccca

SEQ ID NO: 68219 - RNA, 20 nt, Artificial Sequence
  LRRK2 RNA guide
acuucuuaugaaguaaguac

SEQ ID NO: 68220 - RNA, 20 nt, Artificial Sequence
  LRRK2 RNA guide
agaguacuuacuucauaaga

SEQ ID NO: 68221 - RNA, 20 nt, Artificial Sequence
  LRRK2 RNA guide
aguacuuacuucauaagaag

SEQ ID NO: 68222 - RNA, 20 nt, Artificial Sequence
  LRRK2 RNA guide
aguaguuuugggugacuucu

SEQ ID NO: 68223 - RNA, 20 nt, Artificial Sequence
  LRRK2 RNA guide
aguuuugggugacuucuuau

SEQ ID NO: 68224 - RNA, 20 nt, Artificial Sequence
  LRRK2 RNA guide
auaagaagucacccaaaacu

SEQ ID NO: 68225 - RNA, 20 nt, Artificial Sequence
  LRRK2 RNA guide
cauaagaagucacccaaaac

SEQ ID NO: 68226 - RNA, 20 nt, Artificial Sequence
  LRRK2 RNA guide
cuuacuucauaagaagucac

SEQ ID NO: 68227 - RNA, 20 nt, Artificial Sequence
  LRRK2 RNA guide
cuuaugaaguaaguacucua

SEQ ID NO: 68228 - RNA, 20 nt, Artificial Sequence
  LRRK2 RNA guide
cuucauaagaagucacccaa

SEQ ID NO: 68229 - RNA, 20 nt, Artificial Sequence
  LRRK2 RNA guide
cuucuuaugaaguaaguacu

SEQ ID NO: 68230 - RNA, 20 nt, Artificial Sequence
  LRRK2 RNA guide
gacuucuuaugaaguaagua

SEQ ID NO: 68231 - RNA, 20 nt, Artificial Sequence
  LRRK2 RNA guide
gaguacuuacuucauaagaa

SEQ ID NO: 68232 - RNA, 20 nt, Artificial Sequence
  LRRK2 RNA guide
gggugacuucuuaugaagua

SEQ ID NO: 68233 - RNA, 20 nt, Artificial Sequence
  LRRK2 RNA guide
ggugacuucuuaugaaguaa

SEQ ID NO: 68234 - RNA, 20 nt, Artificial Sequence
  LRRK2 RNA guide
guacuuacuucauaagaagu

SEQ ID NO: 68235 - RNA, 20 nt, Artificial Sequence
  LRRK2 RNA guide
guaguuuugggugacuucuu

SEQ ID NO: 68236 - RNA, 20 nt, Artificial Sequence
  LRRK2 RNA guide
gugacuucuuaugaaguaag

SEQ ID NO: 68237 - RNA, 20 nt, Artificial Sequence
  LRRK2 RNA guide
guuuugggugacuucuuaug

SEQ ID NO: 68238 - RNA, 20 nt, Artificial Sequence
  LRRK2 RNA guide
uaagaagucacccaaaacua

SEQ ID NO: 68239 - RNA, 20 nt, Artificial Sequence
  LRRK2 RNA guide
uacuuacuucauaagaaguc

SEQ ID NO: 68240 - RNA, 20 nt, Artificial Sequence
  LRRK2 RNA guide
uacuucauaagaagucaccc

SEQ ID NO: 68241 - RNA, 20 nt, Artificial Sequence
  LRRK2 RNA guide
uagaguacuuacuucauaag

SEQ ID NO: 68242 - RNA, 20 nt, Artificial Sequence
  LRRK2 RNA guide
uaguuuugggugacuucuua

SEQ ID NO: 68243 - RNA, 20 nt, Artificial Sequence
  LRRK2 RNA guide
ucauaagaagucacccaaaa

SEQ ID NO: 68244 - RNA, 20 nt, Artificial Sequence
  LRRK2 RNA guide
ucuuaugaaguaaguacucu

SEQ ID NO: 68245 - RNA, 20 nt, Artificial Sequence
  LRRK2 RNA guide
ugacuucuuaugaaguaagu

SEQ ID NO: 68246 - RNA, 20 nt, Artificial Sequence
  LRRK2 RNA guide
ugggugacuucuuaugaagu

SEQ ID NO: 68247 - RNA, 20 nt, Artificial Sequence
  LRRK2 RNA guide
uuacuucauaagaagucacc

SEQ ID NO: 68248 - RNA, 20 nt, Artificial Sequence
  LRRK2 RNA guide
uucauaagaagucacccaaa

SEQ ID NO: 68249 - RNA, 20 nt, Artificial Sequence
  LRRK2 RNA guide
uucuuaugaaguaaguacuc

SEQ ID NO: 68250 - RNA, 20 nt, Artificial Sequence
  LRRK2 RNA guide
uugggugacuucuuaugaag

SEQ ID NO: 68251 - RNA, 20 nt, Artificial Sequence
  LRRK2 RNA guide
uuugggugacuucuuaugaa

SEQ ID NO: 68252 - RNA, 20 nt, Artificial Sequence
  LRRK2 RNA guide
uuuugggugacuucuuauga

SEQ ID NO: 68253 - RNA, 21 nt, Artificial Sequence
  LRRK2 RNA guide
aagaagucacccaaaacuacu

SEQ ID NO: 68254 - RNA, 21 nt, Artificial Sequence
  LRRK2 RNA guide
acuuacuucauaagaagucac

SEQ ID NO: 68255 - RNA, 21 nt, Artificial Sequence
  LRRK2 RNA guide
acuucauaagaagucacccaa

SEQ ID NO: 68256 - RNA, 21 nt, Artificial Sequence
  LRRK2 RNA guide
aguaguuuugggugacuucuu

SEQ ID NO: 68257 - RNA, 21 nt, Artificial Sequence
  LRRK2 RNA guide
aguuuugggugacuucuuaug

SEQ ID NO: 68258 - RNA, 21 nt, Artificial Sequence
  LRRK2 RNA guide
auaagaagucacccaaaacua

SEQ ID NO: 68259 - RNA, 21 nt, Artificial Sequence
  LRRK2 RNA guide
cauaagaagucacccaaaacu

SEQ ID NO: 68260 - RNA, 21 nt, Artificial Sequence
  LRRK2 RNA guide
cuuacuucauaagaagucacc

SEQ ID NO: 68261 - RNA, 21 nt, Artificial Sequence
  LRRK2 RNA guide
cuucauaagaagucacccaaa

SEQ ID NO: 68262 - RNA, 21 nt, Artificial Sequence
  LRRK2 RNA guide
cuucuuaugaaguaaguacuc

SEQ ID NO: 68263 - RNA, 21 nt, Artificial Sequence
  LRRK2 RNA guide
gacuucuuaugaaguaaguac

SEQ ID NO: 68264 - RNA, 21 nt, Artificial Sequence
  LRRK2 RNA guide
gaguacuuacuucauaagaag

SEQ ID NO: 68265 - RNA, 21 nt, Artificial Sequence
  LRRK2 RNA guide
gaguaguuuugggugacuucu

SEQ ID NO: 68266 - RNA, 21 nt, Artificial Sequence
  LRRK2 RNA guide
gggugacuucuuaugaaguaa

SEQ ID NO: 68267 - RNA, 21 nt, Artificial Sequence
  LRRK2 RNA guide
ggugacuucuuaugaaguaag

SEQ ID NO: 68268 - RNA, 21 nt, Artificial Sequence
  LRRK2 RNA guide
guacuuacuucauaagaaguc

SEQ ID NO: 68269 - RNA, 21 nt, Artificial Sequence
  LRRK2 RNA guide
guaguuuugggugacuucuua

SEQ ID NO: 68270 - RNA, 21 nt, Artificial Sequence
  LRRK2 RNA guide
gugacuucuuaugaaguaagu

SEQ ID NO: 68271 - RNA, 21 nt, Artificial Sequence
  LRRK2 RNA guide
guuuugggugacuucuuauga

SEQ ID NO: 68272 - RNA, 21 nt, Artificial Sequence
  LRRK2 RNA guide
uaagaagucacccaaaacuac

SEQ ID NO: 68273 - RNA, 21 nt, Artificial Sequence
  LRRK2 RNA guide
uacuucauaagaagucaccca

SEQ ID NO: 68274 - RNA, 21 nt, Artificial Sequence
  LRRK2 RNA guide
uaguuuugggugacuucuuau

SEQ ID NO: 68275 - RNA, 21 nt, Artificial Sequence
  LRRK2 RNA guide
ucauaagaagucacccaaaac

SEQ ID NO: 68276 - RNA, 21 nt, Artificial Sequence
  LRRK2 RNA guide
ugggugacuucuuaugaagua

SEQ ID NO: 68277 - RNA, 21 nt, Artificial Sequence
  LRRK2 RNA guide
uuacuucauaagaagucaccc

SEQ ID NO: 68278 - RNA, 21 nt, Artificial Sequence
  LRRK2 RNA guide
uucauaagaagucacccaaaa

SEQ ID NO: 68279 - RNA, 21 nt, Artificial Sequence
  LRRK2 RNA guide
uugggugacuucuuaugaagu

SEQ ID NO: 68280 - RNA, 21 nt, Artificial Sequence
  LRRK2 RNA guide
uuugggugacuucuuaugaag

SEQ ID NO: 68281 - RNA, 21 nt, Artificial Sequence
  LRRK2 RNA guide
uuuugggugacuucuuaugaa

SEQ ID NO: 68282 - RNA, 22 nt, Artificial Sequence
  LRRK2 RNA guide
aagaagucacccaaaacuacuc

SEQ ID NO: 68283 - RNA, 22 nt, Artificial Sequence
  LRRK2 RNA guide
acuuacuucauaagaagucacc

SEQ ID NO: 68284 - RNA, 22 nt, Artificial Sequence
  LRRK2 RNA guide
acuucauaagaagucacccaaa

SEQ ID NO: 68285 - RNA, 22 nt, Artificial Sequence
  LRRK2 RNA guide
acuucuuaugaaguaaguacuc

SEQ ID NO: 68286 - RNA, 22 nt, Artificial Sequence
  LRRK2 RNA guide
agaguacuuacuucauaagaag

SEQ ID NO: 68287 - RNA, 22 nt, Artificial Sequence
  LRRK2 RNA guide
aguacuuacuucauaagaaguc

SEQ ID NO: 68288 - RNA, 22 nt, Artificial Sequence
  LRRK2 RNA guide
aguaguuuugggugacuucuua

SEQ ID NO: 68289 - RNA, 22 nt, Artificial Sequence
  LRRK2 RNA guide
aguuuugggugacuucuuauga

SEQ ID NO: 68290 - RNA, 22 nt, Artificial Sequence
  LRRK2 RNA guide
auaagaagucacccaaaacuac

SEQ ID NO: 68291 - RNA, 22 nt, Artificial Sequence
  LRRK2 RNA guide
cauaagaagucacccaaaacua

SEQ ID NO: 68292 - RNA, 22 nt, Artificial Sequence
  LRRK2 RNA guide
cuuacuucauaagaagucaccc

SEQ ID NO: 68293 - RNA, 22 nt, Artificial Sequence
  LRRK2 RNA guide
cuucauaagaagucacccaaaa

SEQ ID NO: 68294 - RNA, 22 nt, Artificial Sequence
  LRRK2 RNA guide
cuucuuaugaaguaaguacucu

SEQ ID NO: 68295 - RNA, 22 nt, Artificial Sequence
  LRRK2 RNA guide
gacuucuuaugaaguaaguacu

SEQ ID NO: 68296 - RNA, 22 nt, Artificial Sequence
  LRRK2 RNA guide
gaguacuuacuucauaagaagu

SEQ ID NO: 68297 - RNA, 22 nt, Artificial Sequence
  LRRK2 RNA guide
gaguaguuuugggugacuucuu

SEQ ID NO: 68298 - RNA, 22 nt, Artificial Sequence
  LRRK2 RNA guide
gggugacuucuuaugaaguaag

SEQ ID NO: 68299 - RNA, 22 nt, Artificial Sequence
  LRRK2 RNA guide
ggugacuucuuaugaaguaagu

SEQ ID NO: 68300 - RNA, 22 nt, Artificial Sequence
  LRRK2 RNA guide
guacuuacuucauaagaaguca

SEQ ID NO: 68301 - RNA, 22 nt, Artificial Sequence
  LRRK2 RNA guide
guaguuuugggugacuucuuau

SEQ ID NO: 68302 - RNA, 22 nt, Artificial Sequence
  LRRK2 RNA guide
gugacuucuuaugaaguaagua

SEQ ID NO: 68303 - RNA, 22 nt, Artificial Sequence
  LRRK2 RNA guide
guuuugggugacuucuuaugaa

SEQ ID NO: 68304 - RNA, 22 nt, Artificial Sequence
  LRRK2 RNA guide
uaagaagucacccaaaacuacu

SEQ ID NO: 68305 - RNA, 22 nt, Artificial Sequence
  LRRK2 RNA guide
uacuuacuucauaagaagucac

SEQ ID NO: 68306 - RNA, 22 nt, Artificial Sequence
  LRRK2 RNA guide
uacuucauaagaagucacccaa

SEQ ID NO: 68307 - RNA, 22 nt, Artificial Sequence
  LRRK2 RNA guide
uaguuuugggugacuucuuaug

SEQ ID NO: 68308 - RNA, 22 nt, Artificial Sequence
  LRRK2 RNA guide
ucauaagaagucacccaaaacu

SEQ ID NO: 68309 - RNA, 22 nt, Artificial Sequence
  LRRK2 RNA guide
ugacuucuuaugaaguaaguac

SEQ ID NO: 68310 - RNA, 22 nt, Artificial Sequence
  LRRK2 RNA guide
ugaguaguuuugggugacuucu

SEQ ID NO: 68311 - RNA, 22 nt, Artificial Sequence
  LRRK2 RNA guide
ugggugacuucuuaugaaguaa

SEQ ID NO: 68312 - RNA, 22 nt, Artificial Sequence
  LRRK2 RNA guide
uuacuucauaagaagucaccca

SEQ ID NO: 68313 - RNA, 22 nt, Artificial Sequence
  LRRK2 RNA guide
uucauaagaagucacccaaaac

SEQ ID NO: 68314 - RNA, 22 nt, Artificial Sequence
  LRRK2 RNA guide
uugggugacuucuuaugaagua

SEQ ID NO: 68315 - RNA, 22 nt, Artificial Sequence
  LRRK2 RNA guide
uuugggugacuucuuaugaagu

SEQ ID NO: 68316 - RNA, 22 nt, Artificial Sequence
  LRRK2 RNA guide
uuuugggugacuucuuaugaag

SEQ ID NO: 68317 - RNA, 20 nt, Artificial Sequence
  LRRK2 RNA guide
aaacaauuucaaguccagca

SEQ ID NO: 68318 - RNA, 20 nt, Artificial Sequence
  LRRK2 RNA guide
aaaggaaggcaggcuuugcu

SEQ ID NO: 68319 - RNA, 20 nt, Artificial Sequence
  LRRK2 RNA guide
aacaauuucaaguccagcau

SEQ ID NO: 68320 - RNA, 20 nt, Artificial Sequence
  LRRK2 RNA guide
aaggaaggcaggcuuugcuc

SEQ ID NO: 68321 - RNA, 20 nt, Artificial Sequence
  LRRK2 RNA guide
aaggcaggcuuugcucucua

SEQ ID NO: 68322 - RNA, 20 nt, Artificial Sequence
  LRRK2 RNA guide
aaguccagcaucuagagagc

SEQ ID NO: 68323 - RNA, 20 nt, Artificial Sequence
  LRRK2 RNA guide
aauuucaaguccagcaucua

SEQ ID NO: 68324 - RNA, 20 nt, Artificial Sequence
  LRRK2 RNA guide
acaauuucaaguccagcauc

SEQ ID NO: 68325 - RNA, 20 nt, Artificial Sequence
  LRRK2 RNA guide
agcaucuagagagcaaagcc

SEQ ID NO: 68326 - RNA, 20 nt, Artificial Sequence
  LRRK2 RNA guide
aggaaggcaggcuuugcucu

SEQ ID NO: 68327 - RNA, 20 nt, Artificial Sequence
  LRRK2 RNA guide
aggcaggcuuugcucucuag

SEQ ID NO: 68328 - RNA, 20 nt, Artificial Sequence
  LRRK2 RNA guide
aggcuuugcucucuagaugc

SEQ ID NO: 68329 - RNA, 20 nt, Artificial Sequence
  LRRK2 RNA guide
aguccagcaucuagagagca

SEQ ID NO: 68330 - RNA, 20 nt, Artificial Sequence
  LRRK2 RNA guide
aucuagagagcaaagccugc

SEQ ID NO: 68331 - RNA, 20 nt, Artificial Sequence
  LRRK2 RNA guide
auuucaaguccagcaucuag

SEQ ID NO: 68332 - RNA, 20 nt, Artificial Sequence
  LRRK2 RNA guide
caaaggaaggcaggcuuugc

SEQ ID NO: 68333 - RNA, 20 nt, Artificial Sequence
  LRRK2 RNA guide
caaguccagcaucuagagag

SEQ ID NO: 68334 - RNA, 20 nt, Artificial Sequence
  LRRK2 RNA guide
caauuucaaguccagcaucu

SEQ ID NO: 68335 - RNA, 20 nt, Artificial Sequence
  LRRK2 RNA guide
cagcaucuagagagcaaagc

SEQ ID NO: 68336 - RNA, 20 nt, Artificial Sequence
  LRRK2 RNA guide
caggcuuugcucucuagaug

SEQ ID NO: 68337 - RNA, 20 nt, Artificial Sequence
  LRRK2 RNA guide
caucuagagagcaaagccug

SEQ ID NO: 68338 - RNA, 20 nt, Artificial Sequence
  LRRK2 RNA guide
ccagcaucuagagagcaaag

SEQ ID NO: 68339 - RNA, 20 nt, Artificial Sequence
  LRRK2 RNA guide
cuagagagcaaagccugccu

SEQ ID NO: 68340 - RNA, 20 nt, Artificial Sequence
  LRRK2 RNA guide
cuagaugcuggacuugaaau

SEQ ID NO: 68341 - RNA, 20 nt, Artificial Sequence
  LRRK2 RNA guide
cucuagaugcuggacuugaa

SEQ ID NO: 68342 - RNA, 20 nt, Artificial Sequence
  LRRK2 RNA guide
cucucuagaugcuggacuug

SEQ ID NO: 68343 - RNA, 20 nt, Artificial Sequence
  LRRK2 RNA guide
cuuugcucucuagaugcugg

SEQ ID NO: 68344 - RNA, 20 nt, Artificial Sequence
  LRRK2 RNA guide
gaaacaauuucaaguccagc

SEQ ID NO: 68345 - RNA, 20 nt, Artificial Sequence
  LRRK2 RNA guide
gaaggcaggcuuugcucucu

SEQ ID NO: 68346 - RNA, 20 nt, Artificial Sequence
  LRRK2 RNA guide
gcaggcuuugcucucuagau

SEQ ID NO: 68347 - RNA, 20 nt, Artificial Sequence
  LRRK2 RNA guide
gcaucuagagagcaaagccu

SEQ ID NO: 68348 - RNA, 20 nt, Artificial Sequence
  LRRK2 RNA guide
gcucucuagaugcuggacuu

SEQ ID NO: 68349 - RNA, 20 nt, Artificial Sequence
  LRRK2 RNA guide
gcuuugcucucuagaugcug

SEQ ID NO: 68350 - RNA, 20 nt, Artificial Sequence
  LRRK2 RNA guide
ggaaggcaggcuuugcucuc

SEQ ID NO: 68351 - RNA, 20 nt, Artificial Sequence
  LRRK2 RNA guide
ggcaggcuuugcucucuaga

SEQ ID NO: 68352 - RNA, 20 nt, Artificial Sequence
  LRRK2 RNA guide
ggcuuugcucucuagaugcu

SEQ ID NO: 68353 - RNA, 20 nt, Artificial Sequence
  LRRK2 RNA guide
guccagcaucuagagagcaa

SEQ ID NO: 68354 - RNA, 20 nt, Artificial Sequence
  LRRK2 RNA guide
uagagagcaaagccugccuu

SEQ ID NO: 68355 - RNA, 20 nt, Artificial Sequence
  LRRK2 RNA guide
ucaaguccagcaucuagaga

SEQ ID NO: 68356 - RNA, 20 nt, Artificial Sequence
  LRRK2 RNA guide
uccagcaucuagagagcaaa

SEQ ID NO: 68357 - RNA, 20 nt, Artificial Sequence
  LRRK2 RNA guide
ucuagagagcaaagccugcc

SEQ ID NO: 68358 - RNA, 20 nt, Artificial Sequence
  LRRK2 RNA guide
ucuagaugcuggacuugaaa

SEQ ID NO: 68359 - RNA, 20 nt, Artificial Sequence
  LRRK2 RNA guide
ucucuagaugcuggacuuga

SEQ ID NO: 68360 - RNA, 20 nt, Artificial Sequence
  LRRK2 RNA guide
ugcucucuagaugcuggacu

SEQ ID NO: 68361 - RNA, 20 nt, Artificial Sequence
  LRRK2 RNA guide
uucaaguccagcaucuagag

SEQ ID NO: 68362 - RNA, 20 nt, Artificial Sequence
  LRRK2 RNA guide
uugcucucuagaugcuggac

SEQ ID NO: 68363 - RNA, 20 nt, Artificial Sequence
  LRRK2 RNA guide
uuucaaguccagcaucuaga

SEQ ID NO: 68364 - RNA, 20 nt, Artificial Sequence
  LRRK2 RNA guide
uuugcucucuagaugcugga

SEQ ID NO: 68365 - RNA, 21 nt, Artificial Sequence
  LRRK2 RNA guide
aaacaauuucaaguccagcau

SEQ ID NO: 68366 - RNA, 21 nt, Artificial Sequence
  LRRK2 RNA guide
aaaggaaggcaggcuuugcuc

SEQ ID NO: 68367 - RNA, 21 nt, Artificial Sequence
  LRRK2 RNA guide
aacaauuucaaguccagcauc

SEQ ID NO: 68368 - RNA, 21 nt, Artificial Sequence
  LRRK2 RNA guide
aaggaaggcaggcuuugcucu

SEQ ID NO: 68369 - RNA, 21 nt, Artificial Sequence
  LRRK2 RNA guide
aaggcaggcuuugcucucuag

SEQ ID NO: 68370 - RNA, 21 nt, Artificial Sequence
  LRRK2 RNA guide
aaguccagcaucuagagagca

SEQ ID NO: 68371 - RNA, 21 nt, Artificial Sequence
  LRRK2 RNA guide
aauuucaaguccagcaucuag

SEQ ID NO: 68372 - RNA, 21 nt, Artificial Sequence
  LRRK2 RNA guide
acaauuucaaguccagcaucu

SEQ ID NO: 68373 - RNA, 21 nt, Artificial Sequence
  LRRK2 RNA guide
agcaucuagagagcaaagccu

SEQ ID NO: 68374 - RNA, 21 nt, Artificial Sequence
  LRRK2 RNA guide
aggaaggcaggcuuugcucuc

SEQ ID NO: 68375 - RNA, 21 nt, Artificial Sequence
  LRRK2 RNA guide
aggcaggcuuugcucucuaga

SEQ ID NO: 68376 - RNA, 21 nt, Artificial Sequence
  LRRK2 RNA guide
aggcuuugcucucuagaugcu

SEQ ID NO: 68377 - RNA, 21 nt, Artificial Sequence
  LRRK2 RNA guide
aguccagcaucuagagagcaa

SEQ ID NO: 68378 - RNA, 21 nt, Artificial Sequence
  LRRK2 RNA guide
aucuagagagcaaagccugcc

SEQ ID NO: 68379 - RNA, 21 nt, Artificial Sequence
  LRRK2 RNA guide
auuucaaguccagcaucuaga

SEQ ID NO: 68380 - RNA, 21 nt, Artificial Sequence
  LRRK2 RNA guide
caaaggaaggcaggcuuugcu

SEQ ID NO: 68381 - RNA, 21 nt, Artificial Sequence
  LRRK2 RNA guide
caaguccagcaucuagagagc

SEQ ID NO: 68382 - RNA, 21 nt, Artificial Sequence
  LRRK2 RNA guide
caauuucaaguccagcaucua

SEQ ID NO: 68383 - RNA, 21 nt, Artificial Sequence
  LRRK2 RNA guide
cagcaucuagagagcaaagcc

SEQ ID NO: 68384 - RNA, 21 nt, Artificial Sequence
  LRRK2 RNA guide
caggcuuugcucucuagaugc

SEQ ID NO: 68385 - RNA, 21 nt, Artificial Sequence
  LRRK2 RNA guide
caucuagagagcaaagccugc

SEQ ID NO: 68386 - RNA, 21 nt, Artificial Sequence
  LRRK2 RNA guide
ccaaaggaaggcaggcuuugc

SEQ ID NO: 68387 - RNA, 21 nt, Artificial Sequence
  LRRK2 RNA guide
ccagcaucuagagagcaaagc

SEQ ID NO: 68388 - RNA, 21 nt, Artificial Sequence
  LRRK2 RNA guide
cuagagagcaaagccugccuu

SEQ ID NO: 68389 - RNA, 21 nt, Artificial Sequence
  LRRK2 RNA guide
cuagaugcuggacuugaaauu

SEQ ID NO: 68390 - RNA, 21 nt, Artificial Sequence
  LRRK2 RNA guide
cucuagaugcuggacuugaaa

SEQ ID NO: 68391 - RNA, 21 nt, Artificial Sequence
  LRRK2 RNA guide
cucucuagaugcuggacuuga

SEQ ID NO: 68392 - RNA, 21 nt, Artificial Sequence
  LRRK2 RNA guide
cuuugcucucuagaugcugga

SEQ ID NO: 68393 - RNA, 21 nt, Artificial Sequence
  LRRK2 RNA guide
gaaacaauuucaaguccagca

SEQ ID NO: 68394 - RNA, 21 nt, Artificial Sequence
  LRRK2 RNA guide
gaaggcaggcuuugcucucua

SEQ ID NO: 68395 - RNA, 21 nt, Artificial Sequence
  LRRK2 RNA guide
gcaggcuuugcucucuagaug

SEQ ID NO: 68396 - RNA, 21 nt, Artificial Sequence
  LRRK2 RNA guide
gcaucuagagagcaaagccug

SEQ ID NO: 68397 - RNA, 21 nt, Artificial Sequence
  LRRK2 RNA guide
gcucucuagaugcuggacuug

SEQ ID NO: 68398 - RNA, 21 nt, Artificial Sequence
  LRRK2 RNA guide
gcuuugcucucuagaugcugg

SEQ ID NO: 68399 - RNA, 21 nt, Artificial Sequence
  LRRK2 RNA guide
ggaaacaauuucaaguccagc

SEQ ID NO: 68400 - RNA, 21 nt, Artificial Sequence
  LRRK2 RNA guide
ggaaggcaggcuuugcucucu

SEQ ID NO: 68401 - RNA, 21 nt, Artificial Sequence
  LRRK2 RNA guide
ggcaggcuuugcucucuagau

SEQ ID NO: 68402 - RNA, 21 nt, Artificial Sequence
  LRRK2 RNA guide
ggcuuugcucucuagaugcug

SEQ ID NO: 68403 - RNA, 21 nt, Artificial Sequence
  LRRK2 RNA guide
guccagcaucuagagagcaaa

SEQ ID NO: 68404 - RNA, 21 nt, Artificial Sequence
  LRRK2 RNA guide
uagagagcaaagccugccuuc

SEQ ID NO: 68405 - RNA, 21 nt, Artificial Sequence
  LRRK2 RNA guide
ucaaguccagcaucuagagag

SEQ ID NO: 68406 - RNA, 21 nt, Artificial Sequence
  LRRK2 RNA guide
uccagcaucuagagagcaaag

SEQ ID NO: 68407 - RNA, 21 nt, Artificial Sequence
  LRRK2 RNA guide
ucuagagagcaaagccugccu

SEQ ID NO: 68408 - RNA, 21 nt, Artificial Sequence
  LRRK2 RNA guide
ucuagaugcuggacuugaaau

SEQ ID NO: 68409 - RNA, 21 nt, Artificial Sequence
  LRRK2 RNA guide
ucucuagaugcuggacuugaa

SEQ ID NO: 68410 - RNA, 21 nt, Artificial Sequence
  LRRK2 RNA guide
ugcucucuagaugcuggacuu

SEQ ID NO: 68411 - RNA, 21 nt, Artificial Sequence
  LRRK2 RNA guide
uucaaguccagcaucuagaga

SEQ ID NO: 68412 - RNA, 21 nt, Artificial Sequence
  LRRK2 RNA guide
uugcucucuagaugcuggacu

SEQ ID NO: 68413 - RNA, 21 nt, Artificial Sequence
  LRRK2 RNA guide
uuucaaguccagcaucuagag

SEQ ID NO: 68414 - RNA, 21 nt, Artificial Sequence
  LRRK2 RNA guide
uuugcucucuagaugcuggac

SEQ ID NO: 68415 - RNA, 22 nt, Artificial Sequence
  LRRK2 RNA guide
aaacaauuucaaguccagcauc

SEQ ID NO: 68416 - RNA, 22 nt, Artificial Sequence
  LRRK2 RNA guide
aaaggaaggcaggcuuugcucu

SEQ ID NO: 68417 - RNA, 22 nt, Artificial Sequence
  LRRK2 RNA guide
aacaauuucaaguccagcaucu

SEQ ID NO: 68418 - RNA, 22 nt, Artificial Sequence
  LRRK2 RNA guide
aaggaaggcaggcuuugcucuc

SEQ ID NO: 68419 - RNA, 22 nt, Artificial Sequence
  LRRK2 RNA guide
aaggcaggcuuugcucucuaga

SEQ ID NO: 68420 - RNA, 22 nt, Artificial Sequence
  LRRK2 RNA guide
aaguccagcaucuagagagcaa

SEQ ID NO: 68421 - RNA, 22 nt, Artificial Sequence
  LRRK2 RNA guide
aauuucaaguccagcaucuaga

SEQ ID NO: 68422 - RNA, 22 nt, Artificial Sequence
  LRRK2 RNA guide
acaauuucaaguccagcaucua

SEQ ID NO: 68423 - RNA, 22 nt, Artificial Sequence
  LRRK2 RNA guide
agcaucuagagagcaaagccug

SEQ ID NO: 68424 - RNA, 22 nt, Artificial Sequence
  LRRK2 RNA guide
aggaaggcaggcuuugcucucu

SEQ ID NO: 68425 - RNA, 22 nt, Artificial Sequence
  LRRK2 RNA guide
aggcaggcuuugcucucuagau

SEQ ID NO: 68426 - RNA, 22 nt, Artificial Sequence
  LRRK2 RNA guide
aggcuuugcucucuagaugcug

SEQ ID NO: 68427 - RNA, 22 nt, Artificial Sequence
  LRRK2 RNA guide
aguccagcaucuagagagcaaa

SEQ ID NO: 68428 - RNA, 22 nt, Artificial Sequence
  LRRK2 RNA guide
aucuagagagcaaagccugccu

SEQ ID NO: 68429 - RNA, 22 nt, Artificial Sequence
  LRRK2 RNA guide
auuucaaguccagcaucuagag

SEQ ID NO: 68430 - RNA, 22 nt, Artificial Sequence
  LRRK2 RNA guide
caaaggaaggcaggcuuugcuc

SEQ ID NO: 68431 - RNA, 22 nt, Artificial Sequence
  LRRK2 RNA guide
caaguccagcaucuagagagca

SEQ ID NO: 68432 - RNA, 22 nt, Artificial Sequence
  LRRK2 RNA guide
caauuucaaguccagcaucuag

SEQ ID NO: 68433 - RNA, 22 nt, Artificial Sequence
  LRRK2 RNA guide
cagcaucuagagagcaaagccu

SEQ ID NO: 68434 - RNA, 22 nt, Artificial Sequence
  LRRK2 RNA guide
caggcuuugcucucuagaugcu

SEQ ID NO: 68435 - RNA, 22 nt, Artificial Sequence
  LRRK2 RNA guide
caucuagagagcaaagccugcc

SEQ ID NO: 68436 - RNA, 22 nt, Artificial Sequence
  LRRK2 RNA guide
ccaaaggaaggcaggcuuugcu

SEQ ID NO: 68437 - RNA, 22 nt, Artificial Sequence
  LRRK2 RNA guide
ccagcaucuagagagcaaagcc

SEQ ID NO: 68438 - RNA, 22 nt, Artificial Sequence
  LRRK2 RNA guide
cuagagagcaaagccugccuuc

SEQ ID NO: 68439 - RNA, 22 nt, Artificial Sequence
  LRRK2 RNA guide
cuagaugcuggacuugaaauug

SEQ ID NO: 68440 - RNA, 22 nt, Artificial Sequence
  LRRK2 RNA guide
cucuagaugcuggacuugaaau

SEQ ID NO: 68441 - RNA, 22 nt, Artificial Sequence
  LRRK2 RNA guide
cucucuagaugcuggacuugaa

SEQ ID NO: 68442 - RNA, 22 nt, Artificial Sequence
  LRRK2 RNA guide
cuuugcucucuagaugcuggac

SEQ ID NO: 68443 - RNA, 22 nt, Artificial Sequence
  LRRK2 RNA guide
gaaacaauuucaaguccagcau

SEQ ID NO: 68444 - RNA, 22 nt, Artificial Sequence
  LRRK2 RNA guide
gaaggcaggcuuugcucucuag

SEQ ID NO: 68445 - RNA, 22 nt, Artificial Sequence
  LRRK2 RNA guide
gcaggcuuugcucucuagaugc

SEQ ID NO: 68446 - RNA, 22 nt, Artificial Sequence
  LRRK2 RNA guide
gcaucuagagagcaaagccugc

SEQ ID NO: 68447 - RNA, 22 nt, Artificial Sequence
  LRRK2 RNA guide
gccaaaggaaggcaggcuuugc

SEQ ID NO: 68448 - RNA, 22 nt, Artificial Sequence
  LRRK2 RNA guide
gcucucuagaugcuggacuuga

SEQ ID NO: 68449 - RNA, 22 nt, Artificial Sequence
  LRRK2 RNA guide
gcuuugcucucuagaugcugga

SEQ ID NO: 68450 - RNA, 22 nt, Artificial Sequence
  LRRK2 RNA guide
ggaaacaauuucaaguccagca

SEQ ID NO: 68451 - RNA, 22 nt, Artificial Sequence
  LRRK2 RNA guide
ggaaggcaggcuuugcucucua

SEQ ID NO: 68452 - RNA, 22 nt, Artificial Sequence
  LRRK2 RNA guide
ggcaggcuuugcucucuagaug

SEQ ID NO: 68453 - RNA, 22 nt, Artificial Sequence
  LRRK2 RNA guide
ggcuuugcucucuagaugcugg

SEQ ID NO: 68454 - RNA, 22 nt, Artificial Sequence
  LRRK2 RNA guide
gggaaacaauuucaaguccagc

SEQ ID NO: 68455 - RNA, 22 nt, Artificial Sequence
  LRRK2 RNA guide
guccagcaucuagagagcaaag

SEQ ID NO: 68456 - RNA, 22 nt, Artificial Sequence
  LRRK2 RNA guide
uagagagcaaagccugccuucc

SEQ ID NO: 68457 - RNA, 22 nt, Artificial Sequence
  LRRK2 RNA guide
ucaaguccagcaucuagagagc

SEQ ID NO: 68458 - RNA, 22 nt, Artificial Sequence
  LRRK2 RNA guide
uccagcaucuagagagcaaagc

SEQ ID NO: 68459 - RNA, 22 nt, Artificial Sequence
  LRRK2 RNA guide
ucuagagagcaaagccugccuu

SEQ ID NO: 68460 - RNA, 22 nt, Artificial Sequence
  LRRK2 RNA guide
ucuagaugcuggacuugaaauu

SEQ ID NO: 68461 - RNA, 22 nt, Artificial Sequence
  LRRK2 RNA guide
ucucuagaugcuggacuugaaa

SEQ ID NO: 68462 - RNA, 22 nt, Artificial Sequence
  LRRK2 RNA guide
ugcucucuagaugcuggacuug

SEQ ID NO: 68463 - RNA, 22 nt, Artificial Sequence
  LRRK2 RNA guide
uucaaguccagcaucuagagag

SEQ ID NO: 68464 - RNA, 22 nt, Artificial Sequence
  LRRK2 RNA guide
uugcucucuagaugcuggacuu

SEQ ID NO: 68465 - RNA, 22 nt, Artificial Sequence
  LRRK2 RNA guide
uuucaaguccagcaucuagaga

SEQ ID NO: 68466 - RNA, 22 nt, Artificial Sequence
  LRRK2 RNA guide
uuugcucucuagaugcuggacu

SEQ ID NO: 68467 - RNA, 20 nt, Artificial Sequence
  LRRK2 RNA guide
aaggcaggcuuugcucucaa

SEQ ID NO: 68468 - RNA, 20 nt, Artificial Sequence
  LRRK2 RNA guide
aaguccagcaucuugagagc

SEQ ID NO: 68469 - RNA, 20 nt, Artificial Sequence
  LRRK2 RNA guide
aauuucaaguccagcaucuu

SEQ ID NO: 68470 - RNA, 20 nt, Artificial Sequence
  LRRK2 RNA guide
agcaucuugagagcaaagcc

SEQ ID NO: 68471 - RNA, 20 nt, Artificial Sequence
  LRRK2 RNA guide
aggcaggcuuugcucucaag

SEQ ID NO: 68472 - RNA, 20 nt, Artificial Sequence
  LRRK2 RNA guide
aggcuuugcucucaagaugc

SEQ ID NO: 68473 - RNA, 20 nt, Artificial Sequence
  LRRK2 RNA guide
aguccagcaucuugagagca

SEQ ID NO: 68474 - RNA, 20 nt, Artificial Sequence
  LRRK2 RNA guide
aucuugagagcaaagccugc

SEQ ID NO: 68475 - RNA, 20 nt, Artificial Sequence
  LRRK2 RNA guide
auuucaaguccagcaucuug

SEQ ID NO: 68476 - RNA, 20 nt, Artificial Sequence
  LRRK2 RNA guide
caagaugcuggacuugaaau

SEQ ID NO: 68477 - RNA, 20 nt, Artificial Sequence
  LRRK2 RNA guide
caaguccagcaucuugagag

SEQ ID NO: 68478 - RNA, 20 nt, Artificial Sequence
  LRRK2 RNA guide
cagcaucuugagagcaaagc

SEQ ID NO: 68479 - RNA, 20 nt, Artificial Sequence
  LRRK2 RNA guide
caggcuuugcucucaagaug

SEQ ID NO: 68480 - RNA, 20 nt, Artificial Sequence
  LRRK2 RNA guide
caucuugagagcaaagccug

SEQ ID NO: 68481 - RNA, 20 nt, Artificial Sequence
  LRRK2 RNA guide
ccagcaucuugagagcaaag

SEQ ID NO: 68482 - RNA, 20 nt, Artificial Sequence
  LRRK2 RNA guide
cucaagaugcuggacuugaa

SEQ ID NO: 68483 - RNA, 20 nt, Artificial Sequence
  LRRK2 RNA guide
cucucaagaugcuggacuug

SEQ ID NO: 68484 - RNA, 20 nt, Artificial Sequence
  LRRK2 RNA guide
cuugagagcaaagccugccu

SEQ ID NO: 68485 - RNA, 20 nt, Artificial Sequence
  LRRK2 RNA guide
cuuugcucucaagaugcugg

SEQ ID NO: 68486 - RNA, 20 nt, Artificial Sequence
  LRRK2 RNA guide
gaaggcaggcuuugcucuca

SEQ ID NO: 68487 - RNA, 20 nt, Artificial Sequence
  LRRK2 RNA guide
gcaggcuuugcucucaagau

SEQ ID NO: 68488 - RNA, 20 nt, Artificial Sequence
  LRRK2 RNA guide
gcaucuugagagcaaagccu

SEQ ID NO: 68489 - RNA, 20 nt, Artificial Sequence
  LRRK2 RNA guide
gcucucaagaugcuggacuu

SEQ ID NO: 68490 - RNA, 20 nt, Artificial Sequence
  LRRK2 RNA guide
gcuuugcucucaagaugcug

SEQ ID NO: 68491 - RNA, 20 nt, Artificial Sequence
  LRRK2 RNA guide
ggcaggcuuugcucucaaga

SEQ ID NO: 68492 - RNA, 20 nt, Artificial Sequence
  LRRK2 RNA guide
ggcuuugcucucaagaugcu

SEQ ID NO: 68493 - RNA, 20 nt, Artificial Sequence
  LRRK2 RNA guide
guccagcaucuugagagcaa

SEQ ID NO: 68494 - RNA, 20 nt, Artificial Sequence
  LRRK2 RNA guide
ucaagaugcuggacuugaaa

SEQ ID NO: 68495 - RNA, 20 nt, Artificial Sequence
  LRRK2 RNA guide
ucaaguccagcaucuugaga

SEQ ID NO: 68496 - RNA, 20 nt, Artificial Sequence
  LRRK2 RNA guide
uccagcaucuugagagcaaa

SEQ ID NO: 68497 - RNA, 20 nt, Artificial Sequence
  LRRK2 RNA guide
ucucaagaugcuggacuuga

SEQ ID NO: 68498 - RNA, 20 nt, Artificial Sequence
  LRRK2 RNA guide
ucuugagagcaaagccugcc

SEQ ID NO: 68499 - RNA, 20 nt, Artificial Sequence
  LRRK2 RNA guide
ugcucucaagaugcuggacu

SEQ ID NO: 68500 - RNA, 20 nt, Artificial Sequence
  LRRK2 RNA guide
uucaaguccagcaucuugag

SEQ ID NO: 68501 - RNA, 20 nt, Artificial Sequence
  LRRK2 RNA guide
uugagagcaaagccugccuu

SEQ ID NO: 68502 - RNA, 20 nt, Artificial Sequence
  LRRK2 RNA guide
uugcucucaagaugcuggac

SEQ ID NO: 68503 - RNA, 20 nt, Artificial Sequence
  LRRK2 RNA guide
uuucaaguccagcaucuuga

SEQ ID NO: 68504 - RNA, 20 nt, Artificial Sequence
  LRRK2 RNA guide
uuugcucucaagaugcugga

SEQ ID NO: 68505 - RNA, 21 nt, Artificial Sequence
  LRRK2 RNA guide
aaggcaggcuuugcucucaag

SEQ ID NO: 68506 - RNA, 21 nt, Artificial Sequence
  LRRK2 RNA guide
aaguccagcaucuugagagca

SEQ ID NO: 68507 - RNA, 21 nt, Artificial Sequence
  LRRK2 RNA guide
aauuucaaguccagcaucuug

SEQ ID NO: 68508 - RNA, 21 nt, Artificial Sequence
  LRRK2 RNA guide
agcaucuugagagcaaagccu

SEQ ID NO: 68509 - RNA, 21 nt, Artificial Sequence
  LRRK2 RNA guide
aggcaggcuuugcucucaaga

SEQ ID NO: 68510 - RNA, 21 nt, Artificial Sequence
  LRRK2 RNA guide
aggcuuugcucucaagaugcu

SEQ ID NO: 68511 - RNA, 21 nt, Artificial Sequence
  LRRK2 RNA guide
aguccagcaucuugagagcaa

SEQ ID NO: 68512 - RNA, 21 nt, Artificial Sequence
  LRRK2 RNA guide
aucuugagagcaaagccugcc

SEQ ID NO: 68513 - RNA, 21 nt, Artificial Sequence
  LRRK2 RNA guide
auuucaaguccagcaucuuga

SEQ ID NO: 68514 - RNA, 21 nt, Artificial Sequence
  LRRK2 RNA guide
caagaugcuggacuugaaauu

SEQ ID NO: 68515 - RNA, 21 nt, Artificial Sequence
  LRRK2 RNA guide
caaguccagcaucuugagagc

SEQ ID NO: 68516 - RNA, 21 nt, Artificial Sequence
  LRRK2 RNA guide
caauuucaaguccagcaucuu

SEQ ID NO: 68517 - RNA, 21 nt, Artificial Sequence
  LRRK2 RNA guide
cagcaucuugagagcaaagcc

SEQ ID NO: 68518 - RNA, 21 nt, Artificial Sequence
  LRRK2 RNA guide
caggcuuugcucucaagaugc

SEQ ID NO: 68519 - RNA, 21 nt, Artificial Sequence
  LRRK2 RNA guide
caucuugagagcaaagccugc

SEQ ID NO: 68520 - RNA, 21 nt, Artificial Sequence
  LRRK2 RNA guide
ccagcaucuugagagcaaagc

SEQ ID NO: 68521 - RNA, 21 nt, Artificial Sequence
  LRRK2 RNA guide
cucaagaugcuggacuugaaa

SEQ ID NO: 68522 - RNA, 21 nt, Artificial Sequence
  LRRK2 RNA guide
cucucaagaugcuggacuuga

SEQ ID NO: 68523 - RNA, 21 nt, Artificial Sequence
  LRRK2 RNA guide
cuugagagcaaagccugccuu

SEQ ID NO: 68524 - RNA, 21 nt, Artificial Sequence
  LRRK2 RNA guide
cuuugcucucaagaugcugga

SEQ ID NO: 68525 - RNA, 21 nt, Artificial Sequence
  LRRK2 RNA guide
gaaggcaggcuuugcucucaa

SEQ ID NO: 68526 - RNA, 21 nt, Artificial Sequence
  LRRK2 RNA guide
gcaggcuuugcucucaagaug

SEQ ID NO: 68527 - RNA, 21 nt, Artificial Sequence
  LRRK2 RNA guide
gcaucuugagagcaaagccug

SEQ ID NO: 68528 - RNA, 21 nt, Artificial Sequence
  LRRK2 RNA guide
gcucucaagaugcuggacuug

SEQ ID NO: 68529 - RNA, 21 nt, Artificial Sequence
  LRRK2 RNA guide
gcuuugcucucaagaugcugg

SEQ ID NO: 68530 - RNA, 21 nt, Artificial Sequence
  LRRK2 RNA guide
ggaaggcaggcuuugcucuca

SEQ ID NO: 68531 - RNA, 21 nt, Artificial Sequence
  LRRK2 RNA guide
ggcaggcuuugcucucaagau

SEQ ID NO: 68532 - RNA, 21 nt, Artificial Sequence
  LRRK2 RNA guide
ggcuuugcucucaagaugcug

SEQ ID NO: 68533 - RNA, 21 nt, Artificial Sequence
  LRRK2 RNA guide
guccagcaucuugagagcaaa

SEQ ID NO: 68534 - RNA, 21 nt, Artificial Sequence
  LRRK2 RNA guide
ucaagaugcuggacuugaaau

SEQ ID NO: 68535 - RNA, 21 nt, Artificial Sequence
  LRRK2 RNA guide
ucaaguccagcaucuugagag

SEQ ID NO: 68536 - RNA, 21 nt, Artificial Sequence
  LRRK2 RNA guide
uccagcaucuugagagcaaag

SEQ ID NO: 68537 - RNA, 21 nt, Artificial Sequence
  LRRK2 RNA guide
ucucaagaugcuggacuugaa

SEQ ID NO: 68538 - RNA, 21 nt, Artificial Sequence
  LRRK2 RNA guide
ucuugagagcaaagccugccu

SEQ ID NO: 68539 - RNA, 21 nt, Artificial Sequence
  LRRK2 RNA guide
ugcucucaagaugcuggacuu

SEQ ID NO: 68540 - RNA, 21 nt, Artificial Sequence
  LRRK2 RNA guide
uucaaguccagcaucuugaga

SEQ ID NO: 68541 - RNA, 21 nt, Artificial Sequence
  LRRK2 RNA guide
uugagagcaaagccugccuuc

SEQ ID NO: 68542 - RNA, 21 nt, Artificial Sequence
  LRRK2 RNA guide
uugcucucaagaugcuggacu

SEQ ID NO: 68543 - RNA, 21 nt, Artificial Sequence
  LRRK2 RNA guide
uuucaaguccagcaucuugag

SEQ ID NO: 68544 - RNA, 21 nt, Artificial Sequence
  LRRK2 RNA guide
uuugcucucaagaugcuggac

SEQ ID NO: 68545 - RNA, 22 nt, Artificial Sequence
  LRRK2 RNA guide
aaggcaggcuuugcucucaaga

SEQ ID NO: 68546 - RNA, 22 nt, Artificial Sequence
  LRRK2 RNA guide
aaguccagcaucuugagagcaa

SEQ ID NO: 68547 - RNA, 22 nt, Artificial Sequence
  LRRK2 RNA guide
aauuucaaguccagcaucuuga

SEQ ID NO: 68548 - RNA, 22 nt, Artificial Sequence
  LRRK2 RNA guide
acaauuucaaguccagcaucuu

SEQ ID NO: 68549 - RNA, 22 nt, Artificial Sequence
  LRRK2 RNA guide
agcaucuugagagcaaagccug

SEQ ID NO: 68550 - RNA, 22 nt, Artificial Sequence
  LRRK2 RNA guide
aggaaggcaggcuuugcucuca

SEQ ID NO: 68551 - RNA, 22 nt, Artificial Sequence
  LRRK2 RNA guide
aggcaggcuuugcucucaagau

SEQ ID NO: 68552 - RNA, 22 nt, Artificial Sequence
  LRRK2 RNA guide
aggcuuugcucucaagaugcug

SEQ ID NO: 68553 - RNA, 22 nt, Artificial Sequence
  LRRK2 RNA guide
aguccagcaucuugagagcaaa

SEQ ID NO: 68554 - RNA, 22 nt, Artificial Sequence
  LRRK2 RNA guide
aucuugagagcaaagccugccu

SEQ ID NO: 68555 - RNA, 22 nt, Artificial Sequence
  LRRK2 RNA guide
auuucaaguccagcaucuugag

SEQ ID NO: 68556 - RNA, 22 nt, Artificial Sequence
  LRRK2 RNA guide
caagaugcuggacuugaaauug

SEQ ID NO: 68557 - RNA, 22 nt, Artificial Sequence
  LRRK2 RNA guide
caaguccagcaucuugagagca

SEQ ID NO: 68558 - RNA, 22 nt, Artificial Sequence
  LRRK2 RNA guide
caauuucaaguccagcaucuug

SEQ ID NO: 68559 - RNA, 22 nt, Artificial Sequence
  LRRK2 RNA guide
cagcaucuugagagcaaagccu

SEQ ID NO: 68560 - RNA, 22 nt, Artificial Sequence
  LRRK2 RNA guide
caggcuuugcucucaagaugcu

SEQ ID NO: 68561 - RNA, 22 nt, Artificial Sequence
  LRRK2 RNA guide
caucuugagagcaaagccugcc

SEQ ID NO: 68562 - RNA, 22 nt, Artificial Sequence
  LRRK2 RNA guide
ccagcaucuugagagcaaagcc

SEQ ID NO: 68563 - RNA, 22 nt, Artificial Sequence
  LRRK2 RNA guide
cucaagaugcuggacuugaaau

SEQ ID NO: 68564 - RNA, 22 nt, Artificial Sequence
  LRRK2 RNA guide
cucucaagaugcuggacuugaa

SEQ ID NO: 68565 - RNA, 22 nt, Artificial Sequence
  LRRK2 RNA guide
cuugagagcaaagccugccuuc

SEQ ID NO: 68566 - RNA, 22 nt, Artificial Sequence
  LRRK2 RNA guide
cuuugcucucaagaugcuggac

SEQ ID NO: 68567 - RNA, 22 nt, Artificial Sequence
  LRRK2 RNA guide
gaaggcaggcuuugcucucaag

SEQ ID NO: 68568 - RNA, 22 nt, Artificial Sequence
  LRRK2 RNA guide
gcaggcuuugcucucaagaugc

SEQ ID NO: 68569 - RNA, 22 nt, Artificial Sequence
  LRRK2 RNA guide
gcaucuugagagcaaagccugc

SEQ ID NO: 68570 - RNA, 22 nt, Artificial Sequence
  LRRK2 RNA guide
gcucucaagaugcuggacuuga

SEQ ID NO: 68571 - RNA, 22 nt, Artificial Sequence
  LRRK2 RNA guide
gcuuugcucucaagaugcugga

SEQ ID NO: 68572 - RNA, 22 nt, Artificial Sequence
  LRRK2 RNA guide
ggaaggcaggcuuugcucucaa

SEQ ID NO: 68573 - RNA, 22 nt, Artificial Sequence
  LRRK2 RNA guide
ggcaggcuuugcucucaagaug

SEQ ID NO: 68574 - RNA, 22 nt, Artificial Sequence
  LRRK2 RNA guide
ggcuuugcucucaagaugcugg

SEQ ID NO: 68575 - RNA, 22 nt, Artificial Sequence
  LRRK2 RNA guide
guccagcaucuugagagcaaag

SEQ ID NO: 68576 - RNA, 22 nt, Artificial Sequence
  LRRK2 RNA guide
ucaagaugcuggacuugaaauu

SEQ ID NO: 68577 - RNA, 22 nt, Artificial Sequence
  LRRK2 RNA guide
ucaaguccagcaucuugagagc

SEQ ID NO: 68578 - RNA, 22 nt, Artificial Sequence
  LRRK2 RNA guide
uccagcaucuugagagcaaagc

SEQ ID NO: 68579 - RNA, 22 nt, Artificial Sequence
  LRRK2 RNA guide
ucucaagaugcuggacuugaaa

SEQ ID NO: 68580 - RNA, 22 nt, Artificial Sequence
  LRRK2 RNA guide
ucuugagagcaaagccugccuu

SEQ ID NO: 68581 - RNA, 22 nt, Artificial Sequence
  LRRK2 RNA guide
ugcucucaagaugcuggacuug

SEQ ID NO: 68582 - RNA, 22 nt, Artificial Sequence
  LRRK2 RNA guide
uucaaguccagcaucuugagag

SEQ ID NO: 68583 - RNA, 22 nt, Artificial Sequence
  LRRK2 RNA guide
uugagagcaaagccugccuucc

SEQ ID NO: 68584 - RNA, 22 nt, Artificial Sequence
  LRRK2 RNA guide
uugcucucaagaugcuggacuu

SEQ ID NO: 68585 - RNA, 22 nt, Artificial Sequence
  LRRK2 RNA guide
uuucaaguccagcaucuugaga

SEQ ID NO: 68586 - RNA, 22 nt, Artificial Sequence
  LRRK2 RNA guide
uuugcucucaagaugcuggacu

SEQ ID NO: 68587 - RNA, 20 nt, Artificial Sequence
  LRRK2 RNA guide
uagcugaugagcuuaaaaaa

SEQ ID NO: 68588 - RNA, 22 nt, Artificial Sequence
  LRRK2 RNA guide
gauagcugaugagcuuaaaaaa

SEQ ID NO: 68589 - RNA, 20 nt, Artificial Sequence
  LRRK2 RNA guide
aaacucauugcugcaaguua

SEQ ID NO: 68590 - RNA, 20 nt, Artificial Sequence
  LRRK2 RNA guide
aacucauugcugcaaguuau

SEQ ID NO: 68591 - RNA, 20 nt, Artificial Sequence
  LRRK2 RNA guide
aacuugcagcaaugaguuua

SEQ ID NO: 68592 - RNA, 20 nt, Artificial Sequence
  LRRK2 RNA guide
aauaacuugcagcaaugagu

SEQ ID NO: 68593 - RNA, 20 nt, Artificial Sequence
  LRRK2 RNA guide
acuugcagcaaugaguuuau

SEQ ID NO: 68594 - RNA, 20 nt, Artificial Sequence
  LRRK2 RNA guide
agaucaauaacuugcagcaa

SEQ ID NO: 68595 - RNA, 20 nt, Artificial Sequence
  LRRK2 RNA guide
agcaaugaguuuaucagaua

SEQ ID NO: 68596 - RNA, 20 nt, Artificial Sequence
  LRRK2 RNA guide
auaaacucauugcugcaagu

SEQ ID NO: 68597 - RNA, 20 nt, Artificial Sequence
  LRRK2 RNA guide
auaacuugcagcaaugaguu

SEQ ID NO: 68598 - RNA, 20 nt, Artificial Sequence
  LRRK2 RNA guide
aucaauaacuugcagcaaug

SEQ ID NO: 68599 - RNA, 20 nt, Artificial Sequence
  LRRK2 RNA guide
aucugauaaacucauugcug

SEQ ID NO: 68600 - RNA, 20 nt, Artificial Sequence
  LRRK2 RNA guide
caauaacuugcagcaaugag

SEQ ID NO: 68601 - RNA, 20 nt, Artificial Sequence
  LRRK2 RNA guide
cagcaaugaguuuaucagau

SEQ ID NO: 68602 - RNA, 20 nt, Artificial Sequence
  LRRK2 RNA guide
cugauaaacucauugcugca

SEQ ID NO: 68603 - RNA, 20 nt, Artificial Sequence
  LRRK2 RNA guide
cuugcagcaaugaguuuauc

SEQ ID NO: 68604 - RNA, 20 nt, Artificial Sequence
  LRRK2 RNA guide
gauaaacucauugcugcaag

SEQ ID NO: 68605 - RNA, 20 nt, Artificial Sequence
  LRRK2 RNA guide
gaucaauaacuugcagcaau

SEQ ID NO: 68606 - RNA, 20 nt, Artificial Sequence
  LRRK2 RNA guide
gcaaugaguuuaucagauaa

SEQ ID NO: 68607 - RNA, 20 nt, Artificial Sequence
  LRRK2 RNA guide
gcagcaaugaguuuaucaga

SEQ ID NO: 68608 - RNA, 20 nt, Artificial Sequence
  LRRK2 RNA guide
uaaacucauugcugcaaguu

SEQ ID NO: 68609 - RNA, 20 nt, Artificial Sequence
  LRRK2 RNA guide
uaacuugcagcaaugaguuu

SEQ ID NO: 68610 - RNA, 20 nt, Artificial Sequence
  LRRK2 RNA guide
uaucugauaaacucauugcu

SEQ ID NO: 68611 - RNA, 20 nt, Artificial Sequence
  LRRK2 RNA guide
ucaauaacuugcagcaauga

SEQ ID NO: 68612 - RNA, 20 nt, Artificial Sequence
  LRRK2 RNA guide
ucugauaaacucauugcugc

SEQ ID NO: 68613 - RNA, 20 nt, Artificial Sequence
  LRRK2 RNA guide
ugauaaacucauugcugcaa

SEQ ID NO: 68614 - RNA, 20 nt, Artificial Sequence
  LRRK2 RNA guide
ugcagcaaugaguuuaucag

SEQ ID NO: 68615 - RNA, 20 nt, Artificial Sequence
  LRRK2 RNA guide
uuaucugauaaacucauugc

SEQ ID NO: 68616 - RNA, 20 nt, Artificial Sequence
  LRRK2 RNA guide
uugcagcaaugaguuuauca

SEQ ID NO: 68617 - RNA, 21 nt, Artificial Sequence
  LRRK2 RNA guide
aaacucauugcugcaaguuau

SEQ ID NO: 68618 - RNA, 21 nt, Artificial Sequence
  LRRK2 RNA guide
aacucauugcugcaaguuauu

SEQ ID NO: 68619 - RNA, 21 nt, Artificial Sequence
  LRRK2 RNA guide
aacuugcagcaaugaguuuau

SEQ ID NO: 68620 - RNA, 21 nt, Artificial Sequence
  LRRK2 RNA guide
aauaacuugcagcaaugaguu

SEQ ID NO: 68621 - RNA, 21 nt, Artificial Sequence
  LRRK2 RNA guide
acuugcagcaaugaguuuauc

SEQ ID NO: 68622 - RNA, 21 nt, Artificial Sequence
  LRRK2 RNA guide
agaucaauaacuugcagcaau

SEQ ID NO: 68623 - RNA, 21 nt, Artificial Sequence
  LRRK2 RNA guide
auaaacucauugcugcaaguu

SEQ ID NO: 68624 - RNA, 21 nt, Artificial Sequence
  LRRK2 RNA guide
auaacuugcagcaaugaguuu

SEQ ID NO: 68625 - RNA, 21 nt, Artificial Sequence
  LRRK2 RNA guide
aucaauaacuugcagcaauga

SEQ ID NO: 68626 - RNA, 21 nt, Artificial Sequence
  LRRK2 RNA guide
aucugauaaacucauugcugc

SEQ ID NO: 68627 - RNA, 21 nt, Artificial Sequence
  LRRK2 RNA guide
caauaacuugcagcaaugagu

SEQ ID NO: 68628 - RNA, 21 nt, Artificial Sequence
  LRRK2 RNA guide
cagcaaugaguuuaucagaua

SEQ ID NO: 68629 - RNA, 21 nt, Artificial Sequence
  LRRK2 RNA guide
cugauaaacucauugcugcaa

SEQ ID NO: 68630 - RNA, 21 nt, Artificial Sequence
  LRRK2 RNA guide
cuugcagcaaugaguuuauca

SEQ ID NO: 68631 - RNA, 21 nt, Artificial Sequence
  LRRK2 RNA guide
gauaaacucauugcugcaagu

SEQ ID NO: 68632 - RNA, 21 nt, Artificial Sequence
  LRRK2 RNA guide
gaucaauaacuugcagcaaug

SEQ ID NO: 68633 - RNA, 21 nt, Artificial Sequence
  LRRK2 RNA guide
gcagcaaugaguuuaucagau

SEQ ID NO: 68634 - RNA, 21 nt, Artificial Sequence
  LRRK2 RNA guide
uaaacucauugcugcaaguua

SEQ ID NO: 68635 - RNA, 21 nt, Artificial Sequence
  LRRK2 RNA guide
uaacuugcagcaaugaguuua

SEQ ID NO: 68636 - RNA, 21 nt, Artificial Sequence
  LRRK2 RNA guide
uagaucaauaacuugcagcaa

SEQ ID NO: 68637 - RNA, 21 nt, Artificial Sequence
  LRRK2 RNA guide
uaucugauaaacucauugcug

SEQ ID NO: 68638 - RNA, 21 nt, Artificial Sequence
  LRRK2 RNA guide
ucaauaacuugcagcaaugag

SEQ ID NO: 68639 - RNA, 21 nt, Artificial Sequence
  LRRK2 RNA guide
ucugauaaacucauugcugca

SEQ ID NO: 68640 - RNA, 21 nt, Artificial Sequence
  LRRK2 RNA guide
ugauaaacucauugcugcaag

SEQ ID NO: 68641 - RNA, 21 nt, Artificial Sequence
  LRRK2 RNA guide
ugcagcaaugaguuuaucaga

SEQ ID NO: 68642 - RNA, 21 nt, Artificial Sequence
  LRRK2 RNA guide
uugcagcaaugaguuuaucag

SEQ ID NO: 68643 - RNA, 22 nt, Artificial Sequence
  LRRK2 RNA guide
aaacucauugcugcaaguuauu

SEQ ID NO: 68644 - RNA, 22 nt, Artificial Sequence
  LRRK2 RNA guide
aacucauugcugcaaguuauug

SEQ ID NO: 68645 - RNA, 22 nt, Artificial Sequence
  LRRK2 RNA guide
aacuugcagcaaugaguuuauc

SEQ ID NO: 68646 - RNA, 22 nt, Artificial Sequence
  LRRK2 RNA guide
aauaacuugcagcaaugaguuu

SEQ ID NO: 68647 - RNA, 22 nt, Artificial Sequence
  LRRK2 RNA guide
acuugcagcaaugaguuuauca

SEQ ID NO: 68648 - RNA, 22 nt, Artificial Sequence
  LRRK2 RNA guide
agaucaauaacuugcagcaaug

SEQ ID NO: 68649 - RNA, 22 nt, Artificial Sequence
  LRRK2 RNA guide
auaaacucauugcugcaaguua

SEQ ID NO: 68650 - RNA, 22 nt, Artificial Sequence
  LRRK2 RNA guide
auaacuugcagcaaugaguuua

SEQ ID NO: 68651 - RNA, 22 nt, Artificial Sequence
  LRRK2 RNA guide
auagaucaauaacuugcagcaa

SEQ ID NO: 68652 - RNA, 22 nt, Artificial Sequence
  LRRK2 RNA guide
aucaauaacuugcagcaaugag

SEQ ID NO: 68653 - RNA, 22 nt, Artificial Sequence
  LRRK2 RNA guide
aucugauaaacucauugcugca

SEQ ID NO: 68654 - RNA, 22 nt, Artificial Sequence
  LRRK2 RNA guide
caauaacuugcagcaaugaguu

SEQ ID NO: 68655 - RNA, 22 nt, Artificial Sequence
  LRRK2 RNA guide
cagcaaugaguuuaucagauaa

SEQ ID NO: 68656 - RNA, 22 nt, Artificial Sequence
  LRRK2 RNA guide
cugauaaacucauugcugcaag

SEQ ID NO: 68657 - RNA, 22 nt, Artificial Sequence
  LRRK2 RNA guide
cuugcagcaaugaguuuaucag

SEQ ID NO: 68658 - RNA, 22 nt, Artificial Sequence
  LRRK2 RNA guide
gauaaacucauugcugcaaguu

SEQ ID NO: 68659 - RNA, 22 nt, Artificial Sequence
  LRRK2 RNA guide
gaucaauaacuugcagcaauga

SEQ ID NO: 68660 - RNA, 22 nt, Artificial Sequence
  LRRK2 RNA guide
gcagcaaugaguuuaucagaua

SEQ ID NO: 68661 - RNA, 22 nt, Artificial Sequence
  LRRK2 RNA guide
uaaacucauugcugcaaguuau

SEQ ID NO: 68662 - RNA, 22 nt, Artificial Sequence
  LRRK2 RNA guide
uaacuugcagcaaugaguuuau

SEQ ID NO: 68663 - RNA, 22 nt, Artificial Sequence
  LRRK2 RNA guide
uagaucaauaacuugcagcaau

SEQ ID NO: 68664 - RNA, 22 nt, Artificial Sequence
  LRRK2 RNA guide
uaucugauaaacucauugcugc

SEQ ID NO: 68665 - RNA, 22 nt, Artificial Sequence
  LRRK2 RNA guide
ucaauaacuugcagcaaugagu

SEQ ID NO: 68666 - RNA, 22 nt, Artificial Sequence
  LRRK2 RNA guide
ucugauaaacucauugcugcaa

SEQ ID NO: 68667 - RNA, 22 nt, Artificial Sequence
  LRRK2 RNA guide
ugauaaacucauugcugcaagu

SEQ ID NO: 68668 - RNA, 22 nt, Artificial Sequence
  LRRK2 RNA guide
ugcagcaaugaguuuaucagau

SEQ ID NO: 68669 - RNA, 22 nt, Artificial Sequence
  LRRK2 RNA guide
uuaucugauaaacucauugcug

SEQ ID NO: 68670 - RNA, 22 nt, Artificial Sequence
  LRRK2 RNA guide
uugcagcaaugaguuuaucaga

SEQ ID NO: 68671 - RNA, 20 nt, Artificial Sequence
  LRRK2 RNA guide
aacuugcagcaaugagcuua

SEQ ID NO: 68672 - RNA, 20 nt, Artificial Sequence
  LRRK2 RNA guide
aagcucauugcugcaaguua

SEQ ID NO: 68673 - RNA, 20 nt, Artificial Sequence
  LRRK2 RNA guide
aauaacuugcagcaaugagc

SEQ ID NO: 68674 - RNA, 20 nt, Artificial Sequence
  LRRK2 RNA guide
acuugcagcaaugagcuuau

SEQ ID NO: 68675 - RNA, 20 nt, Artificial Sequence
  LRRK2 RNA guide
agcaaugagcuuaucagaua

SEQ ID NO: 68676 - RNA, 20 nt, Artificial Sequence
  LRRK2 RNA guide
agcucauugcugcaaguuau

SEQ ID NO: 68677 - RNA, 20 nt, Artificial Sequence
  LRRK2 RNA guide
auaacuugcagcaaugagcu

SEQ ID NO: 68678 - RNA, 20 nt, Artificial Sequence
  LRRK2 RNA guide
auaagcucauugcugcaagu

SEQ ID NO: 68679 - RNA, 20 nt, Artificial Sequence
  LRRK2 RNA guide
aucugauaagcucauugcug

SEQ ID NO: 68680 - RNA, 20 nt, Artificial Sequence
  LRRK2 RNA guide
caaugagcuuaucagauaaa

SEQ ID NO: 68681 - RNA, 20 nt, Artificial Sequence
  LRRK2 RNA guide
cagcaaugagcuuaucagau

SEQ ID NO: 68682 - RNA, 20 nt, Artificial Sequence
  LRRK2 RNA guide
cugauaagcucauugcugca

SEQ ID NO: 68683 - RNA, 20 nt, Artificial Sequence
  LRRK2 RNA guide
cuugcagcaaugagcuuauc

SEQ ID NO: 68684 - RNA, 20 nt, Artificial Sequence
  LRRK2 RNA guide
gauaagcucauugcugcaag

SEQ ID NO: 68685 - RNA, 20 nt, Artificial Sequence
  LRRK2 RNA guide
gcaaugagcuuaucagauaa

SEQ ID NO: 68686 - RNA, 20 nt, Artificial Sequence
  LRRK2 RNA guide
gcagcaaugagcuuaucaga

SEQ ID NO: 68687 - RNA, 20 nt, Artificial Sequence
  LRRK2 RNA guide
uaacuugcagcaaugagcuu

SEQ ID NO: 68688 - RNA, 20 nt, Artificial Sequence
  LRRK2 RNA guide
uaagcucauugcugcaaguu

SEQ ID NO: 68689 - RNA, 20 nt, Artificial Sequence
  LRRK2 RNA guide
uaucugauaagcucauugcu

SEQ ID NO: 68690 - RNA, 20 nt, Artificial Sequence
  LRRK2 RNA guide
ucugauaagcucauugcugc

SEQ ID NO: 68691 - RNA, 20 nt, Artificial Sequence
  LRRK2 RNA guide
ugauaagcucauugcugcaa

SEQ ID NO: 68692 - RNA, 20 nt, Artificial Sequence
  LRRK2 RNA guide
ugcagcaaugagcuuaucag

SEQ ID NO: 68693 - RNA, 20 nt, Artificial Sequence
  LRRK2 RNA guide
uuaucugauaagcucauugc

SEQ ID NO: 68694 - RNA, 20 nt, Artificial Sequence
  LRRK2 RNA guide
uugcagcaaugagcuuauca

SEQ ID NO: 68695 - RNA, 20 nt, Artificial Sequence
  LRRK2 RNA guide
uuuaucugauaagcucauug

SEQ ID NO: 68696 - RNA, 21 nt, Artificial Sequence
  LRRK2 RNA guide
aacuugcagcaaugagcuuau

SEQ ID NO: 68697 - RNA, 21 nt, Artificial Sequence
  LRRK2 RNA guide
aagcucauugcugcaaguuau

SEQ ID NO: 68698 - RNA, 21 nt, Artificial Sequence
  LRRK2 RNA guide
aauaacuugcagcaaugagcu

SEQ ID NO: 68699 - RNA, 21 nt, Artificial Sequence
  LRRK2 RNA guide
acuugcagcaaugagcuuauc

SEQ ID NO: 68700 - RNA, 21 nt, Artificial Sequence
  LRRK2 RNA guide
agcaaugagcuuaucagauaa

SEQ ID NO: 68701 - RNA, 21 nt, Artificial Sequence
  LRRK2 RNA guide
agcucauugcugcaaguuauu

SEQ ID NO: 68702 - RNA, 21 nt, Artificial Sequence
  LRRK2 RNA guide
auaacuugcagcaaugagcuu

SEQ ID NO: 68703 - RNA, 21 nt, Artificial Sequence
  LRRK2 RNA guide
auaagcucauugcugcaaguu

SEQ ID NO: 68704 - RNA, 21 nt, Artificial Sequence
  LRRK2 RNA guide
aucugauaagcucauugcugc

SEQ ID NO: 68705 - RNA, 21 nt, Artificial Sequence
  LRRK2 RNA guide
caauaacuugcagcaaugagc

SEQ ID NO: 68706 - RNA, 21 nt, Artificial Sequence
  LRRK2 RNA guide
cagcaaugagcuuaucagaua

SEQ ID NO: 68707 - RNA, 21 nt, Artificial Sequence
  LRRK2 RNA guide
cugauaagcucauugcugcaa

SEQ ID NO: 68708 - RNA, 21 nt, Artificial Sequence
  LRRK2 RNA guide
cuugcagcaaugagcuuauca

SEQ ID NO: 68709 - RNA, 21 nt, Artificial Sequence
  LRRK2 RNA guide
gauaagcucauugcugcaagu

SEQ ID NO: 68710 - RNA, 21 nt, Artificial Sequence
  LRRK2 RNA guide
gcaaugagcuuaucagauaaa

SEQ ID NO: 68711 - RNA, 21 nt, Artificial Sequence
  LRRK2 RNA guide
gcagcaaugagcuuaucagau

SEQ ID NO: 68712 - RNA, 21 nt, Artificial Sequence
  LRRK2 RNA guide
uaacuugcagcaaugagcuua

SEQ ID NO: 68713 - RNA, 21 nt, Artificial Sequence
  LRRK2 RNA guide
uaagcucauugcugcaaguua

SEQ ID NO: 68714 - RNA, 21 nt, Artificial Sequence
  LRRK2 RNA guide
uaucugauaagcucauugcug

SEQ ID NO: 68715 - RNA, 21 nt, Artificial Sequence
  LRRK2 RNA guide
ucugauaagcucauugcugca

SEQ ID NO: 68716 - RNA, 21 nt, Artificial Sequence
  LRRK2 RNA guide
ugauaagcucauugcugcaag

SEQ ID NO: 68717 - RNA, 21 nt, Artificial Sequence
  LRRK2 RNA guide
ugcagcaaugagcuuaucaga

SEQ ID NO: 68718 - RNA, 21 nt, Artificial Sequence
  LRRK2 RNA guide
uuaucugauaagcucauugcu

SEQ ID NO: 68719 - RNA, 21 nt, Artificial Sequence
  LRRK2 RNA guide
uugcagcaaugagcuuaucag

SEQ ID NO: 68720 - RNA, 21 nt, Artificial Sequence
  LRRK2 RNA guide
uuuaucugauaagcucauugc

SEQ ID NO: 68721 - RNA, 22 nt, Artificial Sequence
  LRRK2 RNA guide
aacuugcagcaaugagcuuauc

SEQ ID NO: 68722 - RNA, 22 nt, Artificial Sequence
  LRRK2 RNA guide
aagcucauugcugcaaguuauu

SEQ ID NO: 68723 - RNA, 22 nt, Artificial Sequence
  LRRK2 RNA guide
aauaacuugcagcaaugagcuu

SEQ ID NO: 68724 - RNA, 22 nt, Artificial Sequence
  LRRK2 RNA guide
acuugcagcaaugagcuuauca

SEQ ID NO: 68725 - RNA, 22 nt, Artificial Sequence
  LRRK2 RNA guide
agcaaugagcuuaucagauaaa

SEQ ID NO: 68726 - RNA, 22 nt, Artificial Sequence
  LRRK2 RNA guide
agcucauugcugcaaguuauug

SEQ ID NO: 68727 - RNA, 22 nt, Artificial Sequence
  LRRK2 RNA guide
auaacuugcagcaaugagcuua

SEQ ID NO: 68728 - RNA, 22 nt, Artificial Sequence
  LRRK2 RNA guide
auaagcucauugcugcaaguua

SEQ ID NO: 68729 - RNA, 22 nt, Artificial Sequence
  LRRK2 RNA guide
aucugauaagcucauugcugca

SEQ ID NO: 68730 - RNA, 22 nt, Artificial Sequence
  LRRK2 RNA guide
auuuaucugauaagcucauugc

SEQ ID NO: 68731 - RNA, 22 nt, Artificial Sequence
  LRRK2 RNA guide
caauaacuugcagcaaugagcu

SEQ ID NO: 68732 - RNA, 22 nt, Artificial Sequence
  LRRK2 RNA guide
cagcaaugagcuuaucagauaa

SEQ ID NO: 68733 - RNA, 22 nt, Artificial Sequence
  LRRK2 RNA guide
cugauaagcucauugcugcaag

SEQ ID NO: 68734 - RNA, 22 nt, Artificial Sequence
  LRRK2 RNA guide
cuugcagcaaugagcuuaucag

SEQ ID NO: 68735 - RNA, 22 nt, Artificial Sequence
  LRRK2 RNA guide
gauaagcucauugcugcaaguu

SEQ ID NO: 68736 - RNA, 22 nt, Artificial Sequence
  LRRK2 RNA guide
gcaaugagcuuaucagauaaau

SEQ ID NO: 68737 - RNA, 22 nt, Artificial Sequence
  LRRK2 RNA guide
gcagcaaugagcuuaucagaua

SEQ ID NO: 68738 - RNA, 22 nt, Artificial Sequence
  LRRK2 RNA guide
uaacuugcagcaaugagcuuau

SEQ ID NO: 68739 - RNA, 22 nt, Artificial Sequence
  LRRK2 RNA guide
uaagcucauugcugcaaguuau

SEQ ID NO: 68740 - RNA, 22 nt, Artificial Sequence
  LRRK2 RNA guide
uaucugauaagcucauugcugc

SEQ ID NO: 68741 - RNA, 22 nt, Artificial Sequence
  LRRK2 RNA guide
ucaauaacuugcagcaaugagc

SEQ ID NO: 68742 - RNA, 22 nt, Artificial Sequence
  LRRK2 RNA guide
ucugauaagcucauugcugcaa

SEQ ID NO: 68743 - RNA, 22 nt, Artificial Sequence
  LRRK2 RNA guide
ugauaagcucauugcugcaagu

SEQ ID NO: 68744 - RNA, 22 nt, Artificial Sequence
  LRRK2 RNA guide
ugcagcaaugagcuuaucagau

SEQ ID NO: 68745 - RNA, 22 nt, Artificial Sequence
  LRRK2 RNA guide
uuaucugauaagcucauugcug

SEQ ID NO: 68746 - RNA, 22 nt, Artificial Sequence
  LRRK2 RNA guide
uugcagcaaugagcuuaucaga

SEQ ID NO: 68747 - RNA, 22 nt, Artificial Sequence
  LRRK2 RNA guide
uuuaucugauaagcucauugcu

SEQ ID NO: 68748 - RNA, 20 nt, Artificial Sequence
  LRRK2 RNA guide
auggaugaaaagugaacaua

SEQ ID NO: 68749 - RNA, 20 nt, Artificial Sequence
  LRRK2 RNA guide
auguucacuuuucauccaua

SEQ ID NO: 68750 - RNA, 20 nt, Artificial Sequence
  LRRK2 RNA guide
auuauguucacuuuucaucc

SEQ ID NO: 68751 - RNA, 20 nt, Artificial Sequence
  LRRK2 RNA guide
ggaugaaaagugaacauaau

SEQ ID NO: 68752 - RNA, 20 nt, Artificial Sequence
  LRRK2 RNA guide
guucacuuuucauccauaaa

SEQ ID NO: 68753 - RNA, 20 nt, Artificial Sequence
  LRRK2 RNA guide
uauguucacuuuucauccau

SEQ ID NO: 68754 - RNA, 20 nt, Artificial Sequence
  LRRK2 RNA guide
uggaugaaaagugaacauaa

SEQ ID NO: 68755 - RNA, 20 nt, Artificial Sequence
  LRRK2 RNA guide
uguucacuuuucauccauaa

SEQ ID NO: 68756 - RNA, 20 nt, Artificial Sequence
  LRRK2 RNA guide
uuauggaugaaaagugaaca

SEQ ID NO: 68757 - RNA, 20 nt, Artificial Sequence
  LRRK2 RNA guide
uuauguucacuuuucaucca

SEQ ID NO: 68758 - RNA, 20 nt, Artificial Sequence
  LRRK2 RNA guide
uuuauggaugaaaagugaac

SEQ ID NO: 68759 - RNA, 20 nt, Artificial Sequence
  LRRK2 RNA guide
auggaugaaaacugaacaua

SEQ ID NO: 68760 - RNA, 20 nt, Artificial Sequence
  LRRK2 RNA guide
auguucaguuuucauccaua

SEQ ID NO: 68761 - RNA, 20 nt, Artificial Sequence
  LRRK2 RNA guide
auuauguucaguuuucaucc

SEQ ID NO: 68762 - RNA, 20 nt, Artificial Sequence
  LRRK2 RNA guide
ggaugaaaacugaacauaau

SEQ ID NO: 68763 - RNA, 20 nt, Artificial Sequence
  LRRK2 RNA guide
guucaguuuucauccauaaa

SEQ ID NO: 68764 - RNA, 20 nt, Artificial Sequence
  LRRK2 RNA guide
uauggaugaaaacugaacau

SEQ ID NO: 68765 - RNA, 20 nt, Artificial Sequence
  LRRK2 RNA guide
uauguucaguuuucauccau

SEQ ID NO: 68766 - RNA, 20 nt, Artificial Sequence
  LRRK2 RNA guide
uggaugaaaacugaacauaa

SEQ ID NO: 68767 - RNA, 20 nt, Artificial Sequence
  LRRK2 RNA guide
uguucaguuuucauccauaa

SEQ ID NO: 68768 - RNA, 20 nt, Artificial Sequence
  LRRK2 RNA guide
uuauggaugaaaacugaaca

SEQ ID NO: 68769 - RNA, 20 nt, Artificial Sequence
  LRRK2 RNA guide
uuauguucaguuuucaucca

SEQ ID NO: 68770 - RNA, 20 nt, Artificial Sequence
  LRRK2 RNA guide
uuuauggaugaaaacugaac

SEQ ID NO: 68771 - RNA, 20 nt, Artificial Sequence
  LRRK2 RNA guide
aaaagagguacccucuuucc

SEQ ID NO: 68772 - RNA, 20 nt, Artificial Sequence
  LRRK2 RNA guide
aaagagguacccucuuuccu

SEQ ID NO: 68773 - RNA, 20 nt, Artificial Sequence
  LRRK2 RNA guide
aagagguacccucuuuccuu

SEQ ID NO: 68774 - RNA, 20 nt, Artificial Sequence
  LRRK2 RNA guide
aaggaaagaggguaccucuu

SEQ ID NO: 68775 - RNA, 20 nt, Artificial Sequence
  LRRK2 RNA guide
aaguacagaaggaaagaggg

SEQ ID NO: 68776 - RNA, 20 nt, Artificial Sequence
  LRRK2 RNA guide
acagaaggaaagaggguacc

SEQ ID NO: 68777 - RNA, 20 nt, Artificial Sequence
  LRRK2 RNA guide
acccucuuuccuucuguacu

SEQ ID NO: 68778 - RNA, 20 nt, Artificial Sequence
  LRRK2 RNA guide
acucaaaagagguacccucu

SEQ ID NO: 68779 - RNA, 20 nt, Artificial Sequence
  LRRK2 RNA guide
acuuauuccaaguacagaag

SEQ ID NO: 68780 - RNA, 20 nt, Artificial Sequence
  LRRK2 RNA guide
agaaggaaagaggguaccuc

SEQ ID NO: 68781 - RNA, 20 nt, Artificial Sequence
  LRRK2 RNA guide
agagguacccucuuuccuuc

SEQ ID NO: 68782 - RNA, 20 nt, Artificial Sequence
  LRRK2 RNA guide
aggaaagaggguaccucuuu

SEQ ID NO: 68783 - RNA, 20 nt, Artificial Sequence
  LRRK2 RNA guide
agguacccucuuuccuucug

SEQ ID NO: 68784 - RNA, 20 nt, Artificial Sequence
  LRRK2 RNA guide
aguacagaaggaaagagggu

SEQ ID NO: 68785 - RNA, 20 nt, Artificial Sequence
  LRRK2 RNA guide
aguacuuauuccaaguacag

SEQ ID NO: 68786 - RNA, 20 nt, Artificial Sequence
  LRRK2 RNA guide
auuccaaguacagaaggaaa

SEQ ID NO: 68787 - RNA, 20 nt, Artificial Sequence
  LRRK2 RNA guide
caaaagagguacccucuuuc

SEQ ID NO: 68788 - RNA, 20 nt, Artificial Sequence
  LRRK2 RNA guide
caaguacagaaggaaagagg

SEQ ID NO: 68789 - RNA, 20 nt, Artificial Sequence
  LRRK2 RNA guide
cagaaggaaagaggguaccu

SEQ ID NO: 68790 - RNA, 20 nt, Artificial Sequence
  LRRK2 RNA guide
ccaaguacagaaggaaagag

SEQ ID NO: 68791 - RNA, 20 nt, Artificial Sequence
  LRRK2 RNA guide
cccucuuuccuucuguacuu

SEQ ID NO: 68792 - RNA, 20 nt, Artificial Sequence
  LRRK2 RNA guide
ccucuuuccuucuguacuug

SEQ ID NO: 68793 - RNA, 20 nt, Artificial Sequence
  LRRK2 RNA guide
cucaaaagagguacccucuu

SEQ ID NO: 68794 - RNA, 20 nt, Artificial Sequence
  LRRK2 RNA guide
cucuuuccuucuguacuugg

SEQ ID NO: 68795 - RNA, 20 nt, Artificial Sequence
  LRRK2 RNA guide
cuuauuccaaguacagaagg

SEQ ID NO: 68796 - RNA, 20 nt, Artificial Sequence
  LRRK2 RNA guide
cuuuccuucuguacuuggaa

SEQ ID NO: 68797 - RNA, 20 nt, Artificial Sequence
  LRRK2 RNA guide
gaaggaaagaggguaccucu

SEQ ID NO: 68798 - RNA, 20 nt, Artificial Sequence
  LRRK2 RNA guide
gagguacccucuuuccuucu

SEQ ID NO: 68799 - RNA, 20 nt, Artificial Sequence
  LRRK2 RNA guide
gaguacuuauuccaaguaca

SEQ ID NO: 68800 - RNA, 20 nt, Artificial Sequence
  LRRK2 RNA guide
ggaaagaggguaccucuuuu

SEQ ID NO: 68801 - RNA, 20 nt, Artificial Sequence
  LRRK2 RNA guide
gguacccucuuuccuucugu

SEQ ID NO: 68802 - RNA, 20 nt, Artificial Sequence
  LRRK2 RNA guide
guacagaaggaaagagggua

SEQ ID NO: 68803 - RNA, 20 nt, Artificial Sequence
  LRRK2 RNA guide
guacccucuuuccuucugua

SEQ ID NO: 68804 - RNA, 20 nt, Artificial Sequence
  LRRK2 RNA guide
guacucaaaagagguacccu

SEQ ID NO: 68805 - RNA, 20 nt, Artificial Sequence
  LRRK2 RNA guide
guacuuauuccaaguacaga

SEQ ID NO: 68806 - RNA, 20 nt, Artificial Sequence
  LRRK2 RNA guide
uacagaaggaaagaggguac

SEQ ID NO: 68807 - RNA, 20 nt, Artificial Sequence
  LRRK2 RNA guide
uacccucuuuccuucuguac

SEQ ID NO: 68808 - RNA, 20 nt, Artificial Sequence
  LRRK2 RNA guide
uacucaaaagagguacccuc

SEQ ID NO: 68809 - RNA, 20 nt, Artificial Sequence
  LRRK2 RNA guide
uacuuauuccaaguacagaa

SEQ ID NO: 68810 - RNA, 20 nt, Artificial Sequence
  LRRK2 RNA guide
uauuccaaguacagaaggaa

SEQ ID NO: 68811 - RNA, 20 nt, Artificial Sequence
  LRRK2 RNA guide
ucaaaagagguacccucuuu

SEQ ID NO: 68812 - RNA, 20 nt, Artificial Sequence
  LRRK2 RNA guide
uccaaguacagaaggaaaga

SEQ ID NO: 68813 - RNA, 20 nt, Artificial Sequence
  LRRK2 RNA guide
uccuucuguacuuggaauaa

SEQ ID NO: 68814 - RNA, 20 nt, Artificial Sequence
  LRRK2 RNA guide
ucuuuccuucuguacuugga

SEQ ID NO: 68815 - RNA, 20 nt, Artificial Sequence
  LRRK2 RNA guide
uuauuccaaguacagaagga

SEQ ID NO: 68816 - RNA, 20 nt, Artificial Sequence
  LRRK2 RNA guide
uuccaaguacagaaggaaag

SEQ ID NO: 68817 - RNA, 20 nt, Artificial Sequence
  LRRK2 RNA guide
uuccuucuguacuuggaaua

SEQ ID NO: 68818 - RNA, 20 nt, Artificial Sequence
  LRRK2 RNA guide
uuuccuucuguacuuggaau

SEQ ID NO: 68819 - RNA, 21 nt, Artificial Sequence
  LRRK2 RNA guide
aaaagagguacccucuuuccu

SEQ ID NO: 68820 - RNA, 21 nt, Artificial Sequence
  LRRK2 RNA guide
aaagagguacccucuuuccuu

SEQ ID NO: 68821 - RNA, 21 nt, Artificial Sequence
  LRRK2 RNA guide
aagagguacccucuuuccuuc

SEQ ID NO: 68822 - RNA, 21 nt, Artificial Sequence
  LRRK2 RNA guide
aaggaaagaggguaccucuuu

SEQ ID NO: 68823 - RNA, 21 nt, Artificial Sequence
  LRRK2 RNA guide
aaguacagaaggaaagagggu

SEQ ID NO: 68824 - RNA, 21 nt, Artificial Sequence
  LRRK2 RNA guide
acagaaggaaagaggguaccu

SEQ ID NO: 68825 - RNA, 21 nt, Artificial Sequence
  LRRK2 RNA guide
acccucuuuccuucuguacuu

SEQ ID NO: 68826 - RNA, 21 nt, Artificial Sequence
  LRRK2 RNA guide
acucaaaagagguacccucuu

SEQ ID NO: 68827 - RNA, 21 nt, Artificial Sequence
  LRRK2 RNA guide
acuuauuccaaguacagaagg

SEQ ID NO: 68828 - RNA, 21 nt, Artificial Sequence
  LRRK2 RNA guide
agaaggaaagaggguaccucu

SEQ ID NO: 68829 - RNA, 21 nt, Artificial Sequence
  LRRK2 RNA guide
agagguacccucuuuccuucu

SEQ ID NO: 68830 - RNA, 21 nt, Artificial Sequence
  LRRK2 RNA guide
aggaaagaggguaccucuuuu

SEQ ID NO: 68831 - RNA, 21 nt, Artificial Sequence
  LRRK2 RNA guide
agguacccucuuuccuucugu

SEQ ID NO: 68832 - RNA, 21 nt, Artificial Sequence
  LRRK2 RNA guide
aguacagaaggaaagagggua

SEQ ID NO: 68833 - RNA, 21 nt, Artificial Sequence
  LRRK2 RNA guide
aguacucaaaagagguacccu

SEQ ID NO: 68834 - RNA, 21 nt, Artificial Sequence
  LRRK2 RNA guide
aguacuuauuccaaguacaga

SEQ ID NO: 68835 - RNA, 21 nt, Artificial Sequence
  LRRK2 RNA guide
auuccaaguacagaaggaaag

SEQ ID NO: 68836 - RNA, 21 nt, Artificial Sequence
  LRRK2 RNA guide
caaaagagguacccucuuucc

SEQ ID NO: 68837 - RNA, 21 nt, Artificial Sequence
  LRRK2 RNA guide
caaguacagaaggaaagaggg

SEQ ID NO: 68838 - RNA, 21 nt, Artificial Sequence
  LRRK2 RNA guide
cagaaggaaagaggguaccuc

SEQ ID NO: 68839 - RNA, 21 nt, Artificial Sequence
  LRRK2 RNA guide
ccaaguacagaaggaaagagg

SEQ ID NO: 68840 - RNA, 21 nt, Artificial Sequence
  LRRK2 RNA guide
cccucuuuccuucuguacuug

SEQ ID NO: 68841 - RNA, 21 nt, Artificial Sequence
  LRRK2 RNA guide
ccucuuuccuucuguacuugg

SEQ ID NO: 68842 - RNA, 21 nt, Artificial Sequence
  LRRK2 RNA guide
cgaguacuuauuccaaguaca

SEQ ID NO: 68843 - RNA, 21 nt, Artificial Sequence
  LRRK2 RNA guide
cucaaaagagguacccucuuu

SEQ ID NO: 68844 - RNA, 21 nt, Artificial Sequence
  LRRK2 RNA guide
cucuuuccuucuguacuugga

SEQ ID NO: 68845 - RNA, 21 nt, Artificial Sequence
  LRRK2 RNA guide
cuuauuccaaguacagaagga

SEQ ID NO: 68846 - RNA, 21 nt, Artificial Sequence
  LRRK2 RNA guide
cuuuccuucuguacuuggaau

SEQ ID NO: 68847 - RNA, 21 nt, Artificial Sequence
  LRRK2 RNA guide
gaaggaaagaggguaccucuu

SEQ ID NO: 68848 - RNA, 21 nt, Artificial Sequence
  LRRK2 RNA guide
gagguacccucuuuccuucug

SEQ ID NO: 68849 - RNA, 21 nt, Artificial Sequence
  LRRK2 RNA guide
gaguacuuauuccaaguacag

SEQ ID NO: 68850 - RNA, 21 nt, Artificial Sequence
  LRRK2 RNA guide
ggaaagaggguaccucuuuug

SEQ ID NO: 68851 - RNA, 21 nt, Artificial Sequence
  LRRK2 RNA guide
gguacccucuuuccuucugua

SEQ ID NO: 68852 - RNA, 21 nt, Artificial Sequence
  LRRK2 RNA guide
guacagaaggaaagaggguac

SEQ ID NO: 68853 - RNA, 21 nt, Artificial Sequence
  LRRK2 RNA guide
guacccucuuuccuucuguac

SEQ ID NO: 68854 - RNA, 21 nt, Artificial Sequence
  LRRK2 RNA guide
guacucaaaagagguacccuc

SEQ ID NO: 68855 - RNA, 21 nt, Artificial Sequence
  LRRK2 RNA guide
guacuuauuccaaguacagaa

SEQ ID NO: 68856 - RNA, 21 nt, Artificial Sequence
  LRRK2 RNA guide
uacagaaggaaagaggguacc

SEQ ID NO: 68857 - RNA, 21 nt, Artificial Sequence
  LRRK2 RNA guide
uacccucuuuccuucuguacu

SEQ ID NO: 68858 - RNA, 21 nt, Artificial Sequence
  LRRK2 RNA guide
uacucaaaagagguacccucu

SEQ ID NO: 68859 - RNA, 21 nt, Artificial Sequence
  LRRK2 RNA guide
uacuuauuccaaguacagaag

SEQ ID NO: 68860 - RNA, 21 nt, Artificial Sequence
  LRRK2 RNA guide
uauuccaaguacagaaggaaa

SEQ ID NO: 68861 - RNA, 21 nt, Artificial Sequence
  LRRK2 RNA guide
ucaaaagagguacccucuuuc

SEQ ID NO: 68862 - RNA, 21 nt, Artificial Sequence
  LRRK2 RNA guide
uccaaguacagaaggaaagag

SEQ ID NO: 68863 - RNA, 21 nt, Artificial Sequence
  LRRK2 RNA guide
uccuucuguacuuggaauaag

SEQ ID NO: 68864 - RNA, 21 nt, Artificial Sequence
  LRRK2 RNA guide
ucuuuccuucuguacuuggaa

SEQ ID NO: 68865 - RNA, 21 nt, Artificial Sequence
  LRRK2 RNA guide
uuauuccaaguacagaaggaa

SEQ ID NO: 68866 - RNA, 21 nt, Artificial Sequence
  LRRK2 RNA guide
uuccaaguacagaaggaaaga

SEQ ID NO: 68867 - RNA, 21 nt, Artificial Sequence
  LRRK2 RNA guide
uuccuucuguacuuggaauaa

SEQ ID NO: 68868 - RNA, 21 nt, Artificial Sequence
  LRRK2 RNA guide
uuuccuucuguacuuggaaua

SEQ ID NO: 68869 - RNA, 22 nt, Artificial Sequence
  LRRK2 RNA guide
aaaagagguacccucuuuccuu

SEQ ID NO: 68870 - RNA, 22 nt, Artificial Sequence
  LRRK2 RNA guide
aaagagguacccucuuuccuuc

SEQ ID NO: 68871 - RNA, 22 nt, Artificial Sequence
  LRRK2 RNA guide
aagagguacccucuuuccuucu

SEQ ID NO: 68872 - RNA, 22 nt, Artificial Sequence
  LRRK2 RNA guide
aaggaaagaggguaccucuuuu

SEQ ID NO: 68873 - RNA, 22 nt, Artificial Sequence
  LRRK2 RNA guide
aaguacagaaggaaagagggua

SEQ ID NO: 68874 - RNA, 22 nt, Artificial Sequence
  LRRK2 RNA guide
aaguacucaaaagagguacccu

SEQ ID NO: 68875 - RNA, 22 nt, Artificial Sequence
  LRRK2 RNA guide
acagaaggaaagaggguaccuc

SEQ ID NO: 68876 - RNA, 22 nt, Artificial Sequence
  LRRK2 RNA guide
acccucuuuccuucuguacuug

SEQ ID NO: 68877 - RNA, 22 nt, Artificial Sequence
  LRRK2 RNA guide
acgaguacuuauuccaaguaca

SEQ ID NO: 68878 - RNA, 22 nt, Artificial Sequence
  LRRK2 RNA guide
acucaaaagagguacccucuuu

SEQ ID NO: 68879 - RNA, 22 nt, Artificial Sequence
  LRRK2 RNA guide
acuuauuccaaguacagaagga

SEQ ID NO: 68880 - RNA, 22 nt, Artificial Sequence
  LRRK2 RNA guide
agaaggaaagaggguaccucuu

SEQ ID NO: 68881 - RNA, 22 nt, Artificial Sequence
  LRRK2 RNA guide
agagguacccucuuuccuucug

SEQ ID NO: 68882 - RNA, 22 nt, Artificial Sequence
  LRRK2 RNA guide
aggaaagaggguaccucuuuug

SEQ ID NO: 68883 - RNA, 22 nt, Artificial Sequence
  LRRK2 RNA guide
agguacccucuuuccuucugua

SEQ ID NO: 68884 - RNA, 22 nt, Artificial Sequence
  LRRK2 RNA guide
aguacagaaggaaagaggguac

SEQ ID NO: 68885 - RNA, 22 nt, Artificial Sequence
  LRRK2 RNA guide
aguacucaaaagagguacccuc

SEQ ID NO: 68886 - RNA, 22 nt, Artificial Sequence
  LRRK2 RNA guide
aguacuuauuccaaguacagaa

SEQ ID NO: 68887 - RNA, 22 nt, Artificial Sequence
  LRRK2 RNA guide
auuccaaguacagaaggaaaga

SEQ ID NO: 68888 - RNA, 22 nt, Artificial Sequence
  LRRK2 RNA guide
caaaagagguacccucuuuccu

SEQ ID NO: 68889 - RNA, 22 nt, Artificial Sequence
  LRRK2 RNA guide
caaguacagaaggaaagagggu

SEQ ID NO: 68890 - RNA, 22 nt, Artificial Sequence
  LRRK2 RNA guide
cagaaggaaagaggguaccucu

SEQ ID NO: 68891 - RNA, 22 nt, Artificial Sequence
  LRRK2 RNA guide
ccaaguacagaaggaaagaggg

SEQ ID NO: 68892 - RNA, 22 nt, Artificial Sequence
  LRRK2 RNA guide
cccucuuuccuucuguacuugg

SEQ ID NO: 68893 - RNA, 22 nt, Artificial Sequence
  LRRK2 RNA guide
ccucuuuccuucuguacuugga

SEQ ID NO: 68894 - RNA, 22 nt, Artificial Sequence
  LRRK2 RNA guide
cgaguacuuauuccaaguacag

SEQ ID NO: 68895 - RNA, 22 nt, Artificial Sequence
  LRRK2 RNA guide
cucaaaagagguacccucuuuc

SEQ ID NO: 68896 - RNA, 22 nt, Artificial Sequence
  LRRK2 RNA guide
cucuuuccuucuguacuuggaa

SEQ ID NO: 68897 - RNA, 22 nt, Artificial Sequence
  LRRK2 RNA guide
cuuauuccaaguacagaaggaa

SEQ ID NO: 68898 - RNA, 22 nt, Artificial Sequence
  LRRK2 RNA guide
cuuuccuucuguacuuggaaua

SEQ ID NO: 68899 - RNA, 22 nt, Artificial Sequence
  LRRK2 RNA guide
gaaggaaagaggguaccucuuu

SEQ ID NO: 68900 - RNA, 22 nt, Artificial Sequence
  LRRK2 RNA guide
gagguacccucuuuccuucugu

SEQ ID NO: 68901 - RNA, 22 nt, Artificial Sequence
  LRRK2 RNA guide
gaguacuuauuccaaguacaga

SEQ ID NO: 68902 - RNA, 22 nt, Artificial Sequence
  LRRK2 RNA guide
ggaaagaggguaccucuuuuga

SEQ ID NO: 68903 - RNA, 22 nt, Artificial Sequence
  LRRK2 RNA guide
gguacccucuuuccuucuguac

SEQ ID NO: 68904 - RNA, 22 nt, Artificial Sequence
  LRRK2 RNA guide
guacagaaggaaagaggguacc

SEQ ID NO: 68905 - RNA, 22 nt, Artificial Sequence
  LRRK2 RNA guide
guacccucuuuccuucuguacu

SEQ ID NO: 68906 - RNA, 22 nt, Artificial Sequence
  LRRK2 RNA guide
guacucaaaagagguacccucu

SEQ ID NO: 68907 - RNA, 22 nt, Artificial Sequence
  LRRK2 RNA guide
guacuuauuccaaguacagaag

SEQ ID NO: 68908 - RNA, 22 nt, Artificial Sequence
  LRRK2 RNA guide
uacagaaggaaagaggguaccu

SEQ ID NO: 68909 - RNA, 22 nt, Artificial Sequence
  LRRK2 RNA guide
uacccucuuuccuucuguacuu

SEQ ID NO: 68910 - RNA, 22 nt, Artificial Sequence
  LRRK2 RNA guide
uacucaaaagagguacccucuu

SEQ ID NO: 68911 - RNA, 22 nt, Artificial Sequence
  LRRK2 RNA guide
uacuuauuccaaguacagaagg

SEQ ID NO: 68912 - RNA, 22 nt, Artificial Sequence
  LRRK2 RNA guide
uauuccaaguacagaaggaaag

SEQ ID NO: 68913 - RNA, 22 nt, Artificial Sequence
  LRRK2 RNA guide
ucaaaagagguacccucuuucc

SEQ ID NO: 68914 - RNA, 22 nt, Artificial Sequence
  LRRK2 RNA guide
uccaaguacagaaggaaagagg

SEQ ID NO: 68915 - RNA, 22 nt, Artificial Sequence
  LRRK2 RNA guide
uccuucuguacuuggaauaagu

SEQ ID NO: 68916 - RNA, 22 nt, Artificial Sequence
  LRRK2 RNA guide
ucuuuccuucuguacuuggaau

SEQ ID NO: 68917 - RNA, 22 nt, Artificial Sequence
  LRRK2 RNA guide
uuauuccaaguacagaaggaaa

SEQ ID NO: 68918 - RNA, 22 nt, Artificial Sequence
  LRRK2 RNA guide
uuccaaguacagaaggaaagag

SEQ ID NO: 68919 - RNA, 22 nt, Artificial Sequence
  LRRK2 RNA guide
uuccuucuguacuuggaauaag

SEQ ID NO: 68920 - RNA, 22 nt, Artificial Sequence
  LRRK2 RNA guide
uuuccuucuguacuuggaauaa

SEQ ID NO: 68921 - RNA, 20 nt, Artificial Sequence
  LRRK2 RNA guide
aaaagagguacccucuuuuc

SEQ ID NO: 68922 - RNA, 20 nt, Artificial Sequence
  LRRK2 RNA guide
aaagagguacccucuuuucu

SEQ ID NO: 68923 - RNA, 20 nt, Artificial Sequence
  LRRK2 RNA guide
aagaaaagaggguaccucuu

SEQ ID NO: 68924 - RNA, 20 nt, Artificial Sequence
  LRRK2 RNA guide
aagagguacccucuuuucuu

SEQ ID NO: 68925 - RNA, 20 nt, Artificial Sequence
  LRRK2 RNA guide
aaguacagaagaaaagaggg

SEQ ID NO: 68926 - RNA, 20 nt, Artificial Sequence
  LRRK2 RNA guide
acagaagaaaagaggguacc

SEQ ID NO: 68927 - RNA, 20 nt, Artificial Sequence
  LRRK2 RNA guide
acccucuuuucuucuguacu

SEQ ID NO: 68928 - RNA, 20 nt, Artificial Sequence
  LRRK2 RNA guide
agaaaagaggguaccucuuu

SEQ ID NO: 68929 - RNA, 20 nt, Artificial Sequence
  LRRK2 RNA guide
agaagaaaagaggguaccuc

SEQ ID NO: 68930 - RNA, 20 nt, Artificial Sequence
  LRRK2 RNA guide
agagguacccucuuuucuuc

SEQ ID NO: 68931 - RNA, 20 nt, Artificial Sequence
  LRRK2 RNA guide
agguacccucuuuucuucug

SEQ ID NO: 68932 - RNA, 20 nt, Artificial Sequence
  LRRK2 RNA guide
aguacagaagaaaagagggu

SEQ ID NO: 68933 - RNA, 20 nt, Artificial Sequence
  LRRK2 RNA guide
auuccaaguacagaagaaaa

SEQ ID NO: 68934 - RNA, 20 nt, Artificial Sequence
  LRRK2 RNA guide
caaaagagguacccucuuuu

SEQ ID NO: 68935 - RNA, 20 nt, Artificial Sequence
  LRRK2 RNA guide
caaguacagaagaaaagagg

SEQ ID NO: 68936 - RNA, 20 nt, Artificial Sequence
  LRRK2 RNA guide
cagaagaaaagaggguaccu

SEQ ID NO: 68937 - RNA, 20 nt, Artificial Sequence
  LRRK2 RNA guide
ccaaguacagaagaaaagag

SEQ ID NO: 68938 - RNA, 20 nt, Artificial Sequence
  LRRK2 RNA guide
cccucuuuucuucuguacuu

SEQ ID NO: 68939 - RNA, 20 nt, Artificial Sequence
  LRRK2 RNA guide
ccucuuuucuucuguacuug

SEQ ID NO: 68940 - RNA, 20 nt, Artificial Sequence
  LRRK2 RNA guide
cucuuuucuucuguacuugg

SEQ ID NO: 68941 - RNA, 20 nt, Artificial Sequence
  LRRK2 RNA guide
cuuauuccaaguacagaaga

SEQ ID NO: 68942 - RNA, 20 nt, Artificial Sequence
  LRRK2 RNA guide
cuuuucuucuguacuuggaa

SEQ ID NO: 68943 - RNA, 20 nt, Artificial Sequence
  LRRK2 RNA guide
gaaaagaggguaccucuuuu

SEQ ID NO: 68944 - RNA, 20 nt, Artificial Sequence
  LRRK2 RNA guide
gaagaaaagaggguaccucu

SEQ ID NO: 68945 - RNA, 20 nt, Artificial Sequence
  LRRK2 RNA guide
gagguacccucuuuucuucu

SEQ ID NO: 68946 - RNA, 20 nt, Artificial Sequence
  LRRK2 RNA guide
gguacccucuuuucuucugu

SEQ ID NO: 68947 - RNA, 20 nt, Artificial Sequence
  LRRK2 RNA guide
guacagaagaaaagagggua

SEQ ID NO: 68948 - RNA, 20 nt, Artificial Sequence
  LRRK2 RNA guide
guacccucuuuucuucugua

SEQ ID NO: 68949 - RNA, 20 nt, Artificial Sequence
  LRRK2 RNA guide
uacagaagaaaagaggguac

SEQ ID NO: 68950 - RNA, 20 nt, Artificial Sequence
  LRRK2 RNA guide
uacccucuuuucuucuguac

SEQ ID NO: 68951 - RNA, 20 nt, Artificial Sequence
  LRRK2 RNA guide
uauuccaaguacagaagaaa

SEQ ID NO: 68952 - RNA, 20 nt, Artificial Sequence
  LRRK2 RNA guide
uccaaguacagaagaaaaga

SEQ ID NO: 68953 - RNA, 20 nt, Artificial Sequence
  LRRK2 RNA guide
ucuuuucuucuguacuugga

SEQ ID NO: 68954 - RNA, 20 nt, Artificial Sequence
  LRRK2 RNA guide
uuauuccaaguacagaagaa

SEQ ID NO: 68955 - RNA, 20 nt, Artificial Sequence
  LRRK2 RNA guide
uuccaaguacagaagaaaag

SEQ ID NO: 68956 - RNA, 20 nt, Artificial Sequence
  LRRK2 RNA guide
uucuucuguacuuggaauaa

SEQ ID NO: 68957 - RNA, 20 nt, Artificial Sequence
  LRRK2 RNA guide
uuucuucuguacuuggaaua

SEQ ID NO: 68958 - RNA, 20 nt, Artificial Sequence
  LRRK2 RNA guide
uuuucuucuguacuuggaau

SEQ ID NO: 68959 - RNA, 21 nt, Artificial Sequence
  LRRK2 RNA guide
aaaagagguacccucuuuucu

SEQ ID NO: 68960 - RNA, 21 nt, Artificial Sequence
  LRRK2 RNA guide
aaagagguacccucuuuucuu

SEQ ID NO: 68961 - RNA, 21 nt, Artificial Sequence
  LRRK2 RNA guide
aagaaaagaggguaccucuuu

SEQ ID NO: 68962 - RNA, 21 nt, Artificial Sequence
  LRRK2 RNA guide
aagagguacccucuuuucuuc

SEQ ID NO: 68963 - RNA, 21 nt, Artificial Sequence
  LRRK2 RNA guide
aaguacagaagaaaagagggu

SEQ ID NO: 68964 - RNA, 21 nt, Artificial Sequence
  LRRK2 RNA guide
acagaagaaaagaggguaccu

SEQ ID NO: 68965 - RNA, 21 nt, Artificial Sequence
  LRRK2 RNA guide
acccucuuuucuucuguacuu

SEQ ID NO: 68966 - RNA, 21 nt, Artificial Sequence
  LRRK2 RNA guide
acuuauuccaaguacagaaga

SEQ ID NO: 68967 - RNA, 21 nt, Artificial Sequence
  LRRK2 RNA guide
agaaaagaggguaccucuuuu

SEQ ID NO: 68968 - RNA, 21 nt, Artificial Sequence
  LRRK2 RNA guide
agaagaaaagaggguaccucu

SEQ ID NO: 68969 - RNA, 21 nt, Artificial Sequence
  LRRK2 RNA guide
agagguacccucuuuucuucu

SEQ ID NO: 68970 - RNA, 21 nt, Artificial Sequence
  LRRK2 RNA guide
agguacccucuuuucuucugu

SEQ ID NO: 68971 - RNA, 21 nt, Artificial Sequence
  LRRK2 RNA guide
aguacagaagaaaagagggua

SEQ ID NO: 68972 - RNA, 21 nt, Artificial Sequence
  LRRK2 RNA guide
auuccaaguacagaagaaaag

SEQ ID NO: 68973 - RNA, 21 nt, Artificial Sequence
  LRRK2 RNA guide
caaaagagguacccucuuuuc

SEQ ID NO: 68974 - RNA, 21 nt, Artificial Sequence
  LRRK2 RNA guide
caaguacagaagaaaagaggg

SEQ ID NO: 68975 - RNA, 21 nt, Artificial Sequence
  LRRK2 RNA guide
cagaagaaaagaggguaccuc

SEQ ID NO: 68976 - RNA, 21 nt, Artificial Sequence
  LRRK2 RNA guide
ccaaguacagaagaaaagagg

SEQ ID NO: 68977 - RNA, 21 nt, Artificial Sequence
  LRRK2 RNA guide
cccucuuuucuucuguacuug

SEQ ID NO: 68978 - RNA, 21 nt, Artificial Sequence
  LRRK2 RNA guide
ccucuuuucuucuguacuugg

SEQ ID NO: 68979 - RNA, 21 nt, Artificial Sequence
  LRRK2 RNA guide
cucuuuucuucuguacuugga

SEQ ID NO: 68980 - RNA, 21 nt, Artificial Sequence
  LRRK2 RNA guide
cuuauuccaaguacagaagaa

SEQ ID NO: 68981 - RNA, 21 nt, Artificial Sequence
  LRRK2 RNA guide
cuuuucuucuguacuuggaau

SEQ ID NO: 68982 - RNA, 21 nt, Artificial Sequence
  LRRK2 RNA guide
gaaaagaggguaccucuuuug

SEQ ID NO: 68983 - RNA, 21 nt, Artificial Sequence
  LRRK2 RNA guide
gaagaaaagaggguaccucuu

SEQ ID NO: 68984 - RNA, 21 nt, Artificial Sequence
  LRRK2 RNA guide
gagguacccucuuuucuucug

SEQ ID NO: 68985 - RNA, 21 nt, Artificial Sequence
  LRRK2 RNA guide
gguacccucuuuucuucugua

SEQ ID NO: 68986 - RNA, 21 nt, Artificial Sequence
  LRRK2 RNA guide
guacagaagaaaagaggguac

SEQ ID NO: 68987 - RNA, 21 nt, Artificial Sequence
  LRRK2 RNA guide
guacccucuuuucuucuguac

SEQ ID NO: 68988 - RNA, 21 nt, Artificial Sequence
  LRRK2 RNA guide
uacagaagaaaagaggguacc

SEQ ID NO: 68989 - RNA, 21 nt, Artificial Sequence
  LRRK2 RNA guide
uacccucuuuucuucuguacu

SEQ ID NO: 68990 - RNA, 21 nt, Artificial Sequence
  LRRK2 RNA guide
ucaaaagagguacccucuuuu

SEQ ID NO: 68991 - RNA, 21 nt, Artificial Sequence
  LRRK2 RNA guide
uccaaguacagaagaaaagag

SEQ ID NO: 68992 - RNA, 21 nt, Artificial Sequence
  LRRK2 RNA guide
ucuuuucuucuguacuuggaa

SEQ ID NO: 68993 - RNA, 21 nt, Artificial Sequence
  LRRK2 RNA guide
uuccaaguacagaagaaaaga

SEQ ID NO: 68994 - RNA, 21 nt, Artificial Sequence
  LRRK2 RNA guide
uucuucuguacuuggaauaag

SEQ ID NO: 68995 - RNA, 22 nt, Artificial Sequence
  LRRK2 RNA guide
aaaagagguacccucuuuucuu

SEQ ID NO: 68996 - RNA, 22 nt, Artificial Sequence
  LRRK2 RNA guide
aaagagguacccucuuuucuuc

SEQ ID NO: 68997 - RNA, 22 nt, Artificial Sequence
  LRRK2 RNA guide
aagaaaagaggguaccucuuuu

SEQ ID NO: 68998 - RNA, 22 nt, Artificial Sequence
  LRRK2 RNA guide
aagagguacccucuuuucuucu

SEQ ID NO: 68999 - RNA, 22 nt, Artificial Sequence
  LRRK2 RNA guide
aaguacagaagaaaagagggua

SEQ ID NO: 69000 - RNA, 22 nt, Artificial Sequence
  LRRK2 RNA guide
acagaagaaaagaggguaccuc

SEQ ID NO: 69001 - RNA, 22 nt, Artificial Sequence
  LRRK2 RNA guide
acccucuuuucuucuguacuug

SEQ ID NO: 69002 - RNA, 22 nt, Artificial Sequence
  LRRK2 RNA guide
acuuauuccaaguacagaagaa

SEQ ID NO: 69003 - RNA, 22 nt, Artificial Sequence
  LRRK2 RNA guide
agaaaagaggguaccucuuuug

SEQ ID NO: 69004 - RNA, 22 nt, Artificial Sequence
  LRRK2 RNA guide
agaagaaaagaggguaccucuu

SEQ ID NO: 69005 - RNA, 22 nt, Artificial Sequence
  LRRK2 RNA guide
agagguacccucuuuucuucug

SEQ ID NO: 69006 - RNA, 22 nt, Artificial Sequence
  LRRK2 RNA guide
agguacccucuuuucuucugua

SEQ ID NO: 69007 - RNA, 22 nt, Artificial Sequence
  LRRK2 RNA guide
aguacagaagaaaagaggguac

SEQ ID NO: 69008 - RNA, 22 nt, Artificial Sequence
  LRRK2 RNA guide
auuccaaguacagaagaaaaga

SEQ ID NO: 69009 - RNA, 22 nt, Artificial Sequence
  LRRK2 RNA guide
caaaagagguacccucuuuucu

SEQ ID NO: 69010 - RNA, 22 nt, Artificial Sequence
  LRRK2 RNA guide
caaguacagaagaaaagagggu

SEQ ID NO: 69011 - RNA, 22 nt, Artificial Sequence
  LRRK2 RNA guide
cagaagaaaagaggguaccucu

SEQ ID NO: 69012 - RNA, 22 nt, Artificial Sequence
  LRRK2 RNA guide
ccaaguacagaagaaaagaggg

SEQ ID NO: 69013 - RNA, 22 nt, Artificial Sequence
  LRRK2 RNA guide
cccucuuuucuucuguacuugg

SEQ ID NO: 69014 - RNA, 22 nt, Artificial Sequence
  LRRK2 RNA guide
ccucuuuucuucuguacuugga

SEQ ID NO: 69015 - RNA, 22 nt, Artificial Sequence
  LRRK2 RNA guide
cucaaaagagguacccucuuuu

SEQ ID NO: 69016 - RNA, 22 nt, Artificial Sequence
  LRRK2 RNA guide
cucuuuucuucuguacuuggaa

SEQ ID NO: 69017 - RNA, 22 nt, Artificial Sequence
  LRRK2 RNA guide
cuuauuccaaguacagaagaaa

SEQ ID NO: 69018 - RNA, 22 nt, Artificial Sequence
  LRRK2 RNA guide
cuuuucuucuguacuuggaaua

SEQ ID NO: 69019 - RNA, 22 nt, Artificial Sequence
  LRRK2 RNA guide
gaaaagaggguaccucuuuuga

SEQ ID NO: 69020 - RNA, 22 nt, Artificial Sequence
  LRRK2 RNA guide
gaagaaaagaggguaccucuuu

SEQ ID NO: 69021 - RNA, 22 nt, Artificial Sequence
  LRRK2 RNA guide
gagguacccucuuuucuucugu

SEQ ID NO: 69022 - RNA, 22 nt, Artificial Sequence
  LRRK2 RNA guide
gguacccucuuuucuucuguac

SEQ ID NO: 69023 - RNA, 22 nt, Artificial Sequence
  LRRK2 RNA guide
guacagaagaaaagaggguacc

SEQ ID NO: 69024 - RNA, 22 nt, Artificial Sequence
  LRRK2 RNA guide
guacccucuuuucuucuguacu

SEQ ID NO: 69025 - RNA, 22 nt, Artificial Sequence
  LRRK2 RNA guide
uacagaagaaaagaggguaccu

SEQ ID NO: 69026 - RNA, 22 nt, Artificial Sequence
  LRRK2 RNA guide
uacccucuuuucuucuguacuu

SEQ ID NO: 69027 - RNA, 22 nt, Artificial Sequence
  LRRK2 RNA guide
uacuuauuccaaguacagaaga

SEQ ID NO: 69028 - RNA, 22 nt, Artificial Sequence
  LRRK2 RNA guide
uauuccaaguacagaagaaaag

SEQ ID NO: 69029 - RNA, 22 nt, Artificial Sequence
  LRRK2 RNA guide
ucaaaagagguacccucuuuuc

SEQ ID NO: 69030 - RNA, 22 nt, Artificial Sequence
  LRRK2 RNA guide
uccaaguacagaagaaaagagg

SEQ ID NO: 69031 - RNA, 22 nt, Artificial Sequence
  LRRK2 RNA guide
ucuuuucuucuguacuuggaau

SEQ ID NO: 69032 - RNA, 22 nt, Artificial Sequence
  LRRK2 RNA guide
uuccaaguacagaagaaaagag

SEQ ID NO: 69033 - RNA, 22 nt, Artificial Sequence
  LRRK2 RNA guide
uucuucuguacuuggaauaagu

SEQ ID NO: 69034 - RNA, 22 nt, Artificial Sequence
  LRRK2 RNA guide
uuucuucuguacuuggaauaag

SEQ ID NO: 69035 - RNA, 20 nt, Artificial Sequence
  LRRK2 RNA guide
aaaagcacagaugacucacu

SEQ ID NO: 69036 - RNA, 20 nt, Artificial Sequence
  LRRK2 RNA guide
aaagcacagaugacucacug

SEQ ID NO: 69037 - RNA, 20 nt, Artificial Sequence
  LRRK2 RNA guide
aagcacagaugacucacugg

SEQ ID NO: 69038 - RNA, 20 nt, Artificial Sequence
  LRRK2 RNA guide
acagaugacucacuggggcu

SEQ ID NO: 69039 - RNA, 20 nt, Artificial Sequence
  LRRK2 RNA guide
agaaaagcacagaugacuca

SEQ ID NO: 69040 - RNA, 20 nt, Artificial Sequence
  LRRK2 RNA guide
agaugacucacuggggcuga

SEQ ID NO: 69041 - RNA, 20 nt, Artificial Sequence
  LRRK2 RNA guide
agcacagaugacucacuggg

SEQ ID NO: 69042 - RNA, 20 nt, Artificial Sequence
  LRRK2 RNA guide
agccccagugagucaucugu

SEQ ID NO: 69043 - RNA, 20 nt, Artificial Sequence
  LRRK2 RNA guide
agucaucugugcuuuucuca

SEQ ID NO: 69044 - RNA, 20 nt, Artificial Sequence
  LRRK2 RNA guide
agugagucaucugugcuuuu

SEQ ID NO: 69045 - RNA, 20 nt, Artificial Sequence
  LRRK2 RNA guide
agugcuuguugagaaaagca

SEQ ID NO: 69046 - RNA, 20 nt, Artificial Sequence
  LRRK2 RNA guide
auagugcuuguugagaaaag

SEQ ID NO: 69047 - RNA, 20 nt, Artificial Sequence
  LRRK2 RNA guide
aucugugcuuuucucaacaa

SEQ ID NO: 69048 - RNA, 20 nt, Artificial Sequence
  LRRK2 RNA guide
cacagaugacucacuggggc

SEQ ID NO: 69049 - RNA, 20 nt, Artificial Sequence
  LRRK2 RNA guide
cagaugacucacuggggcug

SEQ ID NO: 69050 - RNA, 20 nt, Artificial Sequence
  LRRK2 RNA guide
cagccccagugagucaucug

SEQ ID NO: 69051 - RNA, 20 nt, Artificial Sequence
  LRRK2 RNA guide
cagugagucaucugugcuuu

SEQ ID NO: 69052 - RNA, 20 nt, Artificial Sequence
  LRRK2 RNA guide
caucugugcuuuucucaaca

SEQ ID NO: 69053 - RNA, 20 nt, Artificial Sequence
  LRRK2 RNA guide
ccagugagucaucugugcuu

SEQ ID NO: 69054 - RNA, 20 nt, Artificial Sequence
  LRRK2 RNA guide
cccagugagucaucugugcu

SEQ ID NO: 69055 - RNA, 20 nt, Artificial Sequence
  LRRK2 RNA guide
ccccagugagucaucugugc

SEQ ID NO: 69056 - RNA, 20 nt, Artificial Sequence
  LRRK2 RNA guide
cucagccccagugagucauc

SEQ ID NO: 69057 - RNA, 20 nt, Artificial Sequence
  LRRK2 RNA guide
cucucagccccagugaguca

SEQ ID NO: 69058 - RNA, 20 nt, Artificial Sequence
  LRRK2 RNA guide
cuuguugagaaaagcacaga

SEQ ID NO: 69059 - RNA, 20 nt, Artificial Sequence
  LRRK2 RNA guide
gaaaagcacagaugacucac

SEQ ID NO: 69060 - RNA, 20 nt, Artificial Sequence
  LRRK2 RNA guide
gagucaucugugcuuuucuc

SEQ ID NO: 69061 - RNA, 20 nt, Artificial Sequence
  LRRK2 RNA guide
gcacagaugacucacugggg

SEQ ID NO: 69062 - RNA, 20 nt, Artificial Sequence
  LRRK2 RNA guide
gccccagugagucaucugug

SEQ ID NO: 69063 - RNA, 20 nt, Artificial Sequence
  LRRK2 RNA guide
gcuuguugagaaaagcacag

SEQ ID NO: 69064 - RNA, 20 nt, Artificial Sequence
  LRRK2 RNA guide
gucaucugugcuuuucucaa

SEQ ID NO: 69065 - RNA, 20 nt, Artificial Sequence
  LRRK2 RNA guide
gucucucagccccagugagu

SEQ ID NO: 69066 - RNA, 20 nt, Artificial Sequence
  LRRK2 RNA guide
gugagucaucugugcuuuuc

SEQ ID NO: 69067 - RNA, 20 nt, Artificial Sequence
  LRRK2 RNA guide
gugcuuguugagaaaagcac

SEQ ID NO: 69068 - RNA, 20 nt, Artificial Sequence
  LRRK2 RNA guide
guugagaaaagcacagauga

SEQ ID NO: 69069 - RNA, 20 nt, Artificial Sequence
  LRRK2 RNA guide
uagugcuuguugagaaaagc

SEQ ID NO: 69070 - RNA, 20 nt, Artificial Sequence
  LRRK2 RNA guide
ucagccccagugagucaucu

SEQ ID NO: 69071 - RNA, 20 nt, Artificial Sequence
  LRRK2 RNA guide
ucaucugugcuuuucucaac

SEQ ID NO: 69072 - RNA, 20 nt, Artificial Sequence
  LRRK2 RNA guide
ucucagccccagugagucau

SEQ ID NO: 69073 - RNA, 20 nt, Artificial Sequence
  LRRK2 RNA guide
ucucucagccccagugaguc

SEQ ID NO: 69074 - RNA, 20 nt, Artificial Sequence
  LRRK2 RNA guide
ucugugcuuuucucaacaag

SEQ ID NO: 69075 - RNA, 20 nt, Artificial Sequence
  LRRK2 RNA guide
ugagaaaagcacagaugacu

SEQ ID NO: 69076 - RNA, 20 nt, Artificial Sequence
  LRRK2 RNA guide
ugagucaucugugcuuuucu

SEQ ID NO: 69077 - RNA, 20 nt, Artificial Sequence
  LRRK2 RNA guide
ugcuuguugagaaaagcaca

SEQ ID NO: 69078 - RNA, 20 nt, Artificial Sequence
  LRRK2 RNA guide
ugucucucagccccagugag

SEQ ID NO: 69079 - RNA, 20 nt, Artificial Sequence
  LRRK2 RNA guide
uguugagaaaagcacagaug

SEQ ID NO: 69080 - RNA, 20 nt, Artificial Sequence
  LRRK2 RNA guide
uugagaaaagcacagaugac

SEQ ID NO: 69081 - RNA, 21 nt, Artificial Sequence
  LRRK2 RNA guide
aaaagcacagaugacucacug

SEQ ID NO: 69082 - RNA, 21 nt, Artificial Sequence
  LRRK2 RNA guide
aaagcacagaugacucacugg

SEQ ID NO: 69083 - RNA, 21 nt, Artificial Sequence
  LRRK2 RNA guide
aagcacagaugacucacuggg

SEQ ID NO: 69084 - RNA, 21 nt, Artificial Sequence
  LRRK2 RNA guide
acagaugacucacuggggcug

SEQ ID NO: 69085 - RNA, 21 nt, Artificial Sequence
  LRRK2 RNA guide
agaaaagcacagaugacucac

SEQ ID NO: 69086 - RNA, 21 nt, Artificial Sequence
  LRRK2 RNA guide
agaugacucacuggggcugag

SEQ ID NO: 69087 - RNA, 21 nt, Artificial Sequence
  LRRK2 RNA guide
agcacagaugacucacugggg

SEQ ID NO: 69088 - RNA, 21 nt, Artificial Sequence
  LRRK2 RNA guide
agccccagugagucaucugug

SEQ ID NO: 69089 - RNA, 21 nt, Artificial Sequence
  LRRK2 RNA guide
agucaucugugcuuuucucaa

SEQ ID NO: 69090 - RNA, 21 nt, Artificial Sequence
  LRRK2 RNA guide
agugagucaucugugcuuuuc

SEQ ID NO: 69091 - RNA, 21 nt, Artificial Sequence
  LRRK2 RNA guide
agugcuuguugagaaaagcac

SEQ ID NO: 69092 - RNA, 21 nt, Artificial Sequence
  LRRK2 RNA guide
auagugcuuguugagaaaagc

SEQ ID NO: 69093 - RNA, 21 nt, Artificial Sequence
  LRRK2 RNA guide
aucugugcuuuucucaacaag

SEQ ID NO: 69094 - RNA, 21 nt, Artificial Sequence
  LRRK2 RNA guide
augucucucagccccagugag

SEQ ID NO: 69095 - RNA, 21 nt, Artificial Sequence
  LRRK2 RNA guide
cacagaugacucacuggggcu

SEQ ID NO: 69096 - RNA, 21 nt, Artificial Sequence
  LRRK2 RNA guide
cagaugacucacuggggcuga

SEQ ID NO: 69097 - RNA, 21 nt, Artificial Sequence
  LRRK2 RNA guide
cagccccagugagucaucugu

SEQ ID NO: 69098 - RNA, 21 nt, Artificial Sequence
  LRRK2 RNA guide
cagugagucaucugugcuuuu

SEQ ID NO: 69099 - RNA, 21 nt, Artificial Sequence
  LRRK2 RNA guide
cauagugcuuguugagaaaag

SEQ ID NO: 69100 - RNA, 21 nt, Artificial Sequence
  LRRK2 RNA guide
caucugugcuuuucucaacaa

SEQ ID NO: 69101 - RNA, 21 nt, Artificial Sequence
  LRRK2 RNA guide
ccagugagucaucugugcuuu

SEQ ID NO: 69102 - RNA, 21 nt, Artificial Sequence
  LRRK2 RNA guide
cccagugagucaucugugcuu

SEQ ID NO: 69103 - RNA, 21 nt, Artificial Sequence
  LRRK2 RNA guide
ccccagugagucaucugugcu

SEQ ID NO: 69104 - RNA, 21 nt, Artificial Sequence
  LRRK2 RNA guide
cucagccccagugagucaucu

SEQ ID NO: 69105 - RNA, 21 nt, Artificial Sequence
  LRRK2 RNA guide
cucucagccccagugagucau

SEQ ID NO: 69106 - RNA, 21 nt, Artificial Sequence
  LRRK2 RNA guide
cuuguugagaaaagcacagau

SEQ ID NO: 69107 - RNA, 21 nt, Artificial Sequence
  LRRK2 RNA guide
gaaaagcacagaugacucacu

SEQ ID NO: 69108 - RNA, 21 nt, Artificial Sequence
  LRRK2 RNA guide
gagaaaagcacagaugacuca

SEQ ID NO: 69109 - RNA, 21 nt, Artificial Sequence
  LRRK2 RNA guide
gagucaucugugcuuuucuca

SEQ ID NO: 69110 - RNA, 21 nt, Artificial Sequence
  LRRK2 RNA guide
gcacagaugacucacuggggc

SEQ ID NO: 69111 - RNA, 21 nt, Artificial Sequence
  LRRK2 RNA guide
gccccagugagucaucugugc

SEQ ID NO: 69112 - RNA, 21 nt, Artificial Sequence
  LRRK2 RNA guide
gcuuguugagaaaagcacaga

SEQ ID NO: 69113 - RNA, 21 nt, Artificial Sequence
  LRRK2 RNA guide
gucaucugugcuuuucucaac

SEQ ID NO: 69114 - RNA, 21 nt, Artificial Sequence
  LRRK2 RNA guide
gucucucagccccagugaguc

SEQ ID NO: 69115 - RNA, 21 nt, Artificial Sequence
  LRRK2 RNA guide
gugagucaucugugcuuuucu

SEQ ID NO: 69116 - RNA, 21 nt, Artificial Sequence
  LRRK2 RNA guide
gugcuuguugagaaaagcaca

SEQ ID NO: 69117 - RNA, 21 nt, Artificial Sequence
  LRRK2 RNA guide
guugagaaaagcacagaugac

SEQ ID NO: 69118 - RNA, 21 nt, Artificial Sequence
  LRRK2 RNA guide
uagugcuuguugagaaaagca

SEQ ID NO: 69119 - RNA, 21 nt, Artificial Sequence
  LRRK2 RNA guide
ucagccccagugagucaucug

SEQ ID NO: 69120 - RNA, 21 nt, Artificial Sequence
  LRRK2 RNA guide
ucaucugugcuuuucucaaca

SEQ ID NO: 69121 - RNA, 21 nt, Artificial Sequence
  LRRK2 RNA guide
ucucagccccagugagucauc

SEQ ID NO: 69122 - RNA, 21 nt, Artificial Sequence
  LRRK2 RNA guide
ucucucagccccagugaguca

SEQ ID NO: 69123 - RNA, 21 nt, Artificial Sequence
  LRRK2 RNA guide
ucugugcuuuucucaacaagc

SEQ ID NO: 69124 - RNA, 21 nt, Artificial Sequence
  LRRK2 RNA guide
ugagaaaagcacagaugacuc

SEQ ID NO: 69125 - RNA, 21 nt, Artificial Sequence
  LRRK2 RNA guide
ugagucaucugugcuuuucuc

SEQ ID NO: 69126 - RNA, 21 nt, Artificial Sequence
  LRRK2 RNA guide
ugcuuguugagaaaagcacag

SEQ ID NO: 69127 - RNA, 21 nt, Artificial Sequence
  LRRK2 RNA guide
ugucucucagccccagugagu

SEQ ID NO: 69128 - RNA, 21 nt, Artificial Sequence
  LRRK2 RNA guide
uguugagaaaagcacagauga

SEQ ID NO: 69129 - RNA, 21 nt, Artificial Sequence
  LRRK2 RNA guide
uugagaaaagcacagaugacu

SEQ ID NO: 69130 - RNA, 21 nt, Artificial Sequence
  LRRK2 RNA guide
uuguugagaaaagcacagaug

SEQ ID NO: 69131 - RNA, 22 nt, Artificial Sequence
  LRRK2 RNA guide
aaaagcacagaugacucacugg

SEQ ID NO: 69132 - RNA, 22 nt, Artificial Sequence
  LRRK2 RNA guide
aaagcacagaugacucacuggg

SEQ ID NO: 69133 - RNA, 22 nt, Artificial Sequence
  LRRK2 RNA guide
aagcacagaugacucacugggg

SEQ ID NO: 69134 - RNA, 22 nt, Artificial Sequence
  LRRK2 RNA guide
acagaugacucacuggggcuga

SEQ ID NO: 69135 - RNA, 22 nt, Artificial Sequence
  LRRK2 RNA guide
acauagugcuuguugagaaaag

SEQ ID NO: 69136 - RNA, 22 nt, Artificial Sequence
  LRRK2 RNA guide
agaaaagcacagaugacucacu

SEQ ID NO: 69137 - RNA, 22 nt, Artificial Sequence
  LRRK2 RNA guide
agaugacucacuggggcugaga

SEQ ID NO: 69138 - RNA, 22 nt, Artificial Sequence
  LRRK2 RNA guide
agcacagaugacucacuggggc

SEQ ID NO: 69139 - RNA, 22 nt, Artificial Sequence
  LRRK2 RNA guide
agccccagugagucaucugugc

SEQ ID NO: 69140 - RNA, 22 nt, Artificial Sequence
  LRRK2 RNA guide
agucaucugugcuuuucucaac

SEQ ID NO: 69141 - RNA, 22 nt, Artificial Sequence
  LRRK2 RNA guide
agugagucaucugugcuuuucu

SEQ ID NO: 69142 - RNA, 22 nt, Artificial Sequence
  LRRK2 RNA guide
agugcuuguugagaaaagcaca

SEQ ID NO: 69143 - RNA, 22 nt, Artificial Sequence
  LRRK2 RNA guide
auagugcuuguugagaaaagca

SEQ ID NO: 69144 - RNA, 22 nt, Artificial Sequence
  LRRK2 RNA guide
aucugugcuuuucucaacaagc

SEQ ID NO: 69145 - RNA, 22 nt, Artificial Sequence
  LRRK2 RNA guide
augucucucagccccagugagu

SEQ ID NO: 69146 - RNA, 22 nt, Artificial Sequence
  LRRK2 RNA guide
cacagaugacucacuggggcug

SEQ ID NO: 69147 - RNA, 22 nt, Artificial Sequence
  LRRK2 RNA guide
cagaugacucacuggggcugag

SEQ ID NO: 69148 - RNA, 22 nt, Artificial Sequence
  LRRK2 RNA guide
cagccccagugagucaucugug

SEQ ID NO: 69149 - RNA, 22 nt, Artificial Sequence
  LRRK2 RNA guide
cagugagucaucugugcuuuuc

SEQ ID NO: 69150 - RNA, 22 nt, Artificial Sequence
  LRRK2 RNA guide
cauagugcuuguugagaaaagc

SEQ ID NO: 69151 - RNA, 22 nt, Artificial Sequence
  LRRK2 RNA guide
caucugugcuuuucucaacaag

SEQ ID NO: 69152 - RNA, 22 nt, Artificial Sequence
  LRRK2 RNA guide
ccagugagucaucugugcuuuu

SEQ ID NO: 69153 - RNA, 22 nt, Artificial Sequence
  LRRK2 RNA guide
cccagugagucaucugugcuuu

SEQ ID NO: 69154 - RNA, 22 nt, Artificial Sequence
  LRRK2 RNA guide
ccccagugagucaucugugcuu

SEQ ID NO: 69155 - RNA, 22 nt, Artificial Sequence
  LRRK2 RNA guide
cucagccccagugagucaucug

SEQ ID NO: 69156 - RNA, 22 nt, Artificial Sequence
  LRRK2 RNA guide
cucucagccccagugagucauc

SEQ ID NO: 69157 - RNA, 22 nt, Artificial Sequence
  LRRK2 RNA guide
cuuguugagaaaagcacagaug

SEQ ID NO: 69158 - RNA, 22 nt, Artificial Sequence
  LRRK2 RNA guide
gaaaagcacagaugacucacug

SEQ ID NO: 69159 - RNA, 22 nt, Artificial Sequence
  LRRK2 RNA guide
gagaaaagcacagaugacucac

SEQ ID NO: 69160 - RNA, 22 nt, Artificial Sequence
  LRRK2 RNA guide
gagucaucugugcuuuucucaa

SEQ ID NO: 69161 - RNA, 22 nt, Artificial Sequence
  LRRK2 RNA guide
gaugucucucagccccagugag

SEQ ID NO: 69162 - RNA, 22 nt, Artificial Sequence
  LRRK2 RNA guide
gcacagaugacucacuggggcu

SEQ ID NO: 69163 - RNA, 22 nt, Artificial Sequence
  LRRK2 RNA guide
gccccagugagucaucugugcu

SEQ ID NO: 69164 - RNA, 22 nt, Artificial Sequence
  LRRK2 RNA guide
gcuuguugagaaaagcacagau

SEQ ID NO: 69165 - RNA, 22 nt, Artificial Sequence
  LRRK2 RNA guide
gucaucugugcuuuucucaaca

SEQ ID NO: 69166 - RNA, 22 nt, Artificial Sequence
  LRRK2 RNA guide
gucucucagccccagugaguca

SEQ ID NO: 69167 - RNA, 22 nt, Artificial Sequence
  LRRK2 RNA guide
gugagucaucugugcuuuucuc

SEQ ID NO: 69168 - RNA, 22 nt, Artificial Sequence
  LRRK2 RNA guide
gugcuuguugagaaaagcacag

SEQ ID NO: 69169 - RNA, 22 nt, Artificial Sequence
  LRRK2 RNA guide
guugagaaaagcacagaugacu

SEQ ID NO: 69170 - RNA, 22 nt, Artificial Sequence
  LRRK2 RNA guide
uagugcuuguugagaaaagcac

SEQ ID NO: 69171 - RNA, 22 nt, Artificial Sequence
  LRRK2 RNA guide
ucagccccagugagucaucugu

SEQ ID NO: 69172 - RNA, 22 nt, Artificial Sequence
  LRRK2 RNA guide
ucaucugugcuuuucucaacaa

SEQ ID NO: 69173 - RNA, 22 nt, Artificial Sequence
  LRRK2 RNA guide
ucucagccccagugagucaucu

SEQ ID NO: 69174 - RNA, 22 nt, Artificial Sequence
  LRRK2 RNA guide
ucucucagccccagugagucau

SEQ ID NO: 69175 - RNA, 22 nt, Artificial Sequence
  LRRK2 RNA guide
ucugugcuuuucucaacaagca

SEQ ID NO: 69176 - RNA, 22 nt, Artificial Sequence
  LRRK2 RNA guide
ugagaaaagcacagaugacuca

SEQ ID NO: 69177 - RNA, 22 nt, Artificial Sequence
  LRRK2 RNA guide
ugagucaucugugcuuuucuca

SEQ ID NO: 69178 - RNA, 22 nt, Artificial Sequence
  LRRK2 RNA guide
ugcuuguugagaaaagcacaga

SEQ ID NO: 69179 - RNA, 22 nt, Artificial Sequence
  LRRK2 RNA guide
ugucucucagccccagugaguc

SEQ ID NO: 69180 - RNA, 22 nt, Artificial Sequence
  LRRK2 RNA guide
uguugagaaaagcacagaugac

SEQ ID NO: 69181 - RNA, 22 nt, Artificial Sequence
  LRRK2 RNA guide
uugagaaaagcacagaugacuc

SEQ ID NO: 69182 - RNA, 22 nt, Artificial Sequence
  LRRK2 RNA guide
uuguugagaaaagcacagauga

SEQ ID NO: 69183 - RNA, 20 nt, Artificial Sequence
  LRRK2 RNA guide
aaaagcacaaaugacucacu

SEQ ID NO: 69184 - RNA, 20 nt, Artificial Sequence
  LRRK2 RNA guide
aaagcacaaaugacucacug

SEQ ID NO: 69185 - RNA, 20 nt, Artificial Sequence
  LRRK2 RNA guide
aaaugacucacuggggcuga

SEQ ID NO: 69186 - RNA, 20 nt, Artificial Sequence
  LRRK2 RNA guide
aagcacaaaugacucacugg

SEQ ID NO: 69187 - RNA, 20 nt, Artificial Sequence
  LRRK2 RNA guide
acaaaugacucacuggggcu

SEQ ID NO: 69188 - RNA, 20 nt, Artificial Sequence
  LRRK2 RNA guide
agaaaagcacaaaugacuca

SEQ ID NO: 69189 - RNA, 20 nt, Artificial Sequence
  LRRK2 RNA guide
agcacaaaugacucacuggg

SEQ ID NO: 69190 - RNA, 20 nt, Artificial Sequence
  LRRK2 RNA guide
agccccagugagucauuugu

SEQ ID NO: 69191 - RNA, 20 nt, Artificial Sequence
  LRRK2 RNA guide
agucauuugugcuuuucuca

SEQ ID NO: 69192 - RNA, 20 nt, Artificial Sequence
  LRRK2 RNA guide
agugagucauuugugcuuuu

SEQ ID NO: 69193 - RNA, 20 nt, Artificial Sequence
  LRRK2 RNA guide
auuugugcuuuucucaacaa

SEQ ID NO: 69194 - RNA, 20 nt, Artificial Sequence
  LRRK2 RNA guide
caaaugacucacuggggcug

SEQ ID NO: 69195 - RNA, 20 nt, Artificial Sequence
  LRRK2 RNA guide
cacaaaugacucacuggggc

SEQ ID NO: 69196 - RNA, 20 nt, Artificial Sequence
  LRRK2 RNA guide
cagccccagugagucauuug

SEQ ID NO: 69197 - RNA, 20 nt, Artificial Sequence
  LRRK2 RNA guide
cagugagucauuugugcuuu

SEQ ID NO: 69198 - RNA, 20 nt, Artificial Sequence
  LRRK2 RNA guide
cauuugugcuuuucucaaca

SEQ ID NO: 69199 - RNA, 20 nt, Artificial Sequence
  LRRK2 RNA guide
ccagugagucauuugugcuu

SEQ ID NO: 69200 - RNA, 20 nt, Artificial Sequence
  LRRK2 RNA guide
cccagugagucauuugugcu

SEQ ID NO: 69201 - RNA, 20 nt, Artificial Sequence
  LRRK2 RNA guide
ccccagugagucauuugugc

SEQ ID NO: 69202 - RNA, 20 nt, Artificial Sequence
  LRRK2 RNA guide
cucagccccagugagucauu

SEQ ID NO: 69203 - RNA, 20 nt, Artificial Sequence
  LRRK2 RNA guide
cuuguugagaaaagcacaaa

SEQ ID NO: 69204 - RNA, 20 nt, Artificial Sequence
  LRRK2 RNA guide
gaaaagcacaaaugacucac

SEQ ID NO: 69205 - RNA, 20 nt, Artificial Sequence
  LRRK2 RNA guide
gagaaaagcacaaaugacuc

SEQ ID NO: 69206 - RNA, 20 nt, Artificial Sequence
  LRRK2 RNA guide
gagucauuugugcuuuucuc

SEQ ID NO: 69207 - RNA, 20 nt, Artificial Sequence
  LRRK2 RNA guide
gcacaaaugacucacugggg

SEQ ID NO: 69208 - RNA, 20 nt, Artificial Sequence
  LRRK2 RNA guide
gccccagugagucauuugug

SEQ ID NO: 69209 - RNA, 20 nt, Artificial Sequence
  LRRK2 RNA guide
gcuuguugagaaaagcacaa

SEQ ID NO: 69210 - RNA, 20 nt, Artificial Sequence
  LRRK2 RNA guide
gucauuugugcuuuucucaa

SEQ ID NO: 69211 - RNA, 20 nt, Artificial Sequence
  LRRK2 RNA guide
gugagucauuugugcuuuuc

SEQ ID NO: 69212 - RNA, 20 nt, Artificial Sequence
  LRRK2 RNA guide
guugagaaaagcacaaauga

SEQ ID NO: 69213 - RNA, 20 nt, Artificial Sequence
  LRRK2 RNA guide
ucagccccagugagucauuu

SEQ ID NO: 69214 - RNA, 20 nt, Artificial Sequence
  LRRK2 RNA guide
ucauuugugcuuuucucaac

SEQ ID NO: 69215 - RNA, 20 nt, Artificial Sequence
  LRRK2 RNA guide
ugagaaaagcacaaaugacu

SEQ ID NO: 69216 - RNA, 20 nt, Artificial Sequence
  LRRK2 RNA guide
ugagucauuugugcuuuucu

SEQ ID NO: 69217 - RNA, 20 nt, Artificial Sequence
  LRRK2 RNA guide
uguugagaaaagcacaaaug

SEQ ID NO: 69218 - RNA, 20 nt, Artificial Sequence
  LRRK2 RNA guide
uugagaaaagcacaaaugac

SEQ ID NO: 69219 - RNA, 20 nt, Artificial Sequence
  LRRK2 RNA guide
uuguugagaaaagcacaaau

SEQ ID NO: 69220 - RNA, 20 nt, Artificial Sequence
  LRRK2 RNA guide
uuugugcuuuucucaacaag

SEQ ID NO: 69221 - RNA, 21 nt, Artificial Sequence
  LRRK2 RNA guide
aaaagcacaaaugacucacug

SEQ ID NO: 69222 - RNA, 21 nt, Artificial Sequence
  LRRK2 RNA guide
aaagcacaaaugacucacugg

SEQ ID NO: 69223 - RNA, 21 nt, Artificial Sequence
  LRRK2 RNA guide
aaaugacucacuggggcugag

SEQ ID NO: 69224 - RNA, 21 nt, Artificial Sequence
  LRRK2 RNA guide
aagcacaaaugacucacuggg

SEQ ID NO: 69225 - RNA, 21 nt, Artificial Sequence
  LRRK2 RNA guide
acaaaugacucacuggggcug

SEQ ID NO: 69226 - RNA, 21 nt, Artificial Sequence
  LRRK2 RNA guide
agaaaagcacaaaugacucac

SEQ ID NO: 69227 - RNA, 21 nt, Artificial Sequence
  LRRK2 RNA guide
agcacaaaugacucacugggg

SEQ ID NO: 69228 - RNA, 21 nt, Artificial Sequence
  LRRK2 RNA guide
agccccagugagucauuugug

SEQ ID NO: 69229 - RNA, 21 nt, Artificial Sequence
  LRRK2 RNA guide
agucauuugugcuuuucucaa

SEQ ID NO: 69230 - RNA, 21 nt, Artificial Sequence
  LRRK2 RNA guide
agugagucauuugugcuuuuc

SEQ ID NO: 69231 - RNA, 21 nt, Artificial Sequence
  LRRK2 RNA guide
auuugugcuuuucucaacaag

SEQ ID NO: 69232 - RNA, 21 nt, Artificial Sequence
  LRRK2 RNA guide
caaaugacucacuggggcuga

SEQ ID NO: 69233 - RNA, 21 nt, Artificial Sequence
  LRRK2 RNA guide
cacaaaugacucacuggggcu

SEQ ID NO: 69234 - RNA, 21 nt, Artificial Sequence
  LRRK2 RNA guide
cagccccagugagucauuugu

SEQ ID NO: 69235 - RNA, 21 nt, Artificial Sequence
  LRRK2 RNA guide
cagugagucauuugugcuuuu

SEQ ID NO: 69236 - RNA, 21 nt, Artificial Sequence
  LRRK2 RNA guide
cauuugugcuuuucucaacaa

SEQ ID NO: 69237 - RNA, 21 nt, Artificial Sequence
  LRRK2 RNA guide
ccagugagucauuugugcuuu

SEQ ID NO: 69238 - RNA, 21 nt, Artificial Sequence
  LRRK2 RNA guide
cccagugagucauuugugcuu

SEQ ID NO: 69239 - RNA, 21 nt, Artificial Sequence
  LRRK2 RNA guide
ccccagugagucauuugugcu

SEQ ID NO: 69240 - RNA, 21 nt, Artificial Sequence
  LRRK2 RNA guide
cucagccccagugagucauuu

SEQ ID NO: 69241 - RNA, 21 nt, Artificial Sequence
  LRRK2 RNA guide
cuuguugagaaaagcacaaau

SEQ ID NO: 69242 - RNA, 21 nt, Artificial Sequence
  LRRK2 RNA guide
gaaaagcacaaaugacucacu

SEQ ID NO: 69243 - RNA, 21 nt, Artificial Sequence
  LRRK2 RNA guide
gagaaaagcacaaaugacuca

SEQ ID NO: 69244 - RNA, 21 nt, Artificial Sequence
  LRRK2 RNA guide
gagucauuugugcuuuucuca

SEQ ID NO: 69245 - RNA, 21 nt, Artificial Sequence
  LRRK2 RNA guide
gcacaaaugacucacuggggc

SEQ ID NO: 69246 - RNA, 21 nt, Artificial Sequence
  LRRK2 RNA guide
gccccagugagucauuugugc

SEQ ID NO: 69247 - RNA, 21 nt, Artificial Sequence
  LRRK2 RNA guide
gcuuguugagaaaagcacaaa

SEQ ID NO: 69248 - RNA, 21 nt, Artificial Sequence
  LRRK2 RNA guide
gucauuugugcuuuucucaac

SEQ ID NO: 69249 - RNA, 21 nt, Artificial Sequence
  LRRK2 RNA guide
gugagucauuugugcuuuucu

SEQ ID NO: 69250 - RNA, 21 nt, Artificial Sequence
  LRRK2 RNA guide
guugagaaaagcacaaaugac

SEQ ID NO: 69251 - RNA, 21 nt, Artificial Sequence
  LRRK2 RNA guide
ucagccccagugagucauuug

SEQ ID NO: 69252 - RNA, 21 nt, Artificial Sequence
  LRRK2 RNA guide
ucauuugugcuuuucucaaca

SEQ ID NO: 69253 - RNA, 21 nt, Artificial Sequence
  LRRK2 RNA guide
ucucagccccagugagucauu

SEQ ID NO: 69254 - RNA, 21 nt, Artificial Sequence
  LRRK2 RNA guide
ugagaaaagcacaaaugacuc

SEQ ID NO: 69255 - RNA, 21 nt, Artificial Sequence
  LRRK2 RNA guide
ugagucauuugugcuuuucuc

SEQ ID NO: 69256 - RNA, 21 nt, Artificial Sequence
  LRRK2 RNA guide
ugcuuguugagaaaagcacaa

SEQ ID NO: 69257 - RNA, 21 nt, Artificial Sequence
  LRRK2 RNA guide
uguugagaaaagcacaaauga

SEQ ID NO: 69258 - RNA, 21 nt, Artificial Sequence
  LRRK2 RNA guide
uugagaaaagcacaaaugacu

SEQ ID NO: 69259 - RNA, 21 nt, Artificial Sequence
  LRRK2 RNA guide
uuguugagaaaagcacaaaug

SEQ ID NO: 69260 - RNA, 21 nt, Artificial Sequence
  LRRK2 RNA guide
uuugugcuuuucucaacaagc

SEQ ID NO: 69261 - RNA, 22 nt, Artificial Sequence
  LRRK2 RNA guide
aaaagcacaaaugacucacugg

SEQ ID NO: 69262 - RNA, 22 nt, Artificial Sequence
  LRRK2 RNA guide
aaagcacaaaugacucacuggg

SEQ ID NO: 69263 - RNA, 22 nt, Artificial Sequence
  LRRK2 RNA guide
aaaugacucacuggggcugaga

SEQ ID NO: 69264 - RNA, 22 nt, Artificial Sequence
  LRRK2 RNA guide
aagcacaaaugacucacugggg

SEQ ID NO: 69265 - RNA, 22 nt, Artificial Sequence
  LRRK2 RNA guide
acaaaugacucacuggggcuga

SEQ ID NO: 69266 - RNA, 22 nt, Artificial Sequence
  LRRK2 RNA guide
agaaaagcacaaaugacucacu

SEQ ID NO: 69267 - RNA, 22 nt, Artificial Sequence
  LRRK2 RNA guide
agcacaaaugacucacuggggc

SEQ ID NO: 69268 - RNA, 22 nt, Artificial Sequence
  LRRK2 RNA guide
agccccagugagucauuugugc

SEQ ID NO: 69269 - RNA, 22 nt, Artificial Sequence
  LRRK2 RNA guide
agucauuugugcuuuucucaac

SEQ ID NO: 69270 - RNA, 22 nt, Artificial Sequence
  LRRK2 RNA guide
agugagucauuugugcuuuucu

SEQ ID NO: 69271 - RNA, 22 nt, Artificial Sequence
  LRRK2 RNA guide
auuugugcuuuucucaacaagc

SEQ ID NO: 69272 - RNA, 22 nt, Artificial Sequence
  LRRK2 RNA guide
caaaugacucacuggggcugag

SEQ ID NO: 69273 - RNA, 22 nt, Artificial Sequence
  LRRK2 RNA guide
cacaaaugacucacuggggcug

SEQ ID NO: 69274 - RNA, 22 nt, Artificial Sequence
  LRRK2 RNA guide
cagccccagugagucauuugug

SEQ ID NO: 69275 - RNA, 22 nt, Artificial Sequence
  LRRK2 RNA guide
cagugagucauuugugcuuuuc

SEQ ID NO: 69276 - RNA, 22 nt, Artificial Sequence
  LRRK2 RNA guide
cauuugugcuuuucucaacaag

SEQ ID NO: 69277 - RNA, 22 nt, Artificial Sequence
  LRRK2 RNA guide
ccagugagucauuugugcuuuu

SEQ ID NO: 69278 - RNA, 22 nt, Artificial Sequence
  LRRK2 RNA guide
cccagugagucauuugugcuuu

SEQ ID NO: 69279 - RNA, 22 nt, Artificial Sequence
  LRRK2 RNA guide
ccccagugagucauuugugcuu

SEQ ID NO: 69280 - RNA, 22 nt, Artificial Sequence
  LRRK2 RNA guide
cucagccccagugagucauuug

SEQ ID NO: 69281 - RNA, 22 nt, Artificial Sequence
  LRRK2 RNA guide
cucucagccccagugagucauu

SEQ ID NO: 69282 - RNA, 22 nt, Artificial Sequence
  LRRK2 RNA guide
cuuguugagaaaagcacaaaug

SEQ ID NO: 69283 - RNA, 22 nt, Artificial Sequence
  LRRK2 RNA guide
gaaaagcacaaaugacucacug

SEQ ID NO: 69284 - RNA, 22 nt, Artificial Sequence
  LRRK2 RNA guide
gagaaaagcacaaaugacucac

SEQ ID NO: 69285 - RNA, 22 nt, Artificial Sequence
  LRRK2 RNA guide
gagucauuugugcuuuucucaa

SEQ ID NO: 69286 - RNA, 22 nt, Artificial Sequence
  LRRK2 RNA guide
gcacaaaugacucacuggggcu

SEQ ID NO: 69287 - RNA, 22 nt, Artificial Sequence
  LRRK2 RNA guide
gccccagugagucauuugugcu

SEQ ID NO: 69288 - RNA, 22 nt, Artificial Sequence
  LRRK2 RNA guide
gcuuguugagaaaagcacaaau

SEQ ID NO: 69289 - RNA, 22 nt, Artificial Sequence
  LRRK2 RNA guide
gucauuugugcuuuucucaaca

SEQ ID NO: 69290 - RNA, 22 nt, Artificial Sequence
  LRRK2 RNA guide
gugagucauuugugcuuuucuc

SEQ ID NO: 69291 - RNA, 22 nt, Artificial Sequence
  LRRK2 RNA guide
gugcuuguugagaaaagcacaa

SEQ ID NO: 69292 - RNA, 22 nt, Artificial Sequence
  LRRK2 RNA guide
guugagaaaagcacaaaugacu

SEQ ID NO: 69293 - RNA, 22 nt, Artificial Sequence
  LRRK2 RNA guide
ucagccccagugagucauuugu

SEQ ID NO: 69294 - RNA, 22 nt, Artificial Sequence
  LRRK2 RNA guide
ucauuugugcuuuucucaacaa

SEQ ID NO: 69295 - RNA, 22 nt, Artificial Sequence
  LRRK2 RNA guide
ucucagccccagugagucauuu

SEQ ID NO: 69296 - RNA, 22 nt, Artificial Sequence
  LRRK2 RNA guide
ugagaaaagcacaaaugacuca

SEQ ID NO: 69297 - RNA, 22 nt, Artificial Sequence
  LRRK2 RNA guide
ugagucauuugugcuuuucuca

SEQ ID NO: 69298 - RNA, 22 nt, Artificial Sequence
  LRRK2 RNA guide
ugcuuguugagaaaagcacaaa

SEQ ID NO: 69299 - RNA, 22 nt, Artificial Sequence
  LRRK2 RNA guide
uguugagaaaagcacaaaugac

SEQ ID NO: 69300 - RNA, 22 nt, Artificial Sequence
  LRRK2 RNA guide
uugagaaaagcacaaaugacuc

SEQ ID NO: 69301 - RNA, 22 nt, Artificial Sequence
  LRRK2 RNA guide
uuguugagaaaagcacaaauga

SEQ ID NO: 69302 - RNA, 22 nt, Artificial Sequence
  LRRK2 RNA guide
uuugugcuuuucucaacaagca

SEQ ID NO: 69303 - RNA, 20 nt, Artificial Sequence
  LRRK2 RNA guide
aaagccaauuagcacaaagc

SEQ ID NO: 69304 - RNA, 20 nt, Artificial Sequence
  LRRK2 RNA guide
aaaggccuaaagccaauuag

SEQ ID NO: 69305 - RNA, 20 nt, Artificial Sequence
  LRRK2 RNA guide
aacaaaggccuaaagccaau

SEQ ID NO: 69306 - RNA, 20 nt, Artificial Sequence
  LRRK2 RNA guide
aagccaauuagcacaaagca

SEQ ID NO: 69307 - RNA, 20 nt, Artificial Sequence
  LRRK2 RNA guide
aaggccuaaagccaauuagc

SEQ ID NO: 69308 - RNA, 20 nt, Artificial Sequence
  LRRK2 RNA guide
aaugcuuugugcuaauuggc

SEQ ID NO: 69309 - RNA, 20 nt, Artificial Sequence
  LRRK2 RNA guide
aauuagcacaaagcauugcc

SEQ ID NO: 69310 - RNA, 20 nt, Artificial Sequence
  LRRK2 RNA guide
aauuggcuuuaggccuuugu

SEQ ID NO: 69311 - RNA, 20 nt, Artificial Sequence
  LRRK2 RNA guide
acaaaggccuaaagccaauu

SEQ ID NO: 69312 - RNA, 20 nt, Artificial Sequence
  LRRK2 RNA guide
agccaauuagcacaaagcau

SEQ ID NO: 69313 - RNA, 20 nt, Artificial Sequence
  LRRK2 RNA guide
aggccuaaagccaauuagca

SEQ ID NO: 69314 - RNA, 20 nt, Artificial Sequence
  LRRK2 RNA guide
agggcaaugcuuugugcuaa

SEQ ID NO: 69315 - RNA, 20 nt, Artificial Sequence
  LRRK2 RNA guide
augcuuugugcuaauuggcu

SEQ ID NO: 69316 - RNA, 20 nt, Artificial Sequence
  LRRK2 RNA guide
auuagcacaaagcauugccc

SEQ ID NO: 69317 - RNA, 20 nt, Artificial Sequence
  LRRK2 RNA guide
caaugcuuugugcuaauugg

SEQ ID NO: 69318 - RNA, 20 nt, Artificial Sequence
  LRRK2 RNA guide
caauuagcacaaagcauugc

SEQ ID NO: 69319 - RNA, 20 nt, Artificial Sequence
  LRRK2 RNA guide
cagggcaaugcuuugugcua

SEQ ID NO: 69320 - RNA, 20 nt, Artificial Sequence
  LRRK2 RNA guide
ccaauuagcacaaagcauug

SEQ ID NO: 69321 - RNA, 20 nt, Artificial Sequence
  LRRK2 RNA guide
cuaaagccaauuagcacaaa

SEQ ID NO: 69322 - RNA, 20 nt, Artificial Sequence
  LRRK2 RNA guide
cuaauuggcuuuaggccuuu

SEQ ID NO: 69323 - RNA, 20 nt, Artificial Sequence
  LRRK2 RNA guide
cuuugugcuaauuggcuuua

SEQ ID NO: 69324 - RNA, 20 nt, Artificial Sequence
  LRRK2 RNA guide
gcaaugcuuugugcuaauug

SEQ ID NO: 69325 - RNA, 20 nt, Artificial Sequence
  LRRK2 RNA guide
gccaauuagcacaaagcauu

SEQ ID NO: 69326 - RNA, 20 nt, Artificial Sequence
  LRRK2 RNA guide
gccuaaagccaauuagcaca

SEQ ID NO: 69327 - RNA, 20 nt, Artificial Sequence
  LRRK2 RNA guide
gcuaauuggcuuuaggccuu

SEQ ID NO: 69328 - RNA, 20 nt, Artificial Sequence
  LRRK2 RNA guide
gcuuugugcuaauuggcuuu

SEQ ID NO: 69329 - RNA, 20 nt, Artificial Sequence
  LRRK2 RNA guide
ggcaaugcuuugugcuaauu

SEQ ID NO: 69330 - RNA, 20 nt, Artificial Sequence
  LRRK2 RNA guide
ggccuaaagccaauuagcac

SEQ ID NO: 69331 - RNA, 20 nt, Artificial Sequence
  LRRK2 RNA guide
gggcaaugcuuugugcuaau

SEQ ID NO: 69332 - RNA, 20 nt, Artificial Sequence
  LRRK2 RNA guide
gguaacaaaggccuaaagcc

SEQ ID NO: 69333 - RNA, 20 nt, Artificial Sequence
  LRRK2 RNA guide
guaacaaaggccuaaagcca

SEQ ID NO: 69334 - RNA, 20 nt, Artificial Sequence
  LRRK2 RNA guide
gugcuaauuggcuuuaggcc

SEQ ID NO: 69335 - RNA, 20 nt, Artificial Sequence
  LRRK2 RNA guide
guucagggcaaugcuuugug

SEQ ID NO: 69336 - RNA, 20 nt, Artificial Sequence
  LRRK2 RNA guide
uaaagccaauuagcacaaag

SEQ ID NO: 69337 - RNA, 20 nt, Artificial Sequence
  LRRK2 RNA guide
uaacaaaggccuaaagccaa

SEQ ID NO: 69338 - RNA, 20 nt, Artificial Sequence
  LRRK2 RNA guide
uaauuggcuuuaggccuuug

SEQ ID NO: 69339 - RNA, 20 nt, Artificial Sequence
  LRRK2 RNA guide
ucagggcaaugcuuugugcu

SEQ ID NO: 69340 - RNA, 20 nt, Artificial Sequence
  LRRK2 RNA guide
ugcuaauuggcuuuaggccu

SEQ ID NO: 69341 - RNA, 20 nt, Artificial Sequence
  LRRK2 RNA guide
ugcuuugugcuaauuggcuu

SEQ ID NO: 69342 - RNA, 20 nt, Artificial Sequence
  LRRK2 RNA guide
ugguaacaaaggccuaaagc

SEQ ID NO: 69343 - RNA, 20 nt, Artificial Sequence
  LRRK2 RNA guide
ugugcuaauuggcuuuaggc

SEQ ID NO: 69344 - RNA, 20 nt, Artificial Sequence
  LRRK2 RNA guide
uguucagggcaaugcuuugu

SEQ ID NO: 69345 - RNA, 20 nt, Artificial Sequence
  LRRK2 RNA guide
uucagggcaaugcuuugugc

SEQ ID NO: 69346 - RNA, 20 nt, Artificial Sequence
  LRRK2 RNA guide
uugguaacaaaggccuaaag

SEQ ID NO: 69347 - RNA, 20 nt, Artificial Sequence
  LRRK2 RNA guide
uugugcuaauuggcuuuagg

SEQ ID NO: 69348 - RNA, 20 nt, Artificial Sequence
  LRRK2 RNA guide
uuugugcuaauuggcuuuag

SEQ ID NO: 69349 - RNA, 21 nt, Artificial Sequence
  LRRK2 RNA guide
aaagccaauuagcacaaagca

SEQ ID NO: 69350 - RNA, 21 nt, Artificial Sequence
  LRRK2 RNA guide
aaaggccuaaagccaauuagc

SEQ ID NO: 69351 - RNA, 21 nt, Artificial Sequence
  LRRK2 RNA guide
aacaaaggccuaaagccaauu

SEQ ID NO: 69352 - RNA, 21 nt, Artificial Sequence
  LRRK2 RNA guide
aagccaauuagcacaaagcau

SEQ ID NO: 69353 - RNA, 21 nt, Artificial Sequence
  LRRK2 RNA guide
aaggccuaaagccaauuagca

SEQ ID NO: 69354 - RNA, 21 nt, Artificial Sequence
  LRRK2 RNA guide
aaugcuuugugcuaauuggcu

SEQ ID NO: 69355 - RNA, 21 nt, Artificial Sequence
  LRRK2 RNA guide
aauuagcacaaagcauugccc

SEQ ID NO: 69356 - RNA, 21 nt, Artificial Sequence
  LRRK2 RNA guide
aauuggcuuuaggccuuuguu

SEQ ID NO: 69357 - RNA, 21 nt, Artificial Sequence
  LRRK2 RNA guide
acaaaggccuaaagccaauua

SEQ ID NO: 69358 - RNA, 21 nt, Artificial Sequence
  LRRK2 RNA guide
agccaauuagcacaaagcauu

SEQ ID NO: 69359 - RNA, 21 nt, Artificial Sequence
  LRRK2 RNA guide
aggccuaaagccaauuagcac

SEQ ID NO: 69360 - RNA, 21 nt, Artificial Sequence
  LRRK2 RNA guide
agggcaaugcuuugugcuaau

SEQ ID NO: 69361 - RNA, 21 nt, Artificial Sequence
  LRRK2 RNA guide
augcuuugugcuaauuggcuu

SEQ ID NO: 69362 - RNA, 21 nt, Artificial Sequence
  LRRK2 RNA guide
auguucagggcaaugcuuugu

SEQ ID NO: 69363 - RNA, 21 nt, Artificial Sequence
  LRRK2 RNA guide
auuagcacaaagcauugcccu

SEQ ID NO: 69364 - RNA, 21 nt, Artificial Sequence
  LRRK2 RNA guide
caaaggccuaaagccaauuag

SEQ ID NO: 69365 - RNA, 21 nt, Artificial Sequence
  LRRK2 RNA guide
caaugcuuugugcuaauuggc

SEQ ID NO: 69366 - RNA, 21 nt, Artificial Sequence
  LRRK2 RNA guide
caauuagcacaaagcauugcc

SEQ ID NO: 69367 - RNA, 21 nt, Artificial Sequence
  LRRK2 RNA guide
cagggcaaugcuuugugcuaa

SEQ ID NO: 69368 - RNA, 21 nt, Artificial Sequence
  LRRK2 RNA guide
ccaauuagcacaaagcauugc

SEQ ID NO: 69369 - RNA, 21 nt, Artificial Sequence
  LRRK2 RNA guide
ccuaaagccaauuagcacaaa

SEQ ID NO: 69370 - RNA, 21 nt, Artificial Sequence
  LRRK2 RNA guide
cuaaagccaauuagcacaaag

SEQ ID NO: 69371 - RNA, 21 nt, Artificial Sequence
  LRRK2 RNA guide
cuaauuggcuuuaggccuuug

SEQ ID NO: 69372 - RNA, 21 nt, Artificial Sequence
  LRRK2 RNA guide
cuuugugcuaauuggcuuuag

SEQ ID NO: 69373 - RNA, 21 nt, Artificial Sequence
  LRRK2 RNA guide
gcaaugcuuugugcuaauugg

SEQ ID NO: 69374 - RNA, 21 nt, Artificial Sequence
  LRRK2 RNA guide
gccaauuagcacaaagcauug

SEQ ID NO: 69375 - RNA, 21 nt, Artificial Sequence
  LRRK2 RNA guide
gccuaaagccaauuagcacaa

SEQ ID NO: 69376 - RNA, 21 nt, Artificial Sequence
  LRRK2 RNA guide
gcuaauuggcuuuaggccuuu

SEQ ID NO: 69377 - RNA, 21 nt, Artificial Sequence
  LRRK2 RNA guide
gcuuugugcuaauuggcuuua

SEQ ID NO: 69378 - RNA, 21 nt, Artificial Sequence
  LRRK2 RNA guide
ggcaaugcuuugugcuaauug

SEQ ID NO: 69379 - RNA, 21 nt, Artificial Sequence
  LRRK2 RNA guide
ggccuaaagccaauuagcaca

SEQ ID NO: 69380 - RNA, 21 nt, Artificial Sequence
  LRRK2 RNA guide
gggcaaugcuuugugcuaauu

SEQ ID NO: 69381 - RNA, 21 nt, Artificial Sequence
  LRRK2 RNA guide
gguaacaaaggccuaaagcca

SEQ ID NO: 69382 - RNA, 21 nt, Artificial Sequence
  LRRK2 RNA guide
guaacaaaggccuaaagccaa

SEQ ID NO: 69383 - RNA, 21 nt, Artificial Sequence
  LRRK2 RNA guide
gugcuaauuggcuuuaggccu

SEQ ID NO: 69384 - RNA, 21 nt, Artificial Sequence
  LRRK2 RNA guide
guucagggcaaugcuuugugc

SEQ ID NO: 69385 - RNA, 21 nt, Artificial Sequence
  LRRK2 RNA guide
uaaagccaauuagcacaaagc

SEQ ID NO: 69386 - RNA, 21 nt, Artificial Sequence
  LRRK2 RNA guide
uaacaaaggccuaaagccaau

SEQ ID NO: 69387 - RNA, 21 nt, Artificial Sequence
  LRRK2 RNA guide
uaauuggcuuuaggccuuugu

SEQ ID NO: 69388 - RNA, 21 nt, Artificial Sequence
  LRRK2 RNA guide
ucagggcaaugcuuugugcua

SEQ ID NO: 69389 - RNA, 21 nt, Artificial Sequence
  LRRK2 RNA guide
ugcuaauuggcuuuaggccuu

SEQ ID NO: 69390 - RNA, 21 nt, Artificial Sequence
  LRRK2 RNA guide
ugcuuugugcuaauuggcuuu

SEQ ID NO: 69391 - RNA, 21 nt, Artificial Sequence
  LRRK2 RNA guide
ugguaacaaaggccuaaagcc

SEQ ID NO: 69392 - RNA, 21 nt, Artificial Sequence
  LRRK2 RNA guide
ugugcuaauuggcuuuaggcc

SEQ ID NO: 69393 - RNA, 21 nt, Artificial Sequence
  LRRK2 RNA guide
uguucagggcaaugcuuugug

SEQ ID NO: 69394 - RNA, 21 nt, Artificial Sequence
  LRRK2 RNA guide
uucagggcaaugcuuugugcu

SEQ ID NO: 69395 - RNA, 21 nt, Artificial Sequence
  LRRK2 RNA guide
uugguaacaaaggccuaaagc

SEQ ID NO: 69396 - RNA, 21 nt, Artificial Sequence
  LRRK2 RNA guide
uugugcuaauuggcuuuaggc

SEQ ID NO: 69397 - RNA, 21 nt, Artificial Sequence
  LRRK2 RNA guide
uuugguaacaaaggccuaaag

SEQ ID NO: 69398 - RNA, 21 nt, Artificial Sequence
  LRRK2 RNA guide
uuugugcuaauuggcuuuagg

SEQ ID NO: 69399 - RNA, 22 nt, Artificial Sequence
  LRRK2 RNA guide
aaagccaauuagcacaaagcau

SEQ ID NO: 69400 - RNA, 22 nt, Artificial Sequence
  LRRK2 RNA guide
aaaggccuaaagccaauuagca

SEQ ID NO: 69401 - RNA, 22 nt, Artificial Sequence
  LRRK2 RNA guide
aacaaaggccuaaagccaauua

SEQ ID NO: 69402 - RNA, 22 nt, Artificial Sequence
  LRRK2 RNA guide
aagccaauuagcacaaagcauu

SEQ ID NO: 69403 - RNA, 22 nt, Artificial Sequence
  LRRK2 RNA guide
aaggccuaaagccaauuagcac

SEQ ID NO: 69404 - RNA, 22 nt, Artificial Sequence
  LRRK2 RNA guide
aaugcuuugugcuaauuggcuu

SEQ ID NO: 69405 - RNA, 22 nt, Artificial Sequence
  LRRK2 RNA guide
aauuagcacaaagcauugcccu

SEQ ID NO: 69406 - RNA, 22 nt, Artificial Sequence
  LRRK2 RNA guide
aauuggcuuuaggccuuuguua

SEQ ID NO: 69407 - RNA, 22 nt, Artificial Sequence
  LRRK2 RNA guide
acaaaggccuaaagccaauuag

SEQ ID NO: 69408 - RNA, 22 nt, Artificial Sequence
  LRRK2 RNA guide
agccaauuagcacaaagcauug

SEQ ID NO: 69409 - RNA, 22 nt, Artificial Sequence
  LRRK2 RNA guide
aggccuaaagccaauuagcaca

SEQ ID NO: 69410 - RNA, 22 nt, Artificial Sequence
  LRRK2 RNA guide
agggcaaugcuuugugcuaauu

SEQ ID NO: 69411 - RNA, 22 nt, Artificial Sequence
  LRRK2 RNA guide
augcuuugugcuaauuggcuuu

SEQ ID NO: 69412 - RNA, 22 nt, Artificial Sequence
  LRRK2 RNA guide
auguucagggcaaugcuuugug

SEQ ID NO: 69413 - RNA, 22 nt, Artificial Sequence
  LRRK2 RNA guide
auuagcacaaagcauugcccug

SEQ ID NO: 69414 - RNA, 22 nt, Artificial Sequence
  LRRK2 RNA guide
caaaggccuaaagccaauuagc

SEQ ID NO: 69415 - RNA, 22 nt, Artificial Sequence
  LRRK2 RNA guide
caaugcuuugugcuaauuggcu

SEQ ID NO: 69416 - RNA, 22 nt, Artificial Sequence
  LRRK2 RNA guide
caauuagcacaaagcauugccc

SEQ ID NO: 69417 - RNA, 22 nt, Artificial Sequence
  LRRK2 RNA guide
cagggcaaugcuuugugcuaau

SEQ ID NO: 69418 - RNA, 22 nt, Artificial Sequence
  LRRK2 RNA guide
ccaauuagcacaaagcauugcc

SEQ ID NO: 69419 - RNA, 22 nt, Artificial Sequence
  LRRK2 RNA guide
ccuaaagccaauuagcacaaag

SEQ ID NO: 69420 - RNA, 22 nt, Artificial Sequence
  LRRK2 RNA guide
cuaaagccaauuagcacaaagc

SEQ ID NO: 69421 - RNA, 22 nt, Artificial Sequence
  LRRK2 RNA guide
cuaauuggcuuuaggccuuugu

SEQ ID NO: 69422 - RNA, 22 nt, Artificial Sequence
  LRRK2 RNA guide
cuuugugcuaauuggcuuuagg

SEQ ID NO: 69423 - RNA, 22 nt, Artificial Sequence
  LRRK2 RNA guide
gcaaugcuuugugcuaauuggc

SEQ ID NO: 69424 - RNA, 22 nt, Artificial Sequence
  LRRK2 RNA guide
gccaauuagcacaaagcauugc

SEQ ID NO: 69425 - RNA, 22 nt, Artificial Sequence
  LRRK2 RNA guide
gccuaaagccaauuagcacaaa

SEQ ID NO: 69426 - RNA, 22 nt, Artificial Sequence
  LRRK2 RNA guide
gcuaauuggcuuuaggccuuug

SEQ ID NO: 69427 - RNA, 22 nt, Artificial Sequence
  LRRK2 RNA guide
gcuuugugcuaauuggcuuuag

SEQ ID NO: 69428 - RNA, 22 nt, Artificial Sequence
  LRRK2 RNA guide
ggcaaugcuuugugcuaauugg

SEQ ID NO: 69429 - RNA, 22 nt, Artificial Sequence
  LRRK2 RNA guide
ggccuaaagccaauuagcacaa

SEQ ID NO: 69430 - RNA, 22 nt, Artificial Sequence
  LRRK2 RNA guide
gggcaaugcuuugugcuaauug

SEQ ID NO: 69431 - RNA, 22 nt, Artificial Sequence
  LRRK2 RNA guide
gguaacaaaggccuaaagccaa

SEQ ID NO: 69432 - RNA, 22 nt, Artificial Sequence
  LRRK2 RNA guide
guaacaaaggccuaaagccaau

SEQ ID NO: 69433 - RNA, 22 nt, Artificial Sequence
  LRRK2 RNA guide
gugcuaauuggcuuuaggccuu

SEQ ID NO: 69434 - RNA, 22 nt, Artificial Sequence
  LRRK2 RNA guide
guucagggcaaugcuuugugcu

SEQ ID NO: 69435 - RNA, 22 nt, Artificial Sequence
  LRRK2 RNA guide
guuugguaacaaaggccuaaag

SEQ ID NO: 69436 - RNA, 22 nt, Artificial Sequence
  LRRK2 RNA guide
uaaagccaauuagcacaaagca

SEQ ID NO: 69437 - RNA, 22 nt, Artificial Sequence
  LRRK2 RNA guide
uaacaaaggccuaaagccaauu

SEQ ID NO: 69438 - RNA, 22 nt, Artificial Sequence
  LRRK2 RNA guide
uaauuggcuuuaggccuuuguu

SEQ ID NO: 69439 - RNA, 22 nt, Artificial Sequence
  LRRK2 RNA guide
uauguucagggcaaugcuuugu

SEQ ID NO: 69440 - RNA, 22 nt, Artificial Sequence
  LRRK2 RNA guide
ucagggcaaugcuuugugcuaa

SEQ ID NO: 69441 - RNA, 22 nt, Artificial Sequence
  LRRK2 RNA guide
ugcuaauuggcuuuaggccuuu

SEQ ID NO: 69442 - RNA, 22 nt, Artificial Sequence
  LRRK2 RNA guide
ugcuuugugcuaauuggcuuua

SEQ ID NO: 69443 - RNA, 22 nt, Artificial Sequence
  LRRK2 RNA guide
ugguaacaaaggccuaaagcca

SEQ ID NO: 69444 - RNA, 22 nt, Artificial Sequence
  LRRK2 RNA guide
ugugcuaauuggcuuuaggccu

SEQ ID NO: 69445 - RNA, 22 nt, Artificial Sequence
  LRRK2 RNA guide
uguucagggcaaugcuuugugc

SEQ ID NO: 69446 - RNA, 22 nt, Artificial Sequence
  LRRK2 RNA guide
uucagggcaaugcuuugugcua

SEQ ID NO: 69447 - RNA, 22 nt, Artificial Sequence
  LRRK2 RNA guide
uugguaacaaaggccuaaagcc

SEQ ID NO: 69448 - RNA, 22 nt, Artificial Sequence
  LRRK2 RNA guide
uugugcuaauuggcuuuaggcc

SEQ ID NO: 69449 - RNA, 22 nt, Artificial Sequence
  LRRK2 RNA guide
uuugguaacaaaggccuaaagc

SEQ ID NO: 69450 - RNA, 22 nt, Artificial Sequence
  LRRK2 RNA guide
uuugugcuaauuggcuuuaggc

SEQ ID NO: 69451 - RNA, 20 nt, Artificial Sequence
  LRRK2 RNA guide
aaagccaacuagcacaaagc

SEQ ID NO: 69452 - RNA, 20 nt, Artificial Sequence
  LRRK2 RNA guide
aaaggccuaaagccaacuag

SEQ ID NO: 69453 - RNA, 20 nt, Artificial Sequence
  LRRK2 RNA guide
aacaaaggccuaaagccaac

SEQ ID NO: 69454 - RNA, 20 nt, Artificial Sequence
  LRRK2 RNA guide
aacuagcacaaagcauugcc

SEQ ID NO: 69455 - RNA, 20 nt, Artificial Sequence
  LRRK2 RNA guide
aagccaacuagcacaaagca

SEQ ID NO: 69456 - RNA, 20 nt, Artificial Sequence
  LRRK2 RNA guide
aaggccuaaagccaacuagc

SEQ ID NO: 69457 - RNA, 20 nt, Artificial Sequence
  LRRK2 RNA guide
aaugcuuugugcuaguuggc

SEQ ID NO: 69458 - RNA, 20 nt, Artificial Sequence
  LRRK2 RNA guide
acaaaggccuaaagccaacu

SEQ ID NO: 69459 - RNA, 20 nt, Artificial Sequence
  LRRK2 RNA guide
acuagcacaaagcauugccc

SEQ ID NO: 69460 - RNA, 20 nt, Artificial Sequence
  LRRK2 RNA guide
agccaacuagcacaaagcau

SEQ ID NO: 69461 - RNA, 20 nt, Artificial Sequence
  LRRK2 RNA guide
aggccuaaagccaacuagca

SEQ ID NO: 69462 - RNA, 20 nt, Artificial Sequence
  LRRK2 RNA guide
agggcaaugcuuugugcuag

SEQ ID NO: 69463 - RNA, 20 nt, Artificial Sequence
  LRRK2 RNA guide
aguuggcuuuaggccuuugu

SEQ ID NO: 69464 - RNA, 20 nt, Artificial Sequence
  LRRK2 RNA guide
augcuuugugcuaguuggcu

SEQ ID NO: 69465 - RNA, 20 nt, Artificial Sequence
  LRRK2 RNA guide
caaaggccuaaagccaacua

SEQ ID NO: 69466 - RNA, 20 nt, Artificial Sequence
  LRRK2 RNA guide
caacuagcacaaagcauugc

SEQ ID NO: 69467 - RNA, 20 nt, Artificial Sequence
  LRRK2 RNA guide
caaugcuuugugcuaguugg

SEQ ID NO: 69468 - RNA, 20 nt, Artificial Sequence
  LRRK2 RNA guide
ccaacuagcacaaagcauug

SEQ ID NO: 69469 - RNA, 20 nt, Artificial Sequence
  LRRK2 RNA guide
ccuaaagccaacuagcacaa

SEQ ID NO: 69470 - RNA, 20 nt, Artificial Sequence
  LRRK2 RNA guide
cuaaagccaacuagcacaaa

SEQ ID NO: 69471 - RNA, 20 nt, Artificial Sequence
  LRRK2 RNA guide
cuaguuggcuuuaggccuuu

SEQ ID NO: 69472 - RNA, 20 nt, Artificial Sequence
  LRRK2 RNA guide
cuuugugcuaguuggcuuua

SEQ ID NO: 69473 - RNA, 20 nt, Artificial Sequence
  LRRK2 RNA guide
gcaaugcuuugugcuaguug

SEQ ID NO: 69474 - RNA, 20 nt, Artificial Sequence
  LRRK2 RNA guide
gccaacuagcacaaagcauu

SEQ ID NO: 69475 - RNA, 20 nt, Artificial Sequence
  LRRK2 RNA guide
gccuaaagccaacuagcaca

SEQ ID NO: 69476 - RNA, 20 nt, Artificial Sequence
  LRRK2 RNA guide
gcuaguuggcuuuaggccuu

SEQ ID NO: 69477 - RNA, 20 nt, Artificial Sequence
  LRRK2 RNA guide
gcuuugugcuaguuggcuuu

SEQ ID NO: 69478 - RNA, 20 nt, Artificial Sequence
  LRRK2 RNA guide
ggcaaugcuuugugcuaguu

SEQ ID NO: 69479 - RNA, 20 nt, Artificial Sequence
  LRRK2 RNA guide
ggccuaaagccaacuagcac

SEQ ID NO: 69480 - RNA, 20 nt, Artificial Sequence
  LRRK2 RNA guide
gggcaaugcuuugugcuagu

SEQ ID NO: 69481 - RNA, 20 nt, Artificial Sequence
  LRRK2 RNA guide
gugcuaguuggcuuuaggcc

SEQ ID NO: 69482 - RNA, 20 nt, Artificial Sequence
  LRRK2 RNA guide
uaaagccaacuagcacaaag

SEQ ID NO: 69483 - RNA, 20 nt, Artificial Sequence
  LRRK2 RNA guide
uaguuggcuuuaggccuuug

SEQ ID NO: 69484 - RNA, 20 nt, Artificial Sequence
  LRRK2 RNA guide
ugcuaguuggcuuuaggccu

SEQ ID NO: 69485 - RNA, 20 nt, Artificial Sequence
  LRRK2 RNA guide
ugcuuugugcuaguuggcuu

SEQ ID NO: 69486 - RNA, 20 nt, Artificial Sequence
  LRRK2 RNA guide
ugugcuaguuggcuuuaggc

SEQ ID NO: 69487 - RNA, 20 nt, Artificial Sequence
  LRRK2 RNA guide
uugugcuaguuggcuuuagg

SEQ ID NO: 69488 - RNA, 20 nt, Artificial Sequence
  LRRK2 RNA guide
uuugugcuaguuggcuuuag

SEQ ID NO: 69489 - RNA, 21 nt, Artificial Sequence
  LRRK2 RNA guide
aaagccaacuagcacaaagca

SEQ ID NO: 69490 - RNA, 21 nt, Artificial Sequence
  LRRK2 RNA guide
aaaggccuaaagccaacuagc

SEQ ID NO: 69491 - RNA, 21 nt, Artificial Sequence
  LRRK2 RNA guide
aacaaaggccuaaagccaacu

SEQ ID NO: 69492 - RNA, 21 nt, Artificial Sequence
  LRRK2 RNA guide
aacuagcacaaagcauugccc

SEQ ID NO: 69493 - RNA, 21 nt, Artificial Sequence
  LRRK2 RNA guide
aagccaacuagcacaaagcau

SEQ ID NO: 69494 - RNA, 21 nt, Artificial Sequence
  LRRK2 RNA guide
aaggccuaaagccaacuagca

SEQ ID NO: 69495 - RNA, 21 nt, Artificial Sequence
  LRRK2 RNA guide
aaugcuuugugcuaguuggcu

SEQ ID NO: 69496 - RNA, 21 nt, Artificial Sequence
  LRRK2 RNA guide
acaaaggccuaaagccaacua

SEQ ID NO: 69497 - RNA, 21 nt, Artificial Sequence
  LRRK2 RNA guide
acuagcacaaagcauugcccu

SEQ ID NO: 69498 - RNA, 21 nt, Artificial Sequence
  LRRK2 RNA guide
agccaacuagcacaaagcauu

SEQ ID NO: 69499 - RNA, 21 nt, Artificial Sequence
  LRRK2 RNA guide
aggccuaaagccaacuagcac

SEQ ID NO: 69500 - RNA, 21 nt, Artificial Sequence
  LRRK2 RNA guide
agggcaaugcuuugugcuagu

SEQ ID NO: 69501 - RNA, 21 nt, Artificial Sequence
  LRRK2 RNA guide
aguuggcuuuaggccuuuguu

SEQ ID NO: 69502 - RNA, 21 nt, Artificial Sequence
  LRRK2 RNA guide
augcuuugugcuaguuggcuu

SEQ ID NO: 69503 - RNA, 21 nt, Artificial Sequence
  LRRK2 RNA guide
caaaggccuaaagccaacuag

SEQ ID NO: 69504 - RNA, 21 nt, Artificial Sequence
  LRRK2 RNA guide
caacuagcacaaagcauugcc

SEQ ID NO: 69505 - RNA, 21 nt, Artificial Sequence
  LRRK2 RNA guide
caaugcuuugugcuaguuggc

SEQ ID NO: 69506 - RNA, 21 nt, Artificial Sequence
  LRRK2 RNA guide
cagggcaaugcuuugugcuag

SEQ ID NO: 69507 - RNA, 21 nt, Artificial Sequence
  LRRK2 RNA guide
ccaacuagcacaaagcauugc

SEQ ID NO: 69508 - RNA, 21 nt, Artificial Sequence
  LRRK2 RNA guide
ccuaaagccaacuagcacaaa

SEQ ID NO: 69509 - RNA, 21 nt, Artificial Sequence
  LRRK2 RNA guide
cuaaagccaacuagcacaaag

SEQ ID NO: 69510 - RNA, 21 nt, Artificial Sequence
  LRRK2 RNA guide
cuaguuggcuuuaggccuuug

SEQ ID NO: 69511 - RNA, 21 nt, Artificial Sequence
  LRRK2 RNA guide
cuuugugcuaguuggcuuuag

SEQ ID NO: 69512 - RNA, 21 nt, Artificial Sequence
  LRRK2 RNA guide
gcaaugcuuugugcuaguugg

SEQ ID NO: 69513 - RNA, 21 nt, Artificial Sequence
  LRRK2 RNA guide
gccaacuagcacaaagcauug

SEQ ID NO: 69514 - RNA, 21 nt, Artificial Sequence
  LRRK2 RNA guide
gccuaaagccaacuagcacaa

SEQ ID NO: 69515 - RNA, 21 nt, Artificial Sequence
  LRRK2 RNA guide
gcuaguuggcuuuaggccuuu

SEQ ID NO: 69516 - RNA, 21 nt, Artificial Sequence
  LRRK2 RNA guide
gcuuugugcuaguuggcuuua

SEQ ID NO: 69517 - RNA, 21 nt, Artificial Sequence
  LRRK2 RNA guide
ggcaaugcuuugugcuaguug

SEQ ID NO: 69518 - RNA, 21 nt, Artificial Sequence
  LRRK2 RNA guide
ggccuaaagccaacuagcaca

SEQ ID NO: 69519 - RNA, 21 nt, Artificial Sequence
  LRRK2 RNA guide
gggcaaugcuuugugcuaguu

SEQ ID NO: 69520 - RNA, 21 nt, Artificial Sequence
  LRRK2 RNA guide
gugcuaguuggcuuuaggccu

SEQ ID NO: 69521 - RNA, 21 nt, Artificial Sequence
  LRRK2 RNA guide
uaaagccaacuagcacaaagc

SEQ ID NO: 69522 - RNA, 21 nt, Artificial Sequence
  LRRK2 RNA guide
uaacaaaggccuaaagccaac

SEQ ID NO: 69523 - RNA, 21 nt, Artificial Sequence
  LRRK2 RNA guide
uaguuggcuuuaggccuuugu

SEQ ID NO: 69524 - RNA, 21 nt, Artificial Sequence
  LRRK2 RNA guide
ugcuaguuggcuuuaggccuu

SEQ ID NO: 69525 - RNA, 21 nt, Artificial Sequence
  LRRK2 RNA guide
ugcuuugugcuaguuggcuuu

SEQ ID NO: 69526 - RNA, 21 nt, Artificial Sequence
  LRRK2 RNA guide
ugugcuaguuggcuuuaggcc

SEQ ID NO: 69527 - RNA, 21 nt, Artificial Sequence
  LRRK2 RNA guide
uugugcuaguuggcuuuaggc

SEQ ID NO: 69528 - RNA, 21 nt, Artificial Sequence
  LRRK2 RNA guide
uuugugcuaguuggcuuuagg

SEQ ID NO: 69529 - RNA, 22 nt, Artificial Sequence
  LRRK2 RNA guide
aaagccaacuagcacaaagcau

SEQ ID NO: 69530 - RNA, 22 nt, Artificial Sequence
  LRRK2 RNA guide
aaaggccuaaagccaacuagca

SEQ ID NO: 69531 - RNA, 22 nt, Artificial Sequence
  LRRK2 RNA guide
aacaaaggccuaaagccaacua

SEQ ID NO: 69532 - RNA, 22 nt, Artificial Sequence
  LRRK2 RNA guide
aacuagcacaaagcauugcccu

SEQ ID NO: 69533 - RNA, 22 nt, Artificial Sequence
  LRRK2 RNA guide
aagccaacuagcacaaagcauu

SEQ ID NO: 69534 - RNA, 22 nt, Artificial Sequence
  LRRK2 RNA guide
aaggccuaaagccaacuagcac

SEQ ID NO: 69535 - RNA, 22 nt, Artificial Sequence
  LRRK2 RNA guide
aaugcuuugugcuaguuggcuu

SEQ ID NO: 69536 - RNA, 22 nt, Artificial Sequence
  LRRK2 RNA guide
acaaaggccuaaagccaacuag

SEQ ID NO: 69537 - RNA, 22 nt, Artificial Sequence
  LRRK2 RNA guide
acuagcacaaagcauugcccug

SEQ ID NO: 69538 - RNA, 22 nt, Artificial Sequence
  LRRK2 RNA guide
agccaacuagcacaaagcauug

SEQ ID NO: 69539 - RNA, 22 nt, Artificial Sequence
  LRRK2 RNA guide
aggccuaaagccaacuagcaca

SEQ ID NO: 69540 - RNA, 22 nt, Artificial Sequence
  LRRK2 RNA guide
agggcaaugcuuugugcuaguu

SEQ ID NO: 69541 - RNA, 22 nt, Artificial Sequence
  LRRK2 RNA guide
aguuggcuuuaggccuuuguua

SEQ ID NO: 69542 - RNA, 22 nt, Artificial Sequence
  LRRK2 RNA guide
augcuuugugcuaguuggcuuu

SEQ ID NO: 69543 - RNA, 22 nt, Artificial Sequence
  LRRK2 RNA guide
caaaggccuaaagccaacuagc

SEQ ID NO: 69544 - RNA, 22 nt, Artificial Sequence
  LRRK2 RNA guide
caacuagcacaaagcauugccc

SEQ ID NO: 69545 - RNA, 22 nt, Artificial Sequence
  LRRK2 RNA guide
caaugcuuugugcuaguuggcu

SEQ ID NO: 69546 - RNA, 22 nt, Artificial Sequence
  LRRK2 RNA guide
cagggcaaugcuuugugcuagu

SEQ ID NO: 69547 - RNA, 22 nt, Artificial Sequence
  LRRK2 RNA guide
ccaacuagcacaaagcauugcc

SEQ ID NO: 69548 - RNA, 22 nt, Artificial Sequence
  LRRK2 RNA guide
ccuaaagccaacuagcacaaag

SEQ ID NO: 69549 - RNA, 22 nt, Artificial Sequence
  LRRK2 RNA guide
cuaaagccaacuagcacaaagc

SEQ ID NO: 69550 - RNA, 22 nt, Artificial Sequence
  LRRK2 RNA guide
cuaguuggcuuuaggccuuugu

SEQ ID NO: 69551 - RNA, 22 nt, Artificial Sequence
  LRRK2 RNA guide
cuuugugcuaguuggcuuuagg

SEQ ID NO: 69552 - RNA, 22 nt, Artificial Sequence
  LRRK2 RNA guide
gcaaugcuuugugcuaguuggc

SEQ ID NO: 69553 - RNA, 22 nt, Artificial Sequence
  LRRK2 RNA guide
gccaacuagcacaaagcauugc

SEQ ID NO: 69554 - RNA, 22 nt, Artificial Sequence
  LRRK2 RNA guide
gccuaaagccaacuagcacaaa

SEQ ID NO: 69555 - RNA, 22 nt, Artificial Sequence
  LRRK2 RNA guide
gcuaguuggcuuuaggccuuug

SEQ ID NO: 69556 - RNA, 22 nt, Artificial Sequence
  LRRK2 RNA guide
gcuuugugcuaguuggcuuuag

SEQ ID NO: 69557 - RNA, 22 nt, Artificial Sequence
  LRRK2 RNA guide
ggcaaugcuuugugcuaguugg

SEQ ID NO: 69558 - RNA, 22 nt, Artificial Sequence
  LRRK2 RNA guide
ggccuaaagccaacuagcacaa

SEQ ID NO: 69559 - RNA, 22 nt, Artificial Sequence
  LRRK2 RNA guide
gggcaaugcuuugugcuaguug

SEQ ID NO: 69560 - RNA, 22 nt, Artificial Sequence
  LRRK2 RNA guide
guaacaaaggccuaaagccaac

SEQ ID NO: 69561 - RNA, 22 nt, Artificial Sequence
  LRRK2 RNA guide
gugcuaguuggcuuuaggccuu

SEQ ID NO: 69562 - RNA, 22 nt, Artificial Sequence
  LRRK2 RNA guide
uaaagccaacuagcacaaagca

SEQ ID NO: 69563 - RNA, 22 nt, Artificial Sequence
  LRRK2 RNA guide
uaacaaaggccuaaagccaacu

SEQ ID NO: 69564 - RNA, 22 nt, Artificial Sequence
  LRRK2 RNA guide
uaguuggcuuuaggccuuuguu

SEQ ID NO: 69565 - RNA, 22 nt, Artificial Sequence
  LRRK2 RNA guide
ucagggcaaugcuuugugcuag

SEQ ID NO: 69566 - RNA, 22 nt, Artificial Sequence
  LRRK2 RNA guide
ugcuaguuggcuuuaggccuuu

SEQ ID NO: 69567 - RNA, 22 nt, Artificial Sequence
  LRRK2 RNA guide
ugcuuugugcuaguuggcuuua

SEQ ID NO: 69568 - RNA, 22 nt, Artificial Sequence
  LRRK2 RNA guide
ugugcuaguuggcuuuaggccu

SEQ ID NO: 69569 - RNA, 22 nt, Artificial Sequence
  LRRK2 RNA guide
uugugcuaguuggcuuuaggcc

SEQ ID NO: 69570 - RNA, 22 nt, Artificial Sequence
  LRRK2 RNA guide
uuugugcuaguuggcuuuaggc

SEQ ID NO: 69571 - RNA, 20 nt, Artificial Sequence
  LRRK2 RNA guide
cucuuuuaauguguagguaa

SEQ ID NO: 69572 - RNA, 20 nt, Artificial Sequence
  LRRK2 RNA guide
ucucuuuuaauguguaggua

SEQ ID NO: 69573 - RNA, 20 nt, Artificial Sequence
  LRRK2 RNA guide
aauguacuaauuuccaccau

SEQ ID NO: 69574 - RNA, 20 nt, Artificial Sequence
  LRRK2 RNA guide
aauuuccaccauagcucccc

SEQ ID NO: 69575 - RNA, 20 nt, Artificial Sequence
  LRRK2 RNA guide
acuaauuuccaccauagcuc

SEQ ID NO: 69576 - RNA, 20 nt, Artificial Sequence
  LRRK2 RNA guide
agcuaugguggaaauuagua

SEQ ID NO: 69577 - RNA, 20 nt, Artificial Sequence
  LRRK2 RNA guide
augguggaaauuaguacauu

SEQ ID NO: 69578 - RNA, 20 nt, Artificial Sequence
  LRRK2 RNA guide
auguacuaauuuccaccaua

SEQ ID NO: 69579 - RNA, 20 nt, Artificial Sequence
  LRRK2 RNA guide
auguguuuggggagcuaugg

SEQ ID NO: 69580 - RNA, 20 nt, Artificial Sequence
  LRRK2 RNA guide
auuuccaccauagcucccca

SEQ ID NO: 69581 - RNA, 20 nt, Artificial Sequence
  LRRK2 RNA guide
cuaauuuccaccauagcucc

SEQ ID NO: 69582 - RNA, 20 nt, Artificial Sequence
  LRRK2 RNA guide
cuaugguggaaauuaguaca

SEQ ID NO: 69583 - RNA, 20 nt, Artificial Sequence
  LRRK2 RNA guide
gagcuaugguggaaauuagu

SEQ ID NO: 69584 - RNA, 20 nt, Artificial Sequence
  LRRK2 RNA guide
gcuaugguggaaauuaguac

SEQ ID NO: 69585 - RNA, 20 nt, Artificial Sequence
  LRRK2 RNA guide
ggagcuaugguggaaauuag

SEQ ID NO: 69586 - RNA, 20 nt, Artificial Sequence
  LRRK2 RNA guide
gggagcuaugguggaaauua

SEQ ID NO: 69587 - RNA, 20 nt, Artificial Sequence
  LRRK2 RNA guide
ggggagcuaugguggaaauu

SEQ ID NO: 69588 - RNA, 20 nt, Artificial Sequence
  LRRK2 RNA guide
gguggaaauuaguacauuaa

SEQ ID NO: 69589 - RNA, 20 nt, Artificial Sequence
  LRRK2 RNA guide
guacuaauuuccaccauagc

SEQ ID NO: 69590 - RNA, 20 nt, Artificial Sequence
  LRRK2 RNA guide
guguuuggggagcuauggug

SEQ ID NO: 69591 - RNA, 20 nt, Artificial Sequence
  LRRK2 RNA guide
guuuggggagcuauggugga

SEQ ID NO: 69592 - RNA, 20 nt, Artificial Sequence
  LRRK2 RNA guide
uaauguacuaauuuccacca

SEQ ID NO: 69593 - RNA, 20 nt, Artificial Sequence
  LRRK2 RNA guide
uaauuuccaccauagcuccc

SEQ ID NO: 69594 - RNA, 20 nt, Artificial Sequence
  LRRK2 RNA guide
uacuaauuuccaccauagcu

SEQ ID NO: 69595 - RNA, 20 nt, Artificial Sequence
  LRRK2 RNA guide
uaugguggaaauuaguacau

SEQ ID NO: 69596 - RNA, 20 nt, Artificial Sequence
  LRRK2 RNA guide
uggggagcuaugguggaaau

SEQ ID NO: 69597 - RNA, 20 nt, Artificial Sequence
  LRRK2 RNA guide
ugguggaaauuaguacauua

SEQ ID NO: 69598 - RNA, 20 nt, Artificial Sequence
  LRRK2 RNA guide
uguacuaauuuccaccauag

SEQ ID NO: 69599 - RNA, 20 nt, Artificial Sequence
  LRRK2 RNA guide
uguguuuggggagcuauggu

SEQ ID NO: 69600 - RNA, 20 nt, Artificial Sequence
  LRRK2 RNA guide
uguuuggggagcuauggugg

SEQ ID NO: 69601 - RNA, 20 nt, Artificial Sequence
  LRRK2 RNA guide
uuaauguacuaauuuccacc

SEQ ID NO: 69602 - RNA, 20 nt, Artificial Sequence
  LRRK2 RNA guide
uuggggagcuaugguggaaa

SEQ ID NO: 69603 - RNA, 20 nt, Artificial Sequence
  LRRK2 RNA guide
uuuccaccauagcuccccaa

SEQ ID NO: 69604 - RNA, 20 nt, Artificial Sequence
  LRRK2 RNA guide
uuuggggagcuaugguggaa

SEQ ID NO: 69605 - RNA, 21 nt, Artificial Sequence
  LRRK2 RNA guide
aauuuccaccauagcucccca

SEQ ID NO: 69606 - RNA, 21 nt, Artificial Sequence
  LRRK2 RNA guide
acuaauuuccaccauagcucc

SEQ ID NO: 69607 - RNA, 21 nt, Artificial Sequence
  LRRK2 RNA guide
agcuaugguggaaauuaguac

SEQ ID NO: 69608 - RNA, 21 nt, Artificial Sequence
  LRRK2 RNA guide
auguacuaauuuccaccauag

SEQ ID NO: 69609 - RNA, 21 nt, Artificial Sequence
  LRRK2 RNA guide
auguguuuggggagcuauggu

SEQ ID NO: 69610 - RNA, 21 nt, Artificial Sequence
  LRRK2 RNA guide
auuuccaccauagcuccccaa

SEQ ID NO: 69611 - RNA, 21 nt, Artificial Sequence
  LRRK2 RNA guide
cauguguuuggggagcuaugg

SEQ ID NO: 69612 - RNA, 21 nt, Artificial Sequence
  LRRK2 RNA guide
cuaauuuccaccauagcuccc

SEQ ID NO: 69613 - RNA, 21 nt, Artificial Sequence
  LRRK2 RNA guide
cuaugguggaaauuaguacau

SEQ ID NO: 69614 - RNA, 21 nt, Artificial Sequence
  LRRK2 RNA guide
gagcuaugguggaaauuagua

SEQ ID NO: 69615 - RNA, 21 nt, Artificial Sequence
  LRRK2 RNA guide
gcuaugguggaaauuaguaca

SEQ ID NO: 69616 - RNA, 21 nt, Artificial Sequence
  LRRK2 RNA guide
ggagcuaugguggaaauuagu

SEQ ID NO: 69617 - RNA, 21 nt, Artificial Sequence
  LRRK2 RNA guide
gggagcuaugguggaaauuag

SEQ ID NO: 69618 - RNA, 21 nt, Artificial Sequence
  LRRK2 RNA guide
ggggagcuaugguggaaauua

SEQ ID NO: 69619 - RNA, 21 nt, Artificial Sequence
  LRRK2 RNA guide
guacuaauuuccaccauagcu

SEQ ID NO: 69620 - RNA, 21 nt, Artificial Sequence
  LRRK2 RNA guide
guguuuggggagcuauggugg

SEQ ID NO: 69621 - RNA, 21 nt, Artificial Sequence
  LRRK2 RNA guide
guuuggggagcuaugguggaa

SEQ ID NO: 69622 - RNA, 21 nt, Artificial Sequence
  LRRK2 RNA guide
uaauuuccaccauagcucccc

SEQ ID NO: 69623 - RNA, 21 nt, Artificial Sequence
  LRRK2 RNA guide
uacuaauuuccaccauagcuc

SEQ ID NO: 69624 - RNA, 21 nt, Artificial Sequence
  LRRK2 RNA guide
uggggagcuaugguggaaauu

SEQ ID NO: 69625 - RNA, 21 nt, Artificial Sequence
  LRRK2 RNA guide
uguacuaauuuccaccauagc

SEQ ID NO: 69626 - RNA, 21 nt, Artificial Sequence
  LRRK2 RNA guide
uguguuuggggagcuauggug

SEQ ID NO: 69627 - RNA, 21 nt, Artificial Sequence
  LRRK2 RNA guide
uguuuggggagcuauggugga

SEQ ID NO: 69628 - RNA, 21 nt, Artificial Sequence
  LRRK2 RNA guide
uuggggagcuaugguggaaau

SEQ ID NO: 69629 - RNA, 21 nt, Artificial Sequence
  LRRK2 RNA guide
uuuccaccauagcuccccaaa

SEQ ID NO: 69630 - RNA, 21 nt, Artificial Sequence
  LRRK2 RNA guide
uuuggggagcuaugguggaaa

SEQ ID NO: 69631 - RNA, 22 nt, Artificial Sequence
  LRRK2 RNA guide
aauguacuaauuuccaccauag

SEQ ID NO: 69632 - RNA, 22 nt, Artificial Sequence
  LRRK2 RNA guide
aauuuccaccauagcuccccaa

SEQ ID NO: 69633 - RNA, 22 nt, Artificial Sequence
  LRRK2 RNA guide
acuaauuuccaccauagcuccc

SEQ ID NO: 69634 - RNA, 22 nt, Artificial Sequence
  LRRK2 RNA guide
agcuaugguggaaauuaguaca

SEQ ID NO: 69635 - RNA, 22 nt, Artificial Sequence
  LRRK2 RNA guide
auguacuaauuuccaccauagc

SEQ ID NO: 69636 - RNA, 22 nt, Artificial Sequence
  LRRK2 RNA guide
auguguuuggggagcuauggug

SEQ ID NO: 69637 - RNA, 22 nt, Artificial Sequence
  LRRK2 RNA guide
auuuccaccauagcuccccaaa

SEQ ID NO: 69638 - RNA, 22 nt, Artificial Sequence
  LRRK2 RNA guide
cauguguuuggggagcuauggu

SEQ ID NO: 69639 - RNA, 22 nt, Artificial Sequence
  LRRK2 RNA guide
ccauguguuuggggagcuaugg

SEQ ID NO: 69640 - RNA, 22 nt, Artificial Sequence
  LRRK2 RNA guide
cuaauuuccaccauagcucccc

SEQ ID NO: 69641 - RNA, 22 nt, Artificial Sequence
  LRRK2 RNA guide
cuaugguggaaauuaguacauu

SEQ ID NO: 69642 - RNA, 22 nt, Artificial Sequence
  LRRK2 RNA guide
gagcuaugguggaaauuaguac

SEQ ID NO: 69643 - RNA, 22 nt, Artificial Sequence
  LRRK2 RNA guide
gcuaugguggaaauuaguacau

SEQ ID NO: 69644 - RNA, 22 nt, Artificial Sequence
  LRRK2 RNA guide
ggagcuaugguggaaauuagua

SEQ ID NO: 69645 - RNA, 22 nt, Artificial Sequence
  LRRK2 RNA guide
gggagcuaugguggaaauuagu

SEQ ID NO: 69646 - RNA, 22 nt, Artificial Sequence
  LRRK2 RNA guide
ggggagcuaugguggaaauuag

SEQ ID NO: 69647 - RNA, 22 nt, Artificial Sequence
  LRRK2 RNA guide
guacuaauuuccaccauagcuc

SEQ ID NO: 69648 - RNA, 22 nt, Artificial Sequence
  LRRK2 RNA guide
guguuuggggagcuauggugga

SEQ ID NO: 69649 - RNA, 22 nt, Artificial Sequence
  LRRK2 RNA guide
guuuggggagcuaugguggaaa

SEQ ID NO: 69650 - RNA, 22 nt, Artificial Sequence
  LRRK2 RNA guide
uaauuuccaccauagcucccca

SEQ ID NO: 69651 - RNA, 22 nt, Artificial Sequence
  LRRK2 RNA guide
uacuaauuuccaccauagcucc

SEQ ID NO: 69652 - RNA, 22 nt, Artificial Sequence
  LRRK2 RNA guide
uggggagcuaugguggaaauua

SEQ ID NO: 69653 - RNA, 22 nt, Artificial Sequence
  LRRK2 RNA guide
uguacuaauuuccaccauagcu

SEQ ID NO: 69654 - RNA, 22 nt, Artificial Sequence
  LRRK2 RNA guide
uguguuuggggagcuauggugg

SEQ ID NO: 69655 - RNA, 22 nt, Artificial Sequence
  LRRK2 RNA guide
uguuuggggagcuaugguggaa

SEQ ID NO: 69656 - RNA, 22 nt, Artificial Sequence
  LRRK2 RNA guide
uuggggagcuaugguggaaauu

SEQ ID NO: 69657 - RNA, 22 nt, Artificial Sequence
  LRRK2 RNA guide
uuuccaccauagcuccccaaac

SEQ ID NO: 69658 - RNA, 22 nt, Artificial Sequence
  LRRK2 RNA guide
uuuggggagcuaugguggaaau

SEQ ID NO: 69659 - RNA, 20 nt, Artificial Sequence
  LRRK2 RNA guide
aauauccaccauagcucccc

SEQ ID NO: 69660 - RNA, 20 nt, Artificial Sequence
  LRRK2 RNA guide
aauguacuaauauccaccau

SEQ ID NO: 69661 - RNA, 20 nt, Artificial Sequence
  LRRK2 RNA guide
acuaauauccaccauagcuc

SEQ ID NO: 69662 - RNA, 20 nt, Artificial Sequence
  LRRK2 RNA guide
agcuaugguggauauuagua

SEQ ID NO: 69663 - RNA, 20 nt, Artificial Sequence
  LRRK2 RNA guide
auauccaccauagcucccca

SEQ ID NO: 69664 - RNA, 20 nt, Artificial Sequence
  LRRK2 RNA guide
augguggauauuaguacauu

SEQ ID NO: 69665 - RNA, 20 nt, Artificial Sequence
  LRRK2 RNA guide
auguacuaauauccaccaua

SEQ ID NO: 69666 - RNA, 20 nt, Artificial Sequence
  LRRK2 RNA guide
cuaauauccaccauagcucc

SEQ ID NO: 69667 - RNA, 20 nt, Artificial Sequence
  LRRK2 RNA guide
cuaugguggauauuaguaca

SEQ ID NO: 69668 - RNA, 20 nt, Artificial Sequence
  LRRK2 RNA guide
gagcuaugguggauauuagu

SEQ ID NO: 69669 - RNA, 20 nt, Artificial Sequence
  LRRK2 RNA guide
gcuaugguggauauuaguac

SEQ ID NO: 69670 - RNA, 20 nt, Artificial Sequence
  LRRK2 RNA guide
ggagcuaugguggauauuag

SEQ ID NO: 69671 - RNA, 20 nt, Artificial Sequence
  LRRK2 RNA guide
gggagcuaugguggauauua

SEQ ID NO: 69672 - RNA, 20 nt, Artificial Sequence
  LRRK2 RNA guide
ggggagcuaugguggauauu

SEQ ID NO: 69673 - RNA, 20 nt, Artificial Sequence
  LRRK2 RNA guide
gguggauauuaguacauuaa

SEQ ID NO: 69674 - RNA, 20 nt, Artificial Sequence
  LRRK2 RNA guide
guacuaauauccaccauagc

SEQ ID NO: 69675 - RNA, 20 nt, Artificial Sequence
  LRRK2 RNA guide
uaauauccaccauagcuccc

SEQ ID NO: 69676 - RNA, 20 nt, Artificial Sequence
  LRRK2 RNA guide
uaauguacuaauauccacca

SEQ ID NO: 69677 - RNA, 20 nt, Artificial Sequence
  LRRK2 RNA guide
uacuaauauccaccauagcu

SEQ ID NO: 69678 - RNA, 20 nt, Artificial Sequence
  LRRK2 RNA guide
uauccaccauagcuccccaa

SEQ ID NO: 69679 - RNA, 20 nt, Artificial Sequence
  LRRK2 RNA guide
uaugguggauauuaguacau

SEQ ID NO: 69680 - RNA, 20 nt, Artificial Sequence
  LRRK2 RNA guide
uggggagcuaugguggauau

SEQ ID NO: 69681 - RNA, 20 nt, Artificial Sequence
  LRRK2 RNA guide
ugguggauauuaguacauua

SEQ ID NO: 69682 - RNA, 20 nt, Artificial Sequence
  LRRK2 RNA guide
uguacuaauauccaccauag

SEQ ID NO: 69683 - RNA, 20 nt, Artificial Sequence
  LRRK2 RNA guide
uuaauguacuaauauccacc

SEQ ID NO: 69684 - RNA, 20 nt, Artificial Sequence
  LRRK2 RNA guide
uuggggagcuaugguggaua

SEQ ID NO: 69685 - RNA, 20 nt, Artificial Sequence
  LRRK2 RNA guide
uuuggggagcuaugguggau

SEQ ID NO: 69686 - RNA, 21 nt, Artificial Sequence
  LRRK2 RNA guide
aauauccaccauagcucccca

SEQ ID NO: 69687 - RNA, 21 nt, Artificial Sequence
  LRRK2 RNA guide
acuaauauccaccauagcucc

SEQ ID NO: 69688 - RNA, 21 nt, Artificial Sequence
  LRRK2 RNA guide
agcuaugguggauauuaguac

SEQ ID NO: 69689 - RNA, 21 nt, Artificial Sequence
  LRRK2 RNA guide
auauccaccauagcuccccaa

SEQ ID NO: 69690 - RNA, 21 nt, Artificial Sequence
  LRRK2 RNA guide
auguacuaauauccaccauag

SEQ ID NO: 69691 - RNA, 21 nt, Artificial Sequence
  LRRK2 RNA guide
cuaauauccaccauagcuccc

SEQ ID NO: 69692 - RNA, 21 nt, Artificial Sequence
  LRRK2 RNA guide
cuaugguggauauuaguacau

SEQ ID NO: 69693 - RNA, 21 nt, Artificial Sequence
  LRRK2 RNA guide
gagcuaugguggauauuagua

SEQ ID NO: 69694 - RNA, 21 nt, Artificial Sequence
  LRRK2 RNA guide
gcuaugguggauauuaguaca

SEQ ID NO: 69695 - RNA, 21 nt, Artificial Sequence
  LRRK2 RNA guide
ggagcuaugguggauauuagu

SEQ ID NO: 69696 - RNA, 21 nt, Artificial Sequence
  LRRK2 RNA guide
gggagcuaugguggauauuag

SEQ ID NO: 69697 - RNA, 21 nt, Artificial Sequence
  LRRK2 RNA guide
ggggagcuaugguggauauua

SEQ ID NO: 69698 - RNA, 21 nt, Artificial Sequence
  LRRK2 RNA guide
guacuaauauccaccauagcu

SEQ ID NO: 69699 - RNA, 21 nt, Artificial Sequence
  LRRK2 RNA guide
guuuggggagcuaugguggau

SEQ ID NO: 69700 - RNA, 21 nt, Artificial Sequence
  LRRK2 RNA guide
uaauauccaccauagcucccc

SEQ ID NO: 69701 - RNA, 21 nt, Artificial Sequence
  LRRK2 RNA guide
uacuaauauccaccauagcuc

SEQ ID NO: 69702 - RNA, 21 nt, Artificial Sequence
  LRRK2 RNA guide
uauccaccauagcuccccaaa

SEQ ID NO: 69703 - RNA, 21 nt, Artificial Sequence
  LRRK2 RNA guide
uggggagcuaugguggauauu

SEQ ID NO: 69704 - RNA, 21 nt, Artificial Sequence
  LRRK2 RNA guide
uguacuaauauccaccauagc

SEQ ID NO: 69705 - RNA, 21 nt, Artificial Sequence
  LRRK2 RNA guide
uuggggagcuaugguggauau

SEQ ID NO: 69706 - RNA, 21 nt, Artificial Sequence
  LRRK2 RNA guide
uuuggggagcuaugguggaua

SEQ ID NO: 69707 - RNA, 22 nt, Artificial Sequence
  LRRK2 RNA guide
aauauccaccauagcuccccaa

SEQ ID NO: 69708 - RNA, 22 nt, Artificial Sequence
  LRRK2 RNA guide
aauguacuaauauccaccauag

SEQ ID NO: 69709 - RNA, 22 nt, Artificial Sequence
  LRRK2 RNA guide
acuaauauccaccauagcuccc

SEQ ID NO: 69710 - RNA, 22 nt, Artificial Sequence
  LRRK2 RNA guide
agcuaugguggauauuaguaca

SEQ ID NO: 69711 - RNA, 22 nt, Artificial Sequence
  LRRK2 RNA guide
auauccaccauagcuccccaaa

SEQ ID NO: 69712 - RNA, 22 nt, Artificial Sequence
  LRRK2 RNA guide
auguacuaauauccaccauagc

SEQ ID NO: 69713 - RNA, 22 nt, Artificial Sequence
  LRRK2 RNA guide
cuaauauccaccauagcucccc

SEQ ID NO: 69714 - RNA, 22 nt, Artificial Sequence
  LRRK2 RNA guide
cuaugguggauauuaguacauu

SEQ ID NO: 69715 - RNA, 22 nt, Artificial Sequence
  LRRK2 RNA guide
gagcuaugguggauauuaguac

SEQ ID NO: 69716 - RNA, 22 nt, Artificial Sequence
  LRRK2 RNA guide
gcuaugguggauauuaguacau

SEQ ID NO: 69717 - RNA, 22 nt, Artificial Sequence
  LRRK2 RNA guide
ggagcuaugguggauauuagua

SEQ ID NO: 69718 - RNA, 22 nt, Artificial Sequence
  LRRK2 RNA guide
gggagcuaugguggauauuagu

SEQ ID NO: 69719 - RNA, 22 nt, Artificial Sequence
  LRRK2 RNA guide
ggggagcuaugguggauauuag

SEQ ID NO: 69720 - RNA, 22 nt, Artificial Sequence
  LRRK2 RNA guide
guacuaauauccaccauagcuc

SEQ ID NO: 69721 - RNA, 22 nt, Artificial Sequence
  LRRK2 RNA guide
guuuggggagcuaugguggaua

SEQ ID NO: 69722 - RNA, 22 nt, Artificial Sequence
  LRRK2 RNA guide
uaauauccaccauagcucccca

SEQ ID NO: 69723 - RNA, 22 nt, Artificial Sequence
  LRRK2 RNA guide
uacuaauauccaccauagcucc

SEQ ID NO: 69724 - RNA, 22 nt, Artificial Sequence
  LRRK2 RNA guide
uauccaccauagcuccccaaac

SEQ ID NO: 69725 - RNA, 22 nt, Artificial Sequence
  LRRK2 RNA guide
uggggagcuaugguggauauua

SEQ ID NO: 69726 - RNA, 22 nt, Artificial Sequence
  LRRK2 RNA guide
uguacuaauauccaccauagcu

SEQ ID NO: 69727 - RNA, 22 nt, Artificial Sequence
  LRRK2 RNA guide
uguuuggggagcuaugguggau

SEQ ID NO: 69728 - RNA, 22 nt, Artificial Sequence
  LRRK2 RNA guide
uuggggagcuaugguggauauu

SEQ ID NO: 69729 - RNA, 22 nt, Artificial Sequence
  LRRK2 RNA guide
uuuggggagcuaugguggauau

SEQ ID NO: 69730 - RNA, 20 nt, Artificial Sequence
  LRRK2 RNA guide
aaaaaaggggugugcauaau

SEQ ID NO: 69731 - RNA, 20 nt, Artificial Sequence
  LRRK2 RNA guide
aaaaaggggugugcauaaug

SEQ ID NO: 69732 - RNA, 20 nt, Artificial Sequence
  LRRK2 RNA guide
aaaaggggugugcauaaugu

SEQ ID NO: 69733 - RNA, 20 nt, Artificial Sequence
  LRRK2 RNA guide
aaaggggugugcauaaugug

SEQ ID NO: 69734 - RNA, 20 nt, Artificial Sequence
  LRRK2 RNA guide
aagaagcacauuaugcacac

SEQ ID NO: 69735 - RNA, 20 nt, Artificial Sequence
  LRRK2 RNA guide
aagagaagaagcacauuaug

SEQ ID NO: 69736 - RNA, 20 nt, Artificial Sequence
  LRRK2 RNA guide
aagcacauuaugcacacccc

SEQ ID NO: 69737 - RNA, 20 nt, Artificial Sequence
  LRRK2 RNA guide
aaggggugugcauaaugugc

SEQ ID NO: 69738 - RNA, 20 nt, Artificial Sequence
  LRRK2 RNA guide
aaugugcuucuucucuuaaa

SEQ ID NO: 69739 - RNA, 20 nt, Artificial Sequence
  LRRK2 RNA guide
acauuaugcacaccccuuuu

SEQ ID NO: 69740 - RNA, 20 nt, Artificial Sequence
  LRRK2 RNA guide
agaagaagcacauuaugcac

SEQ ID NO: 69741 - RNA, 20 nt, Artificial Sequence
  LRRK2 RNA guide
agaagcacauuaugcacacc

SEQ ID NO: 69742 - RNA, 20 nt, Artificial Sequence
  LRRK2 RNA guide
agagaagaagcacauuaugc

SEQ ID NO: 69743 - RNA, 20 nt, Artificial Sequence
  LRRK2 RNA guide
agcacauuaugcacaccccu

SEQ ID NO: 69744 - RNA, 20 nt, Artificial Sequence
  LRRK2 RNA guide
aggggugugcauaaugugcu

SEQ ID NO: 69745 - RNA, 20 nt, Artificial Sequence
  LRRK2 RNA guide
auaaugugcuucuucucuua

SEQ ID NO: 69746 - RNA, 20 nt, Artificial Sequence
  LRRK2 RNA guide
augugcuucuucucuuaaaa

SEQ ID NO: 69747 - RNA, 20 nt, Artificial Sequence
  LRRK2 RNA guide
cacauuaugcacaccccuuu

SEQ ID NO: 69748 - RNA, 20 nt, Artificial Sequence
  LRRK2 RNA guide
cauaaugugcuucuucucuu

SEQ ID NO: 69749 - RNA, 20 nt, Artificial Sequence
  LRRK2 RNA guide
cauuaugcacaccccuuuuu

SEQ ID NO: 69750 - RNA, 20 nt, Artificial Sequence
  LRRK2 RNA guide
gaagaagcacauuaugcaca

SEQ ID NO: 69751 - RNA, 20 nt, Artificial Sequence
  LRRK2 RNA guide
gaagcacauuaugcacaccc

SEQ ID NO: 69752 - RNA, 20 nt, Artificial Sequence
  LRRK2 RNA guide
gagaagaagcacauuaugca

SEQ ID NO: 69753 - RNA, 20 nt, Artificial Sequence
  LRRK2 RNA guide
gcacauuaugcacaccccuu

SEQ ID NO: 69754 - RNA, 20 nt, Artificial Sequence
  LRRK2 RNA guide
gcauaaugugcuucuucucu

SEQ ID NO: 69755 - RNA, 20 nt, Artificial Sequence
  LRRK2 RNA guide
ggggugugcauaaugugcuu

SEQ ID NO: 69756 - RNA, 20 nt, Artificial Sequence
  LRRK2 RNA guide
gggugugcauaaugugcuuc

SEQ ID NO: 69757 - RNA, 20 nt, Artificial Sequence
  LRRK2 RNA guide
ggugugcauaaugugcuucu

SEQ ID NO: 69758 - RNA, 20 nt, Artificial Sequence
  LRRK2 RNA guide
gugcauaaugugcuucuucu

SEQ ID NO: 69759 - RNA, 20 nt, Artificial Sequence
  LRRK2 RNA guide
gugugcauaaugugcuucuu

SEQ ID NO: 69760 - RNA, 20 nt, Artificial Sequence
  LRRK2 RNA guide
uaagagaagaagcacauuau

SEQ ID NO: 69761 - RNA, 20 nt, Artificial Sequence
  LRRK2 RNA guide
uaaugugcuucuucucuuaa

SEQ ID NO: 69762 - RNA, 20 nt, Artificial Sequence
  LRRK2 RNA guide
ugcauaaugugcuucuucuc

SEQ ID NO: 69763 - RNA, 20 nt, Artificial Sequence
  LRRK2 RNA guide
ugugcauaaugugcuucuuc

SEQ ID NO: 69764 - RNA, 20 nt, Artificial Sequence
  LRRK2 RNA guide
uuaagagaagaagcacauua

SEQ ID NO: 69765 - RNA, 20 nt, Artificial Sequence
  LRRK2 RNA guide
uuuaagagaagaagcacauu

SEQ ID NO: 69766 - RNA, 20 nt, Artificial Sequence
  LRRK2 RNA guide
uuuuaagagaagaagcacau

SEQ ID NO: 69767 - RNA, 20 nt, Artificial Sequence
  LRRK2 RNA guide
uuuuuaagagaagaagcaca

SEQ ID NO: 69768 - RNA, 20 nt, Artificial Sequence
  LRRK2 RNA guide
uuuuuuaagagaagaagcac

SEQ ID NO: 69769 - RNA, 21 nt, Artificial Sequence
  LRRK2 RNA guide
aaaaaaggggugugcauaaug

SEQ ID NO: 69770 - RNA, 21 nt, Artificial Sequence
  LRRK2 RNA guide
aaaaaggggugugcauaaugu

SEQ ID NO: 69771 - RNA, 21 nt, Artificial Sequence
  LRRK2 RNA guide
aaaaggggugugcauaaugug

SEQ ID NO: 69772 - RNA, 21 nt, Artificial Sequence
  LRRK2 RNA guide
aaaggggugugcauaaugugc

SEQ ID NO: 69773 - RNA, 21 nt, Artificial Sequence
  LRRK2 RNA guide
aagaagcacauuaugcacacc

SEQ ID NO: 69774 - RNA, 21 nt, Artificial Sequence
  LRRK2 RNA guide
aagagaagaagcacauuaugc

SEQ ID NO: 69775 - RNA, 21 nt, Artificial Sequence
  LRRK2 RNA guide
aagcacauuaugcacaccccu

SEQ ID NO: 69776 - RNA, 21 nt, Artificial Sequence
  LRRK2 RNA guide
aaggggugugcauaaugugcu

SEQ ID NO: 69777 - RNA, 21 nt, Artificial Sequence
  LRRK2 RNA guide
acauuaugcacaccccuuuuu

SEQ ID NO: 69778 - RNA, 21 nt, Artificial Sequence
  LRRK2 RNA guide
agaagaagcacauuaugcaca

SEQ ID NO: 69779 - RNA, 21 nt, Artificial Sequence
  LRRK2 RNA guide
agaagcacauuaugcacaccc

SEQ ID NO: 69780 - RNA, 21 nt, Artificial Sequence
  LRRK2 RNA guide
agagaagaagcacauuaugca

SEQ ID NO: 69781 - RNA, 21 nt, Artificial Sequence
  LRRK2 RNA guide
agcacauuaugcacaccccuu

SEQ ID NO: 69782 - RNA, 21 nt, Artificial Sequence
  LRRK2 RNA guide
aggggugugcauaaugugcuu

SEQ ID NO: 69783 - RNA, 21 nt, Artificial Sequence
  LRRK2 RNA guide
cacauuaugcacaccccuuuu

SEQ ID NO: 69784 - RNA, 21 nt, Artificial Sequence
  LRRK2 RNA guide
cauaaugugcuucuucucuua

SEQ ID NO: 69785 - RNA, 21 nt, Artificial Sequence
  LRRK2 RNA guide
cauuaugcacaccccuuuuuu

SEQ ID NO: 69786 - RNA, 21 nt, Artificial Sequence
  LRRK2 RNA guide
gaagaagcacauuaugcacac

SEQ ID NO: 69787 - RNA, 21 nt, Artificial Sequence
  LRRK2 RNA guide
gaagcacauuaugcacacccc

SEQ ID NO: 69788 - RNA, 21 nt, Artificial Sequence
  LRRK2 RNA guide
gagaagaagcacauuaugcac

SEQ ID NO: 69789 - RNA, 21 nt, Artificial Sequence
  LRRK2 RNA guide
gcacauuaugcacaccccuuu

SEQ ID NO: 69790 - RNA, 21 nt, Artificial Sequence
  LRRK2 RNA guide
gcauaaugugcuucuucucuu

SEQ ID NO: 69791 - RNA, 21 nt, Artificial Sequence
  LRRK2 RNA guide
ggggugugcauaaugugcuuc

SEQ ID NO: 69792 - RNA, 21 nt, Artificial Sequence
  LRRK2 RNA guide
gggugugcauaaugugcuucu

SEQ ID NO: 69793 - RNA, 21 nt, Artificial Sequence
  LRRK2 RNA guide
ggugugcauaaugugcuucuu

SEQ ID NO: 69794 - RNA, 21 nt, Artificial Sequence
  LRRK2 RNA guide
gugcauaaugugcuucuucuc

SEQ ID NO: 69795 - RNA, 21 nt, Artificial Sequence
  LRRK2 RNA guide
gugugcauaaugugcuucuuc

SEQ ID NO: 69796 - RNA, 21 nt, Artificial Sequence
  LRRK2 RNA guide
uaagagaagaagcacauuaug

SEQ ID NO: 69797 - RNA, 21 nt, Artificial Sequence
  LRRK2 RNA guide
ugcauaaugugcuucuucucu

SEQ ID NO: 69798 - RNA, 21 nt, Artificial Sequence
  LRRK2 RNA guide
ugugcauaaugugcuucuucu

SEQ ID NO: 69799 - RNA, 22 nt, Artificial Sequence
  LRRK2 RNA guide
aaaaaaggggugugcauaaugu

SEQ ID NO: 69800 - RNA, 22 nt, Artificial Sequence
  LRRK2 RNA guide
aaaaaggggugugcauaaugug

SEQ ID NO: 69801 - RNA, 22 nt, Artificial Sequence
  LRRK2 RNA guide
aaaaggggugugcauaaugugc

SEQ ID NO: 69802 - RNA, 22 nt, Artificial Sequence
  LRRK2 RNA guide
aaaggggugugcauaaugugcu

SEQ ID NO: 69803 - RNA, 22 nt, Artificial Sequence
  LRRK2 RNA guide
aagaagcacauuaugcacaccc

SEQ ID NO: 69804 - RNA, 22 nt, Artificial Sequence
  LRRK2 RNA guide
aagagaagaagcacauuaugca

SEQ ID NO: 69805 - RNA, 22 nt, Artificial Sequence
  LRRK2 RNA guide
aagcacauuaugcacaccccuu

SEQ ID NO: 69806 - RNA, 22 nt, Artificial Sequence
  LRRK2 RNA guide
aaggggugugcauaaugugcuu

SEQ ID NO: 69807 - RNA, 22 nt, Artificial Sequence
  LRRK2 RNA guide
acauuaugcacaccccuuuuuu

SEQ ID NO: 69808 - RNA, 22 nt, Artificial Sequence
  LRRK2 RNA guide
agaagaagcacauuaugcacac

SEQ ID NO: 69809 - RNA, 22 nt, Artificial Sequence
  LRRK2 RNA guide
agaagcacauuaugcacacccc

SEQ ID NO: 69810 - RNA, 22 nt, Artificial Sequence
  LRRK2 RNA guide
agagaagaagcacauuaugcac

SEQ ID NO: 69811 - RNA, 22 nt, Artificial Sequence
  LRRK2 RNA guide
agcacauuaugcacaccccuuu

SEQ ID NO: 69812 - RNA, 22 nt, Artificial Sequence
  LRRK2 RNA guide
aggggugugcauaaugugcuuc

SEQ ID NO: 69813 - RNA, 22 nt, Artificial Sequence
  LRRK2 RNA guide
cacauuaugcacaccccuuuuu

SEQ ID NO: 69814 - RNA, 22 nt, Artificial Sequence
  LRRK2 RNA guide
cauaaugugcuucuucucuuaa

SEQ ID NO: 69815 - RNA, 22 nt, Artificial Sequence
  LRRK2 RNA guide
gaagaagcacauuaugcacacc

SEQ ID NO: 69816 - RNA, 22 nt, Artificial Sequence
  LRRK2 RNA guide
gaagcacauuaugcacaccccu

SEQ ID NO: 69817 - RNA, 22 nt, Artificial Sequence
  LRRK2 RNA guide
gagaagaagcacauuaugcaca

SEQ ID NO: 69818 - RNA, 22 nt, Artificial Sequence
  LRRK2 RNA guide
gcacauuaugcacaccccuuuu

SEQ ID NO: 69819 - RNA, 22 nt, Artificial Sequence
  LRRK2 RNA guide
gcauaaugugcuucuucucuua

SEQ ID NO: 69820 - RNA, 22 nt, Artificial Sequence
  LRRK2 RNA guide
ggggugugcauaaugugcuucu

SEQ ID NO: 69821 - RNA, 22 nt, Artificial Sequence
  LRRK2 RNA guide
gggugugcauaaugugcuucuu

SEQ ID NO: 69822 - RNA, 22 nt, Artificial Sequence
  LRRK2 RNA guide
ggugugcauaaugugcuucuuc

SEQ ID NO: 69823 - RNA, 22 nt, Artificial Sequence
  LRRK2 RNA guide
gugcauaaugugcuucuucucu

SEQ ID NO: 69824 - RNA, 22 nt, Artificial Sequence
  LRRK2 RNA guide
gugugcauaaugugcuucuucu

SEQ ID NO: 69825 - RNA, 22 nt, Artificial Sequence
  LRRK2 RNA guide
uaagagaagaagcacauuaugc

SEQ ID NO: 69826 - RNA, 22 nt, Artificial Sequence
  LRRK2 RNA guide
ugcauaaugugcuucuucucuu

SEQ ID NO: 69827 - RNA, 22 nt, Artificial Sequence
  LRRK2 RNA guide
ugugcauaaugugcuucuucuc

SEQ ID NO: 69828 - RNA, 22 nt, Artificial Sequence
  LRRK2 RNA guide
uuaagagaagaagcacauuaug

SEQ ID NO: 69829 - RNA, 20 nt, Artificial Sequence
  LRRK2 RNA guide
aaaaaaggggugugcauaag

SEQ ID NO: 69830 - RNA, 20 nt, Artificial Sequence
  LRRK2 RNA guide
aaaaaggggugugcauaagg

SEQ ID NO: 69831 - RNA, 20 nt, Artificial Sequence
  LRRK2 RNA guide
aaaaggggugugcauaaggu

SEQ ID NO: 69832 - RNA, 20 nt, Artificial Sequence
  LRRK2 RNA guide
aaaggggugugcauaaggug

SEQ ID NO: 69833 - RNA, 20 nt, Artificial Sequence
  LRRK2 RNA guide
aagaagcaccuuaugcacac

SEQ ID NO: 69834 - RNA, 20 nt, Artificial Sequence
  LRRK2 RNA guide
aagagaagaagcaccuuaug

SEQ ID NO: 69835 - RNA, 20 nt, Artificial Sequence
  LRRK2 RNA guide
aagcaccuuaugcacacccc

SEQ ID NO: 69836 - RNA, 20 nt, Artificial Sequence
  LRRK2 RNA guide
aaggggugugcauaaggugc

SEQ ID NO: 69837 - RNA, 20 nt, Artificial Sequence
  LRRK2 RNA guide
aaggugcuucuucucuuaaa

SEQ ID NO: 69838 - RNA, 20 nt, Artificial Sequence
  LRRK2 RNA guide
accuuaugcacaccccuuuu

SEQ ID NO: 69839 - RNA, 20 nt, Artificial Sequence
  LRRK2 RNA guide
agaagaagcaccuuaugcac

SEQ ID NO: 69840 - RNA, 20 nt, Artificial Sequence
  LRRK2 RNA guide
agaagcaccuuaugcacacc

SEQ ID NO: 69841 - RNA, 20 nt, Artificial Sequence
  LRRK2 RNA guide
agagaagaagcaccuuaugc

SEQ ID NO: 69842 - RNA, 20 nt, Artificial Sequence
  LRRK2 RNA guide
agcaccuuaugcacaccccu

SEQ ID NO: 69843 - RNA, 20 nt, Artificial Sequence
  LRRK2 RNA guide
aggggugugcauaaggugcu

SEQ ID NO: 69844 - RNA, 20 nt, Artificial Sequence
  LRRK2 RNA guide
aggugcuucuucucuuaaaa

SEQ ID NO: 69845 - RNA, 20 nt, Artificial Sequence
  LRRK2 RNA guide
auaaggugcuucuucucuua

SEQ ID NO: 69846 - RNA, 20 nt, Artificial Sequence
  LRRK2 RNA guide
caccuuaugcacaccccuuu

SEQ ID NO: 69847 - RNA, 20 nt, Artificial Sequence
  LRRK2 RNA guide
cauaaggugcuucuucucuu

SEQ ID NO: 69848 - RNA, 20 nt, Artificial Sequence
  LRRK2 RNA guide
ccuuaugcacaccccuuuuu

SEQ ID NO: 69849 - RNA, 20 nt, Artificial Sequence
  LRRK2 RNA guide
gaagaagcaccuuaugcaca

SEQ ID NO: 69850 - RNA, 20 nt, Artificial Sequence
  LRRK2 RNA guide
gaagcaccuuaugcacaccc

SEQ ID NO: 69851 - RNA, 20 nt, Artificial Sequence
  LRRK2 RNA guide
gagaagaagcaccuuaugca

SEQ ID NO: 69852 - RNA, 20 nt, Artificial Sequence
  LRRK2 RNA guide
gcaccuuaugcacaccccuu

SEQ ID NO: 69853 - RNA, 20 nt, Artificial Sequence
  LRRK2 RNA guide
gcauaaggugcuucuucucu

SEQ ID NO: 69854 - RNA, 20 nt, Artificial Sequence
  LRRK2 RNA guide
ggggugugcauaaggugcuu

SEQ ID NO: 69855 - RNA, 20 nt, Artificial Sequence
  LRRK2 RNA guide
gggugugcauaaggugcuuc

SEQ ID NO: 69856 - RNA, 20 nt, Artificial Sequence
  LRRK2 RNA guide
ggugugcauaaggugcuucu

SEQ ID NO: 69857 - RNA, 20 nt, Artificial Sequence
  LRRK2 RNA guide
gugcauaaggugcuucuucu

SEQ ID NO: 69858 - RNA, 20 nt, Artificial Sequence
  LRRK2 RNA guide
gugugcauaaggugcuucuu

SEQ ID NO: 69859 - RNA, 20 nt, Artificial Sequence
  LRRK2 RNA guide
uaagagaagaagcaccuuau

SEQ ID NO: 69860 - RNA, 20 nt, Artificial Sequence
  LRRK2 RNA guide
uaaggugcuucuucucuuaa

SEQ ID NO: 69861 - RNA, 20 nt, Artificial Sequence
  LRRK2 RNA guide
ugcauaaggugcuucuucuc

SEQ ID NO: 69862 - RNA, 20 nt, Artificial Sequence
  LRRK2 RNA guide
ugugcauaaggugcuucuuc

SEQ ID NO: 69863 - RNA, 20 nt, Artificial Sequence
  LRRK2 RNA guide
uuaagagaagaagcaccuua

SEQ ID NO: 69864 - RNA, 20 nt, Artificial Sequence
  LRRK2 RNA guide
uuuaagagaagaagcaccuu

SEQ ID NO: 69865 - RNA, 20 nt, Artificial Sequence
  LRRK2 RNA guide
uuuuaagagaagaagcaccu

SEQ ID NO: 69866 - RNA, 20 nt, Artificial Sequence
  LRRK2 RNA guide
uuuuuaagagaagaagcacc

SEQ ID NO: 69867 - RNA, 21 nt, Artificial Sequence
  LRRK2 RNA guide
aaaaaaggggugugcauaagg

SEQ ID NO: 69868 - RNA, 21 nt, Artificial Sequence
  LRRK2 RNA guide
aaaaaggggugugcauaaggu

SEQ ID NO: 69869 - RNA, 21 nt, Artificial Sequence
  LRRK2 RNA guide
aaaaggggugugcauaaggug

SEQ ID NO: 69870 - RNA, 21 nt, Artificial Sequence
  LRRK2 RNA guide
aaaggggugugcauaaggugc

SEQ ID NO: 69871 - RNA, 21 nt, Artificial Sequence
  LRRK2 RNA guide
aagaagcaccuuaugcacacc

SEQ ID NO: 69872 - RNA, 21 nt, Artificial Sequence
  LRRK2 RNA guide
aagagaagaagcaccuuaugc

SEQ ID NO: 69873 - RNA, 21 nt, Artificial Sequence
  LRRK2 RNA guide
aagcaccuuaugcacaccccu

SEQ ID NO: 69874 - RNA, 21 nt, Artificial Sequence
  LRRK2 RNA guide
aaggggugugcauaaggugcu

SEQ ID NO: 69875 - RNA, 21 nt, Artificial Sequence
  LRRK2 RNA guide
aaggugcuucuucucuuaaaa

SEQ ID NO: 69876 - RNA, 21 nt, Artificial Sequence
  LRRK2 RNA guide
accuuaugcacaccccuuuuu

SEQ ID NO: 69877 - RNA, 21 nt, Artificial Sequence
  LRRK2 RNA guide
agaagaagcaccuuaugcaca

SEQ ID NO: 69878 - RNA, 21 nt, Artificial Sequence
  LRRK2 RNA guide
agaagcaccuuaugcacaccc

SEQ ID NO: 69879 - RNA, 21 nt, Artificial Sequence
  LRRK2 RNA guide
agagaagaagcaccuuaugca

SEQ ID NO: 69880 - RNA, 21 nt, Artificial Sequence
  LRRK2 RNA guide
agcaccuuaugcacaccccuu

SEQ ID NO: 69881 - RNA, 21 nt, Artificial Sequence
  LRRK2 RNA guide
aggggugugcauaaggugcuu

SEQ ID NO: 69882 - RNA, 21 nt, Artificial Sequence
  LRRK2 RNA guide
aggugcuucuucucuuaaaaa

SEQ ID NO: 69883 - RNA, 21 nt, Artificial Sequence
  LRRK2 RNA guide
auaaggugcuucuucucuuaa

SEQ ID NO: 69884 - RNA, 21 nt, Artificial Sequence
  LRRK2 RNA guide
caccuuaugcacaccccuuuu

SEQ ID NO: 69885 - RNA, 21 nt, Artificial Sequence
  LRRK2 RNA guide
cauaaggugcuucuucucuua

SEQ ID NO: 69886 - RNA, 21 nt, Artificial Sequence
  LRRK2 RNA guide
ccuuaugcacaccccuuuuuu

SEQ ID NO: 69887 - RNA, 21 nt, Artificial Sequence
  LRRK2 RNA guide
gaagaagcaccuuaugcacac

SEQ ID NO: 69888 - RNA, 21 nt, Artificial Sequence
  LRRK2 RNA guide
gaagcaccuuaugcacacccc

SEQ ID NO: 69889 - RNA, 21 nt, Artificial Sequence
  LRRK2 RNA guide
gagaagaagcaccuuaugcac

SEQ ID NO: 69890 - RNA, 21 nt, Artificial Sequence
  LRRK2 RNA guide
gcaccuuaugcacaccccuuu

SEQ ID NO: 69891 - RNA, 21 nt, Artificial Sequence
  LRRK2 RNA guide
gcauaaggugcuucuucucuu

SEQ ID NO: 69892 - RNA, 21 nt, Artificial Sequence
  LRRK2 RNA guide
ggggugugcauaaggugcuuc

SEQ ID NO: 69893 - RNA, 21 nt, Artificial Sequence
  LRRK2 RNA guide
gggugugcauaaggugcuucu

SEQ ID NO: 69894 - RNA, 21 nt, Artificial Sequence
  LRRK2 RNA guide
ggugugcauaaggugcuucuu

SEQ ID NO: 69895 - RNA, 21 nt, Artificial Sequence
  LRRK2 RNA guide
gugcauaaggugcuucuucuc

SEQ ID NO: 69896 - RNA, 21 nt, Artificial Sequence
  LRRK2 RNA guide
gugugcauaaggugcuucuuc

SEQ ID NO: 69897 - RNA, 21 nt, Artificial Sequence
  LRRK2 RNA guide
uaagagaagaagcaccuuaug

SEQ ID NO: 69898 - RNA, 21 nt, Artificial Sequence
  LRRK2 RNA guide
uaaggugcuucuucucuuaaa

SEQ ID NO: 69899 - RNA, 21 nt, Artificial Sequence
  LRRK2 RNA guide
ugcauaaggugcuucuucucu

SEQ ID NO: 69900 - RNA, 21 nt, Artificial Sequence
  LRRK2 RNA guide
ugugcauaaggugcuucuucu

SEQ ID NO: 69901 - RNA, 21 nt, Artificial Sequence
  LRRK2 RNA guide
uuaagagaagaagcaccuuau

SEQ ID NO: 69902 - RNA, 21 nt, Artificial Sequence
  LRRK2 RNA guide
uuuaagagaagaagcaccuua

SEQ ID NO: 69903 - RNA, 21 nt, Artificial Sequence
  LRRK2 RNA guide
uuuuaagagaagaagcaccuu

SEQ ID NO: 69904 - RNA, 21 nt, Artificial Sequence
  LRRK2 RNA guide
uuuuuaagagaagaagcaccu

SEQ ID NO: 69905 - RNA, 21 nt, Artificial Sequence
  LRRK2 RNA guide
uuuuuuaagagaagaagcacc

SEQ ID NO: 69906 - RNA, 22 nt, Artificial Sequence
  LRRK2 RNA guide
aaaaaaggggugugcauaaggu

SEQ ID NO: 69907 - RNA, 22 nt, Artificial Sequence
  LRRK2 RNA guide
aaaaaggggugugcauaaggug

SEQ ID NO: 69908 - RNA, 22 nt, Artificial Sequence
  LRRK2 RNA guide
aaaaggggugugcauaaggugc

SEQ ID NO: 69909 - RNA, 22 nt, Artificial Sequence
  LRRK2 RNA guide
aaaggggugugcauaaggugcu

SEQ ID NO: 69910 - RNA, 22 nt, Artificial Sequence
  LRRK2 RNA guide
aagaagcaccuuaugcacaccc

SEQ ID NO: 69911 - RNA, 22 nt, Artificial Sequence
  LRRK2 RNA guide
aagagaagaagcaccuuaugca

SEQ ID NO: 69912 - RNA, 22 nt, Artificial Sequence
  LRRK2 RNA guide
aagcaccuuaugcacaccccuu

SEQ ID NO: 69913 - RNA, 22 nt, Artificial Sequence
  LRRK2 RNA guide
aaggggugugcauaaggugcuu

SEQ ID NO: 69914 - RNA, 22 nt, Artificial Sequence
  LRRK2 RNA guide
aaggugcuucuucucuuaaaaa

SEQ ID NO: 69915 - RNA, 22 nt, Artificial Sequence
  LRRK2 RNA guide
accuuaugcacaccccuuuuuu

SEQ ID NO: 69916 - RNA, 22 nt, Artificial Sequence
  LRRK2 RNA guide
agaagaagcaccuuaugcacac

SEQ ID NO: 69917 - RNA, 22 nt, Artificial Sequence
  LRRK2 RNA guide
agaagcaccuuaugcacacccc

SEQ ID NO: 69918 - RNA, 22 nt, Artificial Sequence
  LRRK2 RNA guide
agagaagaagcaccuuaugcac

SEQ ID NO: 69919 - RNA, 22 nt, Artificial Sequence
  LRRK2 RNA guide
agcaccuuaugcacaccccuuu

SEQ ID NO: 69920 - RNA, 22 nt, Artificial Sequence
  LRRK2 RNA guide
aggggugugcauaaggugcuuc

SEQ ID NO: 69921 - RNA, 22 nt, Artificial Sequence
  LRRK2 RNA guide
aggugcuucuucucuuaaaaaa

SEQ ID NO: 69922 - RNA, 22 nt, Artificial Sequence
  LRRK2 RNA guide
auaaggugcuucuucucuuaaa

SEQ ID NO: 69923 - RNA, 22 nt, Artificial Sequence
  LRRK2 RNA guide
caccuuaugcacaccccuuuuu

SEQ ID NO: 69924 - RNA, 22 nt, Artificial Sequence
  LRRK2 RNA guide
cauaaggugcuucuucucuuaa

SEQ ID NO: 69925 - RNA, 22 nt, Artificial Sequence
  LRRK2 RNA guide
gaagaagcaccuuaugcacacc

SEQ ID NO: 69926 - RNA, 22 nt, Artificial Sequence
  LRRK2 RNA guide
gaagcaccuuaugcacaccccu

SEQ ID NO: 69927 - RNA, 22 nt, Artificial Sequence
  LRRK2 RNA guide
gagaagaagcaccuuaugcaca

SEQ ID NO: 69928 - RNA, 22 nt, Artificial Sequence
  LRRK2 RNA guide
gcaccuuaugcacaccccuuuu

SEQ ID NO: 69929 - RNA, 22 nt, Artificial Sequence
  LRRK2 RNA guide
gcauaaggugcuucuucucuua

SEQ ID NO: 69930 - RNA, 22 nt, Artificial Sequence
  LRRK2 RNA guide
ggggugugcauaaggugcuucu

SEQ ID NO: 69931 - RNA, 22 nt, Artificial Sequence
  LRRK2 RNA guide
gggugugcauaaggugcuucuu

SEQ ID NO: 69932 - RNA, 22 nt, Artificial Sequence
  LRRK2 RNA guide
ggugugcauaaggugcuucuuc

SEQ ID NO: 69933 - RNA, 22 nt, Artificial Sequence
  LRRK2 RNA guide
gugcauaaggugcuucuucucu

SEQ ID NO: 69934 - RNA, 22 nt, Artificial Sequence
  LRRK2 RNA guide
gugugcauaaggugcuucuucu

SEQ ID NO: 69935 - RNA, 22 nt, Artificial Sequence
  LRRK2 RNA guide
uaagagaagaagcaccuuaugc

SEQ ID NO: 69936 - RNA, 22 nt, Artificial Sequence
  LRRK2 RNA guide
uaaggugcuucuucucuuaaaa

SEQ ID NO: 69937 - RNA, 22 nt, Artificial Sequence
  LRRK2 RNA guide
ugcauaaggugcuucuucucuu

SEQ ID NO: 69938 - RNA, 22 nt, Artificial Sequence
  LRRK2 RNA guide
ugugcauaaggugcuucuucuc

SEQ ID NO: 69939 - RNA, 22 nt, Artificial Sequence
  LRRK2 RNA guide
uuaagagaagaagcaccuuaug

SEQ ID NO: 69940 - RNA, 22 nt, Artificial Sequence
  LRRK2 RNA guide
uuuaagagaagaagcaccuuau

SEQ ID NO: 69941 - RNA, 22 nt, Artificial Sequence
  LRRK2 RNA guide
uuuuaagagaagaagcaccuua

SEQ ID NO: 69942 - RNA, 22 nt, Artificial Sequence
  LRRK2 RNA guide
uuuuuaagagaagaagcaccuu

SEQ ID NO: 69943 - RNA, 22 nt, Artificial Sequence
  LRRK2 RNA guide
uuuuuuaagagaagaagcaccu

SEQ ID NO: 69944 - RNA, 20 nt, Artificial Sequence
  LRRK2 RNA guide
gugcuucuucucuuaaaaaa

SEQ ID NO: 69945 - RNA, 20 nt, Artificial Sequence
  LRRK2 RNA guide
ugugcuucuucucuuaaaaa

SEQ ID NO: 69946 - RNA, 20 nt, Artificial Sequence
  LRRK2 RNA guide
aagacuucagccaugugaag

SEQ ID NO: 69947 - RNA, 20 nt, Artificial Sequence
  LRRK2 RNA guide
aagaucugaauggcaagacu

SEQ ID NO: 69948 - RNA, 20 nt, Artificial Sequence
  LRRK2 RNA guide
aaucccuccacccuucacau

SEQ ID NO: 69949 - RNA, 20 nt, Artificial Sequence
  LRRK2 RNA guide
aauggcaagacuucagccau

SEQ ID NO: 69950 - RNA, 20 nt, Artificial Sequence
  LRRK2 RNA guide
acauggcugaagucuugcca

SEQ ID NO: 69951 - RNA, 20 nt, Artificial Sequence
  LRRK2 RNA guide
acccuucacauggcugaagu

SEQ ID NO: 69952 - RNA, 20 nt, Artificial Sequence
  LRRK2 RNA guide
acuucagccaugugaagggu

SEQ ID NO: 69953 - RNA, 20 nt, Artificial Sequence
  LRRK2 RNA guide
agacuucagccaugugaagg

SEQ ID NO: 69954 - RNA, 20 nt, Artificial Sequence
  LRRK2 RNA guide
agaucugaauggcaagacuu

SEQ ID NO: 69955 - RNA, 20 nt, Artificial Sequence
  LRRK2 RNA guide
auaagaucugaauggcaaga

SEQ ID NO: 69956 - RNA, 20 nt, Artificial Sequence
  LRRK2 RNA guide
aucccuccacccuucacaug

SEQ ID NO: 69957 - RNA, 20 nt, Artificial Sequence
  LRRK2 RNA guide
aucugaauggcaagacuuca

SEQ ID NO: 69958 - RNA, 20 nt, Artificial Sequence
  LRRK2 RNA guide
auggcaagacuucagccaug

SEQ ID NO: 69959 - RNA, 20 nt, Artificial Sequence
  LRRK2 RNA guide
auggcugaagucuugccauu

SEQ ID NO: 69960 - RNA, 20 nt, Artificial Sequence
  LRRK2 RNA guide
caagacuucagccaugugaa

SEQ ID NO: 69961 - RNA, 20 nt, Artificial Sequence
  LRRK2 RNA guide
cacauggcugaagucuugcc

SEQ ID NO: 69962 - RNA, 20 nt, Artificial Sequence
  LRRK2 RNA guide
cacccuucacauggcugaag

SEQ ID NO: 69963 - RNA, 20 nt, Artificial Sequence
  LRRK2 RNA guide
cauggcugaagucuugccau

SEQ ID NO: 69964 - RNA, 20 nt, Artificial Sequence
  LRRK2 RNA guide
ccacccuucacauggcugaa

SEQ ID NO: 69965 - RNA, 20 nt, Artificial Sequence
  LRRK2 RNA guide
cccuccacccuucacauggc

SEQ ID NO: 69966 - RNA, 20 nt, Artificial Sequence
  LRRK2 RNA guide
cccuucacauggcugaaguc

SEQ ID NO: 69967 - RNA, 20 nt, Artificial Sequence
  LRRK2 RNA guide
ccuccacccuucacauggcu

SEQ ID NO: 69968 - RNA, 20 nt, Artificial Sequence
  LRRK2 RNA guide
ccuucacauggcugaagucu

SEQ ID NO: 69969 - RNA, 20 nt, Artificial Sequence
  LRRK2 RNA guide
cuccacccuucacauggcug

SEQ ID NO: 69970 - RNA, 20 nt, Artificial Sequence
  LRRK2 RNA guide
cugaagucuugccauucaga

SEQ ID NO: 69971 - RNA, 20 nt, Artificial Sequence
  LRRK2 RNA guide
cugaauggcaagacuucagc

SEQ ID NO: 69972 - RNA, 20 nt, Artificial Sequence
  LRRK2 RNA guide
cuucacauggcugaagucuu

SEQ ID NO: 69973 - RNA, 20 nt, Artificial Sequence
  LRRK2 RNA guide
cuucagccaugugaagggug

SEQ ID NO: 69974 - RNA, 20 nt, Artificial Sequence
  LRRK2 RNA guide
gaauggcaagacuucagcca

SEQ ID NO: 69975 - RNA, 20 nt, Artificial Sequence
  LRRK2 RNA guide
gacuucagccaugugaaggg

SEQ ID NO: 69976 - RNA, 20 nt, Artificial Sequence
  LRRK2 RNA guide
gauaagaucugaauggcaag

SEQ ID NO: 69977 - RNA, 20 nt, Artificial Sequence
  LRRK2 RNA guide
gaucugaauggcaagacuuc

SEQ ID NO: 69978 - RNA, 20 nt, Artificial Sequence
  LRRK2 RNA guide
gcaagacuucagccauguga

SEQ ID NO: 69979 - RNA, 20 nt, Artificial Sequence
  LRRK2 RNA guide
gcugaagucuugccauucag

SEQ ID NO: 69980 - RNA, 20 nt, Artificial Sequence
  LRRK2 RNA guide
ggcaagacuucagccaugug

SEQ ID NO: 69981 - RNA, 20 nt, Artificial Sequence
  LRRK2 RNA guide
ggcugaagucuugccauuca

SEQ ID NO: 69982 - RNA, 20 nt, Artificial Sequence
  LRRK2 RNA guide
uaagaucugaauggcaagac

SEQ ID NO: 69983 - RNA, 20 nt, Artificial Sequence
  LRRK2 RNA guide
ucacauggcugaagucuugc

SEQ ID NO: 69984 - RNA, 20 nt, Artificial Sequence
  LRRK2 RNA guide
ucagccaugugaagggugga

SEQ ID NO: 69985 - RNA, 20 nt, Artificial Sequence
  LRRK2 RNA guide
uccacccuucacauggcuga

SEQ ID NO: 69986 - RNA, 20 nt, Artificial Sequence
  LRRK2 RNA guide
ucccuccacccuucacaugg

SEQ ID NO: 69987 - RNA, 20 nt, Artificial Sequence
  LRRK2 RNA guide
ucugaauggcaagacuucag

SEQ ID NO: 69988 - RNA, 20 nt, Artificial Sequence
  LRRK2 RNA guide
ugaagucuugccauucagau

SEQ ID NO: 69989 - RNA, 20 nt, Artificial Sequence
  LRRK2 RNA guide
ugaauggcaagacuucagcc

SEQ ID NO: 69990 - RNA, 20 nt, Artificial Sequence
  LRRK2 RNA guide
uggcaagacuucagccaugu

SEQ ID NO: 69991 - RNA, 20 nt, Artificial Sequence
  LRRK2 RNA guide
uggcugaagucuugccauuc

SEQ ID NO: 69992 - RNA, 20 nt, Artificial Sequence
  LRRK2 RNA guide
uucagccaugugaagggugg

SEQ ID NO: 69993 - RNA, 21 nt, Artificial Sequence
  LRRK2 RNA guide
aaaucccuccacccuucacau

SEQ ID NO: 69994 - RNA, 21 nt, Artificial Sequence
  LRRK2 RNA guide
aagacuucagccaugugaagg

SEQ ID NO: 69995 - RNA, 21 nt, Artificial Sequence
  LRRK2 RNA guide
aagaucugaauggcaagacuu

SEQ ID NO: 69996 - RNA, 21 nt, Artificial Sequence
  LRRK2 RNA guide
aaucccuccacccuucacaug

SEQ ID NO: 69997 - RNA, 21 nt, Artificial Sequence
  LRRK2 RNA guide
aauggcaagacuucagccaug

SEQ ID NO: 69998 - RNA, 21 nt, Artificial Sequence
  LRRK2 RNA guide
acauggcugaagucuugccau

SEQ ID NO: 69999 - RNA, 21 nt, Artificial Sequence
  LRRK2 RNA guide
acccuucacauggcugaaguc

SEQ ID NO: 70000 - RNA, 21 nt, Artificial Sequence
  LRRK2 RNA guide
acuucagccaugugaagggug

SEQ ID NO: 70001 - RNA, 21 nt, Artificial Sequence
  LRRK2 RNA guide
agacuucagccaugugaaggg

SEQ ID NO: 70002 - RNA, 21 nt, Artificial Sequence
  LRRK2 RNA guide
agauaagaucugaauggcaag

SEQ ID NO: 70003 - RNA, 21 nt, Artificial Sequence
  LRRK2 RNA guide
agaucugaauggcaagacuuc

SEQ ID NO: 70004 - RNA, 21 nt, Artificial Sequence
  LRRK2 RNA guide
auaagaucugaauggcaagac

SEQ ID NO: 70005 - RNA, 21 nt, Artificial Sequence
  LRRK2 RNA guide
aucccuccacccuucacaugg

SEQ ID NO: 70006 - RNA, 21 nt, Artificial Sequence
  LRRK2 RNA guide
aucugaauggcaagacuucag

SEQ ID NO: 70007 - RNA, 21 nt, Artificial Sequence
  LRRK2 RNA guide
auggcaagacuucagccaugu

SEQ ID NO: 70008 - RNA, 21 nt, Artificial Sequence
  LRRK2 RNA guide
auggcugaagucuugccauuc

SEQ ID NO: 70009 - RNA, 21 nt, Artificial Sequence
  LRRK2 RNA guide
caagacuucagccaugugaag

SEQ ID NO: 70010 - RNA, 21 nt, Artificial Sequence
  LRRK2 RNA guide
cacauggcugaagucuugcca

SEQ ID NO: 70011 - RNA, 21 nt, Artificial Sequence
  LRRK2 RNA guide
cacccuucacauggcugaagu

SEQ ID NO: 70012 - RNA, 21 nt, Artificial Sequence
  LRRK2 RNA guide
cauggcugaagucuugccauu

SEQ ID NO: 70013 - RNA, 21 nt, Artificial Sequence
  LRRK2 RNA guide
ccacccuucacauggcugaag

SEQ ID NO: 70014 - RNA, 21 nt, Artificial Sequence
  LRRK2 RNA guide
cccuccacccuucacauggcu

SEQ ID NO: 70015 - RNA, 21 nt, Artificial Sequence
  LRRK2 RNA guide
cccuucacauggcugaagucu

SEQ ID NO: 70016 - RNA, 21 nt, Artificial Sequence
  LRRK2 RNA guide
ccuccacccuucacauggcug

SEQ ID NO: 70017 - RNA, 21 nt, Artificial Sequence
  LRRK2 RNA guide
ccuucacauggcugaagucuu

SEQ ID NO: 70018 - RNA, 21 nt, Artificial Sequence
  LRRK2 RNA guide
cuccacccuucacauggcuga

SEQ ID NO: 70019 - RNA, 21 nt, Artificial Sequence
  LRRK2 RNA guide
cugaagucuugccauucagau

SEQ ID NO: 70020 - RNA, 21 nt, Artificial Sequence
  LRRK2 RNA guide
cugaauggcaagacuucagcc

SEQ ID NO: 70021 - RNA, 21 nt, Artificial Sequence
  LRRK2 RNA guide
cuucacauggcugaagucuug

SEQ ID NO: 70022 - RNA, 21 nt, Artificial Sequence
  LRRK2 RNA guide
cuucagccaugugaagggugg

SEQ ID NO: 70023 - RNA, 21 nt, Artificial Sequence
  LRRK2 RNA guide
gaauggcaagacuucagccau

SEQ ID NO: 70024 - RNA, 21 nt, Artificial Sequence
  LRRK2 RNA guide
gacuucagccaugugaagggu

SEQ ID NO: 70025 - RNA, 21 nt, Artificial Sequence
  LRRK2 RNA guide
gauaagaucugaauggcaaga

SEQ ID NO: 70026 - RNA, 21 nt, Artificial Sequence
  LRRK2 RNA guide
gaucugaauggcaagacuuca

SEQ ID NO: 70027 - RNA, 21 nt, Artificial Sequence
  LRRK2 RNA guide
gcaagacuucagccaugugaa

SEQ ID NO: 70028 - RNA, 21 nt, Artificial Sequence
  LRRK2 RNA guide
gcugaagucuugccauucaga

SEQ ID NO: 70029 - RNA, 21 nt, Artificial Sequence
  LRRK2 RNA guide
ggcaagacuucagccauguga

SEQ ID NO: 70030 - RNA, 21 nt, Artificial Sequence
  LRRK2 RNA guide
ggcugaagucuugccauucag

SEQ ID NO: 70031 - RNA, 21 nt, Artificial Sequence
  LRRK2 RNA guide
uaagaucugaauggcaagacu

SEQ ID NO: 70032 - RNA, 21 nt, Artificial Sequence
  LRRK2 RNA guide
ucacauggcugaagucuugcc

SEQ ID NO: 70033 - RNA, 21 nt, Artificial Sequence
  LRRK2 RNA guide
ucagccaugugaaggguggag

SEQ ID NO: 70034 - RNA, 21 nt, Artificial Sequence
  LRRK2 RNA guide
uccacccuucacauggcugaa

SEQ ID NO: 70035 - RNA, 21 nt, Artificial Sequence
  LRRK2 RNA guide
ucccuccacccuucacauggc

SEQ ID NO: 70036 - RNA, 21 nt, Artificial Sequence
  LRRK2 RNA guide
ucugaauggcaagacuucagc

SEQ ID NO: 70037 - RNA, 21 nt, Artificial Sequence
  LRRK2 RNA guide
ugaagucuugccauucagauc

SEQ ID NO: 70038 - RNA, 21 nt, Artificial Sequence
  LRRK2 RNA guide
ugaauggcaagacuucagcca

SEQ ID NO: 70039 - RNA, 21 nt, Artificial Sequence
  LRRK2 RNA guide
uggcaagacuucagccaugug

SEQ ID NO: 70040 - RNA, 21 nt, Artificial Sequence
  LRRK2 RNA guide
uggcugaagucuugccauuca

SEQ ID NO: 70041 - RNA, 21 nt, Artificial Sequence
  LRRK2 RNA guide
uucacauggcugaagucuugc

SEQ ID NO: 70042 - RNA, 21 nt, Artificial Sequence
  LRRK2 RNA guide
uucagccaugugaagggugga

SEQ ID NO: 70043 - RNA, 22 nt, Artificial Sequence
  LRRK2 RNA guide
aaaucccuccacccuucacaug

SEQ ID NO: 70044 - RNA, 22 nt, Artificial Sequence
  LRRK2 RNA guide
aagacuucagccaugugaaggg

SEQ ID NO: 70045 - RNA, 22 nt, Artificial Sequence
  LRRK2 RNA guide
aagaucugaauggcaagacuuc

SEQ ID NO: 70046 - RNA, 22 nt, Artificial Sequence
  LRRK2 RNA guide
aaucccuccacccuucacaugg

SEQ ID NO: 70047 - RNA, 22 nt, Artificial Sequence
  LRRK2 RNA guide
aauggcaagacuucagccaugu

SEQ ID NO: 70048 - RNA, 22 nt, Artificial Sequence
  LRRK2 RNA guide
acauggcugaagucuugccauu

SEQ ID NO: 70049 - RNA, 22 nt, Artificial Sequence
  LRRK2 RNA guide
acccuucacauggcugaagucu

SEQ ID NO: 70050 - RNA, 22 nt, Artificial Sequence
  LRRK2 RNA guide
acuucagccaugugaagggugg

SEQ ID NO: 70051 - RNA, 22 nt, Artificial Sequence
  LRRK2 RNA guide
agacuucagccaugugaagggu

SEQ ID NO: 70052 - RNA, 22 nt, Artificial Sequence
  LRRK2 RNA guide
agauaagaucugaauggcaaga

SEQ ID NO: 70053 - RNA, 22 nt, Artificial Sequence
  LRRK2 RNA guide
agaucugaauggcaagacuuca

SEQ ID NO: 70054 - RNA, 22 nt, Artificial Sequence
  LRRK2 RNA guide
auaagaucugaauggcaagacu

SEQ ID NO: 70055 - RNA, 22 nt, Artificial Sequence
  LRRK2 RNA guide
aucccuccacccuucacauggc

SEQ ID NO: 70056 - RNA, 22 nt, Artificial Sequence
  LRRK2 RNA guide
aucugaauggcaagacuucagc

SEQ ID NO: 70057 - RNA, 22 nt, Artificial Sequence
  LRRK2 RNA guide
auggcaagacuucagccaugug

SEQ ID NO: 70058 - RNA, 22 nt, Artificial Sequence
  LRRK2 RNA guide
auggcugaagucuugccauuca

SEQ ID NO: 70059 - RNA, 22 nt, Artificial Sequence
  LRRK2 RNA guide
caagacuucagccaugugaagg

SEQ ID NO: 70060 - RNA, 22 nt, Artificial Sequence
  LRRK2 RNA guide
cacauggcugaagucuugccau

SEQ ID NO: 70061 - RNA, 22 nt, Artificial Sequence
  LRRK2 RNA guide
cacccuucacauggcugaaguc

SEQ ID NO: 70062 - RNA, 22 nt, Artificial Sequence
  LRRK2 RNA guide
cauggcugaagucuugccauuc

SEQ ID NO: 70063 - RNA, 22 nt, Artificial Sequence
  LRRK2 RNA guide
ccacccuucacauggcugaagu

SEQ ID NO: 70064 - RNA, 22 nt, Artificial Sequence
  LRRK2 RNA guide
cccuccacccuucacauggcug

SEQ ID NO: 70065 - RNA, 22 nt, Artificial Sequence
  LRRK2 RNA guide
cccuucacauggcugaagucuu

SEQ ID NO: 70066 - RNA, 22 nt, Artificial Sequence
  LRRK2 RNA guide
ccuccacccuucacauggcuga

SEQ ID NO: 70067 - RNA, 22 nt, Artificial Sequence
  LRRK2 RNA guide
ccuucacauggcugaagucuug

SEQ ID NO: 70068 - RNA, 22 nt, Artificial Sequence
  LRRK2 RNA guide
cuccacccuucacauggcugaa

SEQ ID NO: 70069 - RNA, 22 nt, Artificial Sequence
  LRRK2 RNA guide
cugaagucuugccauucagauc

SEQ ID NO: 70070 - RNA, 22 nt, Artificial Sequence
  LRRK2 RNA guide
cugaauggcaagacuucagcca

SEQ ID NO: 70071 - RNA, 22 nt, Artificial Sequence
  LRRK2 RNA guide
cuucacauggcugaagucuugc

SEQ ID NO: 70072 - RNA, 22 nt, Artificial Sequence
  LRRK2 RNA guide
cuucagccaugugaagggugga

SEQ ID NO: 70073 - RNA, 22 nt, Artificial Sequence
  LRRK2 RNA guide
gaaaucccuccacccuucacau

SEQ ID NO: 70074 - RNA, 22 nt, Artificial Sequence
  LRRK2 RNA guide
gaauggcaagacuucagccaug

SEQ ID NO: 70075 - RNA, 22 nt, Artificial Sequence
  LRRK2 RNA guide
gacuucagccaugugaagggug

SEQ ID NO: 70076 - RNA, 22 nt, Artificial Sequence
  LRRK2 RNA guide
gagauaagaucugaauggcaag

SEQ ID NO: 70077 - RNA, 22 nt, Artificial Sequence
  LRRK2 RNA guide
gauaagaucugaauggcaagac

SEQ ID NO: 70078 - RNA, 22 nt, Artificial Sequence
  LRRK2 RNA guide
gaucugaauggcaagacuucag

SEQ ID NO: 70079 - RNA, 22 nt, Artificial Sequence
  LRRK2 RNA guide
gcaagacuucagccaugugaag

SEQ ID NO: 70080 - RNA, 22 nt, Artificial Sequence
  LRRK2 RNA guide
gcugaagucuugccauucagau

SEQ ID NO: 70081 - RNA, 22 nt, Artificial Sequence
  LRRK2 RNA guide
ggcaagacuucagccaugugaa

SEQ ID NO: 70082 - RNA, 22 nt, Artificial Sequence
  LRRK2 RNA guide
ggcugaagucuugccauucaga

SEQ ID NO: 70083 - RNA, 22 nt, Artificial Sequence
  LRRK2 RNA guide
uaagaucugaauggcaagacuu

SEQ ID NO: 70084 - RNA, 22 nt, Artificial Sequence
  LRRK2 RNA guide
ucacauggcugaagucuugcca

SEQ ID NO: 70085 - RNA, 22 nt, Artificial Sequence
  LRRK2 RNA guide
ucagccaugugaaggguggagg

SEQ ID NO: 70086 - RNA, 22 nt, Artificial Sequence
  LRRK2 RNA guide
uccacccuucacauggcugaag

SEQ ID NO: 70087 - RNA, 22 nt, Artificial Sequence
  LRRK2 RNA guide
ucccuccacccuucacauggcu

SEQ ID NO: 70088 - RNA, 22 nt, Artificial Sequence
  LRRK2 RNA guide
ucugaauggcaagacuucagcc

SEQ ID NO: 70089 - RNA, 22 nt, Artificial Sequence
  LRRK2 RNA guide
ugaagucuugccauucagaucu

SEQ ID NO: 70090 - RNA, 22 nt, Artificial Sequence
  LRRK2 RNA guide
ugaauggcaagacuucagccau

SEQ ID NO: 70091 - RNA, 22 nt, Artificial Sequence
  LRRK2 RNA guide
uggcaagacuucagccauguga

SEQ ID NO: 70092 - RNA, 22 nt, Artificial Sequence
  LRRK2 RNA guide
uggcugaagucuugccauucag

SEQ ID NO: 70093 - RNA, 22 nt, Artificial Sequence
  LRRK2 RNA guide
uucacauggcugaagucuugcc

SEQ ID NO: 70094 - RNA, 22 nt, Artificial Sequence
  LRRK2 RNA guide
uucagccaugugaaggguggag

SEQ ID NO: 70095 - RNA, 20 nt, Artificial Sequence
  LRRK2 RNA guide
aagacuuuagccaugugaag

SEQ ID NO: 70096 - RNA, 20 nt, Artificial Sequence
  LRRK2 RNA guide
aauggcaagacuuuagccau

SEQ ID NO: 70097 - RNA, 20 nt, Artificial Sequence
  LRRK2 RNA guide
acauggcuaaagucuugcca

SEQ ID NO: 70098 - RNA, 20 nt, Artificial Sequence
  LRRK2 RNA guide
acccuucacauggcuaaagu

SEQ ID NO: 70099 - RNA, 20 nt, Artificial Sequence
  LRRK2 RNA guide
acuuuagccaugugaagggu

SEQ ID NO: 70100 - RNA, 20 nt, Artificial Sequence
  LRRK2 RNA guide
agacuuuagccaugugaagg

SEQ ID NO: 70101 - RNA, 20 nt, Artificial Sequence
  LRRK2 RNA guide
aucugaauggcaagacuuua

SEQ ID NO: 70102 - RNA, 20 nt, Artificial Sequence
  LRRK2 RNA guide
auggcaagacuuuagccaug

SEQ ID NO: 70103 - RNA, 20 nt, Artificial Sequence
  LRRK2 RNA guide
auggcuaaagucuugccauu

SEQ ID NO: 70104 - RNA, 20 nt, Artificial Sequence
  LRRK2 RNA guide
caagacuuuagccaugugaa

SEQ ID NO: 70105 - RNA, 20 nt, Artificial Sequence
  LRRK2 RNA guide
cacauggcuaaagucuugcc

SEQ ID NO: 70106 - RNA, 20 nt, Artificial Sequence
  LRRK2 RNA guide
cacccuucacauggcuaaag

SEQ ID NO: 70107 - RNA, 20 nt, Artificial Sequence
  LRRK2 RNA guide
cauggcuaaagucuugccau

SEQ ID NO: 70108 - RNA, 20 nt, Artificial Sequence
  LRRK2 RNA guide
ccacccuucacauggcuaaa

SEQ ID NO: 70109 - RNA, 20 nt, Artificial Sequence
  LRRK2 RNA guide
cccuucacauggcuaaaguc

SEQ ID NO: 70110 - RNA, 20 nt, Artificial Sequence
  LRRK2 RNA guide
ccuucacauggcuaaagucu

SEQ ID NO: 70111 - RNA, 20 nt, Artificial Sequence
  LRRK2 RNA guide
cuaaagucuugccauucaga

SEQ ID NO: 70112 - RNA, 20 nt, Artificial Sequence
  LRRK2 RNA guide
cuccacccuucacauggcua

SEQ ID NO: 70113 - RNA, 20 nt, Artificial Sequence
  LRRK2 RNA guide
cugaauggcaagacuuuagc

SEQ ID NO: 70114 - RNA, 20 nt, Artificial Sequence
  LRRK2 RNA guide
cuucacauggcuaaagucuu

SEQ ID NO: 70115 - RNA, 20 nt, Artificial Sequence
  LRRK2 RNA guide
cuuuagccaugugaagggug

SEQ ID NO: 70116 - RNA, 20 nt, Artificial Sequence
  LRRK2 RNA guide
gaauggcaagacuuuagcca

SEQ ID NO: 70117 - RNA, 20 nt, Artificial Sequence
  LRRK2 RNA guide
gacuuuagccaugugaaggg

SEQ ID NO: 70118 - RNA, 20 nt, Artificial Sequence
  LRRK2 RNA guide
gaucugaauggcaagacuuu

SEQ ID NO: 70119 - RNA, 20 nt, Artificial Sequence
  LRRK2 RNA guide
gcaagacuuuagccauguga

SEQ ID NO: 70120 - RNA, 20 nt, Artificial Sequence
  LRRK2 RNA guide
gcuaaagucuugccauucag

SEQ ID NO: 70121 - RNA, 20 nt, Artificial Sequence
  LRRK2 RNA guide
ggcaagacuuuagccaugug

SEQ ID NO: 70122 - RNA, 20 nt, Artificial Sequence
  LRRK2 RNA guide
ggcuaaagucuugccauuca

SEQ ID NO: 70123 - RNA, 20 nt, Artificial Sequence
  LRRK2 RNA guide
uaaagucuugccauucagau

SEQ ID NO: 70124 - RNA, 20 nt, Artificial Sequence
  LRRK2 RNA guide
ucacauggcuaaagucuugc

SEQ ID NO: 70125 - RNA, 20 nt, Artificial Sequence
  LRRK2 RNA guide
uccacccuucacauggcuaa

SEQ ID NO: 70126 - RNA, 20 nt, Artificial Sequence
  LRRK2 RNA guide
ucugaauggcaagacuuuag

SEQ ID NO: 70127 - RNA, 20 nt, Artificial Sequence
  LRRK2 RNA guide
ugaauggcaagacuuuagcc

SEQ ID NO: 70128 - RNA, 20 nt, Artificial Sequence
  LRRK2 RNA guide
uggcaagacuuuagccaugu

SEQ ID NO: 70129 - RNA, 20 nt, Artificial Sequence
  LRRK2 RNA guide
uggcuaaagucuugccauuc

SEQ ID NO: 70130 - RNA, 20 nt, Artificial Sequence
  LRRK2 RNA guide
uuagccaugugaagggugga

SEQ ID NO: 70131 - RNA, 20 nt, Artificial Sequence
  LRRK2 RNA guide
uucacauggcuaaagucuug

SEQ ID NO: 70132 - RNA, 20 nt, Artificial Sequence
  LRRK2 RNA guide
uuuagccaugugaagggugg

SEQ ID NO: 70133 - RNA, 21 nt, Artificial Sequence
  LRRK2 RNA guide
aagacuuuagccaugugaagg

SEQ ID NO: 70134 - RNA, 21 nt, Artificial Sequence
  LRRK2 RNA guide
aauggcaagacuuuagccaug

SEQ ID NO: 70135 - RNA, 21 nt, Artificial Sequence
  LRRK2 RNA guide
acauggcuaaagucuugccau

SEQ ID NO: 70136 - RNA, 21 nt, Artificial Sequence
  LRRK2 RNA guide
acccuucacauggcuaaaguc

SEQ ID NO: 70137 - RNA, 21 nt, Artificial Sequence
  LRRK2 RNA guide
acuuuagccaugugaagggug

SEQ ID NO: 70138 - RNA, 21 nt, Artificial Sequence
  LRRK2 RNA guide
agacuuuagccaugugaaggg

SEQ ID NO: 70139 - RNA, 21 nt, Artificial Sequence
  LRRK2 RNA guide
agaucugaauggcaagacuuu

SEQ ID NO: 70140 - RNA, 21 nt, Artificial Sequence
  LRRK2 RNA guide
aucugaauggcaagacuuuag

SEQ ID NO: 70141 - RNA, 21 nt, Artificial Sequence
  LRRK2 RNA guide
auggcaagacuuuagccaugu

SEQ ID NO: 70142 - RNA, 21 nt, Artificial Sequence
  LRRK2 RNA guide
auggcuaaagucuugccauuc

SEQ ID NO: 70143 - RNA, 21 nt, Artificial Sequence
  LRRK2 RNA guide
caagacuuuagccaugugaag

SEQ ID NO: 70144 - RNA, 21 nt, Artificial Sequence
  LRRK2 RNA guide
cacauggcuaaagucuugcca

SEQ ID NO: 70145 - RNA, 21 nt, Artificial Sequence
  LRRK2 RNA guide
cacccuucacauggcuaaagu

SEQ ID NO: 70146 - RNA, 21 nt, Artificial Sequence
  LRRK2 RNA guide
cauggcuaaagucuugccauu

SEQ ID NO: 70147 - RNA, 21 nt, Artificial Sequence
  LRRK2 RNA guide
ccacccuucacauggcuaaag

SEQ ID NO: 70148 - RNA, 21 nt, Artificial Sequence
  LRRK2 RNA guide
cccuucacauggcuaaagucu

SEQ ID NO: 70149 - RNA, 21 nt, Artificial Sequence
  LRRK2 RNA guide
ccuccacccuucacauggcua

SEQ ID NO: 70150 - RNA, 21 nt, Artificial Sequence
  LRRK2 RNA guide
ccuucacauggcuaaagucuu

SEQ ID NO: 70151 - RNA, 21 nt, Artificial Sequence
  LRRK2 RNA guide
cuaaagucuugccauucagau

SEQ ID NO: 70152 - RNA, 21 nt, Artificial Sequence
  LRRK2 RNA guide
cuccacccuucacauggcuaa

SEQ ID NO: 70153 - RNA, 21 nt, Artificial Sequence
  LRRK2 RNA guide
cugaauggcaagacuuuagcc

SEQ ID NO: 70154 - RNA, 21 nt, Artificial Sequence
  LRRK2 RNA guide
cuucacauggcuaaagucuug

SEQ ID NO: 70155 - RNA, 21 nt, Artificial Sequence
  LRRK2 RNA guide
cuuuagccaugugaagggugg

SEQ ID NO: 70156 - RNA, 21 nt, Artificial Sequence
  LRRK2 RNA guide
gaauggcaagacuuuagccau

SEQ ID NO: 70157 - RNA, 21 nt, Artificial Sequence
  LRRK2 RNA guide
gacuuuagccaugugaagggu

SEQ ID NO: 70158 - RNA, 21 nt, Artificial Sequence
  LRRK2 RNA guide
gaucugaauggcaagacuuua

SEQ ID NO: 70159 - RNA, 21 nt, Artificial Sequence
  LRRK2 RNA guide
gcaagacuuuagccaugugaa

SEQ ID NO: 70160 - RNA, 21 nt, Artificial Sequence
  LRRK2 RNA guide
gcuaaagucuugccauucaga

SEQ ID NO: 70161 - RNA, 21 nt, Artificial Sequence
  LRRK2 RNA guide
ggcaagacuuuagccauguga

SEQ ID NO: 70162 - RNA, 21 nt, Artificial Sequence
  LRRK2 RNA guide
ggcuaaagucuugccauucag

SEQ ID NO: 70163 - RNA, 21 nt, Artificial Sequence
  LRRK2 RNA guide
uaaagucuugccauucagauc

SEQ ID NO: 70164 - RNA, 21 nt, Artificial Sequence
  LRRK2 RNA guide
ucacauggcuaaagucuugcc

SEQ ID NO: 70165 - RNA, 21 nt, Artificial Sequence
  LRRK2 RNA guide
uccacccuucacauggcuaaa

SEQ ID NO: 70166 - RNA, 21 nt, Artificial Sequence
  LRRK2 RNA guide
ucugaauggcaagacuuuagc

SEQ ID NO: 70167 - RNA, 21 nt, Artificial Sequence
  LRRK2 RNA guide
ugaauggcaagacuuuagcca

SEQ ID NO: 70168 - RNA, 21 nt, Artificial Sequence
  LRRK2 RNA guide
uggcaagacuuuagccaugug

SEQ ID NO: 70169 - RNA, 21 nt, Artificial Sequence
  LRRK2 RNA guide
uggcuaaagucuugccauuca

SEQ ID NO: 70170 - RNA, 21 nt, Artificial Sequence
  LRRK2 RNA guide
uuagccaugugaaggguggag

SEQ ID NO: 70171 - RNA, 21 nt, Artificial Sequence
  LRRK2 RNA guide
uucacauggcuaaagucuugc

SEQ ID NO: 70172 - RNA, 21 nt, Artificial Sequence
  LRRK2 RNA guide
uuuagccaugugaagggugga

SEQ ID NO: 70173 - RNA, 22 nt, Artificial Sequence
  LRRK2 RNA guide
aagacuuuagccaugugaaggg

SEQ ID NO: 70174 - RNA, 22 nt, Artificial Sequence
  LRRK2 RNA guide
aagaucugaauggcaagacuuu

SEQ ID NO: 70175 - RNA, 22 nt, Artificial Sequence
  LRRK2 RNA guide
aauggcaagacuuuagccaugu

SEQ ID NO: 70176 - RNA, 22 nt, Artificial Sequence
  LRRK2 RNA guide
acauggcuaaagucuugccauu

SEQ ID NO: 70177 - RNA, 22 nt, Artificial Sequence
  LRRK2 RNA guide
acccuucacauggcuaaagucu

SEQ ID NO: 70178 - RNA, 22 nt, Artificial Sequence
  LRRK2 RNA guide
acuuuagccaugugaagggugg

SEQ ID NO: 70179 - RNA, 22 nt, Artificial Sequence
  LRRK2 RNA guide
agacuuuagccaugugaagggu

SEQ ID NO: 70180 - RNA, 22 nt, Artificial Sequence
  LRRK2 RNA guide
agaucugaauggcaagacuuua

SEQ ID NO: 70181 - RNA, 22 nt, Artificial Sequence
  LRRK2 RNA guide
aucugaauggcaagacuuuagc

SEQ ID NO: 70182 - RNA, 22 nt, Artificial Sequence
  LRRK2 RNA guide
auggcaagacuuuagccaugug

SEQ ID NO: 70183 - RNA, 22 nt, Artificial Sequence
  LRRK2 RNA guide
auggcuaaagucuugccauuca

SEQ ID NO: 70184 - RNA, 22 nt, Artificial Sequence
  LRRK2 RNA guide
caagacuuuagccaugugaagg

SEQ ID NO: 70185 - RNA, 22 nt, Artificial Sequence
  LRRK2 RNA guide
cacauggcuaaagucuugccau

SEQ ID NO: 70186 - RNA, 22 nt, Artificial Sequence
  LRRK2 RNA guide
cacccuucacauggcuaaaguc

SEQ ID NO: 70187 - RNA, 22 nt, Artificial Sequence
  LRRK2 RNA guide
cauggcuaaagucuugccauuc

SEQ ID NO: 70188 - RNA, 22 nt, Artificial Sequence
  LRRK2 RNA guide
ccacccuucacauggcuaaagu

SEQ ID NO: 70189 - RNA, 22 nt, Artificial Sequence
  LRRK2 RNA guide
cccuccacccuucacauggcua

SEQ ID NO: 70190 - RNA, 22 nt, Artificial Sequence
  LRRK2 RNA guide
cccuucacauggcuaaagucuu

SEQ ID NO: 70191 - RNA, 22 nt, Artificial Sequence
  LRRK2 RNA guide
ccuccacccuucacauggcuaa

SEQ ID NO: 70192 - RNA, 22 nt, Artificial Sequence
  LRRK2 RNA guide
ccuucacauggcuaaagucuug

SEQ ID NO: 70193 - RNA, 22 nt, Artificial Sequence
  LRRK2 RNA guide
cuaaagucuugccauucagauc

SEQ ID NO: 70194 - RNA, 22 nt, Artificial Sequence
  LRRK2 RNA guide
cuccacccuucacauggcuaaa

SEQ ID NO: 70195 - RNA, 22 nt, Artificial Sequence
  LRRK2 RNA guide
cugaauggcaagacuuuagcca

SEQ ID NO: 70196 - RNA, 22 nt, Artificial Sequence
  LRRK2 RNA guide
cuucacauggcuaaagucuugc

SEQ ID NO: 70197 - RNA, 22 nt, Artificial Sequence
  LRRK2 RNA guide
cuuuagccaugugaagggugga

SEQ ID NO: 70198 - RNA, 22 nt, Artificial Sequence
  LRRK2 RNA guide
gaauggcaagacuuuagccaug

SEQ ID NO: 70199 - RNA, 22 nt, Artificial Sequence
  LRRK2 RNA guide
gacuuuagccaugugaagggug

SEQ ID NO: 70200 - RNA, 22 nt, Artificial Sequence
  LRRK2 RNA guide
gaucugaauggcaagacuuuag

SEQ ID NO: 70201 - RNA, 22 nt, Artificial Sequence
  LRRK2 RNA guide
gcaagacuuuagccaugugaag

SEQ ID NO: 70202 - RNA, 22 nt, Artificial Sequence
  LRRK2 RNA guide
gcuaaagucuugccauucagau

SEQ ID NO: 70203 - RNA, 22 nt, Artificial Sequence
  LRRK2 RNA guide
ggcaagacuuuagccaugugaa

SEQ ID NO: 70204 - RNA, 22 nt, Artificial Sequence
  LRRK2 RNA guide
ggcuaaagucuugccauucaga

SEQ ID NO: 70205 - RNA, 22 nt, Artificial Sequence
  LRRK2 RNA guide
uaaagucuugccauucagaucu

SEQ ID NO: 70206 - RNA, 22 nt, Artificial Sequence
  LRRK2 RNA guide
ucacauggcuaaagucuugcca

SEQ ID NO: 70207 - RNA, 22 nt, Artificial Sequence
  LRRK2 RNA guide
uccacccuucacauggcuaaag

SEQ ID NO: 70208 - RNA, 22 nt, Artificial Sequence
  LRRK2 RNA guide
ucugaauggcaagacuuuagcc

SEQ ID NO: 70209 - RNA, 22 nt, Artificial Sequence
  LRRK2 RNA guide
ugaauggcaagacuuuagccau

SEQ ID NO: 70210 - RNA, 22 nt, Artificial Sequence
  LRRK2 RNA guide
uggcaagacuuuagccauguga

SEQ ID NO: 70211 - RNA, 22 nt, Artificial Sequence
  LRRK2 RNA guide
uggcuaaagucuugccauucag

SEQ ID NO: 70212 - RNA, 22 nt, Artificial Sequence
  LRRK2 RNA guide
uuagccaugugaaggguggagg

SEQ ID NO: 70213 - RNA, 22 nt, Artificial Sequence
  LRRK2 RNA guide
uucacauggcuaaagucuugcc

SEQ ID NO: 70214 - RNA, 22 nt, Artificial Sequence
  LRRK2 RNA guide
uuuagccaugugaaggguggag

SEQ ID NO: 70215 - RNA, 20 nt, Artificial Sequence
  LRRK2 RNA guide
acggccucagcaccugaucu

SEQ ID NO: 70216 - RNA, 20 nt, Artificial Sequence
  LRRK2 RNA guide
acuuccacggccucagcacc

SEQ ID NO: 70217 - RNA, 20 nt, Artificial Sequence
  LRRK2 RNA guide
agaucaggugcugaggccgu

SEQ ID NO: 70218 - RNA, 20 nt, Artificial Sequence
  LRRK2 RNA guide
agcaccugaucugaucaugc

SEQ ID NO: 70219 - RNA, 20 nt, Artificial Sequence
  LRRK2 RNA guide
aggugcugaggccguggaag

SEQ ID NO: 70220 - RNA, 20 nt, Artificial Sequence
  LRRK2 RNA guide
aucagaucaggugcugaggc

SEQ ID NO: 70221 - RNA, 20 nt, Artificial Sequence
  LRRK2 RNA guide
aucaggugcugaggccgugg

SEQ ID NO: 70222 - RNA, 20 nt, Artificial Sequence
  LRRK2 RNA guide
aucuacuuccacggccucag

SEQ ID NO: 70223 - RNA, 20 nt, Artificial Sequence
  LRRK2 RNA guide
augaucagaucaggugcuga

SEQ ID NO: 70224 - RNA, 20 nt, Artificial Sequence
  LRRK2 RNA guide
caccugaucugaucaugccc

SEQ ID NO: 70225 - RNA, 20 nt, Artificial Sequence
  LRRK2 RNA guide
cacggccucagcaccugauc

SEQ ID NO: 70226 - RNA, 20 nt, Artificial Sequence
  LRRK2 RNA guide
cagaucaggugcugaggccg

SEQ ID NO: 70227 - RNA, 20 nt, Artificial Sequence
  LRRK2 RNA guide
cagcaccugaucugaucaug

SEQ ID NO: 70228 - RNA, 20 nt, Artificial Sequence
  LRRK2 RNA guide
caggugcugaggccguggaa

SEQ ID NO: 70229 - RNA, 20 nt, Artificial Sequence
  LRRK2 RNA guide
caucuacuuccacggccuca

SEQ ID NO: 70230 - RNA, 20 nt, Artificial Sequence
  LRRK2 RNA guide
caugaucagaucaggugcug

SEQ ID NO: 70231 - RNA, 20 nt, Artificial Sequence
  LRRK2 RNA guide
ccacggccucagcaccugau

SEQ ID NO: 70232 - RNA, 20 nt, Artificial Sequence
  LRRK2 RNA guide
ccaucuacuuccacggccuc

SEQ ID NO: 70233 - RNA, 20 nt, Artificial Sequence
  LRRK2 RNA guide
cccaucuacuuccacggccu

SEQ ID NO: 70234 - RNA, 20 nt, Artificial Sequence
  LRRK2 RNA guide
ccucagcaccugaucugauc

SEQ ID NO: 70235 - RNA, 20 nt, Artificial Sequence
  LRRK2 RNA guide
ccuggggcaugaucagauca

SEQ ID NO: 70236 - RNA, 20 nt, Artificial Sequence
  LRRK2 RNA guide
cggccucagcaccugaucug

SEQ ID NO: 70237 - RNA, 20 nt, Artificial Sequence
  LRRK2 RNA guide
cuacuuccacggccucagca

SEQ ID NO: 70238 - RNA, 20 nt, Artificial Sequence
  LRRK2 RNA guide
cucagcaccugaucugauca

SEQ ID NO: 70239 - RNA, 20 nt, Artificial Sequence
  LRRK2 RNA guide
cuggggcaugaucagaucag

SEQ ID NO: 70240 - RNA, 20 nt, Artificial Sequence
  LRRK2 RNA guide
cuuccacggccucagcaccu

SEQ ID NO: 70241 - RNA, 20 nt, Artificial Sequence
  LRRK2 RNA guide
gaucagaucaggugcugagg

SEQ ID NO: 70242 - RNA, 20 nt, Artificial Sequence
  LRRK2 RNA guide
gaucaggugcugaggccgug

SEQ ID NO: 70243 - RNA, 20 nt, Artificial Sequence
  LRRK2 RNA guide
gcaccugaucugaucaugcc

SEQ ID NO: 70244 - RNA, 20 nt, Artificial Sequence
  LRRK2 RNA guide
gcaugaucagaucaggugcu

SEQ ID NO: 70245 - RNA, 20 nt, Artificial Sequence
  LRRK2 RNA guide
gccucagcaccugaucugau

SEQ ID NO: 70246 - RNA, 20 nt, Artificial Sequence
  LRRK2 RNA guide
gccuggggcaugaucagauc

SEQ ID NO: 70247 - RNA, 20 nt, Artificial Sequence
  LRRK2 RNA guide
ggcaugaucagaucaggugc

SEQ ID NO: 70248 - RNA, 20 nt, Artificial Sequence
  LRRK2 RNA guide
ggccucagcaccugaucuga

SEQ ID NO: 70249 - RNA, 20 nt, Artificial Sequence
  LRRK2 RNA guide
ggccuggggcaugaucagau

SEQ ID NO: 70250 - RNA, 20 nt, Artificial Sequence
  LRRK2 RNA guide
gggcaugaucagaucaggug

SEQ ID NO: 70251 - RNA, 20 nt, Artificial Sequence
  LRRK2 RNA guide
ggggcaugaucagaucaggu

SEQ ID NO: 70252 - RNA, 20 nt, Artificial Sequence
  LRRK2 RNA guide
ggugcugaggccguggaagu

SEQ ID NO: 70253 - RNA, 20 nt, Artificial Sequence
  LRRK2 RNA guide
gugcugaggccguggaagua

SEQ ID NO: 70254 - RNA, 20 nt, Artificial Sequence
  LRRK2 RNA guide
uacuuccacggccucagcac

SEQ ID NO: 70255 - RNA, 20 nt, Artificial Sequence
  LRRK2 RNA guide
ucagaucaggugcugaggcc

SEQ ID NO: 70256 - RNA, 20 nt, Artificial Sequence
  LRRK2 RNA guide
ucagcaccugaucugaucau

SEQ ID NO: 70257 - RNA, 20 nt, Artificial Sequence
  LRRK2 RNA guide
ucaggugcugaggccgugga

SEQ ID NO: 70258 - RNA, 20 nt, Artificial Sequence
  LRRK2 RNA guide
uccacggccucagcaccuga

SEQ ID NO: 70259 - RNA, 20 nt, Artificial Sequence
  LRRK2 RNA guide
ucuacuuccacggccucagc

SEQ ID NO: 70260 - RNA, 20 nt, Artificial Sequence
  LRRK2 RNA guide
ugaucagaucaggugcugag

SEQ ID NO: 70261 - RNA, 20 nt, Artificial Sequence
  LRRK2 RNA guide
uggggcaugaucagaucagg

SEQ ID NO: 70262 - RNA, 20 nt, Artificial Sequence
  LRRK2 RNA guide
uuccacggccucagcaccug

SEQ ID NO: 70263 - RNA, 21 nt, Artificial Sequence
  LRRK2 RNA guide
acggccucagcaccugaucug

SEQ ID NO: 70264 - RNA, 21 nt, Artificial Sequence
  LRRK2 RNA guide
acuuccacggccucagcaccu

SEQ ID NO: 70265 - RNA, 21 nt, Artificial Sequence
  LRRK2 RNA guide
agaucaggugcugaggccgug

SEQ ID NO: 70266 - RNA, 21 nt, Artificial Sequence
  LRRK2 RNA guide
agcaccugaucugaucaugcc

SEQ ID NO: 70267 - RNA, 21 nt, Artificial Sequence
  LRRK2 RNA guide
aggccuggggcaugaucagau

SEQ ID NO: 70268 - RNA, 21 nt, Artificial Sequence
  LRRK2 RNA guide
aggugcugaggccguggaagu

SEQ ID NO: 70269 - RNA, 21 nt, Artificial Sequence
  LRRK2 RNA guide
aucagaucaggugcugaggcc

SEQ ID NO: 70270 - RNA, 21 nt, Artificial Sequence
  LRRK2 RNA guide
aucaggugcugaggccgugga

SEQ ID NO: 70271 - RNA, 21 nt, Artificial Sequence
  LRRK2 RNA guide
aucuacuuccacggccucagc

SEQ ID NO: 70272 - RNA, 21 nt, Artificial Sequence
  LRRK2 RNA guide
augaucagaucaggugcugag

SEQ ID NO: 70273 - RNA, 21 nt, Artificial Sequence
  LRRK2 RNA guide
caccugaucugaucaugcccc

SEQ ID NO: 70274 - RNA, 21 nt, Artificial Sequence
  LRRK2 RNA guide
cacggccucagcaccugaucu

SEQ ID NO: 70275 - RNA, 21 nt, Artificial Sequence
  LRRK2 RNA guide
cagaucaggugcugaggccgu

SEQ ID NO: 70276 - RNA, 21 nt, Artificial Sequence
  LRRK2 RNA guide
cagcaccugaucugaucaugc

SEQ ID NO: 70277 - RNA, 21 nt, Artificial Sequence
  LRRK2 RNA guide
caggugcugaggccguggaag

SEQ ID NO: 70278 - RNA, 21 nt, Artificial Sequence
  LRRK2 RNA guide
caucuacuuccacggccucag

SEQ ID NO: 70279 - RNA, 21 nt, Artificial Sequence
  LRRK2 RNA guide
caugaucagaucaggugcuga

SEQ ID NO: 70280 - RNA, 21 nt, Artificial Sequence
  LRRK2 RNA guide
ccacggccucagcaccugauc

SEQ ID NO: 70281 - RNA, 21 nt, Artificial Sequence
  LRRK2 RNA guide
ccaucuacuuccacggccuca

SEQ ID NO: 70282 - RNA, 21 nt, Artificial Sequence
  LRRK2 RNA guide
cccaucuacuuccacggccuc

SEQ ID NO: 70283 - RNA, 21 nt, Artificial Sequence
  LRRK2 RNA guide
ccucagcaccugaucugauca

SEQ ID NO: 70284 - RNA, 21 nt, Artificial Sequence
  LRRK2 RNA guide
ccuggggcaugaucagaucag

SEQ ID NO: 70285 - RNA, 21 nt, Artificial Sequence
  LRRK2 RNA guide
cggccucagcaccugaucuga

SEQ ID NO: 70286 - RNA, 21 nt, Artificial Sequence
  LRRK2 RNA guide
cuacuuccacggccucagcac

SEQ ID NO: 70287 - RNA, 21 nt, Artificial Sequence
  LRRK2 RNA guide
cucagcaccugaucugaucau

SEQ ID NO: 70288 - RNA, 21 nt, Artificial Sequence
  LRRK2 RNA guide
cuggggcaugaucagaucagg

SEQ ID NO: 70289 - RNA, 21 nt, Artificial Sequence
  LRRK2 RNA guide
cuuccacggccucagcaccug

SEQ ID NO: 70290 - RNA, 21 nt, Artificial Sequence
  LRRK2 RNA guide
gaucagaucaggugcugaggc

SEQ ID NO: 70291 - RNA, 21 nt, Artificial Sequence
  LRRK2 RNA guide
gaucaggugcugaggccgugg

SEQ ID NO: 70292 - RNA, 21 nt, Artificial Sequence
  LRRK2 RNA guide
gcaccugaucugaucaugccc

SEQ ID NO: 70293 - RNA, 21 nt, Artificial Sequence
  LRRK2 RNA guide
gcaugaucagaucaggugcug

SEQ ID NO: 70294 - RNA, 21 nt, Artificial Sequence
  LRRK2 RNA guide
gccucagcaccugaucugauc

SEQ ID NO: 70295 - RNA, 21 nt, Artificial Sequence
  LRRK2 RNA guide
gccuggggcaugaucagauca

SEQ ID NO: 70296 - RNA, 21 nt, Artificial Sequence
  LRRK2 RNA guide
ggcaugaucagaucaggugcu

SEQ ID NO: 70297 - RNA, 21 nt, Artificial Sequence
  LRRK2 RNA guide
ggccucagcaccugaucugau

SEQ ID NO: 70298 - RNA, 21 nt, Artificial Sequence
  LRRK2 RNA guide
ggccuggggcaugaucagauc

SEQ ID NO: 70299 - RNA, 21 nt, Artificial Sequence
  LRRK2 RNA guide
gggcaugaucagaucaggugc

SEQ ID NO: 70300 - RNA, 21 nt, Artificial Sequence
  LRRK2 RNA guide
ggggcaugaucagaucaggug

SEQ ID NO: 70301 - RNA, 21 nt, Artificial Sequence
  LRRK2 RNA guide
ggugcugaggccguggaagua

SEQ ID NO: 70302 - RNA, 21 nt, Artificial Sequence
  LRRK2 RNA guide
gugcugaggccguggaaguag

SEQ ID NO: 70303 - RNA, 21 nt, Artificial Sequence
  LRRK2 RNA guide
uacuuccacggccucagcacc

SEQ ID NO: 70304 - RNA, 21 nt, Artificial Sequence
  LRRK2 RNA guide
ucagaucaggugcugaggccg

SEQ ID NO: 70305 - RNA, 21 nt, Artificial Sequence
  LRRK2 RNA guide
ucagcaccugaucugaucaug

SEQ ID NO: 70306 - RNA, 21 nt, Artificial Sequence
  LRRK2 RNA guide
ucaggugcugaggccguggaa

SEQ ID NO: 70307 - RNA, 21 nt, Artificial Sequence
  LRRK2 RNA guide
uccacggccucagcaccugau

SEQ ID NO: 70308 - RNA, 21 nt, Artificial Sequence
  LRRK2 RNA guide
ucccaucuacuuccacggccu

SEQ ID NO: 70309 - RNA, 21 nt, Artificial Sequence
  LRRK2 RNA guide
ucuacuuccacggccucagca

SEQ ID NO: 70310 - RNA, 21 nt, Artificial Sequence
  LRRK2 RNA guide
ugaucagaucaggugcugagg

SEQ ID NO: 70311 - RNA, 21 nt, Artificial Sequence
  LRRK2 RNA guide
uggggcaugaucagaucaggu

SEQ ID NO: 70312 - RNA, 21 nt, Artificial Sequence
  LRRK2 RNA guide
uuccacggccucagcaccuga

SEQ ID NO: 70313 - RNA, 22 nt, Artificial Sequence
  LRRK2 RNA guide
aaggccuggggcaugaucagau

SEQ ID NO: 70314 - RNA, 22 nt, Artificial Sequence
  LRRK2 RNA guide
acggccucagcaccugaucuga

SEQ ID NO: 70315 - RNA, 22 nt, Artificial Sequence
  LRRK2 RNA guide
acuuccacggccucagcaccug

SEQ ID NO: 70316 - RNA, 22 nt, Artificial Sequence
  LRRK2 RNA guide
agaucaggugcugaggccgugg

SEQ ID NO: 70317 - RNA, 22 nt, Artificial Sequence
  LRRK2 RNA guide
agcaccugaucugaucaugccc

SEQ ID NO: 70318 - RNA, 22 nt, Artificial Sequence
  LRRK2 RNA guide
aggccuggggcaugaucagauc

SEQ ID NO: 70319 - RNA, 22 nt, Artificial Sequence
  LRRK2 RNA guide
aggugcugaggccguggaagua

SEQ ID NO: 70320 - RNA, 22 nt, Artificial Sequence
  LRRK2 RNA guide
aucagaucaggugcugaggccg

SEQ ID NO: 70321 - RNA, 22 nt, Artificial Sequence
  LRRK2 RNA guide
aucaggugcugaggccguggaa

SEQ ID NO: 70322 - RNA, 22 nt, Artificial Sequence
  LRRK2 RNA guide
aucccaucuacuuccacggccu

SEQ ID NO: 70323 - RNA, 22 nt, Artificial Sequence
  LRRK2 RNA guide
aucuacuuccacggccucagca

SEQ ID NO: 70324 - RNA, 22 nt, Artificial Sequence
  LRRK2 RNA guide
augaucagaucaggugcugagg

SEQ ID NO: 70325 - RNA, 22 nt, Artificial Sequence
  LRRK2 RNA guide
caccugaucugaucaugcccca

SEQ ID NO: 70326 - RNA, 22 nt, Artificial Sequence
  LRRK2 RNA guide
cacggccucagcaccugaucug

SEQ ID NO: 70327 - RNA, 22 nt, Artificial Sequence
  LRRK2 RNA guide
cagaucaggugcugaggccgug

SEQ ID NO: 70328 - RNA, 22 nt, Artificial Sequence
  LRRK2 RNA guide
cagcaccugaucugaucaugcc

SEQ ID NO: 70329 - RNA, 22 nt, Artificial Sequence
  LRRK2 RNA guide
caggugcugaggccguggaagu

SEQ ID NO: 70330 - RNA, 22 nt, Artificial Sequence
  LRRK2 RNA guide
caucuacuuccacggccucagc

SEQ ID NO: 70331 - RNA, 22 nt, Artificial Sequence
  LRRK2 RNA guide
caugaucagaucaggugcugag

SEQ ID NO: 70332 - RNA, 22 nt, Artificial Sequence
  LRRK2 RNA guide
ccacggccucagcaccugaucu

SEQ ID NO: 70333 - RNA, 22 nt, Artificial Sequence
  LRRK2 RNA guide
ccaucuacuuccacggccucag

SEQ ID NO: 70334 - RNA, 22 nt, Artificial Sequence
  LRRK2 RNA guide
cccaucuacuuccacggccuca

SEQ ID NO: 70335 - RNA, 22 nt, Artificial Sequence
  LRRK2 RNA guide
ccucagcaccugaucugaucau

SEQ ID NO: 70336 - RNA, 22 nt, Artificial Sequence
  LRRK2 RNA guide
ccuggggcaugaucagaucagg

SEQ ID NO: 70337 - RNA, 22 nt, Artificial Sequence
  LRRK2 RNA guide
cggccucagcaccugaucugau

SEQ ID NO: 70338 - RNA, 22 nt, Artificial Sequence
  LRRK2 RNA guide
cuacuuccacggccucagcacc

SEQ ID NO: 70339 - RNA, 22 nt, Artificial Sequence
  LRRK2 RNA guide
cucagcaccugaucugaucaug

SEQ ID NO: 70340 - RNA, 22 nt, Artificial Sequence
  LRRK2 RNA guide
cuggggcaugaucagaucaggu

SEQ ID NO: 70341 - RNA, 22 nt, Artificial Sequence
  LRRK2 RNA guide
cuuccacggccucagcaccuga

SEQ ID NO: 70342 - RNA, 22 nt, Artificial Sequence
  LRRK2 RNA guide
gaucagaucaggugcugaggcc

SEQ ID NO: 70343 - RNA, 22 nt, Artificial Sequence
  LRRK2 RNA guide
gaucaggugcugaggccgugga

SEQ ID NO: 70344 - RNA, 22 nt, Artificial Sequence
  LRRK2 RNA guide
gcaccugaucugaucaugcccc

SEQ ID NO: 70345 - RNA, 22 nt, Artificial Sequence
  LRRK2 RNA guide
gcaugaucagaucaggugcuga

SEQ ID NO: 70346 - RNA, 22 nt, Artificial Sequence
  LRRK2 RNA guide
gccucagcaccugaucugauca

SEQ ID NO: 70347 - RNA, 22 nt, Artificial Sequence
  LRRK2 RNA guide
gccuggggcaugaucagaucag

SEQ ID NO: 70348 - RNA, 22 nt, Artificial Sequence
  LRRK2 RNA guide
ggcaugaucagaucaggugcug

SEQ ID NO: 70349 - RNA, 22 nt, Artificial Sequence
  LRRK2 RNA guide
ggccucagcaccugaucugauc

SEQ ID NO: 70350 - RNA, 22 nt, Artificial Sequence
  LRRK2 RNA guide
ggccuggggcaugaucagauca

SEQ ID NO: 70351 - RNA, 22 nt, Artificial Sequence
  LRRK2 RNA guide
gggcaugaucagaucaggugcu

SEQ ID NO: 70352 - RNA, 22 nt, Artificial Sequence
  LRRK2 RNA guide
ggggcaugaucagaucaggugc

SEQ ID NO: 70353 - RNA, 22 nt, Artificial Sequence
  LRRK2 RNA guide
ggugcugaggccguggaaguag

SEQ ID NO: 70354 - RNA, 22 nt, Artificial Sequence
  LRRK2 RNA guide
gugcugaggccguggaaguaga

SEQ ID NO: 70355 - RNA, 22 nt, Artificial Sequence
  LRRK2 RNA guide
uacuuccacggccucagcaccu

SEQ ID NO: 70356 - RNA, 22 nt, Artificial Sequence
  LRRK2 RNA guide
ucagaucaggugcugaggccgu

SEQ ID NO: 70357 - RNA, 22 nt, Artificial Sequence
  LRRK2 RNA guide
ucagcaccugaucugaucaugc

SEQ ID NO: 70358 - RNA, 22 nt, Artificial Sequence
  LRRK2 RNA guide
ucaggugcugaggccguggaag

SEQ ID NO: 70359 - RNA, 22 nt, Artificial Sequence
  LRRK2 RNA guide
uccacggccucagcaccugauc

SEQ ID NO: 70360 - RNA, 22 nt, Artificial Sequence
  LRRK2 RNA guide
ucccaucuacuuccacggccuc

SEQ ID NO: 70361 - RNA, 22 nt, Artificial Sequence
  LRRK2 RNA guide
ucuacuuccacggccucagcac

SEQ ID NO: 70362 - RNA, 22 nt, Artificial Sequence
  LRRK2 RNA guide
ugaucagaucaggugcugaggc

SEQ ID NO: 70363 - RNA, 22 nt, Artificial Sequence
  LRRK2 RNA guide
uggggcaugaucagaucaggug

SEQ ID NO: 70364 - RNA, 22 nt, Artificial Sequence
  LRRK2 RNA guide
uuccacggccucagcaccugau

SEQ ID NO: 70365 - RNA, 20 nt, Artificial Sequence
  LRRK2 RNA guide
acggccucagccccugaucu

SEQ ID NO: 70366 - RNA, 20 nt, Artificial Sequence
  LRRK2 RNA guide
acuuccacggccucagcccc

SEQ ID NO: 70367 - RNA, 20 nt, Artificial Sequence
  LRRK2 RNA guide
agaucaggggcugaggccgu

SEQ ID NO: 70368 - RNA, 20 nt, Artificial Sequence
  LRRK2 RNA guide
agccccugaucugaucaugc

SEQ ID NO: 70369 - RNA, 20 nt, Artificial Sequence
  LRRK2 RNA guide
aggggcugaggccguggaag

SEQ ID NO: 70370 - RNA, 20 nt, Artificial Sequence
  LRRK2 RNA guide
aucagaucaggggcugaggc

SEQ ID NO: 70371 - RNA, 20 nt, Artificial Sequence
  LRRK2 RNA guide
aucaggggcugaggccgugg

SEQ ID NO: 70372 - RNA, 20 nt, Artificial Sequence
  LRRK2 RNA guide
augaucagaucaggggcuga

SEQ ID NO: 70373 - RNA, 20 nt, Artificial Sequence
  LRRK2 RNA guide
cacggccucagccccugauc

SEQ ID NO: 70374 - RNA, 20 nt, Artificial Sequence
  LRRK2 RNA guide
cagaucaggggcugaggccg

SEQ ID NO: 70375 - RNA, 20 nt, Artificial Sequence
  LRRK2 RNA guide
cagccccugaucugaucaug

SEQ ID NO: 70376 - RNA, 20 nt, Artificial Sequence
  LRRK2 RNA guide
caggggcugaggccguggaa

SEQ ID NO: 70377 - RNA, 20 nt, Artificial Sequence
  LRRK2 RNA guide
caugaucagaucaggggcug

SEQ ID NO: 70378 - RNA, 20 nt, Artificial Sequence
  LRRK2 RNA guide
ccacggccucagccccugau

SEQ ID NO: 70379 - RNA, 20 nt, Artificial Sequence
  LRRK2 RNA guide
ccccugaucugaucaugccc

SEQ ID NO: 70380 - RNA, 20 nt, Artificial Sequence
  LRRK2 RNA guide
ccucagccccugaucugauc

SEQ ID NO: 70381 - RNA, 20 nt, Artificial Sequence
  LRRK2 RNA guide
cggccucagccccugaucug

SEQ ID NO: 70382 - RNA, 20 nt, Artificial Sequence
  LRRK2 RNA guide
cuacuuccacggccucagcc

SEQ ID NO: 70383 - RNA, 20 nt, Artificial Sequence
  LRRK2 RNA guide
cucagccccugaucugauca

SEQ ID NO: 70384 - RNA, 20 nt, Artificial Sequence
  LRRK2 RNA guide
cuuccacggccucagccccu

SEQ ID NO: 70385 - RNA, 20 nt, Artificial Sequence
  LRRK2 RNA guide
gaucagaucaggggcugagg

SEQ ID NO: 70386 - RNA, 20 nt, Artificial Sequence
  LRRK2 RNA guide
gaucaggggcugaggccgug

SEQ ID NO: 70387 - RNA, 20 nt, Artificial Sequence
  LRRK2 RNA guide
gcaugaucagaucaggggcu

SEQ ID NO: 70388 - RNA, 20 nt, Artificial Sequence
  LRRK2 RNA guide
gccccugaucugaucaugcc

SEQ ID NO: 70389 - RNA, 20 nt, Artificial Sequence
  LRRK2 RNA guide
gccucagccccugaucugau

SEQ ID NO: 70390 - RNA, 20 nt, Artificial Sequence
  LRRK2 RNA guide
ggcaugaucagaucaggggc

SEQ ID NO: 70391 - RNA, 20 nt, Artificial Sequence
  LRRK2 RNA guide
ggccucagccccugaucuga

SEQ ID NO: 70392 - RNA, 20 nt, Artificial Sequence
  LRRK2 RNA guide
gggcaugaucagaucagggg

SEQ ID NO: 70393 - RNA, 20 nt, Artificial Sequence
  LRRK2 RNA guide
gggcugaggccguggaagua

SEQ ID NO: 70394 - RNA, 20 nt, Artificial Sequence
  LRRK2 RNA guide
ggggcaugaucagaucaggg

SEQ ID NO: 70395 - RNA, 20 nt, Artificial Sequence
  LRRK2 RNA guide
ggggcugaggccguggaagu

SEQ ID NO: 70396 - RNA, 20 nt, Artificial Sequence
  LRRK2 RNA guide
uacuuccacggccucagccc

SEQ ID NO: 70397 - RNA, 20 nt, Artificial Sequence
  LRRK2 RNA guide
ucagaucaggggcugaggcc

SEQ ID NO: 70398 - RNA, 20 nt, Artificial Sequence
  LRRK2 RNA guide
ucagccccugaucugaucau

SEQ ID NO: 70399 - RNA, 20 nt, Artificial Sequence
  LRRK2 RNA guide
ucaggggcugaggccgugga

SEQ ID NO: 70400 - RNA, 20 nt, Artificial Sequence
  LRRK2 RNA guide
uccacggccucagccccuga

SEQ ID NO: 70401 - RNA, 20 nt, Artificial Sequence
  LRRK2 RNA guide
ugaucagaucaggggcugag

SEQ ID NO: 70402 - RNA, 20 nt, Artificial Sequence
  LRRK2 RNA guide
uuccacggccucagccccug

SEQ ID NO: 70403 - RNA, 21 nt, Artificial Sequence
  LRRK2 RNA guide
acggccucagccccugaucug

SEQ ID NO: 70404 - RNA, 21 nt, Artificial Sequence
  LRRK2 RNA guide
acuuccacggccucagccccu

SEQ ID NO: 70405 - RNA, 21 nt, Artificial Sequence
  LRRK2 RNA guide
agaucaggggcugaggccgug

SEQ ID NO: 70406 - RNA, 21 nt, Artificial Sequence
  LRRK2 RNA guide
agccccugaucugaucaugcc

SEQ ID NO: 70407 - RNA, 21 nt, Artificial Sequence
  LRRK2 RNA guide
aggggcugaggccguggaagu

SEQ ID NO: 70408 - RNA, 21 nt, Artificial Sequence
  LRRK2 RNA guide
aucagaucaggggcugaggcc

SEQ ID NO: 70409 - RNA, 21 nt, Artificial Sequence
  LRRK2 RNA guide
aucaggggcugaggccgugga

SEQ ID NO: 70410 - RNA, 21 nt, Artificial Sequence
  LRRK2 RNA guide
augaucagaucaggggcugag

SEQ ID NO: 70411 - RNA, 21 nt, Artificial Sequence
  LRRK2 RNA guide
cacggccucagccccugaucu

SEQ ID NO: 70412 - RNA, 21 nt, Artificial Sequence
  LRRK2 RNA guide
cagaucaggggcugaggccgu

SEQ ID NO: 70413 - RNA, 21 nt, Artificial Sequence
  LRRK2 RNA guide
cagccccugaucugaucaugc

SEQ ID NO: 70414 - RNA, 21 nt, Artificial Sequence
  LRRK2 RNA guide
caggggcugaggccguggaag

SEQ ID NO: 70415 - RNA, 21 nt, Artificial Sequence
  LRRK2 RNA guide
caugaucagaucaggggcuga

SEQ ID NO: 70416 - RNA, 21 nt, Artificial Sequence
  LRRK2 RNA guide
ccacggccucagccccugauc

SEQ ID NO: 70417 - RNA, 21 nt, Artificial Sequence
  LRRK2 RNA guide
ccccugaucugaucaugcccc

SEQ ID NO: 70418 - RNA, 21 nt, Artificial Sequence
  LRRK2 RNA guide
ccucagccccugaucugauca

SEQ ID NO: 70419 - RNA, 21 nt, Artificial Sequence
  LRRK2 RNA guide
cggccucagccccugaucuga

SEQ ID NO: 70420 - RNA, 21 nt, Artificial Sequence
  LRRK2 RNA guide
cuacuuccacggccucagccc

SEQ ID NO: 70421 - RNA, 21 nt, Artificial Sequence
  LRRK2 RNA guide
cucagccccugaucugaucau

SEQ ID NO: 70422 - RNA, 21 nt, Artificial Sequence
  LRRK2 RNA guide
cuuccacggccucagccccug

SEQ ID NO: 70423 - RNA, 21 nt, Artificial Sequence
  LRRK2 RNA guide
gaucagaucaggggcugaggc

SEQ ID NO: 70424 - RNA, 21 nt, Artificial Sequence
  LRRK2 RNA guide
gaucaggggcugaggccgugg

SEQ ID NO: 70425 - RNA, 21 nt, Artificial Sequence
  LRRK2 RNA guide
gcaugaucagaucaggggcug

SEQ ID NO: 70426 - RNA, 21 nt, Artificial Sequence
  LRRK2 RNA guide
gccccugaucugaucaugccc

SEQ ID NO: 70427 - RNA, 21 nt, Artificial Sequence
  LRRK2 RNA guide
gccucagccccugaucugauc

SEQ ID NO: 70428 - RNA, 21 nt, Artificial Sequence
  LRRK2 RNA guide
ggcaugaucagaucaggggcu

SEQ ID NO: 70429 - RNA, 21 nt, Artificial Sequence
  LRRK2 RNA guide
ggccucagccccugaucugau

SEQ ID NO: 70430 - RNA, 21 nt, Artificial Sequence
  LRRK2 RNA guide
gggcaugaucagaucaggggc

SEQ ID NO: 70431 - RNA, 21 nt, Artificial Sequence
  LRRK2 RNA guide
gggcugaggccguggaaguag

SEQ ID NO: 70432 - RNA, 21 nt, Artificial Sequence
  LRRK2 RNA guide
ggggcaugaucagaucagggg

SEQ ID NO: 70433 - RNA, 21 nt, Artificial Sequence
  LRRK2 RNA guide
ggggcugaggccguggaagua

SEQ ID NO: 70434 - RNA, 21 nt, Artificial Sequence
  LRRK2 RNA guide
uacuuccacggccucagcccc

SEQ ID NO: 70435 - RNA, 21 nt, Artificial Sequence
  LRRK2 RNA guide
ucagaucaggggcugaggccg

SEQ ID NO: 70436 - RNA, 21 nt, Artificial Sequence
  LRRK2 RNA guide
ucagccccugaucugaucaug

SEQ ID NO: 70437 - RNA, 21 nt, Artificial Sequence
  LRRK2 RNA guide
ucaggggcugaggccguggaa

SEQ ID NO: 70438 - RNA, 21 nt, Artificial Sequence
  LRRK2 RNA guide
uccacggccucagccccugau

SEQ ID NO: 70439 - RNA, 21 nt, Artificial Sequence
  LRRK2 RNA guide
ucuacuuccacggccucagcc

SEQ ID NO: 70440 - RNA, 21 nt, Artificial Sequence
  LRRK2 RNA guide
ugaucagaucaggggcugagg

SEQ ID NO: 70441 - RNA, 21 nt, Artificial Sequence
  LRRK2 RNA guide
uggggcaugaucagaucaggg

SEQ ID NO: 70442 - RNA, 21 nt, Artificial Sequence
  LRRK2 RNA guide
uuccacggccucagccccuga

SEQ ID NO: 70443 - RNA, 22 nt, Artificial Sequence
  LRRK2 RNA guide
acggccucagccccugaucuga

SEQ ID NO: 70444 - RNA, 22 nt, Artificial Sequence
  LRRK2 RNA guide
acuuccacggccucagccccug

SEQ ID NO: 70445 - RNA, 22 nt, Artificial Sequence
  LRRK2 RNA guide
agaucaggggcugaggccgugg

SEQ ID NO: 70446 - RNA, 22 nt, Artificial Sequence
  LRRK2 RNA guide
agccccugaucugaucaugccc

SEQ ID NO: 70447 - RNA, 22 nt, Artificial Sequence
  LRRK2 RNA guide
aggggcugaggccguggaagua

SEQ ID NO: 70448 - RNA, 22 nt, Artificial Sequence
  LRRK2 RNA guide
aucagaucaggggcugaggccg

SEQ ID NO: 70449 - RNA, 22 nt, Artificial Sequence
  LRRK2 RNA guide
aucaggggcugaggccguggaa

SEQ ID NO: 70450 - RNA, 22 nt, Artificial Sequence
  LRRK2 RNA guide
aucuacuuccacggccucagcc

SEQ ID NO: 70451 - RNA, 22 nt, Artificial Sequence
  LRRK2 RNA guide
augaucagaucaggggcugagg

SEQ ID NO: 70452 - RNA, 22 nt, Artificial Sequence
  LRRK2 RNA guide
cacggccucagccccugaucug

SEQ ID NO: 70453 - RNA, 22 nt, Artificial Sequence
  LRRK2 RNA guide
cagaucaggggcugaggccgug

SEQ ID NO: 70454 - RNA, 22 nt, Artificial Sequence
  LRRK2 RNA guide
cagccccugaucugaucaugcc

SEQ ID NO: 70455 - RNA, 22 nt, Artificial Sequence
  LRRK2 RNA guide
caggggcugaggccguggaagu

SEQ ID NO: 70456 - RNA, 22 nt, Artificial Sequence
  LRRK2 RNA guide
caugaucagaucaggggcugag

SEQ ID NO: 70457 - RNA, 22 nt, Artificial Sequence
  LRRK2 RNA guide
ccacggccucagccccugaucu

SEQ ID NO: 70458 - RNA, 22 nt, Artificial Sequence
  LRRK2 RNA guide
ccccugaucugaucaugcccca

SEQ ID NO: 70459 - RNA, 22 nt, Artificial Sequence
  LRRK2 RNA guide
ccucagccccugaucugaucau

SEQ ID NO: 70460 - RNA, 22 nt, Artificial Sequence
  LRRK2 RNA guide
cggccucagccccugaucugau

SEQ ID NO: 70461 - RNA, 22 nt, Artificial Sequence
  LRRK2 RNA guide
cuacuuccacggccucagcccc

SEQ ID NO: 70462 - RNA, 22 nt, Artificial Sequence
  LRRK2 RNA guide
cucagccccugaucugaucaug

SEQ ID NO: 70463 - RNA, 22 nt, Artificial Sequence
  LRRK2 RNA guide
cuggggcaugaucagaucaggg

SEQ ID NO: 70464 - RNA, 22 nt, Artificial Sequence
  LRRK2 RNA guide
cuuccacggccucagccccuga

SEQ ID NO: 70465 - RNA, 22 nt, Artificial Sequence
  LRRK2 RNA guide
gaucagaucaggggcugaggcc

SEQ ID NO: 70466 - RNA, 22 nt, Artificial Sequence
  LRRK2 RNA guide
gaucaggggcugaggccgugga

SEQ ID NO: 70467 - RNA, 22 nt, Artificial Sequence
  LRRK2 RNA guide
gcaugaucagaucaggggcuga

SEQ ID NO: 70468 - RNA, 22 nt, Artificial Sequence
  LRRK2 RNA guide
gccccugaucugaucaugcccc

SEQ ID NO: 70469 - RNA, 22 nt, Artificial Sequence
  LRRK2 RNA guide
gccucagccccugaucugauca

SEQ ID NO: 70470 - RNA, 22 nt, Artificial Sequence
  LRRK2 RNA guide
ggcaugaucagaucaggggcug

SEQ ID NO: 70471 - RNA, 22 nt, Artificial Sequence
  LRRK2 RNA guide
ggccucagccccugaucugauc

SEQ ID NO: 70472 - RNA, 22 nt, Artificial Sequence
  LRRK2 RNA guide
gggcaugaucagaucaggggcu

SEQ ID NO: 70473 - RNA, 22 nt, Artificial Sequence
  LRRK2 RNA guide
gggcugaggccguggaaguaga

SEQ ID NO: 70474 - RNA, 22 nt, Artificial Sequence
  LRRK2 RNA guide
ggggcaugaucagaucaggggc

SEQ ID NO: 70475 - RNA, 22 nt, Artificial Sequence
  LRRK2 RNA guide
ggggcugaggccguggaaguag

SEQ ID NO: 70476 - RNA, 22 nt, Artificial Sequence
  LRRK2 RNA guide
uacuuccacggccucagccccu

SEQ ID NO: 70477 - RNA, 22 nt, Artificial Sequence
  LRRK2 RNA guide
ucagaucaggggcugaggccgu

SEQ ID NO: 70478 - RNA, 22 nt, Artificial Sequence
  LRRK2 RNA guide
ucagccccugaucugaucaugc

SEQ ID NO: 70479 - RNA, 22 nt, Artificial Sequence
  LRRK2 RNA guide
ucaggggcugaggccguggaag

SEQ ID NO: 70480 - RNA, 22 nt, Artificial Sequence
  LRRK2 RNA guide
uccacggccucagccccugauc

SEQ ID NO: 70481 - RNA, 22 nt, Artificial Sequence
  LRRK2 RNA guide
ucuacuuccacggccucagccc

SEQ ID NO: 70482 - RNA, 22 nt, Artificial Sequence
  LRRK2 RNA guide
ugaucagaucaggggcugaggc

SEQ ID NO: 70483 - RNA, 22 nt, Artificial Sequence
  LRRK2 RNA guide
uggggcaugaucagaucagggg

SEQ ID NO: 70484 - RNA, 22 nt, Artificial Sequence
  LRRK2 RNA guide
uuccacggccucagccccugau

SEQ ID NO: 70485 - RNA, 20 nt, Artificial Sequence
  LRRK2 RNA guide
aaauuugugacugcacaagg

SEQ ID NO: 70486 - RNA, 20 nt, Artificial Sequence
  LRRK2 RNA guide
aauuugugacugcacaaggg

SEQ ID NO: 70487 - RNA, 20 nt, Artificial Sequence
  LRRK2 RNA guide
accccuugugcagucacaaa

SEQ ID NO: 70488 - RNA, 20 nt, Artificial Sequence
  LRRK2 RNA guide
aggucaaaaguuauaugcaa

SEQ ID NO: 70489 - RNA, 20 nt, Artificial Sequence
  LRRK2 RNA guide
auaugcaaauuugugacugc

SEQ ID NO: 70490 - RNA, 20 nt, Artificial Sequence
  LRRK2 RNA guide
augcaaauuugugacugcac

SEQ ID NO: 70491 - RNA, 20 nt, Artificial Sequence
  LRRK2 RNA guide
auuugugacugcacaagggg

SEQ ID NO: 70492 - RNA, 20 nt, Artificial Sequence
  LRRK2 RNA guide
caaauuugugacugcacaag

SEQ ID NO: 70493 - RNA, 20 nt, Artificial Sequence
  LRRK2 RNA guide
cagucacaaauuugcauaua

SEQ ID NO: 70494 - RNA, 20 nt, Artificial Sequence
  LRRK2 RNA guide
ccccuugugcagucacaaau

SEQ ID NO: 70495 - RNA, 20 nt, Artificial Sequence
  LRRK2 RNA guide
cccuugugcagucacaaauu

SEQ ID NO: 70496 - RNA, 20 nt, Artificial Sequence
  LRRK2 RNA guide
ccuugugcagucacaaauuu

SEQ ID NO: 70497 - RNA, 20 nt, Artificial Sequence
  LRRK2 RNA guide
cugaccccuugugcagucac

SEQ ID NO: 70498 - RNA, 20 nt, Artificial Sequence
  LRRK2 RNA guide
cuugugcagucacaaauuug

SEQ ID NO: 70499 - RNA, 20 nt, Artificial Sequence
  LRRK2 RNA guide
gaccccuugugcagucacaa

SEQ ID NO: 70500 - RNA, 20 nt, Artificial Sequence
  LRRK2 RNA guide
gcaaauuugugacugcacaa

SEQ ID NO: 70501 - RNA, 20 nt, Artificial Sequence
  LRRK2 RNA guide
gcagucacaaauuugcauau

SEQ ID NO: 70502 - RNA, 20 nt, Artificial Sequence
  LRRK2 RNA guide
gcugaccccuugugcaguca

SEQ ID NO: 70503 - RNA, 20 nt, Artificial Sequence
  LRRK2 RNA guide
gggugcugaccccuugugca

SEQ ID NO: 70504 - RNA, 20 nt, Artificial Sequence
  LRRK2 RNA guide
ggucaaaaguuauaugcaaa

SEQ ID NO: 70505 - RNA, 20 nt, Artificial Sequence
  LRRK2 RNA guide
ggugcugaccccuugugcag

SEQ ID NO: 70506 - RNA, 20 nt, Artificial Sequence
  LRRK2 RNA guide
gucacaaauuugcauauaac

SEQ ID NO: 70507 - RNA, 20 nt, Artificial Sequence
  LRRK2 RNA guide
gugcagucacaaauuugcau

SEQ ID NO: 70508 - RNA, 20 nt, Artificial Sequence
  LRRK2 RNA guide
gugcugaccccuugugcagu

SEQ ID NO: 70509 - RNA, 20 nt, Artificial Sequence
  LRRK2 RNA guide
guuauaugcaaauuugugac

SEQ ID NO: 70510 - RNA, 20 nt, Artificial Sequence
  LRRK2 RNA guide
uauaugcaaauuugugacug

SEQ ID NO: 70511 - RNA, 20 nt, Artificial Sequence
  LRRK2 RNA guide
uaugcaaauuugugacugca

SEQ ID NO: 70512 - RNA, 20 nt, Artificial Sequence
  LRRK2 RNA guide
ugaccccuugugcagucaca

SEQ ID NO: 70513 - RNA, 20 nt, Artificial Sequence
  LRRK2 RNA guide
ugcaaauuugugacugcaca

SEQ ID NO: 70514 - RNA, 20 nt, Artificial Sequence
  LRRK2 RNA guide
ugcagucacaaauuugcaua

SEQ ID NO: 70515 - RNA, 20 nt, Artificial Sequence
  LRRK2 RNA guide
ugcugaccccuugugcaguc

SEQ ID NO: 70516 - RNA, 20 nt, Artificial Sequence
  LRRK2 RNA guide
ugugacugcacaagggguca

SEQ ID NO: 70517 - RNA, 20 nt, Artificial Sequence
  LRRK2 RNA guide
ugugcagucacaaauuugca

SEQ ID NO: 70518 - RNA, 20 nt, Artificial Sequence
  LRRK2 RNA guide
uugugacugcacaagggguc

SEQ ID NO: 70519 - RNA, 20 nt, Artificial Sequence
  LRRK2 RNA guide
uugugcagucacaaauuugc

SEQ ID NO: 70520 - RNA, 20 nt, Artificial Sequence
  LRRK2 RNA guide
uuugugacugcacaaggggu

SEQ ID NO: 70521 - RNA, 21 nt, Artificial Sequence
  LRRK2 RNA guide
aaauuugugacugcacaaggg

SEQ ID NO: 70522 - RNA, 21 nt, Artificial Sequence
  LRRK2 RNA guide
aauuugugacugcacaagggg

SEQ ID NO: 70523 - RNA, 21 nt, Artificial Sequence
  LRRK2 RNA guide
accccuugugcagucacaaau

SEQ ID NO: 70524 - RNA, 21 nt, Artificial Sequence
  LRRK2 RNA guide
auaugcaaauuugugacugca

SEQ ID NO: 70525 - RNA, 21 nt, Artificial Sequence
  LRRK2 RNA guide
augcaaauuugugacugcaca

SEQ ID NO: 70526 - RNA, 21 nt, Artificial Sequence
  LRRK2 RNA guide
auuugugacugcacaaggggu

SEQ ID NO: 70527 - RNA, 21 nt, Artificial Sequence
  LRRK2 RNA guide
caaauuugugacugcacaagg

SEQ ID NO: 70528 - RNA, 21 nt, Artificial Sequence
  LRRK2 RNA guide
ccccuugugcagucacaaauu

SEQ ID NO: 70529 - RNA, 21 nt, Artificial Sequence
  LRRK2 RNA guide
cccuugugcagucacaaauuu

SEQ ID NO: 70530 - RNA, 21 nt, Artificial Sequence
  LRRK2 RNA guide
ccuugugcagucacaaauuug

SEQ ID NO: 70531 - RNA, 21 nt, Artificial Sequence
  LRRK2 RNA guide
cugaccccuugugcagucaca

SEQ ID NO: 70532 - RNA, 21 nt, Artificial Sequence
  LRRK2 RNA guide
cuugugcagucacaaauuugc

SEQ ID NO: 70533 - RNA, 21 nt, Artificial Sequence
  LRRK2 RNA guide
gaccccuugugcagucacaaa

SEQ ID NO: 70534 - RNA, 21 nt, Artificial Sequence
  LRRK2 RNA guide
gaggucaaaaguuauaugcaa

SEQ ID NO: 70535 - RNA, 21 nt, Artificial Sequence
  LRRK2 RNA guide
gcaaauuugugacugcacaag

SEQ ID NO: 70536 - RNA, 21 nt, Artificial Sequence
  LRRK2 RNA guide
gcagucacaaauuugcauaua

SEQ ID NO: 70537 - RNA, 21 nt, Artificial Sequence
  LRRK2 RNA guide
gcugaccccuugugcagucac

SEQ ID NO: 70538 - RNA, 21 nt, Artificial Sequence
  LRRK2 RNA guide
ggggugcugaccccuugugca

SEQ ID NO: 70539 - RNA, 21 nt, Artificial Sequence
  LRRK2 RNA guide
gggugcugaccccuugugcag

SEQ ID NO: 70540 - RNA, 21 nt, Artificial Sequence
  LRRK2 RNA guide
ggugcugaccccuugugcagu

SEQ ID NO: 70541 - RNA, 21 nt, Artificial Sequence
  LRRK2 RNA guide
gugcagucacaaauuugcaua

SEQ ID NO: 70542 - RNA, 21 nt, Artificial Sequence
  LRRK2 RNA guide
gugcugaccccuugugcaguc

SEQ ID NO: 70543 - RNA, 21 nt, Artificial Sequence
  LRRK2 RNA guide
uauaugcaaauuugugacugc

SEQ ID NO: 70544 - RNA, 21 nt, Artificial Sequence
  LRRK2 RNA guide
uaugcaaauuugugacugcac

SEQ ID NO: 70545 - RNA, 21 nt, Artificial Sequence
  LRRK2 RNA guide
ugaccccuugugcagucacaa

SEQ ID NO: 70546 - RNA, 21 nt, Artificial Sequence
  LRRK2 RNA guide
ugcaaauuugugacugcacaa

SEQ ID NO: 70547 - RNA, 21 nt, Artificial Sequence
  LRRK2 RNA guide
ugcagucacaaauuugcauau

SEQ ID NO: 70548 - RNA, 21 nt, Artificial Sequence
  LRRK2 RNA guide
ugcugaccccuugugcaguca

SEQ ID NO: 70549 - RNA, 21 nt, Artificial Sequence
  LRRK2 RNA guide
ugugacugcacaaggggucag

SEQ ID NO: 70550 - RNA, 21 nt, Artificial Sequence
  LRRK2 RNA guide
ugugcagucacaaauuugcau

SEQ ID NO: 70551 - RNA, 21 nt, Artificial Sequence
  LRRK2 RNA guide
uugugacugcacaagggguca

SEQ ID NO: 70552 - RNA, 21 nt, Artificial Sequence
  LRRK2 RNA guide
uugugcagucacaaauuugca

SEQ ID NO: 70553 - RNA, 21 nt, Artificial Sequence
  LRRK2 RNA guide
uuugugacugcacaagggguc

SEQ ID NO: 70554 - RNA, 22 nt, Artificial Sequence
  LRRK2 RNA guide
aaauuugugacugcacaagggg

SEQ ID NO: 70555 - RNA, 22 nt, Artificial Sequence
  LRRK2 RNA guide
aauuugugacugcacaaggggu

SEQ ID NO: 70556 - RNA, 22 nt, Artificial Sequence
  LRRK2 RNA guide
accccuugugcagucacaaauu

SEQ ID NO: 70557 - RNA, 22 nt, Artificial Sequence
  LRRK2 RNA guide
auaugcaaauuugugacugcac

SEQ ID NO: 70558 - RNA, 22 nt, Artificial Sequence
  LRRK2 RNA guide
augcaaauuugugacugcacaa

SEQ ID NO: 70559 - RNA, 22 nt, Artificial Sequence
  LRRK2 RNA guide
auuugugacugcacaagggguc

SEQ ID NO: 70560 - RNA, 22 nt, Artificial Sequence
  LRRK2 RNA guide
caaauuugugacugcacaaggg

SEQ ID NO: 70561 - RNA, 22 nt, Artificial Sequence
  LRRK2 RNA guide
cagucacaaauuugcauauaac

SEQ ID NO: 70562 - RNA, 22 nt, Artificial Sequence
  LRRK2 RNA guide
ccccuugugcagucacaaauuu

SEQ ID NO: 70563 - RNA, 22 nt, Artificial Sequence
  LRRK2 RNA guide
cccuugugcagucacaaauuug

SEQ ID NO: 70564 - RNA, 22 nt, Artificial Sequence
  LRRK2 RNA guide
ccuugugcagucacaaauuugc

SEQ ID NO: 70565 - RNA, 22 nt, Artificial Sequence
  LRRK2 RNA guide
cugaccccuugugcagucacaa

SEQ ID NO: 70566 - RNA, 22 nt, Artificial Sequence
  LRRK2 RNA guide
cuugugcagucacaaauuugca

SEQ ID NO: 70567 - RNA, 22 nt, Artificial Sequence
  LRRK2 RNA guide
gaccccuugugcagucacaaau

SEQ ID NO: 70568 - RNA, 22 nt, Artificial Sequence
  LRRK2 RNA guide
gaggucaaaaguuauaugcaaa

SEQ ID NO: 70569 - RNA, 22 nt, Artificial Sequence
  LRRK2 RNA guide
gcaaauuugugacugcacaagg

SEQ ID NO: 70570 - RNA, 22 nt, Artificial Sequence
  LRRK2 RNA guide
gcagucacaaauuugcauauaa

SEQ ID NO: 70571 - RNA, 22 nt, Artificial Sequence
  LRRK2 RNA guide
gcugaccccuugugcagucaca

SEQ ID NO: 70572 - RNA, 22 nt, Artificial Sequence
  LRRK2 RNA guide
ggaggucaaaaguuauaugcaa

SEQ ID NO: 70573 - RNA, 22 nt, Artificial Sequence
  LRRK2 RNA guide
ggggugcugaccccuugugcag

SEQ ID NO: 70574 - RNA, 22 nt, Artificial Sequence
  LRRK2 RNA guide
gggugcugaccccuugugcagu

SEQ ID NO: 70575 - RNA, 22 nt, Artificial Sequence
  LRRK2 RNA guide
ggugcugaccccuugugcaguc

SEQ ID NO: 70576 - RNA, 22 nt, Artificial Sequence
  LRRK2 RNA guide
gugcagucacaaauuugcauau

SEQ ID NO: 70577 - RNA, 22 nt, Artificial Sequence
  LRRK2 RNA guide
gugcugaccccuugugcaguca

SEQ ID NO: 70578 - RNA, 22 nt, Artificial Sequence
  LRRK2 RNA guide
guuauaugcaaauuugugacug

SEQ ID NO: 70579 - RNA, 22 nt, Artificial Sequence
  LRRK2 RNA guide
uauaugcaaauuugugacugca

SEQ ID NO: 70580 - RNA, 22 nt, Artificial Sequence
  LRRK2 RNA guide
uaugcaaauuugugacugcaca

SEQ ID NO: 70581 - RNA, 22 nt, Artificial Sequence
  LRRK2 RNA guide
ugaccccuugugcagucacaaa

SEQ ID NO: 70582 - RNA, 22 nt, Artificial Sequence
  LRRK2 RNA guide
ugcaaauuugugacugcacaag

SEQ ID NO: 70583 - RNA, 22 nt, Artificial Sequence
  LRRK2 RNA guide
ugcagucacaaauuugcauaua

SEQ ID NO: 70584 - RNA, 22 nt, Artificial Sequence
  LRRK2 RNA guide
ugcugaccccuugugcagucac

SEQ ID NO: 70585 - RNA, 22 nt, Artificial Sequence
  LRRK2 RNA guide
uggggugcugaccccuugugca

SEQ ID NO: 70586 - RNA, 22 nt, Artificial Sequence
  LRRK2 RNA guide
ugugacugcacaaggggucagc

SEQ ID NO: 70587 - RNA, 22 nt, Artificial Sequence
  LRRK2 RNA guide
ugugcagucacaaauuugcaua

SEQ ID NO: 70588 - RNA, 22 nt, Artificial Sequence
  LRRK2 RNA guide
uuauaugcaaauuugugacugc

SEQ ID NO: 70589 - RNA, 22 nt, Artificial Sequence
  LRRK2 RNA guide
uugugacugcacaaggggucag

SEQ ID NO: 70590 - RNA, 22 nt, Artificial Sequence
  LRRK2 RNA guide
uugugcagucacaaauuugcau

SEQ ID NO: 70591 - RNA, 22 nt, Artificial Sequence
  LRRK2 RNA guide
uuugugacugcacaagggguca

SEQ ID NO: 70592 - RNA, 20 nt, Artificial Sequence
  LRRK2 RNA guide
aaauuuuugacugcacaagg

SEQ ID NO: 70593 - RNA, 20 nt, Artificial Sequence
  LRRK2 RNA guide
aauuuuugacugcacaaggg

SEQ ID NO: 70594 - RNA, 20 nt, Artificial Sequence
  LRRK2 RNA guide
accccuugugcagucaaaaa

SEQ ID NO: 70595 - RNA, 20 nt, Artificial Sequence
  LRRK2 RNA guide
auaugcaaauuuuugacugc

SEQ ID NO: 70596 - RNA, 20 nt, Artificial Sequence
  LRRK2 RNA guide
auuuuugacugcacaagggg

SEQ ID NO: 70597 - RNA, 20 nt, Artificial Sequence
  LRRK2 RNA guide
caaauuuuugacugcacaag

SEQ ID NO: 70598 - RNA, 20 nt, Artificial Sequence
  LRRK2 RNA guide
ccccuugugcagucaaaaau

SEQ ID NO: 70599 - RNA, 20 nt, Artificial Sequence
  LRRK2 RNA guide
cugaccccuugugcagucaa

SEQ ID NO: 70600 - RNA, 20 nt, Artificial Sequence
  LRRK2 RNA guide
cuugugcagucaaaaauuug

SEQ ID NO: 70601 - RNA, 20 nt, Artificial Sequence
  LRRK2 RNA guide
gaccccuugugcagucaaaa

SEQ ID NO: 70602 - RNA, 20 nt, Artificial Sequence
  LRRK2 RNA guide
gcaaauuuuugacugcacaa

SEQ ID NO: 70603 - RNA, 20 nt, Artificial Sequence
  LRRK2 RNA guide
gcagucaaaaauuugcauau

SEQ ID NO: 70604 - RNA, 20 nt, Artificial Sequence
  LRRK2 RNA guide
ugaccccuugugcagucaaa

SEQ ID NO: 70605 - RNA, 20 nt, Artificial Sequence
  LRRK2 RNA guide
ugcaaauuuuugacugcaca

SEQ ID NO: 70606 - RNA, 20 nt, Artificial Sequence
  LRRK2 RNA guide
ugcagucaaaaauuugcaua

SEQ ID NO: 70607 - RNA, 20 nt, Artificial Sequence
  LRRK2 RNA guide
uugugcagucaaaaauuugc

SEQ ID NO: 70608 - RNA, 20 nt, Artificial Sequence
  LRRK2 RNA guide
uuugacugcacaagggguca

SEQ ID NO: 70609 - RNA, 20 nt, Artificial Sequence
  LRRK2 RNA guide
uuuugacugcacaagggguc

SEQ ID NO: 70610 - RNA, 20 nt, Artificial Sequence
  LRRK2 RNA guide
uuuuugacugcacaaggggu

SEQ ID NO: 70611 - RNA, 21 nt, Artificial Sequence
  LRRK2 RNA guide
aaauuuuugacugcacaaggg

SEQ ID NO: 70612 - RNA, 21 nt, Artificial Sequence
  LRRK2 RNA guide
aauuuuugacugcacaagggg

SEQ ID NO: 70613 - RNA, 21 nt, Artificial Sequence
  LRRK2 RNA guide
accccuugugcagucaaaaau

SEQ ID NO: 70614 - RNA, 21 nt, Artificial Sequence
  LRRK2 RNA guide
augcaaauuuuugacugcaca

SEQ ID NO: 70615 - RNA, 21 nt, Artificial Sequence
  LRRK2 RNA guide
auuuuugacugcacaaggggu

SEQ ID NO: 70616 - RNA, 21 nt, Artificial Sequence
  LRRK2 RNA guide
caaauuuuugacugcacaagg

SEQ ID NO: 70617 - RNA, 21 nt, Artificial Sequence
  LRRK2 RNA guide
ccccuugugcagucaaaaauu

SEQ ID NO: 70618 - RNA, 21 nt, Artificial Sequence
  LRRK2 RNA guide
ccuugugcagucaaaaauuug

SEQ ID NO: 70619 - RNA, 21 nt, Artificial Sequence
  LRRK2 RNA guide
cugaccccuugugcagucaaa

SEQ ID NO: 70620 - RNA, 21 nt, Artificial Sequence
  LRRK2 RNA guide
cuugugcagucaaaaauuugc

SEQ ID NO: 70621 - RNA, 21 nt, Artificial Sequence
  LRRK2 RNA guide
gaccccuugugcagucaaaaa

SEQ ID NO: 70622 - RNA, 21 nt, Artificial Sequence
  LRRK2 RNA guide
gcaaauuuuugacugcacaag

SEQ ID NO: 70623 - RNA, 21 nt, Artificial Sequence
  LRRK2 RNA guide
gcugaccccuugugcagucaa

SEQ ID NO: 70624 - RNA, 21 nt, Artificial Sequence
  LRRK2 RNA guide
gugcagucaaaaauuugcaua

SEQ ID NO: 70625 - RNA, 21 nt, Artificial Sequence
  LRRK2 RNA guide
ugaccccuugugcagucaaaa

SEQ ID NO: 70626 - RNA, 21 nt, Artificial Sequence
  LRRK2 RNA guide
ugcaaauuuuugacugcacaa

SEQ ID NO: 70627 - RNA, 21 nt, Artificial Sequence
  LRRK2 RNA guide
uugugcagucaaaaauuugca

SEQ ID NO: 70628 - RNA, 21 nt, Artificial Sequence
  LRRK2 RNA guide
uuugacugcacaaggggucag

SEQ ID NO: 70629 - RNA, 21 nt, Artificial Sequence
  LRRK2 RNA guide
uuuugacugcacaagggguca

SEQ ID NO: 70630 - RNA, 21 nt, Artificial Sequence
  LRRK2 RNA guide
uuuuugacugcacaagggguc

SEQ ID NO: 70631 - RNA, 22 nt, Artificial Sequence
  LRRK2 RNA guide
aaauuuuugacugcacaagggg

SEQ ID NO: 70632 - RNA, 22 nt, Artificial Sequence
  LRRK2 RNA guide
aauuuuugacugcacaaggggu

SEQ ID NO: 70633 - RNA, 22 nt, Artificial Sequence
  LRRK2 RNA guide
accccuugugcagucaaaaauu

SEQ ID NO: 70634 - RNA, 22 nt, Artificial Sequence
  LRRK2 RNA guide
auaugcaaauuuuugacugcac

SEQ ID NO: 70635 - RNA, 22 nt, Artificial Sequence
  LRRK2 RNA guide
augcaaauuuuugacugcacaa

SEQ ID NO: 70636 - RNA, 22 nt, Artificial Sequence
  LRRK2 RNA guide
auuuuugacugcacaagggguc

SEQ ID NO: 70637 - RNA, 22 nt, Artificial Sequence
  LRRK2 RNA guide
caaauuuuugacugcacaaggg

SEQ ID NO: 70638 - RNA, 22 nt, Artificial Sequence
  LRRK2 RNA guide
ccccuugugcagucaaaaauuu

SEQ ID NO: 70639 - RNA, 22 nt, Artificial Sequence
  LRRK2 RNA guide
cccuugugcagucaaaaauuug

SEQ ID NO: 70640 - RNA, 22 nt, Artificial Sequence
  LRRK2 RNA guide
ccuugugcagucaaaaauuugc

SEQ ID NO: 70641 - RNA, 22 nt, Artificial Sequence
  LRRK2 RNA guide
cugaccccuugugcagucaaaa

SEQ ID NO: 70642 - RNA, 22 nt, Artificial Sequence
  LRRK2 RNA guide
cuugugcagucaaaaauuugca

SEQ ID NO: 70643 - RNA, 22 nt, Artificial Sequence
  LRRK2 RNA guide
gaccccuugugcagucaaaaau

SEQ ID NO: 70644 - RNA, 22 nt, Artificial Sequence
  LRRK2 RNA guide
gcaaauuuuugacugcacaagg

SEQ ID NO: 70645 - RNA, 22 nt, Artificial Sequence
  LRRK2 RNA guide
gcugaccccuugugcagucaaa

SEQ ID NO: 70646 - RNA, 22 nt, Artificial Sequence
  LRRK2 RNA guide
gugcagucaaaaauuugcauau

SEQ ID NO: 70647 - RNA, 22 nt, Artificial Sequence
  LRRK2 RNA guide
uaugcaaauuuuugacugcaca

SEQ ID NO: 70648 - RNA, 22 nt, Artificial Sequence
  LRRK2 RNA guide
ugaccccuugugcagucaaaaa

SEQ ID NO: 70649 - RNA, 22 nt, Artificial Sequence
  LRRK2 RNA guide
ugcaaauuuuugacugcacaag

SEQ ID NO: 70650 - RNA, 22 nt, Artificial Sequence
  LRRK2 RNA guide
ugcugaccccuugugcagucaa

SEQ ID NO: 70651 - RNA, 22 nt, Artificial Sequence
  LRRK2 RNA guide
ugugcagucaaaaauuugcaua

SEQ ID NO: 70652 - RNA, 22 nt, Artificial Sequence
  LRRK2 RNA guide
uugugcagucaaaaauuugcau

SEQ ID NO: 70653 - RNA, 22 nt, Artificial Sequence
  LRRK2 RNA guide
uuugacugcacaaggggucagc

SEQ ID NO: 70654 - RNA, 22 nt, Artificial Sequence
  LRRK2 RNA guide
uuuugacugcacaaggggucag

SEQ ID NO: 70655 - RNA, 22 nt, Artificial Sequence
  LRRK2 RNA guide
uuuuugacugcacaagggguca

SEQ ID NO: 70656 - RNA, 20 nt, Artificial Sequence
  LRRK2 RNA guide
aaacacuugauuaacacaug

SEQ ID NO: 70657 - RNA, 20 nt, Artificial Sequence
  LRRK2 RNA guide
aacacuugauuaacacaugu

SEQ ID NO: 70658 - RNA, 20 nt, Artificial Sequence
  LRRK2 RNA guide
acacuugauuaacacauguu

SEQ ID NO: 70659 - RNA, 20 nt, Artificial Sequence
  LRRK2 RNA guide
cacuugauuaacacauguuu

SEQ ID NO: 70660 - RNA, 20 nt, Artificial Sequence
  LRRK2 RNA guide
cacauguuuuguauguuauc

SEQ ID NO: 70661 - RNA, 20 nt, Artificial Sequence
  LRRK2 RNA guide
cagauaacauacaaaacaug

SEQ ID NO: 70662 - RNA, 20 nt, Artificial Sequence
  LRRK2 RNA guide
cauguuuuguauguuaucug

SEQ ID NO: 70663 - RNA, 20 nt, Artificial Sequence
  LRRK2 RNA guide
cuugauuaacacauguuuug

SEQ ID NO: 70664 - RNA, 20 nt, Artificial Sequence
  LRRK2 RNA guide
gauaacauacaaaacaugug

SEQ ID NO: 70665 - RNA, 22 nt, Artificial Sequence
  LRRK2 RNA guide
cacauguuuuguauguuaucug

SEQ ID NO: 70666 - RNA, 22 nt, Artificial Sequence
  LRRK2 RNA guide
cacuugauuaacacauguuuug

SEQ ID NO: 70667 - RNA, 22 nt, Artificial Sequence
  LRRK2 RNA guide
cagauaacauacaaaacaugug

SEQ ID NO: 70668 - RNA, 20 nt, Artificial Sequence
  LRRK2 RNA guide
agggugaagaccuuuauaau

SEQ ID NO: 70669 - RNA, 20 nt, Artificial Sequence
  LRRK2 RNA guide
aucauuauaaaggucuucac

SEQ ID NO: 70670 - RNA, 20 nt, Artificial Sequence
  LRRK2 RNA guide
augagggugaagaccuuuau

SEQ ID NO: 70671 - RNA, 20 nt, Artificial Sequence
  LRRK2 RNA guide
augugaagaugaugagggug

SEQ ID NO: 70672 - RNA, 20 nt, Artificial Sequence
  LRRK2 RNA guide
gagggugaagaccuuuauaa

SEQ ID NO: 70673 - RNA, 20 nt, Artificial Sequence
  LRRK2 RNA guide
gaucauuauaaaggucuuca

SEQ ID NO: 70674 - RNA, 20 nt, Artificial Sequence
  LRRK2 RNA guide
ggaucauuauaaaggucuuc

SEQ ID NO: 70675 - RNA, 20 nt, Artificial Sequence
  LRRK2 RNA guide
gggugaagaccuuuauaaug

SEQ ID NO: 70676 - RNA, 20 nt, Artificial Sequence
  LRRK2 RNA guide
ggugaagaccuuuauaauga

SEQ ID NO: 70677 - RNA, 20 nt, Artificial Sequence
  LRRK2 RNA guide
guggaucauuauaaaggucu

SEQ ID NO: 70678 - RNA, 20 nt, Artificial Sequence
  LRRK2 RNA guide
ucauuauaaaggucuucacc

SEQ ID NO: 70679 - RNA, 20 nt, Artificial Sequence
  LRRK2 RNA guide
ugagggugaagaccuuuaua

SEQ ID NO: 70680 - RNA, 20 nt, Artificial Sequence
  LRRK2 RNA guide
uggaucauuauaaaggucuu

SEQ ID NO: 70681 - RNA, 21 nt, Artificial Sequence
  LRRK2 RNA guide
aaugugaagaugaugagggug

SEQ ID NO: 70682 - RNA, 21 nt, Artificial Sequence
  LRRK2 RNA guide
agggugaagaccuuuauaaug

SEQ ID NO: 70683 - RNA, 21 nt, Artificial Sequence
  LRRK2 RNA guide
aguggaucauuauaaaggucu

SEQ ID NO: 70684 - RNA, 21 nt, Artificial Sequence
  LRRK2 RNA guide
aucauuauaaaggucuucacc

SEQ ID NO: 70685 - RNA, 21 nt, Artificial Sequence
  LRRK2 RNA guide
augagggugaagaccuuuaua

SEQ ID NO: 70686 - RNA, 21 nt, Artificial Sequence
  LRRK2 RNA guide
augugaagaugaugaggguga

SEQ ID NO: 70687 - RNA, 21 nt, Artificial Sequence
  LRRK2 RNA guide
gagggugaagaccuuuauaau

SEQ ID NO: 70688 - RNA, 21 nt, Artificial Sequence
  LRRK2 RNA guide
gaucauuauaaaggucuucac

SEQ ID NO: 70689 - RNA, 21 nt, Artificial Sequence
  LRRK2 RNA guide
gaugagggugaagaccuuuau

SEQ ID NO: 70690 - RNA, 21 nt, Artificial Sequence
  LRRK2 RNA guide
ggaucauuauaaaggucuuca

SEQ ID NO: 70691 - RNA, 21 nt, Artificial Sequence
  LRRK2 RNA guide
gggugaagaccuuuauaauga

SEQ ID NO: 70692 - RNA, 21 nt, Artificial Sequence
  LRRK2 RNA guide
ggucuucacccucaucaucuu

SEQ ID NO: 70693 - RNA, 21 nt, Artificial Sequence
  LRRK2 RNA guide
ggugaagaccuuuauaaugau

SEQ ID NO: 70694 - RNA, 21 nt, Artificial Sequence
  LRRK2 RNA guide
guggaucauuauaaaggucuu

SEQ ID NO: 70695 - RNA, 21 nt, Artificial Sequence
  LRRK2 RNA guide
ucauuauaaaggucuucaccc

SEQ ID NO: 70696 - RNA, 21 nt, Artificial Sequence
  LRRK2 RNA guide
ugagggugaagaccuuuauaa

SEQ ID NO: 70697 - RNA, 21 nt, Artificial Sequence
  LRRK2 RNA guide
uggaucauuauaaaggucuuc

SEQ ID NO: 70698 - RNA, 22 nt, Artificial Sequence
  LRRK2 RNA guide
aaguggaucauuauaaaggucu

SEQ ID NO: 70699 - RNA, 22 nt, Artificial Sequence
  LRRK2 RNA guide
aaugugaagaugaugaggguga

SEQ ID NO: 70700 - RNA, 22 nt, Artificial Sequence
  LRRK2 RNA guide
agggugaagaccuuuauaauga

SEQ ID NO: 70701 - RNA, 22 nt, Artificial Sequence
  LRRK2 RNA guide
aggucuucacccucaucaucuu

SEQ ID NO: 70702 - RNA, 22 nt, Artificial Sequence
  LRRK2 RNA guide
aguggaucauuauaaaggucuu

SEQ ID NO: 70703 - RNA, 22 nt, Artificial Sequence
  LRRK2 RNA guide
aucauuauaaaggucuucaccc

SEQ ID NO: 70704 - RNA, 22 nt, Artificial Sequence
  LRRK2 RNA guide
augagggugaagaccuuuauaa

SEQ ID NO: 70705 - RNA, 22 nt, Artificial Sequence
  LRRK2 RNA guide
augugaagaugaugagggugaa

SEQ ID NO: 70706 - RNA, 22 nt, Artificial Sequence
  LRRK2 RNA guide
caaugugaagaugaugagggug

SEQ ID NO: 70707 - RNA, 22 nt, Artificial Sequence
  LRRK2 RNA guide
gagggugaagaccuuuauaaug

SEQ ID NO: 70708 - RNA, 22 nt, Artificial Sequence
  LRRK2 RNA guide
gaucauuauaaaggucuucacc

SEQ ID NO: 70709 - RNA, 22 nt, Artificial Sequence
  LRRK2 RNA guide
gaugagggugaagaccuuuaua

SEQ ID NO: 70710 - RNA, 22 nt, Artificial Sequence
  LRRK2 RNA guide
ggaucauuauaaaggucuucac

SEQ ID NO: 70711 - RNA, 22 nt, Artificial Sequence
  LRRK2 RNA guide
gggugaagaccuuuauaaugau

SEQ ID NO: 70712 - RNA, 22 nt, Artificial Sequence
  LRRK2 RNA guide
ggucuucacccucaucaucuuc

SEQ ID NO: 70713 - RNA, 22 nt, Artificial Sequence
  LRRK2 RNA guide
ggugaagaccuuuauaaugauc

SEQ ID NO: 70714 - RNA, 22 nt, Artificial Sequence
  LRRK2 RNA guide
guggaucauuauaaaggucuuc

SEQ ID NO: 70715 - RNA, 22 nt, Artificial Sequence
  LRRK2 RNA guide
ucauuauaaaggucuucacccu

SEQ ID NO: 70716 - RNA, 22 nt, Artificial Sequence
  LRRK2 RNA guide
ugagggugaagaccuuuauaau

SEQ ID NO: 70717 - RNA, 22 nt, Artificial Sequence
  LRRK2 RNA guide
ugaugagggugaagaccuuuau

SEQ ID NO: 70718 - RNA, 22 nt, Artificial Sequence
  LRRK2 RNA guide
uggaucauuauaaaggucuuca

SEQ ID NO: 70719 - RNA, 20 nt, Artificial Sequence
  LRRK2 RNA guide
aaagcucuucacccucauca

SEQ ID NO: 70720 - RNA, 20 nt, Artificial Sequence
  LRRK2 RNA guide
aagagcuuuauaaugaucca

SEQ ID NO: 70721 - RNA, 20 nt, Artificial Sequence
  LRRK2 RNA guide
aagaugaugagggugaagag

SEQ ID NO: 70722 - RNA, 20 nt, Artificial Sequence
  LRRK2 RNA guide
aagcucuucacccucaucau

SEQ ID NO: 70723 - RNA, 20 nt, Artificial Sequence
  LRRK2 RNA guide
aaguagaaguggaucauuau

SEQ ID NO: 70724 - RNA, 20 nt, Artificial Sequence
  LRRK2 RNA guide
agaaguggaucauuauaaag

SEQ ID NO: 70725 - RNA, 20 nt, Artificial Sequence
  LRRK2 RNA guide
agagcuuuauaaugauccac

SEQ ID NO: 70726 - RNA, 20 nt, Artificial Sequence
  LRRK2 RNA guide
agaugaugagggugaagagc

SEQ ID NO: 70727 - RNA, 20 nt, Artificial Sequence
  LRRK2 RNA guide
agcucuucacccucaucauc

SEQ ID NO: 70728 - RNA, 20 nt, Artificial Sequence
  LRRK2 RNA guide
agcuuuauaaugauccacuu

SEQ ID NO: 70729 - RNA, 20 nt, Artificial Sequence
  LRRK2 RNA guide
agggugaagagcuuuauaau

SEQ ID NO: 70730 - RNA, 20 nt, Artificial Sequence
  LRRK2 RNA guide
aguagaaguggaucauuaua

SEQ ID NO: 70731 - RNA, 20 nt, Artificial Sequence
  LRRK2 RNA guide
aguggaucauuauaaagcuc

SEQ ID NO: 70732 - RNA, 20 nt, Artificial Sequence
  LRRK2 RNA guide
auaaagcucuucacccucau

SEQ ID NO: 70733 - RNA, 20 nt, Artificial Sequence
  LRRK2 RNA guide
aucauuauaaagcucuucac

SEQ ID NO: 70734 - RNA, 20 nt, Artificial Sequence
  LRRK2 RNA guide
augagggugaagagcuuuau

SEQ ID NO: 70735 - RNA, 20 nt, Artificial Sequence
  LRRK2 RNA guide
augaugagggugaagagcuu

SEQ ID NO: 70736 - RNA, 20 nt, Artificial Sequence
  LRRK2 RNA guide
auuauaaagcucuucacccu

SEQ ID NO: 70737 - RNA, 20 nt, Artificial Sequence
  LRRK2 RNA guide
cauuauaaagcucuucaccc

SEQ ID NO: 70738 - RNA, 20 nt, Artificial Sequence
  LRRK2 RNA guide
gaagaugaugagggugaaga

SEQ ID NO: 70739 - RNA, 20 nt, Artificial Sequence
  LRRK2 RNA guide
gagcuuuauaaugauccacu

SEQ ID NO: 70740 - RNA, 20 nt, Artificial Sequence
  LRRK2 RNA guide
gagggugaagagcuuuauaa

SEQ ID NO: 70741 - RNA, 20 nt, Artificial Sequence
  LRRK2 RNA guide
gaucauuauaaagcucuuca

SEQ ID NO: 70742 - RNA, 20 nt, Artificial Sequence
  LRRK2 RNA guide
gaugagggugaagagcuuua

SEQ ID NO: 70743 - RNA, 20 nt, Artificial Sequence
  LRRK2 RNA guide
gaugaugagggugaagagcu

SEQ ID NO: 70744 - RNA, 20 nt, Artificial Sequence
  LRRK2 RNA guide
gcucuucacccucaucaucu

SEQ ID NO: 70745 - RNA, 20 nt, Artificial Sequence
  LRRK2 RNA guide
ggaucauuauaaagcucuuc

SEQ ID NO: 70746 - RNA, 20 nt, Artificial Sequence
  LRRK2 RNA guide
gggugaagagcuuuauaaug

SEQ ID NO: 70747 - RNA, 20 nt, Artificial Sequence
  LRRK2 RNA guide
ggugaagagcuuuauaauga

SEQ ID NO: 70748 - RNA, 20 nt, Artificial Sequence
  LRRK2 RNA guide
guagaaguggaucauuauaa

SEQ ID NO: 70749 - RNA, 20 nt, Artificial Sequence
  LRRK2 RNA guide
gugaagagcuuuauaaugau

SEQ ID NO: 70750 - RNA, 20 nt, Artificial Sequence
  LRRK2 RNA guide
gugaagaugaugagggugaa

SEQ ID NO: 70751 - RNA, 20 nt, Artificial Sequence
  LRRK2 RNA guide
guggaucauuauaaagcucu

SEQ ID NO: 70752 - RNA, 20 nt, Artificial Sequence
  LRRK2 RNA guide
uaaagcucuucacccucauc

SEQ ID NO: 70753 - RNA, 20 nt, Artificial Sequence
  LRRK2 RNA guide
uauaaagcucuucacccuca

SEQ ID NO: 70754 - RNA, 20 nt, Artificial Sequence
  LRRK2 RNA guide
ucauuauaaagcucuucacc

SEQ ID NO: 70755 - RNA, 20 nt, Artificial Sequence
  LRRK2 RNA guide
ugaagaugaugagggugaag

SEQ ID NO: 70756 - RNA, 20 nt, Artificial Sequence
  LRRK2 RNA guide
ugagggugaagagcuuuaua

SEQ ID NO: 70757 - RNA, 20 nt, Artificial Sequence
  LRRK2 RNA guide
ugaugagggugaagagcuuu

SEQ ID NO: 70758 - RNA, 20 nt, Artificial Sequence
  LRRK2 RNA guide
uggaucauuauaaagcucuu

SEQ ID NO: 70759 - RNA, 20 nt, Artificial Sequence
  LRRK2 RNA guide
ugugaagaugaugaggguga

SEQ ID NO: 70760 - RNA, 20 nt, Artificial Sequence
  LRRK2 RNA guide
uuauaaagcucuucacccuc

SEQ ID NO: 70761 - RNA, 21 nt, Artificial Sequence
  LRRK2 RNA guide
aaagcucuucacccucaucau

SEQ ID NO: 70762 - RNA, 21 nt, Artificial Sequence
  LRRK2 RNA guide
aagagcuuuauaaugauccac

SEQ ID NO: 70763 - RNA, 21 nt, Artificial Sequence
  LRRK2 RNA guide
aagaugaugagggugaagagc

SEQ ID NO: 70764 - RNA, 21 nt, Artificial Sequence
  LRRK2 RNA guide
aagcucuucacccucaucauc

SEQ ID NO: 70765 - RNA, 21 nt, Artificial Sequence
  LRRK2 RNA guide
aaguggaucauuauaaagcuc

SEQ ID NO: 70766 - RNA, 21 nt, Artificial Sequence
  LRRK2 RNA guide
agaaguggaucauuauaaagc

SEQ ID NO: 70767 - RNA, 21 nt, Artificial Sequence
  LRRK2 RNA guide
agagcuuuauaaugauccacu

SEQ ID NO: 70768 - RNA, 21 nt, Artificial Sequence
  LRRK2 RNA guide
agaugaugagggugaagagcu

SEQ ID NO: 70769 - RNA, 21 nt, Artificial Sequence
  LRRK2 RNA guide
agcucuucacccucaucaucu

SEQ ID NO: 70770 - RNA, 21 nt, Artificial Sequence
  LRRK2 RNA guide
agcuuuauaaugauccacuuc

SEQ ID NO: 70771 - RNA, 21 nt, Artificial Sequence
  LRRK2 RNA guide
agggugaagagcuuuauaaug

SEQ ID NO: 70772 - RNA, 21 nt, Artificial Sequence
  LRRK2 RNA guide
aguggaucauuauaaagcucu

SEQ ID NO: 70773 - RNA, 21 nt, Artificial Sequence
  LRRK2 RNA guide
auaaagcucuucacccucauc

SEQ ID NO: 70774 - RNA, 21 nt, Artificial Sequence
  LRRK2 RNA guide
aucauuauaaagcucuucacc

SEQ ID NO: 70775 - RNA, 21 nt, Artificial Sequence
  LRRK2 RNA guide
augagggugaagagcuuuaua

SEQ ID NO: 70776 - RNA, 21 nt, Artificial Sequence
  LRRK2 RNA guide
augaugagggugaagagcuuu

SEQ ID NO: 70777 - RNA, 21 nt, Artificial Sequence
  LRRK2 RNA guide
auuauaaagcucuucacccuc

SEQ ID NO: 70778 - RNA, 21 nt, Artificial Sequence
  LRRK2 RNA guide
cauuauaaagcucuucacccu

SEQ ID NO: 70779 - RNA, 21 nt, Artificial Sequence
  LRRK2 RNA guide
gaagagcuuuauaaugaucca

SEQ ID NO: 70780 - RNA, 21 nt, Artificial Sequence
  LRRK2 RNA guide
gaagaugaugagggugaagag

SEQ ID NO: 70781 - RNA, 21 nt, Artificial Sequence
  LRRK2 RNA guide
gagcuuuauaaugauccacuu

SEQ ID NO: 70782 - RNA, 21 nt, Artificial Sequence
  LRRK2 RNA guide
gagggugaagagcuuuauaau

SEQ ID NO: 70783 - RNA, 21 nt, Artificial Sequence
  LRRK2 RNA guide
gaucauuauaaagcucuucac

SEQ ID NO: 70784 - RNA, 21 nt, Artificial Sequence
  LRRK2 RNA guide
gaugagggugaagagcuuuau

SEQ ID NO: 70785 - RNA, 21 nt, Artificial Sequence
  LRRK2 RNA guide
gaugaugagggugaagagcuu

SEQ ID NO: 70786 - RNA, 21 nt, Artificial Sequence
  LRRK2 RNA guide
gcucuucacccucaucaucuu

SEQ ID NO: 70787 - RNA, 21 nt, Artificial Sequence
  LRRK2 RNA guide
ggaucauuauaaagcucuuca

SEQ ID NO: 70788 - RNA, 21 nt, Artificial Sequence
  LRRK2 RNA guide
gggugaagagcuuuauaauga

SEQ ID NO: 70789 - RNA, 21 nt, Artificial Sequence
  LRRK2 RNA guide
ggugaagagcuuuauaaugau

SEQ ID NO: 70790 - RNA, 21 nt, Artificial Sequence
  LRRK2 RNA guide
gugaagagcuuuauaaugauc

SEQ ID NO: 70791 - RNA, 21 nt, Artificial Sequence
  LRRK2 RNA guide
gugaagaugaugagggugaag

SEQ ID NO: 70792 - RNA, 21 nt, Artificial Sequence
  LRRK2 RNA guide
guggaucauuauaaagcucuu

SEQ ID NO: 70793 - RNA, 21 nt, Artificial Sequence
  LRRK2 RNA guide
uaaagcucuucacccucauca

SEQ ID NO: 70794 - RNA, 21 nt, Artificial Sequence
  LRRK2 RNA guide
uauaaagcucuucacccucau

SEQ ID NO: 70795 - RNA, 21 nt, Artificial Sequence
  LRRK2 RNA guide
ucauuauaaagcucuucaccc

SEQ ID NO: 70796 - RNA, 21 nt, Artificial Sequence
  LRRK2 RNA guide
ugaagaugaugagggugaaga

SEQ ID NO: 70797 - RNA, 21 nt, Artificial Sequence
  LRRK2 RNA guide
ugagggugaagagcuuuauaa

SEQ ID NO: 70798 - RNA, 21 nt, Artificial Sequence
  LRRK2 RNA guide
ugaugagggugaagagcuuua

SEQ ID NO: 70799 - RNA, 21 nt, Artificial Sequence
  LRRK2 RNA guide
uggaucauuauaaagcucuuc

SEQ ID NO: 70800 - RNA, 21 nt, Artificial Sequence
  LRRK2 RNA guide
ugugaagaugaugagggugaa

SEQ ID NO: 70801 - RNA, 21 nt, Artificial Sequence
  LRRK2 RNA guide
uuauaaagcucuucacccuca

SEQ ID NO: 70802 - RNA, 22 nt, Artificial Sequence
  LRRK2 RNA guide
aaagcucuucacccucaucauc

SEQ ID NO: 70803 - RNA, 22 nt, Artificial Sequence
  LRRK2 RNA guide
aagagcuuuauaaugauccacu

SEQ ID NO: 70804 - RNA, 22 nt, Artificial Sequence
  LRRK2 RNA guide
aagaugaugagggugaagagcu

SEQ ID NO: 70805 - RNA, 22 nt, Artificial Sequence
  LRRK2 RNA guide
aagcucuucacccucaucaucu

SEQ ID NO: 70806 - RNA, 22 nt, Artificial Sequence
  LRRK2 RNA guide
aaguggaucauuauaaagcucu

SEQ ID NO: 70807 - RNA, 22 nt, Artificial Sequence
  LRRK2 RNA guide
agaaguggaucauuauaaagcu

SEQ ID NO: 70808 - RNA, 22 nt, Artificial Sequence
  LRRK2 RNA guide
agagcuuuauaaugauccacuu

SEQ ID NO: 70809 - RNA, 22 nt, Artificial Sequence
  LRRK2 RNA guide
agaugaugagggugaagagcuu

SEQ ID NO: 70810 - RNA, 22 nt, Artificial Sequence
  LRRK2 RNA guide
agcucuucacccucaucaucuu

SEQ ID NO: 70811 - RNA, 22 nt, Artificial Sequence
  LRRK2 RNA guide
agcuuuauaaugauccacuucu

SEQ ID NO: 70812 - RNA, 22 nt, Artificial Sequence
  LRRK2 RNA guide
agggugaagagcuuuauaauga

SEQ ID NO: 70813 - RNA, 22 nt, Artificial Sequence
  LRRK2 RNA guide
aguggaucauuauaaagcucuu

SEQ ID NO: 70814 - RNA, 22 nt, Artificial Sequence
  LRRK2 RNA guide
auaaagcucuucacccucauca

SEQ ID NO: 70815 - RNA, 22 nt, Artificial Sequence
  LRRK2 RNA guide
aucauuauaaagcucuucaccc

SEQ ID NO: 70816 - RNA, 22 nt, Artificial Sequence
  LRRK2 RNA guide
augagggugaagagcuuuauaa

SEQ ID NO: 70817 - RNA, 22 nt, Artificial Sequence
  LRRK2 RNA guide
augaugagggugaagagcuuua

SEQ ID NO: 70818 - RNA, 22 nt, Artificial Sequence
  LRRK2 RNA guide
auuauaaagcucuucacccuca

SEQ ID NO: 70819 - RNA, 22 nt, Artificial Sequence
  LRRK2 RNA guide
cauuauaaagcucuucacccuc

SEQ ID NO: 70820 - RNA, 22 nt, Artificial Sequence
  LRRK2 RNA guide
gaagagcuuuauaaugauccac

SEQ ID NO: 70821 - RNA, 22 nt, Artificial Sequence
  LRRK2 RNA guide
gaagaugaugagggugaagagc

SEQ ID NO: 70822 - RNA, 22 nt, Artificial Sequence
  LRRK2 RNA guide
gaaguggaucauuauaaagcuc

SEQ ID NO: 70823 - RNA, 22 nt, Artificial Sequence
  LRRK2 RNA guide
gagcuuuauaaugauccacuuc

SEQ ID NO: 70824 - RNA, 22 nt, Artificial Sequence
  LRRK2 RNA guide
gagggugaagagcuuuauaaug

SEQ ID NO: 70825 - RNA, 22 nt, Artificial Sequence
  LRRK2 RNA guide
gaucauuauaaagcucuucacc

SEQ ID NO: 70826 - RNA, 22 nt, Artificial Sequence
  LRRK2 RNA guide
gaugagggugaagagcuuuaua

SEQ ID NO: 70827 - RNA, 22 nt, Artificial Sequence
  LRRK2 RNA guide
gaugaugagggugaagagcuuu

SEQ ID NO: 70828 - RNA, 22 nt, Artificial Sequence
  LRRK2 RNA guide
gcucuucacccucaucaucuuc

SEQ ID NO: 70829 - RNA, 22 nt, Artificial Sequence
  LRRK2 RNA guide
ggaucauuauaaagcucuucac

SEQ ID NO: 70830 - RNA, 22 nt, Artificial Sequence
  LRRK2 RNA guide
gggugaagagcuuuauaaugau

SEQ ID NO: 70831 - RNA, 22 nt, Artificial Sequence
  LRRK2 RNA guide
ggugaagagcuuuauaaugauc

SEQ ID NO: 70832 - RNA, 22 nt, Artificial Sequence
  LRRK2 RNA guide
guagaaguggaucauuauaaag

SEQ ID NO: 70833 - RNA, 22 nt, Artificial Sequence
  LRRK2 RNA guide
gugaagagcuuuauaaugaucc

SEQ ID NO: 70834 - RNA, 22 nt, Artificial Sequence
  LRRK2 RNA guide
gugaagaugaugagggugaaga

SEQ ID NO: 70835 - RNA, 22 nt, Artificial Sequence
  LRRK2 RNA guide
guggaucauuauaaagcucuuc

SEQ ID NO: 70836 - RNA, 22 nt, Artificial Sequence
  LRRK2 RNA guide
uaaagcucuucacccucaucau

SEQ ID NO: 70837 - RNA, 22 nt, Artificial Sequence
  LRRK2 RNA guide
uagaaguggaucauuauaaagc

SEQ ID NO: 70838 - RNA, 22 nt, Artificial Sequence
  LRRK2 RNA guide
uauaaagcucuucacccucauc

SEQ ID NO: 70839 - RNA, 22 nt, Artificial Sequence
  LRRK2 RNA guide
ucauuauaaagcucuucacccu

SEQ ID NO: 70840 - RNA, 22 nt, Artificial Sequence
  LRRK2 RNA guide
ugaagagcuuuauaaugaucca

SEQ ID NO: 70841 - RNA, 22 nt, Artificial Sequence
  LRRK2 RNA guide
ugaagaugaugagggugaagag

SEQ ID NO: 70842 - RNA, 22 nt, Artificial Sequence
  LRRK2 RNA guide
ugagggugaagagcuuuauaau

SEQ ID NO: 70843 - RNA, 22 nt, Artificial Sequence
  LRRK2 RNA guide
ugaugagggugaagagcuuuau

SEQ ID NO: 70844 - RNA, 22 nt, Artificial Sequence
  LRRK2 RNA guide
uggaucauuauaaagcucuuca

SEQ ID NO: 70845 - RNA, 22 nt, Artificial Sequence
  LRRK2 RNA guide
ugugaagaugaugagggugaag

SEQ ID NO: 70846 - RNA, 22 nt, Artificial Sequence
  LRRK2 RNA guide
uuauaaagcucuucacccucau

SEQ ID NO: 70847 - RNA, 20 nt, Artificial Sequence
  LRRK2 RNA guide
aaccugagagcaagucugga

SEQ ID NO: 70848 - RNA, 20 nt, Artificial Sequence
  LRRK2 RNA guide
aagucuggaucacacuuguc

SEQ ID NO: 70849 - RNA, 20 nt, Artificial Sequence
  LRRK2 RNA guide
aagugugauccagacuugcu

SEQ ID NO: 70850 - RNA, 20 nt, Artificial Sequence
  LRRK2 RNA guide
acaagugugauccagacuug

SEQ ID NO: 70851 - RNA, 20 nt, Artificial Sequence
  LRRK2 RNA guide
accugagagcaagucuggau

SEQ ID NO: 70852 - RNA, 20 nt, Artificial Sequence
  LRRK2 RNA guide
agaaccugagagcaagucug

SEQ ID NO: 70853 - RNA, 20 nt, Artificial Sequence
  LRRK2 RNA guide
agagcaagucuggaucacac

SEQ ID NO: 70854 - RNA, 20 nt, Artificial Sequence
  LRRK2 RNA guide
agcaagucuggaucacacuu

SEQ ID NO: 70855 - RNA, 20 nt, Artificial Sequence
  LRRK2 RNA guide
agucuggaucacacuuguca

SEQ ID NO: 70856 - RNA, 20 nt, Artificial Sequence
  LRRK2 RNA guide
agugcaugacaagugugauc

SEQ ID NO: 70857 - RNA, 20 nt, Artificial Sequence
  LRRK2 RNA guide
agugugauccagacuugcuc

SEQ ID NO: 70858 - RNA, 20 nt, Artificial Sequence
  LRRK2 RNA guide
auccagacuugcucucaggu

SEQ ID NO: 70859 - RNA, 20 nt, Artificial Sequence
  LRRK2 RNA guide
augacaagugugauccagac

SEQ ID NO: 70860 - RNA, 20 nt, Artificial Sequence
  LRRK2 RNA guide
auucagugcaugacaagugu

SEQ ID NO: 70861 - RNA, 20 nt, Artificial Sequence
  LRRK2 RNA guide
caagugugauccagacuugc

SEQ ID NO: 70862 - RNA, 20 nt, Artificial Sequence
  LRRK2 RNA guide
cagaaccugagagcaagucu

SEQ ID NO: 70863 - RNA, 20 nt, Artificial Sequence
  LRRK2 RNA guide
cagugcaugacaagugugau

SEQ ID NO: 70864 - RNA, 20 nt, Artificial Sequence
  LRRK2 RNA guide
caugacaagugugauccaga

SEQ ID NO: 70865 - RNA, 20 nt, Artificial Sequence
  LRRK2 RNA guide
ccagacuugcucucagguuc

SEQ ID NO: 70866 - RNA, 20 nt, Artificial Sequence
  LRRK2 RNA guide
ccugagagcaagucuggauc

SEQ ID NO: 70867 - RNA, 20 nt, Artificial Sequence
  LRRK2 RNA guide
cucagaaccugagagcaagu

SEQ ID NO: 70868 - RNA, 20 nt, Artificial Sequence
  LRRK2 RNA guide
cugagagcaagucuggauca

SEQ ID NO: 70869 - RNA, 20 nt, Artificial Sequence
  LRRK2 RNA guide
cuggaucacacuugucaugc

SEQ ID NO: 70870 - RNA, 20 nt, Artificial Sequence
  LRRK2 RNA guide
gaaccugagagcaagucugg

SEQ ID NO: 70871 - RNA, 20 nt, Artificial Sequence
  LRRK2 RNA guide
gacaagugugauccagacuu

SEQ ID NO: 70872 - RNA, 20 nt, Artificial Sequence
  LRRK2 RNA guide
gagagcaagucuggaucaca

SEQ ID NO: 70873 - RNA, 20 nt, Artificial Sequence
  LRRK2 RNA guide
gagcaagucuggaucacacu

SEQ ID NO: 70874 - RNA, 20 nt, Artificial Sequence
  LRRK2 RNA guide
gauccagacuugcucucagg

SEQ ID NO: 70875 - RNA, 20 nt, Artificial Sequence
  LRRK2 RNA guide
gcaagucuggaucacacuug

SEQ ID NO: 70876 - RNA, 20 nt, Artificial Sequence
  LRRK2 RNA guide
gcaugacaagugugauccag

SEQ ID NO: 70877 - RNA, 20 nt, Artificial Sequence
  LRRK2 RNA guide
gucuggaucacacuugucau

SEQ ID NO: 70878 - RNA, 20 nt, Artificial Sequence
  LRRK2 RNA guide
gugauccagacuugcucuca

SEQ ID NO: 70879 - RNA, 20 nt, Artificial Sequence
  LRRK2 RNA guide
gugcaugacaagugugaucc

SEQ ID NO: 70880 - RNA, 20 nt, Artificial Sequence
  LRRK2 RNA guide
gugugauccagacuugcucu

SEQ ID NO: 70881 - RNA, 20 nt, Artificial Sequence
  LRRK2 RNA guide
ucagaaccugagagcaaguc

SEQ ID NO: 70882 - RNA, 20 nt, Artificial Sequence
  LRRK2 RNA guide
ucagugcaugacaaguguga

SEQ ID NO: 70883 - RNA, 20 nt, Artificial Sequence
  LRRK2 RNA guide
uccagacuugcucucagguu

SEQ ID NO: 70884 - RNA, 20 nt, Artificial Sequence
  LRRK2 RNA guide
ucucagaaccugagagcaag

SEQ ID NO: 70885 - RNA, 20 nt, Artificial Sequence
  LRRK2 RNA guide
ucuggaucacacuugucaug

SEQ ID NO: 70886 - RNA, 20 nt, Artificial Sequence
  LRRK2 RNA guide
ugacaagugugauccagacu

SEQ ID NO: 70887 - RNA, 20 nt, Artificial Sequence
  LRRK2 RNA guide
ugagagcaagucuggaucac

SEQ ID NO: 70888 - RNA, 20 nt, Artificial Sequence
  LRRK2 RNA guide
ugauccagacuugcucucag

SEQ ID NO: 70889 - RNA, 20 nt, Artificial Sequence
  LRRK2 RNA guide
ugcaugacaagugugaucca

SEQ ID NO: 70890 - RNA, 20 nt, Artificial Sequence
  LRRK2 RNA guide
uggaucacacuugucaugca

SEQ ID NO: 70891 - RNA, 20 nt, Artificial Sequence
  LRRK2 RNA guide
ugugauccagacuugcucuc

SEQ ID NO: 70892 - RNA, 20 nt, Artificial Sequence
  LRRK2 RNA guide
uucagugcaugacaagugug

SEQ ID NO: 70893 - RNA, 20 nt, Artificial Sequence
  LRRK2 RNA guide
uucucagaaccugagagcaa

SEQ ID NO: 70894 - RNA, 21 nt, Artificial Sequence
  LRRK2 RNA guide
aaccugagagcaagucuggau

SEQ ID NO: 70895 - RNA, 21 nt, Artificial Sequence
  LRRK2 RNA guide
aagucuggaucacacuuguca

SEQ ID NO: 70896 - RNA, 21 nt, Artificial Sequence
  LRRK2 RNA guide
aagugugauccagacuugcuc

SEQ ID NO: 70897 - RNA, 21 nt, Artificial Sequence
  LRRK2 RNA guide
acaagugugauccagacuugc

SEQ ID NO: 70898 - RNA, 21 nt, Artificial Sequence
  LRRK2 RNA guide
accugagagcaagucuggauc

SEQ ID NO: 70899 - RNA, 21 nt, Artificial Sequence
  LRRK2 RNA guide
agaaccugagagcaagucugg

SEQ ID NO: 70900 - RNA, 21 nt, Artificial Sequence
  LRRK2 RNA guide
agagcaagucuggaucacacu

SEQ ID NO: 70901 - RNA, 21 nt, Artificial Sequence
  LRRK2 RNA guide
agcaagucuggaucacacuug

SEQ ID NO: 70902 - RNA, 21 nt, Artificial Sequence
  LRRK2 RNA guide
agucuggaucacacuugucau

SEQ ID NO: 70903 - RNA, 21 nt, Artificial Sequence
  LRRK2 RNA guide
agugcaugacaagugugaucc

SEQ ID NO: 70904 - RNA, 21 nt, Artificial Sequence
  LRRK2 RNA guide
agugugauccagacuugcucu

SEQ ID NO: 70905 - RNA, 21 nt, Artificial Sequence
  LRRK2 RNA guide
auccagacuugcucucagguu

SEQ ID NO: 70906 - RNA, 21 nt, Artificial Sequence
  LRRK2 RNA guide
augacaagugugauccagacu

SEQ ID NO: 70907 - RNA, 21 nt, Artificial Sequence
  LRRK2 RNA guide
auucagugcaugacaagugug

SEQ ID NO: 70908 - RNA, 21 nt, Artificial Sequence
  LRRK2 RNA guide
caagucuggaucacacuuguc

SEQ ID NO: 70909 - RNA, 21 nt, Artificial Sequence
  LRRK2 RNA guide
caagugugauccagacuugcu

SEQ ID NO: 70910 - RNA, 21 nt, Artificial Sequence
  LRRK2 RNA guide
cagaaccugagagcaagucug

SEQ ID NO: 70911 - RNA, 21 nt, Artificial Sequence
  LRRK2 RNA guide
cagugcaugacaagugugauc

SEQ ID NO: 70912 - RNA, 21 nt, Artificial Sequence
  LRRK2 RNA guide
caugacaagugugauccagac

SEQ ID NO: 70913 - RNA, 21 nt, Artificial Sequence
  LRRK2 RNA guide
ccagacuugcucucagguucu

SEQ ID NO: 70914 - RNA, 21 nt, Artificial Sequence
  LRRK2 RNA guide
ccugagagcaagucuggauca

SEQ ID NO: 70915 - RNA, 21 nt, Artificial Sequence
  LRRK2 RNA guide
cucagaaccugagagcaaguc

SEQ ID NO: 70916 - RNA, 21 nt, Artificial Sequence
  LRRK2 RNA guide
cugagagcaagucuggaucac

SEQ ID NO: 70917 - RNA, 21 nt, Artificial Sequence
  LRRK2 RNA guide
cuggaucacacuugucaugca

SEQ ID NO: 70918 - RNA, 21 nt, Artificial Sequence
  LRRK2 RNA guide
gaaccugagagcaagucugga

SEQ ID NO: 70919 - RNA, 21 nt, Artificial Sequence
  LRRK2 RNA guide
gacaagugugauccagacuug

SEQ ID NO: 70920 - RNA, 21 nt, Artificial Sequence
  LRRK2 RNA guide
gagagcaagucuggaucacac

SEQ ID NO: 70921 - RNA, 21 nt, Artificial Sequence
  LRRK2 RNA guide
gagcaagucuggaucacacuu

SEQ ID NO: 70922 - RNA, 21 nt, Artificial Sequence
  LRRK2 RNA guide
gauccagacuugcucucaggu

SEQ ID NO: 70923 - RNA, 21 nt, Artificial Sequence
  LRRK2 RNA guide
gcaagucuggaucacacuugu

SEQ ID NO: 70924 - RNA, 21 nt, Artificial Sequence
  LRRK2 RNA guide
gcaugacaagugugauccaga

SEQ ID NO: 70925 - RNA, 21 nt, Artificial Sequence
  LRRK2 RNA guide
gucuggaucacacuugucaug

SEQ ID NO: 70926 - RNA, 21 nt, Artificial Sequence
  LRRK2 RNA guide
gugauccagacuugcucucag

SEQ ID NO: 70927 - RNA, 21 nt, Artificial Sequence
  LRRK2 RNA guide
gugcaugacaagugugaucca

SEQ ID NO: 70928 - RNA, 21 nt, Artificial Sequence
  LRRK2 RNA guide
gugugauccagacuugcucuc

SEQ ID NO: 70929 - RNA, 21 nt, Artificial Sequence
  LRRK2 RNA guide
guucucagaaccugagagcaa

SEQ ID NO: 70930 - RNA, 21 nt, Artificial Sequence
  LRRK2 RNA guide
uauucagugcaugacaagugu

SEQ ID NO: 70931 - RNA, 21 nt, Artificial Sequence
  LRRK2 RNA guide
ucagaaccugagagcaagucu

SEQ ID NO: 70932 - RNA, 21 nt, Artificial Sequence
  LRRK2 RNA guide
ucagugcaugacaagugugau

SEQ ID NO: 70933 - RNA, 21 nt, Artificial Sequence
  LRRK2 RNA guide
uccagacuugcucucagguuc

SEQ ID NO: 70934 - RNA, 21 nt, Artificial Sequence
  LRRK2 RNA guide
ucucagaaccugagagcaagu

SEQ ID NO: 70935 - RNA, 21 nt, Artificial Sequence
  LRRK2 RNA guide
ucuggaucacacuugucaugc

SEQ ID NO: 70936 - RNA, 21 nt, Artificial Sequence
  LRRK2 RNA guide
ugacaagugugauccagacuu

SEQ ID NO: 70937 - RNA, 21 nt, Artificial Sequence
  LRRK2 RNA guide
ugagagcaagucuggaucaca

SEQ ID NO: 70938 - RNA, 21 nt, Artificial Sequence
  LRRK2 RNA guide
ugauccagacuugcucucagg

SEQ ID NO: 70939 - RNA, 21 nt, Artificial Sequence
  LRRK2 RNA guide
ugcaugacaagugugauccag

SEQ ID NO: 70940 - RNA, 21 nt, Artificial Sequence
  LRRK2 RNA guide
uggaucacacuugucaugcac

SEQ ID NO: 70941 - RNA, 21 nt, Artificial Sequence
  LRRK2 RNA guide
ugugauccagacuugcucuca

SEQ ID NO: 70942 - RNA, 21 nt, Artificial Sequence
  LRRK2 RNA guide
uucagugcaugacaaguguga

SEQ ID NO: 70943 - RNA, 21 nt, Artificial Sequence
  LRRK2 RNA guide
uucucagaaccugagagcaag

SEQ ID NO: 70944 - RNA, 22 nt, Artificial Sequence
  LRRK2 RNA guide
aaccugagagcaagucuggauc

SEQ ID NO: 70945 - RNA, 22 nt, Artificial Sequence
  LRRK2 RNA guide
aagucuggaucacacuugucau

SEQ ID NO: 70946 - RNA, 22 nt, Artificial Sequence
  LRRK2 RNA guide
aagugugauccagacuugcucu

SEQ ID NO: 70947 - RNA, 22 nt, Artificial Sequence
  LRRK2 RNA guide
acaagugugauccagacuugcu

SEQ ID NO: 70948 - RNA, 22 nt, Artificial Sequence
  LRRK2 RNA guide
accugagagcaagucuggauca

SEQ ID NO: 70949 - RNA, 22 nt, Artificial Sequence
  LRRK2 RNA guide
agaaccugagagcaagucugga

SEQ ID NO: 70950 - RNA, 22 nt, Artificial Sequence
  LRRK2 RNA guide
agagcaagucuggaucacacuu

SEQ ID NO: 70951 - RNA, 22 nt, Artificial Sequence
  LRRK2 RNA guide
agcaagucuggaucacacuugu

SEQ ID NO: 70952 - RNA, 22 nt, Artificial Sequence
  LRRK2 RNA guide
agucuggaucacacuugucaug

SEQ ID NO: 70953 - RNA, 22 nt, Artificial Sequence
  LRRK2 RNA guide
agugcaugacaagugugaucca

SEQ ID NO: 70954 - RNA, 22 nt, Artificial Sequence
  LRRK2 RNA guide
agugugauccagacuugcucuc

SEQ ID NO: 70955 - RNA, 22 nt, Artificial Sequence
  LRRK2 RNA guide
auccagacuugcucucagguuc

SEQ ID NO: 70956 - RNA, 22 nt, Artificial Sequence
  LRRK2 RNA guide
augacaagugugauccagacuu

SEQ ID NO: 70957 - RNA, 22 nt, Artificial Sequence
  LRRK2 RNA guide
auucagugcaugacaaguguga

SEQ ID NO: 70958 - RNA, 22 nt, Artificial Sequence
  LRRK2 RNA guide
caagucuggaucacacuuguca

SEQ ID NO: 70959 - RNA, 22 nt, Artificial Sequence
  LRRK2 RNA guide
caagugugauccagacuugcuc

SEQ ID NO: 70960 - RNA, 22 nt, Artificial Sequence
  LRRK2 RNA guide
cagaaccugagagcaagucugg

SEQ ID NO: 70961 - RNA, 22 nt, Artificial Sequence
  LRRK2 RNA guide
cagugcaugacaagugugaucc

SEQ ID NO: 70962 - RNA, 22 nt, Artificial Sequence
  LRRK2 RNA guide
caugacaagugugauccagacu

SEQ ID NO: 70963 - RNA, 22 nt, Artificial Sequence
  LRRK2 RNA guide
ccagacuugcucucagguucug

SEQ ID NO: 70964 - RNA, 22 nt, Artificial Sequence
  LRRK2 RNA guide
ccugagagcaagucuggaucac

SEQ ID NO: 70965 - RNA, 22 nt, Artificial Sequence
  LRRK2 RNA guide
cuauucagugcaugacaagugu

SEQ ID NO: 70966 - RNA, 22 nt, Artificial Sequence
  LRRK2 RNA guide
cucagaaccugagagcaagucu

SEQ ID NO: 70967 - RNA, 22 nt, Artificial Sequence
  LRRK2 RNA guide
cugagagcaagucuggaucaca

SEQ ID NO: 70968 - RNA, 22 nt, Artificial Sequence
  LRRK2 RNA guide
cuggaucacacuugucaugcac

SEQ ID NO: 70969 - RNA, 22 nt, Artificial Sequence
  LRRK2 RNA guide
gaaccugagagcaagucuggau

SEQ ID NO: 70970 - RNA, 22 nt, Artificial Sequence
  LRRK2 RNA guide
gacaagugugauccagacuugc

SEQ ID NO: 70971 - RNA, 22 nt, Artificial Sequence
  LRRK2 RNA guide
gagagcaagucuggaucacacu

SEQ ID NO: 70972 - RNA, 22 nt, Artificial Sequence
  LRRK2 RNA guide
gagcaagucuggaucacacuug

SEQ ID NO: 70973 - RNA, 22 nt, Artificial Sequence
  LRRK2 RNA guide
gauccagacuugcucucagguu

SEQ ID NO: 70974 - RNA, 22 nt, Artificial Sequence
  LRRK2 RNA guide
gcaagucuggaucacacuuguc

SEQ ID NO: 70975 - RNA, 22 nt, Artificial Sequence
  LRRK2 RNA guide
gcaugacaagugugauccagac

SEQ ID NO: 70976 - RNA, 22 nt, Artificial Sequence
  LRRK2 RNA guide
gucuggaucacacuugucaugc

SEQ ID NO: 70977 - RNA, 22 nt, Artificial Sequence
  LRRK2 RNA guide
gugauccagacuugcucucagg

SEQ ID NO: 70978 - RNA, 22 nt, Artificial Sequence
  LRRK2 RNA guide
gugcaugacaagugugauccag

SEQ ID NO: 70979 - RNA, 22 nt, Artificial Sequence
  LRRK2 RNA guide
gugugauccagacuugcucuca

SEQ ID NO: 70980 - RNA, 22 nt, Artificial Sequence
  LRRK2 RNA guide
guucucagaaccugagagcaag

SEQ ID NO: 70981 - RNA, 22 nt, Artificial Sequence
  LRRK2 RNA guide
uauucagugcaugacaagugug

SEQ ID NO: 70982 - RNA, 22 nt, Artificial Sequence
  LRRK2 RNA guide
ucagaaccugagagcaagucug

SEQ ID NO: 70983 - RNA, 22 nt, Artificial Sequence
  LRRK2 RNA guide
ucagugcaugacaagugugauc

SEQ ID NO: 70984 - RNA, 22 nt, Artificial Sequence
  LRRK2 RNA guide
uccagacuugcucucagguucu

SEQ ID NO: 70985 - RNA, 22 nt, Artificial Sequence
  LRRK2 RNA guide
ucucagaaccugagagcaaguc

SEQ ID NO: 70986 - RNA, 22 nt, Artificial Sequence
  LRRK2 RNA guide
ucuggaucacacuugucaugca

SEQ ID NO: 70987 - RNA, 22 nt, Artificial Sequence
  LRRK2 RNA guide
ugacaagugugauccagacuug

SEQ ID NO: 70988 - RNA, 22 nt, Artificial Sequence
  LRRK2 RNA guide
ugagagcaagucuggaucacac

SEQ ID NO: 70989 - RNA, 22 nt, Artificial Sequence
  LRRK2 RNA guide
ugauccagacuugcucucaggu

SEQ ID NO: 70990 - RNA, 22 nt, Artificial Sequence
  LRRK2 RNA guide
ugcaugacaagugugauccaga

SEQ ID NO: 70991 - RNA, 22 nt, Artificial Sequence
  LRRK2 RNA guide
uggaucacacuugucaugcacu

SEQ ID NO: 70992 - RNA, 22 nt, Artificial Sequence
  LRRK2 RNA guide
ugugauccagacuugcucucag

SEQ ID NO: 70993 - RNA, 22 nt, Artificial Sequence
  LRRK2 RNA guide
uguucucagaaccugagagcaa

SEQ ID NO: 70994 - RNA, 22 nt, Artificial Sequence
  LRRK2 RNA guide
uucagugcaugacaagugugau

SEQ ID NO: 70995 - RNA, 22 nt, Artificial Sequence
  LRRK2 RNA guide
uucucagaaccugagagcaagu

SEQ ID NO: 70996 - RNA, 20 nt, Artificial Sequence
  LRRK2 RNA guide
aaccugagagcaagucuaga

SEQ ID NO: 70997 - RNA, 20 nt, Artificial Sequence
  LRRK2 RNA guide
aagucuagaucacacuuguc

SEQ ID NO: 70998 - RNA, 20 nt, Artificial Sequence
  LRRK2 RNA guide
aagugugaucuagacuugcu

SEQ ID NO: 70999 - RNA, 20 nt, Artificial Sequence
  LRRK2 RNA guide
acaagugugaucuagacuug

SEQ ID NO: 71000 - RNA, 20 nt, Artificial Sequence
  LRRK2 RNA guide
accugagagcaagucuagau

SEQ ID NO: 71001 - RNA, 20 nt, Artificial Sequence
  LRRK2 RNA guide
agaaccugagagcaagucua

SEQ ID NO: 71002 - RNA, 20 nt, Artificial Sequence
  LRRK2 RNA guide
agagcaagucuagaucacac

SEQ ID NO: 71003 - RNA, 20 nt, Artificial Sequence
  LRRK2 RNA guide
agcaagucuagaucacacuu

SEQ ID NO: 71004 - RNA, 20 nt, Artificial Sequence
  LRRK2 RNA guide
agucuagaucacacuuguca

SEQ ID NO: 71005 - RNA, 20 nt, Artificial Sequence
  LRRK2 RNA guide
agugugaucuagacuugcuc

SEQ ID NO: 71006 - RNA, 20 nt, Artificial Sequence
  LRRK2 RNA guide
aucuagacuugcucucaggu

SEQ ID NO: 71007 - RNA, 20 nt, Artificial Sequence
  LRRK2 RNA guide
augacaagugugaucuagac

SEQ ID NO: 71008 - RNA, 20 nt, Artificial Sequence
  LRRK2 RNA guide
caagucuagaucacacuugu

SEQ ID NO: 71009 - RNA, 20 nt, Artificial Sequence
  LRRK2 RNA guide
caagugugaucuagacuugc

SEQ ID NO: 71010 - RNA, 20 nt, Artificial Sequence
  LRRK2 RNA guide
caugacaagugugaucuaga

SEQ ID NO: 71011 - RNA, 20 nt, Artificial Sequence
  LRRK2 RNA guide
ccugagagcaagucuagauc

SEQ ID NO: 71012 - RNA, 20 nt, Artificial Sequence
  LRRK2 RNA guide
cuagacuugcucucagguuc

SEQ ID NO: 71013 - RNA, 20 nt, Artificial Sequence
  LRRK2 RNA guide
cuagaucacacuugucaugc

SEQ ID NO: 71014 - RNA, 20 nt, Artificial Sequence
  LRRK2 RNA guide
cugagagcaagucuagauca

SEQ ID NO: 71015 - RNA, 20 nt, Artificial Sequence
  LRRK2 RNA guide
gaaccugagagcaagucuag

SEQ ID NO: 71016 - RNA, 20 nt, Artificial Sequence
  LRRK2 RNA guide
gacaagugugaucuagacuu

SEQ ID NO: 71017 - RNA, 20 nt, Artificial Sequence
  LRRK2 RNA guide
gagagcaagucuagaucaca

SEQ ID NO: 71018 - RNA, 20 nt, Artificial Sequence
  LRRK2 RNA guide
gagcaagucuagaucacacu

SEQ ID NO: 71019 - RNA, 20 nt, Artificial Sequence
  LRRK2 RNA guide
gaucuagacuugcucucagg

SEQ ID NO: 71020 - RNA, 20 nt, Artificial Sequence
  LRRK2 RNA guide
gcaagucuagaucacacuug

SEQ ID NO: 71021 - RNA, 20 nt, Artificial Sequence
  LRRK2 RNA guide
gcaugacaagugugaucuag

SEQ ID NO: 71022 - RNA, 20 nt, Artificial Sequence
  LRRK2 RNA guide
gucuagaucacacuugucau

SEQ ID NO: 71023 - RNA, 20 nt, Artificial Sequence
  LRRK2 RNA guide
gugaucuagacuugcucuca

SEQ ID NO: 71024 - RNA, 20 nt, Artificial Sequence
  LRRK2 RNA guide
gugcaugacaagugugaucu

SEQ ID NO: 71025 - RNA, 20 nt, Artificial Sequence
  LRRK2 RNA guide
gugugaucuagacuugcucu

SEQ ID NO: 71026 - RNA, 20 nt, Artificial Sequence
  LRRK2 RNA guide
uagaucacacuugucaugca

SEQ ID NO: 71027 - RNA, 20 nt, Artificial Sequence
  LRRK2 RNA guide
ucuagacuugcucucagguu

SEQ ID NO: 71028 - RNA, 20 nt, Artificial Sequence
  LRRK2 RNA guide
ucuagaucacacuugucaug

SEQ ID NO: 71029 - RNA, 20 nt, Artificial Sequence
  LRRK2 RNA guide
ugacaagugugaucuagacu

SEQ ID NO: 71030 - RNA, 20 nt, Artificial Sequence
  LRRK2 RNA guide
ugagagcaagucuagaucac

SEQ ID NO: 71031 - RNA, 20 nt, Artificial Sequence
  LRRK2 RNA guide
ugaucuagacuugcucucag

SEQ ID NO: 71032 - RNA, 20 nt, Artificial Sequence
  LRRK2 RNA guide
ugcaugacaagugugaucua

SEQ ID NO: 71033 - RNA, 20 nt, Artificial Sequence
  LRRK2 RNA guide
ugugaucuagacuugcucuc

SEQ ID NO: 71034 - RNA, 21 nt, Artificial Sequence
  LRRK2 RNA guide
aaccugagagcaagucuagau

SEQ ID NO: 71035 - RNA, 21 nt, Artificial Sequence
  LRRK2 RNA guide
aagucuagaucacacuuguca

SEQ ID NO: 71036 - RNA, 21 nt, Artificial Sequence
  LRRK2 RNA guide
aagugugaucuagacuugcuc

SEQ ID NO: 71037 - RNA, 21 nt, Artificial Sequence
  LRRK2 RNA guide
acaagugugaucuagacuugc

SEQ ID NO: 71038 - RNA, 21 nt, Artificial Sequence
  LRRK2 RNA guide
accugagagcaagucuagauc

SEQ ID NO: 71039 - RNA, 21 nt, Artificial Sequence
  LRRK2 RNA guide
agaaccugagagcaagucuag

SEQ ID NO: 71040 - RNA, 21 nt, Artificial Sequence
  LRRK2 RNA guide
agagcaagucuagaucacacu

SEQ ID NO: 71041 - RNA, 21 nt, Artificial Sequence
  LRRK2 RNA guide
agcaagucuagaucacacuug

SEQ ID NO: 71042 - RNA, 21 nt, Artificial Sequence
  LRRK2 RNA guide
agucuagaucacacuugucau

SEQ ID NO: 71043 - RNA, 21 nt, Artificial Sequence
  LRRK2 RNA guide
agugcaugacaagugugaucu

SEQ ID NO: 71044 - RNA, 21 nt, Artificial Sequence
  LRRK2 RNA guide
agugugaucuagacuugcucu

SEQ ID NO: 71045 - RNA, 21 nt, Artificial Sequence
  LRRK2 RNA guide
aucuagacuugcucucagguu

SEQ ID NO: 71046 - RNA, 21 nt, Artificial Sequence
  LRRK2 RNA guide
augacaagugugaucuagacu

SEQ ID NO: 71047 - RNA, 21 nt, Artificial Sequence
  LRRK2 RNA guide
caagucuagaucacacuuguc

SEQ ID NO: 71048 - RNA, 21 nt, Artificial Sequence
  LRRK2 RNA guide
caagugugaucuagacuugcu

SEQ ID NO: 71049 - RNA, 21 nt, Artificial Sequence
  LRRK2 RNA guide
cagaaccugagagcaagucua

SEQ ID NO: 71050 - RNA, 21 nt, Artificial Sequence
  LRRK2 RNA guide
caugacaagugugaucuagac

SEQ ID NO: 71051 - RNA, 21 nt, Artificial Sequence
  LRRK2 RNA guide
ccugagagcaagucuagauca

SEQ ID NO: 71052 - RNA, 21 nt, Artificial Sequence
  LRRK2 RNA guide
cuagacuugcucucagguucu

SEQ ID NO: 71053 - RNA, 21 nt, Artificial Sequence
  LRRK2 RNA guide
cuagaucacacuugucaugca

SEQ ID NO: 71054 - RNA, 21 nt, Artificial Sequence
  LRRK2 RNA guide
cugagagcaagucuagaucac

SEQ ID NO: 71055 - RNA, 21 nt, Artificial Sequence
  LRRK2 RNA guide
gaaccugagagcaagucuaga

SEQ ID NO: 71056 - RNA, 21 nt, Artificial Sequence
  LRRK2 RNA guide
gacaagugugaucuagacuug

SEQ ID NO: 71057 - RNA, 21 nt, Artificial Sequence
  LRRK2 RNA guide
gagagcaagucuagaucacac

SEQ ID NO: 71058 - RNA, 21 nt, Artificial Sequence
  LRRK2 RNA guide
gagcaagucuagaucacacuu

SEQ ID NO: 71059 - RNA, 21 nt, Artificial Sequence
  LRRK2 RNA guide
gaucuagacuugcucucaggu

SEQ ID NO: 71060 - RNA, 21 nt, Artificial Sequence
  LRRK2 RNA guide
gcaagucuagaucacacuugu

SEQ ID NO: 71061 - RNA, 21 nt, Artificial Sequence
  LRRK2 RNA guide
gcaugacaagugugaucuaga

SEQ ID NO: 71062 - RNA, 21 nt, Artificial Sequence
  LRRK2 RNA guide
gucuagaucacacuugucaug

SEQ ID NO: 71063 - RNA, 21 nt, Artificial Sequence
  LRRK2 RNA guide
gugaucuagacuugcucucag

SEQ ID NO: 71064 - RNA, 21 nt, Artificial Sequence
  LRRK2 RNA guide
gugcaugacaagugugaucua

SEQ ID NO: 71065 - RNA, 21 nt, Artificial Sequence
  LRRK2 RNA guide
gugugaucuagacuugcucuc

SEQ ID NO: 71066 - RNA, 21 nt, Artificial Sequence
  LRRK2 RNA guide
uagaucacacuugucaugcac

SEQ ID NO: 71067 - RNA, 21 nt, Artificial Sequence
  LRRK2 RNA guide
ucuagacuugcucucagguuc

SEQ ID NO: 71068 - RNA, 21 nt, Artificial Sequence
  LRRK2 RNA guide
ucuagaucacacuugucaugc

SEQ ID NO: 71069 - RNA, 21 nt, Artificial Sequence
  LRRK2 RNA guide
ugacaagugugaucuagacuu

SEQ ID NO: 71070 - RNA, 21 nt, Artificial Sequence
  LRRK2 RNA guide
ugagagcaagucuagaucaca

SEQ ID NO: 71071 - RNA, 21 nt, Artificial Sequence
  LRRK2 RNA guide
ugaucuagacuugcucucagg

SEQ ID NO: 71072 - RNA, 21 nt, Artificial Sequence
  LRRK2 RNA guide
ugcaugacaagugugaucuag

SEQ ID NO: 71073 - RNA, 21 nt, Artificial Sequence
  LRRK2 RNA guide
ugugaucuagacuugcucuca

SEQ ID NO: 71074 - RNA, 22 nt, Artificial Sequence
  LRRK2 RNA guide
aaccugagagcaagucuagauc

SEQ ID NO: 71075 - RNA, 22 nt, Artificial Sequence
  LRRK2 RNA guide
aagucuagaucacacuugucau

SEQ ID NO: 71076 - RNA, 22 nt, Artificial Sequence
  LRRK2 RNA guide
aagugugaucuagacuugcucu

SEQ ID NO: 71077 - RNA, 22 nt, Artificial Sequence
  LRRK2 RNA guide
acaagugugaucuagacuugcu

SEQ ID NO: 71078 - RNA, 22 nt, Artificial Sequence
  LRRK2 RNA guide
accugagagcaagucuagauca

SEQ ID NO: 71079 - RNA, 22 nt, Artificial Sequence
  LRRK2 RNA guide
agaaccugagagcaagucuaga

SEQ ID NO: 71080 - RNA, 22 nt, Artificial Sequence
  LRRK2 RNA guide
agagcaagucuagaucacacuu

SEQ ID NO: 71081 - RNA, 22 nt, Artificial Sequence
  LRRK2 RNA guide
agcaagucuagaucacacuugu

SEQ ID NO: 71082 - RNA, 22 nt, Artificial Sequence
  LRRK2 RNA guide
agucuagaucacacuugucaug

SEQ ID NO: 71083 - RNA, 22 nt, Artificial Sequence
  LRRK2 RNA guide
agugcaugacaagugugaucua

SEQ ID NO: 71084 - RNA, 22 nt, Artificial Sequence
  LRRK2 RNA guide
agugugaucuagacuugcucuc

SEQ ID NO: 71085 - RNA, 22 nt, Artificial Sequence
  LRRK2 RNA guide
aucuagacuugcucucagguuc

SEQ ID NO: 71086 - RNA, 22 nt, Artificial Sequence
  LRRK2 RNA guide
augacaagugugaucuagacuu

SEQ ID NO: 71087 - RNA, 22 nt, Artificial Sequence
  LRRK2 RNA guide
caagucuagaucacacuuguca

SEQ ID NO: 71088 - RNA, 22 nt, Artificial Sequence
  LRRK2 RNA guide
caagugugaucuagacuugcuc

SEQ ID NO: 71089 - RNA, 22 nt, Artificial Sequence
  LRRK2 RNA guide
cagaaccugagagcaagucuag

SEQ ID NO: 71090 - RNA, 22 nt, Artificial Sequence
  LRRK2 RNA guide
cagugcaugacaagugugaucu

SEQ ID NO: 71091 - RNA, 22 nt, Artificial Sequence
  LRRK2 RNA guide
caugacaagugugaucuagacu

SEQ ID NO: 71092 - RNA, 22 nt, Artificial Sequence
  LRRK2 RNA guide
ccugagagcaagucuagaucac

SEQ ID NO: 71093 - RNA, 22 nt, Artificial Sequence
  LRRK2 RNA guide
cuagacuugcucucagguucug

SEQ ID NO: 71094 - RNA, 22 nt, Artificial Sequence
  LRRK2 RNA guide
cuagaucacacuugucaugcac

SEQ ID NO: 71095 - RNA, 22 nt, Artificial Sequence
  LRRK2 RNA guide
cugagagcaagucuagaucaca

SEQ ID NO: 71096 - RNA, 22 nt, Artificial Sequence
  LRRK2 RNA guide
gaaccugagagcaagucuagau

SEQ ID NO: 71097 - RNA, 22 nt, Artificial Sequence
  LRRK2 RNA guide
gacaagugugaucuagacuugc

SEQ ID NO: 71098 - RNA, 22 nt, Artificial Sequence
  LRRK2 RNA guide
gagagcaagucuagaucacacu

SEQ ID NO: 71099 - RNA, 22 nt, Artificial Sequence
  LRRK2 RNA guide
gagcaagucuagaucacacuug

SEQ ID NO: 71100 - RNA, 22 nt, Artificial Sequence
  LRRK2 RNA guide
gaucuagacuugcucucagguu

SEQ ID NO: 71101 - RNA, 22 nt, Artificial Sequence
  LRRK2 RNA guide
gcaagucuagaucacacuuguc

SEQ ID NO: 71102 - RNA, 22 nt, Artificial Sequence
  LRRK2 RNA guide
gcaugacaagugugaucuagac

SEQ ID NO: 71103 - RNA, 22 nt, Artificial Sequence
  LRRK2 RNA guide
gucuagaucacacuugucaugc

SEQ ID NO: 71104 - RNA, 22 nt, Artificial Sequence
  LRRK2 RNA guide
gugaucuagacuugcucucagg

SEQ ID NO: 71105 - RNA, 22 nt, Artificial Sequence
  LRRK2 RNA guide
gugcaugacaagugugaucuag

SEQ ID NO: 71106 - RNA, 22 nt, Artificial Sequence
  LRRK2 RNA guide
gugugaucuagacuugcucuca

SEQ ID NO: 71107 - RNA, 22 nt, Artificial Sequence
  LRRK2 RNA guide
uagaucacacuugucaugcacu

SEQ ID NO: 71108 - RNA, 22 nt, Artificial Sequence
  LRRK2 RNA guide
ucagaaccugagagcaagucua

SEQ ID NO: 71109 - RNA, 22 nt, Artificial Sequence
  LRRK2 RNA guide
ucuagacuugcucucagguucu

SEQ ID NO: 71110 - RNA, 22 nt, Artificial Sequence
  LRRK2 RNA guide
ucuagaucacacuugucaugca

SEQ ID NO: 71111 - RNA, 22 nt, Artificial Sequence
  LRRK2 RNA guide
ugacaagugugaucuagacuug

SEQ ID NO: 71112 - RNA, 22 nt, Artificial Sequence
  LRRK2 RNA guide
ugagagcaagucuagaucacac

SEQ ID NO: 71113 - RNA, 22 nt, Artificial Sequence
  LRRK2 RNA guide
ugaucuagacuugcucucaggu

SEQ ID NO: 71114 - RNA, 22 nt, Artificial Sequence
  LRRK2 RNA guide
ugcaugacaagugugaucuaga

SEQ ID NO: 71115 - RNA, 22 nt, Artificial Sequence
  LRRK2 RNA guide
ugugaucuagacuugcucucag

SEQ ID NO: 71116 - RNA, 20 nt, Artificial Sequence
  LRRK2 RNA guide
aacagggugacugggguugg

SEQ ID NO: 71117 - RNA, 20 nt, Artificial Sequence
  LRRK2 RNA guide
aaccccagucacccuguuac

SEQ ID NO: 71118 - RNA, 20 nt, Artificial Sequence
  LRRK2 RNA guide
aaggugacucucagguguaa

SEQ ID NO: 71119 - RNA, 20 nt, Artificial Sequence
  LRRK2 RNA guide
acagggugacugggguuggg

SEQ ID NO: 71120 - RNA, 20 nt, Artificial Sequence
  LRRK2 RNA guide
accccagucacccuguuaca

SEQ ID NO: 71121 - RNA, 20 nt, Artificial Sequence
  LRRK2 RNA guide
acccuguuacaccugagagu

SEQ ID NO: 71122 - RNA, 20 nt, Artificial Sequence
  LRRK2 RNA guide
acucucagguguaacagggu

SEQ ID NO: 71123 - RNA, 20 nt, Artificial Sequence
  LRRK2 RNA guide
aggugacucucagguguaac

SEQ ID NO: 71124 - RNA, 20 nt, Artificial Sequence
  LRRK2 RNA guide
agguguaacagggugacugg

SEQ ID NO: 71125 - RNA, 20 nt, Artificial Sequence
  LRRK2 RNA guide
agucacccuguuacaccuga

SEQ ID NO: 71126 - RNA, 20 nt, Artificial Sequence
  LRRK2 RNA guide
auguaaggugacucucaggu

SEQ ID NO: 71127 - RNA, 20 nt, Artificial Sequence
  LRRK2 RNA guide
caaccccagucacccuguua

SEQ ID NO: 71128 - RNA, 20 nt, Artificial Sequence
  LRRK2 RNA guide
cacccuguuacaccugagag

SEQ ID NO: 71129 - RNA, 20 nt, Artificial Sequence
  LRRK2 RNA guide
cagguguaacagggugacug

SEQ ID NO: 71130 - RNA, 20 nt, Artificial Sequence
  LRRK2 RNA guide
cagucacccuguuacaccug

SEQ ID NO: 71131 - RNA, 20 nt, Artificial Sequence
  LRRK2 RNA guide
ccaaccccagucacccuguu

SEQ ID NO: 71132 - RNA, 20 nt, Artificial Sequence
  LRRK2 RNA guide
ccagucacccuguuacaccu

SEQ ID NO: 71133 - RNA, 20 nt, Artificial Sequence
  LRRK2 RNA guide
cccaaccccagucacccugu

SEQ ID NO: 71134 - RNA, 20 nt, Artificial Sequence
  LRRK2 RNA guide
cccagucacccuguuacacc

SEQ ID NO: 71135 - RNA, 20 nt, Artificial Sequence
  LRRK2 RNA guide
ccccaaccccagucacccug

SEQ ID NO: 71136 - RNA, 20 nt, Artificial Sequence
  LRRK2 RNA guide
ccccagucacccuguuacac

SEQ ID NO: 71137 - RNA, 20 nt, Artificial Sequence
  LRRK2 RNA guide
cccuguuacaccugagaguc

SEQ ID NO: 71138 - RNA, 20 nt, Artificial Sequence
  LRRK2 RNA guide
ccuguuacaccugagaguca

SEQ ID NO: 71139 - RNA, 20 nt, Artificial Sequence
  LRRK2 RNA guide
cucagguguaacagggugac

SEQ ID NO: 71140 - RNA, 20 nt, Artificial Sequence
  LRRK2 RNA guide
cuccccaaccccagucaccc

SEQ ID NO: 71141 - RNA, 20 nt, Artificial Sequence
  LRRK2 RNA guide
cucucagguguaacagggug

SEQ ID NO: 71142 - RNA, 20 nt, Artificial Sequence
  LRRK2 RNA guide
cuguuacaccugagagucac

SEQ ID NO: 71143 - RNA, 20 nt, Artificial Sequence
  LRRK2 RNA guide
gacucucagguguaacaggg

SEQ ID NO: 71144 - RNA, 20 nt, Artificial Sequence
  LRRK2 RNA guide
gcuccccaaccccagucacc

SEQ ID NO: 71145 - RNA, 20 nt, Artificial Sequence
  LRRK2 RNA guide
ggugacucucagguguaaca

SEQ ID NO: 71146 - RNA, 20 nt, Artificial Sequence
  LRRK2 RNA guide
gguguaacagggugacuggg

SEQ ID NO: 71147 - RNA, 20 nt, Artificial Sequence
  LRRK2 RNA guide
guaacagggugacugggguu

SEQ ID NO: 71148 - RNA, 20 nt, Artificial Sequence
  LRRK2 RNA guide
guaaggugacucucaggugu

SEQ ID NO: 71149 - RNA, 20 nt, Artificial Sequence
  LRRK2 RNA guide
gucacccuguuacaccugag

SEQ ID NO: 71150 - RNA, 20 nt, Artificial Sequence
  LRRK2 RNA guide
gugacucucagguguaacag

SEQ ID NO: 71151 - RNA, 20 nt, Artificial Sequence
  LRRK2 RNA guide
guguaacagggugacugggg

SEQ ID NO: 71152 - RNA, 20 nt, Artificial Sequence
  LRRK2 RNA guide
uaacagggugacugggguug

SEQ ID NO: 71153 - RNA, 20 nt, Artificial Sequence
  LRRK2 RNA guide
uaaggugacucucaggugua

SEQ ID NO: 71154 - RNA, 20 nt, Artificial Sequence
  LRRK2 RNA guide
ucacccuguuacaccugaga

SEQ ID NO: 71155 - RNA, 20 nt, Artificial Sequence
  LRRK2 RNA guide
ucagguguaacagggugacu

SEQ ID NO: 71156 - RNA, 20 nt, Artificial Sequence
  LRRK2 RNA guide
uccccaaccccagucacccu

SEQ ID NO: 71157 - RNA, 20 nt, Artificial Sequence
  LRRK2 RNA guide
ucucagguguaacaggguga

SEQ ID NO: 71158 - RNA, 20 nt, Artificial Sequence
  LRRK2 RNA guide
ugacucucagguguaacagg

SEQ ID NO: 71159 - RNA, 20 nt, Artificial Sequence
  LRRK2 RNA guide
ugcuccccaaccccagucac

SEQ ID NO: 71160 - RNA, 20 nt, Artificial Sequence
  LRRK2 RNA guide
uguaacagggugacuggggu

SEQ ID NO: 71161 - RNA, 20 nt, Artificial Sequence
  LRRK2 RNA guide
uguaaggugacucucaggug

SEQ ID NO: 71162 - RNA, 20 nt, Artificial Sequence
  LRRK2 RNA guide
uguuacaccugagagucacc

SEQ ID NO: 71163 - RNA, 20 nt, Artificial Sequence
  LRRK2 RNA guide
uugcuccccaaccccaguca

SEQ ID NO: 71164 - RNA, 21 nt, Artificial Sequence
  LRRK2 RNA guide
aacagggugacugggguuggg

SEQ ID NO: 71165 - RNA, 21 nt, Artificial Sequence
  LRRK2 RNA guide
aaccccagucacccuguuaca

SEQ ID NO: 71166 - RNA, 21 nt, Artificial Sequence
  LRRK2 RNA guide
aaggugacucucagguguaac

SEQ ID NO: 71167 - RNA, 21 nt, Artificial Sequence
  LRRK2 RNA guide
aauguaaggugacucucaggu

SEQ ID NO: 71168 - RNA, 21 nt, Artificial Sequence
  LRRK2 RNA guide
acagggugacugggguugggg

SEQ ID NO: 71169 - RNA, 21 nt, Artificial Sequence
  LRRK2 RNA guide
accccagucacccuguuacac

SEQ ID NO: 71170 - RNA, 21 nt, Artificial Sequence
  LRRK2 RNA guide
acccuguuacaccugagaguc

SEQ ID NO: 71171 - RNA, 21 nt, Artificial Sequence
  LRRK2 RNA guide
acucucagguguaacagggug

SEQ ID NO: 71172 - RNA, 21 nt, Artificial Sequence
  LRRK2 RNA guide
aggugacucucagguguaaca

SEQ ID NO: 71173 - RNA, 21 nt, Artificial Sequence
  LRRK2 RNA guide
agguguaacagggugacuggg

SEQ ID NO: 71174 - RNA, 21 nt, Artificial Sequence
  LRRK2 RNA guide
agucacccuguuacaccugag

SEQ ID NO: 71175 - RNA, 21 nt, Artificial Sequence
  LRRK2 RNA guide
auguaaggugacucucaggug

SEQ ID NO: 71176 - RNA, 21 nt, Artificial Sequence
  LRRK2 RNA guide
auugcuccccaaccccaguca

SEQ ID NO: 71177 - RNA, 21 nt, Artificial Sequence
  LRRK2 RNA guide
caaccccagucacccuguuac

SEQ ID NO: 71178 - RNA, 21 nt, Artificial Sequence
  LRRK2 RNA guide
cacccuguuacaccugagagu

SEQ ID NO: 71179 - RNA, 21 nt, Artificial Sequence
  LRRK2 RNA guide
cagguguaacagggugacugg

SEQ ID NO: 71180 - RNA, 21 nt, Artificial Sequence
  LRRK2 RNA guide
cagucacccuguuacaccuga

SEQ ID NO: 71181 - RNA, 21 nt, Artificial Sequence
  LRRK2 RNA guide
ccaaccccagucacccuguua

SEQ ID NO: 71182 - RNA, 21 nt, Artificial Sequence
  LRRK2 RNA guide
ccagucacccuguuacaccug

SEQ ID NO: 71183 - RNA, 21 nt, Artificial Sequence
  LRRK2 RNA guide
cccaaccccagucacccuguu

SEQ ID NO: 71184 - RNA, 21 nt, Artificial Sequence
  LRRK2 RNA guide
cccagucacccuguuacaccu

SEQ ID NO: 71185 - RNA, 21 nt, Artificial Sequence
  LRRK2 RNA guide
ccccaaccccagucacccugu

SEQ ID NO: 71186 - RNA, 21 nt, Artificial Sequence
  LRRK2 RNA guide
ccccagucacccuguuacacc

SEQ ID NO: 71187 - RNA, 21 nt, Artificial Sequence
  LRRK2 RNA guide
cccuguuacaccugagaguca

SEQ ID NO: 71188 - RNA, 21 nt, Artificial Sequence
  LRRK2 RNA guide
ccuguuacaccugagagucac

SEQ ID NO: 71189 - RNA, 21 nt, Artificial Sequence
  LRRK2 RNA guide
cucagguguaacagggugacu

SEQ ID NO: 71190 - RNA, 21 nt, Artificial Sequence
  LRRK2 RNA guide
cuccccaaccccagucacccu

SEQ ID NO: 71191 - RNA, 21 nt, Artificial Sequence
  LRRK2 RNA guide
cucucagguguaacaggguga

SEQ ID NO: 71192 - RNA, 21 nt, Artificial Sequence
  LRRK2 RNA guide
cuguuacaccugagagucacc

SEQ ID NO: 71193 - RNA, 21 nt, Artificial Sequence
  LRRK2 RNA guide
gacucucagguguaacagggu

SEQ ID NO: 71194 - RNA, 21 nt, Artificial Sequence
  LRRK2 RNA guide
gcuccccaaccccagucaccc

SEQ ID NO: 71195 - RNA, 21 nt, Artificial Sequence
  LRRK2 RNA guide
ggugacucucagguguaacag

SEQ ID NO: 71196 - RNA, 21 nt, Artificial Sequence
  LRRK2 RNA guide
gguguaacagggugacugggg

SEQ ID NO: 71197 - RNA, 21 nt, Artificial Sequence
  LRRK2 RNA guide
guaacagggugacugggguug

SEQ ID NO: 71198 - RNA, 21 nt, Artificial Sequence
  LRRK2 RNA guide
guaaggugacucucaggugua

SEQ ID NO: 71199 - RNA, 21 nt, Artificial Sequence
  LRRK2 RNA guide
gucacccuguuacaccugaga

SEQ ID NO: 71200 - RNA, 21 nt, Artificial Sequence
  LRRK2 RNA guide
gugacucucagguguaacagg

SEQ ID NO: 71201 - RNA, 21 nt, Artificial Sequence
  LRRK2 RNA guide
guguaacagggugacuggggu

SEQ ID NO: 71202 - RNA, 21 nt, Artificial Sequence
  LRRK2 RNA guide
uaacagggugacugggguugg

SEQ ID NO: 71203 - RNA, 21 nt, Artificial Sequence
  LRRK2 RNA guide
uaaggugacucucagguguaa

SEQ ID NO: 71204 - RNA, 21 nt, Artificial Sequence
  LRRK2 RNA guide
ucacccuguuacaccugagag

SEQ ID NO: 71205 - RNA, 21 nt, Artificial Sequence
  LRRK2 RNA guide
ucagguguaacagggugacug

SEQ ID NO: 71206 - RNA, 21 nt, Artificial Sequence
  LRRK2 RNA guide
uccccaaccccagucacccug

SEQ ID NO: 71207 - RNA, 21 nt, Artificial Sequence
  LRRK2 RNA guide
ucucagguguaacagggugac

SEQ ID NO: 71208 - RNA, 21 nt, Artificial Sequence
  LRRK2 RNA guide
ugacucucagguguaacaggg

SEQ ID NO: 71209 - RNA, 21 nt, Artificial Sequence
  LRRK2 RNA guide
ugcuccccaaccccagucacc

SEQ ID NO: 71210 - RNA, 21 nt, Artificial Sequence
  LRRK2 RNA guide
uguaacagggugacugggguu

SEQ ID NO: 71211 - RNA, 21 nt, Artificial Sequence
  LRRK2 RNA guide
uguaaggugacucucaggugu

SEQ ID NO: 71212 - RNA, 21 nt, Artificial Sequence
  LRRK2 RNA guide
uguuacaccugagagucaccu

SEQ ID NO: 71213 - RNA, 21 nt, Artificial Sequence
  LRRK2 RNA guide
uugcuccccaaccccagucac

SEQ ID NO: 71214 - RNA, 22 nt, Artificial Sequence
  LRRK2 RNA guide
aacagggugacugggguugggg

SEQ ID NO: 71215 - RNA, 22 nt, Artificial Sequence
  LRRK2 RNA guide
aaccccagucacccuguuacac

SEQ ID NO: 71216 - RNA, 22 nt, Artificial Sequence
  LRRK2 RNA guide
aaggugacucucagguguaaca

SEQ ID NO: 71217 - RNA, 22 nt, Artificial Sequence
  LRRK2 RNA guide
aauguaaggugacucucaggug

SEQ ID NO: 71218 - RNA, 22 nt, Artificial Sequence
  LRRK2 RNA guide
acagggugacugggguugggga

SEQ ID NO: 71219 - RNA, 22 nt, Artificial Sequence
  LRRK2 RNA guide
accccagucacccuguuacacc

SEQ ID NO: 71220 - RNA, 22 nt, Artificial Sequence
  LRRK2 RNA guide
acccuguuacaccugagaguca

SEQ ID NO: 71221 - RNA, 22 nt, Artificial Sequence
  LRRK2 RNA guide
acucucagguguaacaggguga

SEQ ID NO: 71222 - RNA, 22 nt, Artificial Sequence
  LRRK2 RNA guide
aggugacucucagguguaacag

SEQ ID NO: 71223 - RNA, 22 nt, Artificial Sequence
  LRRK2 RNA guide
agguguaacagggugacugggg

SEQ ID NO: 71224 - RNA, 22 nt, Artificial Sequence
  LRRK2 RNA guide
agucacccuguuacaccugaga

SEQ ID NO: 71225 - RNA, 22 nt, Artificial Sequence
  LRRK2 RNA guide
auguaaggugacucucaggugu

SEQ ID NO: 71226 - RNA, 22 nt, Artificial Sequence
  LRRK2 RNA guide
auugcuccccaaccccagucac

SEQ ID NO: 71227 - RNA, 22 nt, Artificial Sequence
  LRRK2 RNA guide
caaccccagucacccuguuaca

SEQ ID NO: 71228 - RNA, 22 nt, Artificial Sequence
  LRRK2 RNA guide
cacccuguuacaccugagaguc

SEQ ID NO: 71229 - RNA, 22 nt, Artificial Sequence
  LRRK2 RNA guide
cagguguaacagggugacuggg

SEQ ID NO: 71230 - RNA, 22 nt, Artificial Sequence
  LRRK2 RNA guide
cagucacccuguuacaccugag

SEQ ID NO: 71231 - RNA, 22 nt, Artificial Sequence
  LRRK2 RNA guide
cauugcuccccaaccccaguca

SEQ ID NO: 71232 - RNA, 22 nt, Artificial Sequence
  LRRK2 RNA guide
ccaaccccagucacccuguuac

SEQ ID NO: 71233 - RNA, 22 nt, Artificial Sequence
  LRRK2 RNA guide
ccagucacccuguuacaccuga

SEQ ID NO: 71234 - RNA, 22 nt, Artificial Sequence
  LRRK2 RNA guide
cccaaccccagucacccuguua

SEQ ID NO: 71235 - RNA, 22 nt, Artificial Sequence
  LRRK2 RNA guide
cccagucacccuguuacaccug

SEQ ID NO: 71236 - RNA, 22 nt, Artificial Sequence
  LRRK2 RNA guide
ccccaaccccagucacccuguu

SEQ ID NO: 71237 - RNA, 22 nt, Artificial Sequence
  LRRK2 RNA guide
ccccagucacccuguuacaccu

SEQ ID NO: 71238 - RNA, 22 nt, Artificial Sequence
  LRRK2 RNA guide
cccuguuacaccugagagucac

SEQ ID NO: 71239 - RNA, 22 nt, Artificial Sequence
  LRRK2 RNA guide
ccuguuacaccugagagucacc

SEQ ID NO: 71240 - RNA, 22 nt, Artificial Sequence
  LRRK2 RNA guide
cucagguguaacagggugacug

SEQ ID NO: 71241 - RNA, 22 nt, Artificial Sequence
  LRRK2 RNA guide
cuccccaaccccagucacccug

SEQ ID NO: 71242 - RNA, 22 nt, Artificial Sequence
  LRRK2 RNA guide
cucucagguguaacagggugac

SEQ ID NO: 71243 - RNA, 22 nt, Artificial Sequence
  LRRK2 RNA guide
cuguuacaccugagagucaccu

SEQ ID NO: 71244 - RNA, 22 nt, Artificial Sequence
  LRRK2 RNA guide
gaauguaaggugacucucaggu

SEQ ID NO: 71245 - RNA, 22 nt, Artificial Sequence
  LRRK2 RNA guide
gacucucagguguaacagggug

SEQ ID NO: 71246 - RNA, 22 nt, Artificial Sequence
  LRRK2 RNA guide
gcuccccaaccccagucacccu

SEQ ID NO: 71247 - RNA, 22 nt, Artificial Sequence
  LRRK2 RNA guide
ggugacucucagguguaacagg

SEQ ID NO: 71248 - RNA, 22 nt, Artificial Sequence
  LRRK2 RNA guide
gguguaacagggugacuggggu

SEQ ID NO: 71249 - RNA, 22 nt, Artificial Sequence
  LRRK2 RNA guide
guaacagggugacugggguugg

SEQ ID NO: 71250 - RNA, 22 nt, Artificial Sequence
  LRRK2 RNA guide
guaaggugacucucagguguaa

SEQ ID NO: 71251 - RNA, 22 nt, Artificial Sequence
  LRRK2 RNA guide
gucacccuguuacaccugagag

SEQ ID NO: 71252 - RNA, 22 nt, Artificial Sequence
  LRRK2 RNA guide
gugacucucagguguaacaggg

SEQ ID NO: 71253 - RNA, 22 nt, Artificial Sequence
  LRRK2 RNA guide
guguaacagggugacugggguu

SEQ ID NO: 71254 - RNA, 22 nt, Artificial Sequence
  LRRK2 RNA guide
uaacagggugacugggguuggg

SEQ ID NO: 71255 - RNA, 22 nt, Artificial Sequence
  LRRK2 RNA guide
uaaggugacucucagguguaac

SEQ ID NO: 71256 - RNA, 22 nt, Artificial Sequence
  LRRK2 RNA guide
ucacccuguuacaccugagagu

SEQ ID NO: 71257 - RNA, 22 nt, Artificial Sequence
  LRRK2 RNA guide
ucagguguaacagggugacugg

SEQ ID NO: 71258 - RNA, 22 nt, Artificial Sequence
  LRRK2 RNA guide
uccccaaccccagucacccugu

SEQ ID NO: 71259 - RNA, 22 nt, Artificial Sequence
  LRRK2 RNA guide
ucucagguguaacagggugacu

SEQ ID NO: 71260 - RNA, 22 nt, Artificial Sequence
  LRRK2 RNA guide
ugacucucagguguaacagggu

SEQ ID NO: 71261 - RNA, 22 nt, Artificial Sequence
  LRRK2 RNA guide
ugcuccccaaccccagucaccc

SEQ ID NO: 71262 - RNA, 22 nt, Artificial Sequence
  LRRK2 RNA guide
uguaacagggugacugggguug

SEQ ID NO: 71263 - RNA, 22 nt, Artificial Sequence
  LRRK2 RNA guide
uguaaggugacucucaggugua

SEQ ID NO: 71264 - RNA, 22 nt, Artificial Sequence
  LRRK2 RNA guide
uguuacaccugagagucaccuu

SEQ ID NO: 71265 - RNA, 22 nt, Artificial Sequence
  LRRK2 RNA guide
uugcuccccaaccccagucacc

SEQ ID NO: 71266 - RNA, 20 nt, Artificial Sequence
  LRRK2 RNA guide
aaccccagucacccuauuac

SEQ ID NO: 71267 - RNA, 20 nt, Artificial Sequence
  LRRK2 RNA guide
aauagggugacugggguugg

SEQ ID NO: 71268 - RNA, 20 nt, Artificial Sequence
  LRRK2 RNA guide
accccagucacccuauuaca

SEQ ID NO: 71269 - RNA, 20 nt, Artificial Sequence
  LRRK2 RNA guide
acccuauuacaccugagagu

SEQ ID NO: 71270 - RNA, 20 nt, Artificial Sequence
  LRRK2 RNA guide
acucucagguguaauagggu

SEQ ID NO: 71271 - RNA, 20 nt, Artificial Sequence
  LRRK2 RNA guide
aggugacucucagguguaau

SEQ ID NO: 71272 - RNA, 20 nt, Artificial Sequence
  LRRK2 RNA guide
agguguaauagggugacugg

SEQ ID NO: 71273 - RNA, 20 nt, Artificial Sequence
  LRRK2 RNA guide
agucacccuauuacaccuga

SEQ ID NO: 71274 - RNA, 20 nt, Artificial Sequence
  LRRK2 RNA guide
auagggugacugggguuggg

SEQ ID NO: 71275 - RNA, 20 nt, Artificial Sequence
  LRRK2 RNA guide
caaccccagucacccuauua

SEQ ID NO: 71276 - RNA, 20 nt, Artificial Sequence
  LRRK2 RNA guide
cacccuauuacaccugagag

SEQ ID NO: 71277 - RNA, 20 nt, Artificial Sequence
  LRRK2 RNA guide
cagguguaauagggugacug

SEQ ID NO: 71278 - RNA, 20 nt, Artificial Sequence
  LRRK2 RNA guide
cagucacccuauuacaccug

SEQ ID NO: 71279 - RNA, 20 nt, Artificial Sequence
  LRRK2 RNA guide
ccaaccccagucacccuauu

SEQ ID NO: 71280 - RNA, 20 nt, Artificial Sequence
  LRRK2 RNA guide
ccagucacccuauuacaccu

SEQ ID NO: 71281 - RNA, 20 nt, Artificial Sequence
  LRRK2 RNA guide
cccaaccccagucacccuau

SEQ ID NO: 71282 - RNA, 20 nt, Artificial Sequence
  LRRK2 RNA guide
cccagucacccuauuacacc

SEQ ID NO: 71283 - RNA, 20 nt, Artificial Sequence
  LRRK2 RNA guide
ccccaaccccagucacccua

SEQ ID NO: 71284 - RNA, 20 nt, Artificial Sequence
  LRRK2 RNA guide
ccccagucacccuauuacac

SEQ ID NO: 71285 - RNA, 20 nt, Artificial Sequence
  LRRK2 RNA guide
cccuauuacaccugagaguc

SEQ ID NO: 71286 - RNA, 20 nt, Artificial Sequence
  LRRK2 RNA guide
ccuauuacaccugagaguca

SEQ ID NO: 71287 - RNA, 20 nt, Artificial Sequence
  LRRK2 RNA guide
cuauuacaccugagagucac

SEQ ID NO: 71288 - RNA, 20 nt, Artificial Sequence
  LRRK2 RNA guide
cucagguguaauagggugac

SEQ ID NO: 71289 - RNA, 20 nt, Artificial Sequence
  LRRK2 RNA guide
cucucagguguaauagggug

SEQ ID NO: 71290 - RNA, 20 nt, Artificial Sequence
  LRRK2 RNA guide
gacucucagguguaauaggg

SEQ ID NO: 71291 - RNA, 20 nt, Artificial Sequence
  LRRK2 RNA guide
ggugacucucagguguaaua

SEQ ID NO: 71292 - RNA, 20 nt, Artificial Sequence
  LRRK2 RNA guide
gguguaauagggugacuggg

SEQ ID NO: 71293 - RNA, 20 nt, Artificial Sequence
  LRRK2 RNA guide
guaauagggugacugggguu

SEQ ID NO: 71294 - RNA, 20 nt, Artificial Sequence
  LRRK2 RNA guide
gucacccuauuacaccugag

SEQ ID NO: 71295 - RNA, 20 nt, Artificial Sequence
  LRRK2 RNA guide
gugacucucagguguaauag

SEQ ID NO: 71296 - RNA, 20 nt, Artificial Sequence
  LRRK2 RNA guide
guguaauagggugacugggg

SEQ ID NO: 71297 - RNA, 20 nt, Artificial Sequence
  LRRK2 RNA guide
uaauagggugacugggguug

SEQ ID NO: 71298 - RNA, 20 nt, Artificial Sequence
  LRRK2 RNA guide
uauuacaccugagagucacc

SEQ ID NO: 71299 - RNA, 20 nt, Artificial Sequence
  LRRK2 RNA guide
ucacccuauuacaccugaga

SEQ ID NO: 71300 - RNA, 20 nt, Artificial Sequence
  LRRK2 RNA guide
ucagguguaauagggugacu

SEQ ID NO: 71301 - RNA, 20 nt, Artificial Sequence
  LRRK2 RNA guide
ucucagguguaauaggguga

SEQ ID NO: 71302 - RNA, 20 nt, Artificial Sequence
  LRRK2 RNA guide
ugacucucagguguaauagg

SEQ ID NO: 71303 - RNA, 20 nt, Artificial Sequence
  LRRK2 RNA guide
uguaauagggugacuggggu

SEQ ID NO: 71304 - RNA, 21 nt, Artificial Sequence
  LRRK2 RNA guide
aaccccagucacccuauuaca

SEQ ID NO: 71305 - RNA, 21 nt, Artificial Sequence
  LRRK2 RNA guide
aaggugacucucagguguaau

SEQ ID NO: 71306 - RNA, 21 nt, Artificial Sequence
  LRRK2 RNA guide
aauagggugacugggguuggg

SEQ ID NO: 71307 - RNA, 21 nt, Artificial Sequence
  LRRK2 RNA guide
accccagucacccuauuacac

SEQ ID NO: 71308 - RNA, 21 nt, Artificial Sequence
  LRRK2 RNA guide
acccuauuacaccugagaguc

SEQ ID NO: 71309 - RNA, 21 nt, Artificial Sequence
  LRRK2 RNA guide
acucucagguguaauagggug

SEQ ID NO: 71310 - RNA, 21 nt, Artificial Sequence
  LRRK2 RNA guide
aggugacucucagguguaaua

SEQ ID NO: 71311 - RNA, 21 nt, Artificial Sequence
  LRRK2 RNA guide
agguguaauagggugacuggg

SEQ ID NO: 71312 - RNA, 21 nt, Artificial Sequence
  LRRK2 RNA guide
agucacccuauuacaccugag

SEQ ID NO: 71313 - RNA, 21 nt, Artificial Sequence
  LRRK2 RNA guide
auagggugacugggguugggg

SEQ ID NO: 71314 - RNA, 21 nt, Artificial Sequence
  LRRK2 RNA guide
caaccccagucacccuauuac

SEQ ID NO: 71315 - RNA, 21 nt, Artificial Sequence
  LRRK2 RNA guide
cacccuauuacaccugagagu

SEQ ID NO: 71316 - RNA, 21 nt, Artificial Sequence
  LRRK2 RNA guide
cagguguaauagggugacugg

SEQ ID NO: 71317 - RNA, 21 nt, Artificial Sequence
  LRRK2 RNA guide
cagucacccuauuacaccuga

SEQ ID NO: 71318 - RNA, 21 nt, Artificial Sequence
  LRRK2 RNA guide
ccaaccccagucacccuauua

SEQ ID NO: 71319 - RNA, 21 nt, Artificial Sequence
  LRRK2 RNA guide
ccagucacccuauuacaccug

SEQ ID NO: 71320 - RNA, 21 nt, Artificial Sequence
  LRRK2 RNA guide
cccaaccccagucacccuauu

SEQ ID NO: 71321 - RNA, 21 nt, Artificial Sequence
  LRRK2 RNA guide
cccagucacccuauuacaccu

SEQ ID NO: 71322 - RNA, 21 nt, Artificial Sequence
  LRRK2 RNA guide
ccccaaccccagucacccuau

SEQ ID NO: 71323 - RNA, 21 nt, Artificial Sequence
  LRRK2 RNA guide
ccccagucacccuauuacacc

SEQ ID NO: 71324 - RNA, 21 nt, Artificial Sequence
  LRRK2 RNA guide
cccuauuacaccugagaguca

SEQ ID NO: 71325 - RNA, 21 nt, Artificial Sequence
  LRRK2 RNA guide
ccuauuacaccugagagucac

SEQ ID NO: 71326 - RNA, 21 nt, Artificial Sequence
  LRRK2 RNA guide
cuauuacaccugagagucacc

SEQ ID NO: 71327 - RNA, 21 nt, Artificial Sequence
  LRRK2 RNA guide
cucagguguaauagggugacu

SEQ ID NO: 71328 - RNA, 21 nt, Artificial Sequence
  LRRK2 RNA guide
cucucagguguaauaggguga

SEQ ID NO: 71329 - RNA, 21 nt, Artificial Sequence
  LRRK2 RNA guide
gacucucagguguaauagggu

SEQ ID NO: 71330 - RNA, 21 nt, Artificial Sequence
  LRRK2 RNA guide
ggugacucucagguguaauag

SEQ ID NO: 71331 - RNA, 21 nt, Artificial Sequence
  LRRK2 RNA guide
gguguaauagggugacugggg

SEQ ID NO: 71332 - RNA, 21 nt, Artificial Sequence
  LRRK2 RNA guide
guaauagggugacugggguug

SEQ ID NO: 71333 - RNA, 21 nt, Artificial Sequence
  LRRK2 RNA guide
gucacccuauuacaccugaga

SEQ ID NO: 71334 - RNA, 21 nt, Artificial Sequence
  LRRK2 RNA guide
gugacucucagguguaauagg

SEQ ID NO: 71335 - RNA, 21 nt, Artificial Sequence
  LRRK2 RNA guide
guguaauagggugacuggggu

SEQ ID NO: 71336 - RNA, 21 nt, Artificial Sequence
  LRRK2 RNA guide
uaauagggugacugggguugg

SEQ ID NO: 71337 - RNA, 21 nt, Artificial Sequence
  LRRK2 RNA guide
uauuacaccugagagucaccu

SEQ ID NO: 71338 - RNA, 21 nt, Artificial Sequence
  LRRK2 RNA guide
ucacccuauuacaccugagag

SEQ ID NO: 71339 - RNA, 21 nt, Artificial Sequence
  LRRK2 RNA guide
ucagguguaauagggugacug

SEQ ID NO: 71340 - RNA, 21 nt, Artificial Sequence
  LRRK2 RNA guide
uccccaaccccagucacccua

SEQ ID NO: 71341 - RNA, 21 nt, Artificial Sequence
  LRRK2 RNA guide
ucucagguguaauagggugac

SEQ ID NO: 71342 - RNA, 21 nt, Artificial Sequence
  LRRK2 RNA guide
ugacucucagguguaauaggg

SEQ ID NO: 71343 - RNA, 21 nt, Artificial Sequence
  LRRK2 RNA guide
uguaauagggugacugggguu

SEQ ID NO: 71344 - RNA, 22 nt, Artificial Sequence
  LRRK2 RNA guide
aaccccagucacccuauuacac

SEQ ID NO: 71345 - RNA, 22 nt, Artificial Sequence
  LRRK2 RNA guide
aaggugacucucagguguaaua

SEQ ID NO: 71346 - RNA, 22 nt, Artificial Sequence
  LRRK2 RNA guide
aauagggugacugggguugggg

SEQ ID NO: 71347 - RNA, 22 nt, Artificial Sequence
  LRRK2 RNA guide
accccagucacccuauuacacc

SEQ ID NO: 71348 - RNA, 22 nt, Artificial Sequence
  LRRK2 RNA guide
acccuauuacaccugagaguca

SEQ ID NO: 71349 - RNA, 22 nt, Artificial Sequence
  LRRK2 RNA guide
acucucagguguaauaggguga

SEQ ID NO: 71350 - RNA, 22 nt, Artificial Sequence
  LRRK2 RNA guide
aggugacucucagguguaauag

SEQ ID NO: 71351 - RNA, 22 nt, Artificial Sequence
  LRRK2 RNA guide
agguguaauagggugacugggg

SEQ ID NO: 71352 - RNA, 22 nt, Artificial Sequence
  LRRK2 RNA guide
agucacccuauuacaccugaga

SEQ ID NO: 71353 - RNA, 22 nt, Artificial Sequence
  LRRK2 RNA guide
auagggugacugggguugggga

SEQ ID NO: 71354 - RNA, 22 nt, Artificial Sequence
  LRRK2 RNA guide
caaccccagucacccuauuaca

SEQ ID NO: 71355 - RNA, 22 nt, Artificial Sequence
  LRRK2 RNA guide
cacccuauuacaccugagaguc

SEQ ID NO: 71356 - RNA, 22 nt, Artificial Sequence
  LRRK2 RNA guide
cagguguaauagggugacuggg

SEQ ID NO: 71357 - RNA, 22 nt, Artificial Sequence
  LRRK2 RNA guide
cagucacccuauuacaccugag

SEQ ID NO: 71358 - RNA, 22 nt, Artificial Sequence
  LRRK2 RNA guide
ccaaccccagucacccuauuac

SEQ ID NO: 71359 - RNA, 22 nt, Artificial Sequence
  LRRK2 RNA guide
ccagucacccuauuacaccuga

SEQ ID NO: 71360 - RNA, 22 nt, Artificial Sequence
  LRRK2 RNA guide
cccaaccccagucacccuauua

SEQ ID NO: 71361 - RNA, 22 nt, Artificial Sequence
  LRRK2 RNA guide
cccagucacccuauuacaccug

SEQ ID NO: 71362 - RNA, 22 nt, Artificial Sequence
  LRRK2 RNA guide
ccccaaccccagucacccuauu

SEQ ID NO: 71363 - RNA, 22 nt, Artificial Sequence
  LRRK2 RNA guide
ccccagucacccuauuacaccu

SEQ ID NO: 71364 - RNA, 22 nt, Artificial Sequence
  LRRK2 RNA guide
cccuauuacaccugagagucac

SEQ ID NO: 71365 - RNA, 22 nt, Artificial Sequence
  LRRK2 RNA guide
ccuauuacaccugagagucacc

SEQ ID NO: 71366 - RNA, 22 nt, Artificial Sequence
  LRRK2 RNA guide
cuauuacaccugagagucaccu

SEQ ID NO: 71367 - RNA, 22 nt, Artificial Sequence
  LRRK2 RNA guide
cucagguguaauagggugacug

SEQ ID NO: 71368 - RNA, 22 nt, Artificial Sequence
  LRRK2 RNA guide
cuccccaaccccagucacccua

SEQ ID NO: 71369 - RNA, 22 nt, Artificial Sequence
  LRRK2 RNA guide
cucucagguguaauagggugac

SEQ ID NO: 71370 - RNA, 22 nt, Artificial Sequence
  LRRK2 RNA guide
gacucucagguguaauagggug

SEQ ID NO: 71371 - RNA, 22 nt, Artificial Sequence
  LRRK2 RNA guide
ggugacucucagguguaauagg

SEQ ID NO: 71372 - RNA, 22 nt, Artificial Sequence
  LRRK2 RNA guide
gguguaauagggugacuggggu

SEQ ID NO: 71373 - RNA, 22 nt, Artificial Sequence
  LRRK2 RNA guide
guaauagggugacugggguugg

SEQ ID NO: 71374 - RNA, 22 nt, Artificial Sequence
  LRRK2 RNA guide
gucacccuauuacaccugagag

SEQ ID NO: 71375 - RNA, 22 nt, Artificial Sequence
  LRRK2 RNA guide
gugacucucagguguaauaggg

SEQ ID NO: 71376 - RNA, 22 nt, Artificial Sequence
  LRRK2 RNA guide
guguaauagggugacugggguu

SEQ ID NO: 71377 - RNA, 22 nt, Artificial Sequence
  LRRK2 RNA guide
uaaggugacucucagguguaau

SEQ ID NO: 71378 - RNA, 22 nt, Artificial Sequence
  LRRK2 RNA guide
uaauagggugacugggguuggg

SEQ ID NO: 71379 - RNA, 22 nt, Artificial Sequence
  LRRK2 RNA guide
uauuacaccugagagucaccuu

SEQ ID NO: 71380 - RNA, 22 nt, Artificial Sequence
  LRRK2 RNA guide
ucacccuauuacaccugagagu

SEQ ID NO: 71381 - RNA, 22 nt, Artificial Sequence
  LRRK2 RNA guide
ucagguguaauagggugacugg

SEQ ID NO: 71382 - RNA, 22 nt, Artificial Sequence
  LRRK2 RNA guide
uccccaaccccagucacccuau

SEQ ID NO: 71383 - RNA, 22 nt, Artificial Sequence
  LRRK2 RNA guide
ucucagguguaauagggugacu

SEQ ID NO: 71384 - RNA, 22 nt, Artificial Sequence
  LRRK2 RNA guide
ugacucucagguguaauagggu

SEQ ID NO: 71385 - RNA, 22 nt, Artificial Sequence
  LRRK2 RNA guide
uguaauagggugacugggguug

SEQ ID NO: 71386 - RNA, 20 nt, Artificial Sequence
  LRRK2 RNA guide
aaauguuccuuccugaaagg

SEQ ID NO: 71387 - RNA, 20 nt, Artificial Sequence
  LRRK2 RNA guide
aaggaacauuucuggauacu

SEQ ID NO: 71388 - RNA, 20 nt, Artificial Sequence
  LRRK2 RNA guide
aauguuccuuccugaaaggg

SEQ ID NO: 71389 - RNA, 20 nt, Artificial Sequence
  LRRK2 RNA guide
acccuuucaggaaggaacau

SEQ ID NO: 71390 - RNA, 20 nt, Artificial Sequence
  LRRK2 RNA guide
agaaauguuccuuccugaaa

SEQ ID NO: 71391 - RNA, 20 nt, Artificial Sequence
  LRRK2 RNA guide
aggaacauuucuggauacua

SEQ ID NO: 71392 - RNA, 20 nt, Artificial Sequence
  LRRK2 RNA guide
aggaaggaacauuucuggau

SEQ ID NO: 71393 - RNA, 20 nt, Artificial Sequence
  LRRK2 RNA guide
agguaguauccagaaauguu

SEQ ID NO: 71394 - RNA, 20 nt, Artificial Sequence
  LRRK2 RNA guide
aguauccagaaauguuccuu

SEQ ID NO: 71395 - RNA, 20 nt, Artificial Sequence
  LRRK2 RNA guide
aguuucuggacccuuucagg

SEQ ID NO: 71396 - RNA, 20 nt, Artificial Sequence
  LRRK2 RNA guide
auccagaaauguuccuuccu

SEQ ID NO: 71397 - RNA, 20 nt, Artificial Sequence
  LRRK2 RNA guide
auguuccuuccugaaagggu

SEQ ID NO: 71398 - RNA, 20 nt, Artificial Sequence
  LRRK2 RNA guide
cagaaauguuccuuccugaa

SEQ ID NO: 71399 - RNA, 20 nt, Artificial Sequence
  LRRK2 RNA guide
caggaaggaacauuucugga

SEQ ID NO: 71400 - RNA, 20 nt, Artificial Sequence
  LRRK2 RNA guide
ccagaaauguuccuuccuga

SEQ ID NO: 71401 - RNA, 20 nt, Artificial Sequence
  LRRK2 RNA guide
cccuuucaggaaggaacauu

SEQ ID NO: 71402 - RNA, 20 nt, Artificial Sequence
  LRRK2 RNA guide
ccuuucaggaaggaacauuu

SEQ ID NO: 71403 - RNA, 20 nt, Artificial Sequence
  LRRK2 RNA guide
cuggacccuuucaggaagga

SEQ ID NO: 71404 - RNA, 20 nt, Artificial Sequence
  LRRK2 RNA guide
cuuucaggaaggaacauuuc

SEQ ID NO: 71405 - RNA, 20 nt, Artificial Sequence
  LRRK2 RNA guide
gaaauguuccuuccugaaag

SEQ ID NO: 71406 - RNA, 20 nt, Artificial Sequence
  LRRK2 RNA guide
gaaggaacauuucuggauac

SEQ ID NO: 71407 - RNA, 20 nt, Artificial Sequence
  LRRK2 RNA guide
gacccuuucaggaaggaaca

SEQ ID NO: 71408 - RNA, 20 nt, Artificial Sequence
  LRRK2 RNA guide
ggaacauuucuggauacuac

SEQ ID NO: 71409 - RNA, 20 nt, Artificial Sequence
  LRRK2 RNA guide
ggaaggaacauuucuggaua

SEQ ID NO: 71410 - RNA, 20 nt, Artificial Sequence
  LRRK2 RNA guide
ggacccuuucaggaaggaac

SEQ ID NO: 71411 - RNA, 20 nt, Artificial Sequence
  LRRK2 RNA guide
gguaguauccagaaauguuc

SEQ ID NO: 71412 - RNA, 20 nt, Artificial Sequence
  LRRK2 RNA guide
guaguauccagaaauguucc

SEQ ID NO: 71413 - RNA, 20 nt, Artificial Sequence
  LRRK2 RNA guide
guauccagaaauguuccuuc

SEQ ID NO: 71414 - RNA, 20 nt, Artificial Sequence
  LRRK2 RNA guide
guuccuuccugaaagggucc

SEQ ID NO: 71415 - RNA, 20 nt, Artificial Sequence
  LRRK2 RNA guide
guuucuggacccuuucagga

SEQ ID NO: 71416 - RNA, 20 nt, Artificial Sequence
  LRRK2 RNA guide
uagguaguauccagaaaugu

SEQ ID NO: 71417 - RNA, 20 nt, Artificial Sequence
  LRRK2 RNA guide
uaguauccagaaauguuccu

SEQ ID NO: 71418 - RNA, 20 nt, Artificial Sequence
  LRRK2 RNA guide
uaguuucuggacccuuucag

SEQ ID NO: 71419 - RNA, 20 nt, Artificial Sequence
  LRRK2 RNA guide
uauccagaaauguuccuucc

SEQ ID NO: 71420 - RNA, 20 nt, Artificial Sequence
  LRRK2 RNA guide
ucaggaaggaacauuucugg

SEQ ID NO: 71421 - RNA, 20 nt, Artificial Sequence
  LRRK2 RNA guide
uccagaaauguuccuuccug

SEQ ID NO: 71422 - RNA, 20 nt, Artificial Sequence
  LRRK2 RNA guide
uccuuccugaaaggguccag

SEQ ID NO: 71423 - RNA, 20 nt, Artificial Sequence
  LRRK2 RNA guide
ucuggacccuuucaggaagg

SEQ ID NO: 71424 - RNA, 20 nt, Artificial Sequence
  LRRK2 RNA guide
uggacccuuucaggaaggaa

SEQ ID NO: 71425 - RNA, 20 nt, Artificial Sequence
  LRRK2 RNA guide
uguuccuuccugaaaggguc

SEQ ID NO: 71426 - RNA, 20 nt, Artificial Sequence
  LRRK2 RNA guide
uuagguaguauccagaaaug

SEQ ID NO: 71427 - RNA, 20 nt, Artificial Sequence
  LRRK2 RNA guide
uucaggaaggaacauuucug

SEQ ID NO: 71428 - RNA, 20 nt, Artificial Sequence
  LRRK2 RNA guide
uuccuuccugaaagggucca

SEQ ID NO: 71429 - RNA, 20 nt, Artificial Sequence
  LRRK2 RNA guide
uucuggacccuuucaggaag

SEQ ID NO: 71430 - RNA, 20 nt, Artificial Sequence
  LRRK2 RNA guide
uuuagguaguauccagaaau

SEQ ID NO: 71431 - RNA, 20 nt, Artificial Sequence
  LRRK2 RNA guide
uuucaggaaggaacauuucu

SEQ ID NO: 71432 - RNA, 20 nt, Artificial Sequence
  LRRK2 RNA guide
uuucuggacccuuucaggaa

SEQ ID NO: 71433 - RNA, 20 nt, Artificial Sequence
  LRRK2 RNA guide
uuuuagguaguauccagaaa

SEQ ID NO: 71434 - RNA, 21 nt, Artificial Sequence
  LRRK2 RNA guide
aaauguuccuuccugaaaggg

SEQ ID NO: 71435 - RNA, 21 nt, Artificial Sequence
  LRRK2 RNA guide
aaggaacauuucuggauacua

SEQ ID NO: 71436 - RNA, 21 nt, Artificial Sequence
  LRRK2 RNA guide
aauguuccuuccugaaagggu

SEQ ID NO: 71437 - RNA, 21 nt, Artificial Sequence
  LRRK2 RNA guide
acccuuucaggaaggaacauu

SEQ ID NO: 71438 - RNA, 21 nt, Artificial Sequence
  LRRK2 RNA guide
agaaauguuccuuccugaaag

SEQ ID NO: 71439 - RNA, 21 nt, Artificial Sequence
  LRRK2 RNA guide
aggaacauuucuggauacuac

SEQ ID NO: 71440 - RNA, 21 nt, Artificial Sequence
  LRRK2 RNA guide
aggaaggaacauuucuggaua

SEQ ID NO: 71441 - RNA, 21 nt, Artificial Sequence
  LRRK2 RNA guide
agguaguauccagaaauguuc

SEQ ID NO: 71442 - RNA, 21 nt, Artificial Sequence
  LRRK2 RNA guide
aguauccagaaauguuccuuc

SEQ ID NO: 71443 - RNA, 21 nt, Artificial Sequence
  LRRK2 RNA guide
aguuucuggacccuuucagga

SEQ ID NO: 71444 - RNA, 21 nt, Artificial Sequence
  LRRK2 RNA guide
auccagaaauguuccuuccug

SEQ ID NO: 71445 - RNA, 21 nt, Artificial Sequence
  LRRK2 RNA guide
auguuccuuccugaaaggguc

SEQ ID NO: 71446 - RNA, 21 nt, Artificial Sequence
  LRRK2 RNA guide
cagaaauguuccuuccugaaa

SEQ ID NO: 71447 - RNA, 21 nt, Artificial Sequence
  LRRK2 RNA guide
caggaaggaacauuucuggau

SEQ ID NO: 71448 - RNA, 21 nt, Artificial Sequence
  LRRK2 RNA guide
ccagaaauguuccuuccugaa

SEQ ID NO: 71449 - RNA, 21 nt, Artificial Sequence
  LRRK2 RNA guide
cccuuucaggaaggaacauuu

SEQ ID NO: 71450 - RNA, 21 nt, Artificial Sequence
  LRRK2 RNA guide
ccuuucaggaaggaacauuuc

SEQ ID NO: 71451 - RNA, 21 nt, Artificial Sequence
  LRRK2 RNA guide
cuggacccuuucaggaaggaa

SEQ ID NO: 71452 - RNA, 21 nt, Artificial Sequence
  LRRK2 RNA guide
cuuucaggaaggaacauuucu

SEQ ID NO: 71453 - RNA, 21 nt, Artificial Sequence
  LRRK2 RNA guide
cuuuuagguaguauccagaaa

SEQ ID NO: 71454 - RNA, 21 nt, Artificial Sequence
  LRRK2 RNA guide
gaaauguuccuuccugaaagg

SEQ ID NO: 71455 - RNA, 21 nt, Artificial Sequence
  LRRK2 RNA guide
gaaggaacauuucuggauacu

SEQ ID NO: 71456 - RNA, 21 nt, Artificial Sequence
  LRRK2 RNA guide
gacccuuucaggaaggaacau

SEQ ID NO: 71457 - RNA, 21 nt, Artificial Sequence
  LRRK2 RNA guide
ggaacauuucuggauacuacc

SEQ ID NO: 71458 - RNA, 21 nt, Artificial Sequence
  LRRK2 RNA guide
ggaaggaacauuucuggauac

SEQ ID NO: 71459 - RNA, 21 nt, Artificial Sequence
  LRRK2 RNA guide
ggacccuuucaggaaggaaca

SEQ ID NO: 71460 - RNA, 21 nt, Artificial Sequence
  LRRK2 RNA guide
gguaguauccagaaauguucc

SEQ ID NO: 71461 - RNA, 21 nt, Artificial Sequence
  LRRK2 RNA guide
guaguauccagaaauguuccu

SEQ ID NO: 71462 - RNA, 21 nt, Artificial Sequence
  LRRK2 RNA guide
guaguuucuggacccuuucag

SEQ ID NO: 71463 - RNA, 21 nt, Artificial Sequence
  LRRK2 RNA guide
guauccagaaauguuccuucc

SEQ ID NO: 71464 - RNA, 21 nt, Artificial Sequence
  LRRK2 RNA guide
guuccuuccugaaagggucca

SEQ ID NO: 71465 - RNA, 21 nt, Artificial Sequence
  LRRK2 RNA guide
guuucuggacccuuucaggaa

SEQ ID NO: 71466 - RNA, 21 nt, Artificial Sequence
  LRRK2 RNA guide
uagguaguauccagaaauguu

SEQ ID NO: 71467 - RNA, 21 nt, Artificial Sequence
  LRRK2 RNA guide
uaguauccagaaauguuccuu

SEQ ID NO: 71468 - RNA, 21 nt, Artificial Sequence
  LRRK2 RNA guide
uaguuucuggacccuuucagg

SEQ ID NO: 71469 - RNA, 21 nt, Artificial Sequence
  LRRK2 RNA guide
uauccagaaauguuccuuccu

SEQ ID NO: 71470 - RNA, 21 nt, Artificial Sequence
  LRRK2 RNA guide
ucaggaaggaacauuucugga

SEQ ID NO: 71471 - RNA, 21 nt, Artificial Sequence
  LRRK2 RNA guide
uccagaaauguuccuuccuga

SEQ ID NO: 71472 - RNA, 21 nt, Artificial Sequence
  LRRK2 RNA guide
uccuuccugaaaggguccaga

SEQ ID NO: 71473 - RNA, 21 nt, Artificial Sequence
  LRRK2 RNA guide
ucuggacccuuucaggaagga

SEQ ID NO: 71474 - RNA, 21 nt, Artificial Sequence
  LRRK2 RNA guide
uggacccuuucaggaaggaac

SEQ ID NO: 71475 - RNA, 21 nt, Artificial Sequence
  LRRK2 RNA guide
uguuccuuccugaaagggucc

SEQ ID NO: 71476 - RNA, 21 nt, Artificial Sequence
  LRRK2 RNA guide
uuagguaguauccagaaaugu

SEQ ID NO: 71477 - RNA, 21 nt, Artificial Sequence
  LRRK2 RNA guide
uucaggaaggaacauuucugg

SEQ ID NO: 71478 - RNA, 21 nt, Artificial Sequence
  LRRK2 RNA guide
uuccuuccugaaaggguccag

SEQ ID NO: 71479 - RNA, 21 nt, Artificial Sequence
  LRRK2 RNA guide
uucuggacccuuucaggaagg

SEQ ID NO: 71480 - RNA, 21 nt, Artificial Sequence
  LRRK2 RNA guide
uuuagguaguauccagaaaug

SEQ ID NO: 71481 - RNA, 21 nt, Artificial Sequence
  LRRK2 RNA guide
uuucaggaaggaacauuucug

SEQ ID NO: 71482 - RNA, 21 nt, Artificial Sequence
  LRRK2 RNA guide
uuucuggacccuuucaggaag

SEQ ID NO: 71483 - RNA, 22 nt, Artificial Sequence
  LRRK2 RNA guide
aaauguuccuuccugaaagggu

SEQ ID NO: 71484 - RNA, 22 nt, Artificial Sequence
  LRRK2 RNA guide
aaggaacauuucuggauacuac

SEQ ID NO: 71485 - RNA, 22 nt, Artificial Sequence
  LRRK2 RNA guide
aauguuccuuccugaaaggguc

SEQ ID NO: 71486 - RNA, 22 nt, Artificial Sequence
  LRRK2 RNA guide
acccuuucaggaaggaacauuu

SEQ ID NO: 71487 - RNA, 22 nt, Artificial Sequence
  LRRK2 RNA guide
agaaauguuccuuccugaaagg

SEQ ID NO: 71488 - RNA, 22 nt, Artificial Sequence
  LRRK2 RNA guide
aggaacauuucuggauacuacc

SEQ ID NO: 71489 - RNA, 22 nt, Artificial Sequence
  LRRK2 RNA guide
aggaaggaacauuucuggauac

SEQ ID NO: 71490 - RNA, 22 nt, Artificial Sequence
  LRRK2 RNA guide
agguaguauccagaaauguucc

SEQ ID NO: 71491 - RNA, 22 nt, Artificial Sequence
  LRRK2 RNA guide
aguaguuucuggacccuuucag

SEQ ID NO: 71492 - RNA, 22 nt, Artificial Sequence
  LRRK2 RNA guide
aguauccagaaauguuccuucc

SEQ ID NO: 71493 - RNA, 22 nt, Artificial Sequence
  LRRK2 RNA guide
aguuucuggacccuuucaggaa

SEQ ID NO: 71494 - RNA, 22 nt, Artificial Sequence
  LRRK2 RNA guide
auccagaaauguuccuuccuga

SEQ ID NO: 71495 - RNA, 22 nt, Artificial Sequence
  LRRK2 RNA guide
auguuccuuccugaaagggucc

SEQ ID NO: 71496 - RNA, 22 nt, Artificial Sequence
  LRRK2 RNA guide
cagaaauguuccuuccugaaag

SEQ ID NO: 71497 - RNA, 22 nt, Artificial Sequence
  LRRK2 RNA guide
caggaaggaacauuucuggaua

SEQ ID NO: 71498 - RNA, 22 nt, Artificial Sequence
  LRRK2 RNA guide
ccagaaauguuccuuccugaaa

SEQ ID NO: 71499 - RNA, 22 nt, Artificial Sequence
  LRRK2 RNA guide
cccuuucaggaaggaacauuuc

SEQ ID NO: 71500 - RNA, 22 nt, Artificial Sequence
  LRRK2 RNA guide
ccuuucaggaaggaacauuucu

SEQ ID NO: 71501 - RNA, 22 nt, Artificial Sequence
  LRRK2 RNA guide
ccuuuuagguaguauccagaaa

SEQ ID NO: 71502 - RNA, 22 nt, Artificial Sequence
  LRRK2 RNA guide
cuggacccuuucaggaaggaac

SEQ ID NO: 71503 - RNA, 22 nt, Artificial Sequence
  LRRK2 RNA guide
cuuucaggaaggaacauuucug

SEQ ID NO: 71504 - RNA, 22 nt, Artificial Sequence
  LRRK2 RNA guide
cuuuuagguaguauccagaaau

SEQ ID NO: 71505 - RNA, 22 nt, Artificial Sequence
  LRRK2 RNA guide
gaaauguuccuuccugaaaggg

SEQ ID NO: 71506 - RNA, 22 nt, Artificial Sequence
  LRRK2 RNA guide
gaaggaacauuucuggauacua

SEQ ID NO: 71507 - RNA, 22 nt, Artificial Sequence
  LRRK2 RNA guide
gacccuuucaggaaggaacauu

SEQ ID NO: 71508 - RNA, 22 nt, Artificial Sequence
  LRRK2 RNA guide
ggaacauuucuggauacuaccu

SEQ ID NO: 71509 - RNA, 22 nt, Artificial Sequence
  LRRK2 RNA guide
ggaaggaacauuucuggauacu

SEQ ID NO: 71510 - RNA, 22 nt, Artificial Sequence
  LRRK2 RNA guide
ggacccuuucaggaaggaacau

SEQ ID NO: 71511 - RNA, 22 nt, Artificial Sequence
  LRRK2 RNA guide
gguaguauccagaaauguuccu

SEQ ID NO: 71512 - RNA, 22 nt, Artificial Sequence
  LRRK2 RNA guide
guaguauccagaaauguuccuu

SEQ ID NO: 71513 - RNA, 22 nt, Artificial Sequence
  LRRK2 RNA guide
guaguuucuggacccuuucagg

SEQ ID NO: 71514 - RNA, 22 nt, Artificial Sequence
  LRRK2 RNA guide
guauccagaaauguuccuuccu

SEQ ID NO: 71515 - RNA, 22 nt, Artificial Sequence
  LRRK2 RNA guide
guuccuuccugaaaggguccag

SEQ ID NO: 71516 - RNA, 22 nt, Artificial Sequence
  LRRK2 RNA guide
guuucuggacccuuucaggaag

SEQ ID NO: 71517 - RNA, 22 nt, Artificial Sequence
  LRRK2 RNA guide
uagguaguauccagaaauguuc

SEQ ID NO: 71518 - RNA, 22 nt, Artificial Sequence
  LRRK2 RNA guide
uaguauccagaaauguuccuuc

SEQ ID NO: 71519 - RNA, 22 nt, Artificial Sequence
  LRRK2 RNA guide
uaguuucuggacccuuucagga

SEQ ID NO: 71520 - RNA, 22 nt, Artificial Sequence
  LRRK2 RNA guide
uauccagaaauguuccuuccug

SEQ ID NO: 71521 - RNA, 22 nt, Artificial Sequence
  LRRK2 RNA guide
ucaggaaggaacauuucuggau

SEQ ID NO: 71522 - RNA, 22 nt, Artificial Sequence
  LRRK2 RNA guide
uccagaaauguuccuuccugaa

SEQ ID NO: 71523 - RNA, 22 nt, Artificial Sequence
  LRRK2 RNA guide
uccuuccugaaaggguccagaa

SEQ ID NO: 71524 - RNA, 22 nt, Artificial Sequence
  LRRK2 RNA guide
ucuggacccuuucaggaaggaa

SEQ ID NO: 71525 - RNA, 22 nt, Artificial Sequence
  LRRK2 RNA guide
uggacccuuucaggaaggaaca

SEQ ID NO: 71526 - RNA, 22 nt, Artificial Sequence
  LRRK2 RNA guide
uguuccuuccugaaagggucca

SEQ ID NO: 71527 - RNA, 22 nt, Artificial Sequence
  LRRK2 RNA guide
uuagguaguauccagaaauguu

SEQ ID NO: 71528 - RNA, 22 nt, Artificial Sequence
  LRRK2 RNA guide
uucaggaaggaacauuucugga

SEQ ID NO: 71529 - RNA, 22 nt, Artificial Sequence
  LRRK2 RNA guide
uuccuuccugaaaggguccaga

SEQ ID NO: 71530 - RNA, 22 nt, Artificial Sequence
  LRRK2 RNA guide
uucuggacccuuucaggaagga

SEQ ID NO: 71531 - RNA, 22 nt, Artificial Sequence
  LRRK2 RNA guide
uuuagguaguauccagaaaugu

SEQ ID NO: 71532 - RNA, 22 nt, Artificial Sequence
  LRRK2 RNA guide
uuucaggaaggaacauuucugg

SEQ ID NO: 71533 - RNA, 22 nt, Artificial Sequence
  LRRK2 RNA guide
uuucuggacccuuucaggaagg

SEQ ID NO: 71534 - RNA, 22 nt, Artificial Sequence
  LRRK2 RNA guide
uuuuagguaguauccagaaaug

SEQ ID NO: 71535 - RNA, 20 nt, Artificial Sequence
  LRRK2 RNA guide
aaauguuucuuccugaaagg

SEQ ID NO: 71536 - RNA, 20 nt, Artificial Sequence
  LRRK2 RNA guide
aagaaacauuucuggauacu

SEQ ID NO: 71537 - RNA, 20 nt, Artificial Sequence
  LRRK2 RNA guide
aauguuucuuccugaaaggg

SEQ ID NO: 71538 - RNA, 20 nt, Artificial Sequence
  LRRK2 RNA guide
acccuuucaggaagaaacau

SEQ ID NO: 71539 - RNA, 20 nt, Artificial Sequence
  LRRK2 RNA guide
agaaacauuucuggauacua

SEQ ID NO: 71540 - RNA, 20 nt, Artificial Sequence
  LRRK2 RNA guide
agaaauguuucuuccugaaa

SEQ ID NO: 71541 - RNA, 20 nt, Artificial Sequence
  LRRK2 RNA guide
aggaagaaacauuucuggau

SEQ ID NO: 71542 - RNA, 20 nt, Artificial Sequence
  LRRK2 RNA guide
aguauccagaaauguuucuu

SEQ ID NO: 71543 - RNA, 20 nt, Artificial Sequence
  LRRK2 RNA guide
auccagaaauguuucuuccu

SEQ ID NO: 71544 - RNA, 20 nt, Artificial Sequence
  LRRK2 RNA guide
auguuucuuccugaaagggu

SEQ ID NO: 71545 - RNA, 20 nt, Artificial Sequence
  LRRK2 RNA guide
cagaaauguuucuuccugaa

SEQ ID NO: 71546 - RNA, 20 nt, Artificial Sequence
  LRRK2 RNA guide
caggaagaaacauuucugga

SEQ ID NO: 71547 - RNA, 20 nt, Artificial Sequence
  LRRK2 RNA guide
ccagaaauguuucuuccuga

SEQ ID NO: 71548 - RNA, 20 nt, Artificial Sequence
  LRRK2 RNA guide
cccuuucaggaagaaacauu

SEQ ID NO: 71549 - RNA, 20 nt, Artificial Sequence
  LRRK2 RNA guide
ccuuucaggaagaaacauuu

SEQ ID NO: 71550 - RNA, 20 nt, Artificial Sequence
  LRRK2 RNA guide
cuggacccuuucaggaagaa

SEQ ID NO: 71551 - RNA, 20 nt, Artificial Sequence
  LRRK2 RNA guide
cuuucaggaagaaacauuuc

SEQ ID NO: 71552 - RNA, 20 nt, Artificial Sequence
  LRRK2 RNA guide
gaaacauuucuggauacuac

SEQ ID NO: 71553 - RNA, 20 nt, Artificial Sequence
  LRRK2 RNA guide
gaaauguuucuuccugaaag

SEQ ID NO: 71554 - RNA, 20 nt, Artificial Sequence
  LRRK2 RNA guide
gaagaaacauuucuggauac

SEQ ID NO: 71555 - RNA, 20 nt, Artificial Sequence
  LRRK2 RNA guide
gacccuuucaggaagaaaca

SEQ ID NO: 71556 - RNA, 20 nt, Artificial Sequence
  LRRK2 RNA guide
ggaagaaacauuucuggaua

SEQ ID NO: 71557 - RNA, 20 nt, Artificial Sequence
  LRRK2 RNA guide
ggacccuuucaggaagaaac

SEQ ID NO: 71558 - RNA, 20 nt, Artificial Sequence
  LRRK2 RNA guide
gguaguauccagaaauguuu

SEQ ID NO: 71559 - RNA, 20 nt, Artificial Sequence
  LRRK2 RNA guide
guaguauccagaaauguuuc

SEQ ID NO: 71560 - RNA, 20 nt, Artificial Sequence
  LRRK2 RNA guide
guauccagaaauguuucuuc

SEQ ID NO: 71561 - RNA, 20 nt, Artificial Sequence
  LRRK2 RNA guide
guuucuuccugaaagggucc

SEQ ID NO: 71562 - RNA, 20 nt, Artificial Sequence
  LRRK2 RNA guide
uaguauccagaaauguuucu

SEQ ID NO: 71563 - RNA, 20 nt, Artificial Sequence
  LRRK2 RNA guide
uauccagaaauguuucuucc

SEQ ID NO: 71564 - RNA, 20 nt, Artificial Sequence
  LRRK2 RNA guide
ucaggaagaaacauuucugg

SEQ ID NO: 71565 - RNA, 20 nt, Artificial Sequence
  LRRK2 RNA guide
uccagaaauguuucuuccug

SEQ ID NO: 71566 - RNA, 20 nt, Artificial Sequence
  LRRK2 RNA guide
ucuggacccuuucaggaaga

SEQ ID NO: 71567 - RNA, 20 nt, Artificial Sequence
  LRRK2 RNA guide
uggacccuuucaggaagaaa

SEQ ID NO: 71568 - RNA, 20 nt, Artificial Sequence
  LRRK2 RNA guide
uguuucuuccugaaaggguc

SEQ ID NO: 71569 - RNA, 20 nt, Artificial Sequence
  LRRK2 RNA guide
uucaggaagaaacauuucug

SEQ ID NO: 71570 - RNA, 20 nt, Artificial Sequence
  LRRK2 RNA guide
uucuuccugaaaggguccag

SEQ ID NO: 71571 - RNA, 20 nt, Artificial Sequence
  LRRK2 RNA guide
uuucaggaagaaacauuucu

SEQ ID NO: 71572 - RNA, 20 nt, Artificial Sequence
  LRRK2 RNA guide
uuucuuccugaaagggucca

SEQ ID NO: 71573 - RNA, 21 nt, Artificial Sequence
  LRRK2 RNA guide
aaauguuucuuccugaaaggg

SEQ ID NO: 71574 - RNA, 21 nt, Artificial Sequence
  LRRK2 RNA guide
aauguuucuuccugaaagggu

SEQ ID NO: 71575 - RNA, 21 nt, Artificial Sequence
  LRRK2 RNA guide
acccuuucaggaagaaacauu

SEQ ID NO: 71576 - RNA, 21 nt, Artificial Sequence
  LRRK2 RNA guide
agaaacauuucuggauacuac

SEQ ID NO: 71577 - RNA, 21 nt, Artificial Sequence
  LRRK2 RNA guide
agaaauguuucuuccugaaag

SEQ ID NO: 71578 - RNA, 21 nt, Artificial Sequence
  LRRK2 RNA guide
aggaagaaacauuucuggaua

SEQ ID NO: 71579 - RNA, 21 nt, Artificial Sequence
  LRRK2 RNA guide
agguaguauccagaaauguuu

SEQ ID NO: 71580 - RNA, 21 nt, Artificial Sequence
  LRRK2 RNA guide
aguauccagaaauguuucuuc

SEQ ID NO: 71581 - RNA, 21 nt, Artificial Sequence
  LRRK2 RNA guide
auccagaaauguuucuuccug

SEQ ID NO: 71582 - RNA, 21 nt, Artificial Sequence
  LRRK2 RNA guide
auguuucuuccugaaaggguc

SEQ ID NO: 71583 - RNA, 21 nt, Artificial Sequence
  LRRK2 RNA guide
cagaaauguuucuuccugaaa

SEQ ID NO: 71584 - RNA, 21 nt, Artificial Sequence
  LRRK2 RNA guide
caggaagaaacauuucuggau

SEQ ID NO: 71585 - RNA, 21 nt, Artificial Sequence
  LRRK2 RNA guide
ccagaaauguuucuuccugaa

SEQ ID NO: 71586 - RNA, 21 nt, Artificial Sequence
  LRRK2 RNA guide
cccuuucaggaagaaacauuu

SEQ ID NO: 71587 - RNA, 21 nt, Artificial Sequence
  LRRK2 RNA guide
ccuuucaggaagaaacauuuc

SEQ ID NO: 71588 - RNA, 21 nt, Artificial Sequence
  LRRK2 RNA guide
cuggacccuuucaggaagaaa

SEQ ID NO: 71589 - RNA, 21 nt, Artificial Sequence
  LRRK2 RNA guide
cuuucaggaagaaacauuucu

SEQ ID NO: 71590 - RNA, 21 nt, Artificial Sequence
  LRRK2 RNA guide
gaaacauuucuggauacuacc

SEQ ID NO: 71591 - RNA, 21 nt, Artificial Sequence
  LRRK2 RNA guide
gaaauguuucuuccugaaagg

SEQ ID NO: 71592 - RNA, 21 nt, Artificial Sequence
  LRRK2 RNA guide
gaagaaacauuucuggauacu

SEQ ID NO: 71593 - RNA, 21 nt, Artificial Sequence
  LRRK2 RNA guide
gacccuuucaggaagaaacau

SEQ ID NO: 71594 - RNA, 21 nt, Artificial Sequence
  LRRK2 RNA guide
ggaagaaacauuucuggauac

SEQ ID NO: 71595 - RNA, 21 nt, Artificial Sequence
  LRRK2 RNA guide
ggacccuuucaggaagaaaca

SEQ ID NO: 71596 - RNA, 21 nt, Artificial Sequence
  LRRK2 RNA guide
gguaguauccagaaauguuuc

SEQ ID NO: 71597 - RNA, 21 nt, Artificial Sequence
  LRRK2 RNA guide
guaguauccagaaauguuucu

SEQ ID NO: 71598 - RNA, 21 nt, Artificial Sequence
  LRRK2 RNA guide
guauccagaaauguuucuucc

SEQ ID NO: 71599 - RNA, 21 nt, Artificial Sequence
  LRRK2 RNA guide
guuucuuccugaaagggucca

SEQ ID NO: 71600 - RNA, 21 nt, Artificial Sequence
  LRRK2 RNA guide
uauccagaaauguuucuuccu

SEQ ID NO: 71601 - RNA, 21 nt, Artificial Sequence
  LRRK2 RNA guide
ucaggaagaaacauuucugga

SEQ ID NO: 71602 - RNA, 21 nt, Artificial Sequence
  LRRK2 RNA guide
uccagaaauguuucuuccuga

SEQ ID NO: 71603 - RNA, 21 nt, Artificial Sequence
  LRRK2 RNA guide
ucuggacccuuucaggaagaa

SEQ ID NO: 71604 - RNA, 21 nt, Artificial Sequence
  LRRK2 RNA guide
uggacccuuucaggaagaaac

SEQ ID NO: 71605 - RNA, 21 nt, Artificial Sequence
  LRRK2 RNA guide
uguuucuuccugaaagggucc

SEQ ID NO: 71606 - RNA, 21 nt, Artificial Sequence
  LRRK2 RNA guide
uucaggaagaaacauuucugg

SEQ ID NO: 71607 - RNA, 21 nt, Artificial Sequence
  LRRK2 RNA guide
uucuggacccuuucaggaaga

SEQ ID NO: 71608 - RNA, 21 nt, Artificial Sequence
  LRRK2 RNA guide
uucuuccugaaaggguccaga

SEQ ID NO: 71609 - RNA, 21 nt, Artificial Sequence
  LRRK2 RNA guide
uuucaggaagaaacauuucug

SEQ ID NO: 71610 - RNA, 21 nt, Artificial Sequence
  LRRK2 RNA guide
uuucuuccugaaaggguccag

SEQ ID NO: 71611 - RNA, 22 nt, Artificial Sequence
  LRRK2 RNA guide
aaauguuucuuccugaaagggu

SEQ ID NO: 71612 - RNA, 22 nt, Artificial Sequence
  LRRK2 RNA guide
aagaaacauuucuggauacuac

SEQ ID NO: 71613 - RNA, 22 nt, Artificial Sequence
  LRRK2 RNA guide
aauguuucuuccugaaaggguc

SEQ ID NO: 71614 - RNA, 22 nt, Artificial Sequence
  LRRK2 RNA guide
acccuuucaggaagaaacauuu

SEQ ID NO: 71615 - RNA, 22 nt, Artificial Sequence
  LRRK2 RNA guide
agaaacauuucuggauacuacc

SEQ ID NO: 71616 - RNA, 22 nt, Artificial Sequence
  LRRK2 RNA guide
agaaauguuucuuccugaaagg

SEQ ID NO: 71617 - RNA, 22 nt, Artificial Sequence
  LRRK2 RNA guide
aggaagaaacauuucuggauac

SEQ ID NO: 71618 - RNA, 22 nt, Artificial Sequence
  LRRK2 RNA guide
agguaguauccagaaauguuuc

SEQ ID NO: 71619 - RNA, 22 nt, Artificial Sequence
  LRRK2 RNA guide
aguauccagaaauguuucuucc

SEQ ID NO: 71620 - RNA, 22 nt, Artificial Sequence
  LRRK2 RNA guide
auccagaaauguuucuuccuga

SEQ ID NO: 71621 - RNA, 22 nt, Artificial Sequence
  LRRK2 RNA guide
auguuucuuccugaaagggucc

SEQ ID NO: 71622 - RNA, 22 nt, Artificial Sequence
  LRRK2 RNA guide
cagaaauguuucuuccugaaag

SEQ ID NO: 71623 - RNA, 22 nt, Artificial Sequence
  LRRK2 RNA guide
caggaagaaacauuucuggaua

SEQ ID NO: 71624 - RNA, 22 nt, Artificial Sequence
  LRRK2 RNA guide
ccagaaauguuucuuccugaaa

SEQ ID NO: 71625 - RNA, 22 nt, Artificial Sequence
  LRRK2 RNA guide
cccuuucaggaagaaacauuuc

SEQ ID NO: 71626 - RNA, 22 nt, Artificial Sequence
  LRRK2 RNA guide
ccuuucaggaagaaacauuucu

SEQ ID NO: 71627 - RNA, 22 nt, Artificial Sequence
  LRRK2 RNA guide
cuggacccuuucaggaagaaac

SEQ ID NO: 71628 - RNA, 22 nt, Artificial Sequence
  LRRK2 RNA guide
cuuucaggaagaaacauuucug

SEQ ID NO: 71629 - RNA, 22 nt, Artificial Sequence
  LRRK2 RNA guide
gaaacauuucuggauacuaccu

SEQ ID NO: 71630 - RNA, 22 nt, Artificial Sequence
  LRRK2 RNA guide
gaaauguuucuuccugaaaggg

SEQ ID NO: 71631 - RNA, 22 nt, Artificial Sequence
  LRRK2 RNA guide
gaagaaacauuucuggauacua

SEQ ID NO: 71632 - RNA, 22 nt, Artificial Sequence
  LRRK2 RNA guide
gacccuuucaggaagaaacauu

SEQ ID NO: 71633 - RNA, 22 nt, Artificial Sequence
  LRRK2 RNA guide
ggaagaaacauuucuggauacu

SEQ ID NO: 71634 - RNA, 22 nt, Artificial Sequence
  LRRK2 RNA guide
ggacccuuucaggaagaaacau

SEQ ID NO: 71635 - RNA, 22 nt, Artificial Sequence
  LRRK2 RNA guide
gguaguauccagaaauguuucu

SEQ ID NO: 71636 - RNA, 22 nt, Artificial Sequence
  LRRK2 RNA guide
guaguauccagaaauguuucuu

SEQ ID NO: 71637 - RNA, 22 nt, Artificial Sequence
  LRRK2 RNA guide
guauccagaaauguuucuuccu

SEQ ID NO: 71638 - RNA, 22 nt, Artificial Sequence
  LRRK2 RNA guide
guuucuuccugaaaggguccag

SEQ ID NO: 71639 - RNA, 22 nt, Artificial Sequence
  LRRK2 RNA guide
uagguaguauccagaaauguuu

SEQ ID NO: 71640 - RNA, 22 nt, Artificial Sequence
  LRRK2 RNA guide
uaguauccagaaauguuucuuc

SEQ ID NO: 71641 - RNA, 22 nt, Artificial Sequence
  LRRK2 RNA guide
uauccagaaauguuucuuccug

SEQ ID NO: 71642 - RNA, 22 nt, Artificial Sequence
  LRRK2 RNA guide
ucaggaagaaacauuucuggau

SEQ ID NO: 71643 - RNA, 22 nt, Artificial Sequence
  LRRK2 RNA guide
uccagaaauguuucuuccugaa

SEQ ID NO: 71644 - RNA, 22 nt, Artificial Sequence
  LRRK2 RNA guide
ucuggacccuuucaggaagaaa

SEQ ID NO: 71645 - RNA, 22 nt, Artificial Sequence
  LRRK2 RNA guide
uggacccuuucaggaagaaaca

SEQ ID NO: 71646 - RNA, 22 nt, Artificial Sequence
  LRRK2 RNA guide
uguuucuuccugaaagggucca

SEQ ID NO: 71647 - RNA, 22 nt, Artificial Sequence
  LRRK2 RNA guide
uucaggaagaaacauuucugga

SEQ ID NO: 71648 - RNA, 22 nt, Artificial Sequence
  LRRK2 RNA guide
uucuggacccuuucaggaagaa

SEQ ID NO: 71649 - RNA, 22 nt, Artificial Sequence
  LRRK2 RNA guide
uucuuccugaaaggguccagaa

SEQ ID NO: 71650 - RNA, 22 nt, Artificial Sequence
  LRRK2 RNA guide
uuucaggaagaaacauuucugg

SEQ ID NO: 71651 - RNA, 22 nt, Artificial Sequence
  LRRK2 RNA guide
uuucuggacccuuucaggaaga

SEQ ID NO: 71652 - RNA, 22 nt, Artificial Sequence
  LRRK2 RNA guide
uuucuuccugaaaggguccaga

SEQ ID NO: 71653 - RNA, 20 nt, Artificial Sequence
  LRRK2 RNA guide
aagauugauagcuacugaaa

SEQ ID NO: 71654 - RNA, 20 nt, Artificial Sequence
  LRRK2 RNA guide
acuuagugcugguagaagau

SEQ ID NO: 71655 - RNA, 20 nt, Artificial Sequence
  LRRK2 RNA guide
agaagauugauagcuacuga

SEQ ID NO: 71656 - RNA, 20 nt, Artificial Sequence
  LRRK2 RNA guide
agauugauagcuacugaaau

SEQ ID NO: 71657 - RNA, 20 nt, Artificial Sequence
  LRRK2 RNA guide
agauuucaguagcuaucaau

SEQ ID NO: 71658 - RNA, 20 nt, Artificial Sequence
  LRRK2 RNA guide
agcuaucaaucuucuaccag

SEQ ID NO: 71659 - RNA, 20 nt, Artificial Sequence
  LRRK2 RNA guide
aggcuaguagauuucaguag

SEQ ID NO: 71660 - RNA, 20 nt, Artificial Sequence
  LRRK2 RNA guide
aguagauuucaguagcuauc

SEQ ID NO: 71661 - RNA, 20 nt, Artificial Sequence
  LRRK2 RNA guide
aguagcuaucaaucuucuac

SEQ ID NO: 71662 - RNA, 20 nt, Artificial Sequence
  LRRK2 RNA guide
agugcugguagaagauugau

SEQ ID NO: 71663 - RNA, 20 nt, Artificial Sequence
  LRRK2 RNA guide
auacuuagugcugguagaag

SEQ ID NO: 71664 - RNA, 20 nt, Artificial Sequence
  LRRK2 RNA guide
aucaaucuucuaccagcacu

SEQ ID NO: 71665 - RNA, 20 nt, Artificial Sequence
  LRRK2 RNA guide
auugauagcuacugaaaucu

SEQ ID NO: 71666 - RNA, 20 nt, Artificial Sequence
  LRRK2 RNA guide
auuucaguagcuaucaaucu

SEQ ID NO: 71667 - RNA, 20 nt, Artificial Sequence
  LRRK2 RNA guide
caguagcuaucaaucuucua

SEQ ID NO: 71668 - RNA, 20 nt, Artificial Sequence
  LRRK2 RNA guide
cuaguagauuucaguagcua

SEQ ID NO: 71669 - RNA, 20 nt, Artificial Sequence
  LRRK2 RNA guide
cuaucaaucuucuaccagca

SEQ ID NO: 71670 - RNA, 20 nt, Artificial Sequence
  LRRK2 RNA guide
cugguagaagauugauagcu

SEQ ID NO: 71671 - RNA, 20 nt, Artificial Sequence
  LRRK2 RNA guide
cuuagugcugguagaagauu

SEQ ID NO: 71672 - RNA, 20 nt, Artificial Sequence
  LRRK2 RNA guide
gaagauugauagcuacugaa

SEQ ID NO: 71673 - RNA, 20 nt, Artificial Sequence
  LRRK2 RNA guide
gauugauagcuacugaaauc

SEQ ID NO: 71674 - RNA, 20 nt, Artificial Sequence
  LRRK2 RNA guide
gauuucaguagcuaucaauc

SEQ ID NO: 71675 - RNA, 20 nt, Artificial Sequence
  LRRK2 RNA guide
gcuaguagauuucaguagcu

SEQ ID NO: 71676 - RNA, 20 nt, Artificial Sequence
  LRRK2 RNA guide
gcuaucaaucuucuaccagc

SEQ ID NO: 71677 - RNA, 20 nt, Artificial Sequence
  LRRK2 RNA guide
gcugguagaagauugauagc

SEQ ID NO: 71678 - RNA, 20 nt, Artificial Sequence
  LRRK2 RNA guide
ggcuaguagauuucaguagc

SEQ ID NO: 71679 - RNA, 20 nt, Artificial Sequence
  LRRK2 RNA guide
gguagaagauugauagcuac

SEQ ID NO: 71680 - RNA, 20 nt, Artificial Sequence
  LRRK2 RNA guide
guagaagauugauagcuacu

SEQ ID NO: 71681 - RNA, 20 nt, Artificial Sequence
  LRRK2 RNA guide
guagauuucaguagcuauca

SEQ ID NO: 71682 - RNA, 20 nt, Artificial Sequence
  LRRK2 RNA guide
guagcuaucaaucuucuacc

SEQ ID NO: 71683 - RNA, 20 nt, Artificial Sequence
  LRRK2 RNA guide
gugcugguagaagauugaua

SEQ ID NO: 71684 - RNA, 20 nt, Artificial Sequence
  LRRK2 RNA guide
uacuuagugcugguagaaga

SEQ ID NO: 71685 - RNA, 20 nt, Artificial Sequence
  LRRK2 RNA guide
uagaagauugauagcuacug

SEQ ID NO: 71686 - RNA, 20 nt, Artificial Sequence
  LRRK2 RNA guide
uagauuucaguagcuaucaa

SEQ ID NO: 71687 - RNA, 20 nt, Artificial Sequence
  LRRK2 RNA guide
uagcuaucaaucuucuacca

SEQ ID NO: 71688 - RNA, 20 nt, Artificial Sequence
  LRRK2 RNA guide
uaguagauuucaguagcuau

SEQ ID NO: 71689 - RNA, 20 nt, Artificial Sequence
  LRRK2 RNA guide
uagugcugguagaagauuga

SEQ ID NO: 71690 - RNA, 20 nt, Artificial Sequence
  LRRK2 RNA guide
uauacuuagugcugguagaa

SEQ ID NO: 71691 - RNA, 20 nt, Artificial Sequence
  LRRK2 RNA guide
uaucaaucuucuaccagcac

SEQ ID NO: 71692 - RNA, 20 nt, Artificial Sequence
  LRRK2 RNA guide
ucaaucuucuaccagcacua

SEQ ID NO: 71693 - RNA, 20 nt, Artificial Sequence
  LRRK2 RNA guide
ucaguagcuaucaaucuucu

SEQ ID NO: 71694 - RNA, 20 nt, Artificial Sequence
  LRRK2 RNA guide
ugauagcuacugaaaucuac

SEQ ID NO: 71695 - RNA, 20 nt, Artificial Sequence
  LRRK2 RNA guide
ugcugguagaagauugauag

SEQ ID NO: 71696 - RNA, 20 nt, Artificial Sequence
  LRRK2 RNA guide
ugguagaagauugauagcua

SEQ ID NO: 71697 - RNA, 20 nt, Artificial Sequence
  LRRK2 RNA guide
uuagugcugguagaagauug

SEQ ID NO: 71698 - RNA, 20 nt, Artificial Sequence
  LRRK2 RNA guide
uucaguagcuaucaaucuuc

SEQ ID NO: 71699 - RNA, 20 nt, Artificial Sequence
  LRRK2 RNA guide
uugauagcuacugaaaucua

SEQ ID NO: 71700 - RNA, 20 nt, Artificial Sequence
  LRRK2 RNA guide
uuucaguagcuaucaaucuu

SEQ ID NO: 71701 - RNA, 21 nt, Artificial Sequence
  LRRK2 RNA guide
aaggcuaguagauuucaguag

SEQ ID NO: 71702 - RNA, 21 nt, Artificial Sequence
  LRRK2 RNA guide
acuuagugcugguagaagauu

SEQ ID NO: 71703 - RNA, 21 nt, Artificial Sequence
  LRRK2 RNA guide
agaagauugauagcuacugaa

SEQ ID NO: 71704 - RNA, 21 nt, Artificial Sequence
  LRRK2 RNA guide
agauugauagcuacugaaauc

SEQ ID NO: 71705 - RNA, 21 nt, Artificial Sequence
  LRRK2 RNA guide
agauuucaguagcuaucaauc

SEQ ID NO: 71706 - RNA, 21 nt, Artificial Sequence
  LRRK2 RNA guide
agcuaucaaucuucuaccagc

SEQ ID NO: 71707 - RNA, 21 nt, Artificial Sequence
  LRRK2 RNA guide
aggcuaguagauuucaguagc

SEQ ID NO: 71708 - RNA, 21 nt, Artificial Sequence
  LRRK2 RNA guide
aguagauuucaguagcuauca

SEQ ID NO: 71709 - RNA, 21 nt, Artificial Sequence
  LRRK2 RNA guide
aguagcuaucaaucuucuacc

SEQ ID NO: 71710 - RNA, 21 nt, Artificial Sequence
  LRRK2 RNA guide
agugcugguagaagauugaua

SEQ ID NO: 71711 - RNA, 21 nt, Artificial Sequence
  LRRK2 RNA guide
auacuuagugcugguagaaga

SEQ ID NO: 71712 - RNA, 21 nt, Artificial Sequence
  LRRK2 RNA guide
auauacuuagugcugguagaa

SEQ ID NO: 71713 - RNA, 21 nt, Artificial Sequence
  LRRK2 RNA guide
aucaaucuucuaccagcacua

SEQ ID NO: 71714 - RNA, 21 nt, Artificial Sequence
  LRRK2 RNA guide
caguagcuaucaaucuucuac

SEQ ID NO: 71715 - RNA, 21 nt, Artificial Sequence
  LRRK2 RNA guide
cuaguagauuucaguagcuau

SEQ ID NO: 71716 - RNA, 21 nt, Artificial Sequence
  LRRK2 RNA guide
cuaucaaucuucuaccagcac

SEQ ID NO: 71717 - RNA, 21 nt, Artificial Sequence
  LRRK2 RNA guide
cugguagaagauugauagcua

SEQ ID NO: 71718 - RNA, 21 nt, Artificial Sequence
  LRRK2 RNA guide
cuuagugcugguagaagauug

SEQ ID NO: 71719 - RNA, 21 nt, Artificial Sequence
  LRRK2 RNA guide
gaagauugauagcuacugaaa

SEQ ID NO: 71720 - RNA, 21 nt, Artificial Sequence
  LRRK2 RNA guide
gauugauagcuacugaaaucu

SEQ ID NO: 71721 - RNA, 21 nt, Artificial Sequence
  LRRK2 RNA guide
gauuucaguagcuaucaaucu

SEQ ID NO: 71722 - RNA, 21 nt, Artificial Sequence
  LRRK2 RNA guide
gcuaguagauuucaguagcua

SEQ ID NO: 71723 - RNA, 21 nt, Artificial Sequence
  LRRK2 RNA guide
gcuaucaaucuucuaccagca

SEQ ID NO: 71724 - RNA, 21 nt, Artificial Sequence
  LRRK2 RNA guide
gcugguagaagauugauagcu

SEQ ID NO: 71725 - RNA, 21 nt, Artificial Sequence
  LRRK2 RNA guide
ggcuaguagauuucaguagcu

SEQ ID NO: 71726 - RNA, 21 nt, Artificial Sequence
  LRRK2 RNA guide
gguagaagauugauagcuacu

SEQ ID NO: 71727 - RNA, 21 nt, Artificial Sequence
  LRRK2 RNA guide
guagaagauugauagcuacug

SEQ ID NO: 71728 - RNA, 21 nt, Artificial Sequence
  LRRK2 RNA guide
guagauuucaguagcuaucaa

SEQ ID NO: 71729 - RNA, 21 nt, Artificial Sequence
  LRRK2 RNA guide
guagcuaucaaucuucuacca

SEQ ID NO: 71730 - RNA, 21 nt, Artificial Sequence
  LRRK2 RNA guide
gugcugguagaagauugauag

SEQ ID NO: 71731 - RNA, 21 nt, Artificial Sequence
  LRRK2 RNA guide
uacuuagugcugguagaagau

SEQ ID NO: 71732 - RNA, 21 nt, Artificial Sequence
  LRRK2 RNA guide
uagaagauugauagcuacuga

SEQ ID NO: 71733 - RNA, 21 nt, Artificial Sequence
  LRRK2 RNA guide
uagcuaucaaucuucuaccag

SEQ ID NO: 71734 - RNA, 21 nt, Artificial Sequence
  LRRK2 RNA guide
uaguagauuucaguagcuauc

SEQ ID NO: 71735 - RNA, 21 nt, Artificial Sequence
  LRRK2 RNA guide
uagugcugguagaagauugau

SEQ ID NO: 71736 - RNA, 21 nt, Artificial Sequence
  LRRK2 RNA guide
uauacuuagugcugguagaag

SEQ ID NO: 71737 - RNA, 21 nt, Artificial Sequence
  LRRK2 RNA guide
uaucaaucuucuaccagcacu

SEQ ID NO: 71738 - RNA, 21 nt, Artificial Sequence
  LRRK2 RNA guide
ucaaucuucuaccagcacuaa

SEQ ID NO: 71739 - RNA, 21 nt, Artificial Sequence
  LRRK2 RNA guide
ucaguagcuaucaaucuucua

SEQ ID NO: 71740 - RNA, 21 nt, Artificial Sequence
  LRRK2 RNA guide
ugauagcuacugaaaucuacu

SEQ ID NO: 71741 - RNA, 21 nt, Artificial Sequence
  LRRK2 RNA guide
ugcugguagaagauugauagc

SEQ ID NO: 71742 - RNA, 21 nt, Artificial Sequence
  LRRK2 RNA guide
ugguagaagauugauagcuac

SEQ ID NO: 71743 - RNA, 21 nt, Artificial Sequence
  LRRK2 RNA guide
uuagugcugguagaagauuga

SEQ ID NO: 71744 - RNA, 21 nt, Artificial Sequence
  LRRK2 RNA guide
uucaguagcuaucaaucuucu

SEQ ID NO: 71745 - RNA, 21 nt, Artificial Sequence
  LRRK2 RNA guide
uugauagcuacugaaaucuac

SEQ ID NO: 71746 - RNA, 21 nt, Artificial Sequence
  LRRK2 RNA guide
uuucaguagcuaucaaucuuc

SEQ ID NO: 71747 - RNA, 22 nt, Artificial Sequence
  LRRK2 RNA guide
aaaggcuaguagauuucaguag

SEQ ID NO: 71748 - RNA, 22 nt, Artificial Sequence
  LRRK2 RNA guide
aagauugauagcuacugaaauc

SEQ ID NO: 71749 - RNA, 22 nt, Artificial Sequence
  LRRK2 RNA guide
aaggcuaguagauuucaguagc

SEQ ID NO: 71750 - RNA, 22 nt, Artificial Sequence
  LRRK2 RNA guide
aauauacuuagugcugguagaa

SEQ ID NO: 71751 - RNA, 22 nt, Artificial Sequence
  LRRK2 RNA guide
acuuagugcugguagaagauug

SEQ ID NO: 71752 - RNA, 22 nt, Artificial Sequence
  LRRK2 RNA guide
agaagauugauagcuacugaaa

SEQ ID NO: 71753 - RNA, 22 nt, Artificial Sequence
  LRRK2 RNA guide
agauugauagcuacugaaaucu

SEQ ID NO: 71754 - RNA, 22 nt, Artificial Sequence
  LRRK2 RNA guide
agauuucaguagcuaucaaucu

SEQ ID NO: 71755 - RNA, 22 nt, Artificial Sequence
  LRRK2 RNA guide
agcuaucaaucuucuaccagca

SEQ ID NO: 71756 - RNA, 22 nt, Artificial Sequence
  LRRK2 RNA guide
aggcuaguagauuucaguagcu

SEQ ID NO: 71757 - RNA, 22 nt, Artificial Sequence
  LRRK2 RNA guide
aguagauuucaguagcuaucaa

SEQ ID NO: 71758 - RNA, 22 nt, Artificial Sequence
  LRRK2 RNA guide
aguagcuaucaaucuucuacca

SEQ ID NO: 71759 - RNA, 22 nt, Artificial Sequence
  LRRK2 RNA guide
agugcugguagaagauugauag

SEQ ID NO: 71760 - RNA, 22 nt, Artificial Sequence
  LRRK2 RNA guide
auacuuagugcugguagaagau

SEQ ID NO: 71761 - RNA, 22 nt, Artificial Sequence
  LRRK2 RNA guide
auauacuuagugcugguagaag

SEQ ID NO: 71762 - RNA, 22 nt, Artificial Sequence
  LRRK2 RNA guide
aucaaucuucuaccagcacuaa

SEQ ID NO: 71763 - RNA, 22 nt, Artificial Sequence
  LRRK2 RNA guide
auugauagcuacugaaaucuac

SEQ ID NO: 71764 - RNA, 22 nt, Artificial Sequence
  LRRK2 RNA guide
auuucaguagcuaucaaucuuc

SEQ ID NO: 71765 - RNA, 22 nt, Artificial Sequence
  LRRK2 RNA guide
caguagcuaucaaucuucuacc

SEQ ID NO: 71766 - RNA, 22 nt, Artificial Sequence
  LRRK2 RNA guide
cuaguagauuucaguagcuauc

SEQ ID NO: 71767 - RNA, 22 nt, Artificial Sequence
  LRRK2 RNA guide
cuaucaaucuucuaccagcacu

SEQ ID NO: 71768 - RNA, 22 nt, Artificial Sequence
  LRRK2 RNA guide
cugguagaagauugauagcuac

SEQ ID NO: 71769 - RNA, 22 nt, Artificial Sequence
  LRRK2 RNA guide
cuuagugcugguagaagauuga

SEQ ID NO: 71770 - RNA, 22 nt, Artificial Sequence
  LRRK2 RNA guide
gaagauugauagcuacugaaau

SEQ ID NO: 71771 - RNA, 22 nt, Artificial Sequence
  LRRK2 RNA guide
gauugauagcuacugaaaucua

SEQ ID NO: 71772 - RNA, 22 nt, Artificial Sequence
  LRRK2 RNA guide
gauuucaguagcuaucaaucuu

SEQ ID NO: 71773 - RNA, 22 nt, Artificial Sequence
  LRRK2 RNA guide
gcuaguagauuucaguagcuau

SEQ ID NO: 71774 - RNA, 22 nt, Artificial Sequence
  LRRK2 RNA guide
gcuaucaaucuucuaccagcac

SEQ ID NO: 71775 - RNA, 22 nt, Artificial Sequence
  LRRK2 RNA guide
gcugguagaagauugauagcua

SEQ ID NO: 71776 - RNA, 22 nt, Artificial Sequence
  LRRK2 RNA guide
ggcuaguagauuucaguagcua

SEQ ID NO: 71777 - RNA, 22 nt, Artificial Sequence
  LRRK2 RNA guide
gguagaagauugauagcuacug

SEQ ID NO: 71778 - RNA, 22 nt, Artificial Sequence
  LRRK2 RNA guide
guagaagauugauagcuacuga

SEQ ID NO: 71779 - RNA, 22 nt, Artificial Sequence
  LRRK2 RNA guide
guagauuucaguagcuaucaau

SEQ ID NO: 71780 - RNA, 22 nt, Artificial Sequence
  LRRK2 RNA guide
guagcuaucaaucuucuaccag

SEQ ID NO: 71781 - RNA, 22 nt, Artificial Sequence
  LRRK2 RNA guide
gugcugguagaagauugauagc

SEQ ID NO: 71782 - RNA, 22 nt, Artificial Sequence
  LRRK2 RNA guide
uacuuagugcugguagaagauu

SEQ ID NO: 71783 - RNA, 22 nt, Artificial Sequence
  LRRK2 RNA guide
uagaagauugauagcuacugaa

SEQ ID NO: 71784 - RNA, 22 nt, Artificial Sequence
  LRRK2 RNA guide
uagauuucaguagcuaucaauc

SEQ ID NO: 71785 - RNA, 22 nt, Artificial Sequence
  LRRK2 RNA guide
uagcuaucaaucuucuaccagc

SEQ ID NO: 71786 - RNA, 22 nt, Artificial Sequence
  LRRK2 RNA guide
uaguagauuucaguagcuauca

SEQ ID NO: 71787 - RNA, 22 nt, Artificial Sequence
  LRRK2 RNA guide
uagugcugguagaagauugaua

SEQ ID NO: 71788 - RNA, 22 nt, Artificial Sequence
  LRRK2 RNA guide
uauacuuagugcugguagaaga

SEQ ID NO: 71789 - RNA, 22 nt, Artificial Sequence
  LRRK2 RNA guide
uaucaaucuucuaccagcacua

SEQ ID NO: 71790 - RNA, 22 nt, Artificial Sequence
  LRRK2 RNA guide
ucaaucuucuaccagcacuaag

SEQ ID NO: 71791 - RNA, 22 nt, Artificial Sequence
  LRRK2 RNA guide
ucaguagcuaucaaucuucuac

SEQ ID NO: 71792 - RNA, 22 nt, Artificial Sequence
  LRRK2 RNA guide
ugauagcuacugaaaucuacua

SEQ ID NO: 71793 - RNA, 22 nt, Artificial Sequence
  LRRK2 RNA guide
ugcugguagaagauugauagcu

SEQ ID NO: 71794 - RNA, 22 nt, Artificial Sequence
  LRRK2 RNA guide
ugguagaagauugauagcuacu

SEQ ID NO: 71795 - RNA, 22 nt, Artificial Sequence
  LRRK2 RNA guide
uuagugcugguagaagauugau

SEQ ID NO: 71796 - RNA, 22 nt, Artificial Sequence
  LRRK2 RNA guide
uucaguagcuaucaaucuucua

SEQ ID NO: 71797 - RNA, 22 nt, Artificial Sequence
  LRRK2 RNA guide
uugauagcuacugaaaucuacu

SEQ ID NO: 71798 - RNA, 22 nt, Artificial Sequence
  LRRK2 RNA guide
uuucaguagcuaucaaucuucu

SEQ ID NO: 71799 - RNA, 20 nt, Artificial Sequence
  LRRK2 RNA guide
aagaugauagcuacugaaau

SEQ ID NO: 71800 - RNA, 20 nt, Artificial Sequence
  LRRK2 RNA guide
agaagaugauagcuacugaa

SEQ ID NO: 71801 - RNA, 20 nt, Artificial Sequence
  LRRK2 RNA guide
agaugauagcuacugaaauc

SEQ ID NO: 71802 - RNA, 20 nt, Artificial Sequence
  LRRK2 RNA guide
agauuucaguagcuaucauc

SEQ ID NO: 71803 - RNA, 20 nt, Artificial Sequence
  LRRK2 RNA guide
agcuaucaucuucuaccagc

SEQ ID NO: 71804 - RNA, 20 nt, Artificial Sequence
  LRRK2 RNA guide
aguagcuaucaucuucuacc

SEQ ID NO: 71805 - RNA, 20 nt, Artificial Sequence
  LRRK2 RNA guide
agugcugguagaagaugaua

SEQ ID NO: 71806 - RNA, 20 nt, Artificial Sequence
  LRRK2 RNA guide
auauacuuagugcugguaga

SEQ ID NO: 71807 - RNA, 20 nt, Artificial Sequence
  LRRK2 RNA guide
aucaucuucuaccagcacua

SEQ ID NO: 71808 - RNA, 20 nt, Artificial Sequence
  LRRK2 RNA guide
augauagcuacugaaaucua

SEQ ID NO: 71809 - RNA, 20 nt, Artificial Sequence
  LRRK2 RNA guide
auuucaguagcuaucaucuu

SEQ ID NO: 71810 - RNA, 20 nt, Artificial Sequence
  LRRK2 RNA guide
caguagcuaucaucuucuac

SEQ ID NO: 71811 - RNA, 20 nt, Artificial Sequence
  LRRK2 RNA guide
cuaucaucuucuaccagcac

SEQ ID NO: 71812 - RNA, 20 nt, Artificial Sequence
  LRRK2 RNA guide
cugguagaagaugauagcua

SEQ ID NO: 71813 - RNA, 20 nt, Artificial Sequence
  LRRK2 RNA guide
cuuagugcugguagaagaug

SEQ ID NO: 71814 - RNA, 20 nt, Artificial Sequence
  LRRK2 RNA guide
gaagaugauagcuacugaaa

SEQ ID NO: 71815 - RNA, 20 nt, Artificial Sequence
  LRRK2 RNA guide
gaugauagcuacugaaaucu

SEQ ID NO: 71816 - RNA, 20 nt, Artificial Sequence
  LRRK2 RNA guide
gauuucaguagcuaucaucu

SEQ ID NO: 71817 - RNA, 20 nt, Artificial Sequence
  LRRK2 RNA guide
gcuaucaucuucuaccagca

SEQ ID NO: 71818 - RNA, 20 nt, Artificial Sequence
  LRRK2 RNA guide
gcugguagaagaugauagcu

SEQ ID NO: 71819 - RNA, 20 nt, Artificial Sequence
  LRRK2 RNA guide
gguagaagaugauagcuacu

SEQ ID NO: 71820 - RNA, 20 nt, Artificial Sequence
  LRRK2 RNA guide
guagaagaugauagcuacug

SEQ ID NO: 71821 - RNA, 20 nt, Artificial Sequence
  LRRK2 RNA guide
guagcuaucaucuucuacca

SEQ ID NO: 71822 - RNA, 20 nt, Artificial Sequence
  LRRK2 RNA guide
gugcugguagaagaugauag

SEQ ID NO: 71823 - RNA, 20 nt, Artificial Sequence
  LRRK2 RNA guide
uagaagaugauagcuacuga

SEQ ID NO: 71824 - RNA, 20 nt, Artificial Sequence
  LRRK2 RNA guide
uagauuucaguagcuaucau

SEQ ID NO: 71825 - RNA, 20 nt, Artificial Sequence
  LRRK2 RNA guide
uagcuaucaucuucuaccag

SEQ ID NO: 71826 - RNA, 20 nt, Artificial Sequence
  LRRK2 RNA guide
uagugcugguagaagaugau

SEQ ID NO: 71827 - RNA, 20 nt, Artificial Sequence
  LRRK2 RNA guide
uaucaucuucuaccagcacu

SEQ ID NO: 71828 - RNA, 20 nt, Artificial Sequence
  LRRK2 RNA guide
ucaguagcuaucaucuucua

SEQ ID NO: 71829 - RNA, 20 nt, Artificial Sequence
  LRRK2 RNA guide
ucaucuucuaccagcacuaa

SEQ ID NO: 71830 - RNA, 20 nt, Artificial Sequence
  LRRK2 RNA guide
ugcugguagaagaugauagc

SEQ ID NO: 71831 - RNA, 20 nt, Artificial Sequence
  LRRK2 RNA guide
ugguagaagaugauagcuac

SEQ ID NO: 71832 - RNA, 20 nt, Artificial Sequence
  LRRK2 RNA guide
uuagugcugguagaagauga

SEQ ID NO: 71833 - RNA, 20 nt, Artificial Sequence
  LRRK2 RNA guide
uucaguagcuaucaucuucu

SEQ ID NO: 71834 - RNA, 20 nt, Artificial Sequence
  LRRK2 RNA guide
uuucaguagcuaucaucuuc

SEQ ID NO: 71835 - RNA, 21 nt, Artificial Sequence
  LRRK2 RNA guide
aagaugauagcuacugaaauc

SEQ ID NO: 71836 - RNA, 21 nt, Artificial Sequence
  LRRK2 RNA guide
aauauacuuagugcugguaga

SEQ ID NO: 71837 - RNA, 21 nt, Artificial Sequence
  LRRK2 RNA guide
acuuagugcugguagaagaug

SEQ ID NO: 71838 - RNA, 21 nt, Artificial Sequence
  LRRK2 RNA guide
agaagaugauagcuacugaaa

SEQ ID NO: 71839 - RNA, 21 nt, Artificial Sequence
  LRRK2 RNA guide
agaugauagcuacugaaaucu

SEQ ID NO: 71840 - RNA, 21 nt, Artificial Sequence
  LRRK2 RNA guide
agauuucaguagcuaucaucu

SEQ ID NO: 71841 - RNA, 21 nt, Artificial Sequence
  LRRK2 RNA guide
agcuaucaucuucuaccagca

SEQ ID NO: 71842 - RNA, 21 nt, Artificial Sequence
  LRRK2 RNA guide
aguagcuaucaucuucuacca

SEQ ID NO: 71843 - RNA, 21 nt, Artificial Sequence
  LRRK2 RNA guide
agugcugguagaagaugauag

SEQ ID NO: 71844 - RNA, 21 nt, Artificial Sequence
  LRRK2 RNA guide
aucaucuucuaccagcacuaa

SEQ ID NO: 71845 - RNA, 21 nt, Artificial Sequence
  LRRK2 RNA guide
augauagcuacugaaaucuac

SEQ ID NO: 71846 - RNA, 21 nt, Artificial Sequence
  LRRK2 RNA guide
auuucaguagcuaucaucuuc

SEQ ID NO: 71847 - RNA, 21 nt, Artificial Sequence
  LRRK2 RNA guide
caguagcuaucaucuucuacc

SEQ ID NO: 71848 - RNA, 21 nt, Artificial Sequence
  LRRK2 RNA guide
cuaucaucuucuaccagcacu

SEQ ID NO: 71849 - RNA, 21 nt, Artificial Sequence
  LRRK2 RNA guide
cugguagaagaugauagcuac

SEQ ID NO: 71850 - RNA, 21 nt, Artificial Sequence
  LRRK2 RNA guide
cuuagugcugguagaagauga

SEQ ID NO: 71851 - RNA, 21 nt, Artificial Sequence
  LRRK2 RNA guide
gaagaugauagcuacugaaau

SEQ ID NO: 71852 - RNA, 21 nt, Artificial Sequence
  LRRK2 RNA guide
gaugauagcuacugaaaucua

SEQ ID NO: 71853 - RNA, 21 nt, Artificial Sequence
  LRRK2 RNA guide
gauuucaguagcuaucaucuu

SEQ ID NO: 71854 - RNA, 21 nt, Artificial Sequence
  LRRK2 RNA guide
gcuaucaucuucuaccagcac

SEQ ID NO: 71855 - RNA, 21 nt, Artificial Sequence
  LRRK2 RNA guide
gcugguagaagaugauagcua

SEQ ID NO: 71856 - RNA, 21 nt, Artificial Sequence
  LRRK2 RNA guide
gguagaagaugauagcuacug

SEQ ID NO: 71857 - RNA, 21 nt, Artificial Sequence
  LRRK2 RNA guide
guagaagaugauagcuacuga

SEQ ID NO: 71858 - RNA, 21 nt, Artificial Sequence
  LRRK2 RNA guide
guagauuucaguagcuaucau

SEQ ID NO: 71859 - RNA, 21 nt, Artificial Sequence
  LRRK2 RNA guide
guagcuaucaucuucuaccag

SEQ ID NO: 71860 - RNA, 21 nt, Artificial Sequence
  LRRK2 RNA guide
gugcugguagaagaugauagc

SEQ ID NO: 71861 - RNA, 21 nt, Artificial Sequence
  LRRK2 RNA guide
uagaagaugauagcuacugaa

SEQ ID NO: 71862 - RNA, 21 nt, Artificial Sequence
  LRRK2 RNA guide
uagauuucaguagcuaucauc

SEQ ID NO: 71863 - RNA, 21 nt, Artificial Sequence
  LRRK2 RNA guide
uagcuaucaucuucuaccagc

SEQ ID NO: 71864 - RNA, 21 nt, Artificial Sequence
  LRRK2 RNA guide
uagugcugguagaagaugaua

SEQ ID NO: 71865 - RNA, 21 nt, Artificial Sequence
  LRRK2 RNA guide
uaucaucuucuaccagcacua

SEQ ID NO: 71866 - RNA, 21 nt, Artificial Sequence
  LRRK2 RNA guide
ucaguagcuaucaucuucuac

SEQ ID NO: 71867 - RNA, 21 nt, Artificial Sequence
  LRRK2 RNA guide
ucaucuucuaccagcacuaag

SEQ ID NO: 71868 - RNA, 21 nt, Artificial Sequence
  LRRK2 RNA guide
ugcugguagaagaugauagcu

SEQ ID NO: 71869 - RNA, 21 nt, Artificial Sequence
  LRRK2 RNA guide
ugguagaagaugauagcuacu

SEQ ID NO: 71870 - RNA, 21 nt, Artificial Sequence
  LRRK2 RNA guide
uuagugcugguagaagaugau

SEQ ID NO: 71871 - RNA, 21 nt, Artificial Sequence
  LRRK2 RNA guide
uucaguagcuaucaucuucua

SEQ ID NO: 71872 - RNA, 21 nt, Artificial Sequence
  LRRK2 RNA guide
uuucaguagcuaucaucuucu

SEQ ID NO: 71873 - RNA, 22 nt, Artificial Sequence
  LRRK2 RNA guide
aaauauacuuagugcugguaga

SEQ ID NO: 71874 - RNA, 22 nt, Artificial Sequence
  LRRK2 RNA guide
aagaugauagcuacugaaaucu

SEQ ID NO: 71875 - RNA, 22 nt, Artificial Sequence
  LRRK2 RNA guide
acuuagugcugguagaagauga

SEQ ID NO: 71876 - RNA, 22 nt, Artificial Sequence
  LRRK2 RNA guide
agaagaugauagcuacugaaau

SEQ ID NO: 71877 - RNA, 22 nt, Artificial Sequence
  LRRK2 RNA guide
agaugauagcuacugaaaucua

SEQ ID NO: 71878 - RNA, 22 nt, Artificial Sequence
  LRRK2 RNA guide
agauuucaguagcuaucaucuu

SEQ ID NO: 71879 - RNA, 22 nt, Artificial Sequence
  LRRK2 RNA guide
agcuaucaucuucuaccagcac

SEQ ID NO: 71880 - RNA, 22 nt, Artificial Sequence
  LRRK2 RNA guide
aguagauuucaguagcuaucau

SEQ ID NO: 71881 - RNA, 22 nt, Artificial Sequence
  LRRK2 RNA guide
aguagcuaucaucuucuaccag

SEQ ID NO: 71882 - RNA, 22 nt, Artificial Sequence
  LRRK2 RNA guide
agugcugguagaagaugauagc

SEQ ID NO: 71883 - RNA, 22 nt, Artificial Sequence
  LRRK2 RNA guide
aucaucuucuaccagcacuaag

SEQ ID NO: 71884 - RNA, 22 nt, Artificial Sequence
  LRRK2 RNA guide
augauagcuacugaaaucuacu

SEQ ID NO: 71885 - RNA, 22 nt, Artificial Sequence
  LRRK2 RNA guide
auuucaguagcuaucaucuucu

SEQ ID NO: 71886 - RNA, 22 nt, Artificial Sequence
  LRRK2 RNA guide
caguagcuaucaucuucuacca

SEQ ID NO: 71887 - RNA, 22 nt, Artificial Sequence
  LRRK2 RNA guide
cuaucaucuucuaccagcacua

SEQ ID NO: 71888 - RNA, 22 nt, Artificial Sequence
  LRRK2 RNA guide
cugguagaagaugauagcuacu

SEQ ID NO: 71889 - RNA, 22 nt, Artificial Sequence
  LRRK2 RNA guide
cuuagugcugguagaagaugau

SEQ ID NO: 71890 - RNA, 22 nt, Artificial Sequence
  LRRK2 RNA guide
gaagaugauagcuacugaaauc

SEQ ID NO: 71891 - RNA, 22 nt, Artificial Sequence
  LRRK2 RNA guide
gaugauagcuacugaaaucuac

SEQ ID NO: 71892 - RNA, 22 nt, Artificial Sequence
  LRRK2 RNA guide
gauuucaguagcuaucaucuuc

SEQ ID NO: 71893 - RNA, 22 nt, Artificial Sequence
  LRRK2 RNA guide
gcuaucaucuucuaccagcacu

SEQ ID NO: 71894 - RNA, 22 nt, Artificial Sequence
  LRRK2 RNA guide
gcugguagaagaugauagcuac

SEQ ID NO: 71895 - RNA, 22 nt, Artificial Sequence
  LRRK2 RNA guide
gguagaagaugauagcuacuga

SEQ ID NO: 71896 - RNA, 22 nt, Artificial Sequence
  LRRK2 RNA guide
guagaagaugauagcuacugaa

SEQ ID NO: 71897 - RNA, 22 nt, Artificial Sequence
  LRRK2 RNA guide
guagauuucaguagcuaucauc

SEQ ID NO: 71898 - RNA, 22 nt, Artificial Sequence
  LRRK2 RNA guide
guagcuaucaucuucuaccagc

SEQ ID NO: 71899 - RNA, 22 nt, Artificial Sequence
  LRRK2 RNA guide
gugcugguagaagaugauagcu

SEQ ID NO: 71900 - RNA, 22 nt, Artificial Sequence
  LRRK2 RNA guide
uacuuagugcugguagaagaug

SEQ ID NO: 71901 - RNA, 22 nt, Artificial Sequence
  LRRK2 RNA guide
uagaagaugauagcuacugaaa

SEQ ID NO: 71902 - RNA, 22 nt, Artificial Sequence
  LRRK2 RNA guide
uagauuucaguagcuaucaucu

SEQ ID NO: 71903 - RNA, 22 nt, Artificial Sequence
  LRRK2 RNA guide
uagcuaucaucuucuaccagca

SEQ ID NO: 71904 - RNA, 22 nt, Artificial Sequence
  LRRK2 RNA guide
uagugcugguagaagaugauag

SEQ ID NO: 71905 - RNA, 22 nt, Artificial Sequence
  LRRK2 RNA guide
uaucaucuucuaccagcacuaa

SEQ ID NO: 71906 - RNA, 22 nt, Artificial Sequence
  LRRK2 RNA guide
ucaguagcuaucaucuucuacc

SEQ ID NO: 71907 - RNA, 22 nt, Artificial Sequence
  LRRK2 RNA guide
ucaucuucuaccagcacuaagu

SEQ ID NO: 71908 - RNA, 22 nt, Artificial Sequence
  LRRK2 RNA guide
ugcugguagaagaugauagcua

SEQ ID NO: 71909 - RNA, 22 nt, Artificial Sequence
  LRRK2 RNA guide
ugguagaagaugauagcuacug

SEQ ID NO: 71910 - RNA, 22 nt, Artificial Sequence
  LRRK2 RNA guide
uuagugcugguagaagaugaua

SEQ ID NO: 71911 - RNA, 22 nt, Artificial Sequence
  LRRK2 RNA guide
uucaguagcuaucaucuucuac

SEQ ID NO: 71912 - RNA, 22 nt, Artificial Sequence
  LRRK2 RNA guide
uuucaguagcuaucaucuucua

SEQ ID NO: 71913 - RNA, 20 nt, Artificial Sequence
  LRRK2 RNA guide
caguugacuguauuuucaua

SEQ ID NO: 71914 - RNA, 20 nt, Artificial Sequence
  LRRK2 RNA guide
gcaguugacuguauuuucau

SEQ ID NO: 71915 - RNA, 20 nt, Artificial Sequence
  LRRK2 RNA guide
guugacuguauuuucauaag

SEQ ID NO: 71916 - RNA, 20 nt, Artificial Sequence
  LRRK2 RNA guide
ugcaguugacuguauuuuca

SEQ ID NO: 71917 - RNA, 21 nt, Artificial Sequence
  LRRK2 RNA guide
augcaguugacuguauuuuca

SEQ ID NO: 71918 - RNA, 21 nt, Artificial Sequence
  LRRK2 RNA guide
gcaguugacuguauuuucaua

SEQ ID NO: 71919 - RNA, 21 nt, Artificial Sequence
  LRRK2 RNA guide
ugcaguugacuguauuuucau

SEQ ID NO: 71920 - RNA, 22 nt, Artificial Sequence
  LRRK2 RNA guide
aaugcaguugacuguauuuuca

SEQ ID NO: 71921 - RNA, 22 nt, Artificial Sequence
  LRRK2 RNA guide
augcaguugacuguauuuucau

SEQ ID NO: 71922 - RNA, 22 nt, Artificial Sequence
  LRRK2 RNA guide
caguugacuguauuuucauaag

SEQ ID NO: 71923 - RNA, 22 nt, Artificial Sequence
  LRRK2 RNA guide
gcaguugacuguauuuucauaa

SEQ ID NO: 71924 - RNA, 22 nt, Artificial Sequence
  LRRK2 RNA guide
ugcaguugacuguauuuucaua

SEQ ID NO: 71925 - RNA, 20 nt, Artificial Sequence
  LRRK2 RNA guide
aaccuuaugaaaauacaguc

SEQ ID NO: 71926 - RNA, 20 nt, Artificial Sequence
  LRRK2 RNA guide
accuuaugaaaauacaguca

SEQ ID NO: 71927 - RNA, 20 nt, Artificial Sequence
  LRRK2 RNA guide
gacuguauuuucauaagguu

SEQ ID NO: 71928 - RNA, 20 nt, Artificial Sequence
  LRRK2 RNA guide
ugacuguauuuucauaaggu

SEQ ID NO: 71929 - RNA, 20 nt, Artificial Sequence
  LRRK2 RNA guide
uugacuguauuuucauaagg

SEQ ID NO: 71930 - RNA, 21 nt, Artificial Sequence
  LRRK2 RNA guide
guugacuguauuuucauaagg

SEQ ID NO: 71931 - RNA, 22 nt, Artificial Sequence
  LRRK2 RNA guide
accuuaugaaaauacagucaac

SEQ ID NO: 71932 - RNA, 22 nt, Artificial Sequence
  LRRK2 RNA guide
aguugacuguauuuucauaagg

SEQ ID NO: 71933 - RNA, 22 nt, Artificial Sequence
  LRRK2 RNA guide
guugacuguauuuucauaaggu

SEQ ID NO: 71934 - RNA, 20 nt, Artificial Sequence
  LRRK2 RNA guide
aaaauacagucaacugcauu

SEQ ID NO: 71935 - RNA, 20 nt, Artificial Sequence
  LRRK2 RNA guide
aaacacagaaacauacagaa

SEQ ID NO: 71936 - RNA, 20 nt, Artificial Sequence
  LRRK2 RNA guide
aaacauacagaaaaugcagu

SEQ ID NO: 71937 - RNA, 20 nt, Artificial Sequence
  LRRK2 RNA guide
aaauacagucaacugcauuu

SEQ ID NO: 71938 - RNA, 20 nt, Artificial Sequence
  LRRK2 RNA guide
aacacagaaacauacagaaa

SEQ ID NO: 71939 - RNA, 20 nt, Artificial Sequence
  LRRK2 RNA guide
aacauacagaaaaugcaguu

SEQ ID NO: 71940 - RNA, 20 nt, Artificial Sequence
  LRRK2 RNA guide
aacugcauuuucuguauguu

SEQ ID NO: 71941 - RNA, 20 nt, Artificial Sequence
  LRRK2 RNA guide
aauacagucaacugcauuuu

SEQ ID NO: 71942 - RNA, 20 nt, Artificial Sequence
  LRRK2 RNA guide
acacagaaacauacagaaaa

SEQ ID NO: 71943 - RNA, 20 nt, Artificial Sequence
  LRRK2 RNA guide
acagaaaaugcaguugacug

SEQ ID NO: 71944 - RNA, 20 nt, Artificial Sequence
  LRRK2 RNA guide
acagaaacauacagaaaaug

SEQ ID NO: 71945 - RNA, 20 nt, Artificial Sequence
  LRRK2 RNA guide
acagucaacugcauuuucug

SEQ ID NO: 71946 - RNA, 20 nt, Artificial Sequence
  LRRK2 RNA guide
acauacagaaaaugcaguug

SEQ ID NO: 71947 - RNA, 20 nt, Artificial Sequence
  LRRK2 RNA guide
acugcauuuucuguauguuu

SEQ ID NO: 71948 - RNA, 20 nt, Artificial Sequence
  LRRK2 RNA guide
agaaacauacagaaaaugca

SEQ ID NO: 71949 - RNA, 20 nt, Artificial Sequence
  LRRK2 RNA guide
agauauugaaacacagaaac

SEQ ID NO: 71950 - RNA, 20 nt, Artificial Sequence
  LRRK2 RNA guide
agucaacugcauuuucugua

SEQ ID NO: 71951 - RNA, 20 nt, Artificial Sequence
  LRRK2 RNA guide
auacagaaaaugcaguugac

SEQ ID NO: 71952 - RNA, 20 nt, Artificial Sequence
  LRRK2 RNA guide
auacagucaacugcauuuuc

SEQ ID NO: 71953 - RNA, 20 nt, Artificial Sequence
  LRRK2 RNA guide
auugaaacacagaaacauac

SEQ ID NO: 71954 - RNA, 20 nt, Artificial Sequence
  LRRK2 RNA guide
auuuucuguauguuucugug

SEQ ID NO: 71955 - RNA, 20 nt, Artificial Sequence
  LRRK2 RNA guide
caacugcauuuucuguaugu

SEQ ID NO: 71956 - RNA, 20 nt, Artificial Sequence
  LRRK2 RNA guide
cacagaaacauacagaaaau

SEQ ID NO: 71957 - RNA, 20 nt, Artificial Sequence
  LRRK2 RNA guide
cagaaacauacagaaaaugc

SEQ ID NO: 71958 - RNA, 20 nt, Artificial Sequence
  LRRK2 RNA guide
cagucaacugcauuuucugu

SEQ ID NO: 71959 - RNA, 20 nt, Artificial Sequence
  LRRK2 RNA guide
cauacagaaaaugcaguuga

SEQ ID NO: 71960 - RNA, 20 nt, Artificial Sequence
  LRRK2 RNA guide
cauuuucuguauguuucugu

SEQ ID NO: 71961 - RNA, 20 nt, Artificial Sequence
  LRRK2 RNA guide
cugcauuuucuguauguuuc

SEQ ID NO: 71962 - RNA, 20 nt, Artificial Sequence
  LRRK2 RNA guide
cuguauguuucuguguuuca

SEQ ID NO: 71963 - RNA, 20 nt, Artificial Sequence
  LRRK2 RNA guide
gaaacacagaaacauacaga

SEQ ID NO: 71964 - RNA, 20 nt, Artificial Sequence
  LRRK2 RNA guide
gaaacauacagaaaaugcag

SEQ ID NO: 71965 - RNA, 20 nt, Artificial Sequence
  LRRK2 RNA guide
gauauugaaacacagaaaca

SEQ ID NO: 71966 - RNA, 20 nt, Artificial Sequence
  LRRK2 RNA guide
gcauuuucuguauguuucug

SEQ ID NO: 71967 - RNA, 20 nt, Artificial Sequence
  LRRK2 RNA guide
gucaacugcauuuucuguau

SEQ ID NO: 71968 - RNA, 20 nt, Artificial Sequence
  LRRK2 RNA guide
uacagaaaaugcaguugacu

SEQ ID NO: 71969 - RNA, 20 nt, Artificial Sequence
  LRRK2 RNA guide
uacagucaacugcauuuucu

SEQ ID NO: 71970 - RNA, 20 nt, Artificial Sequence
  LRRK2 RNA guide
ucaacugcauuuucuguaug

SEQ ID NO: 71971 - RNA, 20 nt, Artificial Sequence
  LRRK2 RNA guide
ucuguauguuucuguguuuc

SEQ ID NO: 71972 - RNA, 20 nt, Artificial Sequence
  LRRK2 RNA guide
ugaaacacagaaacauacag

SEQ ID NO: 71973 - RNA, 20 nt, Artificial Sequence
  LRRK2 RNA guide
ugcauuuucuguauguuucu

SEQ ID NO: 71974 - RNA, 20 nt, Artificial Sequence
  LRRK2 RNA guide
uguauguuucuguguuucaa

SEQ ID NO: 71975 - RNA, 20 nt, Artificial Sequence
  LRRK2 RNA guide
uucuguauguuucuguguuu

SEQ ID NO: 71976 - RNA, 20 nt, Artificial Sequence
  LRRK2 RNA guide
uugaaacacagaaacauaca

SEQ ID NO: 71977 - RNA, 20 nt, Artificial Sequence
  LRRK2 RNA guide
uuucuguauguuucuguguu

SEQ ID NO: 71978 - RNA, 20 nt, Artificial Sequence
  LRRK2 RNA guide
uuuucuguauguuucugugu

SEQ ID NO: 71979 - RNA, 21 nt, Artificial Sequence
  LRRK2 RNA guide
aacauacagaaaaugcaguug

SEQ ID NO: 71980 - RNA, 21 nt, Artificial Sequence
  LRRK2 RNA guide
aauacagucaacugcauuuuc

SEQ ID NO: 71981 - RNA, 21 nt, Artificial Sequence
  LRRK2 RNA guide
acagaaaaugcaguugacugu

SEQ ID NO: 71982 - RNA, 21 nt, Artificial Sequence
  LRRK2 RNA guide
acagaaacauacagaaaaugc

SEQ ID NO: 71983 - RNA, 21 nt, Artificial Sequence
  LRRK2 RNA guide
acagucaacugcauuuucugu

SEQ ID NO: 71984 - RNA, 21 nt, Artificial Sequence
  LRRK2 RNA guide
acauacagaaaaugcaguuga

SEQ ID NO: 71985 - RNA, 21 nt, Artificial Sequence
  LRRK2 RNA guide
acugcauuuucuguauguuuc

SEQ ID NO: 71986 - RNA, 21 nt, Artificial Sequence
  LRRK2 RNA guide
agaaacauacagaaaaugcag

SEQ ID NO: 71987 - RNA, 21 nt, Artificial Sequence
  LRRK2 RNA guide
agucaacugcauuuucuguau

SEQ ID NO: 71988 - RNA, 21 nt, Artificial Sequence
  LRRK2 RNA guide
auacagaaaaugcaguugacu

SEQ ID NO: 71989 - RNA, 21 nt, Artificial Sequence
  LRRK2 RNA guide
auacagucaacugcauuuucu

SEQ ID NO: 71990 - RNA, 21 nt, Artificial Sequence
  LRRK2 RNA guide
caacugcauuuucuguauguu

SEQ ID NO: 71991 - RNA, 21 nt, Artificial Sequence
  LRRK2 RNA guide
cacagaaacauacagaaaaug

SEQ ID NO: 71992 - RNA, 21 nt, Artificial Sequence
  LRRK2 RNA guide
cagaaacauacagaaaaugca

SEQ ID NO: 71993 - RNA, 21 nt, Artificial Sequence
  LRRK2 RNA guide
cagucaacugcauuuucugua

SEQ ID NO: 71994 - RNA, 21 nt, Artificial Sequence
  LRRK2 RNA guide
cauacagaaaaugcaguugac

SEQ ID NO: 71995 - RNA, 21 nt, Artificial Sequence
  LRRK2 RNA guide
cauuuucuguauguuucugug

SEQ ID NO: 71996 - RNA, 21 nt, Artificial Sequence
  LRRK2 RNA guide
cugcauuuucuguauguuucu

SEQ ID NO: 71997 - RNA, 21 nt, Artificial Sequence
  LRRK2 RNA guide
cuguauguuucuguguuucaa

SEQ ID NO: 71998 - RNA, 21 nt, Artificial Sequence
  LRRK2 RNA guide
gaaaauacagucaacugcauu

SEQ ID NO: 71999 - RNA, 21 nt, Artificial Sequence
  LRRK2 RNA guide
gaaacacagaaacauacagaa

SEQ ID NO: 72000 - RNA, 21 nt, Artificial Sequence
  LRRK2 RNA guide
gaaacauacagaaaaugcagu

SEQ ID NO: 72001 - RNA, 21 nt, Artificial Sequence
  LRRK2 RNA guide
gcauuuucuguauguuucugu

SEQ ID NO: 72002 - RNA, 21 nt, Artificial Sequence
  LRRK2 RNA guide
gucaacugcauuuucuguaug

SEQ ID NO: 72003 - RNA, 21 nt, Artificial Sequence
  LRRK2 RNA guide
uacagaaaaugcaguugacug

SEQ ID NO: 72004 - RNA, 21 nt, Artificial Sequence
  LRRK2 RNA guide
uacagucaacugcauuuucug

SEQ ID NO: 72005 - RNA, 21 nt, Artificial Sequence
  LRRK2 RNA guide
ucaacugcauuuucuguaugu

SEQ ID NO: 72006 - RNA, 21 nt, Artificial Sequence
  LRRK2 RNA guide
ucuguauguuucuguguuuca

SEQ ID NO: 72007 - RNA, 21 nt, Artificial Sequence
  LRRK2 RNA guide
ugaaacacagaaacauacaga

SEQ ID NO: 72008 - RNA, 21 nt, Artificial Sequence
  LRRK2 RNA guide
ugcauuuucuguauguuucug

SEQ ID NO: 72009 - RNA, 21 nt, Artificial Sequence
  LRRK2 RNA guide
uucuguauguuucuguguuuc

SEQ ID NO: 72010 - RNA, 21 nt, Artificial Sequence
  LRRK2 RNA guide
uugaaacacagaaacauacag

SEQ ID NO: 72011 - RNA, 22 nt, Artificial Sequence
  LRRK2 RNA guide
aaacauacagaaaaugcaguug

SEQ ID NO: 72012 - RNA, 22 nt, Artificial Sequence
  LRRK2 RNA guide
aaauacagucaacugcauuuuc

SEQ ID NO: 72013 - RNA, 22 nt, Artificial Sequence
  LRRK2 RNA guide
aacauacagaaaaugcaguuga

SEQ ID NO: 72014 - RNA, 22 nt, Artificial Sequence
  LRRK2 RNA guide
aacugcauuuucuguauguuuc

SEQ ID NO: 72015 - RNA, 22 nt, Artificial Sequence
  LRRK2 RNA guide
aauacagucaacugcauuuucu

SEQ ID NO: 72016 - RNA, 22 nt, Artificial Sequence
  LRRK2 RNA guide
acacagaaacauacagaaaaug

SEQ ID NO: 72017 - RNA, 22 nt, Artificial Sequence
  LRRK2 RNA guide
acagaaaaugcaguugacugua

SEQ ID NO: 72018 - RNA, 22 nt, Artificial Sequence
  LRRK2 RNA guide
acagaaacauacagaaaaugca

SEQ ID NO: 72019 - RNA, 22 nt, Artificial Sequence
  LRRK2 RNA guide
acagucaacugcauuuucugua

SEQ ID NO: 72020 - RNA, 22 nt, Artificial Sequence
  LRRK2 RNA guide
acauacagaaaaugcaguugac

SEQ ID NO: 72021 - RNA, 22 nt, Artificial Sequence
  LRRK2 RNA guide
acugcauuuucuguauguuucu

SEQ ID NO: 72022 - RNA, 22 nt, Artificial Sequence
  LRRK2 RNA guide
agaaacauacagaaaaugcagu

SEQ ID NO: 72023 - RNA, 22 nt, Artificial Sequence
  LRRK2 RNA guide
agucaacugcauuuucuguaug

SEQ ID NO: 72024 - RNA, 22 nt, Artificial Sequence
  LRRK2 RNA guide
auacagaaaaugcaguugacug

SEQ ID NO: 72025 - RNA, 22 nt, Artificial Sequence
  LRRK2 RNA guide
auacagucaacugcauuuucug

SEQ ID NO: 72026 - RNA, 22 nt, Artificial Sequence
  LRRK2 RNA guide
auugaaacacagaaacauacag

SEQ ID NO: 72027 - RNA, 22 nt, Artificial Sequence
  LRRK2 RNA guide
caacugcauuuucuguauguuu

SEQ ID NO: 72028 - RNA, 22 nt, Artificial Sequence
  LRRK2 RNA guide
cacagaaacauacagaaaaugc

SEQ ID NO: 72029 - RNA, 22 nt, Artificial Sequence
  LRRK2 RNA guide
cagaaacauacagaaaaugcag

SEQ ID NO: 72030 - RNA, 22 nt, Artificial Sequence
  LRRK2 RNA guide
cagucaacugcauuuucuguau

SEQ ID NO: 72031 - RNA, 22 nt, Artificial Sequence
  LRRK2 RNA guide
cauacagaaaaugcaguugacu

SEQ ID NO: 72032 - RNA, 22 nt, Artificial Sequence
  LRRK2 RNA guide
cauuuucuguauguuucugugu

SEQ ID NO: 72033 - RNA, 22 nt, Artificial Sequence
  LRRK2 RNA guide
cugcauuuucuguauguuucug

SEQ ID NO: 72034 - RNA, 22 nt, Artificial Sequence
  LRRK2 RNA guide
cuguauguuucuguguuucaau

SEQ ID NO: 72035 - RNA, 22 nt, Artificial Sequence
  LRRK2 RNA guide
gaaaauacagucaacugcauuu

SEQ ID NO: 72036 - RNA, 22 nt, Artificial Sequence
  LRRK2 RNA guide
gaaacacagaaacauacagaaa

SEQ ID NO: 72037 - RNA, 22 nt, Artificial Sequence
  LRRK2 RNA guide
gaaacauacagaaaaugcaguu

SEQ ID NO: 72038 - RNA, 22 nt, Artificial Sequence
  LRRK2 RNA guide
gaagauauugaaacacagaaac

SEQ ID NO: 72039 - RNA, 22 nt, Artificial Sequence
  LRRK2 RNA guide
gcauuuucuguauguuucugug

SEQ ID NO: 72040 - RNA, 22 nt, Artificial Sequence
  LRRK2 RNA guide
gucaacugcauuuucuguaugu

SEQ ID NO: 72041 - RNA, 22 nt, Artificial Sequence
  LRRK2 RNA guide
uacagaaaaugcaguugacugu

SEQ ID NO: 72042 - RNA, 22 nt, Artificial Sequence
  LRRK2 RNA guide
uacagucaacugcauuuucugu

SEQ ID NO: 72043 - RNA, 22 nt, Artificial Sequence
  LRRK2 RNA guide
ucaacugcauuuucuguauguu

SEQ ID NO: 72044 - RNA, 22 nt, Artificial Sequence
  LRRK2 RNA guide
ucuguauguuucuguguuucaa

SEQ ID NO: 72045 - RNA, 22 nt, Artificial Sequence
  LRRK2 RNA guide
ugaaaauacagucaacugcauu

SEQ ID NO: 72046 - RNA, 22 nt, Artificial Sequence
  LRRK2 RNA guide
ugaaacacagaaacauacagaa

SEQ ID NO: 72047 - RNA, 22 nt, Artificial Sequence
  LRRK2 RNA guide
ugcauuuucuguauguuucugu

SEQ ID NO: 72048 - RNA, 22 nt, Artificial Sequence
  LRRK2 RNA guide
uucuguauguuucuguguuuca

SEQ ID NO: 72049 - RNA, 22 nt, Artificial Sequence
  LRRK2 RNA guide
uugaaacacagaaacauacaga

SEQ ID NO: 72050 - RNA, 22 nt, Artificial Sequence
  LRRK2 RNA guide
uuucuguauguuucuguguuuc

SEQ ID NO: 72051 - RNA, 20 nt, Artificial Sequence
  LRRK2 RNA guide
acagucaacugcauuuucua

SEQ ID NO: 72052 - RNA, 20 nt, Artificial Sequence
  LRRK2 RNA guide
acauauagaaaaugcaguug

SEQ ID NO: 72053 - RNA, 20 nt, Artificial Sequence
  LRRK2 RNA guide
agucaacugcauuuucuaua

SEQ ID NO: 72054 - RNA, 20 nt, Artificial Sequence
  LRRK2 RNA guide
auagaaaaugcaguugacug

SEQ ID NO: 72055 - RNA, 20 nt, Artificial Sequence
  LRRK2 RNA guide
auauagaaaaugcaguugac

SEQ ID NO: 72056 - RNA, 20 nt, Artificial Sequence
  LRRK2 RNA guide
caacugcauuuucuauaugu

SEQ ID NO: 72057 - RNA, 20 nt, Artificial Sequence
  LRRK2 RNA guide
cagaaacauauagaaaaugc

SEQ ID NO: 72058 - RNA, 20 nt, Artificial Sequence
  LRRK2 RNA guide
cagucaacugcauuuucuau

SEQ ID NO: 72059 - RNA, 20 nt, Artificial Sequence
  LRRK2 RNA guide
cauauagaaaaugcaguuga

SEQ ID NO: 72060 - RNA, 20 nt, Artificial Sequence
  LRRK2 RNA guide
cuauauguuucuguguuuca

SEQ ID NO: 72061 - RNA, 20 nt, Artificial Sequence
  LRRK2 RNA guide
cugcauuuucuauauguuuc

SEQ ID NO: 72062 - RNA, 20 nt, Artificial Sequence
  LRRK2 RNA guide
gaaacacagaaacauauaga

SEQ ID NO: 72063 - RNA, 20 nt, Artificial Sequence
  LRRK2 RNA guide
gaaacauauagaaaaugcag

SEQ ID NO: 72064 - RNA, 20 nt, Artificial Sequence
  LRRK2 RNA guide
gcauuuucuauauguuucug

SEQ ID NO: 72065 - RNA, 20 nt, Artificial Sequence
  LRRK2 RNA guide
gucaacugcauuuucuauau

SEQ ID NO: 72066 - RNA, 20 nt, Artificial Sequence
  LRRK2 RNA guide
uauagaaaaugcaguugacu

SEQ ID NO: 72067 - RNA, 20 nt, Artificial Sequence
  LRRK2 RNA guide
ucaacugcauuuucuauaug

SEQ ID NO: 72068 - RNA, 20 nt, Artificial Sequence
  LRRK2 RNA guide
ucuauauguuucuguguuuc

SEQ ID NO: 72069 - RNA, 20 nt, Artificial Sequence
  LRRK2 RNA guide
ugaaacacagaaacauauag

SEQ ID NO: 72070 - RNA, 21 nt, Artificial Sequence
  LRRK2 RNA guide
acagucaacugcauuuucuau

SEQ ID NO: 72071 - RNA, 21 nt, Artificial Sequence
  LRRK2 RNA guide
auagaaaaugcaguugacugu

SEQ ID NO: 72072 - RNA, 21 nt, Artificial Sequence
  LRRK2 RNA guide
cagucaacugcauuuucuaua

SEQ ID NO: 72073 - RNA, 21 nt, Artificial Sequence
  LRRK2 RNA guide
cauauagaaaaugcaguugac

SEQ ID NO: 72074 - RNA, 21 nt, Artificial Sequence
  LRRK2 RNA guide
gucaacugcauuuucuauaug

SEQ ID NO: 72075 - RNA, 21 nt, Artificial Sequence
  LRRK2 RNA guide
uacagucaacugcauuuucua

SEQ ID NO: 72076 - RNA, 21 nt, Artificial Sequence
  LRRK2 RNA guide
uauagaaaaugcaguugacug

SEQ ID NO: 72077 - RNA, 22 nt, Artificial Sequence
  LRRK2 RNA guide
acagucaacugcauuuucuaua

SEQ ID NO: 72078 - RNA, 22 nt, Artificial Sequence
  LRRK2 RNA guide
acauauagaaaaugcaguugac

SEQ ID NO: 72079 - RNA, 22 nt, Artificial Sequence
  LRRK2 RNA guide
agucaacugcauuuucuauaug

SEQ ID NO: 72080 - RNA, 22 nt, Artificial Sequence
  LRRK2 RNA guide
auacagucaacugcauuuucua

SEQ ID NO: 72081 - RNA, 22 nt, Artificial Sequence
  LRRK2 RNA guide
auagaaaaugcaguugacugua

SEQ ID NO: 72082 - RNA, 22 nt, Artificial Sequence
  LRRK2 RNA guide
auauagaaaaugcaguugacug

SEQ ID NO: 72083 - RNA, 22 nt, Artificial Sequence
  LRRK2 RNA guide
cacagaaacauauagaaaaugc

SEQ ID NO: 72084 - RNA, 22 nt, Artificial Sequence
  LRRK2 RNA guide
cagaaacauauagaaaaugcag

SEQ ID NO: 72085 - RNA, 22 nt, Artificial Sequence
  LRRK2 RNA guide
cagucaacugcauuuucuauau

SEQ ID NO: 72086 - RNA, 22 nt, Artificial Sequence
  LRRK2 RNA guide
cauauagaaaaugcaguugacu

SEQ ID NO: 72087 - RNA, 22 nt, Artificial Sequence
  LRRK2 RNA guide
cugcauuuucuauauguuucug

SEQ ID NO: 72088 - RNA, 22 nt, Artificial Sequence
  LRRK2 RNA guide
gcauuuucuauauguuucugug

SEQ ID NO: 72089 - RNA, 22 nt, Artificial Sequence
  LRRK2 RNA guide
gucaacugcauuuucuauaugu

SEQ ID NO: 72090 - RNA, 22 nt, Artificial Sequence
  LRRK2 RNA guide
uacagucaacugcauuuucuau

SEQ ID NO: 72091 - RNA, 22 nt, Artificial Sequence
  LRRK2 RNA guide
uauagaaaaugcaguugacugu

SEQ ID NO: 72092 - RNA, 20 nt, Artificial Sequence
  LRRK2 RNA guide
aaaaaucuguuuaugcuugc

SEQ ID NO: 72093 - RNA, 20 nt, Artificial Sequence
  LRRK2 RNA guide
aaaaucuguuuaugcuugca

SEQ ID NO: 72094 - RNA, 20 nt, Artificial Sequence
  LRRK2 RNA guide
aaaucuguuuaugcuugcaa

SEQ ID NO: 72095 - RNA, 20 nt, Artificial Sequence
  LRRK2 RNA guide
aacugucaaggaauugcaag

SEQ ID NO: 72096 - RNA, 20 nt, Artificial Sequence
  LRRK2 RNA guide
aaggaauugcaagcauaaac

SEQ ID NO: 72097 - RNA, 20 nt, Artificial Sequence
  LRRK2 RNA guide
aaucuguuuaugcuugcaau

SEQ ID NO: 72098 - RNA, 20 nt, Artificial Sequence
  LRRK2 RNA guide
aauugcaagcauaaacagau

SEQ ID NO: 72099 - RNA, 20 nt, Artificial Sequence
  LRRK2 RNA guide
acugucaaggaauugcaagc

SEQ ID NO: 72100 - RNA, 20 nt, Artificial Sequence
  LRRK2 RNA guide
agaacugucaaggaauugca

SEQ ID NO: 72101 - RNA, 20 nt, Artificial Sequence
  LRRK2 RNA guide
aggaauugcaagcauaaaca

SEQ ID NO: 72102 - RNA, 20 nt, Artificial Sequence
  LRRK2 RNA guide
aucuguuuaugcuugcaauu

SEQ ID NO: 72103 - RNA, 20 nt, Artificial Sequence
  LRRK2 RNA guide
augcuugcaauuccuugaca

SEQ ID NO: 72104 - RNA, 20 nt, Artificial Sequence
  LRRK2 RNA guide
cugucaaggaauugcaagca

SEQ ID NO: 72105 - RNA, 20 nt, Artificial Sequence
  LRRK2 RNA guide
cuguuuaugcuugcaauucc

SEQ ID NO: 72106 - RNA, 20 nt, Artificial Sequence
  LRRK2 RNA guide
gaacugucaaggaauugcaa

SEQ ID NO: 72107 - RNA, 20 nt, Artificial Sequence
  LRRK2 RNA guide
gaauugcaagcauaaacaga

SEQ ID NO: 72108 - RNA, 20 nt, Artificial Sequence
  LRRK2 RNA guide
gagaacugucaaggaauugc

SEQ ID NO: 72109 - RNA, 20 nt, Artificial Sequence
  LRRK2 RNA guide
gcaagcauaaacagauuuuu

SEQ ID NO: 72110 - RNA, 20 nt, Artificial Sequence
  LRRK2 RNA guide
ggaauugcaagcauaaacag

SEQ ID NO: 72111 - RNA, 20 nt, Artificial Sequence
  LRRK2 RNA guide
gucaaggaauugcaagcaua

SEQ ID NO: 72112 - RNA, 20 nt, Artificial Sequence
  LRRK2 RNA guide
guuuaugcuugcaauuccuu

SEQ ID NO: 72113 - RNA, 20 nt, Artificial Sequence
  LRRK2 RNA guide
uaugcuugcaauuccuugac

SEQ ID NO: 72114 - RNA, 20 nt, Artificial Sequence
  LRRK2 RNA guide
ucaaggaauugcaagcauaa

SEQ ID NO: 72115 - RNA, 20 nt, Artificial Sequence
  LRRK2 RNA guide
ucuguuuaugcuugcaauuc

SEQ ID NO: 72116 - RNA, 20 nt, Artificial Sequence
  LRRK2 RNA guide
ugagaacugucaaggaauug

SEQ ID NO: 72117 - RNA, 20 nt, Artificial Sequence
  LRRK2 RNA guide
ugcaagcauaaacagauuuu

SEQ ID NO: 72118 - RNA, 20 nt, Artificial Sequence
  LRRK2 RNA guide
ugcuugcaauuccuugacag

SEQ ID NO: 72119 - RNA, 20 nt, Artificial Sequence
  LRRK2 RNA guide
ugucaaggaauugcaagcau

SEQ ID NO: 72120 - RNA, 20 nt, Artificial Sequence
  LRRK2 RNA guide
uguuuaugcuugcaauuccu

SEQ ID NO: 72121 - RNA, 20 nt, Artificial Sequence
  LRRK2 RNA guide
uuaugcuugcaauuccuuga

SEQ ID NO: 72122 - RNA, 20 nt, Artificial Sequence
  LRRK2 RNA guide
uugcaagcauaaacagauuu

SEQ ID NO: 72123 - RNA, 20 nt, Artificial Sequence
  LRRK2 RNA guide
uuuaugcuugcaauuccuug

SEQ ID NO: 72124 - RNA, 21 nt, Artificial Sequence
  LRRK2 RNA guide
aacugucaaggaauugcaagc

SEQ ID NO: 72125 - RNA, 21 nt, Artificial Sequence
  LRRK2 RNA guide
aaggaauugcaagcauaaaca

SEQ ID NO: 72126 - RNA, 21 nt, Artificial Sequence
  LRRK2 RNA guide
acugucaaggaauugcaagca

SEQ ID NO: 72127 - RNA, 21 nt, Artificial Sequence
  LRRK2 RNA guide
agaacugucaaggaauugcaa

SEQ ID NO: 72128 - RNA, 21 nt, Artificial Sequence
  LRRK2 RNA guide
aggaauugcaagcauaaacag

SEQ ID NO: 72129 - RNA, 21 nt, Artificial Sequence
  LRRK2 RNA guide
aucuguuuaugcuugcaauuc

SEQ ID NO: 72130 - RNA, 21 nt, Artificial Sequence
  LRRK2 RNA guide
augcuugcaauuccuugacag

SEQ ID NO: 72131 - RNA, 21 nt, Artificial Sequence
  LRRK2 RNA guide
caaggaauugcaagcauaaac

SEQ ID NO: 72132 - RNA, 21 nt, Artificial Sequence
  LRRK2 RNA guide
cugucaaggaauugcaagcau

SEQ ID NO: 72133 - RNA, 21 nt, Artificial Sequence
  LRRK2 RNA guide
cuguuuaugcuugcaauuccu

SEQ ID NO: 72134 - RNA, 21 nt, Artificial Sequence
  LRRK2 RNA guide
gaacugucaaggaauugcaag

SEQ ID NO: 72135 - RNA, 21 nt, Artificial Sequence
  LRRK2 RNA guide
gaauugcaagcauaaacagau

SEQ ID NO: 72136 - RNA, 21 nt, Artificial Sequence
  LRRK2 RNA guide
gagaacugucaaggaauugca

SEQ ID NO: 72137 - RNA, 21 nt, Artificial Sequence
  LRRK2 RNA guide
ggaauugcaagcauaaacaga

SEQ ID NO: 72138 - RNA, 21 nt, Artificial Sequence
  LRRK2 RNA guide
gucaaggaauugcaagcauaa

SEQ ID NO: 72139 - RNA, 21 nt, Artificial Sequence
  LRRK2 RNA guide
guuuaugcuugcaauuccuug

SEQ ID NO: 72140 - RNA, 21 nt, Artificial Sequence
  LRRK2 RNA guide
uaugcuugcaauuccuugaca

SEQ ID NO: 72141 - RNA, 21 nt, Artificial Sequence
  LRRK2 RNA guide
ucaaggaauugcaagcauaaa

SEQ ID NO: 72142 - RNA, 21 nt, Artificial Sequence
  LRRK2 RNA guide
ucuguuuaugcuugcaauucc

SEQ ID NO: 72143 - RNA, 21 nt, Artificial Sequence
  LRRK2 RNA guide
ugagaacugucaaggaauugc

SEQ ID NO: 72144 - RNA, 21 nt, Artificial Sequence
  LRRK2 RNA guide
ugcuugcaauuccuugacagu

SEQ ID NO: 72145 - RNA, 21 nt, Artificial Sequence
  LRRK2 RNA guide
ugucaaggaauugcaagcaua

SEQ ID NO: 72146 - RNA, 21 nt, Artificial Sequence
  LRRK2 RNA guide
uguuuaugcuugcaauuccuu

SEQ ID NO: 72147 - RNA, 21 nt, Artificial Sequence
  LRRK2 RNA guide
uuaugcuugcaauuccuugac

SEQ ID NO: 72148 - RNA, 21 nt, Artificial Sequence
  LRRK2 RNA guide
uugagaacugucaaggaauug

SEQ ID NO: 72149 - RNA, 21 nt, Artificial Sequence
  LRRK2 RNA guide
uuuaugcuugcaauuccuuga

SEQ ID NO: 72150 - RNA, 22 nt, Artificial Sequence
  LRRK2 RNA guide
aacugucaaggaauugcaagca

SEQ ID NO: 72151 - RNA, 22 nt, Artificial Sequence
  LRRK2 RNA guide
aaggaauugcaagcauaaacag

SEQ ID NO: 72152 - RNA, 22 nt, Artificial Sequence
  LRRK2 RNA guide
aaucuguuuaugcuugcaauuc

SEQ ID NO: 72153 - RNA, 22 nt, Artificial Sequence
  LRRK2 RNA guide
acugucaaggaauugcaagcau

SEQ ID NO: 72154 - RNA, 22 nt, Artificial Sequence
  LRRK2 RNA guide
agaacugucaaggaauugcaag

SEQ ID NO: 72155 - RNA, 22 nt, Artificial Sequence
  LRRK2 RNA guide
aggaauugcaagcauaaacaga

SEQ ID NO: 72156 - RNA, 22 nt, Artificial Sequence
  LRRK2 RNA guide
aucuguuuaugcuugcaauucc

SEQ ID NO: 72157 - RNA, 22 nt, Artificial Sequence
  LRRK2 RNA guide
augcuugcaauuccuugacagu

SEQ ID NO: 72158 - RNA, 22 nt, Artificial Sequence
  LRRK2 RNA guide
auugagaacugucaaggaauug

SEQ ID NO: 72159 - RNA, 22 nt, Artificial Sequence
  LRRK2 RNA guide
caaggaauugcaagcauaaaca

SEQ ID NO: 72160 - RNA, 22 nt, Artificial Sequence
  LRRK2 RNA guide
cugucaaggaauugcaagcaua

SEQ ID NO: 72161 - RNA, 22 nt, Artificial Sequence
  LRRK2 RNA guide
cuguuuaugcuugcaauuccuu

SEQ ID NO: 72162 - RNA, 22 nt, Artificial Sequence
  LRRK2 RNA guide
gaacugucaaggaauugcaagc

SEQ ID NO: 72163 - RNA, 22 nt, Artificial Sequence
  LRRK2 RNA guide
gaauugcaagcauaaacagauu

SEQ ID NO: 72164 - RNA, 22 nt, Artificial Sequence
  LRRK2 RNA guide
gagaacugucaaggaauugcaa

SEQ ID NO: 72165 - RNA, 22 nt, Artificial Sequence
  LRRK2 RNA guide
ggaauugcaagcauaaacagau

SEQ ID NO: 72166 - RNA, 22 nt, Artificial Sequence
  LRRK2 RNA guide
gucaaggaauugcaagcauaaa

SEQ ID NO: 72167 - RNA, 22 nt, Artificial Sequence
  LRRK2 RNA guide
guuuaugcuugcaauuccuuga

SEQ ID NO: 72168 - RNA, 22 nt, Artificial Sequence
  LRRK2 RNA guide
uaugcuugcaauuccuugacag

SEQ ID NO: 72169 - RNA, 22 nt, Artificial Sequence
  LRRK2 RNA guide
ucaaggaauugcaagcauaaac

SEQ ID NO: 72170 - RNA, 22 nt, Artificial Sequence
  LRRK2 RNA guide
ucuguuuaugcuugcaauuccu

SEQ ID NO: 72171 - RNA, 22 nt, Artificial Sequence
  LRRK2 RNA guide
ugagaacugucaaggaauugca

SEQ ID NO: 72172 - RNA, 22 nt, Artificial Sequence
  LRRK2 RNA guide
ugcuugcaauuccuugacaguu

SEQ ID NO: 72173 - RNA, 22 nt, Artificial Sequence
  LRRK2 RNA guide
ugucaaggaauugcaagcauaa

SEQ ID NO: 72174 - RNA, 22 nt, Artificial Sequence
  LRRK2 RNA guide
uguuuaugcuugcaauuccuug

SEQ ID NO: 72175 - RNA, 22 nt, Artificial Sequence
  LRRK2 RNA guide
uuaugcuugcaauuccuugaca

SEQ ID NO: 72176 - RNA, 22 nt, Artificial Sequence
  LRRK2 RNA guide
uugagaacugucaaggaauugc

SEQ ID NO: 72177 - RNA, 22 nt, Artificial Sequence
  LRRK2 RNA guide
uuuaugcuugcaauuccuugac

SEQ ID NO: 72178 - RNA, 20 nt, Artificial Sequence
  LRRK2 RNA guide
aaaaaucuguuuauccuugc

SEQ ID NO: 72179 - RNA, 20 nt, Artificial Sequence
  LRRK2 RNA guide
aaaaucuguuuauccuugca

SEQ ID NO: 72180 - RNA, 20 nt, Artificial Sequence
  LRRK2 RNA guide
aaaucuguuuauccuugcaa

SEQ ID NO: 72181 - RNA, 20 nt, Artificial Sequence
  LRRK2 RNA guide
aaggaauugcaaggauaaac

SEQ ID NO: 72182 - RNA, 20 nt, Artificial Sequence
  LRRK2 RNA guide
aaucuguuuauccuugcaau

SEQ ID NO: 72183 - RNA, 20 nt, Artificial Sequence
  LRRK2 RNA guide
aauugcaaggauaaacagau

SEQ ID NO: 72184 - RNA, 20 nt, Artificial Sequence
  LRRK2 RNA guide
acugucaaggaauugcaagg

SEQ ID NO: 72185 - RNA, 20 nt, Artificial Sequence
  LRRK2 RNA guide
aggaauugcaaggauaaaca

SEQ ID NO: 72186 - RNA, 20 nt, Artificial Sequence
  LRRK2 RNA guide
auccuugcaauuccuugaca

SEQ ID NO: 72187 - RNA, 20 nt, Artificial Sequence
  LRRK2 RNA guide
aucuguuuauccuugcaauu

SEQ ID NO: 72188 - RNA, 20 nt, Artificial Sequence
  LRRK2 RNA guide
auugcaaggauaaacagauu

SEQ ID NO: 72189 - RNA, 20 nt, Artificial Sequence
  LRRK2 RNA guide
caaggaauugcaaggauaaa

SEQ ID NO: 72190 - RNA, 20 nt, Artificial Sequence
  LRRK2 RNA guide
cugucaaggaauugcaagga

SEQ ID NO: 72191 - RNA, 20 nt, Artificial Sequence
  LRRK2 RNA guide
cuguuuauccuugcaauucc

SEQ ID NO: 72192 - RNA, 20 nt, Artificial Sequence
  LRRK2 RNA guide
gaauugcaaggauaaacaga

SEQ ID NO: 72193 - RNA, 20 nt, Artificial Sequence
  LRRK2 RNA guide
gcaaggauaaacagauuuuu

SEQ ID NO: 72194 - RNA, 20 nt, Artificial Sequence
  LRRK2 RNA guide
ggaauugcaaggauaaacag

SEQ ID NO: 72195 - RNA, 20 nt, Artificial Sequence
  LRRK2 RNA guide
gucaaggaauugcaaggaua

SEQ ID NO: 72196 - RNA, 20 nt, Artificial Sequence
  LRRK2 RNA guide
guuuauccuugcaauuccuu

SEQ ID NO: 72197 - RNA, 20 nt, Artificial Sequence
  LRRK2 RNA guide
uauccuugcaauuccuugac

SEQ ID NO: 72198 - RNA, 20 nt, Artificial Sequence
  LRRK2 RNA guide
ucaaggaauugcaaggauaa

SEQ ID NO: 72199 - RNA, 20 nt, Artificial Sequence
  LRRK2 RNA guide
uccuugcaauuccuugacag

SEQ ID NO: 72200 - RNA, 20 nt, Artificial Sequence
  LRRK2 RNA guide
ucuguuuauccuugcaauuc

SEQ ID NO: 72201 - RNA, 20 nt, Artificial Sequence
  LRRK2 RNA guide
ugcaaggauaaacagauuuu

SEQ ID NO: 72202 - RNA, 20 nt, Artificial Sequence
  LRRK2 RNA guide
ugucaaggaauugcaaggau

SEQ ID NO: 72203 - RNA, 20 nt, Artificial Sequence
  LRRK2 RNA guide
uguuuauccuugcaauuccu

SEQ ID NO: 72204 - RNA, 20 nt, Artificial Sequence
  LRRK2 RNA guide
uuauccuugcaauuccuuga

SEQ ID NO: 72205 - RNA, 20 nt, Artificial Sequence
  LRRK2 RNA guide
uugcaaggauaaacagauuu

SEQ ID NO: 72206 - RNA, 20 nt, Artificial Sequence
  LRRK2 RNA guide
uuuauccuugcaauuccuug

SEQ ID NO: 72207 - RNA, 21 nt, Artificial Sequence
  LRRK2 RNA guide
aacugucaaggaauugcaagg

SEQ ID NO: 72208 - RNA, 21 nt, Artificial Sequence
  LRRK2 RNA guide
aaggaauugcaaggauaaaca

SEQ ID NO: 72209 - RNA, 21 nt, Artificial Sequence
  LRRK2 RNA guide
acugucaaggaauugcaagga

SEQ ID NO: 72210 - RNA, 21 nt, Artificial Sequence
  LRRK2 RNA guide
aggaauugcaaggauaaacag

SEQ ID NO: 72211 - RNA, 21 nt, Artificial Sequence
  LRRK2 RNA guide
auccuugcaauuccuugacag

SEQ ID NO: 72212 - RNA, 21 nt, Artificial Sequence
  LRRK2 RNA guide
aucuguuuauccuugcaauuc

SEQ ID NO: 72213 - RNA, 21 nt, Artificial Sequence
  LRRK2 RNA guide
caaggaauugcaaggauaaac

SEQ ID NO: 72214 - RNA, 21 nt, Artificial Sequence
  LRRK2 RNA guide
cugucaaggaauugcaaggau

SEQ ID NO: 72215 - RNA, 21 nt, Artificial Sequence
  LRRK2 RNA guide
cuguuuauccuugcaauuccu

SEQ ID NO: 72216 - RNA, 21 nt, Artificial Sequence
  LRRK2 RNA guide
gaauugcaaggauaaacagau

SEQ ID NO: 72217 - RNA, 21 nt, Artificial Sequence
  LRRK2 RNA guide
ggaauugcaaggauaaacaga

SEQ ID NO: 72218 - RNA, 21 nt, Artificial Sequence
  LRRK2 RNA guide
gucaaggaauugcaaggauaa

SEQ ID NO: 72219 - RNA, 21 nt, Artificial Sequence
  LRRK2 RNA guide
guuuauccuugcaauuccuug

SEQ ID NO: 72220 - RNA, 21 nt, Artificial Sequence
  LRRK2 RNA guide
uauccuugcaauuccuugaca

SEQ ID NO: 72221 - RNA, 21 nt, Artificial Sequence
  LRRK2 RNA guide
ucaaggaauugcaaggauaaa

SEQ ID NO: 72222 - RNA, 21 nt, Artificial Sequence
  LRRK2 RNA guide
uccuugcaauuccuugacagu

SEQ ID NO: 72223 - RNA, 21 nt, Artificial Sequence
  LRRK2 RNA guide
ucuguuuauccuugcaauucc

SEQ ID NO: 72224 - RNA, 21 nt, Artificial Sequence
  LRRK2 RNA guide
ugucaaggaauugcaaggaua

SEQ ID NO: 72225 - RNA, 21 nt, Artificial Sequence
  LRRK2 RNA guide
uguuuauccuugcaauuccuu

SEQ ID NO: 72226 - RNA, 21 nt, Artificial Sequence
  LRRK2 RNA guide
uuauccuugcaauuccuugac

SEQ ID NO: 72227 - RNA, 21 nt, Artificial Sequence
  LRRK2 RNA guide
uuuauccuugcaauuccuuga

SEQ ID NO: 72228 - RNA, 22 nt, Artificial Sequence
  LRRK2 RNA guide
aacugucaaggaauugcaagga

SEQ ID NO: 72229 - RNA, 22 nt, Artificial Sequence
  LRRK2 RNA guide
aaggaauugcaaggauaaacag

SEQ ID NO: 72230 - RNA, 22 nt, Artificial Sequence
  LRRK2 RNA guide
aaucuguuuauccuugcaauuc

SEQ ID NO: 72231 - RNA, 22 nt, Artificial Sequence
  LRRK2 RNA guide
acugucaaggaauugcaaggau

SEQ ID NO: 72232 - RNA, 22 nt, Artificial Sequence
  LRRK2 RNA guide
aggaauugcaaggauaaacaga

SEQ ID NO: 72233 - RNA, 22 nt, Artificial Sequence
  LRRK2 RNA guide
auccuugcaauuccuugacagu

SEQ ID NO: 72234 - RNA, 22 nt, Artificial Sequence
  LRRK2 RNA guide
aucuguuuauccuugcaauucc

SEQ ID NO: 72235 - RNA, 22 nt, Artificial Sequence
  LRRK2 RNA guide
caaggaauugcaaggauaaaca

SEQ ID NO: 72236 - RNA, 22 nt, Artificial Sequence
  LRRK2 RNA guide
cugucaaggaauugcaaggaua

SEQ ID NO: 72237 - RNA, 22 nt, Artificial Sequence
  LRRK2 RNA guide
cuguuuauccuugcaauuccuu

SEQ ID NO: 72238 - RNA, 22 nt, Artificial Sequence
  LRRK2 RNA guide
gaacugucaaggaauugcaagg

SEQ ID NO: 72239 - RNA, 22 nt, Artificial Sequence
  LRRK2 RNA guide
gaauugcaaggauaaacagauu

SEQ ID NO: 72240 - RNA, 22 nt, Artificial Sequence
  LRRK2 RNA guide
ggaauugcaaggauaaacagau

SEQ ID NO: 72241 - RNA, 22 nt, Artificial Sequence
  LRRK2 RNA guide
gucaaggaauugcaaggauaaa

SEQ ID NO: 72242 - RNA, 22 nt, Artificial Sequence
  LRRK2 RNA guide
guuuauccuugcaauuccuuga

SEQ ID NO: 72243 - RNA, 22 nt, Artificial Sequence
  LRRK2 RNA guide
uauccuugcaauuccuugacag

SEQ ID NO: 72244 - RNA, 22 nt, Artificial Sequence
  LRRK2 RNA guide
ucaaggaauugcaaggauaaac

SEQ ID NO: 72245 - RNA, 22 nt, Artificial Sequence
  LRRK2 RNA guide
uccuugcaauuccuugacaguu

SEQ ID NO: 72246 - RNA, 22 nt, Artificial Sequence
  LRRK2 RNA guide
ucuguuuauccuugcaauuccu

SEQ ID NO: 72247 - RNA, 22 nt, Artificial Sequence
  LRRK2 RNA guide
ugucaaggaauugcaaggauaa

SEQ ID NO: 72248 - RNA, 22 nt, Artificial Sequence
  LRRK2 RNA guide
uguuuauccuugcaauuccuug

SEQ ID NO: 72249 - RNA, 22 nt, Artificial Sequence
  LRRK2 RNA guide
uuauccuugcaauuccuugaca

SEQ ID NO: 72250 - RNA, 22 nt, Artificial Sequence
  LRRK2 RNA guide
uuuauccuugcaauuccuugac

SEQ ID NO: 72251 - RNA, 20 nt, Artificial Sequence
  LRRK2 RNA guide
aggggccgcaaagggaagca

SEQ ID NO: 72252 - RNA, 20 nt, Artificial Sequence
  LRRK2 RNA guide
agugggguggcaggggccgc

SEQ ID NO: 72253 - RNA, 20 nt, Artificial Sequence
  LRRK2 RNA guide
augccucuugcuucccuuug

SEQ ID NO: 72254 - RNA, 20 nt, Artificial Sequence
  LRRK2 RNA guide
caggggccgcaaagggaagc

SEQ ID NO: 72255 - RNA, 20 nt, Artificial Sequence
  LRRK2 RNA guide
cagugggguggcaggggccg

SEQ ID NO: 72256 - RNA, 20 nt, Artificial Sequence
  LRRK2 RNA guide
cccuuugcggccccugccac

SEQ ID NO: 72257 - RNA, 20 nt, Artificial Sequence
  LRRK2 RNA guide
ccgcaaagggaagcaagagg

SEQ ID NO: 72258 - RNA, 20 nt, Artificial Sequence
  LRRK2 RNA guide
ccucuugcuucccuuugcgg

SEQ ID NO: 72259 - RNA, 20 nt, Artificial Sequence
  LRRK2 RNA guide
ccuuugcggccccugccacc

SEQ ID NO: 72260 - RNA, 20 nt, Artificial Sequence
  LRRK2 RNA guide
cggccccugccaccccacug

SEQ ID NO: 72261 - RNA, 20 nt, Artificial Sequence
  LRRK2 RNA guide
cucuugcuucccuuugcggc

SEQ ID NO: 72262 - RNA, 20 nt, Artificial Sequence
  LRRK2 RNA guide
cuucccuuugcggccccugc

SEQ ID NO: 72263 - RNA, 20 nt, Artificial Sequence
  LRRK2 RNA guide
cuugcuucccuuugcggccc

SEQ ID NO: 72264 - RNA, 20 nt, Artificial Sequence
  LRRK2 RNA guide
cuuugcggccccugccaccc

SEQ ID NO: 72265 - RNA, 20 nt, Artificial Sequence
  LRRK2 RNA guide
gcaggggccgcaaagggaag

SEQ ID NO: 72266 - RNA, 20 nt, Artificial Sequence
  LRRK2 RNA guide
gcagugggguggcaggggcc

SEQ ID NO: 72267 - RNA, 20 nt, Artificial Sequence
  LRRK2 RNA guide
gccgcaaagggaagcaagag

SEQ ID NO: 72268 - RNA, 20 nt, Artificial Sequence
  LRRK2 RNA guide
gccucuugcuucccuuugcg

SEQ ID NO: 72269 - RNA, 20 nt, Artificial Sequence
  LRRK2 RNA guide
gcggccccugccaccccacu

SEQ ID NO: 72270 - RNA, 20 nt, Artificial Sequence
  LRRK2 RNA guide
gcuucccuuugcggccccug

SEQ ID NO: 72271 - RNA, 20 nt, Artificial Sequence
  LRRK2 RNA guide
ggcaggggccgcaaagggaa

SEQ ID NO: 72272 - RNA, 20 nt, Artificial Sequence
  LRRK2 RNA guide
ggcagugggguggcaggggc

SEQ ID NO: 72273 - RNA, 20 nt, Artificial Sequence
  LRRK2 RNA guide
ggccgcaaagggaagcaaga

SEQ ID NO: 72274 - RNA, 20 nt, Artificial Sequence
  LRRK2 RNA guide
gggcagugggguggcagggg

SEQ ID NO: 72275 - RNA, 20 nt, Artificial Sequence
  LRRK2 RNA guide
gggccgcaaagggaagcaag

SEQ ID NO: 72276 - RNA, 20 nt, Artificial Sequence
  LRRK2 RNA guide
ggggccgcaaagggaagcaa

SEQ ID NO: 72277 - RNA, 20 nt, Artificial Sequence
  LRRK2 RNA guide
gggguggcaggggccgcaaa

SEQ ID NO: 72278 - RNA, 20 nt, Artificial Sequence
  LRRK2 RNA guide
ggguggcaggggccgcaaag

SEQ ID NO: 72279 - RNA, 20 nt, Artificial Sequence
  LRRK2 RNA guide
gguggcaggggccgcaaagg

SEQ ID NO: 72280 - RNA, 20 nt, Artificial Sequence
  LRRK2 RNA guide
guaugccucuugcuucccuu

SEQ ID NO: 72281 - RNA, 20 nt, Artificial Sequence
  LRRK2 RNA guide
guggcaggggccgcaaaggg

SEQ ID NO: 72282 - RNA, 20 nt, Artificial Sequence
  LRRK2 RNA guide
gugggcagugggguggcagg

SEQ ID NO: 72283 - RNA, 20 nt, Artificial Sequence
  LRRK2 RNA guide
gugggguggcaggggccgca

SEQ ID NO: 72284 - RNA, 20 nt, Artificial Sequence
  LRRK2 RNA guide
uaugccucuugcuucccuuu

SEQ ID NO: 72285 - RNA, 20 nt, Artificial Sequence
  LRRK2 RNA guide
ucccuuugcggccccugcca

SEQ ID NO: 72286 - RNA, 20 nt, Artificial Sequence
  LRRK2 RNA guide
ucuugcuucccuuugcggcc

SEQ ID NO: 72287 - RNA, 20 nt, Artificial Sequence
  LRRK2 RNA guide
ugccucuugcuucccuuugc

SEQ ID NO: 72288 - RNA, 20 nt, Artificial Sequence
  LRRK2 RNA guide
ugcggccccugccaccccac

SEQ ID NO: 72289 - RNA, 20 nt, Artificial Sequence
  LRRK2 RNA guide
ugcuucccuuugcggccccu

SEQ ID NO: 72290 - RNA, 20 nt, Artificial Sequence
  LRRK2 RNA guide
uggcaggggccgcaaaggga

SEQ ID NO: 72291 - RNA, 20 nt, Artificial Sequence
  LRRK2 RNA guide
ugggcagugggguggcaggg

SEQ ID NO: 72292 - RNA, 20 nt, Artificial Sequence
  LRRK2 RNA guide
ugggguggcaggggccgcaa

SEQ ID NO: 72293 - RNA, 20 nt, Artificial Sequence
  LRRK2 RNA guide
uguaugccucuugcuucccu

SEQ ID NO: 72294 - RNA, 20 nt, Artificial Sequence
  LRRK2 RNA guide
ugugggcagugggguggcag

SEQ ID NO: 72295 - RNA, 20 nt, Artificial Sequence
  LRRK2 RNA guide
uucccuuugcggccccugcc

SEQ ID NO: 72296 - RNA, 20 nt, Artificial Sequence
  LRRK2 RNA guide
uugcggccccugccacccca

SEQ ID NO: 72297 - RNA, 20 nt, Artificial Sequence
  LRRK2 RNA guide
uugcuucccuuugcggcccc

SEQ ID NO: 72298 - RNA, 20 nt, Artificial Sequence
  LRRK2 RNA guide
uuugcggccccugccacccc

SEQ ID NO: 72299 - RNA, 21 nt, Artificial Sequence
  LRRK2 RNA guide
aggggccgcaaagggaagcaa

SEQ ID NO: 72300 - RNA, 21 nt, Artificial Sequence
  LRRK2 RNA guide
agugggguggcaggggccgca

SEQ ID NO: 72301 - RNA, 21 nt, Artificial Sequence
  LRRK2 RNA guide
augccucuugcuucccuuugc

SEQ ID NO: 72302 - RNA, 21 nt, Artificial Sequence
  LRRK2 RNA guide
caggggccgcaaagggaagca

SEQ ID NO: 72303 - RNA, 21 nt, Artificial Sequence
  LRRK2 RNA guide
cccuuugcggccccugccacc

SEQ ID NO: 72304 - RNA, 21 nt, Artificial Sequence
  LRRK2 RNA guide
ccgcaaagggaagcaagaggc

SEQ ID NO: 72305 - RNA, 21 nt, Artificial Sequence
  LRRK2 RNA guide
ccucuugcuucccuuugcggc

SEQ ID NO: 72306 - RNA, 21 nt, Artificial Sequence
  LRRK2 RNA guide
ccuuugcggccccugccaccc

SEQ ID NO: 72307 - RNA, 21 nt, Artificial Sequence
  LRRK2 RNA guide
cucuugcuucccuuugcggcc

SEQ ID NO: 72308 - RNA, 21 nt, Artificial Sequence
  LRRK2 RNA guide
cuguaugccucuugcuucccu

SEQ ID NO: 72309 - RNA, 21 nt, Artificial Sequence
  LRRK2 RNA guide
cuucccuuugcggccccugcc

SEQ ID NO: 72310 - RNA, 21 nt, Artificial Sequence
  LRRK2 RNA guide
cuugcuucccuuugcggcccc

SEQ ID NO: 72311 - RNA, 21 nt, Artificial Sequence
  LRRK2 RNA guide
cuuugcggccccugccacccc

SEQ ID NO: 72312 - RNA, 21 nt, Artificial Sequence
  LRRK2 RNA guide
gcaggggccgcaaagggaagc

SEQ ID NO: 72313 - RNA, 21 nt, Artificial Sequence
  LRRK2 RNA guide
gccgcaaagggaagcaagagg

SEQ ID NO: 72314 - RNA, 21 nt, Artificial Sequence
  LRRK2 RNA guide
gccucuugcuucccuuugcgg

SEQ ID NO: 72315 - RNA, 21 nt, Artificial Sequence
  LRRK2 RNA guide
gcuucccuuugcggccccugc

SEQ ID NO: 72316 - RNA, 21 nt, Artificial Sequence
  LRRK2 RNA guide
ggcaggggccgcaaagggaag

SEQ ID NO: 72317 - RNA, 21 nt, Artificial Sequence
  LRRK2 RNA guide
ggccgcaaagggaagcaagag

SEQ ID NO: 72318 - RNA, 21 nt, Artificial Sequence
  LRRK2 RNA guide
gggccgcaaagggaagcaaga

SEQ ID NO: 72319 - RNA, 21 nt, Artificial Sequence
  LRRK2 RNA guide
ggggccgcaaagggaagcaag

SEQ ID NO: 72320 - RNA, 21 nt, Artificial Sequence
  LRRK2 RNA guide
gggguggcaggggccgcaaag

SEQ ID NO: 72321 - RNA, 21 nt, Artificial Sequence
  LRRK2 RNA guide
ggguggcaggggccgcaaagg

SEQ ID NO: 72322 - RNA, 21 nt, Artificial Sequence
  LRRK2 RNA guide
gguggcaggggccgcaaaggg

SEQ ID NO: 72323 - RNA, 21 nt, Artificial Sequence
  LRRK2 RNA guide
guaugccucuugcuucccuuu

SEQ ID NO: 72324 - RNA, 21 nt, Artificial Sequence
  LRRK2 RNA guide
guggcaggggccgcaaaggga

SEQ ID NO: 72325 - RNA, 21 nt, Artificial Sequence
  LRRK2 RNA guide
gugggcagugggguggcaggg

SEQ ID NO: 72326 - RNA, 21 nt, Artificial Sequence
  LRRK2 RNA guide
gugggguggcaggggccgcaa

SEQ ID NO: 72327 - RNA, 21 nt, Artificial Sequence
  LRRK2 RNA guide
gugugggcagugggguggcag

SEQ ID NO: 72328 - RNA, 21 nt, Artificial Sequence
  LRRK2 RNA guide
uaugccucuugcuucccuuug

SEQ ID NO: 72329 - RNA, 21 nt, Artificial Sequence
  LRRK2 RNA guide
ucccuuugcggccccugccac

SEQ ID NO: 72330 - RNA, 21 nt, Artificial Sequence
  LRRK2 RNA guide
ucuugcuucccuuugcggccc

SEQ ID NO: 72331 - RNA, 21 nt, Artificial Sequence
  LRRK2 RNA guide
ugccucuugcuucccuuugcg

SEQ ID NO: 72332 - RNA, 21 nt, Artificial Sequence
  LRRK2 RNA guide
ugcggccccugccaccccacu

SEQ ID NO: 72333 - RNA, 21 nt, Artificial Sequence
  LRRK2 RNA guide
ugcuucccuuugcggccccug

SEQ ID NO: 72334 - RNA, 21 nt, Artificial Sequence
  LRRK2 RNA guide
uggcaggggccgcaaagggaa

SEQ ID NO: 72335 - RNA, 21 nt, Artificial Sequence
  LRRK2 RNA guide
ugggcagugggguggcagggg

SEQ ID NO: 72336 - RNA, 21 nt, Artificial Sequence
  LRRK2 RNA guide
ugggguggcaggggccgcaaa

SEQ ID NO: 72337 - RNA, 21 nt, Artificial Sequence
  LRRK2 RNA guide
uguaugccucuugcuucccuu

SEQ ID NO: 72338 - RNA, 21 nt, Artificial Sequence
  LRRK2 RNA guide
ugugggcagugggguggcagg

SEQ ID NO: 72339 - RNA, 21 nt, Artificial Sequence
  LRRK2 RNA guide
uucccuuugcggccccugcca

SEQ ID NO: 72340 - RNA, 21 nt, Artificial Sequence
  LRRK2 RNA guide
uugcggccccugccaccccac

SEQ ID NO: 72341 - RNA, 21 nt, Artificial Sequence
  LRRK2 RNA guide
uugcuucccuuugcggccccu

SEQ ID NO: 72342 - RNA, 21 nt, Artificial Sequence
  LRRK2 RNA guide
uuugcggccccugccacccca

SEQ ID NO: 72343 - RNA, 22 nt, Artificial Sequence
  LRRK2 RNA guide
aggggccgcaaagggaagcaag

SEQ ID NO: 72344 - RNA, 22 nt, Artificial Sequence
  LRRK2 RNA guide
agugggguggcaggggccgcaa

SEQ ID NO: 72345 - RNA, 22 nt, Artificial Sequence
  LRRK2 RNA guide
agugugggcagugggguggcag

SEQ ID NO: 72346 - RNA, 22 nt, Artificial Sequence
  LRRK2 RNA guide
augccucuugcuucccuuugcg

SEQ ID NO: 72347 - RNA, 22 nt, Artificial Sequence
  LRRK2 RNA guide
caggggccgcaaagggaagcaa

SEQ ID NO: 72348 - RNA, 22 nt, Artificial Sequence
  LRRK2 RNA guide
cagugggguggcaggggccgca

SEQ ID NO: 72349 - RNA, 22 nt, Artificial Sequence
  LRRK2 RNA guide
cccuuugcggccccugccaccc

SEQ ID NO: 72350 - RNA, 22 nt, Artificial Sequence
  LRRK2 RNA guide
ccgcaaagggaagcaagaggca

SEQ ID NO: 72351 - RNA, 22 nt, Artificial Sequence
  LRRK2 RNA guide
ccucuugcuucccuuugcggcc

SEQ ID NO: 72352 - RNA, 22 nt, Artificial Sequence
  LRRK2 RNA guide
ccuuugcggccccugccacccc

SEQ ID NO: 72353 - RNA, 22 nt, Artificial Sequence
  LRRK2 RNA guide
cucuugcuucccuuugcggccc

SEQ ID NO: 72354 - RNA, 22 nt, Artificial Sequence
  LRRK2 RNA guide
cuguaugccucuugcuucccuu

SEQ ID NO: 72355 - RNA, 22 nt, Artificial Sequence
  LRRK2 RNA guide
cuucccuuugcggccccugcca

SEQ ID NO: 72356 - RNA, 22 nt, Artificial Sequence
  LRRK2 RNA guide
cuugcuucccuuugcggccccu

SEQ ID NO: 72357 - RNA, 22 nt, Artificial Sequence
  LRRK2 RNA guide
cuuugcggccccugccacccca

SEQ ID NO: 72358 - RNA, 22 nt, Artificial Sequence
  LRRK2 RNA guide
gcaggggccgcaaagggaagca

SEQ ID NO: 72359 - RNA, 22 nt, Artificial Sequence
  LRRK2 RNA guide
gccgcaaagggaagcaagaggc

SEQ ID NO: 72360 - RNA, 22 nt, Artificial Sequence
  LRRK2 RNA guide
gccucuugcuucccuuugcggc

SEQ ID NO: 72361 - RNA, 22 nt, Artificial Sequence
  LRRK2 RNA guide
gcuucccuuugcggccccugcc

SEQ ID NO: 72362 - RNA, 22 nt, Artificial Sequence
  LRRK2 RNA guide
ggcaggggccgcaaagggaagc

SEQ ID NO: 72363 - RNA, 22 nt, Artificial Sequence
  LRRK2 RNA guide
ggccgcaaagggaagcaagagg

SEQ ID NO: 72364 - RNA, 22 nt, Artificial Sequence
  LRRK2 RNA guide
gggccgcaaagggaagcaagag

SEQ ID NO: 72365 - RNA, 22 nt, Artificial Sequence
  LRRK2 RNA guide
ggggccgcaaagggaagcaaga

SEQ ID NO: 72366 - RNA, 22 nt, Artificial Sequence
  LRRK2 RNA guide
gggguggcaggggccgcaaagg

SEQ ID NO: 72367 - RNA, 22 nt, Artificial Sequence
  LRRK2 RNA guide
ggguggcaggggccgcaaaggg

SEQ ID NO: 72368 - RNA, 22 nt, Artificial Sequence
  LRRK2 RNA guide
gguggcaggggccgcaaaggga

SEQ ID NO: 72369 - RNA, 22 nt, Artificial Sequence
  LRRK2 RNA guide
guaugccucuugcuucccuuug

SEQ ID NO: 72370 - RNA, 22 nt, Artificial Sequence
  LRRK2 RNA guide
guggcaggggccgcaaagggaa

SEQ ID NO: 72371 - RNA, 22 nt, Artificial Sequence
  LRRK2 RNA guide
gugggcagugggguggcagggg

SEQ ID NO: 72372 - RNA, 22 nt, Artificial Sequence
  LRRK2 RNA guide
gugggguggcaggggccgcaaa

SEQ ID NO: 72373 - RNA, 22 nt, Artificial Sequence
  LRRK2 RNA guide
gugugggcagugggguggcagg

SEQ ID NO: 72374 - RNA, 22 nt, Artificial Sequence
  LRRK2 RNA guide
uaugccucuugcuucccuuugc

SEQ ID NO: 72375 - RNA, 22 nt, Artificial Sequence
  LRRK2 RNA guide
ucccuuugcggccccugccacc

SEQ ID NO: 72376 - RNA, 22 nt, Artificial Sequence
  LRRK2 RNA guide
ucuguaugccucuugcuucccu

SEQ ID NO: 72377 - RNA, 22 nt, Artificial Sequence
  LRRK2 RNA guide
ucuugcuucccuuugcggcccc

SEQ ID NO: 72378 - RNA, 22 nt, Artificial Sequence
  LRRK2 RNA guide
ugccucuugcuucccuuugcgg

SEQ ID NO: 72379 - RNA, 22 nt, Artificial Sequence
  LRRK2 RNA guide
ugcggccccugccaccccacug

SEQ ID NO: 72380 - RNA, 22 nt, Artificial Sequence
  LRRK2 RNA guide
ugcuucccuuugcggccccugc

SEQ ID NO: 72381 - RNA, 22 nt, Artificial Sequence
  LRRK2 RNA guide
uggcaggggccgcaaagggaag

SEQ ID NO: 72382 - RNA, 22 nt, Artificial Sequence
  LRRK2 RNA guide
ugggcagugggguggcaggggc

SEQ ID NO: 72383 - RNA, 22 nt, Artificial Sequence
  LRRK2 RNA guide
ugggguggcaggggccgcaaag

SEQ ID NO: 72384 - RNA, 22 nt, Artificial Sequence
  LRRK2 RNA guide
uguaugccucuugcuucccuuu

SEQ ID NO: 72385 - RNA, 22 nt, Artificial Sequence
  LRRK2 RNA guide
ugugggcagugggguggcaggg

SEQ ID NO: 72386 - RNA, 22 nt, Artificial Sequence
  LRRK2 RNA guide
uucccuuugcggccccugccac

SEQ ID NO: 72387 - RNA, 22 nt, Artificial Sequence
  LRRK2 RNA guide
uugcggccccugccaccccacu

SEQ ID NO: 72388 - RNA, 22 nt, Artificial Sequence
  LRRK2 RNA guide
uugcuucccuuugcggccccug

SEQ ID NO: 72389 - RNA, 22 nt, Artificial Sequence
  LRRK2 RNA guide
uuugcggccccugccaccccac

SEQ ID NO: 72390 - RNA, 20 nt, Artificial Sequence
  LRRK2 RNA guide
aggggcugcaaagggaagca

SEQ ID NO: 72391 - RNA, 20 nt, Artificial Sequence
  LRRK2 RNA guide
agugggguggcaggggcugc

SEQ ID NO: 72392 - RNA, 20 nt, Artificial Sequence
  LRRK2 RNA guide
cagccccugccaccccacug

SEQ ID NO: 72393 - RNA, 20 nt, Artificial Sequence
  LRRK2 RNA guide
caggggcugcaaagggaagc

SEQ ID NO: 72394 - RNA, 20 nt, Artificial Sequence
  LRRK2 RNA guide
cagugggguggcaggggcug

SEQ ID NO: 72395 - RNA, 20 nt, Artificial Sequence
  LRRK2 RNA guide
cccuuugcagccccugccac

SEQ ID NO: 72396 - RNA, 20 nt, Artificial Sequence
  LRRK2 RNA guide
ccucuugcuucccuuugcag

SEQ ID NO: 72397 - RNA, 20 nt, Artificial Sequence
  LRRK2 RNA guide
ccuuugcagccccugccacc

SEQ ID NO: 72398 - RNA, 20 nt, Artificial Sequence
  LRRK2 RNA guide
cucuugcuucccuuugcagc

SEQ ID NO: 72399 - RNA, 20 nt, Artificial Sequence
  LRRK2 RNA guide
cugcaaagggaagcaagagg

SEQ ID NO: 72400 - RNA, 20 nt, Artificial Sequence
  LRRK2 RNA guide
cuucccuuugcagccccugc

SEQ ID NO: 72401 - RNA, 20 nt, Artificial Sequence
  LRRK2 RNA guide
cuugcuucccuuugcagccc

SEQ ID NO: 72402 - RNA, 20 nt, Artificial Sequence
  LRRK2 RNA guide
cuuugcagccccugccaccc

SEQ ID NO: 72403 - RNA, 20 nt, Artificial Sequence
  LRRK2 RNA guide
gcagccccugccaccccacu

SEQ ID NO: 72404 - RNA, 20 nt, Artificial Sequence
  LRRK2 RNA guide
gcaggggcugcaaagggaag

SEQ ID NO: 72405 - RNA, 20 nt, Artificial Sequence
  LRRK2 RNA guide
gcagugggguggcaggggcu

SEQ ID NO: 72406 - RNA, 20 nt, Artificial Sequence
  LRRK2 RNA guide
gccucuugcuucccuuugca

SEQ ID NO: 72407 - RNA, 20 nt, Artificial Sequence
  LRRK2 RNA guide
gcugcaaagggaagcaagag

SEQ ID NO: 72408 - RNA, 20 nt, Artificial Sequence
  LRRK2 RNA guide
gcuucccuuugcagccccug

SEQ ID NO: 72409 - RNA, 20 nt, Artificial Sequence
  LRRK2 RNA guide
ggcaggggcugcaaagggaa

SEQ ID NO: 72410 - RNA, 20 nt, Artificial Sequence
  LRRK2 RNA guide
ggcugcaaagggaagcaaga

SEQ ID NO: 72411 - RNA, 20 nt, Artificial Sequence
  LRRK2 RNA guide
gggcugcaaagggaagcaag

SEQ ID NO: 72412 - RNA, 20 nt, Artificial Sequence
  LRRK2 RNA guide
ggggcugcaaagggaagcaa

SEQ ID NO: 72413 - RNA, 20 nt, Artificial Sequence
  LRRK2 RNA guide
gggguggcaggggcugcaaa

SEQ ID NO: 72414 - RNA, 20 nt, Artificial Sequence
  LRRK2 RNA guide
ggguggcaggggcugcaaag

SEQ ID NO: 72415 - RNA, 20 nt, Artificial Sequence
  LRRK2 RNA guide
gguggcaggggcugcaaagg

SEQ ID NO: 72416 - RNA, 20 nt, Artificial Sequence
  LRRK2 RNA guide
guggcaggggcugcaaaggg

SEQ ID NO: 72417 - RNA, 20 nt, Artificial Sequence
  LRRK2 RNA guide
gugggguggcaggggcugca

SEQ ID NO: 72418 - RNA, 20 nt, Artificial Sequence
  LRRK2 RNA guide
ucccuuugcagccccugcca

SEQ ID NO: 72419 - RNA, 20 nt, Artificial Sequence
  LRRK2 RNA guide
ucuugcuucccuuugcagcc

SEQ ID NO: 72420 - RNA, 20 nt, Artificial Sequence
  LRRK2 RNA guide
ugcagccccugccaccccac

SEQ ID NO: 72421 - RNA, 20 nt, Artificial Sequence
  LRRK2 RNA guide
ugcuucccuuugcagccccu

SEQ ID NO: 72422 - RNA, 20 nt, Artificial Sequence
  LRRK2 RNA guide
uggcaggggcugcaaaggga

SEQ ID NO: 72423 - RNA, 20 nt, Artificial Sequence
  LRRK2 RNA guide
ugggguggcaggggcugcaa

SEQ ID NO: 72424 - RNA, 20 nt, Artificial Sequence
  LRRK2 RNA guide
uucccuuugcagccccugcc

SEQ ID NO: 72425 - RNA, 20 nt, Artificial Sequence
  LRRK2 RNA guide
uugcagccccugccacccca

SEQ ID NO: 72426 - RNA, 20 nt, Artificial Sequence
  LRRK2 RNA guide
uugcuucccuuugcagcccc

SEQ ID NO: 72427 - RNA, 20 nt, Artificial Sequence
  LRRK2 RNA guide
uuugcagccccugccacccc

SEQ ID NO: 72428 - RNA, 21 nt, Artificial Sequence
  LRRK2 RNA guide
aggggcugcaaagggaagcaa

SEQ ID NO: 72429 - RNA, 21 nt, Artificial Sequence
  LRRK2 RNA guide
agugggguggcaggggcugca

SEQ ID NO: 72430 - RNA, 21 nt, Artificial Sequence
  LRRK2 RNA guide
cagccccugccaccccacugc

SEQ ID NO: 72431 - RNA, 21 nt, Artificial Sequence
  LRRK2 RNA guide
caggggcugcaaagggaagca

SEQ ID NO: 72432 - RNA, 21 nt, Artificial Sequence
  LRRK2 RNA guide
cagugggguggcaggggcugc

SEQ ID NO: 72433 - RNA, 21 nt, Artificial Sequence
  LRRK2 RNA guide
cccuuugcagccccugccacc

SEQ ID NO: 72434 - RNA, 21 nt, Artificial Sequence
  LRRK2 RNA guide
ccucuugcuucccuuugcagc

SEQ ID NO: 72435 - RNA, 21 nt, Artificial Sequence
  LRRK2 RNA guide
ccuuugcagccccugccaccc

SEQ ID NO: 72436 - RNA, 21 nt, Artificial Sequence
  LRRK2 RNA guide
cucuugcuucccuuugcagcc

SEQ ID NO: 72437 - RNA, 21 nt, Artificial Sequence
  LRRK2 RNA guide
cugcaaagggaagcaagaggc

SEQ ID NO: 72438 - RNA, 21 nt, Artificial Sequence
  LRRK2 RNA guide
cuucccuuugcagccccugcc

SEQ ID NO: 72439 - RNA, 21 nt, Artificial Sequence
  LRRK2 RNA guide
cuugcuucccuuugcagcccc

SEQ ID NO: 72440 - RNA, 21 nt, Artificial Sequence
  LRRK2 RNA guide
cuuugcagccccugccacccc

SEQ ID NO: 72441 - RNA, 21 nt, Artificial Sequence
  LRRK2 RNA guide
gcagccccugccaccccacug

SEQ ID NO: 72442 - RNA, 21 nt, Artificial Sequence
  LRRK2 RNA guide
gcaggggcugcaaagggaagc

SEQ ID NO: 72443 - RNA, 21 nt, Artificial Sequence
  LRRK2 RNA guide
gcagugggguggcaggggcug

SEQ ID NO: 72444 - RNA, 21 nt, Artificial Sequence
  LRRK2 RNA guide
gccucuugcuucccuuugcag

SEQ ID NO: 72445 - RNA, 21 nt, Artificial Sequence
  LRRK2 RNA guide
gcugcaaagggaagcaagagg

SEQ ID NO: 72446 - RNA, 21 nt, Artificial Sequence
  LRRK2 RNA guide
gcuucccuuugcagccccugc

SEQ ID NO: 72447 - RNA, 21 nt, Artificial Sequence
  LRRK2 RNA guide
ggcaggggcugcaaagggaag

SEQ ID NO: 72448 - RNA, 21 nt, Artificial Sequence
  LRRK2 RNA guide
ggcagugggguggcaggggcu

SEQ ID NO: 72449 - RNA, 21 nt, Artificial Sequence
  LRRK2 RNA guide
ggcugcaaagggaagcaagag

SEQ ID NO: 72450 - RNA, 21 nt, Artificial Sequence
  LRRK2 RNA guide
gggcugcaaagggaagcaaga

SEQ ID NO: 72451 - RNA, 21 nt, Artificial Sequence
  LRRK2 RNA guide
ggggcugcaaagggaagcaag

SEQ ID NO: 72452 - RNA, 21 nt, Artificial Sequence
  LRRK2 RNA guide
gggguggcaggggcugcaaag

SEQ ID NO: 72453 - RNA, 21 nt, Artificial Sequence
  LRRK2 RNA guide
ggguggcaggggcugcaaagg

SEQ ID NO: 72454 - RNA, 21 nt, Artificial Sequence
  LRRK2 RNA guide
gguggcaggggcugcaaaggg

SEQ ID NO: 72455 - RNA, 21 nt, Artificial Sequence
  LRRK2 RNA guide
guggcaggggcugcaaaggga

SEQ ID NO: 72456 - RNA, 21 nt, Artificial Sequence
  LRRK2 RNA guide
gugggguggcaggggcugcaa

SEQ ID NO: 72457 - RNA, 21 nt, Artificial Sequence
  LRRK2 RNA guide
ucccuuugcagccccugccac

SEQ ID NO: 72458 - RNA, 21 nt, Artificial Sequence
  LRRK2 RNA guide
ucuugcuucccuuugcagccc

SEQ ID NO: 72459 - RNA, 21 nt, Artificial Sequence
  LRRK2 RNA guide
ugcagccccugccaccccacu

SEQ ID NO: 72460 - RNA, 21 nt, Artificial Sequence
  LRRK2 RNA guide
ugccucuugcuucccuuugca

SEQ ID NO: 72461 - RNA, 21 nt, Artificial Sequence
  LRRK2 RNA guide
ugcuucccuuugcagccccug

SEQ ID NO: 72462 - RNA, 21 nt, Artificial Sequence
  LRRK2 RNA guide
uggcaggggcugcaaagggaa

SEQ ID NO: 72463 - RNA, 21 nt, Artificial Sequence
  LRRK2 RNA guide
ugggguggcaggggcugcaaa

SEQ ID NO: 72464 - RNA, 21 nt, Artificial Sequence
  LRRK2 RNA guide
uucccuuugcagccccugcca

SEQ ID NO: 72465 - RNA, 21 nt, Artificial Sequence
  LRRK2 RNA guide
uugcagccccugccaccccac

SEQ ID NO: 72466 - RNA, 21 nt, Artificial Sequence
  LRRK2 RNA guide
uugcuucccuuugcagccccu

SEQ ID NO: 72467 - RNA, 21 nt, Artificial Sequence
  LRRK2 RNA guide
uuugcagccccugccacccca

SEQ ID NO: 72468 - RNA, 22 nt, Artificial Sequence
  LRRK2 RNA guide
aggggcugcaaagggaagcaag

SEQ ID NO: 72469 - RNA, 22 nt, Artificial Sequence
  LRRK2 RNA guide
agugggguggcaggggcugcaa

SEQ ID NO: 72470 - RNA, 22 nt, Artificial Sequence
  LRRK2 RNA guide
augccucuugcuucccuuugca

SEQ ID NO: 72471 - RNA, 22 nt, Artificial Sequence
  LRRK2 RNA guide
cagccccugccaccccacugcc

SEQ ID NO: 72472 - RNA, 22 nt, Artificial Sequence
  LRRK2 RNA guide
caggggcugcaaagggaagcaa

SEQ ID NO: 72473 - RNA, 22 nt, Artificial Sequence
  LRRK2 RNA guide
cagugggguggcaggggcugca

SEQ ID NO: 72474 - RNA, 22 nt, Artificial Sequence
  LRRK2 RNA guide
cccuuugcagccccugccaccc

SEQ ID NO: 72475 - RNA, 22 nt, Artificial Sequence
  LRRK2 RNA guide
ccucuugcuucccuuugcagcc

SEQ ID NO: 72476 - RNA, 22 nt, Artificial Sequence
  LRRK2 RNA guide
ccuuugcagccccugccacccc

SEQ ID NO: 72477 - RNA, 22 nt, Artificial Sequence
  LRRK2 RNA guide
cucuugcuucccuuugcagccc

SEQ ID NO: 72478 - RNA, 22 nt, Artificial Sequence
  LRRK2 RNA guide
cugcaaagggaagcaagaggca

SEQ ID NO: 72479 - RNA, 22 nt, Artificial Sequence
  LRRK2 RNA guide
cuucccuuugcagccccugcca

SEQ ID NO: 72480 - RNA, 22 nt, Artificial Sequence
  LRRK2 RNA guide
cuugcuucccuuugcagccccu

SEQ ID NO: 72481 - RNA, 22 nt, Artificial Sequence
  LRRK2 RNA guide
cuuugcagccccugccacccca

SEQ ID NO: 72482 - RNA, 22 nt, Artificial Sequence
  LRRK2 RNA guide
gcagccccugccaccccacugc

SEQ ID NO: 72483 - RNA, 22 nt, Artificial Sequence
  LRRK2 RNA guide
gcaggggcugcaaagggaagca

SEQ ID NO: 72484 - RNA, 22 nt, Artificial Sequence
  LRRK2 RNA guide
gcagugggguggcaggggcugc

SEQ ID NO: 72485 - RNA, 22 nt, Artificial Sequence
  LRRK2 RNA guide
gccucuugcuucccuuugcagc

SEQ ID NO: 72486 - RNA, 22 nt, Artificial Sequence
  LRRK2 RNA guide
gcugcaaagggaagcaagaggc

SEQ ID NO: 72487 - RNA, 22 nt, Artificial Sequence
  LRRK2 RNA guide
gcuucccuuugcagccccugcc

SEQ ID NO: 72488 - RNA, 22 nt, Artificial Sequence
  LRRK2 RNA guide
ggcaggggcugcaaagggaagc

SEQ ID NO: 72489 - RNA, 22 nt, Artificial Sequence
  LRRK2 RNA guide
ggcagugggguggcaggggcug

SEQ ID NO: 72490 - RNA, 22 nt, Artificial Sequence
  LRRK2 RNA guide
ggcugcaaagggaagcaagagg

SEQ ID NO: 72491 - RNA, 22 nt, Artificial Sequence
  LRRK2 RNA guide
gggcagugggguggcaggggcu

SEQ ID NO: 72492 - RNA, 22 nt, Artificial Sequence
  LRRK2 RNA guide
gggcugcaaagggaagcaagag

SEQ ID NO: 72493 - RNA, 22 nt, Artificial Sequence
  LRRK2 RNA guide
ggggcugcaaagggaagcaaga

SEQ ID NO: 72494 - RNA, 22 nt, Artificial Sequence
  LRRK2 RNA guide
gggguggcaggggcugcaaagg

SEQ ID NO: 72495 - RNA, 22 nt, Artificial Sequence
  LRRK2 RNA guide
ggguggcaggggcugcaaaggg

SEQ ID NO: 72496 - RNA, 22 nt, Artificial Sequence
  LRRK2 RNA guide
gguggcaggggcugcaaaggga

SEQ ID NO: 72497 - RNA, 22 nt, Artificial Sequence
  LRRK2 RNA guide
guggcaggggcugcaaagggaa

SEQ ID NO: 72498 - RNA, 22 nt, Artificial Sequence
  LRRK2 RNA guide
gugggguggcaggggcugcaaa

SEQ ID NO: 72499 - RNA, 22 nt, Artificial Sequence
  LRRK2 RNA guide
ucccuuugcagccccugccacc

SEQ ID NO: 72500 - RNA, 22 nt, Artificial Sequence
  LRRK2 RNA guide
ucuugcuucccuuugcagcccc

SEQ ID NO: 72501 - RNA, 22 nt, Artificial Sequence
  LRRK2 RNA guide
ugcagccccugccaccccacug

SEQ ID NO: 72502 - RNA, 22 nt, Artificial Sequence
  LRRK2 RNA guide
ugccucuugcuucccuuugcag

SEQ ID NO: 72503 - RNA, 22 nt, Artificial Sequence
  LRRK2 RNA guide
ugcuucccuuugcagccccugc

SEQ ID NO: 72504 - RNA, 22 nt, Artificial Sequence
  LRRK2 RNA guide
uggcaggggcugcaaagggaag

SEQ ID NO: 72505 - RNA, 22 nt, Artificial Sequence
  LRRK2 RNA guide
ugggguggcaggggcugcaaag

SEQ ID NO: 72506 - RNA, 22 nt, Artificial Sequence
  LRRK2 RNA guide
uucccuuugcagccccugccac

SEQ ID NO: 72507 - RNA, 22 nt, Artificial Sequence
  LRRK2 RNA guide
uugcagccccugccaccccacu

SEQ ID NO: 72508 - RNA, 22 nt, Artificial Sequence
  LRRK2 RNA guide
uugcuucccuuugcagccccug

SEQ ID NO: 72509 - RNA, 22 nt, Artificial Sequence
  LRRK2 RNA guide
uuugcagccccugccaccccac

SEQ ID NO: 72510 - RNA, 20 nt, Artificial Sequence
  LRRK2 RNA guide
aagcacagagggagaaaaac

SEQ ID NO: 72511 - RNA, 20 nt, Artificial Sequence
  LRRK2 RNA guide
acagagggagaaaaacacug

SEQ ID NO: 72512 - RNA, 20 nt, Artificial Sequence
  LRRK2 RNA guide
accucaguguuuuucucccu

SEQ ID NO: 72513 - RNA, 20 nt, Artificial Sequence
  LRRK2 RNA guide
acgugcuagggaagcacaga

SEQ ID NO: 72514 - RNA, 20 nt, Artificial Sequence
  LRRK2 RNA guide
agagggagaaaaacacugag

SEQ ID NO: 72515 - RNA, 20 nt, Artificial Sequence
  LRRK2 RNA guide
agcacagagggagaaaaaca

SEQ ID NO: 72516 - RNA, 20 nt, Artificial Sequence
  LRRK2 RNA guide
agggaagcacagagggagaa

SEQ ID NO: 72517 - RNA, 20 nt, Artificial Sequence
  LRRK2 RNA guide
agggagaaaaacacugaggu

SEQ ID NO: 72518 - RNA, 20 nt, Artificial Sequence
  LRRK2 RNA guide
aguguuuuucucccucugug

SEQ ID NO: 72519 - RNA, 20 nt, Artificial Sequence
  LRRK2 RNA guide
cacagagggagaaaaacacu

SEQ ID NO: 72520 - RNA, 20 nt, Artificial Sequence
  LRRK2 RNA guide
cacgugcuagggaagcacag

SEQ ID NO: 72521 - RNA, 20 nt, Artificial Sequence
  LRRK2 RNA guide
caguguuuuucucccucugu

SEQ ID NO: 72522 - RNA, 20 nt, Artificial Sequence
  LRRK2 RNA guide
ccacgugcuagggaagcaca

SEQ ID NO: 72523 - RNA, 20 nt, Artificial Sequence
  LRRK2 RNA guide
ccucaguguuuuucucccuc

SEQ ID NO: 72524 - RNA, 20 nt, Artificial Sequence
  LRRK2 RNA guide
cgugcuagggaagcacagag

SEQ ID NO: 72525 - RNA, 20 nt, Artificial Sequence
  LRRK2 RNA guide
cuagggaagcacagagggag

SEQ ID NO: 72526 - RNA, 20 nt, Artificial Sequence
  LRRK2 RNA guide
cucaguguuuuucucccucu

SEQ ID NO: 72527 - RNA, 20 nt, Artificial Sequence
  LRRK2 RNA guide
cucccucugugcuucccuag

SEQ ID NO: 72528 - RNA, 20 nt, Artificial Sequence
  LRRK2 RNA guide
cugucuuuaccucaguguuu

SEQ ID NO: 72529 - RNA, 20 nt, Artificial Sequence
  LRRK2 RNA guide
cuuuaccucaguguuuuucu

SEQ ID NO: 72530 - RNA, 20 nt, Artificial Sequence
  LRRK2 RNA guide
gaagcacagagggagaaaaa

SEQ ID NO: 72531 - RNA, 20 nt, Artificial Sequence
  LRRK2 RNA guide
gagggagaaaaacacugagg

SEQ ID NO: 72532 - RNA, 20 nt, Artificial Sequence
  LRRK2 RNA guide
gcacagagggagaaaaacac

SEQ ID NO: 72533 - RNA, 20 nt, Artificial Sequence
  LRRK2 RNA guide
gcuagggaagcacagaggga

SEQ ID NO: 72534 - RNA, 20 nt, Artificial Sequence
  LRRK2 RNA guide
ggaagcacagagggagaaaa

SEQ ID NO: 72535 - RNA, 20 nt, Artificial Sequence
  LRRK2 RNA guide
ggagaaaaacacugagguaa

SEQ ID NO: 72536 - RNA, 20 nt, Artificial Sequence
  LRRK2 RNA guide
gggaagcacagagggagaaa

SEQ ID NO: 72537 - RNA, 20 nt, Artificial Sequence
  LRRK2 RNA guide
gggagaaaaacacugaggua

SEQ ID NO: 72538 - RNA, 20 nt, Artificial Sequence
  LRRK2 RNA guide
gucuuuaccucaguguuuuu

SEQ ID NO: 72539 - RNA, 20 nt, Artificial Sequence
  LRRK2 RNA guide
gugcuagggaagcacagagg

SEQ ID NO: 72540 - RNA, 20 nt, Artificial Sequence
  LRRK2 RNA guide
guguuuuucucccucugugc

SEQ ID NO: 72541 - RNA, 20 nt, Artificial Sequence
  LRRK2 RNA guide
guuuuucucccucugugcuu

SEQ ID NO: 72542 - RNA, 20 nt, Artificial Sequence
  LRRK2 RNA guide
uaccucaguguuuuucuccc

SEQ ID NO: 72543 - RNA, 20 nt, Artificial Sequence
  LRRK2 RNA guide
uagggaagcacagagggaga

SEQ ID NO: 72544 - RNA, 20 nt, Artificial Sequence
  LRRK2 RNA guide
ucaguguuuuucucccucug

SEQ ID NO: 72545 - RNA, 20 nt, Artificial Sequence
  LRRK2 RNA guide
ucccucugugcuucccuagc

SEQ ID NO: 72546 - RNA, 20 nt, Artificial Sequence
  LRRK2 RNA guide
ucucccucugugcuucccua

SEQ ID NO: 72547 - RNA, 20 nt, Artificial Sequence
  LRRK2 RNA guide
ucuuuaccucaguguuuuuc

SEQ ID NO: 72548 - RNA, 20 nt, Artificial Sequence
  LRRK2 RNA guide
ugcuagggaagcacagaggg

SEQ ID NO: 72549 - RNA, 20 nt, Artificial Sequence
  LRRK2 RNA guide
ugucuuuaccucaguguuuu

SEQ ID NO: 72550 - RNA, 20 nt, Artificial Sequence
  LRRK2 RNA guide
uguuuuucucccucugugcu

SEQ ID NO: 72551 - RNA, 20 nt, Artificial Sequence
  LRRK2 RNA guide
uuaccucaguguuuuucucc

SEQ ID NO: 72552 - RNA, 20 nt, Artificial Sequence
  LRRK2 RNA guide
uucucccucugugcuucccu

SEQ ID NO: 72553 - RNA, 20 nt, Artificial Sequence
  LRRK2 RNA guide
uuuaccucaguguuuuucuc

SEQ ID NO: 72554 - RNA, 20 nt, Artificial Sequence
  LRRK2 RNA guide
uuucucccucugugcuuccc

SEQ ID NO: 72555 - RNA, 20 nt, Artificial Sequence
  LRRK2 RNA guide
uuuucucccucugugcuucc

SEQ ID NO: 72556 - RNA, 20 nt, Artificial Sequence
  LRRK2 RNA guide
uuuuucucccucugugcuuc

SEQ ID NO: 72557 - RNA, 21 nt, Artificial Sequence
  LRRK2 RNA guide
aagcacagagggagaaaaaca

SEQ ID NO: 72558 - RNA, 21 nt, Artificial Sequence
  LRRK2 RNA guide
acagagggagaaaaacacuga

SEQ ID NO: 72559 - RNA, 21 nt, Artificial Sequence
  LRRK2 RNA guide
accacgugcuagggaagcaca

SEQ ID NO: 72560 - RNA, 21 nt, Artificial Sequence
  LRRK2 RNA guide
accucaguguuuuucucccuc

SEQ ID NO: 72561 - RNA, 21 nt, Artificial Sequence
  LRRK2 RNA guide
acgugcuagggaagcacagag

SEQ ID NO: 72562 - RNA, 21 nt, Artificial Sequence
  LRRK2 RNA guide
agagggagaaaaacacugagg

SEQ ID NO: 72563 - RNA, 21 nt, Artificial Sequence
  LRRK2 RNA guide
agcacagagggagaaaaacac

SEQ ID NO: 72564 - RNA, 21 nt, Artificial Sequence
  LRRK2 RNA guide
agggaagcacagagggagaaa

SEQ ID NO: 72565 - RNA, 21 nt, Artificial Sequence
  LRRK2 RNA guide
agggagaaaaacacugaggua

SEQ ID NO: 72566 - RNA, 21 nt, Artificial Sequence
  LRRK2 RNA guide
aguguuuuucucccucugugc

SEQ ID NO: 72567 - RNA, 21 nt, Artificial Sequence
  LRRK2 RNA guide
cacagagggagaaaaacacug

SEQ ID NO: 72568 - RNA, 21 nt, Artificial Sequence
  LRRK2 RNA guide
cacgugcuagggaagcacaga

SEQ ID NO: 72569 - RNA, 21 nt, Artificial Sequence
  LRRK2 RNA guide
cagagggagaaaaacacugag

SEQ ID NO: 72570 - RNA, 21 nt, Artificial Sequence
  LRRK2 RNA guide
caguguuuuucucccucugug

SEQ ID NO: 72571 - RNA, 21 nt, Artificial Sequence
  LRRK2 RNA guide
ccacgugcuagggaagcacag

SEQ ID NO: 72572 - RNA, 21 nt, Artificial Sequence
  LRRK2 RNA guide
ccucaguguuuuucucccucu

SEQ ID NO: 72573 - RNA, 21 nt, Artificial Sequence
  LRRK2 RNA guide
cgugcuagggaagcacagagg

SEQ ID NO: 72574 - RNA, 21 nt, Artificial Sequence
  LRRK2 RNA guide
cuagggaagcacagagggaga

SEQ ID NO: 72575 - RNA, 21 nt, Artificial Sequence
  LRRK2 RNA guide
cucaguguuuuucucccucug

SEQ ID NO: 72576 - RNA, 21 nt, Artificial Sequence
  LRRK2 RNA guide
cucccucugugcuucccuagc

SEQ ID NO: 72577 - RNA, 21 nt, Artificial Sequence
  LRRK2 RNA guide
cugucuuuaccucaguguuuu

SEQ ID NO: 72578 - RNA, 21 nt, Artificial Sequence
  LRRK2 RNA guide
cuuuaccucaguguuuuucuc

SEQ ID NO: 72579 - RNA, 21 nt, Artificial Sequence
  LRRK2 RNA guide
gaagcacagagggagaaaaac

SEQ ID NO: 72580 - RNA, 21 nt, Artificial Sequence
  LRRK2 RNA guide
gagggagaaaaacacugaggu

SEQ ID NO: 72581 - RNA, 21 nt, Artificial Sequence
  LRRK2 RNA guide
gcacagagggagaaaaacacu

SEQ ID NO: 72582 - RNA, 21 nt, Artificial Sequence
  LRRK2 RNA guide
gcuagggaagcacagagggag

SEQ ID NO: 72583 - RNA, 21 nt, Artificial Sequence
  LRRK2 RNA guide
gcugucuuuaccucaguguuu

SEQ ID NO: 72584 - RNA, 21 nt, Artificial Sequence
  LRRK2 RNA guide
ggaagcacagagggagaaaaa

SEQ ID NO: 72585 - RNA, 21 nt, Artificial Sequence
  LRRK2 RNA guide
ggagaaaaacacugagguaaa

SEQ ID NO: 72586 - RNA, 21 nt, Artificial Sequence
  LRRK2 RNA guide
gggaagcacagagggagaaaa

SEQ ID NO: 72587 - RNA, 21 nt, Artificial Sequence
  LRRK2 RNA guide
gggagaaaaacacugagguaa

SEQ ID NO: 72588 - RNA, 21 nt, Artificial Sequence
  LRRK2 RNA guide
gucuuuaccucaguguuuuuc

SEQ ID NO: 72589 - RNA, 21 nt, Artificial Sequence
  LRRK2 RNA guide
gugcuagggaagcacagaggg

SEQ ID NO: 72590 - RNA, 21 nt, Artificial Sequence
  LRRK2 RNA guide
guguuuuucucccucugugcu

SEQ ID NO: 72591 - RNA, 21 nt, Artificial Sequence
  LRRK2 RNA guide
guuuuucucccucugugcuuc

SEQ ID NO: 72592 - RNA, 21 nt, Artificial Sequence
  LRRK2 RNA guide
uaccucaguguuuuucucccu

SEQ ID NO: 72593 - RNA, 21 nt, Artificial Sequence
  LRRK2 RNA guide
uagggaagcacagagggagaa

SEQ ID NO: 72594 - RNA, 21 nt, Artificial Sequence
  LRRK2 RNA guide
ucaguguuuuucucccucugu

SEQ ID NO: 72595 - RNA, 21 nt, Artificial Sequence
  LRRK2 RNA guide
ucccucugugcuucccuagca

SEQ ID NO: 72596 - RNA, 21 nt, Artificial Sequence
  LRRK2 RNA guide
ucucccucugugcuucccuag

SEQ ID NO: 72597 - RNA, 21 nt, Artificial Sequence
  LRRK2 RNA guide
ucuuuaccucaguguuuuucu

SEQ ID NO: 72598 - RNA, 21 nt, Artificial Sequence
  LRRK2 RNA guide
ugcuagggaagcacagaggga

SEQ ID NO: 72599 - RNA, 21 nt, Artificial Sequence
  LRRK2 RNA guide
ugucuuuaccucaguguuuuu

SEQ ID NO: 72600 - RNA, 21 nt, Artificial Sequence
  LRRK2 RNA guide
uguuuuucucccucugugcuu

SEQ ID NO: 72601 - RNA, 21 nt, Artificial Sequence
  LRRK2 RNA guide
uuaccucaguguuuuucuccc

SEQ ID NO: 72602 - RNA, 21 nt, Artificial Sequence
  LRRK2 RNA guide
uucucccucugugcuucccua

SEQ ID NO: 72603 - RNA, 21 nt, Artificial Sequence
  LRRK2 RNA guide
uuuaccucaguguuuuucucc

SEQ ID NO: 72604 - RNA, 21 nt, Artificial Sequence
  LRRK2 RNA guide
uuucucccucugugcuucccu

SEQ ID NO: 72605 - RNA, 21 nt, Artificial Sequence
  LRRK2 RNA guide
uuuucucccucugugcuuccc

SEQ ID NO: 72606 - RNA, 21 nt, Artificial Sequence
  LRRK2 RNA guide
uuuuucucccucugugcuucc

SEQ ID NO: 72607 - RNA, 22 nt, Artificial Sequence
  LRRK2 RNA guide
aagcacagagggagaaaaacac

SEQ ID NO: 72608 - RNA, 22 nt, Artificial Sequence
  LRRK2 RNA guide
acagagggagaaaaacacugag

SEQ ID NO: 72609 - RNA, 22 nt, Artificial Sequence
  LRRK2 RNA guide
accacgugcuagggaagcacag

SEQ ID NO: 72610 - RNA, 22 nt, Artificial Sequence
  LRRK2 RNA guide
accucaguguuuuucucccucu

SEQ ID NO: 72611 - RNA, 22 nt, Artificial Sequence
  LRRK2 RNA guide
acgugcuagggaagcacagagg

SEQ ID NO: 72612 - RNA, 22 nt, Artificial Sequence
  LRRK2 RNA guide
agagggagaaaaacacugaggu

SEQ ID NO: 72613 - RNA, 22 nt, Artificial Sequence
  LRRK2 RNA guide
agcacagagggagaaaaacacu

SEQ ID NO: 72614 - RNA, 22 nt, Artificial Sequence
  LRRK2 RNA guide
agggaagcacagagggagaaaa

SEQ ID NO: 72615 - RNA, 22 nt, Artificial Sequence
  LRRK2 RNA guide
agggagaaaaacacugagguaa

SEQ ID NO: 72616 - RNA, 22 nt, Artificial Sequence
  LRRK2 RNA guide
aguguuuuucucccucugugcu

SEQ ID NO: 72617 - RNA, 22 nt, Artificial Sequence
  LRRK2 RNA guide
cacagagggagaaaaacacuga

SEQ ID NO: 72618 - RNA, 22 nt, Artificial Sequence
  LRRK2 RNA guide
cacgugcuagggaagcacagag

SEQ ID NO: 72619 - RNA, 22 nt, Artificial Sequence
  LRRK2 RNA guide
cagagggagaaaaacacugagg

SEQ ID NO: 72620 - RNA, 22 nt, Artificial Sequence
  LRRK2 RNA guide
caguguuuuucucccucugugc

SEQ ID NO: 72621 - RNA, 22 nt, Artificial Sequence
  LRRK2 RNA guide
ccacgugcuagggaagcacaga

SEQ ID NO: 72622 - RNA, 22 nt, Artificial Sequence
  LRRK2 RNA guide
ccucaguguuuuucucccucug

SEQ ID NO: 72623 - RNA, 22 nt, Artificial Sequence
  LRRK2 RNA guide
cgugcuagggaagcacagaggg

SEQ ID NO: 72624 - RNA, 22 nt, Artificial Sequence
  LRRK2 RNA guide
cuagggaagcacagagggagaa

SEQ ID NO: 72625 - RNA, 22 nt, Artificial Sequence
  LRRK2 RNA guide
cucaguguuuuucucccucugu

SEQ ID NO: 72626 - RNA, 22 nt, Artificial Sequence
  LRRK2 RNA guide
cucccucugugcuucccuagca

SEQ ID NO: 72627 - RNA, 22 nt, Artificial Sequence
  LRRK2 RNA guide
cugucuuuaccucaguguuuuu

SEQ ID NO: 72628 - RNA, 22 nt, Artificial Sequence
  LRRK2 RNA guide
cuuuaccucaguguuuuucucc

SEQ ID NO: 72629 - RNA, 22 nt, Artificial Sequence
  LRRK2 RNA guide
gaagcacagagggagaaaaaca

SEQ ID NO: 72630 - RNA, 22 nt, Artificial Sequence
  LRRK2 RNA guide
gagggagaaaaacacugaggua

SEQ ID NO: 72631 - RNA, 22 nt, Artificial Sequence
  LRRK2 RNA guide
gcacagagggagaaaaacacug

SEQ ID NO: 72632 - RNA, 22 nt, Artificial Sequence
  LRRK2 RNA guide
gcuagggaagcacagagggaga

SEQ ID NO: 72633 - RNA, 22 nt, Artificial Sequence
  LRRK2 RNA guide
gcugucuuuaccucaguguuuu

SEQ ID NO: 72634 - RNA, 22 nt, Artificial Sequence
  LRRK2 RNA guide
ggaagcacagagggagaaaaac

SEQ ID NO: 72635 - RNA, 22 nt, Artificial Sequence
  LRRK2 RNA guide
ggagaaaaacacugagguaaag

SEQ ID NO: 72636 - RNA, 22 nt, Artificial Sequence
  LRRK2 RNA guide
gggaagcacagagggagaaaaa

SEQ ID NO: 72637 - RNA, 22 nt, Artificial Sequence
  LRRK2 RNA guide
gggagaaaaacacugagguaaa

SEQ ID NO: 72638 - RNA, 22 nt, Artificial Sequence
  LRRK2 RNA guide
gucuuuaccucaguguuuuucu

SEQ ID NO: 72639 - RNA, 22 nt, Artificial Sequence
  LRRK2 RNA guide
gugcuagggaagcacagaggga

SEQ ID NO: 72640 - RNA, 22 nt, Artificial Sequence
  LRRK2 RNA guide
guguuuuucucccucugugcuu

SEQ ID NO: 72641 - RNA, 22 nt, Artificial Sequence
  LRRK2 RNA guide
guuuuucucccucugugcuucc

SEQ ID NO: 72642 - RNA, 22 nt, Artificial Sequence
  LRRK2 RNA guide
uaccacgugcuagggaagcaca

SEQ ID NO: 72643 - RNA, 22 nt, Artificial Sequence
  LRRK2 RNA guide
uaccucaguguuuuucucccuc

SEQ ID NO: 72644 - RNA, 22 nt, Artificial Sequence
  LRRK2 RNA guide
uagggaagcacagagggagaaa

SEQ ID NO: 72645 - RNA, 22 nt, Artificial Sequence
  LRRK2 RNA guide
ucaguguuuuucucccucugug

SEQ ID NO: 72646 - RNA, 22 nt, Artificial Sequence
  LRRK2 RNA guide
ucccucugugcuucccuagcac

SEQ ID NO: 72647 - RNA, 22 nt, Artificial Sequence
  LRRK2 RNA guide
ucucccucugugcuucccuagc

SEQ ID NO: 72648 - RNA, 22 nt, Artificial Sequence
  LRRK2 RNA guide
ucuuuaccucaguguuuuucuc

SEQ ID NO: 72649 - RNA, 22 nt, Artificial Sequence
  LRRK2 RNA guide
ugcuagggaagcacagagggag

SEQ ID NO: 72650 - RNA, 22 nt, Artificial Sequence
  LRRK2 RNA guide
ugcugucuuuaccucaguguuu

SEQ ID NO: 72651 - RNA, 22 nt, Artificial Sequence
  LRRK2 RNA guide
ugucuuuaccucaguguuuuuc

SEQ ID NO: 72652 - RNA, 22 nt, Artificial Sequence
  LRRK2 RNA guide
uguuuuucucccucugugcuuc

SEQ ID NO: 72653 - RNA, 22 nt, Artificial Sequence
  LRRK2 RNA guide
uuaccucaguguuuuucucccu

SEQ ID NO: 72654 - RNA, 22 nt, Artificial Sequence
  LRRK2 RNA guide
uucucccucugugcuucccuag

SEQ ID NO: 72655 - RNA, 22 nt, Artificial Sequence
  LRRK2 RNA guide
uuuaccucaguguuuuucuccc

SEQ ID NO: 72656 - RNA, 22 nt, Artificial Sequence
  LRRK2 RNA guide
uuucucccucugugcuucccua

SEQ ID NO: 72657 - RNA, 22 nt, Artificial Sequence
  LRRK2 RNA guide
uuuucucccucugugcuucccu

SEQ ID NO: 72658 - RNA, 22 nt, Artificial Sequence
  LRRK2 RNA guide
uuuuucucccucugugcuuccc

SEQ ID NO: 72659 - RNA, 20 nt, Artificial Sequence
  LRRK2 RNA guide
aagcacaggagaaaaacacu

SEQ ID NO: 72660 - RNA, 20 nt, Artificial Sequence
  LRRK2 RNA guide
acaggagaaaaacacugagg

SEQ ID NO: 72661 - RNA, 20 nt, Artificial Sequence
  LRRK2 RNA guide
accacgugcuagggaagcac

SEQ ID NO: 72662 - RNA, 20 nt, Artificial Sequence
  LRRK2 RNA guide
accucaguguuuuucuccug

SEQ ID NO: 72663 - RNA, 20 nt, Artificial Sequence
  LRRK2 RNA guide
acgugcuagggaagcacagg

SEQ ID NO: 72664 - RNA, 20 nt, Artificial Sequence
  LRRK2 RNA guide
agcacaggagaaaaacacug

SEQ ID NO: 72665 - RNA, 20 nt, Artificial Sequence
  LRRK2 RNA guide
aggagaaaaacacugaggua

SEQ ID NO: 72666 - RNA, 20 nt, Artificial Sequence
  LRRK2 RNA guide
agggaagcacaggagaaaaa

SEQ ID NO: 72667 - RNA, 20 nt, Artificial Sequence
  LRRK2 RNA guide
aguguuuuucuccugugcuu

SEQ ID NO: 72668 - RNA, 20 nt, Artificial Sequence
  LRRK2 RNA guide
cacaggagaaaaacacugag

SEQ ID NO: 72669 - RNA, 20 nt, Artificial Sequence
  LRRK2 RNA guide
caggagaaaaacacugaggu

SEQ ID NO: 72670 - RNA, 20 nt, Artificial Sequence
  LRRK2 RNA guide
caguguuuuucuccugugcu

SEQ ID NO: 72671 - RNA, 20 nt, Artificial Sequence
  LRRK2 RNA guide
ccucaguguuuuucuccugu

SEQ ID NO: 72672 - RNA, 20 nt, Artificial Sequence
  LRRK2 RNA guide
cgugcuagggaagcacagga

SEQ ID NO: 72673 - RNA, 20 nt, Artificial Sequence
  LRRK2 RNA guide
cuagggaagcacaggagaaa

SEQ ID NO: 72674 - RNA, 20 nt, Artificial Sequence
  LRRK2 RNA guide
cucaguguuuuucuccugug

SEQ ID NO: 72675 - RNA, 20 nt, Artificial Sequence
  LRRK2 RNA guide
cuccugugcuucccuagcac

SEQ ID NO: 72676 - RNA, 20 nt, Artificial Sequence
  LRRK2 RNA guide
gaagcacaggagaaaaacac

SEQ ID NO: 72677 - RNA, 20 nt, Artificial Sequence
  LRRK2 RNA guide
gcacaggagaaaaacacuga

SEQ ID NO: 72678 - RNA, 20 nt, Artificial Sequence
  LRRK2 RNA guide
gcuagggaagcacaggagaa

SEQ ID NO: 72679 - RNA, 20 nt, Artificial Sequence
  LRRK2 RNA guide
ggaagcacaggagaaaaaca

SEQ ID NO: 72680 - RNA, 20 nt, Artificial Sequence
  LRRK2 RNA guide
gggaagcacaggagaaaaac

SEQ ID NO: 72681 - RNA, 20 nt, Artificial Sequence
  LRRK2 RNA guide
guaccacgugcuagggaagc

SEQ ID NO: 72682 - RNA, 20 nt, Artificial Sequence
  LRRK2 RNA guide
gugcuagggaagcacaggag

SEQ ID NO: 72683 - RNA, 20 nt, Artificial Sequence
  LRRK2 RNA guide
guguuuuucuccugugcuuc

SEQ ID NO: 72684 - RNA, 20 nt, Artificial Sequence
  LRRK2 RNA guide
guuuuucuccugugcuuccc

SEQ ID NO: 72685 - RNA, 20 nt, Artificial Sequence
  LRRK2 RNA guide
uaccacgugcuagggaagca

SEQ ID NO: 72686 - RNA, 20 nt, Artificial Sequence
  LRRK2 RNA guide
uaccucaguguuuuucuccu

SEQ ID NO: 72687 - RNA, 20 nt, Artificial Sequence
  LRRK2 RNA guide
uagggaagcacaggagaaaa

SEQ ID NO: 72688 - RNA, 20 nt, Artificial Sequence
  LRRK2 RNA guide
ucaguguuuuucuccugugc

SEQ ID NO: 72689 - RNA, 20 nt, Artificial Sequence
  LRRK2 RNA guide
uccugugcuucccuagcacg

SEQ ID NO: 72690 - RNA, 20 nt, Artificial Sequence
  LRRK2 RNA guide
ucuccugugcuucccuagca

SEQ ID NO: 72691 - RNA, 20 nt, Artificial Sequence
  LRRK2 RNA guide
ugcuagggaagcacaggaga

SEQ ID NO: 72692 - RNA, 20 nt, Artificial Sequence
  LRRK2 RNA guide
uguuuuucuccugugcuucc

SEQ ID NO: 72693 - RNA, 20 nt, Artificial Sequence
  LRRK2 RNA guide
uucuccugugcuucccuagc

SEQ ID NO: 72694 - RNA, 20 nt, Artificial Sequence
  LRRK2 RNA guide
uuucuccugugcuucccuag

SEQ ID NO: 72695 - RNA, 20 nt, Artificial Sequence
  LRRK2 RNA guide
uuuucuccugugcuucccua

SEQ ID NO: 72696 - RNA, 20 nt, Artificial Sequence
  LRRK2 RNA guide
uuuuucuccugugcuucccu

SEQ ID NO: 72697 - RNA, 21 nt, Artificial Sequence
  LRRK2 RNA guide
aagcacaggagaaaaacacug

SEQ ID NO: 72698 - RNA, 21 nt, Artificial Sequence
  LRRK2 RNA guide
acaggagaaaaacacugaggu

SEQ ID NO: 72699 - RNA, 21 nt, Artificial Sequence
  LRRK2 RNA guide
accucaguguuuuucuccugu

SEQ ID NO: 72700 - RNA, 21 nt, Artificial Sequence
  LRRK2 RNA guide
acgugcuagggaagcacagga

SEQ ID NO: 72701 - RNA, 21 nt, Artificial Sequence
  LRRK2 RNA guide
agcacaggagaaaaacacuga

SEQ ID NO: 72702 - RNA, 21 nt, Artificial Sequence
  LRRK2 RNA guide
aggagaaaaacacugagguaa

SEQ ID NO: 72703 - RNA, 21 nt, Artificial Sequence
  LRRK2 RNA guide
agggaagcacaggagaaaaac

SEQ ID NO: 72704 - RNA, 21 nt, Artificial Sequence
  LRRK2 RNA guide
aguaccacgugcuagggaagc

SEQ ID NO: 72705 - RNA, 21 nt, Artificial Sequence
  LRRK2 RNA guide
aguguuuuucuccugugcuuc

SEQ ID NO: 72706 - RNA, 21 nt, Artificial Sequence
  LRRK2 RNA guide
cacaggagaaaaacacugagg

SEQ ID NO: 72707 - RNA, 21 nt, Artificial Sequence
  LRRK2 RNA guide
cacgugcuagggaagcacagg

SEQ ID NO: 72708 - RNA, 21 nt, Artificial Sequence
  LRRK2 RNA guide
caggagaaaaacacugaggua

SEQ ID NO: 72709 - RNA, 21 nt, Artificial Sequence
  LRRK2 RNA guide
caguguuuuucuccugugcuu

SEQ ID NO: 72710 - RNA, 21 nt, Artificial Sequence
  LRRK2 RNA guide
ccucaguguuuuucuccugug

SEQ ID NO: 72711 - RNA, 21 nt, Artificial Sequence
  LRRK2 RNA guide
cgugcuagggaagcacaggag

SEQ ID NO: 72712 - RNA, 21 nt, Artificial Sequence
  LRRK2 RNA guide
cuagggaagcacaggagaaaa

SEQ ID NO: 72713 - RNA, 21 nt, Artificial Sequence
  LRRK2 RNA guide
cucaguguuuuucuccugugc

SEQ ID NO: 72714 - RNA, 21 nt, Artificial Sequence
  LRRK2 RNA guide
cuccugugcuucccuagcacg

SEQ ID NO: 72715 - RNA, 21 nt, Artificial Sequence
  LRRK2 RNA guide
gaagcacaggagaaaaacacu

SEQ ID NO: 72716 - RNA, 21 nt, Artificial Sequence
  LRRK2 RNA guide
gcacaggagaaaaacacugag

SEQ ID NO: 72717 - RNA, 21 nt, Artificial Sequence
  LRRK2 RNA guide
gcuagggaagcacaggagaaa

SEQ ID NO: 72718 - RNA, 21 nt, Artificial Sequence
  LRRK2 RNA guide
ggaagcacaggagaaaaacac

SEQ ID NO: 72719 - RNA, 21 nt, Artificial Sequence
  LRRK2 RNA guide
gggaagcacaggagaaaaaca

SEQ ID NO: 72720 - RNA, 21 nt, Artificial Sequence
  LRRK2 RNA guide
guaccacgugcuagggaagca

SEQ ID NO: 72721 - RNA, 21 nt, Artificial Sequence
  LRRK2 RNA guide
gugcuagggaagcacaggaga

SEQ ID NO: 72722 - RNA, 21 nt, Artificial Sequence
  LRRK2 RNA guide
guguuuuucuccugugcuucc

SEQ ID NO: 72723 - RNA, 21 nt, Artificial Sequence
  LRRK2 RNA guide
guuuuucuccugugcuucccu

SEQ ID NO: 72724 - RNA, 21 nt, Artificial Sequence
  LRRK2 RNA guide
uaccacgugcuagggaagcac

SEQ ID NO: 72725 - RNA, 21 nt, Artificial Sequence
  LRRK2 RNA guide
uaccucaguguuuuucuccug

SEQ ID NO: 72726 - RNA, 21 nt, Artificial Sequence
  LRRK2 RNA guide
uagggaagcacaggagaaaaa

SEQ ID NO: 72727 - RNA, 21 nt, Artificial Sequence
  LRRK2 RNA guide
ucaguguuuuucuccugugcu

SEQ ID NO: 72728 - RNA, 21 nt, Artificial Sequence
  LRRK2 RNA guide
uccugugcuucccuagcacgu

SEQ ID NO: 72729 - RNA, 21 nt, Artificial Sequence
  LRRK2 RNA guide
ucuccugugcuucccuagcac

SEQ ID NO: 72730 - RNA, 21 nt, Artificial Sequence
  LRRK2 RNA guide
ugcuagggaagcacaggagaa

SEQ ID NO: 72731 - RNA, 21 nt, Artificial Sequence
  LRRK2 RNA guide
uguuuuucuccugugcuuccc

SEQ ID NO: 72732 - RNA, 21 nt, Artificial Sequence
  LRRK2 RNA guide
uuaccucaguguuuuucuccu

SEQ ID NO: 72733 - RNA, 21 nt, Artificial Sequence
  LRRK2 RNA guide
uucuccugugcuucccuagca

SEQ ID NO: 72734 - RNA, 21 nt, Artificial Sequence
  LRRK2 RNA guide
uuucuccugugcuucccuagc

SEQ ID NO: 72735 - RNA, 21 nt, Artificial Sequence
  LRRK2 RNA guide
uuuucuccugugcuucccuag

SEQ ID NO: 72736 - RNA, 21 nt, Artificial Sequence
  LRRK2 RNA guide
uuuuucuccugugcuucccua

SEQ ID NO: 72737 - RNA, 22 nt, Artificial Sequence
  LRRK2 RNA guide
aagcacaggagaaaaacacuga

SEQ ID NO: 72738 - RNA, 22 nt, Artificial Sequence
  LRRK2 RNA guide
aaguaccacgugcuagggaagc

SEQ ID NO: 72739 - RNA, 22 nt, Artificial Sequence
  LRRK2 RNA guide
acaggagaaaaacacugaggua

SEQ ID NO: 72740 - RNA, 22 nt, Artificial Sequence
  LRRK2 RNA guide
accucaguguuuuucuccugug

SEQ ID NO: 72741 - RNA, 22 nt, Artificial Sequence
  LRRK2 RNA guide
acgugcuagggaagcacaggag

SEQ ID NO: 72742 - RNA, 22 nt, Artificial Sequence
  LRRK2 RNA guide
agcacaggagaaaaacacugag

SEQ ID NO: 72743 - RNA, 22 nt, Artificial Sequence
  LRRK2 RNA guide
aggagaaaaacacugagguaaa

SEQ ID NO: 72744 - RNA, 22 nt, Artificial Sequence
  LRRK2 RNA guide
agggaagcacaggagaaaaaca

SEQ ID NO: 72745 - RNA, 22 nt, Artificial Sequence
  LRRK2 RNA guide
aguaccacgugcuagggaagca

SEQ ID NO: 72746 - RNA, 22 nt, Artificial Sequence
  LRRK2 RNA guide
aguguuuuucuccugugcuucc

SEQ ID NO: 72747 - RNA, 22 nt, Artificial Sequence
  LRRK2 RNA guide
cacaggagaaaaacacugaggu

SEQ ID NO: 72748 - RNA, 22 nt, Artificial Sequence
  LRRK2 RNA guide
cacgugcuagggaagcacagga

SEQ ID NO: 72749 - RNA, 22 nt, Artificial Sequence
  LRRK2 RNA guide
caggagaaaaacacugagguaa

SEQ ID NO: 72750 - RNA, 22 nt, Artificial Sequence
  LRRK2 RNA guide
caguguuuuucuccugugcuuc

SEQ ID NO: 72751 - RNA, 22 nt, Artificial Sequence
  LRRK2 RNA guide
ccacgugcuagggaagcacagg

SEQ ID NO: 72752 - RNA, 22 nt, Artificial Sequence
  LRRK2 RNA guide
ccucaguguuuuucuccugugc

SEQ ID NO: 72753 - RNA, 22 nt, Artificial Sequence
  LRRK2 RNA guide
cgugcuagggaagcacaggaga

SEQ ID NO: 72754 - RNA, 22 nt, Artificial Sequence
  LRRK2 RNA guide
cuagggaagcacaggagaaaaa

SEQ ID NO: 72755 - RNA, 22 nt, Artificial Sequence
  LRRK2 RNA guide
cucaguguuuuucuccugugcu

SEQ ID NO: 72756 - RNA, 22 nt, Artificial Sequence
  LRRK2 RNA guide
cuccugugcuucccuagcacgu

SEQ ID NO: 72757 - RNA, 22 nt, Artificial Sequence
  LRRK2 RNA guide
gaagcacaggagaaaaacacug

SEQ ID NO: 72758 - RNA, 22 nt, Artificial Sequence
  LRRK2 RNA guide
gcacaggagaaaaacacugagg

SEQ ID NO: 72759 - RNA, 22 nt, Artificial Sequence
  LRRK2 RNA guide
gcuagggaagcacaggagaaaa

SEQ ID NO: 72760 - RNA, 22 nt, Artificial Sequence
  LRRK2 RNA guide
ggaagcacaggagaaaaacacu

SEQ ID NO: 72761 - RNA, 22 nt, Artificial Sequence
  LRRK2 RNA guide
gggaagcacaggagaaaaacac

SEQ ID NO: 72762 - RNA, 22 nt, Artificial Sequence
  LRRK2 RNA guide
guaccacgugcuagggaagcac

SEQ ID NO: 72763 - RNA, 22 nt, Artificial Sequence
  LRRK2 RNA guide
gugcuagggaagcacaggagaa

SEQ ID NO: 72764 - RNA, 22 nt, Artificial Sequence
  LRRK2 RNA guide
guguuuuucuccugugcuuccc

SEQ ID NO: 72765 - RNA, 22 nt, Artificial Sequence
  LRRK2 RNA guide
guuuuucuccugugcuucccua

SEQ ID NO: 72766 - RNA, 22 nt, Artificial Sequence
  LRRK2 RNA guide
uaccucaguguuuuucuccugu

SEQ ID NO: 72767 - RNA, 22 nt, Artificial Sequence
  LRRK2 RNA guide
uagggaagcacaggagaaaaac

SEQ ID NO: 72768 - RNA, 22 nt, Artificial Sequence
  LRRK2 RNA guide
ucaguguuuuucuccugugcuu

SEQ ID NO: 72769 - RNA, 22 nt, Artificial Sequence
  LRRK2 RNA guide
uccugugcuucccuagcacgug

SEQ ID NO: 72770 - RNA, 22 nt, Artificial Sequence
  LRRK2 RNA guide
ucuccugugcuucccuagcacg

SEQ ID NO: 72771 - RNA, 22 nt, Artificial Sequence
  LRRK2 RNA guide
ugcuagggaagcacaggagaaa

SEQ ID NO: 72772 - RNA, 22 nt, Artificial Sequence
  LRRK2 RNA guide
uguuuuucuccugugcuucccu

SEQ ID NO: 72773 - RNA, 22 nt, Artificial Sequence
  LRRK2 RNA guide
uuaccucaguguuuuucuccug

SEQ ID NO: 72774 - RNA, 22 nt, Artificial Sequence
  LRRK2 RNA guide
uucuccugugcuucccuagcac

SEQ ID NO: 72775 - RNA, 22 nt, Artificial Sequence
  LRRK2 RNA guide
uuuaccucaguguuuuucuccu

SEQ ID NO: 72776 - RNA, 22 nt, Artificial Sequence
  LRRK2 RNA guide
uuucuccugugcuucccuagca

SEQ ID NO: 72777 - RNA, 22 nt, Artificial Sequence
  LRRK2 RNA guide
uuuucuccugugcuucccuagc

SEQ ID NO: 72778 - RNA, 22 nt, Artificial Sequence
  LRRK2 RNA guide
uuuuucuccugugcuucccuag

SEQ ID NO: 72779 - RNA, 20 nt, Artificial Sequence
  LRRK2 RNA guide
cccucugugcuucccuagca

SEQ ID NO: 72780 - RNA, 20 nt, Artificial Sequence
  LRRK2 RNA guide
ccucugugcuucccuagcac

SEQ ID NO: 72781 - RNA, 21 nt, Artificial Sequence
  LRRK2 RNA guide
cccucugugcuucccuagcac

SEQ ID NO: 72782 - RNA, 21 nt, Artificial Sequence
  LRRK2 RNA guide
ccucugugcuucccuagcacg

SEQ ID NO: 72783 - RNA, 22 nt, Artificial Sequence
  LRRK2 RNA guide
cccucugugcuucccuagcacg

SEQ ID NO: 72784 - RNA, 22 nt, Artificial Sequence
  LRRK2 RNA guide
ccucugugcuucccuagcacgu

SEQ ID NO: 72785 - RNA, 20 nt, Artificial Sequence
  LRRK2 RNA guide
aagcacagaaggagaaaaac

SEQ ID NO: 72786 - RNA, 20 nt, Artificial Sequence
  LRRK2 RNA guide
aaggagaaaaacacugaggu

SEQ ID NO: 72787 - RNA, 20 nt, Artificial Sequence
  LRRK2 RNA guide
acagaaggagaaaaacacug

SEQ ID NO: 72788 - RNA, 20 nt, Artificial Sequence
  LRRK2 RNA guide
accucaguguuuuucuccuu

SEQ ID NO: 72789 - RNA, 20 nt, Artificial Sequence
  LRRK2 RNA guide
agaaggagaaaaacacugag

SEQ ID NO: 72790 - RNA, 20 nt, Artificial Sequence
  LRRK2 RNA guide
agcacagaaggagaaaaaca

SEQ ID NO: 72791 - RNA, 20 nt, Artificial Sequence
  LRRK2 RNA guide
agggaagcacagaaggagaa

SEQ ID NO: 72792 - RNA, 20 nt, Artificial Sequence
  LRRK2 RNA guide
aguguuuuucuccuucugug

SEQ ID NO: 72793 - RNA, 20 nt, Artificial Sequence
  LRRK2 RNA guide
cacagaaggagaaaaacacu

SEQ ID NO: 72794 - RNA, 20 nt, Artificial Sequence
  LRRK2 RNA guide
cagaaggagaaaaacacuga

SEQ ID NO: 72795 - RNA, 20 nt, Artificial Sequence
  LRRK2 RNA guide
caguguuuuucuccuucugu

SEQ ID NO: 72796 - RNA, 20 nt, Artificial Sequence
  LRRK2 RNA guide
ccucaguguuuuucuccuuc

SEQ ID NO: 72797 - RNA, 20 nt, Artificial Sequence
  LRRK2 RNA guide
ccuucugugcuucccuagca

SEQ ID NO: 72798 - RNA, 20 nt, Artificial Sequence
  LRRK2 RNA guide
cgugcuagggaagcacagaa

SEQ ID NO: 72799 - RNA, 20 nt, Artificial Sequence
  LRRK2 RNA guide
cuagggaagcacagaaggag

SEQ ID NO: 72800 - RNA, 20 nt, Artificial Sequence
  LRRK2 RNA guide
cucaguguuuuucuccuucu

SEQ ID NO: 72801 - RNA, 20 nt, Artificial Sequence
  LRRK2 RNA guide
cuccuucugugcuucccuag

SEQ ID NO: 72802 - RNA, 20 nt, Artificial Sequence
  LRRK2 RNA guide
cuucugugcuucccuagcac

SEQ ID NO: 72803 - RNA, 20 nt, Artificial Sequence
  LRRK2 RNA guide
gaagcacagaaggagaaaaa

SEQ ID NO: 72804 - RNA, 20 nt, Artificial Sequence
  LRRK2 RNA guide
gaaggagaaaaacacugagg

SEQ ID NO: 72805 - RNA, 20 nt, Artificial Sequence
  LRRK2 RNA guide
gcacagaaggagaaaaacac

SEQ ID NO: 72806 - RNA, 20 nt, Artificial Sequence
  LRRK2 RNA guide
gcuagggaagcacagaagga

SEQ ID NO: 72807 - RNA, 20 nt, Artificial Sequence
  LRRK2 RNA guide
ggaagcacagaaggagaaaa

SEQ ID NO: 72808 - RNA, 20 nt, Artificial Sequence
  LRRK2 RNA guide
gggaagcacagaaggagaaa

SEQ ID NO: 72809 - RNA, 20 nt, Artificial Sequence
  LRRK2 RNA guide
gugcuagggaagcacagaag

SEQ ID NO: 72810 - RNA, 20 nt, Artificial Sequence
  LRRK2 RNA guide
guguuuuucuccuucugugc

SEQ ID NO: 72811 - RNA, 20 nt, Artificial Sequence
  LRRK2 RNA guide
guuuuucuccuucugugcuu

SEQ ID NO: 72812 - RNA, 20 nt, Artificial Sequence
  LRRK2 RNA guide
uagggaagcacagaaggaga

SEQ ID NO: 72813 - RNA, 20 nt, Artificial Sequence
  LRRK2 RNA guide
ucaguguuuuucuccuucug

SEQ ID NO: 72814 - RNA, 20 nt, Artificial Sequence
  LRRK2 RNA guide
uccuucugugcuucccuagc

SEQ ID NO: 72815 - RNA, 20 nt, Artificial Sequence
  LRRK2 RNA guide
ucuccuucugugcuucccua

SEQ ID NO: 72816 - RNA, 20 nt, Artificial Sequence
  LRRK2 RNA guide
ugcuagggaagcacagaagg

SEQ ID NO: 72817 - RNA, 20 nt, Artificial Sequence
  LRRK2 RNA guide
uguuuuucuccuucugugcu

SEQ ID NO: 72818 - RNA, 20 nt, Artificial Sequence
  LRRK2 RNA guide
uucuccuucugugcuucccu

SEQ ID NO: 72819 - RNA, 20 nt, Artificial Sequence
  LRRK2 RNA guide
uuucuccuucugugcuuccc

SEQ ID NO: 72820 - RNA, 20 nt, Artificial Sequence
  LRRK2 RNA guide
uuuucuccuucugugcuucc

SEQ ID NO: 72821 - RNA, 20 nt, Artificial Sequence
  LRRK2 RNA guide
uuuuucuccuucugugcuuc

SEQ ID NO: 72822 - RNA, 21 nt, Artificial Sequence
  LRRK2 RNA guide
aagcacagaaggagaaaaaca

SEQ ID NO: 72823 - RNA, 21 nt, Artificial Sequence
  LRRK2 RNA guide
aaggagaaaaacacugaggua

SEQ ID NO: 72824 - RNA, 21 nt, Artificial Sequence
  LRRK2 RNA guide
acagaaggagaaaaacacuga

SEQ ID NO: 72825 - RNA, 21 nt, Artificial Sequence
  LRRK2 RNA guide
accucaguguuuuucuccuuc

SEQ ID NO: 72826 - RNA, 21 nt, Artificial Sequence
  LRRK2 RNA guide
acgugcuagggaagcacagaa

SEQ ID NO: 72827 - RNA, 21 nt, Artificial Sequence
  LRRK2 RNA guide
agaaggagaaaaacacugagg

SEQ ID NO: 72828 - RNA, 21 nt, Artificial Sequence
  LRRK2 RNA guide
agcacagaaggagaaaaacac

SEQ ID NO: 72829 - RNA, 21 nt, Artificial Sequence
  LRRK2 RNA guide
agggaagcacagaaggagaaa

SEQ ID NO: 72830 - RNA, 21 nt, Artificial Sequence
  LRRK2 RNA guide
aguguuuuucuccuucugugc

SEQ ID NO: 72831 - RNA, 21 nt, Artificial Sequence
  LRRK2 RNA guide
cacagaaggagaaaaacacug

SEQ ID NO: 72832 - RNA, 21 nt, Artificial Sequence
  LRRK2 RNA guide
cagaaggagaaaaacacugag

SEQ ID NO: 72833 - RNA, 21 nt, Artificial Sequence
  LRRK2 RNA guide
caguguuuuucuccuucugug

SEQ ID NO: 72834 - RNA, 21 nt, Artificial Sequence
  LRRK2 RNA guide
ccucaguguuuuucuccuucu

SEQ ID NO: 72835 - RNA, 21 nt, Artificial Sequence
  LRRK2 RNA guide
ccuucugugcuucccuagcac

SEQ ID NO: 72836 - RNA, 21 nt, Artificial Sequence
  LRRK2 RNA guide
cgugcuagggaagcacagaag

SEQ ID NO: 72837 - RNA, 21 nt, Artificial Sequence
  LRRK2 RNA guide
cuagggaagcacagaaggaga

SEQ ID NO: 72838 - RNA, 21 nt, Artificial Sequence
  LRRK2 RNA guide
cucaguguuuuucuccuucug

SEQ ID NO: 72839 - RNA, 21 nt, Artificial Sequence
  LRRK2 RNA guide
cuccuucugugcuucccuagc

SEQ ID NO: 72840 - RNA, 21 nt, Artificial Sequence
  LRRK2 RNA guide
cuucugugcuucccuagcacg

SEQ ID NO: 72841 - RNA, 21 nt, Artificial Sequence
  LRRK2 RNA guide
gaagcacagaaggagaaaaac

SEQ ID NO: 72842 - RNA, 21 nt, Artificial Sequence
  LRRK2 RNA guide
gaaggagaaaaacacugaggu

SEQ ID NO: 72843 - RNA, 21 nt, Artificial Sequence
  LRRK2 RNA guide
gcacagaaggagaaaaacacu

SEQ ID NO: 72844 - RNA, 21 nt, Artificial Sequence
  LRRK2 RNA guide
gcuagggaagcacagaaggag

SEQ ID NO: 72845 - RNA, 21 nt, Artificial Sequence
  LRRK2 RNA guide
ggaagcacagaaggagaaaaa

SEQ ID NO: 72846 - RNA, 21 nt, Artificial Sequence
  LRRK2 RNA guide
gggaagcacagaaggagaaaa

SEQ ID NO: 72847 - RNA, 21 nt, Artificial Sequence
  LRRK2 RNA guide
gugcuagggaagcacagaagg

SEQ ID NO: 72848 - RNA, 21 nt, Artificial Sequence
  LRRK2 RNA guide
guguuuuucuccuucugugcu

SEQ ID NO: 72849 - RNA, 21 nt, Artificial Sequence
  LRRK2 RNA guide
guuuuucuccuucugugcuuc

SEQ ID NO: 72850 - RNA, 21 nt, Artificial Sequence
  LRRK2 RNA guide
uaccucaguguuuuucuccuu

SEQ ID NO: 72851 - RNA, 21 nt, Artificial Sequence
  LRRK2 RNA guide
uagggaagcacagaaggagaa

SEQ ID NO: 72852 - RNA, 21 nt, Artificial Sequence
  LRRK2 RNA guide
ucaguguuuuucuccuucugu

SEQ ID NO: 72853 - RNA, 21 nt, Artificial Sequence
  LRRK2 RNA guide
uccuucugugcuucccuagca

SEQ ID NO: 72854 - RNA, 21 nt, Artificial Sequence
  LRRK2 RNA guide
ucuccuucugugcuucccuag

SEQ ID NO: 72855 - RNA, 21 nt, Artificial Sequence
  LRRK2 RNA guide
ugcuagggaagcacagaagga

SEQ ID NO: 72856 - RNA, 21 nt, Artificial Sequence
  LRRK2 RNA guide
uguuuuucuccuucugugcuu

SEQ ID NO: 72857 - RNA, 21 nt, Artificial Sequence
  LRRK2 RNA guide
uucuccuucugugcuucccua

SEQ ID NO: 72858 - RNA, 21 nt, Artificial Sequence
  LRRK2 RNA guide
uuucuccuucugugcuucccu

SEQ ID NO: 72859 - RNA, 21 nt, Artificial Sequence
  LRRK2 RNA guide
uuuucuccuucugugcuuccc

SEQ ID NO: 72860 - RNA, 21 nt, Artificial Sequence
  LRRK2 RNA guide
uuuuucuccuucugugcuucc

SEQ ID NO: 72861 - RNA, 22 nt, Artificial Sequence
  LRRK2 RNA guide
aagcacagaaggagaaaaacac

SEQ ID NO: 72862 - RNA, 22 nt, Artificial Sequence
  LRRK2 RNA guide
aaggagaaaaacacugagguaa

SEQ ID NO: 72863 - RNA, 22 nt, Artificial Sequence
  LRRK2 RNA guide
acagaaggagaaaaacacugag

SEQ ID NO: 72864 - RNA, 22 nt, Artificial Sequence
  LRRK2 RNA guide
accucaguguuuuucuccuucu

SEQ ID NO: 72865 - RNA, 22 nt, Artificial Sequence
  LRRK2 RNA guide
acgugcuagggaagcacagaag

SEQ ID NO: 72866 - RNA, 22 nt, Artificial Sequence
  LRRK2 RNA guide
agaaggagaaaaacacugaggu

SEQ ID NO: 72867 - RNA, 22 nt, Artificial Sequence
  LRRK2 RNA guide
agcacagaaggagaaaaacacu

SEQ ID NO: 72868 - RNA, 22 nt, Artificial Sequence
  LRRK2 RNA guide
agggaagcacagaaggagaaaa

SEQ ID NO: 72869 - RNA, 22 nt, Artificial Sequence
  LRRK2 RNA guide
aguguuuuucuccuucugugcu

SEQ ID NO: 72870 - RNA, 22 nt, Artificial Sequence
  LRRK2 RNA guide
cacagaaggagaaaaacacuga

SEQ ID NO: 72871 - RNA, 22 nt, Artificial Sequence
  LRRK2 RNA guide
cacgugcuagggaagcacagaa

SEQ ID NO: 72872 - RNA, 22 nt, Artificial Sequence
  LRRK2 RNA guide
cagaaggagaaaaacacugagg

SEQ ID NO: 72873 - RNA, 22 nt, Artificial Sequence
  LRRK2 RNA guide
caguguuuuucuccuucugugc

SEQ ID NO: 72874 - RNA, 22 nt, Artificial Sequence
  LRRK2 RNA guide
ccucaguguuuuucuccuucug

SEQ ID NO: 72875 - RNA, 22 nt, Artificial Sequence
  LRRK2 RNA guide
ccuucugugcuucccuagcacg

SEQ ID NO: 72876 - RNA, 22 nt, Artificial Sequence
  LRRK2 RNA guide
cgugcuagggaagcacagaagg

SEQ ID NO: 72877 - RNA, 22 nt, Artificial Sequence
  LRRK2 RNA guide
cuagggaagcacagaaggagaa

SEQ ID NO: 72878 - RNA, 22 nt, Artificial Sequence
  LRRK2 RNA guide
cucaguguuuuucuccuucugu

SEQ ID NO: 72879 - RNA, 22 nt, Artificial Sequence
  LRRK2 RNA guide
cuccuucugugcuucccuagca

SEQ ID NO: 72880 - RNA, 22 nt, Artificial Sequence
  LRRK2 RNA guide
cuucugugcuucccuagcacgu

SEQ ID NO: 72881 - RNA, 22 nt, Artificial Sequence
  LRRK2 RNA guide
gaagcacagaaggagaaaaaca

SEQ ID NO: 72882 - RNA, 22 nt, Artificial Sequence
  LRRK2 RNA guide
gaaggagaaaaacacugaggua

SEQ ID NO: 72883 - RNA, 22 nt, Artificial Sequence
  LRRK2 RNA guide
gcacagaaggagaaaaacacug

SEQ ID NO: 72884 - RNA, 22 nt, Artificial Sequence
  LRRK2 RNA guide
gcuagggaagcacagaaggaga

SEQ ID NO: 72885 - RNA, 22 nt, Artificial Sequence
  LRRK2 RNA guide
ggaagcacagaaggagaaaaac

SEQ ID NO: 72886 - RNA, 22 nt, Artificial Sequence
  LRRK2 RNA guide
gggaagcacagaaggagaaaaa

SEQ ID NO: 72887 - RNA, 22 nt, Artificial Sequence
  LRRK2 RNA guide
gugcuagggaagcacagaagga

SEQ ID NO: 72888 - RNA, 22 nt, Artificial Sequence
  LRRK2 RNA guide
guguuuuucuccuucugugcuu

SEQ ID NO: 72889 - RNA, 22 nt, Artificial Sequence
  LRRK2 RNA guide
guuuuucuccuucugugcuucc

SEQ ID NO: 72890 - RNA, 22 nt, Artificial Sequence
  LRRK2 RNA guide
uaccucaguguuuuucuccuuc

SEQ ID NO: 72891 - RNA, 22 nt, Artificial Sequence
  LRRK2 RNA guide
uagggaagcacagaaggagaaa

SEQ ID NO: 72892 - RNA, 22 nt, Artificial Sequence
  LRRK2 RNA guide
ucaguguuuuucuccuucugug

SEQ ID NO: 72893 - RNA, 22 nt, Artificial Sequence
  LRRK2 RNA guide
uccuucugugcuucccuagcac

SEQ ID NO: 72894 - RNA, 22 nt, Artificial Sequence
  LRRK2 RNA guide
ucuccuucugugcuucccuagc

SEQ ID NO: 72895 - RNA, 22 nt, Artificial Sequence
  LRRK2 RNA guide
ugcuagggaagcacagaaggag

SEQ ID NO: 72896 - RNA, 22 nt, Artificial Sequence
  LRRK2 RNA guide
uguuuuucuccuucugugcuuc

SEQ ID NO: 72897 - RNA, 22 nt, Artificial Sequence
  LRRK2 RNA guide
uuaccucaguguuuuucuccuu

SEQ ID NO: 72898 - RNA, 22 nt, Artificial Sequence
  LRRK2 RNA guide
uucuccuucugugcuucccuag

SEQ ID NO: 72899 - RNA, 22 nt, Artificial Sequence
  LRRK2 RNA guide
uuucuccuucugugcuucccua

SEQ ID NO: 72900 - RNA, 22 nt, Artificial Sequence
  LRRK2 RNA guide
uuuucuccuucugugcuucccu

SEQ ID NO: 72901 - RNA, 22 nt, Artificial Sequence
  LRRK2 RNA guide
uuuuucuccuucugugcuuccc

SEQ ID NO: 72902 - RNA, 20 nt, Artificial Sequence
  LRRK2 RNA guide
aaacaccuguuugaggacug

SEQ ID NO: 72903 - RNA, 20 nt, Artificial Sequence
  LRRK2 RNA guide
aacaccuguuugaggacugu

SEQ ID NO: 72904 - RNA, 20 nt, Artificial Sequence
  LRRK2 RNA guide
aaggauugugcucagacagu

SEQ ID NO: 72905 - RNA, 20 nt, Artificial Sequence
  LRRK2 RNA guide
aauccagaaggauugugcuc

SEQ ID NO: 72906 - RNA, 20 nt, Artificial Sequence
  LRRK2 RNA guide
acaauccagaaggauugugc

SEQ ID NO: 72907 - RNA, 20 nt, Artificial Sequence
  LRRK2 RNA guide
acaccuguuugaggacuguc

SEQ ID NO: 72908 - RNA, 20 nt, Artificial Sequence
  LRRK2 RNA guide
accuguuugaggacugucug

SEQ ID NO: 72909 - RNA, 20 nt, Artificial Sequence
  LRRK2 RNA guide
acugucugagcacaauccuu

SEQ ID NO: 72910 - RNA, 20 nt, Artificial Sequence
  LRRK2 RNA guide
agaaggauugugcucagaca

SEQ ID NO: 72911 - RNA, 20 nt, Artificial Sequence
  LRRK2 RNA guide
agacaguccucaaacaggug

SEQ ID NO: 72912 - RNA, 20 nt, Artificial Sequence
  LRRK2 RNA guide
aggacugucugagcacaauc

SEQ ID NO: 72913 - RNA, 20 nt, Artificial Sequence
  LRRK2 RNA guide
aggauugugcucagacaguc

SEQ ID NO: 72914 - RNA, 20 nt, Artificial Sequence
  LRRK2 RNA guide
auccagaaggauugugcuca

SEQ ID NO: 72915 - RNA, 20 nt, Artificial Sequence
  LRRK2 RNA guide
auuaaacaccuguuugagga

SEQ ID NO: 72916 - RNA, 20 nt, Artificial Sequence
  LRRK2 RNA guide
auugugcucagacaguccuc

SEQ ID NO: 72917 - RNA, 20 nt, Artificial Sequence
  LRRK2 RNA guide
caauccagaaggauugugcu

SEQ ID NO: 72918 - RNA, 20 nt, Artificial Sequence
  LRRK2 RNA guide
cacaauccagaaggauugug

SEQ ID NO: 72919 - RNA, 20 nt, Artificial Sequence
  LRRK2 RNA guide
caccuguuugaggacugucu

SEQ ID NO: 72920 - RNA, 20 nt, Artificial Sequence
  LRRK2 RNA guide
cagaaggauugugcucagac

SEQ ID NO: 72921 - RNA, 20 nt, Artificial Sequence
  LRRK2 RNA guide
cagacaguccucaaacaggu

SEQ ID NO: 72922 - RNA, 20 nt, Artificial Sequence
  LRRK2 RNA guide
ccagaaggauugugcucaga

SEQ ID NO: 72923 - RNA, 20 nt, Artificial Sequence
  LRRK2 RNA guide
ccuguuugaggacugucuga

SEQ ID NO: 72924 - RNA, 20 nt, Artificial Sequence
  LRRK2 RNA guide
cucagacaguccucaaacag

SEQ ID NO: 72925 - RNA, 20 nt, Artificial Sequence
  LRRK2 RNA guide
cugucugagcacaauccuuc

SEQ ID NO: 72926 - RNA, 20 nt, Artificial Sequence
  LRRK2 RNA guide
cuguuugaggacugucugag

SEQ ID NO: 72927 - RNA, 20 nt, Artificial Sequence
  LRRK2 RNA guide
gaaggauugugcucagacag

SEQ ID NO: 72928 - RNA, 20 nt, Artificial Sequence
  LRRK2 RNA guide
gacugucugagcacaauccu

SEQ ID NO: 72929 - RNA, 20 nt, Artificial Sequence
  LRRK2 RNA guide
gaggacugucugagcacaau

SEQ ID NO: 72930 - RNA, 20 nt, Artificial Sequence
  LRRK2 RNA guide
gauugugcucagacaguccu

SEQ ID NO: 72931 - RNA, 20 nt, Artificial Sequence
  LRRK2 RNA guide
gcucagacaguccucaaaca

SEQ ID NO: 72932 - RNA, 20 nt, Artificial Sequence
  LRRK2 RNA guide
ggacugucugagcacaaucc

SEQ ID NO: 72933 - RNA, 20 nt, Artificial Sequence
  LRRK2 RNA guide
ggauugugcucagacagucc

SEQ ID NO: 72934 - RNA, 20 nt, Artificial Sequence
  LRRK2 RNA guide
gucugagcacaauccuucug

SEQ ID NO: 72935 - RNA, 20 nt, Artificial Sequence
  LRRK2 RNA guide
gugcucagacaguccucaaa

SEQ ID NO: 72936 - RNA, 20 nt, Artificial Sequence
  LRRK2 RNA guide
guuugaggacugucugagca

SEQ ID NO: 72937 - RNA, 20 nt, Artificial Sequence
  LRRK2 RNA guide
uaaacaccuguuugaggacu

SEQ ID NO: 72938 - RNA, 20 nt, Artificial Sequence
  LRRK2 RNA guide
ucagacaguccucaaacagg

SEQ ID NO: 72939 - RNA, 20 nt, Artificial Sequence
  LRRK2 RNA guide
uccagaaggauugugcucag

SEQ ID NO: 72940 - RNA, 20 nt, Artificial Sequence
  LRRK2 RNA guide
ucugagcacaauccuucugg

SEQ ID NO: 72941 - RNA, 20 nt, Artificial Sequence
  LRRK2 RNA guide
ugaggacugucugagcacaa

SEQ ID NO: 72942 - RNA, 20 nt, Artificial Sequence
  LRRK2 RNA guide
ugcucagacaguccucaaac

SEQ ID NO: 72943 - RNA, 20 nt, Artificial Sequence
  LRRK2 RNA guide
ugucugagcacaauccuucu

SEQ ID NO: 72944 - RNA, 20 nt, Artificial Sequence
  LRRK2 RNA guide
ugugcucagacaguccucaa

SEQ ID NO: 72945 - RNA, 20 nt, Artificial Sequence
  LRRK2 RNA guide
uguuugaggacugucugagc

SEQ ID NO: 72946 - RNA, 20 nt, Artificial Sequence
  LRRK2 RNA guide
uuaaacaccuguuugaggac

SEQ ID NO: 72947 - RNA, 20 nt, Artificial Sequence
  LRRK2 RNA guide
uugaggacugucugagcaca

SEQ ID NO: 72948 - RNA, 20 nt, Artificial Sequence
  LRRK2 RNA guide
uugugcucagacaguccuca

SEQ ID NO: 72949 - RNA, 20 nt, Artificial Sequence
  LRRK2 RNA guide
uuugaggacugucugagcac

SEQ ID NO: 72950 - RNA, 21 nt, Artificial Sequence
  LRRK2 RNA guide
aaacaccuguuugaggacugu

SEQ ID NO: 72951 - RNA, 21 nt, Artificial Sequence
  LRRK2 RNA guide
aacaccuguuugaggacuguc

SEQ ID NO: 72952 - RNA, 21 nt, Artificial Sequence
  LRRK2 RNA guide
aaggauugugcucagacaguc

SEQ ID NO: 72953 - RNA, 21 nt, Artificial Sequence
  LRRK2 RNA guide
aauccagaaggauugugcuca

SEQ ID NO: 72954 - RNA, 21 nt, Artificial Sequence
  LRRK2 RNA guide
acaauccagaaggauugugcu

SEQ ID NO: 72955 - RNA, 21 nt, Artificial Sequence
  LRRK2 RNA guide
acaccuguuugaggacugucu

SEQ ID NO: 72956 - RNA, 21 nt, Artificial Sequence
  LRRK2 RNA guide
accuguuugaggacugucuga

SEQ ID NO: 72957 - RNA, 21 nt, Artificial Sequence
  LRRK2 RNA guide
acugucugagcacaauccuuc

SEQ ID NO: 72958 - RNA, 21 nt, Artificial Sequence
  LRRK2 RNA guide
agaaggauugugcucagacag

SEQ ID NO: 72959 - RNA, 21 nt, Artificial Sequence
  LRRK2 RNA guide
agacaguccucaaacaggugu

SEQ ID NO: 72960 - RNA, 21 nt, Artificial Sequence
  LRRK2 RNA guide
aggacugucugagcacaaucc

SEQ ID NO: 72961 - RNA, 21 nt, Artificial Sequence
  LRRK2 RNA guide
aggauugugcucagacagucc

SEQ ID NO: 72962 - RNA, 21 nt, Artificial Sequence
  LRRK2 RNA guide
auccagaaggauugugcucag

SEQ ID NO: 72963 - RNA, 21 nt, Artificial Sequence
  LRRK2 RNA guide
auuaaacaccuguuugaggac

SEQ ID NO: 72964 - RNA, 21 nt, Artificial Sequence
  LRRK2 RNA guide
auugugcucagacaguccuca

SEQ ID NO: 72965 - RNA, 21 nt, Artificial Sequence
  LRRK2 RNA guide
caauccagaaggauugugcuc

SEQ ID NO: 72966 - RNA, 21 nt, Artificial Sequence
  LRRK2 RNA guide
cacaauccagaaggauugugc

SEQ ID NO: 72967 - RNA, 21 nt, Artificial Sequence
  LRRK2 RNA guide
caccuguuugaggacugucug

SEQ ID NO: 72968 - RNA, 21 nt, Artificial Sequence
  LRRK2 RNA guide
cagaaggauugugcucagaca

SEQ ID NO: 72969 - RNA, 21 nt, Artificial Sequence
  LRRK2 RNA guide
cagacaguccucaaacaggug

SEQ ID NO: 72970 - RNA, 21 nt, Artificial Sequence
  LRRK2 RNA guide
ccagaaggauugugcucagac

SEQ ID NO: 72971 - RNA, 21 nt, Artificial Sequence
  LRRK2 RNA guide
ccuguuugaggacugucugag

SEQ ID NO: 72972 - RNA, 21 nt, Artificial Sequence
  LRRK2 RNA guide
cucagacaguccucaaacagg

SEQ ID NO: 72973 - RNA, 21 nt, Artificial Sequence
  LRRK2 RNA guide
cugucugagcacaauccuucu

SEQ ID NO: 72974 - RNA, 21 nt, Artificial Sequence
  LRRK2 RNA guide
cuguuugaggacugucugagc

SEQ ID NO: 72975 - RNA, 21 nt, Artificial Sequence
  LRRK2 RNA guide
gaaggauugugcucagacagu

SEQ ID NO: 72976 - RNA, 21 nt, Artificial Sequence
  LRRK2 RNA guide
gacugucugagcacaauccuu

SEQ ID NO: 72977 - RNA, 21 nt, Artificial Sequence
  LRRK2 RNA guide
gaggacugucugagcacaauc

SEQ ID NO: 72978 - RNA, 21 nt, Artificial Sequence
  LRRK2 RNA guide
gauuaaacaccuguuugagga

SEQ ID NO: 72979 - RNA, 21 nt, Artificial Sequence
  LRRK2 RNA guide
gauugugcucagacaguccuc

SEQ ID NO: 72980 - RNA, 21 nt, Artificial Sequence
  LRRK2 RNA guide
gcucagacaguccucaaacag

SEQ ID NO: 72981 - RNA, 21 nt, Artificial Sequence
  LRRK2 RNA guide
ggacugucugagcacaauccu

SEQ ID NO: 72982 - RNA, 21 nt, Artificial Sequence
  LRRK2 RNA guide
ggauugugcucagacaguccu

SEQ ID NO: 72983 - RNA, 21 nt, Artificial Sequence
  LRRK2 RNA guide
gucugagcacaauccuucugg

SEQ ID NO: 72984 - RNA, 21 nt, Artificial Sequence
  LRRK2 RNA guide
gugcucagacaguccucaaac

SEQ ID NO: 72985 - RNA, 21 nt, Artificial Sequence
  LRRK2 RNA guide
guuugaggacugucugagcac

SEQ ID NO: 72986 - RNA, 21 nt, Artificial Sequence
  LRRK2 RNA guide
uaaacaccuguuugaggacug

SEQ ID NO: 72987 - RNA, 21 nt, Artificial Sequence
  LRRK2 RNA guide
ucacaauccagaaggauugug

SEQ ID NO: 72988 - RNA, 21 nt, Artificial Sequence
  LRRK2 RNA guide
ucagacaguccucaaacaggu

SEQ ID NO: 72989 - RNA, 21 nt, Artificial Sequence
  LRRK2 RNA guide
uccagaaggauugugcucaga

SEQ ID NO: 72990 - RNA, 21 nt, Artificial Sequence
  LRRK2 RNA guide
ucugagcacaauccuucugga

SEQ ID NO: 72991 - RNA, 21 nt, Artificial Sequence
  LRRK2 RNA guide
ugaggacugucugagcacaau

SEQ ID NO: 72992 - RNA, 21 nt, Artificial Sequence
  LRRK2 RNA guide
ugcucagacaguccucaaaca

SEQ ID NO: 72993 - RNA, 21 nt, Artificial Sequence
  LRRK2 RNA guide
ugucugagcacaauccuucug

SEQ ID NO: 72994 - RNA, 21 nt, Artificial Sequence
  LRRK2 RNA guide
ugugcucagacaguccucaaa

SEQ ID NO: 72995 - RNA, 21 nt, Artificial Sequence
  LRRK2 RNA guide
uguuugaggacugucugagca

SEQ ID NO: 72996 - RNA, 21 nt, Artificial Sequence
  LRRK2 RNA guide
uuaaacaccuguuugaggacu

SEQ ID NO: 72997 - RNA, 21 nt, Artificial Sequence
  LRRK2 RNA guide
uugaggacugucugagcacaa

SEQ ID NO: 72998 - RNA, 21 nt, Artificial Sequence
  LRRK2 RNA guide
uugugcucagacaguccucaa

SEQ ID NO: 72999 - RNA, 21 nt, Artificial Sequence
  LRRK2 RNA guide
uuugaggacugucugagcaca

SEQ ID NO: 73000 - RNA, 22 nt, Artificial Sequence
  LRRK2 RNA guide
aaacaccuguuugaggacuguc

SEQ ID NO: 73001 - RNA, 22 nt, Artificial Sequence
  LRRK2 RNA guide
aacaccuguuugaggacugucu

SEQ ID NO: 73002 - RNA, 22 nt, Artificial Sequence
  LRRK2 RNA guide
aaggauugugcucagacagucc

SEQ ID NO: 73003 - RNA, 22 nt, Artificial Sequence
  LRRK2 RNA guide
aauccagaaggauugugcucag

SEQ ID NO: 73004 - RNA, 22 nt, Artificial Sequence
  LRRK2 RNA guide
acaauccagaaggauugugcuc

SEQ ID NO: 73005 - RNA, 22 nt, Artificial Sequence
  LRRK2 RNA guide
acaccuguuugaggacugucug

SEQ ID NO: 73006 - RNA, 22 nt, Artificial Sequence
  LRRK2 RNA guide
accuguuugaggacugucugag

SEQ ID NO: 73007 - RNA, 22 nt, Artificial Sequence
  LRRK2 RNA guide
acugucugagcacaauccuucu

SEQ ID NO: 73008 - RNA, 22 nt, Artificial Sequence
  LRRK2 RNA guide
agaaggauugugcucagacagu

SEQ ID NO: 73009 - RNA, 22 nt, Artificial Sequence
  LRRK2 RNA guide
agacaguccucaaacagguguu

SEQ ID NO: 73010 - RNA, 22 nt, Artificial Sequence
  LRRK2 RNA guide
aggacugucugagcacaauccu

SEQ ID NO: 73011 - RNA, 22 nt, Artificial Sequence
  LRRK2 RNA guide
aggauugugcucagacaguccu

SEQ ID NO: 73012 - RNA, 22 nt, Artificial Sequence
  LRRK2 RNA guide
auccagaaggauugugcucaga

SEQ ID NO: 73013 - RNA, 22 nt, Artificial Sequence
  LRRK2 RNA guide
auuaaacaccuguuugaggacu

SEQ ID NO: 73014 - RNA, 22 nt, Artificial Sequence
  LRRK2 RNA guide
auugugcucagacaguccucaa

SEQ ID NO: 73015 - RNA, 22 nt, Artificial Sequence
  LRRK2 RNA guide
caauccagaaggauugugcuca

SEQ ID NO: 73016 - RNA, 22 nt, Artificial Sequence
  LRRK2 RNA guide
cacaauccagaaggauugugcu

SEQ ID NO: 73017 - RNA, 22 nt, Artificial Sequence
  LRRK2 RNA guide
caccuguuugaggacugucuga

SEQ ID NO: 73018 - RNA, 22 nt, Artificial Sequence
  LRRK2 RNA guide
cagaaggauugugcucagacag

SEQ ID NO: 73019 - RNA, 22 nt, Artificial Sequence
  LRRK2 RNA guide
cagacaguccucaaacaggugu

SEQ ID NO: 73020 - RNA, 22 nt, Artificial Sequence
  LRRK2 RNA guide
ccagaaggauugugcucagaca

SEQ ID NO: 73021 - RNA, 22 nt, Artificial Sequence
  LRRK2 RNA guide
ccuguuugaggacugucugagc

SEQ ID NO: 73022 - RNA, 22 nt, Artificial Sequence
  LRRK2 RNA guide
cucagacaguccucaaacaggu

SEQ ID NO: 73023 - RNA, 22 nt, Artificial Sequence
  LRRK2 RNA guide
cugucugagcacaauccuucug

SEQ ID NO: 73024 - RNA, 22 nt, Artificial Sequence
  LRRK2 RNA guide
cuguuugaggacugucugagca

SEQ ID NO: 73025 - RNA, 22 nt, Artificial Sequence
  LRRK2 RNA guide
gaaggauugugcucagacaguc

SEQ ID NO: 73026 - RNA, 22 nt, Artificial Sequence
  LRRK2 RNA guide
gacugucugagcacaauccuuc

SEQ ID NO: 73027 - RNA, 22 nt, Artificial Sequence
  LRRK2 RNA guide
gaggacugucugagcacaaucc

SEQ ID NO: 73028 - RNA, 22 nt, Artificial Sequence
  LRRK2 RNA guide
gauuaaacaccuguuugaggac

SEQ ID NO: 73029 - RNA, 22 nt, Artificial Sequence
  LRRK2 RNA guide
gauugugcucagacaguccuca

SEQ ID NO: 73030 - RNA, 22 nt, Artificial Sequence
  LRRK2 RNA guide
gcucagacaguccucaaacagg

SEQ ID NO: 73031 - RNA, 22 nt, Artificial Sequence
  LRRK2 RNA guide
ggacugucugagcacaauccuu

SEQ ID NO: 73032 - RNA, 22 nt, Artificial Sequence
  LRRK2 RNA guide
ggauugugcucagacaguccuc

SEQ ID NO: 73033 - RNA, 22 nt, Artificial Sequence
  LRRK2 RNA guide
gucacaauccagaaggauugug

SEQ ID NO: 73034 - RNA, 22 nt, Artificial Sequence
  LRRK2 RNA guide
gucugagcacaauccuucugga

SEQ ID NO: 73035 - RNA, 22 nt, Artificial Sequence
  LRRK2 RNA guide
gugcucagacaguccucaaaca

SEQ ID NO: 73036 - RNA, 22 nt, Artificial Sequence
  LRRK2 RNA guide
guuugaggacugucugagcaca

SEQ ID NO: 73037 - RNA, 22 nt, Artificial Sequence
  LRRK2 RNA guide
uaaacaccuguuugaggacugu

SEQ ID NO: 73038 - RNA, 22 nt, Artificial Sequence
  LRRK2 RNA guide
ucacaauccagaaggauugugc

SEQ ID NO: 73039 - RNA, 22 nt, Artificial Sequence
  LRRK2 RNA guide
ucagacaguccucaaacaggug

SEQ ID NO: 73040 - RNA, 22 nt, Artificial Sequence
  LRRK2 RNA guide
uccagaaggauugugcucagac

SEQ ID NO: 73041 - RNA, 22 nt, Artificial Sequence
  LRRK2 RNA guide
ucugagcacaauccuucuggau

SEQ ID NO: 73042 - RNA, 22 nt, Artificial Sequence
  LRRK2 RNA guide
ugaggacugucugagcacaauc

SEQ ID NO: 73043 - RNA, 22 nt, Artificial Sequence
  LRRK2 RNA guide
ugauuaaacaccuguuugagga

SEQ ID NO: 73044 - RNA, 22 nt, Artificial Sequence
  LRRK2 RNA guide
ugcucagacaguccucaaacag

SEQ ID NO: 73045 - RNA, 22 nt, Artificial Sequence
  LRRK2 RNA guide
ugucugagcacaauccuucugg

SEQ ID NO: 73046 - RNA, 22 nt, Artificial Sequence
  LRRK2 RNA guide
ugugcucagacaguccucaaac

SEQ ID NO: 73047 - RNA, 22 nt, Artificial Sequence
  LRRK2 RNA guide
uguuugaggacugucugagcac

SEQ ID NO: 73048 - RNA, 22 nt, Artificial Sequence
  LRRK2 RNA guide
uuaaacaccuguuugaggacug

SEQ ID NO: 73049 - RNA, 22 nt, Artificial Sequence
  LRRK2 RNA guide
uugaggacugucugagcacaau

SEQ ID NO: 73050 - RNA, 22 nt, Artificial Sequence
  LRRK2 RNA guide
uugugcucagacaguccucaaa

SEQ ID NO: 73051 - RNA, 22 nt, Artificial Sequence
  LRRK2 RNA guide
uuugaggacugucugagcacaa

SEQ ID NO: 73052 - RNA, 20 nt, Artificial Sequence
  LRRK2 RNA guide
aaacaguccucaaacaggug

SEQ ID NO: 73053 - RNA, 20 nt, Artificial Sequence
  LRRK2 RNA guide
aaggauugugcucaaacagu

SEQ ID NO: 73054 - RNA, 20 nt, Artificial Sequence
  LRRK2 RNA guide
acaccuguuugaggacuguu

SEQ ID NO: 73055 - RNA, 20 nt, Artificial Sequence
  LRRK2 RNA guide
accuguuugaggacuguuug

SEQ ID NO: 73056 - RNA, 20 nt, Artificial Sequence
  LRRK2 RNA guide
acuguuugagcacaauccuu

SEQ ID NO: 73057 - RNA, 20 nt, Artificial Sequence
  LRRK2 RNA guide
agaaggauugugcucaaaca

SEQ ID NO: 73058 - RNA, 20 nt, Artificial Sequence
  LRRK2 RNA guide
aggacuguuugagcacaauc

SEQ ID NO: 73059 - RNA, 20 nt, Artificial Sequence
  LRRK2 RNA guide
aggauugugcucaaacaguc

SEQ ID NO: 73060 - RNA, 20 nt, Artificial Sequence
  LRRK2 RNA guide
auugugcucaaacaguccuc

SEQ ID NO: 73061 - RNA, 20 nt, Artificial Sequence
  LRRK2 RNA guide
caaacaguccucaaacaggu

SEQ ID NO: 73062 - RNA, 20 nt, Artificial Sequence
  LRRK2 RNA guide
caccuguuugaggacuguuu

SEQ ID NO: 73063 - RNA, 20 nt, Artificial Sequence
  LRRK2 RNA guide
cagaaggauugugcucaaac

SEQ ID NO: 73064 - RNA, 20 nt, Artificial Sequence
  LRRK2 RNA guide
ccagaaggauugugcucaaa

SEQ ID NO: 73065 - RNA, 20 nt, Artificial Sequence
  LRRK2 RNA guide
ccuguuugaggacuguuuga

SEQ ID NO: 73066 - RNA, 20 nt, Artificial Sequence
  LRRK2 RNA guide
cucaaacaguccucaaacag

SEQ ID NO: 73067 - RNA, 20 nt, Artificial Sequence
  LRRK2 RNA guide
cuguuugagcacaauccuuc

SEQ ID NO: 73068 - RNA, 20 nt, Artificial Sequence
  LRRK2 RNA guide
cuguuugaggacuguuugag

SEQ ID NO: 73069 - RNA, 20 nt, Artificial Sequence
  LRRK2 RNA guide
gaaggauugugcucaaacag

SEQ ID NO: 73070 - RNA, 20 nt, Artificial Sequence
  LRRK2 RNA guide
gacuguuugagcacaauccu

SEQ ID NO: 73071 - RNA, 20 nt, Artificial Sequence
  LRRK2 RNA guide
gaggacuguuugagcacaau

SEQ ID NO: 73072 - RNA, 20 nt, Artificial Sequence
  LRRK2 RNA guide
gauugugcucaaacaguccu

SEQ ID NO: 73073 - RNA, 20 nt, Artificial Sequence
  LRRK2 RNA guide
gcucaaacaguccucaaaca

SEQ ID NO: 73074 - RNA, 20 nt, Artificial Sequence
  LRRK2 RNA guide
ggacuguuugagcacaaucc

SEQ ID NO: 73075 - RNA, 20 nt, Artificial Sequence
  LRRK2 RNA guide
ggauugugcucaaacagucc

SEQ ID NO: 73076 - RNA, 20 nt, Artificial Sequence
  LRRK2 RNA guide
gugcucaaacaguccucaaa

SEQ ID NO: 73077 - RNA, 20 nt, Artificial Sequence
  LRRK2 RNA guide
guuugagcacaauccuucug

SEQ ID NO: 73078 - RNA, 20 nt, Artificial Sequence
  LRRK2 RNA guide
guuugaggacuguuugagca

SEQ ID NO: 73079 - RNA, 20 nt, Artificial Sequence
  LRRK2 RNA guide
ucaaacaguccucaaacagg

SEQ ID NO: 73080 - RNA, 20 nt, Artificial Sequence
  LRRK2 RNA guide
uccagaaggauugugcucaa

SEQ ID NO: 73081 - RNA, 20 nt, Artificial Sequence
  LRRK2 RNA guide
ugaggacuguuugagcacaa

SEQ ID NO: 73082 - RNA, 20 nt, Artificial Sequence
  LRRK2 RNA guide
ugcucaaacaguccucaaac

SEQ ID NO: 73083 - RNA, 20 nt, Artificial Sequence
  LRRK2 RNA guide
ugugcucaaacaguccucaa

SEQ ID NO: 73084 - RNA, 20 nt, Artificial Sequence
  LRRK2 RNA guide
uguuugagcacaauccuucu

SEQ ID NO: 73085 - RNA, 20 nt, Artificial Sequence
  LRRK2 RNA guide
uguuugaggacuguuugagc

SEQ ID NO: 73086 - RNA, 20 nt, Artificial Sequence
  LRRK2 RNA guide
uugaggacuguuugagcaca

SEQ ID NO: 73087 - RNA, 20 nt, Artificial Sequence
  LRRK2 RNA guide
uugugcucaaacaguccuca

SEQ ID NO: 73088 - RNA, 20 nt, Artificial Sequence
  LRRK2 RNA guide
uuugagcacaauccuucugg

SEQ ID NO: 73089 - RNA, 20 nt, Artificial Sequence
  LRRK2 RNA guide
uuugaggacuguuugagcac

SEQ ID NO: 73090 - RNA, 21 nt, Artificial Sequence
  LRRK2 RNA guide
aaacaguccucaaacaggugu

SEQ ID NO: 73091 - RNA, 21 nt, Artificial Sequence
  LRRK2 RNA guide
aacaccuguuugaggacuguu

SEQ ID NO: 73092 - RNA, 21 nt, Artificial Sequence
  LRRK2 RNA guide
aaggauugugcucaaacaguc

SEQ ID NO: 73093 - RNA, 21 nt, Artificial Sequence
  LRRK2 RNA guide
acaccuguuugaggacuguuu

SEQ ID NO: 73094 - RNA, 21 nt, Artificial Sequence
  LRRK2 RNA guide
accuguuugaggacuguuuga

SEQ ID NO: 73095 - RNA, 21 nt, Artificial Sequence
  LRRK2 RNA guide
acuguuugagcacaauccuuc

SEQ ID NO: 73096 - RNA, 21 nt, Artificial Sequence
  LRRK2 RNA guide
agaaggauugugcucaaacag

SEQ ID NO: 73097 - RNA, 21 nt, Artificial Sequence
  LRRK2 RNA guide
aggacuguuugagcacaaucc

SEQ ID NO: 73098 - RNA, 21 nt, Artificial Sequence
  LRRK2 RNA guide
aggauugugcucaaacagucc

SEQ ID NO: 73099 - RNA, 21 nt, Artificial Sequence
  LRRK2 RNA guide
auccagaaggauugugcucaa

SEQ ID NO: 73100 - RNA, 21 nt, Artificial Sequence
  LRRK2 RNA guide
auugugcucaaacaguccuca

SEQ ID NO: 73101 - RNA, 21 nt, Artificial Sequence
  LRRK2 RNA guide
caaacaguccucaaacaggug

SEQ ID NO: 73102 - RNA, 21 nt, Artificial Sequence
  LRRK2 RNA guide
caccuguuugaggacuguuug

SEQ ID NO: 73103 - RNA, 21 nt, Artificial Sequence
  LRRK2 RNA guide
cagaaggauugugcucaaaca

SEQ ID NO: 73104 - RNA, 21 nt, Artificial Sequence
  LRRK2 RNA guide
ccagaaggauugugcucaaac

SEQ ID NO: 73105 - RNA, 21 nt, Artificial Sequence
  LRRK2 RNA guide
ccuguuugaggacuguuugag

SEQ ID NO: 73106 - RNA, 21 nt, Artificial Sequence
  LRRK2 RNA guide
cucaaacaguccucaaacagg

SEQ ID NO: 73107 - RNA, 21 nt, Artificial Sequence
  LRRK2 RNA guide
cuguuugagcacaauccuucu

SEQ ID NO: 73108 - RNA, 21 nt, Artificial Sequence
  LRRK2 RNA guide
cuguuugaggacuguuugagc

SEQ ID NO: 73109 - RNA, 21 nt, Artificial Sequence
  LRRK2 RNA guide
gaaggauugugcucaaacagu

SEQ ID NO: 73110 - RNA, 21 nt, Artificial Sequence
  LRRK2 RNA guide
gacuguuugagcacaauccuu

SEQ ID NO: 73111 - RNA, 21 nt, Artificial Sequence
  LRRK2 RNA guide
gaggacuguuugagcacaauc

SEQ ID NO: 73112 - RNA, 21 nt, Artificial Sequence
  LRRK2 RNA guide
gauugugcucaaacaguccuc

SEQ ID NO: 73113 - RNA, 21 nt, Artificial Sequence
  LRRK2 RNA guide
gcucaaacaguccucaaacag

SEQ ID NO: 73114 - RNA, 21 nt, Artificial Sequence
  LRRK2 RNA guide
ggacuguuugagcacaauccu

SEQ ID NO: 73115 - RNA, 21 nt, Artificial Sequence
  LRRK2 RNA guide
ggauugugcucaaacaguccu

SEQ ID NO: 73116 - RNA, 21 nt, Artificial Sequence
  LRRK2 RNA guide
gugcucaaacaguccucaaac

SEQ ID NO: 73117 - RNA, 21 nt, Artificial Sequence
  LRRK2 RNA guide
guuugagcacaauccuucugg

SEQ ID NO: 73118 - RNA, 21 nt, Artificial Sequence
  LRRK2 RNA guide
guuugaggacuguuugagcac

SEQ ID NO: 73119 - RNA, 21 nt, Artificial Sequence
  LRRK2 RNA guide
ucaaacaguccucaaacaggu

SEQ ID NO: 73120 - RNA, 21 nt, Artificial Sequence
  LRRK2 RNA guide
uccagaaggauugugcucaaa

SEQ ID NO: 73121 - RNA, 21 nt, Artificial Sequence
  LRRK2 RNA guide
ugaggacuguuugagcacaau

SEQ ID NO: 73122 - RNA, 21 nt, Artificial Sequence
  LRRK2 RNA guide
ugcucaaacaguccucaaaca

SEQ ID NO: 73123 - RNA, 21 nt, Artificial Sequence
  LRRK2 RNA guide
ugugcucaaacaguccucaaa

SEQ ID NO: 73124 - RNA, 21 nt, Artificial Sequence
  LRRK2 RNA guide
uguuugagcacaauccuucug

SEQ ID NO: 73125 - RNA, 21 nt, Artificial Sequence
  LRRK2 RNA guide
uguuugaggacuguuugagca

SEQ ID NO: 73126 - RNA, 21 nt, Artificial Sequence
  LRRK2 RNA guide
uugaggacuguuugagcacaa

SEQ ID NO: 73127 - RNA, 21 nt, Artificial Sequence
  LRRK2 RNA guide
uugugcucaaacaguccucaa

SEQ ID NO: 73128 - RNA, 21 nt, Artificial Sequence
  LRRK2 RNA guide
uuugagcacaauccuucugga

SEQ ID NO: 73129 - RNA, 21 nt, Artificial Sequence
  LRRK2 RNA guide
uuugaggacuguuugagcaca

SEQ ID NO: 73130 - RNA, 22 nt, Artificial Sequence
  LRRK2 RNA guide
aaacaccuguuugaggacuguu

SEQ ID NO: 73131 - RNA, 22 nt, Artificial Sequence
  LRRK2 RNA guide
aaacaguccucaaacagguguu

SEQ ID NO: 73132 - RNA, 22 nt, Artificial Sequence
  LRRK2 RNA guide
aacaccuguuugaggacuguuu

SEQ ID NO: 73133 - RNA, 22 nt, Artificial Sequence
  LRRK2 RNA guide
aaggauugugcucaaacagucc

SEQ ID NO: 73134 - RNA, 22 nt, Artificial Sequence
  LRRK2 RNA guide
aauccagaaggauugugcucaa

SEQ ID NO: 73135 - RNA, 22 nt, Artificial Sequence
  LRRK2 RNA guide
acaccuguuugaggacuguuug

SEQ ID NO: 73136 - RNA, 22 nt, Artificial Sequence
  LRRK2 RNA guide
accuguuugaggacuguuugag

SEQ ID NO: 73137 - RNA, 22 nt, Artificial Sequence
  LRRK2 RNA guide
acuguuugagcacaauccuucu

SEQ ID NO: 73138 - RNA, 22 nt, Artificial Sequence
  LRRK2 RNA guide
agaaggauugugcucaaacagu

SEQ ID NO: 73139 - RNA, 22 nt, Artificial Sequence
  LRRK2 RNA guide
aggacuguuugagcacaauccu

SEQ ID NO: 73140 - RNA, 22 nt, Artificial Sequence
  LRRK2 RNA guide
aggauugugcucaaacaguccu

SEQ ID NO: 73141 - RNA, 22 nt, Artificial Sequence
  LRRK2 RNA guide
auccagaaggauugugcucaaa

SEQ ID NO: 73142 - RNA, 22 nt, Artificial Sequence
  LRRK2 RNA guide
auugugcucaaacaguccucaa

SEQ ID NO: 73143 - RNA, 22 nt, Artificial Sequence
  LRRK2 RNA guide
caaacaguccucaaacaggugu

SEQ ID NO: 73144 - RNA, 22 nt, Artificial Sequence
  LRRK2 RNA guide
caccuguuugaggacuguuuga

SEQ ID NO: 73145 - RNA, 22 nt, Artificial Sequence
  LRRK2 RNA guide
cagaaggauugugcucaaacag

SEQ ID NO: 73146 - RNA, 22 nt, Artificial Sequence
  LRRK2 RNA guide
ccagaaggauugugcucaaaca

SEQ ID NO: 73147 - RNA, 22 nt, Artificial Sequence
  LRRK2 RNA guide
ccuguuugaggacuguuugagc

SEQ ID NO: 73148 - RNA, 22 nt, Artificial Sequence
  LRRK2 RNA guide
cucaaacaguccucaaacaggu

SEQ ID NO: 73149 - RNA, 22 nt, Artificial Sequence
  LRRK2 RNA guide
cuguuugagcacaauccuucug

SEQ ID NO: 73150 - RNA, 22 nt, Artificial Sequence
  LRRK2 RNA guide
cuguuugaggacuguuugagca

SEQ ID NO: 73151 - RNA, 22 nt, Artificial Sequence
  LRRK2 RNA guide
gaaggauugugcucaaacaguc

SEQ ID NO: 73152 - RNA, 22 nt, Artificial Sequence
  LRRK2 RNA guide
gacuguuugagcacaauccuuc

SEQ ID NO: 73153 - RNA, 22 nt, Artificial Sequence
  LRRK2 RNA guide
gaggacuguuugagcacaaucc

SEQ ID NO: 73154 - RNA, 22 nt, Artificial Sequence
  LRRK2 RNA guide
gauugugcucaaacaguccuca

SEQ ID NO: 73155 - RNA, 22 nt, Artificial Sequence
  LRRK2 RNA guide
gcucaaacaguccucaaacagg

SEQ ID NO: 73156 - RNA, 22 nt, Artificial Sequence
  LRRK2 RNA guide
ggacuguuugagcacaauccuu

SEQ ID NO: 73157 - RNA, 22 nt, Artificial Sequence
  LRRK2 RNA guide
ggauugugcucaaacaguccuc

SEQ ID NO: 73158 - RNA, 22 nt, Artificial Sequence
  LRRK2 RNA guide
gugcucaaacaguccucaaaca

SEQ ID NO: 73159 - RNA, 22 nt, Artificial Sequence
  LRRK2 RNA guide
guuugagcacaauccuucugga

SEQ ID NO: 73160 - RNA, 22 nt, Artificial Sequence
  LRRK2 RNA guide
guuugaggacuguuugagcaca

SEQ ID NO: 73161 - RNA, 22 nt, Artificial Sequence
  LRRK2 RNA guide
ucaaacaguccucaaacaggug

SEQ ID NO: 73162 - RNA, 22 nt, Artificial Sequence
  LRRK2 RNA guide
uccagaaggauugugcucaaac

SEQ ID NO: 73163 - RNA, 22 nt, Artificial Sequence
  LRRK2 RNA guide
ugaggacuguuugagcacaauc

SEQ ID NO: 73164 - RNA, 22 nt, Artificial Sequence
  LRRK2 RNA guide
ugcucaaacaguccucaaacag

SEQ ID NO: 73165 - RNA, 22 nt, Artificial Sequence
  LRRK2 RNA guide
ugugcucaaacaguccucaaac

SEQ ID NO: 73166 - RNA, 22 nt, Artificial Sequence
  LRRK2 RNA guide
uguuugagcacaauccuucugg

SEQ ID NO: 73167 - RNA, 22 nt, Artificial Sequence
  LRRK2 RNA guide
uguuugaggacuguuugagcac

SEQ ID NO: 73168 - RNA, 22 nt, Artificial Sequence
  LRRK2 RNA guide
uugaggacuguuugagcacaau

SEQ ID NO: 73169 - RNA, 22 nt, Artificial Sequence
  LRRK2 RNA guide
uugugcucaaacaguccucaaa

SEQ ID NO: 73170 - RNA, 22 nt, Artificial Sequence
  LRRK2 RNA guide
uuugagcacaauccuucuggau

SEQ ID NO: 73171 - RNA, 22 nt, Artificial Sequence
  LRRK2 RNA guide
uuugaggacuguuugagcacaa

SEQ ID NO: 73172 - RNA, 20 nt, Artificial Sequence
  LRRK2 RNA guide
aaaugacuggcccucauaga

SEQ ID NO: 73173 - RNA, 20 nt, Artificial Sequence
  LRRK2 RNA guide
aaugacuggcccucauagau

SEQ ID NO: 73174 - RNA, 20 nt, Artificial Sequence
  LRRK2 RNA guide
acaaauauguacuagguauc

SEQ ID NO: 73175 - RNA, 20 nt, Artificial Sequence
  LRRK2 RNA guide
accuaguacauauuugucaa

SEQ ID NO: 73176 - RNA, 20 nt, Artificial Sequence
  LRRK2 RNA guide
acuagguaucuaugagggcc

SEQ ID NO: 73177 - RNA, 20 nt, Artificial Sequence
  LRRK2 RNA guide
acuggcccucauagauaccu

SEQ ID NO: 73178 - RNA, 20 nt, Artificial Sequence
  LRRK2 RNA guide
agauaccuaguacauauuug

SEQ ID NO: 73179 - RNA, 20 nt, Artificial Sequence
  LRRK2 RNA guide
agguaucuaugagggccagu

SEQ ID NO: 73180 - RNA, 20 nt, Artificial Sequence
  LRRK2 RNA guide
auaccuaguacauauuuguc

SEQ ID NO: 73181 - RNA, 20 nt, Artificial Sequence
  LRRK2 RNA guide
auauguacuagguaucuaug

SEQ ID NO: 73182 - RNA, 20 nt, Artificial Sequence
  LRRK2 RNA guide
augacuggcccucauagaua

SEQ ID NO: 73183 - RNA, 20 nt, Artificial Sequence
  LRRK2 RNA guide
auguacuagguaucuaugag

SEQ ID NO: 73184 - RNA, 20 nt, Artificial Sequence
  LRRK2 RNA guide
caaauauguacuagguaucu

SEQ ID NO: 73185 - RNA, 20 nt, Artificial Sequence
  LRRK2 RNA guide
cauagauaccuaguacauau

SEQ ID NO: 73186 - RNA, 20 nt, Artificial Sequence
  LRRK2 RNA guide
cccucauagauaccuaguac

SEQ ID NO: 73187 - RNA, 20 nt, Artificial Sequence
  LRRK2 RNA guide
ccuaguacauauuugucaaa

SEQ ID NO: 73188 - RNA, 20 nt, Artificial Sequence
  LRRK2 RNA guide
ccucauagauaccuaguaca

SEQ ID NO: 73189 - RNA, 20 nt, Artificial Sequence
  LRRK2 RNA guide
cuagguaucuaugagggcca

SEQ ID NO: 73190 - RNA, 20 nt, Artificial Sequence
  LRRK2 RNA guide
cucauagauaccuaguacau

SEQ ID NO: 73191 - RNA, 20 nt, Artificial Sequence
  LRRK2 RNA guide
cuggcccucauagauaccua

SEQ ID NO: 73192 - RNA, 20 nt, Artificial Sequence
  LRRK2 RNA guide
gacaaauauguacuagguau

SEQ ID NO: 73193 - RNA, 20 nt, Artificial Sequence
  LRRK2 RNA guide
gacuggcccucauagauacc

SEQ ID NO: 73194 - RNA, 20 nt, Artificial Sequence
  LRRK2 RNA guide
gauaccuaguacauauuugu

SEQ ID NO: 73195 - RNA, 20 nt, Artificial Sequence
  LRRK2 RNA guide
gcccucauagauaccuagua

SEQ ID NO: 73196 - RNA, 20 nt, Artificial Sequence
  LRRK2 RNA guide
ggcccucauagauaccuagu

SEQ ID NO: 73197 - RNA, 20 nt, Artificial Sequence
  LRRK2 RNA guide
guacuagguaucuaugaggg

SEQ ID NO: 73198 - RNA, 20 nt, Artificial Sequence
  LRRK2 RNA guide
uaaaugacuggcccucauag

SEQ ID NO: 73199 - RNA, 20 nt, Artificial Sequence
  LRRK2 RNA guide
uaccuaguacauauuuguca

SEQ ID NO: 73200 - RNA, 20 nt, Artificial Sequence
  LRRK2 RNA guide
uacuagguaucuaugagggc

SEQ ID NO: 73201 - RNA, 20 nt, Artificial Sequence
  LRRK2 RNA guide
uagguaucuaugagggccag

SEQ ID NO: 73202 - RNA, 20 nt, Artificial Sequence
  LRRK2 RNA guide
uauguacuagguaucuauga

SEQ ID NO: 73203 - RNA, 20 nt, Artificial Sequence
  LRRK2 RNA guide
ucauagauaccuaguacaua

SEQ ID NO: 73204 - RNA, 20 nt, Artificial Sequence
  LRRK2 RNA guide
ugacaaauauguacuaggua

SEQ ID NO: 73205 - RNA, 20 nt, Artificial Sequence
  LRRK2 RNA guide
ugacuggcccucauagauac

SEQ ID NO: 73206 - RNA, 20 nt, Artificial Sequence
  LRRK2 RNA guide
uggcccucauagauaccuag

SEQ ID NO: 73207 - RNA, 20 nt, Artificial Sequence
  LRRK2 RNA guide
uguacuagguaucuaugagg

SEQ ID NO: 73208 - RNA, 20 nt, Artificial Sequence
  LRRK2 RNA guide
uugacaaauauguacuaggu

SEQ ID NO: 73209 - RNA, 20 nt, Artificial Sequence
  LRRK2 RNA guide
uuugacaaauauguacuagg

SEQ ID NO: 73210 - RNA, 21 nt, Artificial Sequence
  LRRK2 RNA guide
aaaugacuggcccucauagau

SEQ ID NO: 73211 - RNA, 21 nt, Artificial Sequence
  LRRK2 RNA guide
aaugacuggcccucauagaua

SEQ ID NO: 73212 - RNA, 21 nt, Artificial Sequence
  LRRK2 RNA guide
acuagguaucuaugagggcca

SEQ ID NO: 73213 - RNA, 21 nt, Artificial Sequence
  LRRK2 RNA guide
acuggcccucauagauaccua

SEQ ID NO: 73214 - RNA, 21 nt, Artificial Sequence
  LRRK2 RNA guide
agguaucuaugagggccaguc

SEQ ID NO: 73215 - RNA, 21 nt, Artificial Sequence
  LRRK2 RNA guide
augacuggcccucauagauac

SEQ ID NO: 73216 - RNA, 21 nt, Artificial Sequence
  LRRK2 RNA guide
auguacuagguaucuaugagg

SEQ ID NO: 73217 - RNA, 21 nt, Artificial Sequence
  LRRK2 RNA guide
cccucauagauaccuaguaca

SEQ ID NO: 73218 - RNA, 21 nt, Artificial Sequence
  LRRK2 RNA guide
ccucauagauaccuaguacau

SEQ ID NO: 73219 - RNA, 21 nt, Artificial Sequence
  LRRK2 RNA guide
cuaaaugacuggcccucauag

SEQ ID NO: 73220 - RNA, 21 nt, Artificial Sequence
  LRRK2 RNA guide
cuagguaucuaugagggccag

SEQ ID NO: 73221 - RNA, 21 nt, Artificial Sequence
  LRRK2 RNA guide
cucauagauaccuaguacaua

SEQ ID NO: 73222 - RNA, 21 nt, Artificial Sequence
  LRRK2 RNA guide
cuggcccucauagauaccuag

SEQ ID NO: 73223 - RNA, 21 nt, Artificial Sequence
  LRRK2 RNA guide
gacaaauauguacuagguauc

SEQ ID NO: 73224 - RNA, 21 nt, Artificial Sequence
  LRRK2 RNA guide
gacuggcccucauagauaccu

SEQ ID NO: 73225 - RNA, 21 nt, Artificial Sequence
  LRRK2 RNA guide
gauaccuaguacauauuuguc

SEQ ID NO: 73226 - RNA, 21 nt, Artificial Sequence
  LRRK2 RNA guide
gcccucauagauaccuaguac

SEQ ID NO: 73227 - RNA, 21 nt, Artificial Sequence
  LRRK2 RNA guide
ggcccucauagauaccuagua

SEQ ID NO: 73228 - RNA, 21 nt, Artificial Sequence
  LRRK2 RNA guide
guacuagguaucuaugagggc

SEQ ID NO: 73229 - RNA, 21 nt, Artificial Sequence
  LRRK2 RNA guide
uaaaugacuggcccucauaga

SEQ ID NO: 73230 - RNA, 21 nt, Artificial Sequence
  LRRK2 RNA guide
uacuagguaucuaugagggcc

SEQ ID NO: 73231 - RNA, 21 nt, Artificial Sequence
  LRRK2 RNA guide
uagguaucuaugagggccagu

SEQ ID NO: 73232 - RNA, 21 nt, Artificial Sequence
  LRRK2 RNA guide
uauguacuagguaucuaugag

SEQ ID NO: 73233 - RNA, 21 nt, Artificial Sequence
  LRRK2 RNA guide
ugacuggcccucauagauacc

SEQ ID NO: 73234 - RNA, 21 nt, Artificial Sequence
  LRRK2 RNA guide
uggcccucauagauaccuagu

SEQ ID NO: 73235 - RNA, 21 nt, Artificial Sequence
  LRRK2 RNA guide
uguacuagguaucuaugaggg

SEQ ID NO: 73236 - RNA, 22 nt, Artificial Sequence
  LRRK2 RNA guide
aaaugacuggcccucauagaua

SEQ ID NO: 73237 - RNA, 22 nt, Artificial Sequence
  LRRK2 RNA guide
aaugacuggcccucauagauac

SEQ ID NO: 73238 - RNA, 22 nt, Artificial Sequence
  LRRK2 RNA guide
acuaaaugacuggcccucauag

SEQ ID NO: 73239 - RNA, 22 nt, Artificial Sequence
  LRRK2 RNA guide
acuagguaucuaugagggccag

SEQ ID NO: 73240 - RNA, 22 nt, Artificial Sequence
  LRRK2 RNA guide
acuggcccucauagauaccuag

SEQ ID NO: 73241 - RNA, 22 nt, Artificial Sequence
  LRRK2 RNA guide
agauaccuaguacauauuuguc

SEQ ID NO: 73242 - RNA, 22 nt, Artificial Sequence
  LRRK2 RNA guide
agguaucuaugagggccaguca

SEQ ID NO: 73243 - RNA, 22 nt, Artificial Sequence
  LRRK2 RNA guide
auauguacuagguaucuaugag

SEQ ID NO: 73244 - RNA, 22 nt, Artificial Sequence
  LRRK2 RNA guide
augacuggcccucauagauacc

SEQ ID NO: 73245 - RNA, 22 nt, Artificial Sequence
  LRRK2 RNA guide
auguacuagguaucuaugaggg

SEQ ID NO: 73246 - RNA, 22 nt, Artificial Sequence
  LRRK2 RNA guide
cccucauagauaccuaguacau

SEQ ID NO: 73247 - RNA, 22 nt, Artificial Sequence
  LRRK2 RNA guide
ccucauagauaccuaguacaua

SEQ ID NO: 73248 - RNA, 22 nt, Artificial Sequence
  LRRK2 RNA guide
cuaaaugacuggcccucauaga

SEQ ID NO: 73249 - RNA, 22 nt, Artificial Sequence
  LRRK2 RNA guide
cuagguaucuaugagggccagu

SEQ ID NO: 73250 - RNA, 22 nt, Artificial Sequence
  LRRK2 RNA guide
cucauagauaccuaguacauau

SEQ ID NO: 73251 - RNA, 22 nt, Artificial Sequence
  LRRK2 RNA guide
cuggcccucauagauaccuagu

SEQ ID NO: 73252 - RNA, 22 nt, Artificial Sequence
  LRRK2 RNA guide
gacaaauauguacuagguaucu

SEQ ID NO: 73253 - RNA, 22 nt, Artificial Sequence
  LRRK2 RNA guide
gacuggcccucauagauaccua

SEQ ID NO: 73254 - RNA, 22 nt, Artificial Sequence
  LRRK2 RNA guide
gauaccuaguacauauuuguca

SEQ ID NO: 73255 - RNA, 22 nt, Artificial Sequence
  LRRK2 RNA guide
gcccucauagauaccuaguaca

SEQ ID NO: 73256 - RNA, 22 nt, Artificial Sequence
  LRRK2 RNA guide
ggcccucauagauaccuaguac

SEQ ID NO: 73257 - RNA, 22 nt, Artificial Sequence
  LRRK2 RNA guide
guacuagguaucuaugagggcc

SEQ ID NO: 73258 - RNA, 22 nt, Artificial Sequence
  LRRK2 RNA guide
uaaaugacuggcccucauagau

SEQ ID NO: 73259 - RNA, 22 nt, Artificial Sequence
  LRRK2 RNA guide
uacuagguaucuaugagggcca

SEQ ID NO: 73260 - RNA, 22 nt, Artificial Sequence
  LRRK2 RNA guide
uagguaucuaugagggccaguc

SEQ ID NO: 73261 - RNA, 22 nt, Artificial Sequence
  LRRK2 RNA guide
uauguacuagguaucuaugagg

SEQ ID NO: 73262 - RNA, 22 nt, Artificial Sequence
  LRRK2 RNA guide
ugacaaauauguacuagguauc

SEQ ID NO: 73263 - RNA, 22 nt, Artificial Sequence
  LRRK2 RNA guide
ugacuggcccucauagauaccu

SEQ ID NO: 73264 - RNA, 22 nt, Artificial Sequence
  LRRK2 RNA guide
uggcccucauagauaccuagua

SEQ ID NO: 73265 - RNA, 22 nt, Artificial Sequence
  LRRK2 RNA guide
uguacuagguaucuaugagggc

SEQ ID NO: 73266 - RNA, 20 nt, Artificial Sequence
  LRRK2 RNA guide
aaguaucuaugagggccagu

SEQ ID NO: 73267 - RNA, 20 nt, Artificial Sequence
  LRRK2 RNA guide
acuaaguaucuaugagggcc

SEQ ID NO: 73268 - RNA, 20 nt, Artificial Sequence
  LRRK2 RNA guide
acuggcccucauagauacuu

SEQ ID NO: 73269 - RNA, 20 nt, Artificial Sequence
  LRRK2 RNA guide
auguacuaaguaucuaugag

SEQ ID NO: 73270 - RNA, 20 nt, Artificial Sequence
  LRRK2 RNA guide
cccucauagauacuuaguac

SEQ ID NO: 73271 - RNA, 20 nt, Artificial Sequence
  LRRK2 RNA guide
ccucauagauacuuaguaca

SEQ ID NO: 73272 - RNA, 20 nt, Artificial Sequence
  LRRK2 RNA guide
cuaaguaucuaugagggcca

SEQ ID NO: 73273 - RNA, 20 nt, Artificial Sequence
  LRRK2 RNA guide
cucauagauacuuaguacau

SEQ ID NO: 73274 - RNA, 20 nt, Artificial Sequence
  LRRK2 RNA guide
cuggcccucauagauacuua

SEQ ID NO: 73275 - RNA, 20 nt, Artificial Sequence
  LRRK2 RNA guide
gacuggcccucauagauacu

SEQ ID NO: 73276 - RNA, 20 nt, Artificial Sequence
  LRRK2 RNA guide
gcccucauagauacuuagua

SEQ ID NO: 73277 - RNA, 20 nt, Artificial Sequence
  LRRK2 RNA guide
ggcccucauagauacuuagu

SEQ ID NO: 73278 - RNA, 20 nt, Artificial Sequence
  LRRK2 RNA guide
guacuaaguaucuaugaggg

SEQ ID NO: 73279 - RNA, 20 nt, Artificial Sequence
  LRRK2 RNA guide
uaaguaucuaugagggccag

SEQ ID NO: 73280 - RNA, 20 nt, Artificial Sequence
  LRRK2 RNA guide
uacuaaguaucuaugagggc

SEQ ID NO: 73281 - RNA, 20 nt, Artificial Sequence
  LRRK2 RNA guide
uggcccucauagauacuuag

SEQ ID NO: 73282 - RNA, 20 nt, Artificial Sequence
  LRRK2 RNA guide
uguacuaaguaucuaugagg

SEQ ID NO: 73283 - RNA, 21 nt, Artificial Sequence
  LRRK2 RNA guide
aaguaucuaugagggccaguc

SEQ ID NO: 73284 - RNA, 21 nt, Artificial Sequence
  LRRK2 RNA guide
acuaaguaucuaugagggcca

SEQ ID NO: 73285 - RNA, 21 nt, Artificial Sequence
  LRRK2 RNA guide
acuggcccucauagauacuua

SEQ ID NO: 73286 - RNA, 21 nt, Artificial Sequence
  LRRK2 RNA guide
auguacuaaguaucuaugagg

SEQ ID NO: 73287 - RNA, 21 nt, Artificial Sequence
  LRRK2 RNA guide
cccucauagauacuuaguaca

SEQ ID NO: 73288 - RNA, 21 nt, Artificial Sequence
  LRRK2 RNA guide
ccucauagauacuuaguacau

SEQ ID NO: 73289 - RNA, 21 nt, Artificial Sequence
  LRRK2 RNA guide
cuaaguaucuaugagggccag

SEQ ID NO: 73290 - RNA, 21 nt, Artificial Sequence
  LRRK2 RNA guide
cuggcccucauagauacuuag

SEQ ID NO: 73291 - RNA, 21 nt, Artificial Sequence
  LRRK2 RNA guide
gacuggcccucauagauacuu

SEQ ID NO: 73292 - RNA, 21 nt, Artificial Sequence
  LRRK2 RNA guide
gcccucauagauacuuaguac

SEQ ID NO: 73293 - RNA, 21 nt, Artificial Sequence
  LRRK2 RNA guide
ggcccucauagauacuuagua

SEQ ID NO: 73294 - RNA, 21 nt, Artificial Sequence
  LRRK2 RNA guide
guacuaaguaucuaugagggc

SEQ ID NO: 73295 - RNA, 21 nt, Artificial Sequence
  LRRK2 RNA guide
uaaguaucuaugagggccagu

SEQ ID NO: 73296 - RNA, 21 nt, Artificial Sequence
  LRRK2 RNA guide
uacuaaguaucuaugagggcc

SEQ ID NO: 73297 - RNA, 21 nt, Artificial Sequence
  LRRK2 RNA guide
ugacuggcccucauagauacu

SEQ ID NO: 73298 - RNA, 21 nt, Artificial Sequence
  LRRK2 RNA guide
uggcccucauagauacuuagu

SEQ ID NO: 73299 - RNA, 21 nt, Artificial Sequence
  LRRK2 RNA guide
uguacuaaguaucuaugaggg

SEQ ID NO: 73300 - RNA, 22 nt, Artificial Sequence
  LRRK2 RNA guide
aaguaucuaugagggccaguca

SEQ ID NO: 73301 - RNA, 22 nt, Artificial Sequence
  LRRK2 RNA guide
acuaaguaucuaugagggccag

SEQ ID NO: 73302 - RNA, 22 nt, Artificial Sequence
  LRRK2 RNA guide
acuggcccucauagauacuuag

SEQ ID NO: 73303 - RNA, 22 nt, Artificial Sequence
  LRRK2 RNA guide
augacuggcccucauagauacu

SEQ ID NO: 73304 - RNA, 22 nt, Artificial Sequence
  LRRK2 RNA guide
auguacuaaguaucuaugaggg

SEQ ID NO: 73305 - RNA, 22 nt, Artificial Sequence
  LRRK2 RNA guide
cccucauagauacuuaguacau

SEQ ID NO: 73306 - RNA, 22 nt, Artificial Sequence
  LRRK2 RNA guide
ccucauagauacuuaguacaua

SEQ ID NO: 73307 - RNA, 22 nt, Artificial Sequence
  LRRK2 RNA guide
cuaaguaucuaugagggccagu

SEQ ID NO: 73308 - RNA, 22 nt, Artificial Sequence
  LRRK2 RNA guide
cuggcccucauagauacuuagu

SEQ ID NO: 73309 - RNA, 22 nt, Artificial Sequence
  LRRK2 RNA guide
gacuggcccucauagauacuua

SEQ ID NO: 73310 - RNA, 22 nt, Artificial Sequence
  LRRK2 RNA guide
gcccucauagauacuuaguaca

SEQ ID NO: 73311 - RNA, 22 nt, Artificial Sequence
  LRRK2 RNA guide
ggcccucauagauacuuaguac

SEQ ID NO: 73312 - RNA, 22 nt, Artificial Sequence
  LRRK2 RNA guide
guacuaaguaucuaugagggcc

SEQ ID NO: 73313 - RNA, 22 nt, Artificial Sequence
  LRRK2 RNA guide
uaaguaucuaugagggccaguc

SEQ ID NO: 73314 - RNA, 22 nt, Artificial Sequence
  LRRK2 RNA guide
uacuaaguaucuaugagggcca

SEQ ID NO: 73315 - RNA, 22 nt, Artificial Sequence
  LRRK2 RNA guide
uauguacuaaguaucuaugagg

SEQ ID NO: 73316 - RNA, 22 nt, Artificial Sequence
  LRRK2 RNA guide
ugacuggcccucauagauacuu

SEQ ID NO: 73317 - RNA, 22 nt, Artificial Sequence
  LRRK2 RNA guide
uggcccucauagauacuuagua

SEQ ID NO: 73318 - RNA, 22 nt, Artificial Sequence
  LRRK2 RNA guide
uguacuaaguaucuaugagggc

SEQ ID NO: 73319 - RNA, 20 nt, Artificial Sequence
  LRRK2 RNA guide
aaaagcuauuuugcuagucu

SEQ ID NO: 73320 - RNA, 20 nt, Artificial Sequence
  LRRK2 RNA guide
aaagcuauuuugcuagucua

SEQ ID NO: 73321 - RNA, 20 nt, Artificial Sequence
  LRRK2 RNA guide
aagcuauuuugcuagucuau

SEQ ID NO: 73322 - RNA, 20 nt, Artificial Sequence
  LRRK2 RNA guide
aauagacuagcaaaauagcu

SEQ ID NO: 73323 - RNA, 20 nt, Artificial Sequence
  LRRK2 RNA guide
acuagcaaaauagcuuuuga

SEQ ID NO: 73324 - RNA, 20 nt, Artificial Sequence
  LRRK2 RNA guide
agcuauuuugcuagucuauu

SEQ ID NO: 73325 - RNA, 20 nt, Artificial Sequence
  LRRK2 RNA guide
agcuuuuaauagacuagcaa

SEQ ID NO: 73326 - RNA, 20 nt, Artificial Sequence
  LRRK2 RNA guide
auagacuagcaaaauagcuu

SEQ ID NO: 73327 - RNA, 20 nt, Artificial Sequence
  LRRK2 RNA guide
auagcuuuuaauagacuagc

SEQ ID NO: 73328 - RNA, 20 nt, Artificial Sequence
  LRRK2 RNA guide
caaaagcuauuuugcuaguc

SEQ ID NO: 73329 - RNA, 20 nt, Artificial Sequence
  LRRK2 RNA guide
cuagcaaaauagcuuuugaa

SEQ ID NO: 73330 - RNA, 20 nt, Artificial Sequence
  LRRK2 RNA guide
gacuagcaaaauagcuuuug

SEQ ID NO: 73331 - RNA, 20 nt, Artificial Sequence
  LRRK2 RNA guide
gcuagucuauuaaaagcuau

SEQ ID NO: 73332 - RNA, 20 nt, Artificial Sequence
  LRRK2 RNA guide
gcuauuuugcuagucuauua

SEQ ID NO: 73333 - RNA, 20 nt, Artificial Sequence
  LRRK2 RNA guide
gcuuuuaauagacuagcaaa

SEQ ID NO: 73334 - RNA, 20 nt, Artificial Sequence
  LRRK2 RNA guide
uaauagacuagcaaaauagc

SEQ ID NO: 73335 - RNA, 20 nt, Artificial Sequence
  LRRK2 RNA guide
uagacuagcaaaauagcuuu

SEQ ID NO: 73336 - RNA, 20 nt, Artificial Sequence
  LRRK2 RNA guide
uagcuuuuaauagacuagca

SEQ ID NO: 73337 - RNA, 20 nt, Artificial Sequence
  LRRK2 RNA guide
ucaaaagcuauuuugcuagu

SEQ ID NO: 73338 - RNA, 20 nt, Artificial Sequence
  LRRK2 RNA guide
ugcuagucuauuaaaagcua

SEQ ID NO: 73339 - RNA, 20 nt, Artificial Sequence
  LRRK2 RNA guide
uucaaaagcuauuuugcuag

SEQ ID NO: 73340 - RNA, 20 nt, Artificial Sequence
  LRRK2 RNA guide
uugcuagucuauuaaaagcu

SEQ ID NO: 73341 - RNA, 20 nt, Artificial Sequence
  LRRK2 RNA guide
uuugcuagucuauuaaaagc

SEQ ID NO: 73342 - RNA, 21 nt, Artificial Sequence
  LRRK2 RNA guide
agacuagcaaaauagcuuuug

SEQ ID NO: 73343 - RNA, 21 nt, Artificial Sequence
  LRRK2 RNA guide
caaaagcuauuuugcuagucu

SEQ ID NO: 73344 - RNA, 21 nt, Artificial Sequence
  LRRK2 RNA guide
gacuagcaaaauagcuuuuga

SEQ ID NO: 73345 - RNA, 21 nt, Artificial Sequence
  LRRK2 RNA guide
ucaaaagcuauuuugcuaguc

SEQ ID NO: 73346 - RNA, 22 nt, Artificial Sequence
  LRRK2 RNA guide
agacuagcaaaauagcuuuuga

SEQ ID NO: 73347 - RNA, 22 nt, Artificial Sequence
  LRRK2 RNA guide
caaaagcuauuuugcuagucua

SEQ ID NO: 73348 - RNA, 22 nt, Artificial Sequence
  LRRK2 RNA guide
gacuagcaaaauagcuuuugaa

SEQ ID NO: 73349 - RNA, 22 nt, Artificial Sequence
  LRRK2 RNA guide
uagacuagcaaaauagcuuuug

SEQ ID NO: 73350 - RNA, 22 nt, Artificial Sequence
  LRRK2 RNA guide
ucaaaagcuauuuugcuagucu

SEQ ID NO: 73351 - RNA, 22 nt, Artificial Sequence
  LRRK2 RNA guide
uucaaaagcuauuuugcuaguc

SEQ ID NO: 73352 - RNA, 20 nt, Artificial Sequence
  LRRK2 RNA guide
aaaagcuauuuugccagucu

SEQ ID NO: 73353 - RNA, 20 nt, Artificial Sequence
  LRRK2 RNA guide
aaagcuauuuugccagucua

SEQ ID NO: 73354 - RNA, 20 nt, Artificial Sequence
  LRRK2 RNA guide
aagcuauuuugccagucuau

SEQ ID NO: 73355 - RNA, 20 nt, Artificial Sequence
  LRRK2 RNA guide
aauagacuggcaaaauagcu

SEQ ID NO: 73356 - RNA, 20 nt, Artificial Sequence
  LRRK2 RNA guide
aauagcuuuuaauagacugg

SEQ ID NO: 73357 - RNA, 20 nt, Artificial Sequence
  LRRK2 RNA guide
acuggcaaaauagcuuuuga

SEQ ID NO: 73358 - RNA, 20 nt, Artificial Sequence
  LRRK2 RNA guide
agacuggcaaaauagcuuuu

SEQ ID NO: 73359 - RNA, 20 nt, Artificial Sequence
  LRRK2 RNA guide
agcuauuuugccagucuauu

SEQ ID NO: 73360 - RNA, 20 nt, Artificial Sequence
  LRRK2 RNA guide
agcuuuuaauagacuggcaa

SEQ ID NO: 73361 - RNA, 20 nt, Artificial Sequence
  LRRK2 RNA guide
auagacuggcaaaauagcuu

SEQ ID NO: 73362 - RNA, 20 nt, Artificial Sequence
  LRRK2 RNA guide
auagcuuuuaauagacuggc

SEQ ID NO: 73363 - RNA, 20 nt, Artificial Sequence
  LRRK2 RNA guide
auuucaaaagcuauuuugcc

SEQ ID NO: 73364 - RNA, 20 nt, Artificial Sequence
  LRRK2 RNA guide
caaaagcuauuuugccaguc

SEQ ID NO: 73365 - RNA, 20 nt, Artificial Sequence
  LRRK2 RNA guide
ccagucuauuaaaagcuauu

SEQ ID NO: 73366 - RNA, 20 nt, Artificial Sequence
  LRRK2 RNA guide
cuauuuugccagucuauuaa

SEQ ID NO: 73367 - RNA, 20 nt, Artificial Sequence
  LRRK2 RNA guide
cuggcaaaauagcuuuugaa

SEQ ID NO: 73368 - RNA, 20 nt, Artificial Sequence
  LRRK2 RNA guide
cuuuuaauagacuggcaaaa

SEQ ID NO: 73369 - RNA, 20 nt, Artificial Sequence
  LRRK2 RNA guide
gacuggcaaaauagcuuuug

SEQ ID NO: 73370 - RNA, 20 nt, Artificial Sequence
  LRRK2 RNA guide
gccagucuauuaaaagcuau

SEQ ID NO: 73371 - RNA, 20 nt, Artificial Sequence
  LRRK2 RNA guide
gcuauuuugccagucuauua

SEQ ID NO: 73372 - RNA, 20 nt, Artificial Sequence
  LRRK2 RNA guide
gcuuuuaauagacuggcaaa

SEQ ID NO: 73373 - RNA, 20 nt, Artificial Sequence
  LRRK2 RNA guide
uaauagacuggcaaaauagc

SEQ ID NO: 73374 - RNA, 20 nt, Artificial Sequence
  LRRK2 RNA guide
uagacuggcaaaauagcuuu

SEQ ID NO: 73375 - RNA, 20 nt, Artificial Sequence
  LRRK2 RNA guide
uagcuuuuaauagacuggca

SEQ ID NO: 73376 - RNA, 20 nt, Artificial Sequence
  LRRK2 RNA guide
ucaaaagcuauuuugccagu

SEQ ID NO: 73377 - RNA, 20 nt, Artificial Sequence
  LRRK2 RNA guide
ugccagucuauuaaaagcua

SEQ ID NO: 73378 - RNA, 20 nt, Artificial Sequence
  LRRK2 RNA guide
uggcaaaauagcuuuugaaa

SEQ ID NO: 73379 - RNA, 20 nt, Artificial Sequence
  LRRK2 RNA guide
uuaauagacuggcaaaauag

SEQ ID NO: 73380 - RNA, 20 nt, Artificial Sequence
  LRRK2 RNA guide
uucaaaagcuauuuugccag

SEQ ID NO: 73381 - RNA, 20 nt, Artificial Sequence
  LRRK2 RNA guide
uugccagucuauuaaaagcu

SEQ ID NO: 73382 - RNA, 20 nt, Artificial Sequence
  LRRK2 RNA guide
uuucaaaagcuauuuugcca

SEQ ID NO: 73383 - RNA, 20 nt, Artificial Sequence
  LRRK2 RNA guide
uuugccagucuauuaaaagc

SEQ ID NO: 73384 - RNA, 20 nt, Artificial Sequence
  LRRK2 RNA guide
uuuugccagucuauuaaaag

SEQ ID NO: 73385 - RNA, 21 nt, Artificial Sequence
  LRRK2 RNA guide
aaaagcuauuuugccagucua

SEQ ID NO: 73386 - RNA, 21 nt, Artificial Sequence
  LRRK2 RNA guide
aaagcuauuuugccagucuau

SEQ ID NO: 73387 - RNA, 21 nt, Artificial Sequence
  LRRK2 RNA guide
aagcuauuuugccagucuauu

SEQ ID NO: 73388 - RNA, 21 nt, Artificial Sequence
  LRRK2 RNA guide
aauagacuggcaaaauagcuu

SEQ ID NO: 73389 - RNA, 21 nt, Artificial Sequence
  LRRK2 RNA guide
aauagcuuuuaauagacuggc

SEQ ID NO: 73390 - RNA, 21 nt, Artificial Sequence
  LRRK2 RNA guide
acuggcaaaauagcuuuugaa

SEQ ID NO: 73391 - RNA, 21 nt, Artificial Sequence
  LRRK2 RNA guide
agacuggcaaaauagcuuuug

SEQ ID NO: 73392 - RNA, 21 nt, Artificial Sequence
  LRRK2 RNA guide
agcuauuuugccagucuauua

SEQ ID NO: 73393 - RNA, 21 nt, Artificial Sequence
  LRRK2 RNA guide
agcuuuuaauagacuggcaaa

SEQ ID NO: 73394 - RNA, 21 nt, Artificial Sequence
  LRRK2 RNA guide
auagacuggcaaaauagcuuu

SEQ ID NO: 73395 - RNA, 21 nt, Artificial Sequence
  LRRK2 RNA guide
auagcuuuuaauagacuggca

SEQ ID NO: 73396 - RNA, 21 nt, Artificial Sequence
  LRRK2 RNA guide
caaaagcuauuuugccagucu

SEQ ID NO: 73397 - RNA, 21 nt, Artificial Sequence
  LRRK2 RNA guide
cuggcaaaauagcuuuugaaa

SEQ ID NO: 73398 - RNA, 21 nt, Artificial Sequence
  LRRK2 RNA guide
gacuggcaaaauagcuuuuga

SEQ ID NO: 73399 - RNA, 21 nt, Artificial Sequence
  LRRK2 RNA guide
gccagucuauuaaaagcuauu

SEQ ID NO: 73400 - RNA, 21 nt, Artificial Sequence
  LRRK2 RNA guide
gcuauuuugccagucuauuaa

SEQ ID NO: 73401 - RNA, 21 nt, Artificial Sequence
  LRRK2 RNA guide
gcuuuuaauagacuggcaaaa

SEQ ID NO: 73402 - RNA, 21 nt, Artificial Sequence
  LRRK2 RNA guide
uaauagacuggcaaaauagcu

SEQ ID NO: 73403 - RNA, 21 nt, Artificial Sequence
  LRRK2 RNA guide
uagacuggcaaaauagcuuuu

SEQ ID NO: 73404 - RNA, 21 nt, Artificial Sequence
  LRRK2 RNA guide
uagcuuuuaauagacuggcaa

SEQ ID NO: 73405 - RNA, 21 nt, Artificial Sequence
  LRRK2 RNA guide
ucaaaagcuauuuugccaguc

SEQ ID NO: 73406 - RNA, 21 nt, Artificial Sequence
  LRRK2 RNA guide
ugccagucuauuaaaagcuau

SEQ ID NO: 73407 - RNA, 21 nt, Artificial Sequence
  LRRK2 RNA guide
uuaauagacuggcaaaauagc

SEQ ID NO: 73408 - RNA, 21 nt, Artificial Sequence
  LRRK2 RNA guide
uucaaaagcuauuuugccagu

SEQ ID NO: 73409 - RNA, 21 nt, Artificial Sequence
  LRRK2 RNA guide
uugccagucuauuaaaagcua

SEQ ID NO: 73410 - RNA, 21 nt, Artificial Sequence
  LRRK2 RNA guide
uuucaaaagcuauuuugccag

SEQ ID NO: 73411 - RNA, 21 nt, Artificial Sequence
  LRRK2 RNA guide
uuugccagucuauuaaaagcu

SEQ ID NO: 73412 - RNA, 21 nt, Artificial Sequence
  LRRK2 RNA guide
uuuugccagucuauuaaaagc

SEQ ID NO: 73413 - RNA, 22 nt, Artificial Sequence
  LRRK2 RNA guide
aaaagcuauuuugccagucuau

SEQ ID NO: 73414 - RNA, 22 nt, Artificial Sequence
  LRRK2 RNA guide
aaagcuauuuugccagucuauu

SEQ ID NO: 73415 - RNA, 22 nt, Artificial Sequence
  LRRK2 RNA guide
aagcuauuuugccagucuauua

SEQ ID NO: 73416 - RNA, 22 nt, Artificial Sequence
  LRRK2 RNA guide
aauagacuggcaaaauagcuuu

SEQ ID NO: 73417 - RNA, 22 nt, Artificial Sequence
  LRRK2 RNA guide
aauagcuuuuaauagacuggca

SEQ ID NO: 73418 - RNA, 22 nt, Artificial Sequence
  LRRK2 RNA guide
acuggcaaaauagcuuuugaaa

SEQ ID NO: 73419 - RNA, 22 nt, Artificial Sequence
  LRRK2 RNA guide
agacuggcaaaauagcuuuuga

SEQ ID NO: 73420 - RNA, 22 nt, Artificial Sequence
  LRRK2 RNA guide
agcuauuuugccagucuauuaa

SEQ ID NO: 73421 - RNA, 22 nt, Artificial Sequence
  LRRK2 RNA guide
agcuuuuaauagacuggcaaaa

SEQ ID NO: 73422 - RNA, 22 nt, Artificial Sequence
  LRRK2 RNA guide
auagacuggcaaaauagcuuuu

SEQ ID NO: 73423 - RNA, 22 nt, Artificial Sequence
  LRRK2 RNA guide
auagcuuuuaauagacuggcaa

SEQ ID NO: 73424 - RNA, 22 nt, Artificial Sequence
  LRRK2 RNA guide
auuucaaaagcuauuuugccag

SEQ ID NO: 73425 - RNA, 22 nt, Artificial Sequence
  LRRK2 RNA guide
auuuugccagucuauuaaaagc

SEQ ID NO: 73426 - RNA, 22 nt, Artificial Sequence
  LRRK2 RNA guide
caaaagcuauuuugccagucua

SEQ ID NO: 73427 - RNA, 22 nt, Artificial Sequence
  LRRK2 RNA guide
ccagucuauuaaaagcuauuag

SEQ ID NO: 73428 - RNA, 22 nt, Artificial Sequence
  LRRK2 RNA guide
cuaauagcuuuuaauagacugg

SEQ ID NO: 73429 - RNA, 22 nt, Artificial Sequence
  LRRK2 RNA guide
cuggcaaaauagcuuuugaaau

SEQ ID NO: 73430 - RNA, 22 nt, Artificial Sequence
  LRRK2 RNA guide
gacuggcaaaauagcuuuugaa

SEQ ID NO: 73431 - RNA, 22 nt, Artificial Sequence
  LRRK2 RNA guide
gccagucuauuaaaagcuauua

SEQ ID NO: 73432 - RNA, 22 nt, Artificial Sequence
  LRRK2 RNA guide
gcuauuuugccagucuauuaaa

SEQ ID NO: 73433 - RNA, 22 nt, Artificial Sequence
  LRRK2 RNA guide
gcuuuuaauagacuggcaaaau

SEQ ID NO: 73434 - RNA, 22 nt, Artificial Sequence
  LRRK2 RNA guide
uaauagacuggcaaaauagcuu

SEQ ID NO: 73435 - RNA, 22 nt, Artificial Sequence
  LRRK2 RNA guide
uaauagcuuuuaauagacuggc

SEQ ID NO: 73436 - RNA, 22 nt, Artificial Sequence
  LRRK2 RNA guide
uagacuggcaaaauagcuuuug

SEQ ID NO: 73437 - RNA, 22 nt, Artificial Sequence
  LRRK2 RNA guide
uagcuuuuaauagacuggcaaa

SEQ ID NO: 73438 - RNA, 22 nt, Artificial Sequence
  LRRK2 RNA guide
ucaaaagcuauuuugccagucu

SEQ ID NO: 73439 - RNA, 22 nt, Artificial Sequence
  LRRK2 RNA guide
ugccagucuauuaaaagcuauu

SEQ ID NO: 73440 - RNA, 22 nt, Artificial Sequence
  LRRK2 RNA guide
uuaauagacuggcaaaauagcu

SEQ ID NO: 73441 - RNA, 22 nt, Artificial Sequence
  LRRK2 RNA guide
uucaaaagcuauuuugccaguc

SEQ ID NO: 73442 - RNA, 22 nt, Artificial Sequence
  LRRK2 RNA guide
uugccagucuauuaaaagcuau

SEQ ID NO: 73443 - RNA, 22 nt, Artificial Sequence
  LRRK2 RNA guide
uuuaauagacuggcaaaauagc

SEQ ID NO: 73444 - RNA, 22 nt, Artificial Sequence
  LRRK2 RNA guide
uuucaaaagcuauuuugccagu

SEQ ID NO: 73445 - RNA, 22 nt, Artificial Sequence
  LRRK2 RNA guide
uuugccagucuauuaaaagcua

SEQ ID NO: 73446 - RNA, 22 nt, Artificial Sequence
  LRRK2 RNA guide
uuuugccagucuauuaaaagcu

SEQ ID NO: 73447 - RNA, 20 nt, Artificial Sequence
  LRRK2 RNA guide
aaauaaugucaguggcaaag

SEQ ID NO: 73448 - RNA, 20 nt, Artificial Sequence
  LRRK2 RNA guide
aagauauuaucucuuugcca

SEQ ID NO: 73449 - RNA, 20 nt, Artificial Sequence
  LRRK2 RNA guide
aauaaugucaguggcaaaga

SEQ ID NO: 73450 - RNA, 20 nt, Artificial Sequence
  LRRK2 RNA guide
aaugucaguggcaaagagau

SEQ ID NO: 73451 - RNA, 20 nt, Artificial Sequence
  LRRK2 RNA guide
accaagauauuaucucuuug

SEQ ID NO: 73452 - RNA, 20 nt, Artificial Sequence
  LRRK2 RNA guide
acuaaccaagauauuaucuc

SEQ ID NO: 73453 - RNA, 20 nt, Artificial Sequence
  LRRK2 RNA guide
agauauuaucucuuugccac

SEQ ID NO: 73454 - RNA, 20 nt, Artificial Sequence
  LRRK2 RNA guide
aguggcaaagagauaauauc

SEQ ID NO: 73455 - RNA, 20 nt, Artificial Sequence
  LRRK2 RNA guide
auaaugucaguggcaaagag

SEQ ID NO: 73456 - RNA, 20 nt, Artificial Sequence
  LRRK2 RNA guide
auauuaucucuuugccacug

SEQ ID NO: 73457 - RNA, 20 nt, Artificial Sequence
  LRRK2 RNA guide
aucucuuugccacugacauu

SEQ ID NO: 73458 - RNA, 20 nt, Artificial Sequence
  LRRK2 RNA guide
augucaguggcaaagagaua

SEQ ID NO: 73459 - RNA, 20 nt, Artificial Sequence
  LRRK2 RNA guide
auuaucucuuugccacugac

SEQ ID NO: 73460 - RNA, 20 nt, Artificial Sequence
  LRRK2 RNA guide
auuugaaauaaugucagugg

SEQ ID NO: 73461 - RNA, 20 nt, Artificial Sequence
  LRRK2 RNA guide
caagauauuaucucuuugcc

SEQ ID NO: 73462 - RNA, 20 nt, Artificial Sequence
  LRRK2 RNA guide
caguggcaaagagauaauau

SEQ ID NO: 73463 - RNA, 20 nt, Artificial Sequence
  LRRK2 RNA guide
ccaagauauuaucucuuugc

SEQ ID NO: 73464 - RNA, 20 nt, Artificial Sequence
  LRRK2 RNA guide
cuaaccaagauauuaucucu

SEQ ID NO: 73465 - RNA, 20 nt, Artificial Sequence
  LRRK2 RNA guide
cucuuugccacugacauuau

SEQ ID NO: 73466 - RNA, 20 nt, Artificial Sequence
  LRRK2 RNA guide
cuuugccacugacauuauuu

SEQ ID NO: 73467 - RNA, 20 nt, Artificial Sequence
  LRRK2 RNA guide
gaaauaaugucaguggcaaa

SEQ ID NO: 73468 - RNA, 20 nt, Artificial Sequence
  LRRK2 RNA guide
gauauuaucucuuugccacu

SEQ ID NO: 73469 - RNA, 20 nt, Artificial Sequence
  LRRK2 RNA guide
gcaaagagauaauaucuugg

SEQ ID NO: 73470 - RNA, 20 nt, Artificial Sequence
  LRRK2 RNA guide
ggcaaagagauaauaucuug

SEQ ID NO: 73471 - RNA, 20 nt, Artificial Sequence
  LRRK2 RNA guide
gucaguggcaaagagauaau

SEQ ID NO: 73472 - RNA, 20 nt, Artificial Sequence
  LRRK2 RNA guide
guggcaaagagauaauaucu

SEQ ID NO: 73473 - RNA, 20 nt, Artificial Sequence
  LRRK2 RNA guide
uaaugucaguggcaaagaga

SEQ ID NO: 73474 - RNA, 20 nt, Artificial Sequence
  LRRK2 RNA guide
uaucucuuugccacugacau

SEQ ID NO: 73475 - RNA, 20 nt, Artificial Sequence
  LRRK2 RNA guide
uauuaucucuuugccacuga

SEQ ID NO: 73476 - RNA, 20 nt, Artificial Sequence
  LRRK2 RNA guide
ucaguggcaaagagauaaua

SEQ ID NO: 73477 - RNA, 20 nt, Artificial Sequence
  LRRK2 RNA guide
ucucuuugccacugacauua

SEQ ID NO: 73478 - RNA, 20 nt, Artificial Sequence
  LRRK2 RNA guide
ucuuugccacugacauuauu

SEQ ID NO: 73479 - RNA, 20 nt, Artificial Sequence
  LRRK2 RNA guide
ugaaauaaugucaguggcaa

SEQ ID NO: 73480 - RNA, 20 nt, Artificial Sequence
  LRRK2 RNA guide
ugccacugacauuauuucaa

SEQ ID NO: 73481 - RNA, 20 nt, Artificial Sequence
  LRRK2 RNA guide
uggcaaagagauaauaucuu

SEQ ID NO: 73482 - RNA, 20 nt, Artificial Sequence
  LRRK2 RNA guide
ugucaguggcaaagagauaa

SEQ ID NO: 73483 - RNA, 20 nt, Artificial Sequence
  LRRK2 RNA guide
uuaucucuuugccacugaca

SEQ ID NO: 73484 - RNA, 20 nt, Artificial Sequence
  LRRK2 RNA guide
uugaaauaaugucaguggca

SEQ ID NO: 73485 - RNA, 20 nt, Artificial Sequence
  LRRK2 RNA guide
uugccacugacauuauuuca

SEQ ID NO: 73486 - RNA, 20 nt, Artificial Sequence
  LRRK2 RNA guide
uuugaaauaaugucaguggc

SEQ ID NO: 73487 - RNA, 20 nt, Artificial Sequence
  LRRK2 RNA guide
uuugccacugacauuauuuc

SEQ ID NO: 73488 - RNA, 21 nt, Artificial Sequence
  LRRK2 RNA guide
aaauaaugucaguggcaaaga

SEQ ID NO: 73489 - RNA, 21 nt, Artificial Sequence
  LRRK2 RNA guide
aagauauuaucucuuugccac

SEQ ID NO: 73490 - RNA, 21 nt, Artificial Sequence
  LRRK2 RNA guide
aauaaugucaguggcaaagag

SEQ ID NO: 73491 - RNA, 21 nt, Artificial Sequence
  LRRK2 RNA guide
aaugucaguggcaaagagaua

SEQ ID NO: 73492 - RNA, 21 nt, Artificial Sequence
  LRRK2 RNA guide
accaagauauuaucucuuugc

SEQ ID NO: 73493 - RNA, 21 nt, Artificial Sequence
  LRRK2 RNA guide
agauauuaucucuuugccacu

SEQ ID NO: 73494 - RNA, 21 nt, Artificial Sequence
  LRRK2 RNA guide
aguggcaaagagauaauaucu

SEQ ID NO: 73495 - RNA, 21 nt, Artificial Sequence
  LRRK2 RNA guide
auaaugucaguggcaaagaga

SEQ ID NO: 73496 - RNA, 21 nt, Artificial Sequence
  LRRK2 RNA guide
auauuaucucuuugccacuga

SEQ ID NO: 73497 - RNA, 21 nt, Artificial Sequence
  LRRK2 RNA guide
aucucuuugccacugacauua

SEQ ID NO: 73498 - RNA, 21 nt, Artificial Sequence
  LRRK2 RNA guide
augucaguggcaaagagauaa

SEQ ID NO: 73499 - RNA, 21 nt, Artificial Sequence
  LRRK2 RNA guide
auuaucucuuugccacugaca

SEQ ID NO: 73500 - RNA, 21 nt, Artificial Sequence
  LRRK2 RNA guide
auuugaaauaaugucaguggc

SEQ ID NO: 73501 - RNA, 21 nt, Artificial Sequence
  LRRK2 RNA guide
caagauauuaucucuuugcca

SEQ ID NO: 73502 - RNA, 21 nt, Artificial Sequence
  LRRK2 RNA guide
caguggcaaagagauaauauc

SEQ ID NO: 73503 - RNA, 21 nt, Artificial Sequence
  LRRK2 RNA guide
ccaagauauuaucucuuugcc

SEQ ID NO: 73504 - RNA, 21 nt, Artificial Sequence
  LRRK2 RNA guide
cucuuugccacugacauuauu

SEQ ID NO: 73505 - RNA, 21 nt, Artificial Sequence
  LRRK2 RNA guide
cuuugccacugacauuauuuc

SEQ ID NO: 73506 - RNA, 21 nt, Artificial Sequence
  LRRK2 RNA guide
gaaauaaugucaguggcaaag

SEQ ID NO: 73507 - RNA, 21 nt, Artificial Sequence
  LRRK2 RNA guide
gauauuaucucuuugccacug

SEQ ID NO: 73508 - RNA, 21 nt, Artificial Sequence
  LRRK2 RNA guide
gcaaagagauaauaucuuggu

SEQ ID NO: 73509 - RNA, 21 nt, Artificial Sequence
  LRRK2 RNA guide
ggcaaagagauaauaucuugg

SEQ ID NO: 73510 - RNA, 21 nt, Artificial Sequence
  LRRK2 RNA guide
gucaguggcaaagagauaaua

SEQ ID NO: 73511 - RNA, 21 nt, Artificial Sequence
  LRRK2 RNA guide
guggcaaagagauaauaucuu

SEQ ID NO: 73512 - RNA, 21 nt, Artificial Sequence
  LRRK2 RNA guide
uaaugucaguggcaaagagau

SEQ ID NO: 73513 - RNA, 21 nt, Artificial Sequence
  LRRK2 RNA guide
uaucucuuugccacugacauu

SEQ ID NO: 73514 - RNA, 21 nt, Artificial Sequence
  LRRK2 RNA guide
uauuaucucuuugccacugac

SEQ ID NO: 73515 - RNA, 21 nt, Artificial Sequence
  LRRK2 RNA guide
ucaguggcaaagagauaauau

SEQ ID NO: 73516 - RNA, 21 nt, Artificial Sequence
  LRRK2 RNA guide
ucucuuugccacugacauuau

SEQ ID NO: 73517 - RNA, 21 nt, Artificial Sequence
  LRRK2 RNA guide
ucuuugccacugacauuauuu

SEQ ID NO: 73518 - RNA, 21 nt, Artificial Sequence
  LRRK2 RNA guide
ugaaauaaugucaguggcaaa

SEQ ID NO: 73519 - RNA, 21 nt, Artificial Sequence
  LRRK2 RNA guide
ugccacugacauuauuucaaa

SEQ ID NO: 73520 - RNA, 21 nt, Artificial Sequence
  LRRK2 RNA guide
uggcaaagagauaauaucuug

SEQ ID NO: 73521 - RNA, 21 nt, Artificial Sequence
  LRRK2 RNA guide
ugucaguggcaaagagauaau

SEQ ID NO: 73522 - RNA, 21 nt, Artificial Sequence
  LRRK2 RNA guide
uuaucucuuugccacugacau

SEQ ID NO: 73523 - RNA, 21 nt, Artificial Sequence
  LRRK2 RNA guide
uugaaauaaugucaguggcaa

SEQ ID NO: 73524 - RNA, 21 nt, Artificial Sequence
  LRRK2 RNA guide
uugccacugacauuauuucaa

SEQ ID NO: 73525 - RNA, 21 nt, Artificial Sequence
  LRRK2 RNA guide
uuugaaauaaugucaguggca

SEQ ID NO: 73526 - RNA, 21 nt, Artificial Sequence
  LRRK2 RNA guide
uuugccacugacauuauuuca

SEQ ID NO: 73527 - RNA, 22 nt, Artificial Sequence
  LRRK2 RNA guide
aaauaaugucaguggcaaagag

SEQ ID NO: 73528 - RNA, 22 nt, Artificial Sequence
  LRRK2 RNA guide
aaccaagauauuaucucuuugc

SEQ ID NO: 73529 - RNA, 22 nt, Artificial Sequence
  LRRK2 RNA guide
aagauauuaucucuuugccacu

SEQ ID NO: 73530 - RNA, 22 nt, Artificial Sequence
  LRRK2 RNA guide
aauaaugucaguggcaaagaga

SEQ ID NO: 73531 - RNA, 22 nt, Artificial Sequence
  LRRK2 RNA guide
aaugucaguggcaaagagauaa

SEQ ID NO: 73532 - RNA, 22 nt, Artificial Sequence
  LRRK2 RNA guide
aauuugaaauaaugucaguggc

SEQ ID NO: 73533 - RNA, 22 nt, Artificial Sequence
  LRRK2 RNA guide
accaagauauuaucucuuugcc

SEQ ID NO: 73534 - RNA, 22 nt, Artificial Sequence
  LRRK2 RNA guide
agauauuaucucuuugccacug

SEQ ID NO: 73535 - RNA, 22 nt, Artificial Sequence
  LRRK2 RNA guide
aguggcaaagagauaauaucuu

SEQ ID NO: 73536 - RNA, 22 nt, Artificial Sequence
  LRRK2 RNA guide
auaaugucaguggcaaagagau

SEQ ID NO: 73537 - RNA, 22 nt, Artificial Sequence
  LRRK2 RNA guide
auauuaucucuuugccacugac

SEQ ID NO: 73538 - RNA, 22 nt, Artificial Sequence
  LRRK2 RNA guide
aucucuuugccacugacauuau

SEQ ID NO: 73539 - RNA, 22 nt, Artificial Sequence
  LRRK2 RNA guide
augucaguggcaaagagauaau

SEQ ID NO: 73540 - RNA, 22 nt, Artificial Sequence
  LRRK2 RNA guide
auuaucucuuugccacugacau

SEQ ID NO: 73541 - RNA, 22 nt, Artificial Sequence
  LRRK2 RNA guide
auuugaaauaaugucaguggca

SEQ ID NO: 73542 - RNA, 22 nt, Artificial Sequence
  LRRK2 RNA guide
caagauauuaucucuuugccac

SEQ ID NO: 73543 - RNA, 22 nt, Artificial Sequence
  LRRK2 RNA guide
caguggcaaagagauaauaucu

SEQ ID NO: 73544 - RNA, 22 nt, Artificial Sequence
  LRRK2 RNA guide
ccaagauauuaucucuuugcca

SEQ ID NO: 73545 - RNA, 22 nt, Artificial Sequence
  LRRK2 RNA guide
cucuuugccacugacauuauuu

SEQ ID NO: 73546 - RNA, 22 nt, Artificial Sequence
  LRRK2 RNA guide
cuuugccacugacauuauuuca

SEQ ID NO: 73547 - RNA, 22 nt, Artificial Sequence
  LRRK2 RNA guide
gaaauaaugucaguggcaaaga

SEQ ID NO: 73548 - RNA, 22 nt, Artificial Sequence
  LRRK2 RNA guide
gauauuaucucuuugccacuga

SEQ ID NO: 73549 - RNA, 22 nt, Artificial Sequence
  LRRK2 RNA guide
gcaaagagauaauaucuugguu

SEQ ID NO: 73550 - RNA, 22 nt, Artificial Sequence
  LRRK2 RNA guide
ggcaaagagauaauaucuuggu

SEQ ID NO: 73551 - RNA, 22 nt, Artificial Sequence
  LRRK2 RNA guide
gucaguggcaaagagauaauau

SEQ ID NO: 73552 - RNA, 22 nt, Artificial Sequence
  LRRK2 RNA guide
guggcaaagagauaauaucuug

SEQ ID NO: 73553 - RNA, 22 nt, Artificial Sequence
  LRRK2 RNA guide
uaaugucaguggcaaagagaua

SEQ ID NO: 73554 - RNA, 22 nt, Artificial Sequence
  LRRK2 RNA guide
uaucucuuugccacugacauua

SEQ ID NO: 73555 - RNA, 22 nt, Artificial Sequence
  LRRK2 RNA guide
uauuaucucuuugccacugaca

SEQ ID NO: 73556 - RNA, 22 nt, Artificial Sequence
  LRRK2 RNA guide
ucaguggcaaagagauaauauc

SEQ ID NO: 73557 - RNA, 22 nt, Artificial Sequence
  LRRK2 RNA guide
ucucuuugccacugacauuauu

SEQ ID NO: 73558 - RNA, 22 nt, Artificial Sequence
  LRRK2 RNA guide
ucuuugccacugacauuauuuc

SEQ ID NO: 73559 - RNA, 22 nt, Artificial Sequence
  LRRK2 RNA guide
ugaaauaaugucaguggcaaag

SEQ ID NO: 73560 - RNA, 22 nt, Artificial Sequence
  LRRK2 RNA guide
ugccacugacauuauuucaaau

SEQ ID NO: 73561 - RNA, 22 nt, Artificial Sequence
  LRRK2 RNA guide
uggcaaagagauaauaucuugg

SEQ ID NO: 73562 - RNA, 22 nt, Artificial Sequence
  LRRK2 RNA guide
ugucaguggcaaagagauaaua

SEQ ID NO: 73563 - RNA, 22 nt, Artificial Sequence
  LRRK2 RNA guide
uuaucucuuugccacugacauu

SEQ ID NO: 73564 - RNA, 22 nt, Artificial Sequence
  LRRK2 RNA guide
uugaaauaaugucaguggcaaa

SEQ ID NO: 73565 - RNA, 22 nt, Artificial Sequence
  LRRK2 RNA guide
uugccacugacauuauuucaaa

SEQ ID NO: 73566 - RNA, 22 nt, Artificial Sequence
  LRRK2 RNA guide
uuugaaauaaugucaguggcaa

SEQ ID NO: 73567 - RNA, 22 nt, Artificial Sequence
  LRRK2 RNA guide
uuugccacugacauuauuucaa

SEQ ID NO: 73568 - RNA, 20 nt, Artificial Sequence
  LRRK2 RNA guide
aaauaaugucagugggaaag

SEQ ID NO: 73569 - RNA, 20 nt, Artificial Sequence
  LRRK2 RNA guide
aagauauuaucucuuuccca

SEQ ID NO: 73570 - RNA, 20 nt, Artificial Sequence
  LRRK2 RNA guide
aauaaugucagugggaaaga

SEQ ID NO: 73571 - RNA, 20 nt, Artificial Sequence
  LRRK2 RNA guide
aaugucagugggaaagagau

SEQ ID NO: 73572 - RNA, 20 nt, Artificial Sequence
  LRRK2 RNA guide
accaagauauuaucucuuuc

SEQ ID NO: 73573 - RNA, 20 nt, Artificial Sequence
  LRRK2 RNA guide
agauauuaucucuuucccac

SEQ ID NO: 73574 - RNA, 20 nt, Artificial Sequence
  LRRK2 RNA guide
agugggaaagagauaauauc

SEQ ID NO: 73575 - RNA, 20 nt, Artificial Sequence
  LRRK2 RNA guide
auaaugucagugggaaagag

SEQ ID NO: 73576 - RNA, 20 nt, Artificial Sequence
  LRRK2 RNA guide
auauuaucucuuucccacug

SEQ ID NO: 73577 - RNA, 20 nt, Artificial Sequence
  LRRK2 RNA guide
aucucuuucccacugacauu

SEQ ID NO: 73578 - RNA, 20 nt, Artificial Sequence
  LRRK2 RNA guide
augucagugggaaagagaua

SEQ ID NO: 73579 - RNA, 20 nt, Artificial Sequence
  LRRK2 RNA guide
auuaucucuuucccacugac

SEQ ID NO: 73580 - RNA, 20 nt, Artificial Sequence
  LRRK2 RNA guide
caagauauuaucucuuuccc

SEQ ID NO: 73581 - RNA, 20 nt, Artificial Sequence
  LRRK2 RNA guide
cagugggaaagagauaauau

SEQ ID NO: 73582 - RNA, 20 nt, Artificial Sequence
  LRRK2 RNA guide
ccaagauauuaucucuuucc

SEQ ID NO: 73583 - RNA, 20 nt, Artificial Sequence
  LRRK2 RNA guide
cucuuucccacugacauuau

SEQ ID NO: 73584 - RNA, 20 nt, Artificial Sequence
  LRRK2 RNA guide
cuuucccacugacauuauuu

SEQ ID NO: 73585 - RNA, 20 nt, Artificial Sequence
  LRRK2 RNA guide
gaaauaaugucagugggaaa

SEQ ID NO: 73586 - RNA, 20 nt, Artificial Sequence
  LRRK2 RNA guide
gauauuaucucuuucccacu

SEQ ID NO: 73587 - RNA, 20 nt, Artificial Sequence
  LRRK2 RNA guide
ggaaagagauaauaucuugg

SEQ ID NO: 73588 - RNA, 20 nt, Artificial Sequence
  LRRK2 RNA guide
gggaaagagauaauaucuug

SEQ ID NO: 73589 - RNA, 20 nt, Artificial Sequence
  LRRK2 RNA guide
gucagugggaaagagauaau

SEQ ID NO: 73590 - RNA, 20 nt, Artificial Sequence
  LRRK2 RNA guide
gugggaaagagauaauaucu

SEQ ID NO: 73591 - RNA, 20 nt, Artificial Sequence
  LRRK2 RNA guide
uaaugucagugggaaagaga

SEQ ID NO: 73592 - RNA, 20 nt, Artificial Sequence
  LRRK2 RNA guide
uaucucuuucccacugacau

SEQ ID NO: 73593 - RNA, 20 nt, Artificial Sequence
  LRRK2 RNA guide
uauuaucucuuucccacuga

SEQ ID NO: 73594 - RNA, 20 nt, Artificial Sequence
  LRRK2 RNA guide
ucagugggaaagagauaaua

SEQ ID NO: 73595 - RNA, 20 nt, Artificial Sequence
  LRRK2 RNA guide
ucccacugacauuauuucaa

SEQ ID NO: 73596 - RNA, 20 nt, Artificial Sequence
  LRRK2 RNA guide
ucucuuucccacugacauua

SEQ ID NO: 73597 - RNA, 20 nt, Artificial Sequence
  LRRK2 RNA guide
ucuuucccacugacauuauu

SEQ ID NO: 73598 - RNA, 20 nt, Artificial Sequence
  LRRK2 RNA guide
ugaaauaaugucagugggaa

SEQ ID NO: 73599 - RNA, 20 nt, Artificial Sequence
  LRRK2 RNA guide
ugggaaagagauaauaucuu

SEQ ID NO: 73600 - RNA, 20 nt, Artificial Sequence
  LRRK2 RNA guide
ugucagugggaaagagauaa

SEQ ID NO: 73601 - RNA, 20 nt, Artificial Sequence
  LRRK2 RNA guide
uuaucucuuucccacugaca

SEQ ID NO: 73602 - RNA, 20 nt, Artificial Sequence
  LRRK2 RNA guide
uucccacugacauuauuuca

SEQ ID NO: 73603 - RNA, 20 nt, Artificial Sequence
  LRRK2 RNA guide
uugaaauaaugucaguggga

SEQ ID NO: 73604 - RNA, 20 nt, Artificial Sequence
  LRRK2 RNA guide
uuucccacugacauuauuuc

SEQ ID NO: 73605 - RNA, 20 nt, Artificial Sequence
  LRRK2 RNA guide
uuugaaauaaugucaguggg

SEQ ID NO: 73606 - RNA, 21 nt, Artificial Sequence
  LRRK2 RNA guide
aaauaaugucagugggaaaga

SEQ ID NO: 73607 - RNA, 21 nt, Artificial Sequence
  LRRK2 RNA guide
aagauauuaucucuuucccac

SEQ ID NO: 73608 - RNA, 21 nt, Artificial Sequence
  LRRK2 RNA guide
aauaaugucagugggaaagag

SEQ ID NO: 73609 - RNA, 21 nt, Artificial Sequence
  LRRK2 RNA guide
aaugucagugggaaagagaua

SEQ ID NO: 73610 - RNA, 21 nt, Artificial Sequence
  LRRK2 RNA guide
accaagauauuaucucuuucc

SEQ ID NO: 73611 - RNA, 21 nt, Artificial Sequence
  LRRK2 RNA guide
agauauuaucucuuucccacu

SEQ ID NO: 73612 - RNA, 21 nt, Artificial Sequence
  LRRK2 RNA guide
agugggaaagagauaauaucu

SEQ ID NO: 73613 - RNA, 21 nt, Artificial Sequence
  LRRK2 RNA guide
auaaugucagugggaaagaga

SEQ ID NO: 73614 - RNA, 21 nt, Artificial Sequence
  LRRK2 RNA guide
auauuaucucuuucccacuga

SEQ ID NO: 73615 - RNA, 21 nt, Artificial Sequence
  LRRK2 RNA guide
aucucuuucccacugacauua

SEQ ID NO: 73616 - RNA, 21 nt, Artificial Sequence
  LRRK2 RNA guide
augucagugggaaagagauaa

SEQ ID NO: 73617 - RNA, 21 nt, Artificial Sequence
  LRRK2 RNA guide
auuaucucuuucccacugaca

SEQ ID NO: 73618 - RNA, 21 nt, Artificial Sequence
  LRRK2 RNA guide
auuugaaauaaugucaguggg

SEQ ID NO: 73619 - RNA, 21 nt, Artificial Sequence
  LRRK2 RNA guide
caagauauuaucucuuuccca

SEQ ID NO: 73620 - RNA, 21 nt, Artificial Sequence
  LRRK2 RNA guide
cagugggaaagagauaauauc

SEQ ID NO: 73621 - RNA, 21 nt, Artificial Sequence
  LRRK2 RNA guide
ccaagauauuaucucuuuccc

SEQ ID NO: 73622 - RNA, 21 nt, Artificial Sequence
  LRRK2 RNA guide
cucuuucccacugacauuauu

SEQ ID NO: 73623 - RNA, 21 nt, Artificial Sequence
  LRRK2 RNA guide
cuuucccacugacauuauuuc

SEQ ID NO: 73624 - RNA, 21 nt, Artificial Sequence
  LRRK2 RNA guide
gaaauaaugucagugggaaag

SEQ ID NO: 73625 - RNA, 21 nt, Artificial Sequence
  LRRK2 RNA guide
gauauuaucucuuucccacug

SEQ ID NO: 73626 - RNA, 21 nt, Artificial Sequence
  LRRK2 RNA guide
ggaaagagauaauaucuuggu

SEQ ID NO: 73627 - RNA, 21 nt, Artificial Sequence
  LRRK2 RNA guide
gggaaagagauaauaucuugg

SEQ ID NO: 73628 - RNA, 21 nt, Artificial Sequence
  LRRK2 RNA guide
gucagugggaaagagauaaua

SEQ ID NO: 73629 - RNA, 21 nt, Artificial Sequence
  LRRK2 RNA guide
gugggaaagagauaauaucuu

SEQ ID NO: 73630 - RNA, 21 nt, Artificial Sequence
  LRRK2 RNA guide
uaaugucagugggaaagagau

SEQ ID NO: 73631 - RNA, 21 nt, Artificial Sequence
  LRRK2 RNA guide
uaucucuuucccacugacauu

SEQ ID NO: 73632 - RNA, 21 nt, Artificial Sequence
  LRRK2 RNA guide
uauuaucucuuucccacugac

SEQ ID NO: 73633 - RNA, 21 nt, Artificial Sequence
  LRRK2 RNA guide
ucagugggaaagagauaauau

SEQ ID NO: 73634 - RNA, 21 nt, Artificial Sequence
  LRRK2 RNA guide
ucccacugacauuauuucaaa

SEQ ID NO: 73635 - RNA, 21 nt, Artificial Sequence
  LRRK2 RNA guide
ucucuuucccacugacauuau

SEQ ID NO: 73636 - RNA, 21 nt, Artificial Sequence
  LRRK2 RNA guide
ucuuucccacugacauuauuu

SEQ ID NO: 73637 - RNA, 21 nt, Artificial Sequence
  LRRK2 RNA guide
ugaaauaaugucagugggaaa

SEQ ID NO: 73638 - RNA, 21 nt, Artificial Sequence
  LRRK2 RNA guide
ugggaaagagauaauaucuug

SEQ ID NO: 73639 - RNA, 21 nt, Artificial Sequence
  LRRK2 RNA guide
ugucagugggaaagagauaau

SEQ ID NO: 73640 - RNA, 21 nt, Artificial Sequence
  LRRK2 RNA guide
uuaucucuuucccacugacau

SEQ ID NO: 73641 - RNA, 21 nt, Artificial Sequence
  LRRK2 RNA guide
uucccacugacauuauuucaa

SEQ ID NO: 73642 - RNA, 21 nt, Artificial Sequence
  LRRK2 RNA guide
uugaaauaaugucagugggaa

SEQ ID NO: 73643 - RNA, 21 nt, Artificial Sequence
  LRRK2 RNA guide
uuucccacugacauuauuuca

SEQ ID NO: 73644 - RNA, 21 nt, Artificial Sequence
  LRRK2 RNA guide
uuugaaauaaugucaguggga

SEQ ID NO: 73645 - RNA, 22 nt, Artificial Sequence
  LRRK2 RNA guide
aaauaaugucagugggaaagag

SEQ ID NO: 73646 - RNA, 22 nt, Artificial Sequence
  LRRK2 RNA guide
aaccaagauauuaucucuuucc

SEQ ID NO: 73647 - RNA, 22 nt, Artificial Sequence
  LRRK2 RNA guide
aagauauuaucucuuucccacu

SEQ ID NO: 73648 - RNA, 22 nt, Artificial Sequence
  LRRK2 RNA guide
aauaaugucagugggaaagaga

SEQ ID NO: 73649 - RNA, 22 nt, Artificial Sequence
  LRRK2 RNA guide
aaugucagugggaaagagauaa

SEQ ID NO: 73650 - RNA, 22 nt, Artificial Sequence
  LRRK2 RNA guide
aauuugaaauaaugucaguggg

SEQ ID NO: 73651 - RNA, 22 nt, Artificial Sequence
  LRRK2 RNA guide
accaagauauuaucucuuuccc

SEQ ID NO: 73652 - RNA, 22 nt, Artificial Sequence
  LRRK2 RNA guide
agauauuaucucuuucccacug

SEQ ID NO: 73653 - RNA, 22 nt, Artificial Sequence
  LRRK2 RNA guide
agugggaaagagauaauaucuu

SEQ ID NO: 73654 - RNA, 22 nt, Artificial Sequence
  LRRK2 RNA guide
auaaugucagugggaaagagau

SEQ ID NO: 73655 - RNA, 22 nt, Artificial Sequence
  LRRK2 RNA guide
auauuaucucuuucccacugac

SEQ ID NO: 73656 - RNA, 22 nt, Artificial Sequence
  LRRK2 RNA guide
aucucuuucccacugacauuau

SEQ ID NO: 73657 - RNA, 22 nt, Artificial Sequence
  LRRK2 RNA guide
augucagugggaaagagauaau

SEQ ID NO: 73658 - RNA, 22 nt, Artificial Sequence
  LRRK2 RNA guide
auuaucucuuucccacugacau

SEQ ID NO: 73659 - RNA, 22 nt, Artificial Sequence
  LRRK2 RNA guide
auuugaaauaaugucaguggga

SEQ ID NO: 73660 - RNA, 22 nt, Artificial Sequence
  LRRK2 RNA guide
caagauauuaucucuuucccac

SEQ ID NO: 73661 - RNA, 22 nt, Artificial Sequence
  LRRK2 RNA guide
cagugggaaagagauaauaucu

SEQ ID NO: 73662 - RNA, 22 nt, Artificial Sequence
  LRRK2 RNA guide
ccaagauauuaucucuuuccca

SEQ ID NO: 73663 - RNA, 22 nt, Artificial Sequence
  LRRK2 RNA guide
cucuuucccacugacauuauuu

SEQ ID NO: 73664 - RNA, 22 nt, Artificial Sequence
  LRRK2 RNA guide
cuuucccacugacauuauuuca

SEQ ID NO: 73665 - RNA, 22 nt, Artificial Sequence
  LRRK2 RNA guide
gaaauaaugucagugggaaaga

SEQ ID NO: 73666 - RNA, 22 nt, Artificial Sequence
  LRRK2 RNA guide
gauauuaucucuuucccacuga

SEQ ID NO: 73667 - RNA, 22 nt, Artificial Sequence
  LRRK2 RNA guide
ggaaagagauaauaucuugguu

SEQ ID NO: 73668 - RNA, 22 nt, Artificial Sequence
  LRRK2 RNA guide
gggaaagagauaauaucuuggu

SEQ ID NO: 73669 - RNA, 22 nt, Artificial Sequence
  LRRK2 RNA guide
gucagugggaaagagauaauau

SEQ ID NO: 73670 - RNA, 22 nt, Artificial Sequence
  LRRK2 RNA guide
gugggaaagagauaauaucuug

SEQ ID NO: 73671 - RNA, 22 nt, Artificial Sequence
  LRRK2 RNA guide
uaaugucagugggaaagagaua

SEQ ID NO: 73672 - RNA, 22 nt, Artificial Sequence
  LRRK2 RNA guide
uaucucuuucccacugacauua

SEQ ID NO: 73673 - RNA, 22 nt, Artificial Sequence
  LRRK2 RNA guide
uauuaucucuuucccacugaca

SEQ ID NO: 73674 - RNA, 22 nt, Artificial Sequence
  LRRK2 RNA guide
ucagugggaaagagauaauauc

SEQ ID NO: 73675 - RNA, 22 nt, Artificial Sequence
  LRRK2 RNA guide
ucccacugacauuauuucaaau

SEQ ID NO: 73676 - RNA, 22 nt, Artificial Sequence
  LRRK2 RNA guide
ucucuuucccacugacauuauu

SEQ ID NO: 73677 - RNA, 22 nt, Artificial Sequence
  LRRK2 RNA guide
ucuuucccacugacauuauuuc

SEQ ID NO: 73678 - RNA, 22 nt, Artificial Sequence
  LRRK2 RNA guide
ugaaauaaugucagugggaaag

SEQ ID NO: 73679 - RNA, 22 nt, Artificial Sequence
  LRRK2 RNA guide
ugggaaagagauaauaucuugg

SEQ ID NO: 73680 - RNA, 22 nt, Artificial Sequence
  LRRK2 RNA guide
ugucagugggaaagagauaaua

SEQ ID NO: 73681 - RNA, 22 nt, Artificial Sequence
  LRRK2 RNA guide
uuaucucuuucccacugacauu

SEQ ID NO: 73682 - RNA, 22 nt, Artificial Sequence
  LRRK2 RNA guide
uucccacugacauuauuucaaa

SEQ ID NO: 73683 - RNA, 22 nt, Artificial Sequence
  LRRK2 RNA guide
uugaaauaaugucagugggaaa

SEQ ID NO: 73684 - RNA, 22 nt, Artificial Sequence
  LRRK2 RNA guide
uuucccacugacauuauuucaa

SEQ ID NO: 73685 - RNA, 22 nt, Artificial Sequence
  LRRK2 RNA guide
uuugaaauaaugucagugggaa

SEQ ID NO: 73686 - RNA, 20 nt, Artificial Sequence
  LRRK2 RNA guide
aaauuuuucuuucaagccca

SEQ ID NO: 73687 - RNA, 20 nt, Artificial Sequence
  LRRK2 RNA guide
aagcccauuacuuacuguga

SEQ ID NO: 73688 - RNA, 20 nt, Artificial Sequence
  LRRK2 RNA guide
aaguaaugggcuugaaagaa

SEQ ID NO: 73689 - RNA, 20 nt, Artificial Sequence
  LRRK2 RNA guide
aaguugaccuucacaguaag

SEQ ID NO: 73690 - RNA, 20 nt, Artificial Sequence
  LRRK2 RNA guide
aaugaaguugaccuucacag

SEQ ID NO: 73691 - RNA, 20 nt, Artificial Sequence
  LRRK2 RNA guide
aauuuuucuuucaagcccau

SEQ ID NO: 73692 - RNA, 20 nt, Artificial Sequence
  LRRK2 RNA guide
acaguaaguaaugggcuuga

SEQ ID NO: 73693 - RNA, 20 nt, Artificial Sequence
  LRRK2 RNA guide
accuucacaguaaguaaugg

SEQ ID NO: 73694 - RNA, 20 nt, Artificial Sequence
  LRRK2 RNA guide
acuuacugugaaggucaacu

SEQ ID NO: 73695 - RNA, 20 nt, Artificial Sequence
  LRRK2 RNA guide
agcccauuacuuacugugaa

SEQ ID NO: 73696 - RNA, 20 nt, Artificial Sequence
  LRRK2 RNA guide
aguaaguaaugggcuugaaa

SEQ ID NO: 73697 - RNA, 20 nt, Artificial Sequence
  LRRK2 RNA guide
aguaaugggcuugaaagaaa

SEQ ID NO: 73698 - RNA, 20 nt, Artificial Sequence
  LRRK2 RNA guide
aguugaccuucacaguaagu

SEQ ID NO: 73699 - RNA, 20 nt, Artificial Sequence
  LRRK2 RNA guide
augaaguugaccuucacagu

SEQ ID NO: 73700 - RNA, 20 nt, Artificial Sequence
  LRRK2 RNA guide
auuacuuacugugaagguca

SEQ ID NO: 73701 - RNA, 20 nt, Artificial Sequence
  LRRK2 RNA guide
auuuuucuuucaagcccauu

SEQ ID NO: 73702 - RNA, 20 nt, Artificial Sequence
  LRRK2 RNA guide
caagcccauuacuuacugug

SEQ ID NO: 73703 - RNA, 20 nt, Artificial Sequence
  LRRK2 RNA guide
cacaguaaguaaugggcuug

SEQ ID NO: 73704 - RNA, 20 nt, Artificial Sequence
  LRRK2 RNA guide
caguaaguaaugggcuugaa

SEQ ID NO: 73705 - RNA, 20 nt, Artificial Sequence
  LRRK2 RNA guide
cauuacuuacugugaagguc

SEQ ID NO: 73706 - RNA, 20 nt, Artificial Sequence
  LRRK2 RNA guide
ccauuacuuacugugaaggu

SEQ ID NO: 73707 - RNA, 20 nt, Artificial Sequence
  LRRK2 RNA guide
cccauuacuuacugugaagg

SEQ ID NO: 73708 - RNA, 20 nt, Artificial Sequence
  LRRK2 RNA guide
ccuucacaguaaguaauggg

SEQ ID NO: 73709 - RNA, 20 nt, Artificial Sequence
  LRRK2 RNA guide
cuucacaguaaguaaugggc

SEQ ID NO: 73710 - RNA, 20 nt, Artificial Sequence
  LRRK2 RNA guide
cuuucaagcccauuacuuac

SEQ ID NO: 73711 - RNA, 20 nt, Artificial Sequence
  LRRK2 RNA guide
gaaguugaccuucacaguaa

SEQ ID NO: 73712 - RNA, 20 nt, Artificial Sequence
  LRRK2 RNA guide
gaccuucacaguaaguaaug

SEQ ID NO: 73713 - RNA, 20 nt, Artificial Sequence
  LRRK2 RNA guide
gcccauuacuuacugugaag

SEQ ID NO: 73714 - RNA, 20 nt, Artificial Sequence
  LRRK2 RNA guide
guaaguaaugggcuugaaag

SEQ ID NO: 73715 - RNA, 20 nt, Artificial Sequence
  LRRK2 RNA guide
guugaccuucacaguaagua

SEQ ID NO: 73716 - RNA, 20 nt, Artificial Sequence
  LRRK2 RNA guide
uaaauuuuucuuucaagccc

SEQ ID NO: 73717 - RNA, 20 nt, Artificial Sequence
  LRRK2 RNA guide
uaaguaaugggcuugaaaga

SEQ ID NO: 73718 - RNA, 20 nt, Artificial Sequence
  LRRK2 RNA guide
uaaugaaguugaccuucaca

SEQ ID NO: 73719 - RNA, 20 nt, Artificial Sequence
  LRRK2 RNA guide
uacuuacugugaaggucaac

SEQ ID NO: 73720 - RNA, 20 nt, Artificial Sequence
  LRRK2 RNA guide
ucaagcccauuacuuacugu

SEQ ID NO: 73721 - RNA, 20 nt, Artificial Sequence
  LRRK2 RNA guide
ucacaguaaguaaugggcuu

SEQ ID NO: 73722 - RNA, 20 nt, Artificial Sequence
  LRRK2 RNA guide
ucuuucaagcccauuacuua

SEQ ID NO: 73723 - RNA, 20 nt, Artificial Sequence
  LRRK2 RNA guide
ugaaguugaccuucacagua

SEQ ID NO: 73724 - RNA, 20 nt, Artificial Sequence
  LRRK2 RNA guide
ugaccuucacaguaaguaau

SEQ ID NO: 73725 - RNA, 20 nt, Artificial Sequence
  LRRK2 RNA guide
uuacuuacugugaaggucaa

SEQ ID NO: 73726 - RNA, 20 nt, Artificial Sequence
  LRRK2 RNA guide
uucaagcccauuacuuacug

SEQ ID NO: 73727 - RNA, 20 nt, Artificial Sequence
  LRRK2 RNA guide
uucacaguaaguaaugggcu

SEQ ID NO: 73728 - RNA, 20 nt, Artificial Sequence
  LRRK2 RNA guide
uucuuucaagcccauuacuu

SEQ ID NO: 73729 - RNA, 20 nt, Artificial Sequence
  LRRK2 RNA guide
uugaccuucacaguaaguaa

SEQ ID NO: 73730 - RNA, 20 nt, Artificial Sequence
  LRRK2 RNA guide
uuucaagcccauuacuuacu

SEQ ID NO: 73731 - RNA, 20 nt, Artificial Sequence
  LRRK2 RNA guide
uuucuuucaagcccauuacu

SEQ ID NO: 73732 - RNA, 20 nt, Artificial Sequence
  LRRK2 RNA guide
uuuucuuucaagcccauuac

SEQ ID NO: 73733 - RNA, 20 nt, Artificial Sequence
  LRRK2 RNA guide
uuuuucuuucaagcccauua

SEQ ID NO: 73734 - RNA, 21 nt, Artificial Sequence
  LRRK2 RNA guide
aagcccauuacuuacugugaa

SEQ ID NO: 73735 - RNA, 21 nt, Artificial Sequence
  LRRK2 RNA guide
aaguaaugggcuugaaagaaa

SEQ ID NO: 73736 - RNA, 21 nt, Artificial Sequence
  LRRK2 RNA guide
aaguugaccuucacaguaagu

SEQ ID NO: 73737 - RNA, 21 nt, Artificial Sequence
  LRRK2 RNA guide
aaugaaguugaccuucacagu

SEQ ID NO: 73738 - RNA, 21 nt, Artificial Sequence
  LRRK2 RNA guide
acaguaaguaaugggcuugaa

SEQ ID NO: 73739 - RNA, 21 nt, Artificial Sequence
  LRRK2 RNA guide
accuucacaguaaguaauggg

SEQ ID NO: 73740 - RNA, 21 nt, Artificial Sequence
  LRRK2 RNA guide
acuuacugugaaggucaacuu

SEQ ID NO: 73741 - RNA, 21 nt, Artificial Sequence
  LRRK2 RNA guide
agcccauuacuuacugugaag

SEQ ID NO: 73742 - RNA, 21 nt, Artificial Sequence
  LRRK2 RNA guide
aguaaguaaugggcuugaaag

SEQ ID NO: 73743 - RNA, 21 nt, Artificial Sequence
  LRRK2 RNA guide
aguaaugggcuugaaagaaaa

SEQ ID NO: 73744 - RNA, 21 nt, Artificial Sequence
  LRRK2 RNA guide
aguugaccuucacaguaagua

SEQ ID NO: 73745 - RNA, 21 nt, Artificial Sequence
  LRRK2 RNA guide
augaaguugaccuucacagua

SEQ ID NO: 73746 - RNA, 21 nt, Artificial Sequence
  LRRK2 RNA guide
auuacuuacugugaaggucaa

SEQ ID NO: 73747 - RNA, 21 nt, Artificial Sequence
  LRRK2 RNA guide
caagcccauuacuuacuguga

SEQ ID NO: 73748 - RNA, 21 nt, Artificial Sequence
  LRRK2 RNA guide
cacaguaaguaaugggcuuga

SEQ ID NO: 73749 - RNA, 21 nt, Artificial Sequence
  LRRK2 RNA guide
caguaaguaaugggcuugaaa

SEQ ID NO: 73750 - RNA, 21 nt, Artificial Sequence
  LRRK2 RNA guide
cauuacuuacugugaagguca

SEQ ID NO: 73751 - RNA, 21 nt, Artificial Sequence
  LRRK2 RNA guide
ccauuacuuacugugaagguc

SEQ ID NO: 73752 - RNA, 21 nt, Artificial Sequence
  LRRK2 RNA guide
cccauuacuuacugugaaggu

SEQ ID NO: 73753 - RNA, 21 nt, Artificial Sequence
  LRRK2 RNA guide
ccuucacaguaaguaaugggc

SEQ ID NO: 73754 - RNA, 21 nt, Artificial Sequence
  LRRK2 RNA guide
cuaaugaaguugaccuucaca

SEQ ID NO: 73755 - RNA, 21 nt, Artificial Sequence
  LRRK2 RNA guide
cuucacaguaaguaaugggcu

SEQ ID NO: 73756 - RNA, 21 nt, Artificial Sequence
  LRRK2 RNA guide
cuuucaagcccauuacuuacu

SEQ ID NO: 73757 - RNA, 21 nt, Artificial Sequence
  LRRK2 RNA guide
gaaguugaccuucacaguaag

SEQ ID NO: 73758 - RNA, 21 nt, Artificial Sequence
  LRRK2 RNA guide
gaccuucacaguaaguaaugg

SEQ ID NO: 73759 - RNA, 21 nt, Artificial Sequence
  LRRK2 RNA guide
gcccauuacuuacugugaagg

SEQ ID NO: 73760 - RNA, 21 nt, Artificial Sequence
  LRRK2 RNA guide
guaaauuuuucuuucaagccc

SEQ ID NO: 73761 - RNA, 21 nt, Artificial Sequence
  LRRK2 RNA guide
guaaguaaugggcuugaaaga

SEQ ID NO: 73762 - RNA, 21 nt, Artificial Sequence
  LRRK2 RNA guide
guugaccuucacaguaaguaa

SEQ ID NO: 73763 - RNA, 21 nt, Artificial Sequence
  LRRK2 RNA guide
uaaguaaugggcuugaaagaa

SEQ ID NO: 73764 - RNA, 21 nt, Artificial Sequence
  LRRK2 RNA guide
uaaugaaguugaccuucacag

SEQ ID NO: 73765 - RNA, 21 nt, Artificial Sequence
  LRRK2 RNA guide
uacuuacugugaaggucaacu

SEQ ID NO: 73766 - RNA, 21 nt, Artificial Sequence
  LRRK2 RNA guide
ucaagcccauuacuuacugug

SEQ ID NO: 73767 - RNA, 21 nt, Artificial Sequence
  LRRK2 RNA guide
ucacaguaaguaaugggcuug

SEQ ID NO: 73768 - RNA, 21 nt, Artificial Sequence
  LRRK2 RNA guide
ucuuucaagcccauuacuuac

SEQ ID NO: 73769 - RNA, 21 nt, Artificial Sequence
  LRRK2 RNA guide
ugaaguugaccuucacaguaa

SEQ ID NO: 73770 - RNA, 21 nt, Artificial Sequence
  LRRK2 RNA guide
ugaccuucacaguaaguaaug

SEQ ID NO: 73771 - RNA, 21 nt, Artificial Sequence
  LRRK2 RNA guide
uuacuuacugugaaggucaac

SEQ ID NO: 73772 - RNA, 21 nt, Artificial Sequence
  LRRK2 RNA guide
uucaagcccauuacuuacugu

SEQ ID NO: 73773 - RNA, 21 nt, Artificial Sequence
  LRRK2 RNA guide
uucacaguaaguaaugggcuu

SEQ ID NO: 73774 - RNA, 21 nt, Artificial Sequence
  LRRK2 RNA guide
uucuuucaagcccauuacuua

SEQ ID NO: 73775 - RNA, 21 nt, Artificial Sequence
  LRRK2 RNA guide
uugaccuucacaguaaguaau

SEQ ID NO: 73776 - RNA, 21 nt, Artificial Sequence
  LRRK2 RNA guide
uuucaagcccauuacuuacug

SEQ ID NO: 73777 - RNA, 21 nt, Artificial Sequence
  LRRK2 RNA guide
uuucuuucaagcccauuacuu

SEQ ID NO: 73778 - RNA, 21 nt, Artificial Sequence
  LRRK2 RNA guide
uuuucuuucaagcccauuacu

SEQ ID NO: 73779 - RNA, 21 nt, Artificial Sequence
  LRRK2 RNA guide
uuuuucuuucaagcccauuac

SEQ ID NO: 73780 - RNA, 22 nt, Artificial Sequence
  LRRK2 RNA guide
aagcccauuacuuacugugaag

SEQ ID NO: 73781 - RNA, 22 nt, Artificial Sequence
  LRRK2 RNA guide
aaguaaugggcuugaaagaaaa

SEQ ID NO: 73782 - RNA, 22 nt, Artificial Sequence
  LRRK2 RNA guide
aaguugaccuucacaguaagua

SEQ ID NO: 73783 - RNA, 22 nt, Artificial Sequence
  LRRK2 RNA guide
aaugaaguugaccuucacagua

SEQ ID NO: 73784 - RNA, 22 nt, Artificial Sequence
  LRRK2 RNA guide
acaguaaguaaugggcuugaaa

SEQ ID NO: 73785 - RNA, 22 nt, Artificial Sequence
  LRRK2 RNA guide
accuucacaguaaguaaugggc

SEQ ID NO: 73786 - RNA, 22 nt, Artificial Sequence
  LRRK2 RNA guide
acuaaugaaguugaccuucaca

SEQ ID NO: 73787 - RNA, 22 nt, Artificial Sequence
  LRRK2 RNA guide
acuuacugugaaggucaacuuc

SEQ ID NO: 73788 - RNA, 22 nt, Artificial Sequence
  LRRK2 RNA guide
agcccauuacuuacugugaagg

SEQ ID NO: 73789 - RNA, 22 nt, Artificial Sequence
  LRRK2 RNA guide
aguaaguaaugggcuugaaaga

SEQ ID NO: 73790 - RNA, 22 nt, Artificial Sequence
  LRRK2 RNA guide
aguaaugggcuugaaagaaaaa

SEQ ID NO: 73791 - RNA, 22 nt, Artificial Sequence
  LRRK2 RNA guide
aguugaccuucacaguaaguaa

SEQ ID NO: 73792 - RNA, 22 nt, Artificial Sequence
  LRRK2 RNA guide
augaaguugaccuucacaguaa

SEQ ID NO: 73793 - RNA, 22 nt, Artificial Sequence
  LRRK2 RNA guide
auuacuuacugugaaggucaac

SEQ ID NO: 73794 - RNA, 22 nt, Artificial Sequence
  LRRK2 RNA guide
auuuuucuuucaagcccauuac

SEQ ID NO: 73795 - RNA, 22 nt, Artificial Sequence
  LRRK2 RNA guide
caagcccauuacuuacugugaa

SEQ ID NO: 73796 - RNA, 22 nt, Artificial Sequence
  LRRK2 RNA guide
cacaguaaguaaugggcuugaa

SEQ ID NO: 73797 - RNA, 22 nt, Artificial Sequence
  LRRK2 RNA guide
caguaaguaaugggcuugaaag

SEQ ID NO: 73798 - RNA, 22 nt, Artificial Sequence
  LRRK2 RNA guide
cauuacuuacugugaaggucaa

SEQ ID NO: 73799 - RNA, 22 nt, Artificial Sequence
  LRRK2 RNA guide
ccauuacuuacugugaagguca

SEQ ID NO: 73800 - RNA, 22 nt, Artificial Sequence
  LRRK2 RNA guide
cccauuacuuacugugaagguc

SEQ ID NO: 73801 - RNA, 22 nt, Artificial Sequence
  LRRK2 RNA guide
ccuucacaguaaguaaugggcu

SEQ ID NO: 73802 - RNA, 22 nt, Artificial Sequence
  LRRK2 RNA guide
cuaaugaaguugaccuucacag

SEQ ID NO: 73803 - RNA, 22 nt, Artificial Sequence
  LRRK2 RNA guide
cuucacaguaaguaaugggcuu

SEQ ID NO: 73804 - RNA, 22 nt, Artificial Sequence
  LRRK2 RNA guide
cuuucaagcccauuacuuacug

SEQ ID NO: 73805 - RNA, 22 nt, Artificial Sequence
  LRRK2 RNA guide
gaaguugaccuucacaguaagu

SEQ ID NO: 73806 - RNA, 22 nt, Artificial Sequence
  LRRK2 RNA guide
gaccuucacaguaaguaauggg

SEQ ID NO: 73807 - RNA, 22 nt, Artificial Sequence
  LRRK2 RNA guide
gcccauuacuuacugugaaggu

SEQ ID NO: 73808 - RNA, 22 nt, Artificial Sequence
  LRRK2 RNA guide
gguaaauuuuucuuucaagccc

SEQ ID NO: 73809 - RNA, 22 nt, Artificial Sequence
  LRRK2 RNA guide
guaaauuuuucuuucaagccca

SEQ ID NO: 73810 - RNA, 22 nt, Artificial Sequence
  LRRK2 RNA guide
guaaguaaugggcuugaaagaa

SEQ ID NO: 73811 - RNA, 22 nt, Artificial Sequence
  LRRK2 RNA guide
guugaccuucacaguaaguaau

SEQ ID NO: 73812 - RNA, 22 nt, Artificial Sequence
  LRRK2 RNA guide
uaaguaaugggcuugaaagaaa

SEQ ID NO: 73813 - RNA, 22 nt, Artificial Sequence
  LRRK2 RNA guide
uaaugaaguugaccuucacagu

SEQ ID NO: 73814 - RNA, 22 nt, Artificial Sequence
  LRRK2 RNA guide
uacuuacugugaaggucaacuu

SEQ ID NO: 73815 - RNA, 22 nt, Artificial Sequence
  LRRK2 RNA guide
ucaagcccauuacuuacuguga

SEQ ID NO: 73816 - RNA, 22 nt, Artificial Sequence
  LRRK2 RNA guide
ucacaguaaguaaugggcuuga

SEQ ID NO: 73817 - RNA, 22 nt, Artificial Sequence
  LRRK2 RNA guide
ucuuucaagcccauuacuuacu

SEQ ID NO: 73818 - RNA, 22 nt, Artificial Sequence
  LRRK2 RNA guide
ugaaguugaccuucacaguaag

SEQ ID NO: 73819 - RNA, 22 nt, Artificial Sequence
  LRRK2 RNA guide
ugaccuucacaguaaguaaugg

SEQ ID NO: 73820 - RNA, 22 nt, Artificial Sequence
  LRRK2 RNA guide
uuacuuacugugaaggucaacu

SEQ ID NO: 73821 - RNA, 22 nt, Artificial Sequence
  LRRK2 RNA guide
uucaagcccauuacuuacugug

SEQ ID NO: 73822 - RNA, 22 nt, Artificial Sequence
  LRRK2 RNA guide
uucacaguaaguaaugggcuug

SEQ ID NO: 73823 - RNA, 22 nt, Artificial Sequence
  LRRK2 RNA guide
uucuuucaagcccauuacuuac

SEQ ID NO: 73824 - RNA, 22 nt, Artificial Sequence
  LRRK2 RNA guide
uugaccuucacaguaaguaaug

SEQ ID NO: 73825 - RNA, 22 nt, Artificial Sequence
  LRRK2 RNA guide
uuucaagcccauuacuuacugu

SEQ ID NO: 73826 - RNA, 22 nt, Artificial Sequence
  LRRK2 RNA guide
uuucuuucaagcccauuacuua

SEQ ID NO: 73827 - RNA, 22 nt, Artificial Sequence
  LRRK2 RNA guide
uuuucuuucaagcccauuacuu

SEQ ID NO: 73828 - RNA, 22 nt, Artificial Sequence
  LRRK2 RNA guide
uuuuucuuucaagcccauuacu

SEQ ID NO: 73829 - RNA, 20 nt, Artificial Sequence
  LRRK2 RNA guide
aacuaaugggcuugaaagaa

SEQ ID NO: 73830 - RNA, 20 nt, Artificial Sequence
  LRRK2 RNA guide
aagcccauuaguuacuguga

SEQ ID NO: 73831 - RNA, 20 nt, Artificial Sequence
  LRRK2 RNA guide
aaguugaccuucacaguaac

SEQ ID NO: 73832 - RNA, 20 nt, Artificial Sequence
  LRRK2 RNA guide
acaguaacuaaugggcuuga

SEQ ID NO: 73833 - RNA, 20 nt, Artificial Sequence
  LRRK2 RNA guide
accuucacaguaacuaaugg

SEQ ID NO: 73834 - RNA, 20 nt, Artificial Sequence
  LRRK2 RNA guide
acuaaugggcuugaaagaaa

SEQ ID NO: 73835 - RNA, 20 nt, Artificial Sequence
  LRRK2 RNA guide
agcccauuaguuacugugaa

SEQ ID NO: 73836 - RNA, 20 nt, Artificial Sequence
  LRRK2 RNA guide
aguaacuaaugggcuugaaa

SEQ ID NO: 73837 - RNA, 20 nt, Artificial Sequence
  LRRK2 RNA guide
aguuacugugaaggucaacu

SEQ ID NO: 73838 - RNA, 20 nt, Artificial Sequence
  LRRK2 RNA guide
aguugaccuucacaguaacu

SEQ ID NO: 73839 - RNA, 20 nt, Artificial Sequence
  LRRK2 RNA guide
auuaguuacugugaagguca

SEQ ID NO: 73840 - RNA, 20 nt, Artificial Sequence
  LRRK2 RNA guide
caagcccauuaguuacugug

SEQ ID NO: 73841 - RNA, 20 nt, Artificial Sequence
  LRRK2 RNA guide
cacaguaacuaaugggcuug

SEQ ID NO: 73842 - RNA, 20 nt, Artificial Sequence
  LRRK2 RNA guide
caguaacuaaugggcuugaa

SEQ ID NO: 73843 - RNA, 20 nt, Artificial Sequence
  LRRK2 RNA guide
cauuaguuacugugaagguc

SEQ ID NO: 73844 - RNA, 20 nt, Artificial Sequence
  LRRK2 RNA guide
ccauuaguuacugugaaggu

SEQ ID NO: 73845 - RNA, 20 nt, Artificial Sequence
  LRRK2 RNA guide
cccauuaguuacugugaagg

SEQ ID NO: 73846 - RNA, 20 nt, Artificial Sequence
  LRRK2 RNA guide
ccuucacaguaacuaauggg

SEQ ID NO: 73847 - RNA, 20 nt, Artificial Sequence
  LRRK2 RNA guide
cuucacaguaacuaaugggc

SEQ ID NO: 73848 - RNA, 20 nt, Artificial Sequence
  LRRK2 RNA guide
cuuucaagcccauuaguuac

SEQ ID NO: 73849 - RNA, 20 nt, Artificial Sequence
  LRRK2 RNA guide
gaccuucacaguaacuaaug

SEQ ID NO: 73850 - RNA, 20 nt, Artificial Sequence
  LRRK2 RNA guide
gcccauuaguuacugugaag

SEQ ID NO: 73851 - RNA, 20 nt, Artificial Sequence
  LRRK2 RNA guide
guaacuaaugggcuugaaag

SEQ ID NO: 73852 - RNA, 20 nt, Artificial Sequence
  LRRK2 RNA guide
guugaccuucacaguaacua

SEQ ID NO: 73853 - RNA, 20 nt, Artificial Sequence
  LRRK2 RNA guide
uaacuaaugggcuugaaaga

SEQ ID NO: 73854 - RNA, 20 nt, Artificial Sequence
  LRRK2 RNA guide
uaguuacugugaaggucaac

SEQ ID NO: 73855 - RNA, 20 nt, Artificial Sequence
  LRRK2 RNA guide
ucaagcccauuaguuacugu

SEQ ID NO: 73856 - RNA, 20 nt, Artificial Sequence
  LRRK2 RNA guide
ucacaguaacuaaugggcuu

SEQ ID NO: 73857 - RNA, 20 nt, Artificial Sequence
  LRRK2 RNA guide
ucuuucaagcccauuaguua

SEQ ID NO: 73858 - RNA, 20 nt, Artificial Sequence
  LRRK2 RNA guide
ugaccuucacaguaacuaau

SEQ ID NO: 73859 - RNA, 20 nt, Artificial Sequence
  LRRK2 RNA guide
uuaguuacugugaaggucaa

SEQ ID NO: 73860 - RNA, 20 nt, Artificial Sequence
  LRRK2 RNA guide
uucaagcccauuaguuacug

SEQ ID NO: 73861 - RNA, 20 nt, Artificial Sequence
  LRRK2 RNA guide
uucacaguaacuaaugggcu

SEQ ID NO: 73862 - RNA, 20 nt, Artificial Sequence
  LRRK2 RNA guide
uucuuucaagcccauuaguu

SEQ ID NO: 73863 - RNA, 20 nt, Artificial Sequence
  LRRK2 RNA guide
uugaccuucacaguaacuaa

SEQ ID NO: 73864 - RNA, 20 nt, Artificial Sequence
  LRRK2 RNA guide
uuucaagcccauuaguuacu

SEQ ID NO: 73865 - RNA, 20 nt, Artificial Sequence
  LRRK2 RNA guide
uuucuuucaagcccauuagu

SEQ ID NO: 73866 - RNA, 20 nt, Artificial Sequence
  LRRK2 RNA guide
uuuucuuucaagcccauuag

SEQ ID NO: 73867 - RNA, 21 nt, Artificial Sequence
  LRRK2 RNA guide
aacuaaugggcuugaaagaaa

SEQ ID NO: 73868 - RNA, 21 nt, Artificial Sequence
  LRRK2 RNA guide
aagcccauuaguuacugugaa

SEQ ID NO: 73869 - RNA, 21 nt, Artificial Sequence
  LRRK2 RNA guide
aaguugaccuucacaguaacu

SEQ ID NO: 73870 - RNA, 21 nt, Artificial Sequence
  LRRK2 RNA guide
acaguaacuaaugggcuugaa

SEQ ID NO: 73871 - RNA, 21 nt, Artificial Sequence
  LRRK2 RNA guide
accuucacaguaacuaauggg

SEQ ID NO: 73872 - RNA, 21 nt, Artificial Sequence
  LRRK2 RNA guide
acuaaugggcuugaaagaaaa

SEQ ID NO: 73873 - RNA, 21 nt, Artificial Sequence
  LRRK2 RNA guide
agcccauuaguuacugugaag

SEQ ID NO: 73874 - RNA, 21 nt, Artificial Sequence
  LRRK2 RNA guide
aguaacuaaugggcuugaaag

SEQ ID NO: 73875 - RNA, 21 nt, Artificial Sequence
  LRRK2 RNA guide
aguuacugugaaggucaacuu

SEQ ID NO: 73876 - RNA, 21 nt, Artificial Sequence
  LRRK2 RNA guide
aguugaccuucacaguaacua

SEQ ID NO: 73877 - RNA, 21 nt, Artificial Sequence
  LRRK2 RNA guide
auuaguuacugugaaggucaa

SEQ ID NO: 73878 - RNA, 21 nt, Artificial Sequence
  LRRK2 RNA guide
caagcccauuaguuacuguga

SEQ ID NO: 73879 - RNA, 21 nt, Artificial Sequence
  LRRK2 RNA guide
cacaguaacuaaugggcuuga

SEQ ID NO: 73880 - RNA, 21 nt, Artificial Sequence
  LRRK2 RNA guide
caguaacuaaugggcuugaaa

SEQ ID NO: 73881 - RNA, 21 nt, Artificial Sequence
  LRRK2 RNA guide
cauuaguuacugugaagguca

SEQ ID NO: 73882 - RNA, 21 nt, Artificial Sequence
  LRRK2 RNA guide
ccauuaguuacugugaagguc

SEQ ID NO: 73883 - RNA, 21 nt, Artificial Sequence
  LRRK2 RNA guide
cccauuaguuacugugaaggu

SEQ ID NO: 73884 - RNA, 21 nt, Artificial Sequence
  LRRK2 RNA guide
ccuucacaguaacuaaugggc

SEQ ID NO: 73885 - RNA, 21 nt, Artificial Sequence
  LRRK2 RNA guide
cuucacaguaacuaaugggcu

SEQ ID NO: 73886 - RNA, 21 nt, Artificial Sequence
  LRRK2 RNA guide
cuuucaagcccauuaguuacu

SEQ ID NO: 73887 - RNA, 21 nt, Artificial Sequence
  LRRK2 RNA guide
gaaguugaccuucacaguaac

SEQ ID NO: 73888 - RNA, 21 nt, Artificial Sequence
  LRRK2 RNA guide
gaccuucacaguaacuaaugg

SEQ ID NO: 73889 - RNA, 21 nt, Artificial Sequence
  LRRK2 RNA guide
gcccauuaguuacugugaagg

SEQ ID NO: 73890 - RNA, 21 nt, Artificial Sequence
  LRRK2 RNA guide
guaacuaaugggcuugaaaga

SEQ ID NO: 73891 - RNA, 21 nt, Artificial Sequence
  LRRK2 RNA guide
guugaccuucacaguaacuaa

SEQ ID NO: 73892 - RNA, 21 nt, Artificial Sequence
  LRRK2 RNA guide
uaacuaaugggcuugaaagaa

SEQ ID NO: 73893 - RNA, 21 nt, Artificial Sequence
  LRRK2 RNA guide
uaguuacugugaaggucaacu

SEQ ID NO: 73894 - RNA, 21 nt, Artificial Sequence
  LRRK2 RNA guide
ucaagcccauuaguuacugug

SEQ ID NO: 73895 - RNA, 21 nt, Artificial Sequence
  LRRK2 RNA guide
ucacaguaacuaaugggcuug

SEQ ID NO: 73896 - RNA, 21 nt, Artificial Sequence
  LRRK2 RNA guide
ucuuucaagcccauuaguuac

SEQ ID NO: 73897 - RNA, 21 nt, Artificial Sequence
  LRRK2 RNA guide
ugaccuucacaguaacuaaug

SEQ ID NO: 73898 - RNA, 21 nt, Artificial Sequence
  LRRK2 RNA guide
uuaguuacugugaaggucaac

SEQ ID NO: 73899 - RNA, 21 nt, Artificial Sequence
  LRRK2 RNA guide
uucaagcccauuaguuacugu

SEQ ID NO: 73900 - RNA, 21 nt, Artificial Sequence
  LRRK2 RNA guide
uucacaguaacuaaugggcuu

SEQ ID NO: 73901 - RNA, 21 nt, Artificial Sequence
  LRRK2 RNA guide
uucuuucaagcccauuaguua

SEQ ID NO: 73902 - RNA, 21 nt, Artificial Sequence
  LRRK2 RNA guide
uugaccuucacaguaacuaau

SEQ ID NO: 73903 - RNA, 21 nt, Artificial Sequence
  LRRK2 RNA guide
uuucaagcccauuaguuacug

SEQ ID NO: 73904 - RNA, 21 nt, Artificial Sequence
  LRRK2 RNA guide
uuucuuucaagcccauuaguu

SEQ ID NO: 73905 - RNA, 21 nt, Artificial Sequence
  LRRK2 RNA guide
uuuucuuucaagcccauuagu

SEQ ID NO: 73906 - RNA, 21 nt, Artificial Sequence
  LRRK2 RNA guide
uuuuucuuucaagcccauuag

SEQ ID NO: 73907 - RNA, 22 nt, Artificial Sequence
  LRRK2 RNA guide
aacuaaugggcuugaaagaaaa

SEQ ID NO: 73908 - RNA, 22 nt, Artificial Sequence
  LRRK2 RNA guide
aagcccauuaguuacugugaag

SEQ ID NO: 73909 - RNA, 22 nt, Artificial Sequence
  LRRK2 RNA guide
aaguugaccuucacaguaacua

SEQ ID NO: 73910 - RNA, 22 nt, Artificial Sequence
  LRRK2 RNA guide
acaguaacuaaugggcuugaaa

SEQ ID NO: 73911 - RNA, 22 nt, Artificial Sequence
  LRRK2 RNA guide
accuucacaguaacuaaugggc

SEQ ID NO: 73912 - RNA, 22 nt, Artificial Sequence
  LRRK2 RNA guide
acuaaugggcuugaaagaaaaa

SEQ ID NO: 73913 - RNA, 22 nt, Artificial Sequence
  LRRK2 RNA guide
agcccauuaguuacugugaagg

SEQ ID NO: 73914 - RNA, 22 nt, Artificial Sequence
  LRRK2 RNA guide
aguaacuaaugggcuugaaaga

SEQ ID NO: 73915 - RNA, 22 nt, Artificial Sequence
  LRRK2 RNA guide
aguuacugugaaggucaacuuc

SEQ ID NO: 73916 - RNA, 22 nt, Artificial Sequence
  LRRK2 RNA guide
aguugaccuucacaguaacuaa

SEQ ID NO: 73917 - RNA, 22 nt, Artificial Sequence
  LRRK2 RNA guide
auuaguuacugugaaggucaac

SEQ ID NO: 73918 - RNA, 22 nt, Artificial Sequence
  LRRK2 RNA guide
auuuuucuuucaagcccauuag

SEQ ID NO: 73919 - RNA, 22 nt, Artificial Sequence
  LRRK2 RNA guide
caagcccauuaguuacugugaa

SEQ ID NO: 73920 - RNA, 22 nt, Artificial Sequence
  LRRK2 RNA guide
cacaguaacuaaugggcuugaa

SEQ ID NO: 73921 - RNA, 22 nt, Artificial Sequence
  LRRK2 RNA guide
caguaacuaaugggcuugaaag

SEQ ID NO: 73922 - RNA, 22 nt, Artificial Sequence
  LRRK2 RNA guide
cauuaguuacugugaaggucaa

SEQ ID NO: 73923 - RNA, 22 nt, Artificial Sequence
  LRRK2 RNA guide
ccauuaguuacugugaagguca

SEQ ID NO: 73924 - RNA, 22 nt, Artificial Sequence
  LRRK2 RNA guide
cccauuaguuacugugaagguc

SEQ ID NO: 73925 - RNA, 22 nt, Artificial Sequence
  LRRK2 RNA guide
ccuucacaguaacuaaugggcu

SEQ ID NO: 73926 - RNA, 22 nt, Artificial Sequence
  LRRK2 RNA guide
cuucacaguaacuaaugggcuu

SEQ ID NO: 73927 - RNA, 22 nt, Artificial Sequence
  LRRK2 RNA guide
cuuucaagcccauuaguuacug

SEQ ID NO: 73928 - RNA, 22 nt, Artificial Sequence
  LRRK2 RNA guide
gaaguugaccuucacaguaacu

SEQ ID NO: 73929 - RNA, 22 nt, Artificial Sequence
  LRRK2 RNA guide
gaccuucacaguaacuaauggg

SEQ ID NO: 73930 - RNA, 22 nt, Artificial Sequence
  LRRK2 RNA guide
gcccauuaguuacugugaaggu

SEQ ID NO: 73931 - RNA, 22 nt, Artificial Sequence
  LRRK2 RNA guide
guaacuaaugggcuugaaagaa

SEQ ID NO: 73932 - RNA, 22 nt, Artificial Sequence
  LRRK2 RNA guide
guugaccuucacaguaacuaau

SEQ ID NO: 73933 - RNA, 22 nt, Artificial Sequence
  LRRK2 RNA guide
uaacuaaugggcuugaaagaaa

SEQ ID NO: 73934 - RNA, 22 nt, Artificial Sequence
  LRRK2 RNA guide
uaguuacugugaaggucaacuu

SEQ ID NO: 73935 - RNA, 22 nt, Artificial Sequence
  LRRK2 RNA guide
ucaagcccauuaguuacuguga

SEQ ID NO: 73936 - RNA, 22 nt, Artificial Sequence
  LRRK2 RNA guide
ucacaguaacuaaugggcuuga

SEQ ID NO: 73937 - RNA, 22 nt, Artificial Sequence
  LRRK2 RNA guide
ucuuucaagcccauuaguuacu

SEQ ID NO: 73938 - RNA, 22 nt, Artificial Sequence
  LRRK2 RNA guide
ugaaguugaccuucacaguaac

SEQ ID NO: 73939 - RNA, 22 nt, Artificial Sequence
  LRRK2 RNA guide
ugaccuucacaguaacuaaugg

SEQ ID NO: 73940 - RNA, 22 nt, Artificial Sequence
  LRRK2 RNA guide
uuaguuacugugaaggucaacu

SEQ ID NO: 73941 - RNA, 22 nt, Artificial Sequence
  LRRK2 RNA guide
uucaagcccauuaguuacugug

SEQ ID NO: 73942 - RNA, 22 nt, Artificial Sequence
  LRRK2 RNA guide
uucacaguaacuaaugggcuug

SEQ ID NO: 73943 - RNA, 22 nt, Artificial Sequence
  LRRK2 RNA guide
uucuuucaagcccauuaguuac

SEQ ID NO: 73944 - RNA, 22 nt, Artificial Sequence
  LRRK2 RNA guide
uugaccuucacaguaacuaaug

SEQ ID NO: 73945 - RNA, 22 nt, Artificial Sequence
  LRRK2 RNA guide
uuucaagcccauuaguuacugu

SEQ ID NO: 73946 - RNA, 22 nt, Artificial Sequence
  LRRK2 RNA guide
uuucuuucaagcccauuaguua

SEQ ID NO: 73947 - RNA, 22 nt, Artificial Sequence
  LRRK2 RNA guide
uuuucuuucaagcccauuaguu

SEQ ID NO: 73948 - RNA, 22 nt, Artificial Sequence
  LRRK2 RNA guide
uuuuucuuucaagcccauuagu

SEQ ID NO: 73949 - RNA, 20 nt, Artificial Sequence
  LRRK2 RNA guide
aaauaauauguacucuccag

SEQ ID NO: 73950 - RNA, 20 nt, Artificial Sequence
  LRRK2 RNA guide
aacuuucaauuguaugaggg

SEQ ID NO: 73951 - RNA, 20 nt, Artificial Sequence
  LRRK2 RNA guide
aauaauauguacucuccagg

SEQ ID NO: 73952 - RNA, 20 nt, Artificial Sequence
  LRRK2 RNA guide
aauauguacucuccaggccc

SEQ ID NO: 73953 - RNA, 20 nt, Artificial Sequence
  LRRK2 RNA guide
aauuguaugagggccuggag

SEQ ID NO: 73954 - RNA, 20 nt, Artificial Sequence
  LRRK2 RNA guide
acccugaacuuucaauugua

SEQ ID NO: 73955 - RNA, 20 nt, Artificial Sequence
  LRRK2 RNA guide
acucuccaggcccucauaca

SEQ ID NO: 73956 - RNA, 20 nt, Artificial Sequence
  LRRK2 RNA guide
acuuucaauuguaugagggc

SEQ ID NO: 73957 - RNA, 20 nt, Artificial Sequence
  LRRK2 RNA guide
aggcccucauacaauugaaa

SEQ ID NO: 73958 - RNA, 20 nt, Artificial Sequence
  LRRK2 RNA guide
agggccuggagaguacauau

SEQ ID NO: 73959 - RNA, 20 nt, Artificial Sequence
  LRRK2 RNA guide
auaauauguacucuccaggc

SEQ ID NO: 73960 - RNA, 20 nt, Artificial Sequence
  LRRK2 RNA guide
auauguacucuccaggcccu

SEQ ID NO: 73961 - RNA, 20 nt, Artificial Sequence
  LRRK2 RNA guide
augagggccuggagaguaca

SEQ ID NO: 73962 - RNA, 20 nt, Artificial Sequence
  LRRK2 RNA guide
auguacucuccaggcccuca

SEQ ID NO: 73963 - RNA, 20 nt, Artificial Sequence
  LRRK2 RNA guide
auuguaugagggccuggaga

SEQ ID NO: 73964 - RNA, 20 nt, Artificial Sequence
  LRRK2 RNA guide
caauuguaugagggccugga

SEQ ID NO: 73965 - RNA, 20 nt, Artificial Sequence
  LRRK2 RNA guide
caggcccucauacaauugaa

SEQ ID NO: 73966 - RNA, 20 nt, Artificial Sequence
  LRRK2 RNA guide
ccaggcccucauacaauuga

SEQ ID NO: 73967 - RNA, 20 nt, Artificial Sequence
  LRRK2 RNA guide
cccucauacaauugaaaguu

SEQ ID NO: 73968 - RNA, 20 nt, Artificial Sequence
  LRRK2 RNA guide
cccugaacuuucaauuguau

SEQ ID NO: 73969 - RNA, 20 nt, Artificial Sequence
  LRRK2 RNA guide
ccucauacaauugaaaguuc

SEQ ID NO: 73970 - RNA, 20 nt, Artificial Sequence
  LRRK2 RNA guide
cuccaggcccucauacaauu

SEQ ID NO: 73971 - RNA, 20 nt, Artificial Sequence
  LRRK2 RNA guide
cucuccaggcccucauacaa

SEQ ID NO: 73972 - RNA, 20 nt, Artificial Sequence
  LRRK2 RNA guide
cugaacuuucaauuguauga

SEQ ID NO: 73973 - RNA, 20 nt, Artificial Sequence
  LRRK2 RNA guide
cuuucaauuguaugagggcc

SEQ ID NO: 73974 - RNA, 20 nt, Artificial Sequence
  LRRK2 RNA guide
gaacuuucaauuguaugagg

SEQ ID NO: 73975 - RNA, 20 nt, Artificial Sequence
  LRRK2 RNA guide
gagggccuggagaguacaua

SEQ ID NO: 73976 - RNA, 20 nt, Artificial Sequence
  LRRK2 RNA guide
gcccucauacaauugaaagu

SEQ ID NO: 73977 - RNA, 20 nt, Artificial Sequence
  LRRK2 RNA guide
ggcccucauacaauugaaag

SEQ ID NO: 73978 - RNA, 20 nt, Artificial Sequence
  LRRK2 RNA guide
guacucuccaggcccucaua

SEQ ID NO: 73979 - RNA, 20 nt, Artificial Sequence
  LRRK2 RNA guide
guaugagggccuggagagua

SEQ ID NO: 73980 - RNA, 20 nt, Artificial Sequence
  LRRK2 RNA guide
uaauauguacucuccaggcc

SEQ ID NO: 73981 - RNA, 20 nt, Artificial Sequence
  LRRK2 RNA guide
uacccugaacuuucaauugu

SEQ ID NO: 73982 - RNA, 20 nt, Artificial Sequence
  LRRK2 RNA guide
uacucuccaggcccucauac

SEQ ID NO: 73983 - RNA, 20 nt, Artificial Sequence
  LRRK2 RNA guide
uaugagggccuggagaguac

SEQ ID NO: 73984 - RNA, 20 nt, Artificial Sequence
  LRRK2 RNA guide
uauguacucuccaggcccuc

SEQ ID NO: 73985 - RNA, 20 nt, Artificial Sequence
  LRRK2 RNA guide
ucaauuguaugagggccugg

SEQ ID NO: 73986 - RNA, 20 nt, Artificial Sequence
  LRRK2 RNA guide
uccaggcccucauacaauug

SEQ ID NO: 73987 - RNA, 20 nt, Artificial Sequence
  LRRK2 RNA guide
ucuccaggcccucauacaau

SEQ ID NO: 73988 - RNA, 20 nt, Artificial Sequence
  LRRK2 RNA guide
ugaacuuucaauuguaugag

SEQ ID NO: 73989 - RNA, 20 nt, Artificial Sequence
  LRRK2 RNA guide
ugagggccuggagaguacau

SEQ ID NO: 73990 - RNA, 20 nt, Artificial Sequence
  LRRK2 RNA guide
uguacucuccaggcccucau

SEQ ID NO: 73991 - RNA, 20 nt, Artificial Sequence
  LRRK2 RNA guide
uguaugagggccuggagagu

SEQ ID NO: 73992 - RNA, 20 nt, Artificial Sequence
  LRRK2 RNA guide
uuguaugagggccuggagag

SEQ ID NO: 73993 - RNA, 20 nt, Artificial Sequence
  LRRK2 RNA guide
uuucaauuguaugagggccu

SEQ ID NO: 73994 - RNA, 21 nt, Artificial Sequence
  LRRK2 RNA guide
aaauaauauguacucuccagg

SEQ ID NO: 73995 - RNA, 21 nt, Artificial Sequence
  LRRK2 RNA guide
aacuuucaauuguaugagggc

SEQ ID NO: 73996 - RNA, 21 nt, Artificial Sequence
  LRRK2 RNA guide
aauaauauguacucuccaggc

SEQ ID NO: 73997 - RNA, 21 nt, Artificial Sequence
  LRRK2 RNA guide
aauauguacucuccaggcccu

SEQ ID NO: 73998 - RNA, 21 nt, Artificial Sequence
  LRRK2 RNA guide
aauuguaugagggccuggaga

SEQ ID NO: 73999 - RNA, 21 nt, Artificial Sequence
  LRRK2 RNA guide
acccugaacuuucaauuguau

SEQ ID NO: 74000 - RNA, 21 nt, Artificial Sequence
  LRRK2 RNA guide
acucuccaggcccucauacaa

SEQ ID NO: 74001 - RNA, 21 nt, Artificial Sequence
  LRRK2 RNA guide
acuuucaauuguaugagggcc

SEQ ID NO: 74002 - RNA, 21 nt, Artificial Sequence
  LRRK2 RNA guide
aggcccucauacaauugaaag

SEQ ID NO: 74003 - RNA, 21 nt, Artificial Sequence
  LRRK2 RNA guide
agggccuggagaguacauauu

SEQ ID NO: 74004 - RNA, 21 nt, Artificial Sequence
  LRRK2 RNA guide
auaauauguacucuccaggcc

SEQ ID NO: 74005 - RNA, 21 nt, Artificial Sequence
  LRRK2 RNA guide
auacccugaacuuucaauugu

SEQ ID NO: 74006 - RNA, 21 nt, Artificial Sequence
  LRRK2 RNA guide
auauguacucuccaggcccuc

SEQ ID NO: 74007 - RNA, 21 nt, Artificial Sequence
  LRRK2 RNA guide
augagggccuggagaguacau

SEQ ID NO: 74008 - RNA, 21 nt, Artificial Sequence
  LRRK2 RNA guide
auguacucuccaggcccucau

SEQ ID NO: 74009 - RNA, 21 nt, Artificial Sequence
  LRRK2 RNA guide
auuguaugagggccuggagag

SEQ ID NO: 74010 - RNA, 21 nt, Artificial Sequence
  LRRK2 RNA guide
caauuguaugagggccuggag

SEQ ID NO: 74011 - RNA, 21 nt, Artificial Sequence
  LRRK2 RNA guide
caggcccucauacaauugaaa

SEQ ID NO: 74012 - RNA, 21 nt, Artificial Sequence
  LRRK2 RNA guide
ccaggcccucauacaauugaa

SEQ ID NO: 74013 - RNA, 21 nt, Artificial Sequence
  LRRK2 RNA guide
cccucauacaauugaaaguuc

SEQ ID NO: 74014 - RNA, 21 nt, Artificial Sequence
  LRRK2 RNA guide
cccugaacuuucaauuguaug

SEQ ID NO: 74015 - RNA, 21 nt, Artificial Sequence
  LRRK2 RNA guide
ccucauacaauugaaaguuca

SEQ ID NO: 74016 - RNA, 21 nt, Artificial Sequence
  LRRK2 RNA guide
ccugaacuuucaauuguauga

SEQ ID NO: 74017 - RNA, 21 nt, Artificial Sequence
  LRRK2 RNA guide
cuccaggcccucauacaauug

SEQ ID NO: 74018 - RNA, 21 nt, Artificial Sequence
  LRRK2 RNA guide
cucuccaggcccucauacaau

SEQ ID NO: 74019 - RNA, 21 nt, Artificial Sequence
  LRRK2 RNA guide
cugaacuuucaauuguaugag

SEQ ID NO: 74020 - RNA, 21 nt, Artificial Sequence
  LRRK2 RNA guide
cuuucaauuguaugagggccu

SEQ ID NO: 74021 - RNA, 21 nt, Artificial Sequence
  LRRK2 RNA guide
gaacuuucaauuguaugaggg

SEQ ID NO: 74022 - RNA, 21 nt, Artificial Sequence
  LRRK2 RNA guide
gagggccuggagaguacauau

SEQ ID NO: 74023 - RNA, 21 nt, Artificial Sequence
  LRRK2 RNA guide
gcccucauacaauugaaaguu

SEQ ID NO: 74024 - RNA, 21 nt, Artificial Sequence
  LRRK2 RNA guide
ggcccucauacaauugaaagu

SEQ ID NO: 74025 - RNA, 21 nt, Artificial Sequence
  LRRK2 RNA guide
guacucuccaggcccucauac

SEQ ID NO: 74026 - RNA, 21 nt, Artificial Sequence
  LRRK2 RNA guide
guaugagggccuggagaguac

SEQ ID NO: 74027 - RNA, 21 nt, Artificial Sequence
  LRRK2 RNA guide
uaauauguacucuccaggccc

SEQ ID NO: 74028 - RNA, 21 nt, Artificial Sequence
  LRRK2 RNA guide
uacccugaacuuucaauugua

SEQ ID NO: 74029 - RNA, 21 nt, Artificial Sequence
  LRRK2 RNA guide
uacucuccaggcccucauaca

SEQ ID NO: 74030 - RNA, 21 nt, Artificial Sequence
  LRRK2 RNA guide
uaugagggccuggagaguaca

SEQ ID NO: 74031 - RNA, 21 nt, Artificial Sequence
  LRRK2 RNA guide
uauguacucuccaggcccuca

SEQ ID NO: 74032 - RNA, 21 nt, Artificial Sequence
  LRRK2 RNA guide
ucaauuguaugagggccugga

SEQ ID NO: 74033 - RNA, 21 nt, Artificial Sequence
  LRRK2 RNA guide
uccaggcccucauacaauuga

SEQ ID NO: 74034 - RNA, 21 nt, Artificial Sequence
  LRRK2 RNA guide
ucuccaggcccucauacaauu

SEQ ID NO: 74035 - RNA, 21 nt, Artificial Sequence
  LRRK2 RNA guide
ugaacuuucaauuguaugagg

SEQ ID NO: 74036 - RNA, 21 nt, Artificial Sequence
  LRRK2 RNA guide
ugagggccuggagaguacaua

SEQ ID NO: 74037 - RNA, 21 nt, Artificial Sequence
  LRRK2 RNA guide
uguacucuccaggcccucaua

SEQ ID NO: 74038 - RNA, 21 nt, Artificial Sequence
  LRRK2 RNA guide
uguaugagggccuggagagua

SEQ ID NO: 74039 - RNA, 21 nt, Artificial Sequence
  LRRK2 RNA guide
uucaauuguaugagggccugg

SEQ ID NO: 74040 - RNA, 21 nt, Artificial Sequence
  LRRK2 RNA guide
uuguaugagggccuggagagu

SEQ ID NO: 74041 - RNA, 21 nt, Artificial Sequence
  LRRK2 RNA guide
uuucaauuguaugagggccug

SEQ ID NO: 74042 - RNA, 22 nt, Artificial Sequence
  LRRK2 RNA guide
aaauaauauguacucuccaggc

SEQ ID NO: 74043 - RNA, 22 nt, Artificial Sequence
  LRRK2 RNA guide
aacuuucaauuguaugagggcc

SEQ ID NO: 74044 - RNA, 22 nt, Artificial Sequence
  LRRK2 RNA guide
aauaauauguacucuccaggcc

SEQ ID NO: 74045 - RNA, 22 nt, Artificial Sequence
  LRRK2 RNA guide
aauauguacucuccaggcccuc

SEQ ID NO: 74046 - RNA, 22 nt, Artificial Sequence
  LRRK2 RNA guide
aauuguaugagggccuggagag

SEQ ID NO: 74047 - RNA, 22 nt, Artificial Sequence
  LRRK2 RNA guide
acccugaacuuucaauuguaug

SEQ ID NO: 74048 - RNA, 22 nt, Artificial Sequence
  LRRK2 RNA guide
acucuccaggcccucauacaau

SEQ ID NO: 74049 - RNA, 22 nt, Artificial Sequence
  LRRK2 RNA guide
acuuucaauuguaugagggccu

SEQ ID NO: 74050 - RNA, 22 nt, Artificial Sequence
  LRRK2 RNA guide
aggcccucauacaauugaaagu

SEQ ID NO: 74051 - RNA, 22 nt, Artificial Sequence
  LRRK2 RNA guide
agggccuggagaguacauauua

SEQ ID NO: 74052 - RNA, 22 nt, Artificial Sequence
  LRRK2 RNA guide
auaauauguacucuccaggccc

SEQ ID NO: 74053 - RNA, 22 nt, Artificial Sequence
  LRRK2 RNA guide
auacccugaacuuucaauugua

SEQ ID NO: 74054 - RNA, 22 nt, Artificial Sequence
  LRRK2 RNA guide
auauguacucuccaggcccuca

SEQ ID NO: 74055 - RNA, 22 nt, Artificial Sequence
  LRRK2 RNA guide
augagggccuggagaguacaua

SEQ ID NO: 74056 - RNA, 22 nt, Artificial Sequence
  LRRK2 RNA guide
auguacucuccaggcccucaua

SEQ ID NO: 74057 - RNA, 22 nt, Artificial Sequence
  LRRK2 RNA guide
auuguaugagggccuggagagu

SEQ ID NO: 74058 - RNA, 22 nt, Artificial Sequence
  LRRK2 RNA guide
caauuguaugagggccuggaga

SEQ ID NO: 74059 - RNA, 22 nt, Artificial Sequence
  LRRK2 RNA guide
caggcccucauacaauugaaag

SEQ ID NO: 74060 - RNA, 22 nt, Artificial Sequence
  LRRK2 RNA guide
ccaggcccucauacaauugaaa

SEQ ID NO: 74061 - RNA, 22 nt, Artificial Sequence
  LRRK2 RNA guide
cccucauacaauugaaaguuca

SEQ ID NO: 74062 - RNA, 22 nt, Artificial Sequence
  LRRK2 RNA guide
cccugaacuuucaauuguauga

SEQ ID NO: 74063 - RNA, 22 nt, Artificial Sequence
  LRRK2 RNA guide
ccucauacaauugaaaguucag

SEQ ID NO: 74064 - RNA, 22 nt, Artificial Sequence
  LRRK2 RNA guide
ccugaacuuucaauuguaugag

SEQ ID NO: 74065 - RNA, 22 nt, Artificial Sequence
  LRRK2 RNA guide
cuccaggcccucauacaauuga

SEQ ID NO: 74066 - RNA, 22 nt, Artificial Sequence
  LRRK2 RNA guide
cucuccaggcccucauacaauu

SEQ ID NO: 74067 - RNA, 22 nt, Artificial Sequence
  LRRK2 RNA guide
cugaacuuucaauuguaugagg

SEQ ID NO: 74068 - RNA, 22 nt, Artificial Sequence
  LRRK2 RNA guide
cuuucaauuguaugagggccug

SEQ ID NO: 74069 - RNA, 22 nt, Artificial Sequence
  LRRK2 RNA guide
gaacuuucaauuguaugagggc

SEQ ID NO: 74070 - RNA, 22 nt, Artificial Sequence
  LRRK2 RNA guide
gagggccuggagaguacauauu

SEQ ID NO: 74071 - RNA, 22 nt, Artificial Sequence
  LRRK2 RNA guide
gauacccugaacuuucaauugu

SEQ ID NO: 74072 - RNA, 22 nt, Artificial Sequence
  LRRK2 RNA guide
gcccucauacaauugaaaguuc

SEQ ID NO: 74073 - RNA, 22 nt, Artificial Sequence
  LRRK2 RNA guide
ggcccucauacaauugaaaguu

SEQ ID NO: 74074 - RNA, 22 nt, Artificial Sequence
  LRRK2 RNA guide
guacucuccaggcccucauaca

SEQ ID NO: 74075 - RNA, 22 nt, Artificial Sequence
  LRRK2 RNA guide
guaugagggccuggagaguaca

SEQ ID NO: 74076 - RNA, 22 nt, Artificial Sequence
  LRRK2 RNA guide
uaaauaauauguacucuccagg

SEQ ID NO: 74077 - RNA, 22 nt, Artificial Sequence
  LRRK2 RNA guide
uaauauguacucuccaggcccu

SEQ ID NO: 74078 - RNA, 22 nt, Artificial Sequence
  LRRK2 RNA guide
uacccugaacuuucaauuguau

SEQ ID NO: 74079 - RNA, 22 nt, Artificial Sequence
  LRRK2 RNA guide
uacucuccaggcccucauacaa

SEQ ID NO: 74080 - RNA, 22 nt, Artificial Sequence
  LRRK2 RNA guide
uaugagggccuggagaguacau

SEQ ID NO: 74081 - RNA, 22 nt, Artificial Sequence
  LRRK2 RNA guide
uauguacucuccaggcccucau

SEQ ID NO: 74082 - RNA, 22 nt, Artificial Sequence
  LRRK2 RNA guide
ucaauuguaugagggccuggag

SEQ ID NO: 74083 - RNA, 22 nt, Artificial Sequence
  LRRK2 RNA guide
uccaggcccucauacaauugaa

SEQ ID NO: 74084 - RNA, 22 nt, Artificial Sequence
  LRRK2 RNA guide
ucuccaggcccucauacaauug

SEQ ID NO: 74085 - RNA, 22 nt, Artificial Sequence
  LRRK2 RNA guide
ugaacuuucaauuguaugaggg

SEQ ID NO: 74086 - RNA, 22 nt, Artificial Sequence
  LRRK2 RNA guide
ugagggccuggagaguacauau

SEQ ID NO: 74087 - RNA, 22 nt, Artificial Sequence
  LRRK2 RNA guide
uguacucuccaggcccucauac

SEQ ID NO: 74088 - RNA, 22 nt, Artificial Sequence
  LRRK2 RNA guide
uguaugagggccuggagaguac

SEQ ID NO: 74089 - RNA, 22 nt, Artificial Sequence
  LRRK2 RNA guide
uucaauuguaugagggccugga

SEQ ID NO: 74090 - RNA, 22 nt, Artificial Sequence
  LRRK2 RNA guide
uuguaugagggccuggagagua

SEQ ID NO: 74091 - RNA, 22 nt, Artificial Sequence
  LRRK2 RNA guide
uuucaauuguaugagggccugg

SEQ ID NO: 74092 - RNA, 20 nt, Artificial Sequence
  LRRK2 RNA guide
aacuuucaauuguaugaugg

SEQ ID NO: 74093 - RNA, 20 nt, Artificial Sequence
  LRRK2 RNA guide
aauauguacucuccaggcca

SEQ ID NO: 74094 - RNA, 20 nt, Artificial Sequence
  LRRK2 RNA guide
aauuguaugauggccuggag

SEQ ID NO: 74095 - RNA, 20 nt, Artificial Sequence
  LRRK2 RNA guide
acucuccaggccaucauaca

SEQ ID NO: 74096 - RNA, 20 nt, Artificial Sequence
  LRRK2 RNA guide
acuuucaauuguaugauggc

SEQ ID NO: 74097 - RNA, 20 nt, Artificial Sequence
  LRRK2 RNA guide
aggccaucauacaauugaaa

SEQ ID NO: 74098 - RNA, 20 nt, Artificial Sequence
  LRRK2 RNA guide
auauguacucuccaggccau

SEQ ID NO: 74099 - RNA, 20 nt, Artificial Sequence
  LRRK2 RNA guide
augauggccuggagaguaca

SEQ ID NO: 74100 - RNA, 20 nt, Artificial Sequence
  LRRK2 RNA guide
auggccuggagaguacauau

SEQ ID NO: 74101 - RNA, 20 nt, Artificial Sequence
  LRRK2 RNA guide
auguacucuccaggccauca

SEQ ID NO: 74102 - RNA, 20 nt, Artificial Sequence
  LRRK2 RNA guide
auuguaugauggccuggaga

SEQ ID NO: 74103 - RNA, 20 nt, Artificial Sequence
  LRRK2 RNA guide
caauuguaugauggccugga

SEQ ID NO: 74104 - RNA, 20 nt, Artificial Sequence
  LRRK2 RNA guide
caggccaucauacaauugaa

SEQ ID NO: 74105 - RNA, 20 nt, Artificial Sequence
  LRRK2 RNA guide
caucauacaauugaaaguuc

SEQ ID NO: 74106 - RNA, 20 nt, Artificial Sequence
  LRRK2 RNA guide
ccaggccaucauacaauuga

SEQ ID NO: 74107 - RNA, 20 nt, Artificial Sequence
  LRRK2 RNA guide
ccaucauacaauugaaaguu

SEQ ID NO: 74108 - RNA, 20 nt, Artificial Sequence
  LRRK2 RNA guide
cuccaggccaucauacaauu

SEQ ID NO: 74109 - RNA, 20 nt, Artificial Sequence
  LRRK2 RNA guide
cucuccaggccaucauacaa

SEQ ID NO: 74110 - RNA, 20 nt, Artificial Sequence
  LRRK2 RNA guide
cuuucaauuguaugauggcc

SEQ ID NO: 74111 - RNA, 20 nt, Artificial Sequence
  LRRK2 RNA guide
gaacuuucaauuguaugaug

SEQ ID NO: 74112 - RNA, 20 nt, Artificial Sequence
  LRRK2 RNA guide
gauggccuggagaguacaua

SEQ ID NO: 74113 - RNA, 20 nt, Artificial Sequence
  LRRK2 RNA guide
gccaucauacaauugaaagu

SEQ ID NO: 74114 - RNA, 20 nt, Artificial Sequence
  LRRK2 RNA guide
ggccaucauacaauugaaag

SEQ ID NO: 74115 - RNA, 20 nt, Artificial Sequence
  LRRK2 RNA guide
guacucuccaggccaucaua

SEQ ID NO: 74116 - RNA, 20 nt, Artificial Sequence
  LRRK2 RNA guide
guaugauggccuggagagua

SEQ ID NO: 74117 - RNA, 20 nt, Artificial Sequence
  LRRK2 RNA guide
uacucuccaggccaucauac

SEQ ID NO: 74118 - RNA, 20 nt, Artificial Sequence
  LRRK2 RNA guide
uaugauggccuggagaguac

SEQ ID NO: 74119 - RNA, 20 nt, Artificial Sequence
  LRRK2 RNA guide
uauguacucuccaggccauc

SEQ ID NO: 74120 - RNA, 20 nt, Artificial Sequence
  LRRK2 RNA guide
ucaauuguaugauggccugg

SEQ ID NO: 74121 - RNA, 20 nt, Artificial Sequence
  LRRK2 RNA guide
uccaggccaucauacaauug

SEQ ID NO: 74122 - RNA, 20 nt, Artificial Sequence
  LRRK2 RNA guide
ucuccaggccaucauacaau

SEQ ID NO: 74123 - RNA, 20 nt, Artificial Sequence
  LRRK2 RNA guide
ugauggccuggagaguacau

SEQ ID NO: 74124 - RNA, 20 nt, Artificial Sequence
  LRRK2 RNA guide
uguacucuccaggccaucau

SEQ ID NO: 74125 - RNA, 20 nt, Artificial Sequence
  LRRK2 RNA guide
uguaugauggccuggagagu

SEQ ID NO: 74126 - RNA, 20 nt, Artificial Sequence
  LRRK2 RNA guide
uucaauuguaugauggccug

SEQ ID NO: 74127 - RNA, 20 nt, Artificial Sequence
  LRRK2 RNA guide
uuguaugauggccuggagag

SEQ ID NO: 74128 - RNA, 20 nt, Artificial Sequence
  LRRK2 RNA guide
uuucaauuguaugauggccu

SEQ ID NO: 74129 - RNA, 21 nt, Artificial Sequence
  LRRK2 RNA guide
aacuuucaauuguaugauggc

SEQ ID NO: 74130 - RNA, 21 nt, Artificial Sequence
  LRRK2 RNA guide
aauauguacucuccaggccau

SEQ ID NO: 74131 - RNA, 21 nt, Artificial Sequence
  LRRK2 RNA guide
aauuguaugauggccuggaga

SEQ ID NO: 74132 - RNA, 21 nt, Artificial Sequence
  LRRK2 RNA guide
acucuccaggccaucauacaa

SEQ ID NO: 74133 - RNA, 21 nt, Artificial Sequence
  LRRK2 RNA guide
acuuucaauuguaugauggcc

SEQ ID NO: 74134 - RNA, 21 nt, Artificial Sequence
  LRRK2 RNA guide
aggccaucauacaauugaaag

SEQ ID NO: 74135 - RNA, 21 nt, Artificial Sequence
  LRRK2 RNA guide
auauguacucuccaggccauc

SEQ ID NO: 74136 - RNA, 21 nt, Artificial Sequence
  LRRK2 RNA guide
augauggccuggagaguacau

SEQ ID NO: 74137 - RNA, 21 nt, Artificial Sequence
  LRRK2 RNA guide
auggccuggagaguacauauu

SEQ ID NO: 74138 - RNA, 21 nt, Artificial Sequence
  LRRK2 RNA guide
auguacucuccaggccaucau

SEQ ID NO: 74139 - RNA, 21 nt, Artificial Sequence
  LRRK2 RNA guide
auuguaugauggccuggagag

SEQ ID NO: 74140 - RNA, 21 nt, Artificial Sequence
  LRRK2 RNA guide
caauuguaugauggccuggag

SEQ ID NO: 74141 - RNA, 21 nt, Artificial Sequence
  LRRK2 RNA guide
caggccaucauacaauugaaa

SEQ ID NO: 74142 - RNA, 21 nt, Artificial Sequence
  LRRK2 RNA guide
ccaggccaucauacaauugaa

SEQ ID NO: 74143 - RNA, 21 nt, Artificial Sequence
  LRRK2 RNA guide
ccaucauacaauugaaaguuc

SEQ ID NO: 74144 - RNA, 21 nt, Artificial Sequence
  LRRK2 RNA guide
cuccaggccaucauacaauug

SEQ ID NO: 74145 - RNA, 21 nt, Artificial Sequence
  LRRK2 RNA guide
cucuccaggccaucauacaau

SEQ ID NO: 74146 - RNA, 21 nt, Artificial Sequence
  LRRK2 RNA guide
cuuucaauuguaugauggccu

SEQ ID NO: 74147 - RNA, 21 nt, Artificial Sequence
  LRRK2 RNA guide
gaacuuucaauuguaugaugg

SEQ ID NO: 74148 - RNA, 21 nt, Artificial Sequence
  LRRK2 RNA guide
gauggccuggagaguacauau

SEQ ID NO: 74149 - RNA, 21 nt, Artificial Sequence
  LRRK2 RNA guide
gccaucauacaauugaaaguu

SEQ ID NO: 74150 - RNA, 21 nt, Artificial Sequence
  LRRK2 RNA guide
ggccaucauacaauugaaagu

SEQ ID NO: 74151 - RNA, 21 nt, Artificial Sequence
  LRRK2 RNA guide
guacucuccaggccaucauac

SEQ ID NO: 74152 - RNA, 21 nt, Artificial Sequence
  LRRK2 RNA guide
guaugauggccuggagaguac

SEQ ID NO: 74153 - RNA, 21 nt, Artificial Sequence
  LRRK2 RNA guide
uaauauguacucuccaggcca

SEQ ID NO: 74154 - RNA, 21 nt, Artificial Sequence
  LRRK2 RNA guide
uacucuccaggccaucauaca

SEQ ID NO: 74155 - RNA, 21 nt, Artificial Sequence
  LRRK2 RNA guide
uaugauggccuggagaguaca

SEQ ID NO: 74156 - RNA, 21 nt, Artificial Sequence
  LRRK2 RNA guide
uauguacucuccaggccauca

SEQ ID NO: 74157 - RNA, 21 nt, Artificial Sequence
  LRRK2 RNA guide
ucaauuguaugauggccugga

SEQ ID NO: 74158 - RNA, 21 nt, Artificial Sequence
  LRRK2 RNA guide
uccaggccaucauacaauuga

SEQ ID NO: 74159 - RNA, 21 nt, Artificial Sequence
  LRRK2 RNA guide
ucuccaggccaucauacaauu

SEQ ID NO: 74160 - RNA, 21 nt, Artificial Sequence
  LRRK2 RNA guide
ugauggccuggagaguacaua

SEQ ID NO: 74161 - RNA, 21 nt, Artificial Sequence
  LRRK2 RNA guide
uguacucuccaggccaucaua

SEQ ID NO: 74162 - RNA, 21 nt, Artificial Sequence
  LRRK2 RNA guide
uguaugauggccuggagagua

SEQ ID NO: 74163 - RNA, 21 nt, Artificial Sequence
  LRRK2 RNA guide
uucaauuguaugauggccugg

SEQ ID NO: 74164 - RNA, 21 nt, Artificial Sequence
  LRRK2 RNA guide
uuguaugauggccuggagagu

SEQ ID NO: 74165 - RNA, 21 nt, Artificial Sequence
  LRRK2 RNA guide
uuucaauuguaugauggccug

SEQ ID NO: 74166 - RNA, 22 nt, Artificial Sequence
  LRRK2 RNA guide
aacuuucaauuguaugauggcc

SEQ ID NO: 74167 - RNA, 22 nt, Artificial Sequence
  LRRK2 RNA guide
aauauguacucuccaggccauc

SEQ ID NO: 74168 - RNA, 22 nt, Artificial Sequence
  LRRK2 RNA guide
aauuguaugauggccuggagag

SEQ ID NO: 74169 - RNA, 22 nt, Artificial Sequence
  LRRK2 RNA guide
acucuccaggccaucauacaau

SEQ ID NO: 74170 - RNA, 22 nt, Artificial Sequence
  LRRK2 RNA guide
acuuucaauuguaugauggccu

SEQ ID NO: 74171 - RNA, 22 nt, Artificial Sequence
  LRRK2 RNA guide
aggccaucauacaauugaaagu

SEQ ID NO: 74172 - RNA, 22 nt, Artificial Sequence
  LRRK2 RNA guide
auaauauguacucuccaggcca

SEQ ID NO: 74173 - RNA, 22 nt, Artificial Sequence
  LRRK2 RNA guide
auauguacucuccaggccauca

SEQ ID NO: 74174 - RNA, 22 nt, Artificial Sequence
  LRRK2 RNA guide
augauggccuggagaguacaua

SEQ ID NO: 74175 - RNA, 22 nt, Artificial Sequence
  LRRK2 RNA guide
auggccuggagaguacauauua

SEQ ID NO: 74176 - RNA, 22 nt, Artificial Sequence
  LRRK2 RNA guide
auguacucuccaggccaucaua

SEQ ID NO: 74177 - RNA, 22 nt, Artificial Sequence
  LRRK2 RNA guide
auuguaugauggccuggagagu

SEQ ID NO: 74178 - RNA, 22 nt, Artificial Sequence
  LRRK2 RNA guide
caauuguaugauggccuggaga

SEQ ID NO: 74179 - RNA, 22 nt, Artificial Sequence
  LRRK2 RNA guide
caggccaucauacaauugaaag

SEQ ID NO: 74180 - RNA, 22 nt, Artificial Sequence
  LRRK2 RNA guide
caucauacaauugaaaguucag

SEQ ID NO: 74181 - RNA, 22 nt, Artificial Sequence
  LRRK2 RNA guide
ccaggccaucauacaauugaaa

SEQ ID NO: 74182 - RNA, 22 nt, Artificial Sequence
  LRRK2 RNA guide
ccaucauacaauugaaaguuca

SEQ ID NO: 74183 - RNA, 22 nt, Artificial Sequence
  LRRK2 RNA guide
ccugaacuuucaauuguaugau

SEQ ID NO: 74184 - RNA, 22 nt, Artificial Sequence
  LRRK2 RNA guide
cuccaggccaucauacaauuga

SEQ ID NO: 74185 - RNA, 22 nt, Artificial Sequence
  LRRK2 RNA guide
cucuccaggccaucauacaauu

SEQ ID NO: 74186 - RNA, 22 nt, Artificial Sequence
  LRRK2 RNA guide
cugaacuuucaauuguaugaug

SEQ ID NO: 74187 - RNA, 22 nt, Artificial Sequence
  LRRK2 RNA guide
cuuucaauuguaugauggccug

SEQ ID NO: 74188 - RNA, 22 nt, Artificial Sequence
  LRRK2 RNA guide
gaacuuucaauuguaugauggc

SEQ ID NO: 74189 - RNA, 22 nt, Artificial Sequence
  LRRK2 RNA guide
gauggccuggagaguacauauu

SEQ ID NO: 74190 - RNA, 22 nt, Artificial Sequence
  LRRK2 RNA guide
gccaucauacaauugaaaguuc

SEQ ID NO: 74191 - RNA, 22 nt, Artificial Sequence
  LRRK2 RNA guide
ggccaucauacaauugaaaguu

SEQ ID NO: 74192 - RNA, 22 nt, Artificial Sequence
  LRRK2 RNA guide
guacucuccaggccaucauaca

SEQ ID NO: 74193 - RNA, 22 nt, Artificial Sequence
  LRRK2 RNA guide
guaugauggccuggagaguaca

SEQ ID NO: 74194 - RNA, 22 nt, Artificial Sequence
  LRRK2 RNA guide
uaauauguacucuccaggccau

SEQ ID NO: 74195 - RNA, 22 nt, Artificial Sequence
  LRRK2 RNA guide
uacucuccaggccaucauacaa

SEQ ID NO: 74196 - RNA, 22 nt, Artificial Sequence
  LRRK2 RNA guide
uaugauggccuggagaguacau

SEQ ID NO: 74197 - RNA, 22 nt, Artificial Sequence
  LRRK2 RNA guide
uauguacucuccaggccaucau

SEQ ID NO: 74198 - RNA, 22 nt, Artificial Sequence
  LRRK2 RNA guide
ucaauuguaugauggccuggag

SEQ ID NO: 74199 - RNA, 22 nt, Artificial Sequence
  LRRK2 RNA guide
uccaggccaucauacaauugaa

SEQ ID NO: 74200 - RNA, 22 nt, Artificial Sequence
  LRRK2 RNA guide
ucuccaggccaucauacaauug

SEQ ID NO: 74201 - RNA, 22 nt, Artificial Sequence
  LRRK2 RNA guide
ugaacuuucaauuguaugaugg

SEQ ID NO: 74202 - RNA, 22 nt, Artificial Sequence
  LRRK2 RNA guide
ugauggccuggagaguacauau

SEQ ID NO: 74203 - RNA, 22 nt, Artificial Sequence
  LRRK2 RNA guide
uguacucuccaggccaucauac

SEQ ID NO: 74204 - RNA, 22 nt, Artificial Sequence
  LRRK2 RNA guide
uguaugauggccuggagaguac

SEQ ID NO: 74205 - RNA, 22 nt, Artificial Sequence
  LRRK2 RNA guide
uucaauuguaugauggccugga

SEQ ID NO: 74206 - RNA, 22 nt, Artificial Sequence
  LRRK2 RNA guide
uuguaugauggccuggagagua

SEQ ID NO: 74207 - RNA, 22 nt, Artificial Sequence
  LRRK2 RNA guide
uuucaauuguaugauggccugg

SEQ ID NO: 74208 - RNA, 20 nt, Artificial Sequence
  LRRK2 RNA guide
aacauagguuauaacauacc

SEQ ID NO: 74209 - RNA, 20 nt, Artificial Sequence
  LRRK2 RNA guide
acagguauguuauaaccuau

SEQ ID NO: 74210 - RNA, 20 nt, Artificial Sequence
  LRRK2 RNA guide
acauagguuauaacauaccu

SEQ ID NO: 74211 - RNA, 20 nt, Artificial Sequence
  LRRK2 RNA guide
agguauguuauaaccuaugu

SEQ ID NO: 74212 - RNA, 20 nt, Artificial Sequence
  LRRK2 RNA guide
auagguuauaacauaccugu

SEQ ID NO: 74213 - RNA, 20 nt, Artificial Sequence
  LRRK2 RNA guide
augucacagguauguuauaa

SEQ ID NO: 74214 - RNA, 20 nt, Artificial Sequence
  LRRK2 RNA guide
caacauagguuauaacauac

SEQ ID NO: 74215 - RNA, 20 nt, Artificial Sequence
  LRRK2 RNA guide
cacagguauguuauaaccua

SEQ ID NO: 74216 - RNA, 20 nt, Artificial Sequence
  LRRK2 RNA guide
cagguauguuauaaccuaug

SEQ ID NO: 74217 - RNA, 20 nt, Artificial Sequence
  LRRK2 RNA guide
cauagguuauaacauaccug

SEQ ID NO: 74218 - RNA, 20 nt, Artificial Sequence
  LRRK2 RNA guide
gaugucacagguauguuaua

SEQ ID NO: 74219 - RNA, 20 nt, Artificial Sequence
  LRRK2 RNA guide
gguauguuauaaccuauguu

SEQ ID NO: 74220 - RNA, 20 nt, Artificial Sequence
  LRRK2 RNA guide
guauguuauaaccuauguug

SEQ ID NO: 74221 - RNA, 20 nt, Artificial Sequence
  LRRK2 RNA guide
gucacagguauguuauaacc

SEQ ID NO: 74222 - RNA, 20 nt, Artificial Sequence
  LRRK2 RNA guide
uagguuauaacauaccugug

SEQ ID NO: 74223 - RNA, 20 nt, Artificial Sequence
  LRRK2 RNA guide
ucacagguauguuauaaccu

SEQ ID NO: 74224 - RNA, 20 nt, Artificial Sequence
  LRRK2 RNA guide
ugaugucacagguauguuau

SEQ ID NO: 74225 - RNA, 20 nt, Artificial Sequence
  LRRK2 RNA guide
ugucacagguauguuauaac

SEQ ID NO: 74226 - RNA, 21 nt, Artificial Sequence
  LRRK2 RNA guide
acagguauguuauaaccuaug

SEQ ID NO: 74227 - RNA, 21 nt, Artificial Sequence
  LRRK2 RNA guide
acauagguuauaacauaccug

SEQ ID NO: 74228 - RNA, 21 nt, Artificial Sequence
  LRRK2 RNA guide
auagguuauaacauaccugug

SEQ ID NO: 74229 - RNA, 21 nt, Artificial Sequence
  LRRK2 RNA guide
augucacagguauguuauaac

SEQ ID NO: 74230 - RNA, 21 nt, Artificial Sequence
  LRRK2 RNA guide
caacauagguuauaacauacc

SEQ ID NO: 74231 - RNA, 21 nt, Artificial Sequence
  LRRK2 RNA guide
cacagguauguuauaaccuau

SEQ ID NO: 74232 - RNA, 21 nt, Artificial Sequence
  LRRK2 RNA guide
cagguauguuauaaccuaugu

SEQ ID NO: 74233 - RNA, 21 nt, Artificial Sequence
  LRRK2 RNA guide
cauagguuauaacauaccugu

SEQ ID NO: 74234 - RNA, 21 nt, Artificial Sequence
  LRRK2 RNA guide
gaugucacagguauguuauaa

SEQ ID NO: 74235 - RNA, 21 nt, Artificial Sequence
  LRRK2 RNA guide
gguauguuauaaccuauguug

SEQ ID NO: 74236 - RNA, 21 nt, Artificial Sequence
  LRRK2 RNA guide
gucacagguauguuauaaccu

SEQ ID NO: 74237 - RNA, 21 nt, Artificial Sequence
  LRRK2 RNA guide
gugaugucacagguauguuau

SEQ ID NO: 74238 - RNA, 21 nt, Artificial Sequence
  LRRK2 RNA guide
uagguuauaacauaccuguga

SEQ ID NO: 74239 - RNA, 21 nt, Artificial Sequence
  LRRK2 RNA guide
ucacagguauguuauaaccua

SEQ ID NO: 74240 - RNA, 21 nt, Artificial Sequence
  LRRK2 RNA guide
ugaugucacagguauguuaua

SEQ ID NO: 74241 - RNA, 21 nt, Artificial Sequence
  LRRK2 RNA guide
ugucacagguauguuauaacc

SEQ ID NO: 74242 - RNA, 22 nt, Artificial Sequence
  LRRK2 RNA guide
aacauagguuauaacauaccug

SEQ ID NO: 74243 - RNA, 22 nt, Artificial Sequence
  LRRK2 RNA guide
acagguauguuauaaccuaugu

SEQ ID NO: 74244 - RNA, 22 nt, Artificial Sequence
  LRRK2 RNA guide
acauagguuauaacauaccugu

SEQ ID NO: 74245 - RNA, 22 nt, Artificial Sequence
  LRRK2 RNA guide
agguauguuauaaccuauguug

SEQ ID NO: 74246 - RNA, 22 nt, Artificial Sequence
  LRRK2 RNA guide
auagguuauaacauaccuguga

SEQ ID NO: 74247 - RNA, 22 nt, Artificial Sequence
  LRRK2 RNA guide
augucacagguauguuauaacc

SEQ ID NO: 74248 - RNA, 22 nt, Artificial Sequence
  LRRK2 RNA guide
caacauagguuauaacauaccu

SEQ ID NO: 74249 - RNA, 22 nt, Artificial Sequence
  LRRK2 RNA guide
cacagguauguuauaaccuaug

SEQ ID NO: 74250 - RNA, 22 nt, Artificial Sequence
  LRRK2 RNA guide
cagguauguuauaaccuauguu

SEQ ID NO: 74251 - RNA, 22 nt, Artificial Sequence
  LRRK2 RNA guide
cauagguuauaacauaccugug

SEQ ID NO: 74252 - RNA, 22 nt, Artificial Sequence
  LRRK2 RNA guide
gaugucacagguauguuauaac

SEQ ID NO: 74253 - RNA, 22 nt, Artificial Sequence
  LRRK2 RNA guide
gguauguuauaaccuauguuga

SEQ ID NO: 74254 - RNA, 22 nt, Artificial Sequence
  LRRK2 RNA guide
gucacagguauguuauaaccua

SEQ ID NO: 74255 - RNA, 22 nt, Artificial Sequence
  LRRK2 RNA guide
gugaugucacagguauguuaua

SEQ ID NO: 74256 - RNA, 22 nt, Artificial Sequence
  LRRK2 RNA guide
uagguuauaacauaccugugac

SEQ ID NO: 74257 - RNA, 22 nt, Artificial Sequence
  LRRK2 RNA guide
ucaacauagguuauaacauacc

SEQ ID NO: 74258 - RNA, 22 nt, Artificial Sequence
  LRRK2 RNA guide
ucacagguauguuauaaccuau

SEQ ID NO: 74259 - RNA, 22 nt, Artificial Sequence
  LRRK2 RNA guide
ugaugucacagguauguuauaa

SEQ ID NO: 74260 - RNA, 22 nt, Artificial Sequence
  LRRK2 RNA guide
ugucacagguauguuauaaccu

SEQ ID NO: 74261 - RNA, 22 nt, Artificial Sequence
  LRRK2 RNA guide
ugugaugucacagguauguuau

SEQ ID NO: 74262 - RNA, 20 nt, Artificial Sequence
  LRRK2 RNA guide
aacauggguuauaacauacc

SEQ ID NO: 74263 - RNA, 20 nt, Artificial Sequence
  LRRK2 RNA guide
acagguauguuauaacccau

SEQ ID NO: 74264 - RNA, 20 nt, Artificial Sequence
  LRRK2 RNA guide
acauggguuauaacauaccu

SEQ ID NO: 74265 - RNA, 20 nt, Artificial Sequence
  LRRK2 RNA guide
agguauguuauaacccaugu

SEQ ID NO: 74266 - RNA, 20 nt, Artificial Sequence
  LRRK2 RNA guide
auggguuauaacauaccugu

SEQ ID NO: 74267 - RNA, 20 nt, Artificial Sequence
  LRRK2 RNA guide
auguuauaacccauguugaa

SEQ ID NO: 74268 - RNA, 20 nt, Artificial Sequence
  LRRK2 RNA guide
caacauggguuauaacauac

SEQ ID NO: 74269 - RNA, 20 nt, Artificial Sequence
  LRRK2 RNA guide
cacagguauguuauaaccca

SEQ ID NO: 74270 - RNA, 20 nt, Artificial Sequence
  LRRK2 RNA guide
cagguauguuauaacccaug

SEQ ID NO: 74271 - RNA, 20 nt, Artificial Sequence
  LRRK2 RNA guide
cauggguuauaacauaccug

SEQ ID NO: 74272 - RNA, 20 nt, Artificial Sequence
  LRRK2 RNA guide
cccauguugaaaauaauuuc

SEQ ID NO: 74273 - RNA, 20 nt, Artificial Sequence
  LRRK2 RNA guide
gaaauuauuuucaacauggg

SEQ ID NO: 74274 - RNA, 20 nt, Artificial Sequence
  LRRK2 RNA guide
gguauguuauaacccauguu

SEQ ID NO: 74275 - RNA, 20 nt, Artificial Sequence
  LRRK2 RNA guide
guauguuauaacccauguug

SEQ ID NO: 74276 - RNA, 20 nt, Artificial Sequence
  LRRK2 RNA guide
guuauaacccauguugaaaa

SEQ ID NO: 74277 - RNA, 20 nt, Artificial Sequence
  LRRK2 RNA guide
uauguuauaacccauguuga

SEQ ID NO: 74278 - RNA, 20 nt, Artificial Sequence
  LRRK2 RNA guide
ucaacauggguuauaacaua

SEQ ID NO: 74279 - RNA, 20 nt, Artificial Sequence
  LRRK2 RNA guide
ucacagguauguuauaaccc

SEQ ID NO: 74280 - RNA, 20 nt, Artificial Sequence
  LRRK2 RNA guide
uggguuauaacauaccugug

SEQ ID NO: 74281 - RNA, 20 nt, Artificial Sequence
  LRRK2 RNA guide
uguuauaacccauguugaaa

SEQ ID NO: 74282 - RNA, 20 nt, Artificial Sequence
  LRRK2 RNA guide
uucaacauggguuauaacau

SEQ ID NO: 74283 - RNA, 20 nt, Artificial Sequence
  LRRK2 RNA guide
uuucaacauggguuauaaca

SEQ ID NO: 74284 - RNA, 20 nt, Artificial Sequence
  LRRK2 RNA guide
uuuucaacauggguuauaac

SEQ ID NO: 74285 - RNA, 21 nt, Artificial Sequence
  LRRK2 RNA guide
aacauggguuauaacauaccu

SEQ ID NO: 74286 - RNA, 21 nt, Artificial Sequence
  LRRK2 RNA guide
acagguauguuauaacccaug

SEQ ID NO: 74287 - RNA, 21 nt, Artificial Sequence
  LRRK2 RNA guide
acauggguuauaacauaccug

SEQ ID NO: 74288 - RNA, 21 nt, Artificial Sequence
  LRRK2 RNA guide
agguauguuauaacccauguu

SEQ ID NO: 74289 - RNA, 21 nt, Artificial Sequence
  LRRK2 RNA guide
auggguuauaacauaccugug

SEQ ID NO: 74290 - RNA, 21 nt, Artificial Sequence
  LRRK2 RNA guide
caacauggguuauaacauacc

SEQ ID NO: 74291 - RNA, 21 nt, Artificial Sequence
  LRRK2 RNA guide
cacagguauguuauaacccau

SEQ ID NO: 74292 - RNA, 21 nt, Artificial Sequence
  LRRK2 RNA guide
cagguauguuauaacccaugu

SEQ ID NO: 74293 - RNA, 21 nt, Artificial Sequence
  LRRK2 RNA guide
cauggguuauaacauaccugu

SEQ ID NO: 74294 - RNA, 21 nt, Artificial Sequence
  LRRK2 RNA guide
gguauguuauaacccauguug

SEQ ID NO: 74295 - RNA, 21 nt, Artificial Sequence
  LRRK2 RNA guide
guauguuauaacccauguuga

SEQ ID NO: 74296 - RNA, 21 nt, Artificial Sequence
  LRRK2 RNA guide
gucacagguauguuauaaccc

SEQ ID NO: 74297 - RNA, 21 nt, Artificial Sequence
  LRRK2 RNA guide
ucaacauggguuauaacauac

SEQ ID NO: 74298 - RNA, 21 nt, Artificial Sequence
  LRRK2 RNA guide
ucacagguauguuauaaccca

SEQ ID NO: 74299 - RNA, 21 nt, Artificial Sequence
  LRRK2 RNA guide
uggguuauaacauaccuguga

SEQ ID NO: 74300 - RNA, 22 nt, Artificial Sequence
  LRRK2 RNA guide
aacauggguuauaacauaccug

SEQ ID NO: 74301 - RNA, 22 nt, Artificial Sequence
  LRRK2 RNA guide
acagguauguuauaacccaugu

SEQ ID NO: 74302 - RNA, 22 nt, Artificial Sequence
  LRRK2 RNA guide
acauggguuauaacauaccugu

SEQ ID NO: 74303 - RNA, 22 nt, Artificial Sequence
  LRRK2 RNA guide
agguauguuauaacccauguug

SEQ ID NO: 74304 - RNA, 22 nt, Artificial Sequence
  LRRK2 RNA guide
auggguuauaacauaccuguga

SEQ ID NO: 74305 - RNA, 22 nt, Artificial Sequence
  LRRK2 RNA guide
caacauggguuauaacauaccu

SEQ ID NO: 74306 - RNA, 22 nt, Artificial Sequence
  LRRK2 RNA guide
cacagguauguuauaacccaug

SEQ ID NO: 74307 - RNA, 22 nt, Artificial Sequence
  LRRK2 RNA guide
cagguauguuauaacccauguu

SEQ ID NO: 74308 - RNA, 22 nt, Artificial Sequence
  LRRK2 RNA guide
cauggguuauaacauaccugug

SEQ ID NO: 74309 - RNA, 22 nt, Artificial Sequence
  LRRK2 RNA guide
cccauguugaaaauaauuucuc

SEQ ID NO: 74310 - RNA, 22 nt, Artificial Sequence
  LRRK2 RNA guide
gagaaauuauuuucaacauggg

SEQ ID NO: 74311 - RNA, 22 nt, Artificial Sequence
  LRRK2 RNA guide
gguauguuauaacccauguuga

SEQ ID NO: 74312 - RNA, 22 nt, Artificial Sequence
  LRRK2 RNA guide
guauguuauaacccauguugaa

SEQ ID NO: 74313 - RNA, 22 nt, Artificial Sequence
  LRRK2 RNA guide
gucacagguauguuauaaccca

SEQ ID NO: 74314 - RNA, 22 nt, Artificial Sequence
  LRRK2 RNA guide
ucaacauggguuauaacauacc

SEQ ID NO: 74315 - RNA, 22 nt, Artificial Sequence
  LRRK2 RNA guide
ucacagguauguuauaacccau

SEQ ID NO: 74316 - RNA, 22 nt, Artificial Sequence
  LRRK2 RNA guide
uggguuauaacauaccugugac

SEQ ID NO: 74317 - RNA, 22 nt, Artificial Sequence
  LRRK2 RNA guide
ugucacagguauguuauaaccc

SEQ ID NO: 74318 - RNA, 22 nt, Artificial Sequence
  LRRK2 RNA guide
uucaacauggguuauaacauac

SEQ ID NO: 74319 - RNA, 20 nt, Artificial Sequence
  LRRK2 RNA guide
aaaauguuucccaauguuug

SEQ ID NO: 74320 - RNA, 20 nt, Artificial Sequence
  LRRK2 RNA guide
aaauguuucccaauguuugg

SEQ ID NO: 74321 - RNA, 20 nt, Artificial Sequence
  LRRK2 RNA guide
aauauuuuccaaacauuggg

SEQ ID NO: 74322 - RNA, 20 nt, Artificial Sequence
  LRRK2 RNA guide
aauguuucccaauguuugga

SEQ ID NO: 74323 - RNA, 20 nt, Artificial Sequence
  LRRK2 RNA guide
acuaaaauguuucccaaugu

SEQ ID NO: 74324 - RNA, 20 nt, Artificial Sequence
  LRRK2 RNA guide
auauuuuccaaacauuggga

SEQ ID NO: 74325 - RNA, 20 nt, Artificial Sequence
  LRRK2 RNA guide
auguuucccaauguuuggaa

SEQ ID NO: 74326 - RNA, 20 nt, Artificial Sequence
  LRRK2 RNA guide
auuuuccaaacauugggaaa

SEQ ID NO: 74327 - RNA, 20 nt, Artificial Sequence
  LRRK2 RNA guide
cccaauguuuggaaaauauu

SEQ ID NO: 74328 - RNA, 20 nt, Artificial Sequence
  LRRK2 RNA guide
cuaaaauguuucccaauguu

SEQ ID NO: 74329 - RNA, 20 nt, Artificial Sequence
  LRRK2 RNA guide
guuucccaauguuuggaaaa

SEQ ID NO: 74330 - RNA, 20 nt, Artificial Sequence
  LRRK2 RNA guide
uauuuuccaaacauugggaa

SEQ ID NO: 74331 - RNA, 20 nt, Artificial Sequence
  LRRK2 RNA guide
ucccaauguuuggaaaauau

SEQ ID NO: 74332 - RNA, 20 nt, Artificial Sequence
  LRRK2 RNA guide
uguuucccaauguuuggaaa

SEQ ID NO: 74333 - RNA, 20 nt, Artificial Sequence
  LRRK2 RNA guide
uuccaaacauugggaaacau

SEQ ID NO: 74334 - RNA, 20 nt, Artificial Sequence
  LRRK2 RNA guide
uucccaauguuuggaaaaua

SEQ ID NO: 74335 - RNA, 20 nt, Artificial Sequence
  LRRK2 RNA guide
uuuccaaacauugggaaaca

SEQ ID NO: 74336 - RNA, 20 nt, Artificial Sequence
  LRRK2 RNA guide
uuucccaauguuuggaaaau

SEQ ID NO: 74337 - RNA, 20 nt, Artificial Sequence
  LRRK2 RNA guide
uuuuccaaacauugggaaac

SEQ ID NO: 74338 - RNA, 21 nt, Artificial Sequence
  LRRK2 RNA guide
aaaauguuucccaauguuugg

SEQ ID NO: 74339 - RNA, 21 nt, Artificial Sequence
  LRRK2 RNA guide
aaauguuucccaauguuugga

SEQ ID NO: 74340 - RNA, 21 nt, Artificial Sequence
  LRRK2 RNA guide
aauguuucccaauguuuggaa

SEQ ID NO: 74341 - RNA, 21 nt, Artificial Sequence
  LRRK2 RNA guide
auguuucccaauguuuggaaa

SEQ ID NO: 74342 - RNA, 21 nt, Artificial Sequence
  LRRK2 RNA guide
auuuuccaaacauugggaaac

SEQ ID NO: 74343 - RNA, 21 nt, Artificial Sequence
  LRRK2 RNA guide
gacuaaaauguuucccaaugu

SEQ ID NO: 74344 - RNA, 21 nt, Artificial Sequence
  LRRK2 RNA guide
guuucccaauguuuggaaaau

SEQ ID NO: 74345 - RNA, 21 nt, Artificial Sequence
  LRRK2 RNA guide
uguuucccaauguuuggaaaa

SEQ ID NO: 74346 - RNA, 21 nt, Artificial Sequence
  LRRK2 RNA guide
uuccaaacauugggaaacauu

SEQ ID NO: 74347 - RNA, 21 nt, Artificial Sequence
  LRRK2 RNA guide
uuuccaaacauugggaaacau

SEQ ID NO: 74348 - RNA, 21 nt, Artificial Sequence
  LRRK2 RNA guide
uuuuccaaacauugggaaaca

SEQ ID NO: 74349 - RNA, 22 nt, Artificial Sequence
  LRRK2 RNA guide
aaaauguuucccaauguuugga

SEQ ID NO: 74350 - RNA, 22 nt, Artificial Sequence
  LRRK2 RNA guide
aaauguuucccaauguuuggaa

SEQ ID NO: 74351 - RNA, 22 nt, Artificial Sequence
  LRRK2 RNA guide
aauguuucccaauguuuggaaa

SEQ ID NO: 74352 - RNA, 22 nt, Artificial Sequence
  LRRK2 RNA guide
auguuucccaauguuuggaaaa

SEQ ID NO: 74353 - RNA, 22 nt, Artificial Sequence
  LRRK2 RNA guide
auuuuccaaacauugggaaaca

SEQ ID NO: 74354 - RNA, 22 nt, Artificial Sequence
  LRRK2 RNA guide
cuaaaauguuucccaauguuug

SEQ ID NO: 74355 - RNA, 22 nt, Artificial Sequence
  LRRK2 RNA guide
gacuaaaauguuucccaauguu

SEQ ID NO: 74356 - RNA, 22 nt, Artificial Sequence
  LRRK2 RNA guide
guuucccaauguuuggaaaaua

SEQ ID NO: 74357 - RNA, 22 nt, Artificial Sequence
  LRRK2 RNA guide
uaaaauguuucccaauguuugg

SEQ ID NO: 74358 - RNA, 22 nt, Artificial Sequence
  LRRK2 RNA guide
uauuuuccaaacauugggaaac

SEQ ID NO: 74359 - RNA, 22 nt, Artificial Sequence
  LRRK2 RNA guide
ugacuaaaauguuucccaaugu

SEQ ID NO: 74360 - RNA, 22 nt, Artificial Sequence
  LRRK2 RNA guide
uguuucccaauguuuggaaaau

SEQ ID NO: 74361 - RNA, 22 nt, Artificial Sequence
  LRRK2 RNA guide
uuccaaacauugggaaacauuu

SEQ ID NO: 74362 - RNA, 22 nt, Artificial Sequence
  LRRK2 RNA guide
uuuccaaacauugggaaacauu

SEQ ID NO: 74363 - RNA, 22 nt, Artificial Sequence
  LRRK2 RNA guide
uuuuccaaacauugggaaacau

SEQ ID NO: 74364 - RNA, 20 nt, Artificial Sequence
  LRRK2 RNA guide
aaauauuugccaaacauugg

SEQ ID NO: 74365 - RNA, 20 nt, Artificial Sequence
  LRRK2 RNA guide
aauauuugccaaacauuggg

SEQ ID NO: 74366 - RNA, 20 nt, Artificial Sequence
  LRRK2 RNA guide
aauguuucccaauguuuggc

SEQ ID NO: 74367 - RNA, 20 nt, Artificial Sequence
  LRRK2 RNA guide
auauuugccaaacauuggga

SEQ ID NO: 74368 - RNA, 20 nt, Artificial Sequence
  LRRK2 RNA guide
auguuucccaauguuuggca

SEQ ID NO: 74369 - RNA, 20 nt, Artificial Sequence
  LRRK2 RNA guide
auuugccaaacauugggaaa

SEQ ID NO: 74370 - RNA, 20 nt, Artificial Sequence
  LRRK2 RNA guide
ccaauguuuggcaaauauuu

SEQ ID NO: 74371 - RNA, 20 nt, Artificial Sequence
  LRRK2 RNA guide
cccaauguuuggcaaauauu

SEQ ID NO: 74372 - RNA, 20 nt, Artificial Sequence
  LRRK2 RNA guide
guagaaaauauuugccaaac

SEQ ID NO: 74373 - RNA, 20 nt, Artificial Sequence
  LRRK2 RNA guide
guuucccaauguuuggcaaa

SEQ ID NO: 74374 - RNA, 20 nt, Artificial Sequence
  LRRK2 RNA guide
guuuggcaaauauuuucuac

SEQ ID NO: 74375 - RNA, 20 nt, Artificial Sequence
  LRRK2 RNA guide
uauuugccaaacauugggaa

SEQ ID NO: 74376 - RNA, 20 nt, Artificial Sequence
  LRRK2 RNA guide
ucccaauguuuggcaaauau

SEQ ID NO: 74377 - RNA, 20 nt, Artificial Sequence
  LRRK2 RNA guide
ugccaaacauugggaaacau

SEQ ID NO: 74378 - RNA, 20 nt, Artificial Sequence
  LRRK2 RNA guide
uguuucccaauguuuggcaa

SEQ ID NO: 74379 - RNA, 20 nt, Artificial Sequence
  LRRK2 RNA guide
uucccaauguuuggcaaaua

SEQ ID NO: 74380 - RNA, 20 nt, Artificial Sequence
  LRRK2 RNA guide
uugccaaacauugggaaaca

SEQ ID NO: 74381 - RNA, 20 nt, Artificial Sequence
  LRRK2 RNA guide
uuucccaauguuuggcaaau

SEQ ID NO: 74382 - RNA, 20 nt, Artificial Sequence
  LRRK2 RNA guide
uuugccaaacauugggaaac

SEQ ID NO: 74383 - RNA, 21 nt, Artificial Sequence
  LRRK2 RNA guide
aaauauuugccaaacauuggg

SEQ ID NO: 74384 - RNA, 21 nt, Artificial Sequence
  LRRK2 RNA guide
aaauguuucccaauguuuggc

SEQ ID NO: 74385 - RNA, 21 nt, Artificial Sequence
  LRRK2 RNA guide
aauauuugccaaacauuggga

SEQ ID NO: 74386 - RNA, 21 nt, Artificial Sequence
  LRRK2 RNA guide
aauguuucccaauguuuggca

SEQ ID NO: 74387 - RNA, 21 nt, Artificial Sequence
  LRRK2 RNA guide
auauuugccaaacauugggaa

SEQ ID NO: 74388 - RNA, 21 nt, Artificial Sequence
  LRRK2 RNA guide
auguuucccaauguuuggcaa

SEQ ID NO: 74389 - RNA, 21 nt, Artificial Sequence
  LRRK2 RNA guide
auuugccaaacauugggaaac

SEQ ID NO: 74390 - RNA, 21 nt, Artificial Sequence
  LRRK2 RNA guide
cccaauguuuggcaaauauuu

SEQ ID NO: 74391 - RNA, 21 nt, Artificial Sequence
  LRRK2 RNA guide
guuucccaauguuuggcaaau

SEQ ID NO: 74392 - RNA, 21 nt, Artificial Sequence
  LRRK2 RNA guide
uauuugccaaacauugggaaa

SEQ ID NO: 74393 - RNA, 21 nt, Artificial Sequence
  LRRK2 RNA guide
ucccaauguuuggcaaauauu

SEQ ID NO: 74394 - RNA, 21 nt, Artificial Sequence
  LRRK2 RNA guide
ugccaaacauugggaaacauu

SEQ ID NO: 74395 - RNA, 21 nt, Artificial Sequence
  LRRK2 RNA guide
uguuucccaauguuuggcaaa

SEQ ID NO: 74396 - RNA, 21 nt, Artificial Sequence
  LRRK2 RNA guide
uucccaauguuuggcaaauau

SEQ ID NO: 74397 - RNA, 21 nt, Artificial Sequence
  LRRK2 RNA guide
uugccaaacauugggaaacau

SEQ ID NO: 74398 - RNA, 21 nt, Artificial Sequence
  LRRK2 RNA guide
uuucccaauguuuggcaaaua

SEQ ID NO: 74399 - RNA, 21 nt, Artificial Sequence
  LRRK2 RNA guide
uuugccaaacauugggaaaca

SEQ ID NO: 74400 - RNA, 22 nt, Artificial Sequence
  LRRK2 RNA guide
aaaauauuugccaaacauuggg

SEQ ID NO: 74401 - RNA, 22 nt, Artificial Sequence
  LRRK2 RNA guide
aaaauguuucccaauguuuggc

SEQ ID NO: 74402 - RNA, 22 nt, Artificial Sequence
  LRRK2 RNA guide
aaauauuugccaaacauuggga

SEQ ID NO: 74403 - RNA, 22 nt, Artificial Sequence
  LRRK2 RNA guide
aaauguuucccaauguuuggca

SEQ ID NO: 74404 - RNA, 22 nt, Artificial Sequence
  LRRK2 RNA guide
aauauuugccaaacauugggaa

SEQ ID NO: 74405 - RNA, 22 nt, Artificial Sequence
  LRRK2 RNA guide
aauguuucccaauguuuggcaa

SEQ ID NO: 74406 - RNA, 22 nt, Artificial Sequence
  LRRK2 RNA guide
auauuugccaaacauugggaaa

SEQ ID NO: 74407 - RNA, 22 nt, Artificial Sequence
  LRRK2 RNA guide
auguuucccaauguuuggcaaa

SEQ ID NO: 74408 - RNA, 22 nt, Artificial Sequence
  LRRK2 RNA guide
auuugccaaacauugggaaaca

SEQ ID NO: 74409 - RNA, 22 nt, Artificial Sequence
  LRRK2 RNA guide
ccaauguuuggcaaauauuuuc

SEQ ID NO: 74410 - RNA, 22 nt, Artificial Sequence
  LRRK2 RNA guide
cccaauguuuggcaaauauuuu

SEQ ID NO: 74411 - RNA, 22 nt, Artificial Sequence
  LRRK2 RNA guide
gaaaauauuugccaaacauugg

SEQ ID NO: 74412 - RNA, 22 nt, Artificial Sequence
  LRRK2 RNA guide
guuucccaauguuuggcaaaua

SEQ ID NO: 74413 - RNA, 22 nt, Artificial Sequence
  LRRK2 RNA guide
uauuugccaaacauugggaaac

SEQ ID NO: 74414 - RNA, 22 nt, Artificial Sequence
  LRRK2 RNA guide
ucccaauguuuggcaaauauuu

SEQ ID NO: 74415 - RNA, 22 nt, Artificial Sequence
  LRRK2 RNA guide
ugccaaacauugggaaacauuu

SEQ ID NO: 74416 - RNA, 22 nt, Artificial Sequence
  LRRK2 RNA guide
uguuucccaauguuuggcaaau

SEQ ID NO: 74417 - RNA, 22 nt, Artificial Sequence
  LRRK2 RNA guide
uucccaauguuuggcaaauauu

SEQ ID NO: 74418 - RNA, 22 nt, Artificial Sequence
  LRRK2 RNA guide
uugccaaacauugggaaacauu

SEQ ID NO: 74419 - RNA, 22 nt, Artificial Sequence
  LRRK2 RNA guide
uuucccaauguuuggcaaauau

SEQ ID NO: 74420 - RNA, 22 nt, Artificial Sequence
  LRRK2 RNA guide
uuugccaaacauugggaaacau

SEQ ID NO: 74421 - RNA, 20 nt, Artificial Sequence
  LRRK2 RNA guide
aaacuuuagucuagguauug

SEQ ID NO: 74422 - RNA, 20 nt, Artificial Sequence
  LRRK2 RNA guide
aacaauaccuagacuaaagu

SEQ ID NO: 74423 - RNA, 20 nt, Artificial Sequence
  LRRK2 RNA guide
aacuuuagucuagguauugu

SEQ ID NO: 74424 - RNA, 20 nt, Artificial Sequence
  LRRK2 RNA guide
aagugccaacaauaccuaga

SEQ ID NO: 74425 - RNA, 20 nt, Artificial Sequence
  LRRK2 RNA guide
acaagugccaacaauaccua

SEQ ID NO: 74426 - RNA, 20 nt, Artificial Sequence
  LRRK2 RNA guide
acaauaccuagacuaaaguu

SEQ ID NO: 74427 - RNA, 20 nt, Artificial Sequence
  LRRK2 RNA guide
acagcaaaaacuuuagucua

SEQ ID NO: 74428 - RNA, 20 nt, Artificial Sequence
  LRRK2 RNA guide
acuuuagucuagguauuguu

SEQ ID NO: 74429 - RNA, 20 nt, Artificial Sequence
  LRRK2 RNA guide
agcaaaaacuuuagucuagg

SEQ ID NO: 74430 - RNA, 20 nt, Artificial Sequence
  LRRK2 RNA guide
agguauuguuggcacuugug

SEQ ID NO: 74431 - RNA, 20 nt, Artificial Sequence
  LRRK2 RNA guide
agucuagguauuguuggcac

SEQ ID NO: 74432 - RNA, 20 nt, Artificial Sequence
  LRRK2 RNA guide
agugccaacaauaccuagac

SEQ ID NO: 74433 - RNA, 20 nt, Artificial Sequence
  LRRK2 RNA guide
auuguuggcacuugugaggc

SEQ ID NO: 74434 - RNA, 20 nt, Artificial Sequence
  LRRK2 RNA guide
auuugccucacaagugccaa

SEQ ID NO: 74435 - RNA, 20 nt, Artificial Sequence
  LRRK2 RNA guide
caaaaacuuuagucuaggua

SEQ ID NO: 74436 - RNA, 20 nt, Artificial Sequence
  LRRK2 RNA guide
caacaauaccuagacuaaag

SEQ ID NO: 74437 - RNA, 20 nt, Artificial Sequence
  LRRK2 RNA guide
caagugccaacaauaccuag

SEQ ID NO: 74438 - RNA, 20 nt, Artificial Sequence
  LRRK2 RNA guide
caauaccuagacuaaaguuu

SEQ ID NO: 74439 - RNA, 20 nt, Artificial Sequence
  LRRK2 RNA guide
cacaagugccaacaauaccu

SEQ ID NO: 74440 - RNA, 20 nt, Artificial Sequence
  LRRK2 RNA guide
cagcaaaaacuuuagucuag

SEQ ID NO: 74441 - RNA, 20 nt, Artificial Sequence
  LRRK2 RNA guide
ccaacaauaccuagacuaaa

SEQ ID NO: 74442 - RNA, 20 nt, Artificial Sequence
  LRRK2 RNA guide
ccucacaagugccaacaaua

SEQ ID NO: 74443 - RNA, 20 nt, Artificial Sequence
  LRRK2 RNA guide
cuagguauuguuggcacuug

SEQ ID NO: 74444 - RNA, 20 nt, Artificial Sequence
  LRRK2 RNA guide
cucacaagugccaacaauac

SEQ ID NO: 74445 - RNA, 20 nt, Artificial Sequence
  LRRK2 RNA guide
cuuuagucuagguauuguug

SEQ ID NO: 74446 - RNA, 20 nt, Artificial Sequence
  LRRK2 RNA guide
gauuugccucacaagugcca

SEQ ID NO: 74447 - RNA, 20 nt, Artificial Sequence
  LRRK2 RNA guide
gcaaaaacuuuagucuaggu

SEQ ID NO: 74448 - RNA, 20 nt, Artificial Sequence
  LRRK2 RNA guide
gccaacaauaccuagacuaa

SEQ ID NO: 74449 - RNA, 20 nt, Artificial Sequence
  LRRK2 RNA guide
gccucacaagugccaacaau

SEQ ID NO: 74450 - RNA, 20 nt, Artificial Sequence
  LRRK2 RNA guide
gguauuguuggcacuuguga

SEQ ID NO: 74451 - RNA, 20 nt, Artificial Sequence
  LRRK2 RNA guide
guauuguuggcacuugugag

SEQ ID NO: 74452 - RNA, 20 nt, Artificial Sequence
  LRRK2 RNA guide
gucuagguauuguuggcacu

SEQ ID NO: 74453 - RNA, 20 nt, Artificial Sequence
  LRRK2 RNA guide
gugccaacaauaccuagacu

SEQ ID NO: 74454 - RNA, 20 nt, Artificial Sequence
  LRRK2 RNA guide
uagguauuguuggcacuugu

SEQ ID NO: 74455 - RNA, 20 nt, Artificial Sequence
  LRRK2 RNA guide
uagucuagguauuguuggca

SEQ ID NO: 74456 - RNA, 20 nt, Artificial Sequence
  LRRK2 RNA guide
uauuguuggcacuugugagg

SEQ ID NO: 74457 - RNA, 20 nt, Artificial Sequence
  LRRK2 RNA guide
ucacaagugccaacaauacc

SEQ ID NO: 74458 - RNA, 20 nt, Artificial Sequence
  LRRK2 RNA guide
ucuagguauuguuggcacuu

SEQ ID NO: 74459 - RNA, 20 nt, Artificial Sequence
  LRRK2 RNA guide
ugauuugccucacaagugcc

SEQ ID NO: 74460 - RNA, 20 nt, Artificial Sequence
  LRRK2 RNA guide
ugccaacaauaccuagacua

SEQ ID NO: 74461 - RNA, 20 nt, Artificial Sequence
  LRRK2 RNA guide
ugccucacaagugccaacaa

SEQ ID NO: 74462 - RNA, 20 nt, Artificial Sequence
  LRRK2 RNA guide
uuagucuagguauuguuggc

SEQ ID NO: 74463 - RNA, 20 nt, Artificial Sequence
  LRRK2 RNA guide
uugccucacaagugccaaca

SEQ ID NO: 74464 - RNA, 20 nt, Artificial Sequence
  LRRK2 RNA guide
uuuagucuagguauuguugg

SEQ ID NO: 74465 - RNA, 20 nt, Artificial Sequence
  LRRK2 RNA guide
uuugccucacaagugccaac

SEQ ID NO: 74466 - RNA, 21 nt, Artificial Sequence
  LRRK2 RNA guide
aagugccaacaauaccuagac

SEQ ID NO: 74467 - RNA, 21 nt, Artificial Sequence
  LRRK2 RNA guide
acaagugccaacaauaccuag

SEQ ID NO: 74468 - RNA, 21 nt, Artificial Sequence
  LRRK2 RNA guide
acagcaaaaacuuuagucuag

SEQ ID NO: 74469 - RNA, 21 nt, Artificial Sequence
  LRRK2 RNA guide
acuuuagucuagguauuguug

SEQ ID NO: 74470 - RNA, 21 nt, Artificial Sequence
  LRRK2 RNA guide
agcaaaaacuuuagucuaggu

SEQ ID NO: 74471 - RNA, 21 nt, Artificial Sequence
  LRRK2 RNA guide
agguauuguuggcacuuguga

SEQ ID NO: 74472 - RNA, 21 nt, Artificial Sequence
  LRRK2 RNA guide
agucuagguauuguuggcacu

SEQ ID NO: 74473 - RNA, 21 nt, Artificial Sequence
  LRRK2 RNA guide
agugccaacaauaccuagacu

SEQ ID NO: 74474 - RNA, 21 nt, Artificial Sequence
  LRRK2 RNA guide
auuguuggcacuugugaggca

SEQ ID NO: 74475 - RNA, 21 nt, Artificial Sequence
  LRRK2 RNA guide
auuugccucacaagugccaac

SEQ ID NO: 74476 - RNA, 21 nt, Artificial Sequence
  LRRK2 RNA guide
caacaauaccuagacuaaagu

SEQ ID NO: 74477 - RNA, 21 nt, Artificial Sequence
  LRRK2 RNA guide
caagugccaacaauaccuaga

SEQ ID NO: 74478 - RNA, 21 nt, Artificial Sequence
  LRRK2 RNA guide
cacaagugccaacaauaccua

SEQ ID NO: 74479 - RNA, 21 nt, Artificial Sequence
  LRRK2 RNA guide
cagcaaaaacuuuagucuagg

SEQ ID NO: 74480 - RNA, 21 nt, Artificial Sequence
  LRRK2 RNA guide
ccaacaauaccuagacuaaag

SEQ ID NO: 74481 - RNA, 21 nt, Artificial Sequence
  LRRK2 RNA guide
ccucacaagugccaacaauac

SEQ ID NO: 74482 - RNA, 21 nt, Artificial Sequence
  LRRK2 RNA guide
cuagguauuguuggcacuugu

SEQ ID NO: 74483 - RNA, 21 nt, Artificial Sequence
  LRRK2 RNA guide
cucacaagugccaacaauacc

SEQ ID NO: 74484 - RNA, 21 nt, Artificial Sequence
  LRRK2 RNA guide
cuuuagucuagguauuguugg

SEQ ID NO: 74485 - RNA, 21 nt, Artificial Sequence
  LRRK2 RNA guide
gauuugccucacaagugccaa

SEQ ID NO: 74486 - RNA, 21 nt, Artificial Sequence
  LRRK2 RNA guide
gcaaaaacuuuagucuaggua

SEQ ID NO: 74487 - RNA, 21 nt, Artificial Sequence
  LRRK2 RNA guide
gccaacaauaccuagacuaaa

SEQ ID NO: 74488 - RNA, 21 nt, Artificial Sequence
  LRRK2 RNA guide
gccucacaagugccaacaaua

SEQ ID NO: 74489 - RNA, 21 nt, Artificial Sequence
  LRRK2 RNA guide
gguauuguuggcacuugugag

SEQ ID NO: 74490 - RNA, 21 nt, Artificial Sequence
  LRRK2 RNA guide
guauuguuggcacuugugagg

SEQ ID NO: 74491 - RNA, 21 nt, Artificial Sequence
  LRRK2 RNA guide
gucuagguauuguuggcacuu

SEQ ID NO: 74492 - RNA, 21 nt, Artificial Sequence
  LRRK2 RNA guide
gugccaacaauaccuagacua

SEQ ID NO: 74493 - RNA, 21 nt, Artificial Sequence
  LRRK2 RNA guide
uagguauuguuggcacuugug

SEQ ID NO: 74494 - RNA, 21 nt, Artificial Sequence
  LRRK2 RNA guide
uagucuagguauuguuggcac

SEQ ID NO: 74495 - RNA, 21 nt, Artificial Sequence
  LRRK2 RNA guide
uauuguuggcacuugugaggc

SEQ ID NO: 74496 - RNA, 21 nt, Artificial Sequence
  LRRK2 RNA guide
ucacaagugccaacaauaccu

SEQ ID NO: 74497 - RNA, 21 nt, Artificial Sequence
  LRRK2 RNA guide
ucuagguauuguuggcacuug

SEQ ID NO: 74498 - RNA, 21 nt, Artificial Sequence
  LRRK2 RNA guide
ugauuugccucacaagugcca

SEQ ID NO: 74499 - RNA, 21 nt, Artificial Sequence
  LRRK2 RNA guide
ugccaacaauaccuagacuaa

SEQ ID NO: 74500 - RNA, 21 nt, Artificial Sequence
  LRRK2 RNA guide
ugccucacaagugccaacaau

SEQ ID NO: 74501 - RNA, 21 nt, Artificial Sequence
  LRRK2 RNA guide
uuagucuagguauuguuggca

SEQ ID NO: 74502 - RNA, 21 nt, Artificial Sequence
  LRRK2 RNA guide
uugauuugccucacaagugcc

SEQ ID NO: 74503 - RNA, 21 nt, Artificial Sequence
  LRRK2 RNA guide
uugccucacaagugccaacaa

SEQ ID NO: 74504 - RNA, 21 nt, Artificial Sequence
  LRRK2 RNA guide
uuuagucuagguauuguuggc

SEQ ID NO: 74505 - RNA, 21 nt, Artificial Sequence
  LRRK2 RNA guide
uuugccucacaagugccaaca

SEQ ID NO: 74506 - RNA, 22 nt, Artificial Sequence
  LRRK2 RNA guide
aacagcaaaaacuuuagucuag

SEQ ID NO: 74507 - RNA, 22 nt, Artificial Sequence
  LRRK2 RNA guide
aacuuuagucuagguauuguug

SEQ ID NO: 74508 - RNA, 22 nt, Artificial Sequence
  LRRK2 RNA guide
aagugccaacaauaccuagacu

SEQ ID NO: 74509 - RNA, 22 nt, Artificial Sequence
  LRRK2 RNA guide
acaagugccaacaauaccuaga

SEQ ID NO: 74510 - RNA, 22 nt, Artificial Sequence
  LRRK2 RNA guide
acagcaaaaacuuuagucuagg

SEQ ID NO: 74511 - RNA, 22 nt, Artificial Sequence
  LRRK2 RNA guide
acuuuagucuagguauuguugg

SEQ ID NO: 74512 - RNA, 22 nt, Artificial Sequence
  LRRK2 RNA guide
agcaaaaacuuuagucuaggua

SEQ ID NO: 74513 - RNA, 22 nt, Artificial Sequence
  LRRK2 RNA guide
agguauuguuggcacuugugag

SEQ ID NO: 74514 - RNA, 22 nt, Artificial Sequence
  LRRK2 RNA guide
agucuagguauuguuggcacuu

SEQ ID NO: 74515 - RNA, 22 nt, Artificial Sequence
  LRRK2 RNA guide
agugccaacaauaccuagacua

SEQ ID NO: 74516 - RNA, 22 nt, Artificial Sequence
  LRRK2 RNA guide
auuguuggcacuugugaggcaa

SEQ ID NO: 74517 - RNA, 22 nt, Artificial Sequence
  LRRK2 RNA guide
auuugccucacaagugccaaca

SEQ ID NO: 74518 - RNA, 22 nt, Artificial Sequence
  LRRK2 RNA guide
caacaauaccuagacuaaaguu

SEQ ID NO: 74519 - RNA, 22 nt, Artificial Sequence
  LRRK2 RNA guide
caagugccaacaauaccuagac

SEQ ID NO: 74520 - RNA, 22 nt, Artificial Sequence
  LRRK2 RNA guide
cacaagugccaacaauaccuag

SEQ ID NO: 74521 - RNA, 22 nt, Artificial Sequence
  LRRK2 RNA guide
cagcaaaaacuuuagucuaggu

SEQ ID NO: 74522 - RNA, 22 nt, Artificial Sequence
  LRRK2 RNA guide
ccaacaauaccuagacuaaagu

SEQ ID NO: 74523 - RNA, 22 nt, Artificial Sequence
  LRRK2 RNA guide
ccucacaagugccaacaauacc

SEQ ID NO: 74524 - RNA, 22 nt, Artificial Sequence
  LRRK2 RNA guide
cuagguauuguuggcacuugug

SEQ ID NO: 74525 - RNA, 22 nt, Artificial Sequence
  LRRK2 RNA guide
cucacaagugccaacaauaccu

SEQ ID NO: 74526 - RNA, 22 nt, Artificial Sequence
  LRRK2 RNA guide
cuuuagucuagguauuguuggc

SEQ ID NO: 74527 - RNA, 22 nt, Artificial Sequence
  LRRK2 RNA guide
gauuugccucacaagugccaac

SEQ ID NO: 74528 - RNA, 22 nt, Artificial Sequence
  LRRK2 RNA guide
gcaaaaacuuuagucuagguau

SEQ ID NO: 74529 - RNA, 22 nt, Artificial Sequence
  LRRK2 RNA guide
gccaacaauaccuagacuaaag

SEQ ID NO: 74530 - RNA, 22 nt, Artificial Sequence
  LRRK2 RNA guide
gccucacaagugccaacaauac

SEQ ID NO: 74531 - RNA, 22 nt, Artificial Sequence
  LRRK2 RNA guide
gguauuguuggcacuugugagg

SEQ ID NO: 74532 - RNA, 22 nt, Artificial Sequence
  LRRK2 RNA guide
guauuguuggcacuugugaggc

SEQ ID NO: 74533 - RNA, 22 nt, Artificial Sequence
  LRRK2 RNA guide
gucuagguauuguuggcacuug

SEQ ID NO: 74534 - RNA, 22 nt, Artificial Sequence
  LRRK2 RNA guide
gugccaacaauaccuagacuaa

SEQ ID NO: 74535 - RNA, 22 nt, Artificial Sequence
  LRRK2 RNA guide
uagguauuguuggcacuuguga

SEQ ID NO: 74536 - RNA, 22 nt, Artificial Sequence
  LRRK2 RNA guide
uagucuagguauuguuggcacu

SEQ ID NO: 74537 - RNA, 22 nt, Artificial Sequence
  LRRK2 RNA guide
uauuguuggcacuugugaggca

SEQ ID NO: 74538 - RNA, 22 nt, Artificial Sequence
  LRRK2 RNA guide
ucacaagugccaacaauaccua

SEQ ID NO: 74539 - RNA, 22 nt, Artificial Sequence
  LRRK2 RNA guide
ucuagguauuguuggcacuugu

SEQ ID NO: 74540 - RNA, 22 nt, Artificial Sequence
  LRRK2 RNA guide
ugauuugccucacaagugccaa

SEQ ID NO: 74541 - RNA, 22 nt, Artificial Sequence
  LRRK2 RNA guide
ugccaacaauaccuagacuaaa

SEQ ID NO: 74542 - RNA, 22 nt, Artificial Sequence
  LRRK2 RNA guide
ugccucacaagugccaacaaua

SEQ ID NO: 74543 - RNA, 22 nt, Artificial Sequence
  LRRK2 RNA guide
uuagucuagguauuguuggcac

SEQ ID NO: 74544 - RNA, 22 nt, Artificial Sequence
  LRRK2 RNA guide
uugauuugccucacaagugcca

SEQ ID NO: 74545 - RNA, 22 nt, Artificial Sequence
  LRRK2 RNA guide
uugccucacaagugccaacaau

SEQ ID NO: 74546 - RNA, 22 nt, Artificial Sequence
  LRRK2 RNA guide
uuuagucuagguauuguuggca

SEQ ID NO: 74547 - RNA, 22 nt, Artificial Sequence
  LRRK2 RNA guide
uuugauuugccucacaagugcc

SEQ ID NO: 74548 - RNA, 22 nt, Artificial Sequence
  LRRK2 RNA guide
uuugccucacaagugccaacaa

SEQ ID NO: 74549 - RNA, 20 nt, Artificial Sequence
  LRRK2 RNA guide
aaaaacuuuagucuagguac

SEQ ID NO: 74550 - RNA, 20 nt, Artificial Sequence
  LRRK2 RNA guide
aaaacuuuagucuagguacu

SEQ ID NO: 74551 - RNA, 20 nt, Artificial Sequence
  LRRK2 RNA guide
aaacuuuagucuagguacug

SEQ ID NO: 74552 - RNA, 20 nt, Artificial Sequence
  LRRK2 RNA guide
aacaguaccuagacuaaagu

SEQ ID NO: 74553 - RNA, 20 nt, Artificial Sequence
  LRRK2 RNA guide
aacuuuagucuagguacugu

SEQ ID NO: 74554 - RNA, 20 nt, Artificial Sequence
  LRRK2 RNA guide
aagugccaacaguaccuaga

SEQ ID NO: 74555 - RNA, 20 nt, Artificial Sequence
  LRRK2 RNA guide
acaagugccaacaguaccua

SEQ ID NO: 74556 - RNA, 20 nt, Artificial Sequence
  LRRK2 RNA guide
acaguaccuagacuaaaguu

SEQ ID NO: 74557 - RNA, 20 nt, Artificial Sequence
  LRRK2 RNA guide
acuguuggcacuugugaggc

SEQ ID NO: 74558 - RNA, 20 nt, Artificial Sequence
  LRRK2 RNA guide
acuuuagucuagguacuguu

SEQ ID NO: 74559 - RNA, 20 nt, Artificial Sequence
  LRRK2 RNA guide
agguacuguuggcacuugug

SEQ ID NO: 74560 - RNA, 20 nt, Artificial Sequence
  LRRK2 RNA guide
aguaccuagacuaaaguuuu

SEQ ID NO: 74561 - RNA, 20 nt, Artificial Sequence
  LRRK2 RNA guide
agucuagguacuguuggcac

SEQ ID NO: 74562 - RNA, 20 nt, Artificial Sequence
  LRRK2 RNA guide
agugccaacaguaccuagac

SEQ ID NO: 74563 - RNA, 20 nt, Artificial Sequence
  LRRK2 RNA guide
caacaguaccuagacuaaag

SEQ ID NO: 74564 - RNA, 20 nt, Artificial Sequence
  LRRK2 RNA guide
caagugccaacaguaccuag

SEQ ID NO: 74565 - RNA, 20 nt, Artificial Sequence
  LRRK2 RNA guide
cacaagugccaacaguaccu

SEQ ID NO: 74566 - RNA, 20 nt, Artificial Sequence
  LRRK2 RNA guide
caguaccuagacuaaaguuu

SEQ ID NO: 74567 - RNA, 20 nt, Artificial Sequence
  LRRK2 RNA guide
ccaacaguaccuagacuaaa

SEQ ID NO: 74568 - RNA, 20 nt, Artificial Sequence
  LRRK2 RNA guide
ccucacaagugccaacagua

SEQ ID NO: 74569 - RNA, 20 nt, Artificial Sequence
  LRRK2 RNA guide
cuagguacuguuggcacuug

SEQ ID NO: 74570 - RNA, 20 nt, Artificial Sequence
  LRRK2 RNA guide
cucacaagugccaacaguac

SEQ ID NO: 74571 - RNA, 20 nt, Artificial Sequence
  LRRK2 RNA guide
cuuuagucuagguacuguug

SEQ ID NO: 74572 - RNA, 20 nt, Artificial Sequence
  LRRK2 RNA guide
gccaacaguaccuagacuaa

SEQ ID NO: 74573 - RNA, 20 nt, Artificial Sequence
  LRRK2 RNA guide
gccucacaagugccaacagu

SEQ ID NO: 74574 - RNA, 20 nt, Artificial Sequence
  LRRK2 RNA guide
gguacuguuggcacuuguga

SEQ ID NO: 74575 - RNA, 20 nt, Artificial Sequence
  LRRK2 RNA guide
guacuguuggcacuugugag

SEQ ID NO: 74576 - RNA, 20 nt, Artificial Sequence
  LRRK2 RNA guide
gucuagguacuguuggcacu

SEQ ID NO: 74577 - RNA, 20 nt, Artificial Sequence
  LRRK2 RNA guide
gugccaacaguaccuagacu

SEQ ID NO: 74578 - RNA, 20 nt, Artificial Sequence
  LRRK2 RNA guide
uacuguuggcacuugugagg

SEQ ID NO: 74579 - RNA, 20 nt, Artificial Sequence
  LRRK2 RNA guide
uagguacuguuggcacuugu

SEQ ID NO: 74580 - RNA, 20 nt, Artificial Sequence
  LRRK2 RNA guide
uagucuagguacuguuggca

SEQ ID NO: 74581 - RNA, 20 nt, Artificial Sequence
  LRRK2 RNA guide
ucacaagugccaacaguacc

SEQ ID NO: 74582 - RNA, 20 nt, Artificial Sequence
  LRRK2 RNA guide
ucuagguacuguuggcacuu

SEQ ID NO: 74583 - RNA, 20 nt, Artificial Sequence
  LRRK2 RNA guide
ugccaacaguaccuagacua

SEQ ID NO: 74584 - RNA, 20 nt, Artificial Sequence
  LRRK2 RNA guide
ugccucacaagugccaacag

SEQ ID NO: 74585 - RNA, 20 nt, Artificial Sequence
  LRRK2 RNA guide
uuagucuagguacuguuggc

SEQ ID NO: 74586 - RNA, 20 nt, Artificial Sequence
  LRRK2 RNA guide
uuuagucuagguacuguugg

SEQ ID NO: 74587 - RNA, 21 nt, Artificial Sequence
  LRRK2 RNA guide
aaaacuuuagucuagguacug

SEQ ID NO: 74588 - RNA, 21 nt, Artificial Sequence
  LRRK2 RNA guide
aaacuuuagucuagguacugu

SEQ ID NO: 74589 - RNA, 21 nt, Artificial Sequence
  LRRK2 RNA guide
aacaguaccuagacuaaaguu

SEQ ID NO: 74590 - RNA, 21 nt, Artificial Sequence
  LRRK2 RNA guide
aacuuuagucuagguacuguu

SEQ ID NO: 74591 - RNA, 21 nt, Artificial Sequence
  LRRK2 RNA guide
aagugccaacaguaccuagac

SEQ ID NO: 74592 - RNA, 21 nt, Artificial Sequence
  LRRK2 RNA guide
acaagugccaacaguaccuag

SEQ ID NO: 74593 - RNA, 21 nt, Artificial Sequence
  LRRK2 RNA guide
acaguaccuagacuaaaguuu

SEQ ID NO: 74594 - RNA, 21 nt, Artificial Sequence
  LRRK2 RNA guide
acuguuggcacuugugaggca

SEQ ID NO: 74595 - RNA, 21 nt, Artificial Sequence
  LRRK2 RNA guide
acuuuagucuagguacuguug

SEQ ID NO: 74596 - RNA, 21 nt, Artificial Sequence
  LRRK2 RNA guide
agguacuguuggcacuuguga

SEQ ID NO: 74597 - RNA, 21 nt, Artificial Sequence
  LRRK2 RNA guide
agucuagguacuguuggcacu

SEQ ID NO: 74598 - RNA, 21 nt, Artificial Sequence
  LRRK2 RNA guide
agugccaacaguaccuagacu

SEQ ID NO: 74599 - RNA, 21 nt, Artificial Sequence
  LRRK2 RNA guide
caaaaacuuuagucuagguac

SEQ ID NO: 74600 - RNA, 21 nt, Artificial Sequence
  LRRK2 RNA guide
caacaguaccuagacuaaagu

SEQ ID NO: 74601 - RNA, 21 nt, Artificial Sequence
  LRRK2 RNA guide
caagugccaacaguaccuaga

SEQ ID NO: 74602 - RNA, 21 nt, Artificial Sequence
  LRRK2 RNA guide
cacaagugccaacaguaccua

SEQ ID NO: 74603 - RNA, 21 nt, Artificial Sequence
  LRRK2 RNA guide
caguaccuagacuaaaguuuu

SEQ ID NO: 74604 - RNA, 21 nt, Artificial Sequence
  LRRK2 RNA guide
ccaacaguaccuagacuaaag

SEQ ID NO: 74605 - RNA, 21 nt, Artificial Sequence
  LRRK2 RNA guide
ccucacaagugccaacaguac

SEQ ID NO: 74606 - RNA, 21 nt, Artificial Sequence
  LRRK2 RNA guide
cuagguacuguuggcacuugu

SEQ ID NO: 74607 - RNA, 21 nt, Artificial Sequence
  LRRK2 RNA guide
cucacaagugccaacaguacc

SEQ ID NO: 74608 - RNA, 21 nt, Artificial Sequence
  LRRK2 RNA guide
cuuuagucuagguacuguugg

SEQ ID NO: 74609 - RNA, 21 nt, Artificial Sequence
  LRRK2 RNA guide
gccaacaguaccuagacuaaa

SEQ ID NO: 74610 - RNA, 21 nt, Artificial Sequence
  LRRK2 RNA guide
gccucacaagugccaacagua

SEQ ID NO: 74611 - RNA, 21 nt, Artificial Sequence
  LRRK2 RNA guide
gguacuguuggcacuugugag

SEQ ID NO: 74612 - RNA, 21 nt, Artificial Sequence
  LRRK2 RNA guide
guacuguuggcacuugugagg

SEQ ID NO: 74613 - RNA, 21 nt, Artificial Sequence
  LRRK2 RNA guide
gucuagguacuguuggcacuu

SEQ ID NO: 74614 - RNA, 21 nt, Artificial Sequence
  LRRK2 RNA guide
gugccaacaguaccuagacua

SEQ ID NO: 74615 - RNA, 21 nt, Artificial Sequence
  LRRK2 RNA guide
uacuguuggcacuugugaggc

SEQ ID NO: 74616 - RNA, 21 nt, Artificial Sequence
  LRRK2 RNA guide
uagguacuguuggcacuugug

SEQ ID NO: 74617 - RNA, 21 nt, Artificial Sequence
  LRRK2 RNA guide
uagucuagguacuguuggcac

SEQ ID NO: 74618 - RNA, 21 nt, Artificial Sequence
  LRRK2 RNA guide
ucacaagugccaacaguaccu

SEQ ID NO: 74619 - RNA, 21 nt, Artificial Sequence
  LRRK2 RNA guide
ucuagguacuguuggcacuug

SEQ ID NO: 74620 - RNA, 21 nt, Artificial Sequence
  LRRK2 RNA guide
ugccaacaguaccuagacuaa

SEQ ID NO: 74621 - RNA, 21 nt, Artificial Sequence
  LRRK2 RNA guide
ugccucacaagugccaacagu

SEQ ID NO: 74622 - RNA, 21 nt, Artificial Sequence
  LRRK2 RNA guide
uuagucuagguacuguuggca

SEQ ID NO: 74623 - RNA, 21 nt, Artificial Sequence
  LRRK2 RNA guide
uugccucacaagugccaacag

SEQ ID NO: 74624 - RNA, 21 nt, Artificial Sequence
  LRRK2 RNA guide
uuuagucuagguacuguuggc

SEQ ID NO: 74625 - RNA, 22 nt, Artificial Sequence
  LRRK2 RNA guide
aaaaacuuuagucuagguacug

SEQ ID NO: 74626 - RNA, 22 nt, Artificial Sequence
  LRRK2 RNA guide
aaaacuuuagucuagguacugu

SEQ ID NO: 74627 - RNA, 22 nt, Artificial Sequence
  LRRK2 RNA guide
aaacuuuagucuagguacuguu

SEQ ID NO: 74628 - RNA, 22 nt, Artificial Sequence
  LRRK2 RNA guide
aacaguaccuagacuaaaguuu

SEQ ID NO: 74629 - RNA, 22 nt, Artificial Sequence
  LRRK2 RNA guide
aacuuuagucuagguacuguug

SEQ ID NO: 74630 - RNA, 22 nt, Artificial Sequence
  LRRK2 RNA guide
aagugccaacaguaccuagacu

SEQ ID NO: 74631 - RNA, 22 nt, Artificial Sequence
  LRRK2 RNA guide
acaagugccaacaguaccuaga

SEQ ID NO: 74632 - RNA, 22 nt, Artificial Sequence
  LRRK2 RNA guide
acaguaccuagacuaaaguuuu

SEQ ID NO: 74633 - RNA, 22 nt, Artificial Sequence
  LRRK2 RNA guide
acuguuggcacuugugaggcaa

SEQ ID NO: 74634 - RNA, 22 nt, Artificial Sequence
  LRRK2 RNA guide
acuuuagucuagguacuguugg

SEQ ID NO: 74635 - RNA, 22 nt, Artificial Sequence
  LRRK2 RNA guide
agguacuguuggcacuugugag

SEQ ID NO: 74636 - RNA, 22 nt, Artificial Sequence
  LRRK2 RNA guide
aguaccuagacuaaaguuuuug

SEQ ID NO: 74637 - RNA, 22 nt, Artificial Sequence
  LRRK2 RNA guide
agucuagguacuguuggcacuu

SEQ ID NO: 74638 - RNA, 22 nt, Artificial Sequence
  LRRK2 RNA guide
agugccaacaguaccuagacua

SEQ ID NO: 74639 - RNA, 22 nt, Artificial Sequence
  LRRK2 RNA guide
caaaaacuuuagucuagguacu

SEQ ID NO: 74640 - RNA, 22 nt, Artificial Sequence
  LRRK2 RNA guide
caacaguaccuagacuaaaguu

SEQ ID NO: 74641 - RNA, 22 nt, Artificial Sequence
  LRRK2 RNA guide
caagugccaacaguaccuagac

SEQ ID NO: 74642 - RNA, 22 nt, Artificial Sequence
  LRRK2 RNA guide
cacaagugccaacaguaccuag

SEQ ID NO: 74643 - RNA, 22 nt, Artificial Sequence
  LRRK2 RNA guide
caguaccuagacuaaaguuuuu

SEQ ID NO: 74644 - RNA, 22 nt, Artificial Sequence
  LRRK2 RNA guide
ccaacaguaccuagacuaaagu

SEQ ID NO: 74645 - RNA, 22 nt, Artificial Sequence
  LRRK2 RNA guide
ccucacaagugccaacaguacc

SEQ ID NO: 74646 - RNA, 22 nt, Artificial Sequence
  LRRK2 RNA guide
cuagguacuguuggcacuugug

SEQ ID NO: 74647 - RNA, 22 nt, Artificial Sequence
  LRRK2 RNA guide
cucacaagugccaacaguaccu

SEQ ID NO: 74648 - RNA, 22 nt, Artificial Sequence
  LRRK2 RNA guide
cuuuagucuagguacuguuggc

SEQ ID NO: 74649 - RNA, 22 nt, Artificial Sequence
  LRRK2 RNA guide
gcaaaaacuuuagucuagguac

SEQ ID NO: 74650 - RNA, 22 nt, Artificial Sequence
  LRRK2 RNA guide
gccaacaguaccuagacuaaag

SEQ ID NO: 74651 - RNA, 22 nt, Artificial Sequence
  LRRK2 RNA guide
gccucacaagugccaacaguac

SEQ ID NO: 74652 - RNA, 22 nt, Artificial Sequence
  LRRK2 RNA guide
gguacuguuggcacuugugagg

SEQ ID NO: 74653 - RNA, 22 nt, Artificial Sequence
  LRRK2 RNA guide
guacuguuggcacuugugaggc

SEQ ID NO: 74654 - RNA, 22 nt, Artificial Sequence
  LRRK2 RNA guide
gucuagguacuguuggcacuug

SEQ ID NO: 74655 - RNA, 22 nt, Artificial Sequence
  LRRK2 RNA guide
gugccaacaguaccuagacuaa

SEQ ID NO: 74656 - RNA, 22 nt, Artificial Sequence
  LRRK2 RNA guide
uacuguuggcacuugugaggca

SEQ ID NO: 74657 - RNA, 22 nt, Artificial Sequence
  LRRK2 RNA guide
uagguacuguuggcacuuguga

SEQ ID NO: 74658 - RNA, 22 nt, Artificial Sequence
  LRRK2 RNA guide
uagucuagguacuguuggcacu

SEQ ID NO: 74659 - RNA, 22 nt, Artificial Sequence
  LRRK2 RNA guide
ucacaagugccaacaguaccua

SEQ ID NO: 74660 - RNA, 22 nt, Artificial Sequence
  LRRK2 RNA guide
ucuagguacuguuggcacuugu

SEQ ID NO: 74661 - RNA, 22 nt, Artificial Sequence
  LRRK2 RNA guide
ugccaacaguaccuagacuaaa

SEQ ID NO: 74662 - RNA, 22 nt, Artificial Sequence
  LRRK2 RNA guide
ugccucacaagugccaacagua

SEQ ID NO: 74663 - RNA, 22 nt, Artificial Sequence
  LRRK2 RNA guide
uuagucuagguacuguuggcac

SEQ ID NO: 74664 - RNA, 22 nt, Artificial Sequence
  LRRK2 RNA guide
uugccucacaagugccaacagu

SEQ ID NO: 74665 - RNA, 22 nt, Artificial Sequence
  LRRK2 RNA guide
uuuagucuagguacuguuggca

SEQ ID NO: 74666 - RNA, 22 nt, Artificial Sequence
  LRRK2 RNA guide
uuugccucacaagugccaacag

SEQ ID NO: 74667 - RNA, 20 nt, Artificial Sequence
  LRRK2 RNA guide
aaaagcaguuauggggccag

SEQ ID NO: 74668 - RNA, 20 nt, Artificial Sequence
  LRRK2 RNA guide
aaagcaguuauggggccagu

SEQ ID NO: 74669 - RNA, 20 nt, Artificial Sequence
  LRRK2 RNA guide
aacaugucuguacagagcac

SEQ ID NO: 74670 - RNA, 20 nt, Artificial Sequence
  LRRK2 RNA guide
aagcaguuauggggccagug

SEQ ID NO: 74671 - RNA, 20 nt, Artificial Sequence
  LRRK2 RNA guide
acaacaugucuguacagagc

SEQ ID NO: 74672 - RNA, 20 nt, Artificial Sequence
  LRRK2 RNA guide
acagagcacuggccccauaa

SEQ ID NO: 74673 - RNA, 20 nt, Artificial Sequence
  LRRK2 RNA guide
acaugucuguacagagcacu

SEQ ID NO: 74674 - RNA, 20 nt, Artificial Sequence
  LRRK2 RNA guide
agacaacaugucuguacaga

SEQ ID NO: 74675 - RNA, 20 nt, Artificial Sequence
  LRRK2 RNA guide
agagcacuggccccauaacu

SEQ ID NO: 74676 - RNA, 20 nt, Artificial Sequence
  LRRK2 RNA guide
agcacuggccccauaacugc

SEQ ID NO: 74677 - RNA, 20 nt, Artificial Sequence
  LRRK2 RNA guide
agcaguuauggggccagugc

SEQ ID NO: 74678 - RNA, 20 nt, Artificial Sequence
  LRRK2 RNA guide
agugcucuguacagacaugu

SEQ ID NO: 74679 - RNA, 20 nt, Artificial Sequence
  LRRK2 RNA guide
aguuauggggccagugcucu

SEQ ID NO: 74680 - RNA, 20 nt, Artificial Sequence
  LRRK2 RNA guide
auggggccagugcucuguac

SEQ ID NO: 74681 - RNA, 20 nt, Artificial Sequence
  LRRK2 RNA guide
augucuguacagagcacugg

SEQ ID NO: 74682 - RNA, 20 nt, Artificial Sequence
  LRRK2 RNA guide
caacaugucuguacagagca

SEQ ID NO: 74683 - RNA, 20 nt, Artificial Sequence
  LRRK2 RNA guide
cagagcacuggccccauaac

SEQ ID NO: 74684 - RNA, 20 nt, Artificial Sequence
  LRRK2 RNA guide
cagugcucuguacagacaug

SEQ ID NO: 74685 - RNA, 20 nt, Artificial Sequence
  LRRK2 RNA guide
caguuauggggccagugcuc

SEQ ID NO: 74686 - RNA, 20 nt, Artificial Sequence
  LRRK2 RNA guide
caugucuguacagagcacug

SEQ ID NO: 74687 - RNA, 20 nt, Artificial Sequence
  LRRK2 RNA guide
ccagugcucuguacagacau

SEQ ID NO: 74688 - RNA, 20 nt, Artificial Sequence
  LRRK2 RNA guide
cugagacaacaugucuguac

SEQ ID NO: 74689 - RNA, 20 nt, Artificial Sequence
  LRRK2 RNA guide
cuguacagagcacuggcccc

SEQ ID NO: 74690 - RNA, 20 nt, Artificial Sequence
  LRRK2 RNA guide
gaaaagcaguuauggggcca

SEQ ID NO: 74691 - RNA, 20 nt, Artificial Sequence
  LRRK2 RNA guide
gacaacaugucuguacagag

SEQ ID NO: 74692 - RNA, 20 nt, Artificial Sequence
  LRRK2 RNA guide
gagacaacaugucuguacag

SEQ ID NO: 74693 - RNA, 20 nt, Artificial Sequence
  LRRK2 RNA guide
gagcacuggccccauaacug

SEQ ID NO: 74694 - RNA, 20 nt, Artificial Sequence
  LRRK2 RNA guide
gcaguuauggggccagugcu

SEQ ID NO: 74695 - RNA, 20 nt, Artificial Sequence
  LRRK2 RNA guide
gccagugcucuguacagaca

SEQ ID NO: 74696 - RNA, 20 nt, Artificial Sequence
  LRRK2 RNA guide
gcucuguacagacauguugu

SEQ ID NO: 74697 - RNA, 20 nt, Artificial Sequence
  LRRK2 RNA guide
ggccagugcucuguacagac

SEQ ID NO: 74698 - RNA, 20 nt, Artificial Sequence
  LRRK2 RNA guide
gggccagugcucuguacaga

SEQ ID NO: 74699 - RNA, 20 nt, Artificial Sequence
  LRRK2 RNA guide
ggggccagugcucuguacag

SEQ ID NO: 74700 - RNA, 20 nt, Artificial Sequence
  LRRK2 RNA guide
guacagagcacuggccccau

SEQ ID NO: 74701 - RNA, 20 nt, Artificial Sequence
  LRRK2 RNA guide
gucuguacagagcacuggcc

SEQ ID NO: 74702 - RNA, 20 nt, Artificial Sequence
  LRRK2 RNA guide
gugcucuguacagacauguu

SEQ ID NO: 74703 - RNA, 20 nt, Artificial Sequence
  LRRK2 RNA guide
guuauggggccagugcucug

SEQ ID NO: 74704 - RNA, 20 nt, Artificial Sequence
  LRRK2 RNA guide
uacagagcacuggccccaua

SEQ ID NO: 74705 - RNA, 20 nt, Artificial Sequence
  LRRK2 RNA guide
uauggggccagugcucugua

SEQ ID NO: 74706 - RNA, 20 nt, Artificial Sequence
  LRRK2 RNA guide
ucugagacaacaugucugua

SEQ ID NO: 74707 - RNA, 20 nt, Artificial Sequence
  LRRK2 RNA guide
ucuguacagagcacuggccc

SEQ ID NO: 74708 - RNA, 20 nt, Artificial Sequence
  LRRK2 RNA guide
ugaaaagcaguuauggggcc

SEQ ID NO: 74709 - RNA, 20 nt, Artificial Sequence
  LRRK2 RNA guide
ugagacaacaugucuguaca

SEQ ID NO: 74710 - RNA, 20 nt, Artificial Sequence
  LRRK2 RNA guide
ugcucuguacagacauguug

SEQ ID NO: 74711 - RNA, 20 nt, Artificial Sequence
  LRRK2 RNA guide
uggggccagugcucuguaca

SEQ ID NO: 74712 - RNA, 20 nt, Artificial Sequence
  LRRK2 RNA guide
uguacagagcacuggcccca

SEQ ID NO: 74713 - RNA, 20 nt, Artificial Sequence
  LRRK2 RNA guide
ugucuguacagagcacuggc

SEQ ID NO: 74714 - RNA, 20 nt, Artificial Sequence
  LRRK2 RNA guide
uuauggggccagugcucugu

SEQ ID NO: 74715 - RNA, 21 nt, Artificial Sequence
  LRRK2 RNA guide
aaaagcaguuauggggccagu

SEQ ID NO: 74716 - RNA, 21 nt, Artificial Sequence
  LRRK2 RNA guide
aaagcaguuauggggccagug

SEQ ID NO: 74717 - RNA, 21 nt, Artificial Sequence
  LRRK2 RNA guide
aacaugucuguacagagcacu

SEQ ID NO: 74718 - RNA, 21 nt, Artificial Sequence
  LRRK2 RNA guide
aagcaguuauggggccagugc

SEQ ID NO: 74719 - RNA, 21 nt, Artificial Sequence
  LRRK2 RNA guide
acaacaugucuguacagagca

SEQ ID NO: 74720 - RNA, 21 nt, Artificial Sequence
  LRRK2 RNA guide
acagagcacuggccccauaac

SEQ ID NO: 74721 - RNA, 21 nt, Artificial Sequence
  LRRK2 RNA guide
acaugucuguacagagcacug

SEQ ID NO: 74722 - RNA, 21 nt, Artificial Sequence
  LRRK2 RNA guide
agacaacaugucuguacagag

SEQ ID NO: 74723 - RNA, 21 nt, Artificial Sequence
  LRRK2 RNA guide
agagcacuggccccauaacug

SEQ ID NO: 74724 - RNA, 21 nt, Artificial Sequence
  LRRK2 RNA guide
agcacuggccccauaacugcu

SEQ ID NO: 74725 - RNA, 21 nt, Artificial Sequence
  LRRK2 RNA guide
agcaguuauggggccagugcu

SEQ ID NO: 74726 - RNA, 21 nt, Artificial Sequence
  LRRK2 RNA guide
agugcucuguacagacauguu

SEQ ID NO: 74727 - RNA, 21 nt, Artificial Sequence
  LRRK2 RNA guide
aguuauggggccagugcucug

SEQ ID NO: 74728 - RNA, 21 nt, Artificial Sequence
  LRRK2 RNA guide
auggggccagugcucuguaca

SEQ ID NO: 74729 - RNA, 21 nt, Artificial Sequence
  LRRK2 RNA guide
augucuguacagagcacuggc

SEQ ID NO: 74730 - RNA, 21 nt, Artificial Sequence
  LRRK2 RNA guide
caacaugucuguacagagcac

SEQ ID NO: 74731 - RNA, 21 nt, Artificial Sequence
  LRRK2 RNA guide
cagagcacuggccccauaacu

SEQ ID NO: 74732 - RNA, 21 nt, Artificial Sequence
  LRRK2 RNA guide
cagugcucuguacagacaugu

SEQ ID NO: 74733 - RNA, 21 nt, Artificial Sequence
  LRRK2 RNA guide
caguuauggggccagugcucu

SEQ ID NO: 74734 - RNA, 21 nt, Artificial Sequence
  LRRK2 RNA guide
caugucuguacagagcacugg

SEQ ID NO: 74735 - RNA, 21 nt, Artificial Sequence
  LRRK2 RNA guide
ccagugcucuguacagacaug

SEQ ID NO: 74736 - RNA, 21 nt, Artificial Sequence
  LRRK2 RNA guide
cugaaaagcaguuauggggcc

SEQ ID NO: 74737 - RNA, 21 nt, Artificial Sequence
  LRRK2 RNA guide
cugagacaacaugucuguaca

SEQ ID NO: 74738 - RNA, 21 nt, Artificial Sequence
  LRRK2 RNA guide
cuguacagagcacuggcccca

SEQ ID NO: 74739 - RNA, 21 nt, Artificial Sequence
  LRRK2 RNA guide
gaaaagcaguuauggggccag

SEQ ID NO: 74740 - RNA, 21 nt, Artificial Sequence
  LRRK2 RNA guide
gacaacaugucuguacagagc

SEQ ID NO: 74741 - RNA, 21 nt, Artificial Sequence
  LRRK2 RNA guide
gagacaacaugucuguacaga

SEQ ID NO: 74742 - RNA, 21 nt, Artificial Sequence
  LRRK2 RNA guide
gagcacuggccccauaacugc

SEQ ID NO: 74743 - RNA, 21 nt, Artificial Sequence
  LRRK2 RNA guide
gcaguuauggggccagugcuc

SEQ ID NO: 74744 - RNA, 21 nt, Artificial Sequence
  LRRK2 RNA guide
gccagugcucuguacagacau

SEQ ID NO: 74745 - RNA, 21 nt, Artificial Sequence
  LRRK2 RNA guide
gcucuguacagacauguuguc

SEQ ID NO: 74746 - RNA, 21 nt, Artificial Sequence
  LRRK2 RNA guide
ggccagugcucuguacagaca

SEQ ID NO: 74747 - RNA, 21 nt, Artificial Sequence
  LRRK2 RNA guide
gggccagugcucuguacagac

SEQ ID NO: 74748 - RNA, 21 nt, Artificial Sequence
  LRRK2 RNA guide
ggggccagugcucuguacaga

SEQ ID NO: 74749 - RNA, 21 nt, Artificial Sequence
  LRRK2 RNA guide
guacagagcacuggccccaua

SEQ ID NO: 74750 - RNA, 21 nt, Artificial Sequence
  LRRK2 RNA guide
gucugagacaacaugucugua

SEQ ID NO: 74751 - RNA, 21 nt, Artificial Sequence
  LRRK2 RNA guide
gucuguacagagcacuggccc

SEQ ID NO: 74752 - RNA, 21 nt, Artificial Sequence
  LRRK2 RNA guide
gugcucuguacagacauguug

SEQ ID NO: 74753 - RNA, 21 nt, Artificial Sequence
  LRRK2 RNA guide
guuauggggccagugcucugu

SEQ ID NO: 74754 - RNA, 21 nt, Artificial Sequence
  LRRK2 RNA guide
uacagagcacuggccccauaa

SEQ ID NO: 74755 - RNA, 21 nt, Artificial Sequence
  LRRK2 RNA guide
uauggggccagugcucuguac

SEQ ID NO: 74756 - RNA, 21 nt, Artificial Sequence
  LRRK2 RNA guide
ucugagacaacaugucuguac

SEQ ID NO: 74757 - RNA, 21 nt, Artificial Sequence
  LRRK2 RNA guide
ucuguacagagcacuggcccc

SEQ ID NO: 74758 - RNA, 21 nt, Artificial Sequence
  LRRK2 RNA guide
ugaaaagcaguuauggggcca

SEQ ID NO: 74759 - RNA, 21 nt, Artificial Sequence
  LRRK2 RNA guide
ugagacaacaugucuguacag

SEQ ID NO: 74760 - RNA, 21 nt, Artificial Sequence
  LRRK2 RNA guide
ugcucuguacagacauguugu

SEQ ID NO: 74761 - RNA, 21 nt, Artificial Sequence
  LRRK2 RNA guide
uggggccagugcucuguacag

SEQ ID NO: 74762 - RNA, 21 nt, Artificial Sequence
  LRRK2 RNA guide
uguacagagcacuggccccau

SEQ ID NO: 74763 - RNA, 21 nt, Artificial Sequence
  LRRK2 RNA guide
ugucuguacagagcacuggcc

SEQ ID NO: 74764 - RNA, 21 nt, Artificial Sequence
  LRRK2 RNA guide
uuauggggccagugcucugua

SEQ ID NO: 74765 - RNA, 22 nt, Artificial Sequence
  LRRK2 RNA guide
aaaagcaguuauggggccagug

SEQ ID NO: 74766 - RNA, 22 nt, Artificial Sequence
  LRRK2 RNA guide
aaagcaguuauggggccagugc

SEQ ID NO: 74767 - RNA, 22 nt, Artificial Sequence
  LRRK2 RNA guide
aacaugucuguacagagcacug

SEQ ID NO: 74768 - RNA, 22 nt, Artificial Sequence
  LRRK2 RNA guide
aagcaguuauggggccagugcu

SEQ ID NO: 74769 - RNA, 22 nt, Artificial Sequence
  LRRK2 RNA guide
acaacaugucuguacagagcac

SEQ ID NO: 74770 - RNA, 22 nt, Artificial Sequence
  LRRK2 RNA guide
acagagcacuggccccauaacu

SEQ ID NO: 74771 - RNA, 22 nt, Artificial Sequence
  LRRK2 RNA guide
acaugucuguacagagcacugg

SEQ ID NO: 74772 - RNA, 22 nt, Artificial Sequence
  LRRK2 RNA guide
agacaacaugucuguacagagc

SEQ ID NO: 74773 - RNA, 22 nt, Artificial Sequence
  LRRK2 RNA guide
agagcacuggccccauaacugc

SEQ ID NO: 74774 - RNA, 22 nt, Artificial Sequence
  LRRK2 RNA guide
agcacuggccccauaacugcuu

SEQ ID NO: 74775 - RNA, 22 nt, Artificial Sequence
  LRRK2 RNA guide
agcaguuauggggccagugcuc

SEQ ID NO: 74776 - RNA, 22 nt, Artificial Sequence
  LRRK2 RNA guide
agugcucuguacagacauguug

SEQ ID NO: 74777 - RNA, 22 nt, Artificial Sequence
  LRRK2 RNA guide
aguuauggggccagugcucugu

SEQ ID NO: 74778 - RNA, 22 nt, Artificial Sequence
  LRRK2 RNA guide
auggggccagugcucuguacag

SEQ ID NO: 74779 - RNA, 22 nt, Artificial Sequence
  LRRK2 RNA guide
augucuguacagagcacuggcc

SEQ ID NO: 74780 - RNA, 22 nt, Artificial Sequence
  LRRK2 RNA guide
caacaugucuguacagagcacu

SEQ ID NO: 74781 - RNA, 22 nt, Artificial Sequence
  LRRK2 RNA guide
cagagcacuggccccauaacug

SEQ ID NO: 74782 - RNA, 22 nt, Artificial Sequence
  LRRK2 RNA guide
cagugcucuguacagacauguu

SEQ ID NO: 74783 - RNA, 22 nt, Artificial Sequence
  LRRK2 RNA guide
caguuauggggccagugcucug

SEQ ID NO: 74784 - RNA, 22 nt, Artificial Sequence
  LRRK2 RNA guide
caugucuguacagagcacuggc

SEQ ID NO: 74785 - RNA, 22 nt, Artificial Sequence
  LRRK2 RNA guide
ccagugcucuguacagacaugu

SEQ ID NO: 74786 - RNA, 22 nt, Artificial Sequence
  LRRK2 RNA guide
ccugaaaagcaguuauggggcc

SEQ ID NO: 74787 - RNA, 22 nt, Artificial Sequence
  LRRK2 RNA guide
cugaaaagcaguuauggggcca

SEQ ID NO: 74788 - RNA, 22 nt, Artificial Sequence
  LRRK2 RNA guide
cugagacaacaugucuguacag

SEQ ID NO: 74789 - RNA, 22 nt, Artificial Sequence
  LRRK2 RNA guide
cuguacagagcacuggccccau

SEQ ID NO: 74790 - RNA, 22 nt, Artificial Sequence
  LRRK2 RNA guide
gaaaagcaguuauggggccagu

SEQ ID NO: 74791 - RNA, 22 nt, Artificial Sequence
  LRRK2 RNA guide
gacaacaugucuguacagagca

SEQ ID NO: 74792 - RNA, 22 nt, Artificial Sequence
  LRRK2 RNA guide
gagacaacaugucuguacagag

SEQ ID NO: 74793 - RNA, 22 nt, Artificial Sequence
  LRRK2 RNA guide
gagcacuggccccauaacugcu

SEQ ID NO: 74794 - RNA, 22 nt, Artificial Sequence
  LRRK2 RNA guide
gcaguuauggggccagugcucu

SEQ ID NO: 74795 - RNA, 22 nt, Artificial Sequence
  LRRK2 RNA guide
gccagugcucuguacagacaug

SEQ ID NO: 74796 - RNA, 22 nt, Artificial Sequence
  LRRK2 RNA guide
gcucuguacagacauguugucu

SEQ ID NO: 74797 - RNA, 22 nt, Artificial Sequence
  LRRK2 RNA guide
ggccagugcucuguacagacau

SEQ ID NO: 74798 - RNA, 22 nt, Artificial Sequence
  LRRK2 RNA guide
gggccagugcucuguacagaca

SEQ ID NO: 74799 - RNA, 22 nt, Artificial Sequence
  LRRK2 RNA guide
ggggccagugcucuguacagac

SEQ ID NO: 74800 - RNA, 22 nt, Artificial Sequence
  LRRK2 RNA guide
guacagagcacuggccccauaa

SEQ ID NO: 74801 - RNA, 22 nt, Artificial Sequence
  LRRK2 RNA guide
gucugagacaacaugucuguac

SEQ ID NO: 74802 - RNA, 22 nt, Artificial Sequence
  LRRK2 RNA guide
gucuguacagagcacuggcccc

SEQ ID NO: 74803 - RNA, 22 nt, Artificial Sequence
  LRRK2 RNA guide
gugcucuguacagacauguugu

SEQ ID NO: 74804 - RNA, 22 nt, Artificial Sequence
  LRRK2 RNA guide
guuauggggccagugcucugua

SEQ ID NO: 74805 - RNA, 22 nt, Artificial Sequence
  LRRK2 RNA guide
uacagagcacuggccccauaac

SEQ ID NO: 74806 - RNA, 22 nt, Artificial Sequence
  LRRK2 RNA guide
uauggggccagugcucuguaca

SEQ ID NO: 74807 - RNA, 22 nt, Artificial Sequence
  LRRK2 RNA guide
ucugagacaacaugucuguaca

SEQ ID NO: 74808 - RNA, 22 nt, Artificial Sequence
  LRRK2 RNA guide
ucuguacagagcacuggcccca

SEQ ID NO: 74809 - RNA, 22 nt, Artificial Sequence
  LRRK2 RNA guide
ugaaaagcaguuauggggccag

SEQ ID NO: 74810 - RNA, 22 nt, Artificial Sequence
  LRRK2 RNA guide
ugagacaacaugucuguacaga

SEQ ID NO: 74811 - RNA, 22 nt, Artificial Sequence
  LRRK2 RNA guide
ugcucuguacagacauguuguc

SEQ ID NO: 74812 - RNA, 22 nt, Artificial Sequence
  LRRK2 RNA guide
uggggccagugcucuguacaga

SEQ ID NO: 74813 - RNA, 22 nt, Artificial Sequence
  LRRK2 RNA guide
uguacagagcacuggccccaua

SEQ ID NO: 74814 - RNA, 22 nt, Artificial Sequence
  LRRK2 RNA guide
ugucugagacaacaugucugua

SEQ ID NO: 74815 - RNA, 22 nt, Artificial Sequence
  LRRK2 RNA guide
ugucuguacagagcacuggccc

SEQ ID NO: 74816 - RNA, 22 nt, Artificial Sequence
  LRRK2 RNA guide
uuauggggccagugcucuguac

SEQ ID NO: 74817 - RNA, 20 nt, Artificial Sequence
  LRRK2 RNA guide
aacaugucuguacagaucac

SEQ ID NO: 74818 - RNA, 20 nt, Artificial Sequence
  LRRK2 RNA guide
acaacaugucuguacagauc

SEQ ID NO: 74819 - RNA, 20 nt, Artificial Sequence
  LRRK2 RNA guide
acagaucacuggccccauaa

SEQ ID NO: 74820 - RNA, 20 nt, Artificial Sequence
  LRRK2 RNA guide
acaugucuguacagaucacu

SEQ ID NO: 74821 - RNA, 20 nt, Artificial Sequence
  LRRK2 RNA guide
agaucacuggccccauaacu

SEQ ID NO: 74822 - RNA, 20 nt, Artificial Sequence
  LRRK2 RNA guide
agcaguuauggggccaguga

SEQ ID NO: 74823 - RNA, 20 nt, Artificial Sequence
  LRRK2 RNA guide
agugaucuguacagacaugu

SEQ ID NO: 74824 - RNA, 20 nt, Artificial Sequence
  LRRK2 RNA guide
aguuauggggccagugaucu

SEQ ID NO: 74825 - RNA, 20 nt, Artificial Sequence
  LRRK2 RNA guide
aucacuggccccauaacugc

SEQ ID NO: 74826 - RNA, 20 nt, Artificial Sequence
  LRRK2 RNA guide
auggggccagugaucuguac

SEQ ID NO: 74827 - RNA, 20 nt, Artificial Sequence
  LRRK2 RNA guide
augucuguacagaucacugg

SEQ ID NO: 74828 - RNA, 20 nt, Artificial Sequence
  LRRK2 RNA guide
caacaugucuguacagauca

SEQ ID NO: 74829 - RNA, 20 nt, Artificial Sequence
  LRRK2 RNA guide
cagaucacuggccccauaac

SEQ ID NO: 74830 - RNA, 20 nt, Artificial Sequence
  LRRK2 RNA guide
cagugaucuguacagacaug

SEQ ID NO: 74831 - RNA, 20 nt, Artificial Sequence
  LRRK2 RNA guide
caguuauggggccagugauc

SEQ ID NO: 74832 - RNA, 20 nt, Artificial Sequence
  LRRK2 RNA guide
caugucuguacagaucacug

SEQ ID NO: 74833 - RNA, 20 nt, Artificial Sequence
  LRRK2 RNA guide
ccagugaucuguacagacau

SEQ ID NO: 74834 - RNA, 20 nt, Artificial Sequence
  LRRK2 RNA guide
cuguacagaucacuggcccc

SEQ ID NO: 74835 - RNA, 20 nt, Artificial Sequence
  LRRK2 RNA guide
gacaacaugucuguacagau

SEQ ID NO: 74836 - RNA, 20 nt, Artificial Sequence
  LRRK2 RNA guide
gaucacuggccccauaacug

SEQ ID NO: 74837 - RNA, 20 nt, Artificial Sequence
  LRRK2 RNA guide
gaucuguacagacauguugu

SEQ ID NO: 74838 - RNA, 20 nt, Artificial Sequence
  LRRK2 RNA guide
gcaguuauggggccagugau

SEQ ID NO: 74839 - RNA, 20 nt, Artificial Sequence
  LRRK2 RNA guide
gccagugaucuguacagaca

SEQ ID NO: 74840 - RNA, 20 nt, Artificial Sequence
  LRRK2 RNA guide
ggccagugaucuguacagac

SEQ ID NO: 74841 - RNA, 20 nt, Artificial Sequence
  LRRK2 RNA guide
gggccagugaucuguacaga

SEQ ID NO: 74842 - RNA, 20 nt, Artificial Sequence
  LRRK2 RNA guide
ggggccagugaucuguacag

SEQ ID NO: 74843 - RNA, 20 nt, Artificial Sequence
  LRRK2 RNA guide
guacagaucacuggccccau

SEQ ID NO: 74844 - RNA, 20 nt, Artificial Sequence
  LRRK2 RNA guide
gucuguacagaucacuggcc

SEQ ID NO: 74845 - RNA, 20 nt, Artificial Sequence
  LRRK2 RNA guide
gugaucuguacagacauguu

SEQ ID NO: 74846 - RNA, 20 nt, Artificial Sequence
  LRRK2 RNA guide
guuauggggccagugaucug

SEQ ID NO: 74847 - RNA, 20 nt, Artificial Sequence
  LRRK2 RNA guide
uacagaucacuggccccaua

SEQ ID NO: 74848 - RNA, 20 nt, Artificial Sequence
  LRRK2 RNA guide
uauggggccagugaucugua

SEQ ID NO: 74849 - RNA, 20 nt, Artificial Sequence
  LRRK2 RNA guide
ucuguacagaucacuggccc

SEQ ID NO: 74850 - RNA, 20 nt, Artificial Sequence
  LRRK2 RNA guide
ugaucuguacagacauguug

SEQ ID NO: 74851 - RNA, 20 nt, Artificial Sequence
  LRRK2 RNA guide
uggggccagugaucuguaca

SEQ ID NO: 74852 - RNA, 20 nt, Artificial Sequence
  LRRK2 RNA guide
uguacagaucacuggcccca

SEQ ID NO: 74853 - RNA, 20 nt, Artificial Sequence
  LRRK2 RNA guide
ugucuguacagaucacuggc

SEQ ID NO: 74854 - RNA, 20 nt, Artificial Sequence
  LRRK2 RNA guide
uuauggggccagugaucugu

SEQ ID NO: 74855 - RNA, 21 nt, Artificial Sequence
  LRRK2 RNA guide
aacaugucuguacagaucacu

SEQ ID NO: 74856 - RNA, 21 nt, Artificial Sequence
  LRRK2 RNA guide
aagcaguuauggggccaguga

SEQ ID NO: 74857 - RNA, 21 nt, Artificial Sequence
  LRRK2 RNA guide
acaacaugucuguacagauca

SEQ ID NO: 74858 - RNA, 21 nt, Artificial Sequence
  LRRK2 RNA guide
acagaucacuggccccauaac

SEQ ID NO: 74859 - RNA, 21 nt, Artificial Sequence
  LRRK2 RNA guide
acaugucuguacagaucacug

SEQ ID NO: 74860 - RNA, 21 nt, Artificial Sequence
  LRRK2 RNA guide
agacaacaugucuguacagau

SEQ ID NO: 74861 - RNA, 21 nt, Artificial Sequence
  LRRK2 RNA guide
agaucacuggccccauaacug

SEQ ID NO: 74862 - RNA, 21 nt, Artificial Sequence
  LRRK2 RNA guide
agcaguuauggggccagugau

SEQ ID NO: 74863 - RNA, 21 nt, Artificial Sequence
  LRRK2 RNA guide
agugaucuguacagacauguu

SEQ ID NO: 74864 - RNA, 21 nt, Artificial Sequence
  LRRK2 RNA guide
aguuauggggccagugaucug

SEQ ID NO: 74865 - RNA, 21 nt, Artificial Sequence
  LRRK2 RNA guide
aucacuggccccauaacugcu

SEQ ID NO: 74866 - RNA, 21 nt, Artificial Sequence
  LRRK2 RNA guide
auggggccagugaucuguaca

SEQ ID NO: 74867 - RNA, 21 nt, Artificial Sequence
  LRRK2 RNA guide
augucuguacagaucacuggc

SEQ ID NO: 74868 - RNA, 21 nt, Artificial Sequence
  LRRK2 RNA guide
caacaugucuguacagaucac

SEQ ID NO: 74869 - RNA, 21 nt, Artificial Sequence
  LRRK2 RNA guide
cagaucacuggccccauaacu

SEQ ID NO: 74870 - RNA, 21 nt, Artificial Sequence
  LRRK2 RNA guide
cagugaucuguacagacaugu

SEQ ID NO: 74871 - RNA, 21 nt, Artificial Sequence
  LRRK2 RNA guide
caguuauggggccagugaucu

SEQ ID NO: 74872 - RNA, 21 nt, Artificial Sequence
  LRRK2 RNA guide
caugucuguacagaucacugg

SEQ ID NO: 74873 - RNA, 21 nt, Artificial Sequence
  LRRK2 RNA guide
ccagugaucuguacagacaug

SEQ ID NO: 74874 - RNA, 21 nt, Artificial Sequence
  LRRK2 RNA guide
cuguacagaucacuggcccca

SEQ ID NO: 74875 - RNA, 21 nt, Artificial Sequence
  LRRK2 RNA guide
gacaacaugucuguacagauc

SEQ ID NO: 74876 - RNA, 21 nt, Artificial Sequence
  LRRK2 RNA guide
gaucacuggccccauaacugc

SEQ ID NO: 74877 - RNA, 21 nt, Artificial Sequence
  LRRK2 RNA guide
gaucuguacagacauguuguc

SEQ ID NO: 74878 - RNA, 21 nt, Artificial Sequence
  LRRK2 RNA guide
gcaguuauggggccagugauc

SEQ ID NO: 74879 - RNA, 21 nt, Artificial Sequence
  LRRK2 RNA guide
gccagugaucuguacagacau

SEQ ID NO: 74880 - RNA, 21 nt, Artificial Sequence
  LRRK2 RNA guide
ggccagugaucuguacagaca

SEQ ID NO: 74881 - RNA, 21 nt, Artificial Sequence
  LRRK2 RNA guide
gggccagugaucuguacagac

SEQ ID NO: 74882 - RNA, 21 nt, Artificial Sequence
  LRRK2 RNA guide
ggggccagugaucuguacaga

SEQ ID NO: 74883 - RNA, 21 nt, Artificial Sequence
  LRRK2 RNA guide
guacagaucacuggccccaua

SEQ ID NO: 74884 - RNA, 21 nt, Artificial Sequence
  LRRK2 RNA guide
gucuguacagaucacuggccc

SEQ ID NO: 74885 - RNA, 21 nt, Artificial Sequence
  LRRK2 RNA guide
gugaucuguacagacauguug

SEQ ID NO: 74886 - RNA, 21 nt, Artificial Sequence
  LRRK2 RNA guide
guuauggggccagugaucugu

SEQ ID NO: 74887 - RNA, 21 nt, Artificial Sequence
  LRRK2 RNA guide
uacagaucacuggccccauaa

SEQ ID NO: 74888 - RNA, 21 nt, Artificial Sequence
  LRRK2 RNA guide
uauggggccagugaucuguac

SEQ ID NO: 74889 - RNA, 21 nt, Artificial Sequence
  LRRK2 RNA guide
ucuguacagaucacuggcccc

SEQ ID NO: 74890 - RNA, 21 nt, Artificial Sequence
  LRRK2 RNA guide
ugaucuguacagacauguugu

SEQ ID NO: 74891 - RNA, 21 nt, Artificial Sequence
  LRRK2 RNA guide
uggggccagugaucuguacag

SEQ ID NO: 74892 - RNA, 21 nt, Artificial Sequence
  LRRK2 RNA guide
uguacagaucacuggccccau

SEQ ID NO: 74893 - RNA, 21 nt, Artificial Sequence
  LRRK2 RNA guide
ugucuguacagaucacuggcc

SEQ ID NO: 74894 - RNA, 21 nt, Artificial Sequence
  LRRK2 RNA guide
uuauggggccagugaucugua

SEQ ID NO: 74895 - RNA, 22 nt, Artificial Sequence
  LRRK2 RNA guide
aaagcaguuauggggccaguga

SEQ ID NO: 74896 - RNA, 22 nt, Artificial Sequence
  LRRK2 RNA guide
aacaugucuguacagaucacug

SEQ ID NO: 74897 - RNA, 22 nt, Artificial Sequence
  LRRK2 RNA guide
aagcaguuauggggccagugau

SEQ ID NO: 74898 - RNA, 22 nt, Artificial Sequence
  LRRK2 RNA guide
acaacaugucuguacagaucac

SEQ ID NO: 74899 - RNA, 22 nt, Artificial Sequence
  LRRK2 RNA guide
acagaucacuggccccauaacu

SEQ ID NO: 74900 - RNA, 22 nt, Artificial Sequence
  LRRK2 RNA guide
acaugucuguacagaucacugg

SEQ ID NO: 74901 - RNA, 22 nt, Artificial Sequence
  LRRK2 RNA guide
agacaacaugucuguacagauc

SEQ ID NO: 74902 - RNA, 22 nt, Artificial Sequence
  LRRK2 RNA guide
agaucacuggccccauaacugc

SEQ ID NO: 74903 - RNA, 22 nt, Artificial Sequence
  LRRK2 RNA guide
agcaguuauggggccagugauc

SEQ ID NO: 74904 - RNA, 22 nt, Artificial Sequence
  LRRK2 RNA guide
agugaucuguacagacauguug

SEQ ID NO: 74905 - RNA, 22 nt, Artificial Sequence
  LRRK2 RNA guide
aguuauggggccagugaucugu

SEQ ID NO: 74906 - RNA, 22 nt, Artificial Sequence
  LRRK2 RNA guide
aucacuggccccauaacugcuu

SEQ ID NO: 74907 - RNA, 22 nt, Artificial Sequence
  LRRK2 RNA guide
auggggccagugaucuguacag

SEQ ID NO: 74908 - RNA, 22 nt, Artificial Sequence
  LRRK2 RNA guide
augucuguacagaucacuggcc

SEQ ID NO: 74909 - RNA, 22 nt, Artificial Sequence
  LRRK2 RNA guide
caacaugucuguacagaucacu

SEQ ID NO: 74910 - RNA, 22 nt, Artificial Sequence
  LRRK2 RNA guide
cagaucacuggccccauaacug

SEQ ID NO: 74911 - RNA, 22 nt, Artificial Sequence
  LRRK2 RNA guide
cagugaucuguacagacauguu

SEQ ID NO: 74912 - RNA, 22 nt, Artificial Sequence
  LRRK2 RNA guide
caguuauggggccagugaucug

SEQ ID NO: 74913 - RNA, 22 nt, Artificial Sequence
  LRRK2 RNA guide
caugucuguacagaucacuggc

SEQ ID NO: 74914 - RNA, 22 nt, Artificial Sequence
  LRRK2 RNA guide
ccagugaucuguacagacaugu

SEQ ID NO: 74915 - RNA, 22 nt, Artificial Sequence
  LRRK2 RNA guide
cuguacagaucacuggccccau

SEQ ID NO: 74916 - RNA, 22 nt, Artificial Sequence
  LRRK2 RNA guide
gacaacaugucuguacagauca

SEQ ID NO: 74917 - RNA, 22 nt, Artificial Sequence
  LRRK2 RNA guide
gagacaacaugucuguacagau

SEQ ID NO: 74918 - RNA, 22 nt, Artificial Sequence
  LRRK2 RNA guide
gaucacuggccccauaacugcu

SEQ ID NO: 74919 - RNA, 22 nt, Artificial Sequence
  LRRK2 RNA guide
gaucuguacagacauguugucu

SEQ ID NO: 74920 - RNA, 22 nt, Artificial Sequence
  LRRK2 RNA guide
gcaguuauggggccagugaucu

SEQ ID NO: 74921 - RNA, 22 nt, Artificial Sequence
  LRRK2 RNA guide
gccagugaucuguacagacaug

SEQ ID NO: 74922 - RNA, 22 nt, Artificial Sequence
  LRRK2 RNA guide
ggccagugaucuguacagacau

SEQ ID NO: 74923 - RNA, 22 nt, Artificial Sequence
  LRRK2 RNA guide
gggccagugaucuguacagaca

SEQ ID NO: 74924 - RNA, 22 nt, Artificial Sequence
  LRRK2 RNA guide
ggggccagugaucuguacagac

SEQ ID NO: 74925 - RNA, 22 nt, Artificial Sequence
  LRRK2 RNA guide
guacagaucacuggccccauaa

SEQ ID NO: 74926 - RNA, 22 nt, Artificial Sequence
  LRRK2 RNA guide
gucuguacagaucacuggcccc

SEQ ID NO: 74927 - RNA, 22 nt, Artificial Sequence
  LRRK2 RNA guide
gugaucuguacagacauguugu

SEQ ID NO: 74928 - RNA, 22 nt, Artificial Sequence
  LRRK2 RNA guide
guuauggggccagugaucugua

SEQ ID NO: 74929 - RNA, 22 nt, Artificial Sequence
  LRRK2 RNA guide
uacagaucacuggccccauaac

SEQ ID NO: 74930 - RNA, 22 nt, Artificial Sequence
  LRRK2 RNA guide
uauggggccagugaucuguaca

SEQ ID NO: 74931 - RNA, 22 nt, Artificial Sequence
  LRRK2 RNA guide
ucuguacagaucacuggcccca

SEQ ID NO: 74932 - RNA, 22 nt, Artificial Sequence
  LRRK2 RNA guide
ugaucuguacagacauguuguc

SEQ ID NO: 74933 - RNA, 22 nt, Artificial Sequence
  LRRK2 RNA guide
uggggccagugaucuguacaga

SEQ ID NO: 74934 - RNA, 22 nt, Artificial Sequence
  LRRK2 RNA guide
uguacagaucacuggccccaua

SEQ ID NO: 74935 - RNA, 22 nt, Artificial Sequence
  LRRK2 RNA guide
ugucuguacagaucacuggccc

SEQ ID NO: 74936 - RNA, 22 nt, Artificial Sequence
  LRRK2 RNA guide
uuauggggccagugaucuguac

SEQ ID NO: 74937 - RNA, 20 nt, Artificial Sequence
  LRRK2 RNA guide
aaacaaaugccaaccccuaa

SEQ ID NO: 74938 - RNA, 20 nt, Artificial Sequence
  LRRK2 RNA guide
aaaucauuuagggguuggca

SEQ ID NO: 74939 - RNA, 20 nt, Artificial Sequence
  LRRK2 RNA guide
aaaugccaaccccuaaauga

SEQ ID NO: 74940 - RNA, 20 nt, Artificial Sequence
  LRRK2 RNA guide
aaguaaaucauuuagggguu

SEQ ID NO: 74941 - RNA, 20 nt, Artificial Sequence
  LRRK2 RNA guide
aaucauuuagggguuggcau

SEQ ID NO: 74942 - RNA, 20 nt, Artificial Sequence
  LRRK2 RNA guide
aaugccaaccccuaaaugau

SEQ ID NO: 74943 - RNA, 20 nt, Artificial Sequence
  LRRK2 RNA guide
acaaaugccaaccccuaaau

SEQ ID NO: 74944 - RNA, 20 nt, Artificial Sequence
  LRRK2 RNA guide
acacuccaaacaaaugccaa

SEQ ID NO: 74945 - RNA, 20 nt, Artificial Sequence
  LRRK2 RNA guide
acuccaaacaaaugccaacc

SEQ ID NO: 74946 - RNA, 20 nt, Artificial Sequence
  LRRK2 RNA guide
aggaaguaaaucauuuaggg

SEQ ID NO: 74947 - RNA, 20 nt, Artificial Sequence
  LRRK2 RNA guide
agggguuggcauuuguuugg

SEQ ID NO: 74948 - RNA, 20 nt, Artificial Sequence
  LRRK2 RNA guide
aguaaaucauuuagggguug

SEQ ID NO: 74949 - RNA, 20 nt, Artificial Sequence
  LRRK2 RNA guide
aucauuuagggguuggcauu

SEQ ID NO: 74950 - RNA, 20 nt, Artificial Sequence
  LRRK2 RNA guide
augccaaccccuaaaugauu

SEQ ID NO: 74951 - RNA, 20 nt, Artificial Sequence
  LRRK2 RNA guide
auuuagggguuggcauuugu

SEQ ID NO: 74952 - RNA, 20 nt, Artificial Sequence
  LRRK2 RNA guide
caaacaaaugccaaccccua

SEQ ID NO: 74953 - RNA, 20 nt, Artificial Sequence
  LRRK2 RNA guide
caaaugccaaccccuaaaug

SEQ ID NO: 74954 - RNA, 20 nt, Artificial Sequence
  LRRK2 RNA guide
caaccccuaaaugauuuacu

SEQ ID NO: 74955 - RNA, 20 nt, Artificial Sequence
  LRRK2 RNA guide
cacacuccaaacaaaugcca

SEQ ID NO: 74956 - RNA, 20 nt, Artificial Sequence
  LRRK2 RNA guide
cacuccaaacaaaugccaac

SEQ ID NO: 74957 - RNA, 20 nt, Artificial Sequence
  LRRK2 RNA guide
caggaaguaaaucauuuagg

SEQ ID NO: 74958 - RNA, 20 nt, Artificial Sequence
  LRRK2 RNA guide
cauuuagggguuggcauuug

SEQ ID NO: 74959 - RNA, 20 nt, Artificial Sequence
  LRRK2 RNA guide
ccaaacaaaugccaaccccu

SEQ ID NO: 74960 - RNA, 20 nt, Artificial Sequence
  LRRK2 RNA guide
ccaaccccuaaaugauuuac

SEQ ID NO: 74961 - RNA, 20 nt, Artificial Sequence
  LRRK2 RNA guide
ccacacuccaaacaaaugcc

SEQ ID NO: 74962 - RNA, 20 nt, Artificial Sequence
  LRRK2 RNA guide
cccacacuccaaacaaaugc

SEQ ID NO: 74963 - RNA, 20 nt, Artificial Sequence
  LRRK2 RNA guide
ccccacacuccaaacaaaug

SEQ ID NO: 74964 - RNA, 20 nt, Artificial Sequence
  LRRK2 RNA guide
cuccaaacaaaugccaaccc

SEQ ID NO: 74965 - RNA, 20 nt, Artificial Sequence
  LRRK2 RNA guide
gaaguaaaucauuuaggggu

SEQ ID NO: 74966 - RNA, 20 nt, Artificial Sequence
  LRRK2 RNA guide
gcaggaaguaaaucauuuag

SEQ ID NO: 74967 - RNA, 20 nt, Artificial Sequence
  LRRK2 RNA guide
gccaaccccuaaaugauuua

SEQ ID NO: 74968 - RNA, 20 nt, Artificial Sequence
  LRRK2 RNA guide
ggaaguaaaucauuuagggg

SEQ ID NO: 74969 - RNA, 20 nt, Artificial Sequence
  LRRK2 RNA guide
gggguuggcauuuguuugga

SEQ ID NO: 74970 - RNA, 20 nt, Artificial Sequence
  LRRK2 RNA guide
ggguuggcauuuguuuggag

SEQ ID NO: 74971 - RNA, 20 nt, Artificial Sequence
  LRRK2 RNA guide
gguuggcauuuguuuggagu

SEQ ID NO: 74972 - RNA, 20 nt, Artificial Sequence
  LRRK2 RNA guide
guaaaucauuuagggguugg

SEQ ID NO: 74973 - RNA, 20 nt, Artificial Sequence
  LRRK2 RNA guide
guuggcauuuguuuggagug

SEQ ID NO: 74974 - RNA, 20 nt, Artificial Sequence
  LRRK2 RNA guide
uaaaucauuuagggguuggc

SEQ ID NO: 74975 - RNA, 20 nt, Artificial Sequence
  LRRK2 RNA guide
uagggguuggcauuuguuug

SEQ ID NO: 74976 - RNA, 20 nt, Artificial Sequence
  LRRK2 RNA guide
ucauuuagggguuggcauuu

SEQ ID NO: 74977 - RNA, 20 nt, Artificial Sequence
  LRRK2 RNA guide
uccaaacaaaugccaacccc

SEQ ID NO: 74978 - RNA, 20 nt, Artificial Sequence
  LRRK2 RNA guide
uccccacacuccaaacaaau

SEQ ID NO: 74979 - RNA, 20 nt, Artificial Sequence
  LRRK2 RNA guide
ugccaaccccuaaaugauuu

SEQ ID NO: 74980 - RNA, 20 nt, Artificial Sequence
  LRRK2 RNA guide
uuagggguuggcauuuguuu

SEQ ID NO: 74981 - RNA, 20 nt, Artificial Sequence
  LRRK2 RNA guide
uuccccacacuccaaacaaa

SEQ ID NO: 74982 - RNA, 20 nt, Artificial Sequence
  LRRK2 RNA guide
uuggcauuuguuuggagugu

SEQ ID NO: 74983 - RNA, 20 nt, Artificial Sequence
  LRRK2 RNA guide
uuuagggguuggcauuuguu

SEQ ID NO: 74984 - RNA, 21 nt, Artificial Sequence
  LRRK2 RNA guide
aaacaaaugccaaccccuaaa

SEQ ID NO: 74985 - RNA, 21 nt, Artificial Sequence
  LRRK2 RNA guide
aaaucauuuagggguuggcau

SEQ ID NO: 74986 - RNA, 21 nt, Artificial Sequence
  LRRK2 RNA guide
aaaugccaaccccuaaaugau

SEQ ID NO: 74987 - RNA, 21 nt, Artificial Sequence
  LRRK2 RNA guide
aacaaaugccaaccccuaaau

SEQ ID NO: 74988 - RNA, 21 nt, Artificial Sequence
  LRRK2 RNA guide
aaguaaaucauuuagggguug

SEQ ID NO: 74989 - RNA, 21 nt, Artificial Sequence
  LRRK2 RNA guide
aaucauuuagggguuggcauu

SEQ ID NO: 74990 - RNA, 21 nt, Artificial Sequence
  LRRK2 RNA guide
aaugccaaccccuaaaugauu

SEQ ID NO: 74991 - RNA, 21 nt, Artificial Sequence
  LRRK2 RNA guide
acaaaugccaaccccuaaaug

SEQ ID NO: 74992 - RNA, 21 nt, Artificial Sequence
  LRRK2 RNA guide
acacuccaaacaaaugccaac

SEQ ID NO: 74993 - RNA, 21 nt, Artificial Sequence
  LRRK2 RNA guide
acuccaaacaaaugccaaccc

SEQ ID NO: 74994 - RNA, 21 nt, Artificial Sequence
  LRRK2 RNA guide
agcaggaaguaaaucauuuag

SEQ ID NO: 74995 - RNA, 21 nt, Artificial Sequence
  LRRK2 RNA guide
aggaaguaaaucauuuagggg

SEQ ID NO: 74996 - RNA, 21 nt, Artificial Sequence
  LRRK2 RNA guide
agggguuggcauuuguuugga

SEQ ID NO: 74997 - RNA, 21 nt, Artificial Sequence
  LRRK2 RNA guide
aguaaaucauuuagggguugg

SEQ ID NO: 74998 - RNA, 21 nt, Artificial Sequence
  LRRK2 RNA guide
aucauuuagggguuggcauuu

SEQ ID NO: 74999 - RNA, 21 nt, Artificial Sequence
  LRRK2 RNA guide
augccaaccccuaaaugauuu

SEQ ID NO: 75000 - RNA, 21 nt, Artificial Sequence
  LRRK2 RNA guide
auuuagggguuggcauuuguu

SEQ ID NO: 75001 - RNA, 21 nt, Artificial Sequence
  LRRK2 RNA guide
caaacaaaugccaaccccuaa

SEQ ID NO: 75002 - RNA, 21 nt, Artificial Sequence
  LRRK2 RNA guide
caaaugccaaccccuaaauga

SEQ ID NO: 75003 - RNA, 21 nt, Artificial Sequence
  LRRK2 RNA guide
caaccccuaaaugauuuacuu

SEQ ID NO: 75004 - RNA, 21 nt, Artificial Sequence
  LRRK2 RNA guide
cacacuccaaacaaaugccaa

SEQ ID NO: 75005 - RNA, 21 nt, Artificial Sequence
  LRRK2 RNA guide
cacuccaaacaaaugccaacc

SEQ ID NO: 75006 - RNA, 21 nt, Artificial Sequence
  LRRK2 RNA guide
caggaaguaaaucauuuaggg

SEQ ID NO: 75007 - RNA, 21 nt, Artificial Sequence
  LRRK2 RNA guide
cauuuagggguuggcauuugu

SEQ ID NO: 75008 - RNA, 21 nt, Artificial Sequence
  LRRK2 RNA guide
ccaaacaaaugccaaccccua

SEQ ID NO: 75009 - RNA, 21 nt, Artificial Sequence
  LRRK2 RNA guide
ccaaccccuaaaugauuuacu

SEQ ID NO: 75010 - RNA, 21 nt, Artificial Sequence
  LRRK2 RNA guide
ccacacuccaaacaaaugcca

SEQ ID NO: 75011 - RNA, 21 nt, Artificial Sequence
  LRRK2 RNA guide
cccacacuccaaacaaaugcc

SEQ ID NO: 75012 - RNA, 21 nt, Artificial Sequence
  LRRK2 RNA guide
ccccacacuccaaacaaaugc

SEQ ID NO: 75013 - RNA, 21 nt, Artificial Sequence
  LRRK2 RNA guide
cuccaaacaaaugccaacccc

SEQ ID NO: 75014 - RNA, 21 nt, Artificial Sequence
  LRRK2 RNA guide
gaaguaaaucauuuagggguu

SEQ ID NO: 75015 - RNA, 21 nt, Artificial Sequence
  LRRK2 RNA guide
gcaggaaguaaaucauuuagg

SEQ ID NO: 75016 - RNA, 21 nt, Artificial Sequence
  LRRK2 RNA guide
gccaaccccuaaaugauuuac

SEQ ID NO: 75017 - RNA, 21 nt, Artificial Sequence
  LRRK2 RNA guide
ggaaguaaaucauuuaggggu

SEQ ID NO: 75018 - RNA, 21 nt, Artificial Sequence
  LRRK2 RNA guide
gggguuggcauuuguuuggag

SEQ ID NO: 75019 - RNA, 21 nt, Artificial Sequence
  LRRK2 RNA guide
ggguuggcauuuguuuggagu

SEQ ID NO: 75020 - RNA, 21 nt, Artificial Sequence
  LRRK2 RNA guide
gguuggcauuuguuuggagug

SEQ ID NO: 75021 - RNA, 21 nt, Artificial Sequence
  LRRK2 RNA guide
guaaaucauuuagggguuggc

SEQ ID NO: 75022 - RNA, 21 nt, Artificial Sequence
  LRRK2 RNA guide
guuccccacacuccaaacaaa

SEQ ID NO: 75023 - RNA, 21 nt, Artificial Sequence
  LRRK2 RNA guide
guuggcauuuguuuggagugu

SEQ ID NO: 75024 - RNA, 21 nt, Artificial Sequence
  LRRK2 RNA guide
uaaaucauuuagggguuggca

SEQ ID NO: 75025 - RNA, 21 nt, Artificial Sequence
  LRRK2 RNA guide
uagggguuggcauuuguuugg

SEQ ID NO: 75026 - RNA, 21 nt, Artificial Sequence
  LRRK2 RNA guide
ucauuuagggguuggcauuug

SEQ ID NO: 75027 - RNA, 21 nt, Artificial Sequence
  LRRK2 RNA guide
uccaaacaaaugccaaccccu

SEQ ID NO: 75028 - RNA, 21 nt, Artificial Sequence
  LRRK2 RNA guide
uccccacacuccaaacaaaug

SEQ ID NO: 75029 - RNA, 21 nt, Artificial Sequence
  LRRK2 RNA guide
ugccaaccccuaaaugauuua

SEQ ID NO: 75030 - RNA, 21 nt, Artificial Sequence
  LRRK2 RNA guide
uuagggguuggcauuuguuug

SEQ ID NO: 75031 - RNA, 21 nt, Artificial Sequence
  LRRK2 RNA guide
uuccccacacuccaaacaaau

SEQ ID NO: 75032 - RNA, 21 nt, Artificial Sequence
  LRRK2 RNA guide
uuggcauuuguuuggagugug

SEQ ID NO: 75033 - RNA, 21 nt, Artificial Sequence
  LRRK2 RNA guide
uuuagggguuggcauuuguuu

SEQ ID NO: 75034 - RNA, 22 nt, Artificial Sequence
  LRRK2 RNA guide
aaacaaaugccaaccccuaaau

SEQ ID NO: 75035 - RNA, 22 nt, Artificial Sequence
  LRRK2 RNA guide
aaaucauuuagggguuggcauu

SEQ ID NO: 75036 - RNA, 22 nt, Artificial Sequence
  LRRK2 RNA guide
aaaugccaaccccuaaaugauu

SEQ ID NO: 75037 - RNA, 22 nt, Artificial Sequence
  LRRK2 RNA guide
aacaaaugccaaccccuaaaug

SEQ ID NO: 75038 - RNA, 22 nt, Artificial Sequence
  LRRK2 RNA guide
aaguaaaucauuuagggguugg

SEQ ID NO: 75039 - RNA, 22 nt, Artificial Sequence
  LRRK2 RNA guide
aaucauuuagggguuggcauuu

SEQ ID NO: 75040 - RNA, 22 nt, Artificial Sequence
  LRRK2 RNA guide
aaugccaaccccuaaaugauuu

SEQ ID NO: 75041 - RNA, 22 nt, Artificial Sequence
  LRRK2 RNA guide
acaaaugccaaccccuaaauga

SEQ ID NO: 75042 - RNA, 22 nt, Artificial Sequence
  LRRK2 RNA guide
acacuccaaacaaaugccaacc

SEQ ID NO: 75043 - RNA, 22 nt, Artificial Sequence
  LRRK2 RNA guide
acuccaaacaaaugccaacccc

SEQ ID NO: 75044 - RNA, 22 nt, Artificial Sequence
  LRRK2 RNA guide
agcaggaaguaaaucauuuagg

SEQ ID NO: 75045 - RNA, 22 nt, Artificial Sequence
  LRRK2 RNA guide
aggaaguaaaucauuuaggggu

SEQ ID NO: 75046 - RNA, 22 nt, Artificial Sequence
  LRRK2 RNA guide
agggguuggcauuuguuuggag

SEQ ID NO: 75047 - RNA, 22 nt, Artificial Sequence
  LRRK2 RNA guide
aguaaaucauuuagggguuggc

SEQ ID NO: 75048 - RNA, 22 nt, Artificial Sequence
  LRRK2 RNA guide
aucauuuagggguuggcauuug

SEQ ID NO: 75049 - RNA, 22 nt, Artificial Sequence
  LRRK2 RNA guide
augccaaccccuaaaugauuua

SEQ ID NO: 75050 - RNA, 22 nt, Artificial Sequence
  LRRK2 RNA guide
auuuagggguuggcauuuguuu

SEQ ID NO: 75051 - RNA, 22 nt, Artificial Sequence
  LRRK2 RNA guide
caaacaaaugccaaccccuaaa

SEQ ID NO: 75052 - RNA, 22 nt, Artificial Sequence
  LRRK2 RNA guide
caaaugccaaccccuaaaugau

SEQ ID NO: 75053 - RNA, 22 nt, Artificial Sequence
  LRRK2 RNA guide
caaccccuaaaugauuuacuuc

SEQ ID NO: 75054 - RNA, 22 nt, Artificial Sequence
  LRRK2 RNA guide
cacacuccaaacaaaugccaac

SEQ ID NO: 75055 - RNA, 22 nt, Artificial Sequence
  LRRK2 RNA guide
cacuccaaacaaaugccaaccc

SEQ ID NO: 75056 - RNA, 22 nt, Artificial Sequence
  LRRK2 RNA guide
caggaaguaaaucauuuagggg

SEQ ID NO: 75057 - RNA, 22 nt, Artificial Sequence
  LRRK2 RNA guide
cauuuagggguuggcauuuguu

SEQ ID NO: 75058 - RNA, 22 nt, Artificial Sequence
  LRRK2 RNA guide
ccaaacaaaugccaaccccuaa

SEQ ID NO: 75059 - RNA, 22 nt, Artificial Sequence
  LRRK2 RNA guide
ccaaccccuaaaugauuuacuu

SEQ ID NO: 75060 - RNA, 22 nt, Artificial Sequence
  LRRK2 RNA guide
ccacacuccaaacaaaugccaa

SEQ ID NO: 75061 - RNA, 22 nt, Artificial Sequence
  LRRK2 RNA guide
cccacacuccaaacaaaugcca

SEQ ID NO: 75062 - RNA, 22 nt, Artificial Sequence
  LRRK2 RNA guide
ccccacacuccaaacaaaugcc

SEQ ID NO: 75063 - RNA, 22 nt, Artificial Sequence
  LRRK2 RNA guide
cuccaaacaaaugccaaccccu

SEQ ID NO: 75064 - RNA, 22 nt, Artificial Sequence
  LRRK2 RNA guide
gaaguaaaucauuuagggguug

SEQ ID NO: 75065 - RNA, 22 nt, Artificial Sequence
  LRRK2 RNA guide
gagcaggaaguaaaucauuuag

SEQ ID NO: 75066 - RNA, 22 nt, Artificial Sequence
  LRRK2 RNA guide
gcaggaaguaaaucauuuaggg

SEQ ID NO: 75067 - RNA, 22 nt, Artificial Sequence
  LRRK2 RNA guide
gccaaccccuaaaugauuuacu

SEQ ID NO: 75068 - RNA, 22 nt, Artificial Sequence
  LRRK2 RNA guide
ggaaguaaaucauuuagggguu

SEQ ID NO: 75069 - RNA, 22 nt, Artificial Sequence
  LRRK2 RNA guide
gggguuggcauuuguuuggagu

SEQ ID NO: 75070 - RNA, 22 nt, Artificial Sequence
  LRRK2 RNA guide
ggguuggcauuuguuuggagug

SEQ ID NO: 75071 - RNA, 22 nt, Artificial Sequence
  LRRK2 RNA guide
gguuggcauuuguuuggagugu

SEQ ID NO: 75072 - RNA, 22 nt, Artificial Sequence
  LRRK2 RNA guide
guaaaucauuuagggguuggca

SEQ ID NO: 75073 - RNA, 22 nt, Artificial Sequence
  LRRK2 RNA guide
guuccccacacuccaaacaaau

SEQ ID NO: 75074 - RNA, 22 nt, Artificial Sequence
  LRRK2 RNA guide
guuggcauuuguuuggagugug

SEQ ID NO: 75075 - RNA, 22 nt, Artificial Sequence
  LRRK2 RNA guide
uaaaucauuuagggguuggcau

SEQ ID NO: 75076 - RNA, 22 nt, Artificial Sequence
  LRRK2 RNA guide
uagggguuggcauuuguuugga

SEQ ID NO: 75077 - RNA, 22 nt, Artificial Sequence
  LRRK2 RNA guide
ucauuuagggguuggcauuugu

SEQ ID NO: 75078 - RNA, 22 nt, Artificial Sequence
  LRRK2 RNA guide
uccaaacaaaugccaaccccua

SEQ ID NO: 75079 - RNA, 22 nt, Artificial Sequence
  LRRK2 RNA guide
uccccacacuccaaacaaaugc

SEQ ID NO: 75080 - RNA, 22 nt, Artificial Sequence
  LRRK2 RNA guide
ugccaaccccuaaaugauuuac

SEQ ID NO: 75081 - RNA, 22 nt, Artificial Sequence
  LRRK2 RNA guide
uguuccccacacuccaaacaaa

SEQ ID NO: 75082 - RNA, 22 nt, Artificial Sequence
  LRRK2 RNA guide
uuagggguuggcauuuguuugg

SEQ ID NO: 75083 - RNA, 22 nt, Artificial Sequence
  LRRK2 RNA guide
uuccccacacuccaaacaaaug

SEQ ID NO: 75084 - RNA, 22 nt, Artificial Sequence
  LRRK2 RNA guide
uuggcauuuguuuggagugugg

SEQ ID NO: 75085 - RNA, 22 nt, Artificial Sequence
  LRRK2 RNA guide
uuuagggguuggcauuuguuug

SEQ ID NO: 75086 - RNA, 20 nt, Artificial Sequence
  LRRK2 RNA guide
aaacaaaugcaaccccuaaa

SEQ ID NO: 75087 - RNA, 20 nt, Artificial Sequence
  LRRK2 RNA guide
aaaucauuuagggguugcau

SEQ ID NO: 75088 - RNA, 20 nt, Artificial Sequence
  LRRK2 RNA guide
aaaugcaaccccuaaaugau

SEQ ID NO: 75089 - RNA, 20 nt, Artificial Sequence
  LRRK2 RNA guide
aacaaaugcaaccccuaaau

SEQ ID NO: 75090 - RNA, 20 nt, Artificial Sequence
  LRRK2 RNA guide
aaucauuuagggguugcauu

SEQ ID NO: 75091 - RNA, 20 nt, Artificial Sequence
  LRRK2 RNA guide
aaugcaaccccuaaaugauu

SEQ ID NO: 75092 - RNA, 20 nt, Artificial Sequence
  LRRK2 RNA guide
acaaaugcaaccccuaaaug

SEQ ID NO: 75093 - RNA, 20 nt, Artificial Sequence
  LRRK2 RNA guide
acacuccaaacaaaugcaac

SEQ ID NO: 75094 - RNA, 20 nt, Artificial Sequence
  LRRK2 RNA guide
acuccaaacaaaugcaaccc

SEQ ID NO: 75095 - RNA, 20 nt, Artificial Sequence
  LRRK2 RNA guide
agggguugcauuuguuugga

SEQ ID NO: 75096 - RNA, 20 nt, Artificial Sequence
  LRRK2 RNA guide
aucauuuagggguugcauuu

SEQ ID NO: 75097 - RNA, 20 nt, Artificial Sequence
  LRRK2 RNA guide
augcaaccccuaaaugauuu

SEQ ID NO: 75098 - RNA, 20 nt, Artificial Sequence
  LRRK2 RNA guide
auuuagggguugcauuuguu

SEQ ID NO: 75099 - RNA, 20 nt, Artificial Sequence
  LRRK2 RNA guide
caaacaaaugcaaccccuaa

SEQ ID NO: 75100 - RNA, 20 nt, Artificial Sequence
  LRRK2 RNA guide
caaaugcaaccccuaaauga

SEQ ID NO: 75101 - RNA, 20 nt, Artificial Sequence
  LRRK2 RNA guide
cacacuccaaacaaaugcaa

SEQ ID NO: 75102 - RNA, 20 nt, Artificial Sequence
  LRRK2 RNA guide
cacuccaaacaaaugcaacc

SEQ ID NO: 75103 - RNA, 20 nt, Artificial Sequence
  LRRK2 RNA guide
cauuuagggguugcauuugu

SEQ ID NO: 75104 - RNA, 20 nt, Artificial Sequence
  LRRK2 RNA guide
ccaaacaaaugcaaccccua

SEQ ID NO: 75105 - RNA, 20 nt, Artificial Sequence
  LRRK2 RNA guide
ccacacuccaaacaaaugca

SEQ ID NO: 75106 - RNA, 20 nt, Artificial Sequence
  LRRK2 RNA guide
cuccaaacaaaugcaacccc

SEQ ID NO: 75107 - RNA, 20 nt, Artificial Sequence
  LRRK2 RNA guide
gcaaccccuaaaugauuuac

SEQ ID NO: 75108 - RNA, 20 nt, Artificial Sequence
  LRRK2 RNA guide
gggguugcauuuguuuggag

SEQ ID NO: 75109 - RNA, 20 nt, Artificial Sequence
  LRRK2 RNA guide
ggguugcauuuguuuggagu

SEQ ID NO: 75110 - RNA, 20 nt, Artificial Sequence
  LRRK2 RNA guide
gguugcauuuguuuggagug

SEQ ID NO: 75111 - RNA, 20 nt, Artificial Sequence
  LRRK2 RNA guide
guaaaucauuuagggguugc

SEQ ID NO: 75112 - RNA, 20 nt, Artificial Sequence
  LRRK2 RNA guide
guuccccacacuccaaacaa

SEQ ID NO: 75113 - RNA, 20 nt, Artificial Sequence
  LRRK2 RNA guide
guugcauuuguuuggagugu

SEQ ID NO: 75114 - RNA, 20 nt, Artificial Sequence
  LRRK2 RNA guide
uaaaucauuuagggguugca

SEQ ID NO: 75115 - RNA, 20 nt, Artificial Sequence
  LRRK2 RNA guide
uagggguugcauuuguuugg

SEQ ID NO: 75116 - RNA, 20 nt, Artificial Sequence
  LRRK2 RNA guide
ucauuuagggguugcauuug

SEQ ID NO: 75117 - RNA, 20 nt, Artificial Sequence
  LRRK2 RNA guide
uccaaacaaaugcaaccccu

SEQ ID NO: 75118 - RNA, 20 nt, Artificial Sequence
  LRRK2 RNA guide
ugcaaccccuaaaugauuua

SEQ ID NO: 75119 - RNA, 20 nt, Artificial Sequence
  LRRK2 RNA guide
uuagggguugcauuuguuug

SEQ ID NO: 75120 - RNA, 20 nt, Artificial Sequence
  LRRK2 RNA guide
uugcauuuguuuggagugug

SEQ ID NO: 75121 - RNA, 20 nt, Artificial Sequence
  LRRK2 RNA guide
uuuagggguugcauuuguuu

SEQ ID NO: 75122 - RNA, 21 nt, Artificial Sequence
  LRRK2 RNA guide
aaacaaaugcaaccccuaaau

SEQ ID NO: 75123 - RNA, 21 nt, Artificial Sequence
  LRRK2 RNA guide
aaaucauuuagggguugcauu

SEQ ID NO: 75124 - RNA, 21 nt, Artificial Sequence
  LRRK2 RNA guide
aaaugcaaccccuaaaugauu

SEQ ID NO: 75125 - RNA, 21 nt, Artificial Sequence
  LRRK2 RNA guide
aacaaaugcaaccccuaaaug

SEQ ID NO: 75126 - RNA, 21 nt, Artificial Sequence
  LRRK2 RNA guide
aaucauuuagggguugcauuu

SEQ ID NO: 75127 - RNA, 21 nt, Artificial Sequence
  LRRK2 RNA guide
aaugcaaccccuaaaugauuu

SEQ ID NO: 75128 - RNA, 21 nt, Artificial Sequence
  LRRK2 RNA guide
acaaaugcaaccccuaaauga

SEQ ID NO: 75129 - RNA, 21 nt, Artificial Sequence
  LRRK2 RNA guide
acacuccaaacaaaugcaacc

SEQ ID NO: 75130 - RNA, 21 nt, Artificial Sequence
  LRRK2 RNA guide
acuccaaacaaaugcaacccc

SEQ ID NO: 75131 - RNA, 21 nt, Artificial Sequence
  LRRK2 RNA guide
agggguugcauuuguuuggag

SEQ ID NO: 75132 - RNA, 21 nt, Artificial Sequence
  LRRK2 RNA guide
aguaaaucauuuagggguugc

SEQ ID NO: 75133 - RNA, 21 nt, Artificial Sequence
  LRRK2 RNA guide
aucauuuagggguugcauuug

SEQ ID NO: 75134 - RNA, 21 nt, Artificial Sequence
  LRRK2 RNA guide
augcaaccccuaaaugauuua

SEQ ID NO: 75135 - RNA, 21 nt, Artificial Sequence
  LRRK2 RNA guide
auuuagggguugcauuuguuu

SEQ ID NO: 75136 - RNA, 21 nt, Artificial Sequence
  LRRK2 RNA guide
caaacaaaugcaaccccuaaa

SEQ ID NO: 75137 - RNA, 21 nt, Artificial Sequence
  LRRK2 RNA guide
caaaugcaaccccuaaaugau

SEQ ID NO: 75138 - RNA, 21 nt, Artificial Sequence
  LRRK2 RNA guide
cacacuccaaacaaaugcaac

SEQ ID NO: 75139 - RNA, 21 nt, Artificial Sequence
  LRRK2 RNA guide
cacuccaaacaaaugcaaccc

SEQ ID NO: 75140 - RNA, 21 nt, Artificial Sequence
  LRRK2 RNA guide
cauuuagggguugcauuuguu

SEQ ID NO: 75141 - RNA, 21 nt, Artificial Sequence
  LRRK2 RNA guide
ccaaacaaaugcaaccccuaa

SEQ ID NO: 75142 - RNA, 21 nt, Artificial Sequence
  LRRK2 RNA guide
ccacacuccaaacaaaugcaa

SEQ ID NO: 75143 - RNA, 21 nt, Artificial Sequence
  LRRK2 RNA guide
cccacacuccaaacaaaugca

SEQ ID NO: 75144 - RNA, 21 nt, Artificial Sequence
  LRRK2 RNA guide
cuccaaacaaaugcaaccccu

SEQ ID NO: 75145 - RNA, 21 nt, Artificial Sequence
  LRRK2 RNA guide
gcaaccccuaaaugauuuacu

SEQ ID NO: 75146 - RNA, 21 nt, Artificial Sequence
  LRRK2 RNA guide
gggguugcauuuguuuggagu

SEQ ID NO: 75147 - RNA, 21 nt, Artificial Sequence
  LRRK2 RNA guide
ggguugcauuuguuuggagug

SEQ ID NO: 75148 - RNA, 21 nt, Artificial Sequence
  LRRK2 RNA guide
gguugcauuuguuuggagugu

SEQ ID NO: 75149 - RNA, 21 nt, Artificial Sequence
  LRRK2 RNA guide
guaaaucauuuagggguugca

SEQ ID NO: 75150 - RNA, 21 nt, Artificial Sequence
  LRRK2 RNA guide
guugcauuuguuuggagugug

SEQ ID NO: 75151 - RNA, 21 nt, Artificial Sequence
  LRRK2 RNA guide
uaaaucauuuagggguugcau

SEQ ID NO: 75152 - RNA, 21 nt, Artificial Sequence
  LRRK2 RNA guide
uagggguugcauuuguuugga

SEQ ID NO: 75153 - RNA, 21 nt, Artificial Sequence
  LRRK2 RNA guide
ucauuuagggguugcauuugu

SEQ ID NO: 75154 - RNA, 21 nt, Artificial Sequence
  LRRK2 RNA guide
uccaaacaaaugcaaccccua

SEQ ID NO: 75155 - RNA, 21 nt, Artificial Sequence
  LRRK2 RNA guide
ugcaaccccuaaaugauuuac

SEQ ID NO: 75156 - RNA, 21 nt, Artificial Sequence
  LRRK2 RNA guide
uguuccccacacuccaaacaa

SEQ ID NO: 75157 - RNA, 21 nt, Artificial Sequence
  LRRK2 RNA guide
uuagggguugcauuuguuugg

SEQ ID NO: 75158 - RNA, 21 nt, Artificial Sequence
  LRRK2 RNA guide
uugcauuuguuuggagugugg

SEQ ID NO: 75159 - RNA, 21 nt, Artificial Sequence
  LRRK2 RNA guide
uuuagggguugcauuuguuug

SEQ ID NO: 75160 - RNA, 22 nt, Artificial Sequence
  LRRK2 RNA guide
aaacaaaugcaaccccuaaaug

SEQ ID NO: 75161 - RNA, 22 nt, Artificial Sequence
  LRRK2 RNA guide
aaaucauuuagggguugcauuu

SEQ ID NO: 75162 - RNA, 22 nt, Artificial Sequence
  LRRK2 RNA guide
aaaugcaaccccuaaaugauuu

SEQ ID NO: 75163 - RNA, 22 nt, Artificial Sequence
  LRRK2 RNA guide
aacaaaugcaaccccuaaauga

SEQ ID NO: 75164 - RNA, 22 nt, Artificial Sequence
  LRRK2 RNA guide
aaguaaaucauuuagggguugc

SEQ ID NO: 75165 - RNA, 22 nt, Artificial Sequence
  LRRK2 RNA guide
aaucauuuagggguugcauuug

SEQ ID NO: 75166 - RNA, 22 nt, Artificial Sequence
  LRRK2 RNA guide
aaugcaaccccuaaaugauuua

SEQ ID NO: 75167 - RNA, 22 nt, Artificial Sequence
  LRRK2 RNA guide
acaaaugcaaccccuaaaugau

SEQ ID NO: 75168 - RNA, 22 nt, Artificial Sequence
  LRRK2 RNA guide
acacuccaaacaaaugcaaccc

SEQ ID NO: 75169 - RNA, 22 nt, Artificial Sequence
  LRRK2 RNA guide
acuccaaacaaaugcaaccccu

SEQ ID NO: 75170 - RNA, 22 nt, Artificial Sequence
  LRRK2 RNA guide
agggguugcauuuguuuggagu

SEQ ID NO: 75171 - RNA, 22 nt, Artificial Sequence
  LRRK2 RNA guide
aguaaaucauuuagggguugca

SEQ ID NO: 75172 - RNA, 22 nt, Artificial Sequence
  LRRK2 RNA guide
aucauuuagggguugcauuugu

SEQ ID NO: 75173 - RNA, 22 nt, Artificial Sequence
  LRRK2 RNA guide
augcaaccccuaaaugauuuac

SEQ ID NO: 75174 - RNA, 22 nt, Artificial Sequence
  LRRK2 RNA guide
auuuagggguugcauuuguuug

SEQ ID NO: 75175 - RNA, 22 nt, Artificial Sequence
  LRRK2 RNA guide
caaacaaaugcaaccccuaaau

SEQ ID NO: 75176 - RNA, 22 nt, Artificial Sequence
  LRRK2 RNA guide
caaaugcaaccccuaaaugauu

SEQ ID NO: 75177 - RNA, 22 nt, Artificial Sequence
  LRRK2 RNA guide
cacacuccaaacaaaugcaacc

SEQ ID NO: 75178 - RNA, 22 nt, Artificial Sequence
  LRRK2 RNA guide
cacuccaaacaaaugcaacccc

SEQ ID NO: 75179 - RNA, 22 nt, Artificial Sequence
  LRRK2 RNA guide
cauuuagggguugcauuuguuu

SEQ ID NO: 75180 - RNA, 22 nt, Artificial Sequence
  LRRK2 RNA guide
ccaaacaaaugcaaccccuaaa

SEQ ID NO: 75181 - RNA, 22 nt, Artificial Sequence
  LRRK2 RNA guide
ccacacuccaaacaaaugcaac

SEQ ID NO: 75182 - RNA, 22 nt, Artificial Sequence
  LRRK2 RNA guide
cccacacuccaaacaaaugcaa

SEQ ID NO: 75183 - RNA, 22 nt, Artificial Sequence
  LRRK2 RNA guide
ccccacacuccaaacaaaugca

SEQ ID NO: 75184 - RNA, 22 nt, Artificial Sequence
  LRRK2 RNA guide
cuccaaacaaaugcaaccccua

SEQ ID NO: 75185 - RNA, 22 nt, Artificial Sequence
  LRRK2 RNA guide
gcaaccccuaaaugauuuacuu

SEQ ID NO: 75186 - RNA, 22 nt, Artificial Sequence
  LRRK2 RNA guide
gggguugcauuuguuuggagug

SEQ ID NO: 75187 - RNA, 22 nt, Artificial Sequence
  LRRK2 RNA guide
ggguugcauuuguuuggagugu

SEQ ID NO: 75188 - RNA, 22 nt, Artificial Sequence
  LRRK2 RNA guide
gguugcauuuguuuggagugug

SEQ ID NO: 75189 - RNA, 22 nt, Artificial Sequence
  LRRK2 RNA guide
guaaaucauuuagggguugcau

SEQ ID NO: 75190 - RNA, 22 nt, Artificial Sequence
  LRRK2 RNA guide
guguuccccacacuccaaacaa

SEQ ID NO: 75191 - RNA, 22 nt, Artificial Sequence
  LRRK2 RNA guide
guugcauuuguuuggagugugg

SEQ ID NO: 75192 - RNA, 22 nt, Artificial Sequence
  LRRK2 RNA guide
uaaaucauuuagggguugcauu

SEQ ID NO: 75193 - RNA, 22 nt, Artificial Sequence
  LRRK2 RNA guide
uagggguugcauuuguuuggag

SEQ ID NO: 75194 - RNA, 22 nt, Artificial Sequence
  LRRK2 RNA guide
ucauuuagggguugcauuuguu

SEQ ID NO: 75195 - RNA, 22 nt, Artificial Sequence
  LRRK2 RNA guide
uccaaacaaaugcaaccccuaa

SEQ ID NO: 75196 - RNA, 22 nt, Artificial Sequence
  LRRK2 RNA guide
ugcaaccccuaaaugauuuacu

SEQ ID NO: 75197 - RNA, 22 nt, Artificial Sequence
  LRRK2 RNA guide
uuagggguugcauuuguuugga

SEQ ID NO: 75198 - RNA, 22 nt, Artificial Sequence
  LRRK2 RNA guide
uugcauuuguuuggaguguggg

SEQ ID NO: 75199 - RNA, 22 nt, Artificial Sequence
  LRRK2 RNA guide
uuuagggguugcauuuguuugg

SEQ ID NO: 75200 - RNA, 20 nt, Artificial Sequence
  LRRK2 RNA guide
aaaagguucuaguucguuuc

SEQ ID NO: 75201 - RNA, 20 nt, Artificial Sequence
  LRRK2 RNA guide
aaaaguugagugcgcaggaa

SEQ ID NO: 75202 - RNA, 20 nt, Artificial Sequence
  LRRK2 RNA guide
aaagguucuaguucguuucc

SEQ ID NO: 75203 - RNA, 20 nt, Artificial Sequence
  LRRK2 RNA guide
aaaguugagugcgcaggaaa

SEQ ID NO: 75204 - RNA, 20 nt, Artificial Sequence
  LRRK2 RNA guide
aagguucuaguucguuuccu

SEQ ID NO: 75205 - RNA, 20 nt, Artificial Sequence
  LRRK2 RNA guide
aaguacaaaaguugagugcg

SEQ ID NO: 75206 - RNA, 20 nt, Artificial Sequence
  LRRK2 RNA guide
aaguugagugcgcaggaaac

SEQ ID NO: 75207 - RNA, 20 nt, Artificial Sequence
  LRRK2 RNA guide
acaaaaguugagugcgcagg

SEQ ID NO: 75208 - RNA, 20 nt, Artificial Sequence
  LRRK2 RNA guide
agguucuaguucguuuccug

SEQ ID NO: 75209 - RNA, 20 nt, Artificial Sequence
  LRRK2 RNA guide
aguacaaaaguugagugcgc

SEQ ID NO: 75210 - RNA, 20 nt, Artificial Sequence
  LRRK2 RNA guide
agugcgcaggaaacgaacua

SEQ ID NO: 75211 - RNA, 20 nt, Artificial Sequence
  LRRK2 RNA guide
aguucguuuccugcgcacuc

SEQ ID NO: 75212 - RNA, 20 nt, Artificial Sequence
  LRRK2 RNA guide
aguugagugcgcaggaaacg

SEQ ID NO: 75213 - RNA, 20 nt, Artificial Sequence
  LRRK2 RNA guide
aucuaaguacaaaaguugag

SEQ ID NO: 75214 - RNA, 20 nt, Artificial Sequence
  LRRK2 RNA guide
caaaaguugagugcgcagga

SEQ ID NO: 75215 - RNA, 20 nt, Artificial Sequence
  LRRK2 RNA guide
ccugcgcacucaacuuuugu

SEQ ID NO: 75216 - RNA, 20 nt, Artificial Sequence
  LRRK2 RNA guide
cgcacucaacuuuuguacuu

SEQ ID NO: 75217 - RNA, 20 nt, Artificial Sequence
  LRRK2 RNA guide
cguuuccugcgcacucaacu

SEQ ID NO: 75218 - RNA, 20 nt, Artificial Sequence
  LRRK2 RNA guide
cuaaguacaaaaguugagug

SEQ ID NO: 75219 - RNA, 20 nt, Artificial Sequence
  LRRK2 RNA guide
cuaguucguuuccugcgcac

SEQ ID NO: 75220 - RNA, 20 nt, Artificial Sequence
  LRRK2 RNA guide
cugcgcacucaacuuuugua

SEQ ID NO: 75221 - RNA, 20 nt, Artificial Sequence
  LRRK2 RNA guide
gagugcgcaggaaacgaacu

SEQ ID NO: 75222 - RNA, 20 nt, Artificial Sequence
  LRRK2 RNA guide
gcgcacucaacuuuuguacu

SEQ ID NO: 75223 - RNA, 20 nt, Artificial Sequence
  LRRK2 RNA guide
gcgcaggaaacgaacuagaa

SEQ ID NO: 75224 - RNA, 20 nt, Artificial Sequence
  LRRK2 RNA guide
gguucuaguucguuuccugc

SEQ ID NO: 75225 - RNA, 20 nt, Artificial Sequence
  LRRK2 RNA guide
guacaaaaguugagugcgca

SEQ ID NO: 75226 - RNA, 20 nt, Artificial Sequence
  LRRK2 RNA guide
gugcgcaggaaacgaacuag

SEQ ID NO: 75227 - RNA, 20 nt, Artificial Sequence
  LRRK2 RNA guide
guucguuuccugcgcacuca

SEQ ID NO: 75228 - RNA, 20 nt, Artificial Sequence
  LRRK2 RNA guide
guucuaguucguuuccugcg

SEQ ID NO: 75229 - RNA, 20 nt, Artificial Sequence
  LRRK2 RNA guide
guugagugcgcaggaaacga

SEQ ID NO: 75230 - RNA, 20 nt, Artificial Sequence
  LRRK2 RNA guide
guuuccugcgcacucaacuu

SEQ ID NO: 75231 - RNA, 20 nt, Artificial Sequence
  LRRK2 RNA guide
uaaguacaaaaguugagugc

SEQ ID NO: 75232 - RNA, 20 nt, Artificial Sequence
  LRRK2 RNA guide
uacaaaaguugagugcgcag

SEQ ID NO: 75233 - RNA, 20 nt, Artificial Sequence
  LRRK2 RNA guide
uaguucguuuccugcgcacu

SEQ ID NO: 75234 - RNA, 20 nt, Artificial Sequence
  LRRK2 RNA guide
uccugcgcacucaacuuuug

SEQ ID NO: 75235 - RNA, 20 nt, Artificial Sequence
  LRRK2 RNA guide
ucguuuccugcgcacucaac

SEQ ID NO: 75236 - RNA, 20 nt, Artificial Sequence
  LRRK2 RNA guide
ucuaaguacaaaaguugagu

SEQ ID NO: 75237 - RNA, 20 nt, Artificial Sequence
  LRRK2 RNA guide
ucuaguucguuuccugcgca

SEQ ID NO: 75238 - RNA, 20 nt, Artificial Sequence
  LRRK2 RNA guide
ugagugcgcaggaaacgaac

SEQ ID NO: 75239 - RNA, 20 nt, Artificial Sequence
  LRRK2 RNA guide
ugcgcacucaacuuuuguac

SEQ ID NO: 75240 - RNA, 20 nt, Artificial Sequence
  LRRK2 RNA guide
ugcgcaggaaacgaacuaga

SEQ ID NO: 75241 - RNA, 20 nt, Artificial Sequence
  LRRK2 RNA guide
uuccugcgcacucaacuuuu

SEQ ID NO: 75242 - RNA, 20 nt, Artificial Sequence
  LRRK2 RNA guide
uucguuuccugcgcacucaa

SEQ ID NO: 75243 - RNA, 20 nt, Artificial Sequence
  LRRK2 RNA guide
uucuaguucguuuccugcgc

SEQ ID NO: 75244 - RNA, 20 nt, Artificial Sequence
  LRRK2 RNA guide
uugagugcgcaggaaacgaa

SEQ ID NO: 75245 - RNA, 20 nt, Artificial Sequence
  LRRK2 RNA guide
uuuccugcgcacucaacuuu

SEQ ID NO: 75246 - RNA, 21 nt, Artificial Sequence
  LRRK2 RNA guide
aaaagguucuaguucguuucc

SEQ ID NO: 75247 - RNA, 21 nt, Artificial Sequence
  LRRK2 RNA guide
aaaaguugagugcgcaggaaa

SEQ ID NO: 75248 - RNA, 21 nt, Artificial Sequence
  LRRK2 RNA guide
aaagguucuaguucguuuccu

SEQ ID NO: 75249 - RNA, 21 nt, Artificial Sequence
  LRRK2 RNA guide
aaaguugagugcgcaggaaac

SEQ ID NO: 75250 - RNA, 21 nt, Artificial Sequence
  LRRK2 RNA guide
aagguucuaguucguuuccug

SEQ ID NO: 75251 - RNA, 21 nt, Artificial Sequence
  LRRK2 RNA guide
aaguacaaaaguugagugcgc

SEQ ID NO: 75252 - RNA, 21 nt, Artificial Sequence
  LRRK2 RNA guide
aaguugagugcgcaggaaacg

SEQ ID NO: 75253 - RNA, 21 nt, Artificial Sequence
  LRRK2 RNA guide
acaaaaguugagugcgcagga

SEQ ID NO: 75254 - RNA, 21 nt, Artificial Sequence
  LRRK2 RNA guide
agguucuaguucguuuccugc

SEQ ID NO: 75255 - RNA, 21 nt, Artificial Sequence
  LRRK2 RNA guide
aguacaaaaguugagugcgca

SEQ ID NO: 75256 - RNA, 21 nt, Artificial Sequence
  LRRK2 RNA guide
agugcgcaggaaacgaacuag

SEQ ID NO: 75257 - RNA, 21 nt, Artificial Sequence
  LRRK2 RNA guide
aguucguuuccugcgcacuca

SEQ ID NO: 75258 - RNA, 21 nt, Artificial Sequence
  LRRK2 RNA guide
aguugagugcgcaggaaacga

SEQ ID NO: 75259 - RNA, 21 nt, Artificial Sequence
  LRRK2 RNA guide
caaaaguugagugcgcaggaa

SEQ ID NO: 75260 - RNA, 21 nt, Artificial Sequence
  LRRK2 RNA guide
ccugcgcacucaacuuuugua

SEQ ID NO: 75261 - RNA, 21 nt, Artificial Sequence
  LRRK2 RNA guide
cgcacucaacuuuuguacuua

SEQ ID NO: 75262 - RNA, 21 nt, Artificial Sequence
  LRRK2 RNA guide
cguuuccugcgcacucaacuu

SEQ ID NO: 75263 - RNA, 21 nt, Artificial Sequence
  LRRK2 RNA guide
cuaaguacaaaaguugagugc

SEQ ID NO: 75264 - RNA, 21 nt, Artificial Sequence
  LRRK2 RNA guide
cuaguucguuuccugcgcacu

SEQ ID NO: 75265 - RNA, 21 nt, Artificial Sequence
  LRRK2 RNA guide
cugcgcacucaacuuuuguac

SEQ ID NO: 75266 - RNA, 21 nt, Artificial Sequence
  LRRK2 RNA guide
gaaaagguucuaguucguuuc

SEQ ID NO: 75267 - RNA, 21 nt, Artificial Sequence
  LRRK2 RNA guide
gagugcgcaggaaacgaacua

SEQ ID NO: 75268 - RNA, 21 nt, Artificial Sequence
  LRRK2 RNA guide
gcgcacucaacuuuuguacuu

SEQ ID NO: 75269 - RNA, 21 nt, Artificial Sequence
  LRRK2 RNA guide
gcgcaggaaacgaacuagaac

SEQ ID NO: 75270 - RNA, 21 nt, Artificial Sequence
  LRRK2 RNA guide
gguucuaguucguuuccugcg

SEQ ID NO: 75271 - RNA, 21 nt, Artificial Sequence
  LRRK2 RNA guide
guacaaaaguugagugcgcag

SEQ ID NO: 75272 - RNA, 21 nt, Artificial Sequence
  LRRK2 RNA guide
gugcgcaggaaacgaacuaga

SEQ ID NO: 75273 - RNA, 21 nt, Artificial Sequence
  LRRK2 RNA guide
guucguuuccugcgcacucaa

SEQ ID NO: 75274 - RNA, 21 nt, Artificial Sequence
  LRRK2 RNA guide
guucuaguucguuuccugcgc

SEQ ID NO: 75275 - RNA, 21 nt, Artificial Sequence
  LRRK2 RNA guide
guugagugcgcaggaaacgaa

SEQ ID NO: 75276 - RNA, 21 nt, Artificial Sequence
  LRRK2 RNA guide
guuuccugcgcacucaacuuu

SEQ ID NO: 75277 - RNA, 21 nt, Artificial Sequence
  LRRK2 RNA guide
uaaguacaaaaguugagugcg

SEQ ID NO: 75278 - RNA, 21 nt, Artificial Sequence
  LRRK2 RNA guide
uacaaaaguugagugcgcagg

SEQ ID NO: 75279 - RNA, 21 nt, Artificial Sequence
  LRRK2 RNA guide
uaguucguuuccugcgcacuc

SEQ ID NO: 75280 - RNA, 21 nt, Artificial Sequence
  LRRK2 RNA guide
uccugcgcacucaacuuuugu

SEQ ID NO: 75281 - RNA, 21 nt, Artificial Sequence
  LRRK2 RNA guide
ucguuuccugcgcacucaacu

SEQ ID NO: 75282 - RNA, 21 nt, Artificial Sequence
  LRRK2 RNA guide
ucuaaguacaaaaguugagug

SEQ ID NO: 75283 - RNA, 21 nt, Artificial Sequence
  LRRK2 RNA guide
ucuaguucguuuccugcgcac

SEQ ID NO: 75284 - RNA, 21 nt, Artificial Sequence
  LRRK2 RNA guide
ugagugcgcaggaaacgaacu

SEQ ID NO: 75285 - RNA, 21 nt, Artificial Sequence
  LRRK2 RNA guide
ugcgcacucaacuuuuguacu

SEQ ID NO: 75286 - RNA, 21 nt, Artificial Sequence
  LRRK2 RNA guide
ugcgcaggaaacgaacuagaa

SEQ ID NO: 75287 - RNA, 21 nt, Artificial Sequence
  LRRK2 RNA guide
uuccugcgcacucaacuuuug

SEQ ID NO: 75288 - RNA, 21 nt, Artificial Sequence
  LRRK2 RNA guide
uucguuuccugcgcacucaac

SEQ ID NO: 75289 - RNA, 21 nt, Artificial Sequence
  LRRK2 RNA guide
uucuaguucguuuccugcgca

SEQ ID NO: 75290 - RNA, 21 nt, Artificial Sequence
  LRRK2 RNA guide
uugagugcgcaggaaacgaac

SEQ ID NO: 75291 - RNA, 21 nt, Artificial Sequence
  LRRK2 RNA guide
uuuccugcgcacucaacuuuu

SEQ ID NO: 75292 - RNA, 22 nt, Artificial Sequence
  LRRK2 RNA guide
aaaagguucuaguucguuuccu

SEQ ID NO: 75293 - RNA, 22 nt, Artificial Sequence
  LRRK2 RNA guide
aaaaguugagugcgcaggaaac

SEQ ID NO: 75294 - RNA, 22 nt, Artificial Sequence
  LRRK2 RNA guide
aaagguucuaguucguuuccug

SEQ ID NO: 75295 - RNA, 22 nt, Artificial Sequence
  LRRK2 RNA guide
aaaguugagugcgcaggaaacg

SEQ ID NO: 75296 - RNA, 22 nt, Artificial Sequence
  LRRK2 RNA guide
aagguucuaguucguuuccugc

SEQ ID NO: 75297 - RNA, 22 nt, Artificial Sequence
  LRRK2 RNA guide
aaguacaaaaguugagugcgca

SEQ ID NO: 75298 - RNA, 22 nt, Artificial Sequence
  LRRK2 RNA guide
aaguugagugcgcaggaaacga

SEQ ID NO: 75299 - RNA, 22 nt, Artificial Sequence
  LRRK2 RNA guide
acaaaaguugagugcgcaggaa

SEQ ID NO: 75300 - RNA, 22 nt, Artificial Sequence
  LRRK2 RNA guide
agguucuaguucguuuccugcg

SEQ ID NO: 75301 - RNA, 22 nt, Artificial Sequence
  LRRK2 RNA guide
aguacaaaaguugagugcgcag

SEQ ID NO: 75302 - RNA, 22 nt, Artificial Sequence
  LRRK2 RNA guide
agugcgcaggaaacgaacuaga

SEQ ID NO: 75303 - RNA, 22 nt, Artificial Sequence
  LRRK2 RNA guide
aguucguuuccugcgcacucaa

SEQ ID NO: 75304 - RNA, 22 nt, Artificial Sequence
  LRRK2 RNA guide
aguugagugcgcaggaaacgaa

SEQ ID NO: 75305 - RNA, 22 nt, Artificial Sequence
  LRRK2 RNA guide
aucuaaguacaaaaguugagug

SEQ ID NO: 75306 - RNA, 22 nt, Artificial Sequence
  LRRK2 RNA guide
caaaaguugagugcgcaggaaa

SEQ ID NO: 75307 - RNA, 22 nt, Artificial Sequence
  LRRK2 RNA guide
ccugcgcacucaacuuuuguac

SEQ ID NO: 75308 - RNA, 22 nt, Artificial Sequence
  LRRK2 RNA guide
cgcacucaacuuuuguacuuag

SEQ ID NO: 75309 - RNA, 22 nt, Artificial Sequence
  LRRK2 RNA guide
cguuuccugcgcacucaacuuu

SEQ ID NO: 75310 - RNA, 22 nt, Artificial Sequence
  LRRK2 RNA guide
cuaaguacaaaaguugagugcg

SEQ ID NO: 75311 - RNA, 22 nt, Artificial Sequence
  LRRK2 RNA guide
cuaguucguuuccugcgcacuc

SEQ ID NO: 75312 - RNA, 22 nt, Artificial Sequence
  LRRK2 RNA guide
cugcgcacucaacuuuuguacu

SEQ ID NO: 75313 - RNA, 22 nt, Artificial Sequence
  LRRK2 RNA guide
gaaaagguucuaguucguuucc

SEQ ID NO: 75314 - RNA, 22 nt, Artificial Sequence
  LRRK2 RNA guide
gagugcgcaggaaacgaacuag

SEQ ID NO: 75315 - RNA, 22 nt, Artificial Sequence
  LRRK2 RNA guide
gcgcacucaacuuuuguacuua

SEQ ID NO: 75316 - RNA, 22 nt, Artificial Sequence
  LRRK2 RNA guide
gcgcaggaaacgaacuagaacc

SEQ ID NO: 75317 - RNA, 22 nt, Artificial Sequence
  LRRK2 RNA guide
gcuuaucuaaguacaaaaguug

SEQ ID NO: 75318 - RNA, 22 nt, Artificial Sequence
  LRRK2 RNA guide
ggaaaagguucuaguucguuuc

SEQ ID NO: 75319 - RNA, 22 nt, Artificial Sequence
  LRRK2 RNA guide
gguucuaguucguuuccugcgc

SEQ ID NO: 75320 - RNA, 22 nt, Artificial Sequence
  LRRK2 RNA guide
guacaaaaguugagugcgcagg

SEQ ID NO: 75321 - RNA, 22 nt, Artificial Sequence
  LRRK2 RNA guide
gugcgcaggaaacgaacuagaa

SEQ ID NO: 75322 - RNA, 22 nt, Artificial Sequence
  LRRK2 RNA guide
guucguuuccugcgcacucaac

SEQ ID NO: 75323 - RNA, 22 nt, Artificial Sequence
  LRRK2 RNA guide
guucuaguucguuuccugcgca

SEQ ID NO: 75324 - RNA, 22 nt, Artificial Sequence
  LRRK2 RNA guide
guugagugcgcaggaaacgaac

SEQ ID NO: 75325 - RNA, 22 nt, Artificial Sequence
  LRRK2 RNA guide
guuuccugcgcacucaacuuuu

SEQ ID NO: 75326 - RNA, 22 nt, Artificial Sequence
  LRRK2 RNA guide
uaaguacaaaaguugagugcgc

SEQ ID NO: 75327 - RNA, 22 nt, Artificial Sequence
  LRRK2 RNA guide
uacaaaaguugagugcgcagga

SEQ ID NO: 75328 - RNA, 22 nt, Artificial Sequence
  LRRK2 RNA guide
uaguucguuuccugcgcacuca

SEQ ID NO: 75329 - RNA, 22 nt, Artificial Sequence
  LRRK2 RNA guide
uccugcgcacucaacuuuugua

SEQ ID NO: 75330 - RNA, 22 nt, Artificial Sequence
  LRRK2 RNA guide
ucguuuccugcgcacucaacuu

SEQ ID NO: 75331 - RNA, 22 nt, Artificial Sequence
  LRRK2 RNA guide
ucuaaguacaaaaguugagugc

SEQ ID NO: 75332 - RNA, 22 nt, Artificial Sequence
  LRRK2 RNA guide
ucuaguucguuuccugcgcacu

SEQ ID NO: 75333 - RNA, 22 nt, Artificial Sequence
  LRRK2 RNA guide
ugagugcgcaggaaacgaacua

SEQ ID NO: 75334 - RNA, 22 nt, Artificial Sequence
  LRRK2 RNA guide
ugcgcacucaacuuuuguacuu

SEQ ID NO: 75335 - RNA, 22 nt, Artificial Sequence
  LRRK2 RNA guide
ugcgcaggaaacgaacuagaac

SEQ ID NO: 75336 - RNA, 22 nt, Artificial Sequence
  LRRK2 RNA guide
uuccugcgcacucaacuuuugu

SEQ ID NO: 75337 - RNA, 22 nt, Artificial Sequence
  LRRK2 RNA guide
uucguuuccugcgcacucaacu

SEQ ID NO: 75338 - RNA, 22 nt, Artificial Sequence
  LRRK2 RNA guide
uucuaguucguuuccugcgcac

SEQ ID NO: 75339 - RNA, 22 nt, Artificial Sequence
  LRRK2 RNA guide
uugagugcgcaggaaacgaacu

SEQ ID NO: 75340 - RNA, 22 nt, Artificial Sequence
  LRRK2 RNA guide
uuuccugcgcacucaacuuuug

SEQ ID NO: 75341 - RNA, 20 nt, Artificial Sequence
  LRRK2 RNA guide
aaaaguugagugggcaggaa

SEQ ID NO: 75342 - RNA, 20 nt, Artificial Sequence
  LRRK2 RNA guide
aaaguugagugggcaggaaa

SEQ ID NO: 75343 - RNA, 20 nt, Artificial Sequence
  LRRK2 RNA guide
aaguacaaaaguugaguggg

SEQ ID NO: 75344 - RNA, 20 nt, Artificial Sequence
  LRRK2 RNA guide
aaguugagugggcaggaaac

SEQ ID NO: 75345 - RNA, 20 nt, Artificial Sequence
  LRRK2 RNA guide
acaaaaguugagugggcagg

SEQ ID NO: 75346 - RNA, 20 nt, Artificial Sequence
  LRRK2 RNA guide
aguacaaaaguugagugggc

SEQ ID NO: 75347 - RNA, 20 nt, Artificial Sequence
  LRRK2 RNA guide
agugggcaggaaacgaacua

SEQ ID NO: 75348 - RNA, 20 nt, Artificial Sequence
  LRRK2 RNA guide
aguucguuuccugcccacuc

SEQ ID NO: 75349 - RNA, 20 nt, Artificial Sequence
  LRRK2 RNA guide
aguugagugggcaggaaacg

SEQ ID NO: 75350 - RNA, 20 nt, Artificial Sequence
  LRRK2 RNA guide
caaaaguugagugggcagga

SEQ ID NO: 75351 - RNA, 20 nt, Artificial Sequence
  LRRK2 RNA guide
cccacucaacuuuuguacuu

SEQ ID NO: 75352 - RNA, 20 nt, Artificial Sequence
  LRRK2 RNA guide
ccugcccacucaacuuuugu

SEQ ID NO: 75353 - RNA, 20 nt, Artificial Sequence
  LRRK2 RNA guide
cguuuccugcccacucaacu

SEQ ID NO: 75354 - RNA, 20 nt, Artificial Sequence
  LRRK2 RNA guide
cuaguucguuuccugcccac

SEQ ID NO: 75355 - RNA, 20 nt, Artificial Sequence
  LRRK2 RNA guide
cugcccacucaacuuuugua

SEQ ID NO: 75356 - RNA, 20 nt, Artificial Sequence
  LRRK2 RNA guide
gagugggcaggaaacgaacu

SEQ ID NO: 75357 - RNA, 20 nt, Artificial Sequence
  LRRK2 RNA guide
gcccacucaacuuuuguacu

SEQ ID NO: 75358 - RNA, 20 nt, Artificial Sequence
  LRRK2 RNA guide
gggcaggaaacgaacuagaa

SEQ ID NO: 75359 - RNA, 20 nt, Artificial Sequence
  LRRK2 RNA guide
guacaaaaguugagugggca

SEQ ID NO: 75360 - RNA, 20 nt, Artificial Sequence
  LRRK2 RNA guide
gugggcaggaaacgaacuag

SEQ ID NO: 75361 - RNA, 20 nt, Artificial Sequence
  LRRK2 RNA guide
guucguuuccugcccacuca

SEQ ID NO: 75362 - RNA, 20 nt, Artificial Sequence
  LRRK2 RNA guide
guucuaguucguuuccugcc

SEQ ID NO: 75363 - RNA, 20 nt, Artificial Sequence
  LRRK2 RNA guide
guugagugggcaggaaacga

SEQ ID NO: 75364 - RNA, 20 nt, Artificial Sequence
  LRRK2 RNA guide
guuuccugcccacucaacuu

SEQ ID NO: 75365 - RNA, 20 nt, Artificial Sequence
  LRRK2 RNA guide
uaaguacaaaaguugagugg

SEQ ID NO: 75366 - RNA, 20 nt, Artificial Sequence
  LRRK2 RNA guide
uacaaaaguugagugggcag

SEQ ID NO: 75367 - RNA, 20 nt, Artificial Sequence
  LRRK2 RNA guide
uaguucguuuccugcccacu

SEQ ID NO: 75368 - RNA, 20 nt, Artificial Sequence
  LRRK2 RNA guide
uccugcccacucaacuuuug

SEQ ID NO: 75369 - RNA, 20 nt, Artificial Sequence
  LRRK2 RNA guide
ucguuuccugcccacucaac

SEQ ID NO: 75370 - RNA, 20 nt, Artificial Sequence
  LRRK2 RNA guide
ucuaguucguuuccugccca

SEQ ID NO: 75371 - RNA, 20 nt, Artificial Sequence
  LRRK2 RNA guide
ugagugggcaggaaacgaac

SEQ ID NO: 75372 - RNA, 20 nt, Artificial Sequence
  LRRK2 RNA guide
ugcccacucaacuuuuguac

SEQ ID NO: 75373 - RNA, 20 nt, Artificial Sequence
  LRRK2 RNA guide
ugggcaggaaacgaacuaga

SEQ ID NO: 75374 - RNA, 20 nt, Artificial Sequence
  LRRK2 RNA guide
uuccugcccacucaacuuuu

SEQ ID NO: 75375 - RNA, 20 nt, Artificial Sequence
  LRRK2 RNA guide
uucguuuccugcccacucaa

SEQ ID NO: 75376 - RNA, 20 nt, Artificial Sequence
  LRRK2 RNA guide
uucuaguucguuuccugccc

SEQ ID NO: 75377 - RNA, 20 nt, Artificial Sequence
  LRRK2 RNA guide
uugagugggcaggaaacgaa

SEQ ID NO: 75378 - RNA, 20 nt, Artificial Sequence
  LRRK2 RNA guide
uuuccugcccacucaacuuu

SEQ ID NO: 75379 - RNA, 21 nt, Artificial Sequence
  LRRK2 RNA guide
aaaaguugagugggcaggaaa

SEQ ID NO: 75380 - RNA, 21 nt, Artificial Sequence
  LRRK2 RNA guide
aaaguugagugggcaggaaac

SEQ ID NO: 75381 - RNA, 21 nt, Artificial Sequence
  LRRK2 RNA guide
aaguacaaaaguugagugggc

SEQ ID NO: 75382 - RNA, 21 nt, Artificial Sequence
  LRRK2 RNA guide
aaguugagugggcaggaaacg

SEQ ID NO: 75383 - RNA, 21 nt, Artificial Sequence
  LRRK2 RNA guide
acaaaaguugagugggcagga

SEQ ID NO: 75384 - RNA, 21 nt, Artificial Sequence
  LRRK2 RNA guide
aguacaaaaguugagugggca

SEQ ID NO: 75385 - RNA, 21 nt, Artificial Sequence
  LRRK2 RNA guide
agugggcaggaaacgaacuag

SEQ ID NO: 75386 - RNA, 21 nt, Artificial Sequence
  LRRK2 RNA guide
aguucguuuccugcccacuca

SEQ ID NO: 75387 - RNA, 21 nt, Artificial Sequence
  LRRK2 RNA guide
aguugagugggcaggaaacga

SEQ ID NO: 75388 - RNA, 21 nt, Artificial Sequence
  LRRK2 RNA guide
caaaaguugagugggcaggaa

SEQ ID NO: 75389 - RNA, 21 nt, Artificial Sequence
  LRRK2 RNA guide
cccacucaacuuuuguacuua

SEQ ID NO: 75390 - RNA, 21 nt, Artificial Sequence
  LRRK2 RNA guide
ccugcccacucaacuuuugua

SEQ ID NO: 75391 - RNA, 21 nt, Artificial Sequence
  LRRK2 RNA guide
cguuuccugcccacucaacuu

SEQ ID NO: 75392 - RNA, 21 nt, Artificial Sequence
  LRRK2 RNA guide
cuaaguacaaaaguugagugg

SEQ ID NO: 75393 - RNA, 21 nt, Artificial Sequence
  LRRK2 RNA guide
cuaguucguuuccugcccacu

SEQ ID NO: 75394 - RNA, 21 nt, Artificial Sequence
  LRRK2 RNA guide
cugcccacucaacuuuuguac

SEQ ID NO: 75395 - RNA, 21 nt, Artificial Sequence
  LRRK2 RNA guide
gagugggcaggaaacgaacua

SEQ ID NO: 75396 - RNA, 21 nt, Artificial Sequence
  LRRK2 RNA guide
gcccacucaacuuuuguacuu

SEQ ID NO: 75397 - RNA, 21 nt, Artificial Sequence
  LRRK2 RNA guide
gggcaggaaacgaacuagaac

SEQ ID NO: 75398 - RNA, 21 nt, Artificial Sequence
  LRRK2 RNA guide
gguucuaguucguuuccugcc

SEQ ID NO: 75399 - RNA, 21 nt, Artificial Sequence
  LRRK2 RNA guide
guacaaaaguugagugggcag

SEQ ID NO: 75400 - RNA, 21 nt, Artificial Sequence
  LRRK2 RNA guide
gugggcaggaaacgaacuaga

SEQ ID NO: 75401 - RNA, 21 nt, Artificial Sequence
  LRRK2 RNA guide
guucguuuccugcccacucaa

SEQ ID NO: 75402 - RNA, 21 nt, Artificial Sequence
  LRRK2 RNA guide
guucuaguucguuuccugccc

SEQ ID NO: 75403 - RNA, 21 nt, Artificial Sequence
  LRRK2 RNA guide
guugagugggcaggaaacgaa

SEQ ID NO: 75404 - RNA, 21 nt, Artificial Sequence
  LRRK2 RNA guide
guuuccugcccacucaacuuu

SEQ ID NO: 75405 - RNA, 21 nt, Artificial Sequence
  LRRK2 RNA guide
uaaguacaaaaguugaguggg

SEQ ID NO: 75406 - RNA, 21 nt, Artificial Sequence
  LRRK2 RNA guide
uacaaaaguugagugggcagg

SEQ ID NO: 75407 - RNA, 21 nt, Artificial Sequence
  LRRK2 RNA guide
uaguucguuuccugcccacuc

SEQ ID NO: 75408 - RNA, 21 nt, Artificial Sequence
  LRRK2 RNA guide
uccugcccacucaacuuuugu

SEQ ID NO: 75409 - RNA, 21 nt, Artificial Sequence
  LRRK2 RNA guide
ucguuuccugcccacucaacu

SEQ ID NO: 75410 - RNA, 21 nt, Artificial Sequence
  LRRK2 RNA guide
ucuaguucguuuccugcccac

SEQ ID NO: 75411 - RNA, 21 nt, Artificial Sequence
  LRRK2 RNA guide
ugagugggcaggaaacgaacu

SEQ ID NO: 75412 - RNA, 21 nt, Artificial Sequence
  LRRK2 RNA guide
ugcccacucaacuuuuguacu

SEQ ID NO: 75413 - RNA, 21 nt, Artificial Sequence
  LRRK2 RNA guide
ugggcaggaaacgaacuagaa

SEQ ID NO: 75414 - RNA, 21 nt, Artificial Sequence
  LRRK2 RNA guide
uuccugcccacucaacuuuug

SEQ ID NO: 75415 - RNA, 21 nt, Artificial Sequence
  LRRK2 RNA guide
uucguuuccugcccacucaac

SEQ ID NO: 75416 - RNA, 21 nt, Artificial Sequence
  LRRK2 RNA guide
uucuaguucguuuccugccca

SEQ ID NO: 75417 - RNA, 21 nt, Artificial Sequence
  LRRK2 RNA guide
uugagugggcaggaaacgaac

SEQ ID NO: 75418 - RNA, 21 nt, Artificial Sequence
  LRRK2 RNA guide
uuuccugcccacucaacuuuu

SEQ ID NO: 75419 - RNA, 22 nt, Artificial Sequence
  LRRK2 RNA guide
aaaaguugagugggcaggaaac

SEQ ID NO: 75420 - RNA, 22 nt, Artificial Sequence
  LRRK2 RNA guide
aaaguugagugggcaggaaacg

SEQ ID NO: 75421 - RNA, 22 nt, Artificial Sequence
  LRRK2 RNA guide
aaguacaaaaguugagugggca

SEQ ID NO: 75422 - RNA, 22 nt, Artificial Sequence
  LRRK2 RNA guide
aaguugagugggcaggaaacga

SEQ ID NO: 75423 - RNA, 22 nt, Artificial Sequence
  LRRK2 RNA guide
acaaaaguugagugggcaggaa

SEQ ID NO: 75424 - RNA, 22 nt, Artificial Sequence
  LRRK2 RNA guide
agguucuaguucguuuccugcc

SEQ ID NO: 75425 - RNA, 22 nt, Artificial Sequence
  LRRK2 RNA guide
aguacaaaaguugagugggcag

SEQ ID NO: 75426 - RNA, 22 nt, Artificial Sequence
  LRRK2 RNA guide
agugggcaggaaacgaacuaga

SEQ ID NO: 75427 - RNA, 22 nt, Artificial Sequence
  LRRK2 RNA guide
aguucguuuccugcccacucaa

SEQ ID NO: 75428 - RNA, 22 nt, Artificial Sequence
  LRRK2 RNA guide
aguugagugggcaggaaacgaa

SEQ ID NO: 75429 - RNA, 22 nt, Artificial Sequence
  LRRK2 RNA guide
caaaaguugagugggcaggaaa

SEQ ID NO: 75430 - RNA, 22 nt, Artificial Sequence
  LRRK2 RNA guide
cccacucaacuuuuguacuuag

SEQ ID NO: 75431 - RNA, 22 nt, Artificial Sequence
  LRRK2 RNA guide
ccugcccacucaacuuuuguac

SEQ ID NO: 75432 - RNA, 22 nt, Artificial Sequence
  LRRK2 RNA guide
cguuuccugcccacucaacuuu

SEQ ID NO: 75433 - RNA, 22 nt, Artificial Sequence
  LRRK2 RNA guide
cuaaguacaaaaguugaguggg

SEQ ID NO: 75434 - RNA, 22 nt, Artificial Sequence
  LRRK2 RNA guide
cuaguucguuuccugcccacuc

SEQ ID NO: 75435 - RNA, 22 nt, Artificial Sequence
  LRRK2 RNA guide
cugcccacucaacuuuuguacu

SEQ ID NO: 75436 - RNA, 22 nt, Artificial Sequence
  LRRK2 RNA guide
gagugggcaggaaacgaacuag

SEQ ID NO: 75437 - RNA, 22 nt, Artificial Sequence
  LRRK2 RNA guide
gcccacucaacuuuuguacuua

SEQ ID NO: 75438 - RNA, 22 nt, Artificial Sequence
  LRRK2 RNA guide
gggcaggaaacgaacuagaacc

SEQ ID NO: 75439 - RNA, 22 nt, Artificial Sequence
  LRRK2 RNA guide
gguucuaguucguuuccugccc

SEQ ID NO: 75440 - RNA, 22 nt, Artificial Sequence
  LRRK2 RNA guide
guacaaaaguugagugggcagg

SEQ ID NO: 75441 - RNA, 22 nt, Artificial Sequence
  LRRK2 RNA guide
gugggcaggaaacgaacuagaa

SEQ ID NO: 75442 - RNA, 22 nt, Artificial Sequence
  LRRK2 RNA guide
guucguuuccugcccacucaac

SEQ ID NO: 75443 - RNA, 22 nt, Artificial Sequence
  LRRK2 RNA guide
guucuaguucguuuccugccca

SEQ ID NO: 75444 - RNA, 22 nt, Artificial Sequence
  LRRK2 RNA guide
guugagugggcaggaaacgaac

SEQ ID NO: 75445 - RNA, 22 nt, Artificial Sequence
  LRRK2 RNA guide
guuuccugcccacucaacuuuu

SEQ ID NO: 75446 - RNA, 22 nt, Artificial Sequence
  LRRK2 RNA guide
uaaguacaaaaguugagugggc

SEQ ID NO: 75447 - RNA, 22 nt, Artificial Sequence
  LRRK2 RNA guide
uacaaaaguugagugggcagga

SEQ ID NO: 75448 - RNA, 22 nt, Artificial Sequence
  LRRK2 RNA guide
uaguucguuuccugcccacuca

SEQ ID NO: 75449 - RNA, 22 nt, Artificial Sequence
  LRRK2 RNA guide
uccugcccacucaacuuuugua

SEQ ID NO: 75450 - RNA, 22 nt, Artificial Sequence
  LRRK2 RNA guide
ucguuuccugcccacucaacuu

SEQ ID NO: 75451 - RNA, 22 nt, Artificial Sequence
  LRRK2 RNA guide
ucuaaguacaaaaguugagugg

SEQ ID NO: 75452 - RNA, 22 nt, Artificial Sequence
  LRRK2 RNA guide
ucuaguucguuuccugcccacu

SEQ ID NO: 75453 - RNA, 22 nt, Artificial Sequence
  LRRK2 RNA guide
ugagugggcaggaaacgaacua

SEQ ID NO: 75454 - RNA, 22 nt, Artificial Sequence
  LRRK2 RNA guide
ugcccacucaacuuuuguacuu

SEQ ID NO: 75455 - RNA, 22 nt, Artificial Sequence
  LRRK2 RNA guide
ugggcaggaaacgaacuagaac

SEQ ID NO: 75456 - RNA, 22 nt, Artificial Sequence
  LRRK2 RNA guide
uuccugcccacucaacuuuugu

SEQ ID NO: 75457 - RNA, 22 nt, Artificial Sequence
  LRRK2 RNA guide
uucguuuccugcccacucaacu

SEQ ID NO: 75458 - RNA, 22 nt, Artificial Sequence
  LRRK2 RNA guide
uucuaguucguuuccugcccac

SEQ ID NO: 75459 - RNA, 22 nt, Artificial Sequence
  LRRK2 RNA guide
uugagugggcaggaaacgaacu

SEQ ID NO: 75460 - RNA, 22 nt, Artificial Sequence
  LRRK2 RNA guide
uuuccugcccacucaacuuuug

SEQ ID NO: 75461 - RNA, 20 nt, Artificial Sequence
  LRRK2 RNA guide
cucuguuguuuuguuuugac

SEQ ID NO: 75462 - RNA, 20 nt, Artificial Sequence
  LRRK2 RNA guide
cuguuguuuuguuuugacuu

SEQ ID NO: 75463 - RNA, 20 nt, Artificial Sequence
  LRRK2 RNA guide
gcucuguuguuuuguuuuga

SEQ ID NO: 75464 - RNA, 20 nt, Artificial Sequence
  LRRK2 RNA guide
ggcucuguuguuuuguuuug

SEQ ID NO: 75465 - RNA, 20 nt, Artificial Sequence
  LRRK2 RNA guide
ucuguuguuuuguuuugacu

SEQ ID NO: 75466 - RNA, 20 nt, Artificial Sequence
  LRRK2 RNA guide
uggcucuguuguuuuguuuu

SEQ ID NO: 75467 - RNA, 21 nt, Artificial Sequence
  LRRK2 RNA guide
auggcucuguuguuuuguuuu

SEQ ID NO: 75468 - RNA, 21 nt, Artificial Sequence
  LRRK2 RNA guide
cucuguuguuuuguuuugacu

SEQ ID NO: 75469 - RNA, 21 nt, Artificial Sequence
  LRRK2 RNA guide
gcucuguuguuuuguuuugac

SEQ ID NO: 75470 - RNA, 21 nt, Artificial Sequence
  LRRK2 RNA guide
ggcucuguuguuuuguuuuga

SEQ ID NO: 75471 - RNA, 21 nt, Artificial Sequence
  LRRK2 RNA guide
uggcucuguuguuuuguuuug

SEQ ID NO: 75472 - RNA, 22 nt, Artificial Sequence
  LRRK2 RNA guide
auggcucuguuguuuuguuuug

SEQ ID NO: 75473 - RNA, 22 nt, Artificial Sequence
  LRRK2 RNA guide
cauggcucuguuguuuuguuuu

SEQ ID NO: 75474 - RNA, 22 nt, Artificial Sequence
  LRRK2 RNA guide
cucuguuguuuuguuuugacuu

SEQ ID NO: 75475 - RNA, 22 nt, Artificial Sequence
  LRRK2 RNA guide
gcucuguuguuuuguuuugacu

SEQ ID NO: 75476 - RNA, 22 nt, Artificial Sequence
  LRRK2 RNA guide
ggcucuguuguuuuguuuugac

SEQ ID NO: 75477 - RNA, 22 nt, Artificial Sequence
  LRRK2 RNA guide
uggcucuguuguuuuguuuuga

SEQ ID NO: 75478 - RNA, 20 nt, Artificial Sequence
  LRRK2 RNA guide
aagagucaaaacaaaacaac

SEQ ID NO: 75479 - RNA, 20 nt, Artificial Sequence
  LRRK2 RNA guide
agagucaaaacaaaacaaca

SEQ ID NO: 75480 - RNA, 20 nt, Artificial Sequence
  LRRK2 RNA guide
cuguuguuuuguuuugacuc

SEQ ID NO: 75481 - RNA, 20 nt, Artificial Sequence
  LRRK2 RNA guide
cuucacuauuaaaagaguca

SEQ ID NO: 75482 - RNA, 20 nt, Artificial Sequence
  LRRK2 RNA guide
gacucuuuuaauagugaaga

SEQ ID NO: 75483 - RNA, 20 nt, Artificial Sequence
  LRRK2 RNA guide
guuguuuuguuuugacucuu

SEQ ID NO: 75484 - RNA, 20 nt, Artificial Sequence
  LRRK2 RNA guide
ucuucacuauuaaaagaguc

SEQ ID NO: 75485 - RNA, 20 nt, Artificial Sequence
  LRRK2 RNA guide
ugacucuuuuaauagugaag

SEQ ID NO: 75486 - RNA, 20 nt, Artificial Sequence
  LRRK2 RNA guide
uguuguuuuguuuugacucu

SEQ ID NO: 75487 - RNA, 21 nt, Artificial Sequence
  LRRK2 RNA guide
agagucaaaacaaaacaacag

SEQ ID NO: 75488 - RNA, 21 nt, Artificial Sequence
  LRRK2 RNA guide
cuguuguuuuguuuugacucu

SEQ ID NO: 75489 - RNA, 21 nt, Artificial Sequence
  LRRK2 RNA guide
ucuguuguuuuguuuugacuc

SEQ ID NO: 75490 - RNA, 22 nt, Artificial Sequence
  LRRK2 RNA guide
aagagucaaaacaaaacaacag

SEQ ID NO: 75491 - RNA, 22 nt, Artificial Sequence
  LRRK2 RNA guide
agagucaaaacaaaacaacaga

SEQ ID NO: 75492 - RNA, 22 nt, Artificial Sequence
  LRRK2 RNA guide
cucuguuguuuuguuuugacuc

SEQ ID NO: 75493 - RNA, 22 nt, Artificial Sequence
  LRRK2 RNA guide
cuguuguuuuguuuugacucuu

SEQ ID NO: 75494 - RNA, 22 nt, Artificial Sequence
  LRRK2 RNA guide
ucuguuguuuuguuuugacucu

SEQ ID NO: 75495 - RNA, 20 nt, Artificial Sequence
  LRRK2 RNA guide
aaauuccauagaccugauau

SEQ ID NO: 75496 - RNA, 20 nt, Artificial Sequence
  LRRK2 RNA guide
aauuccauagaccugauaua

SEQ ID NO: 75497 - RNA, 20 nt, Artificial Sequence
  LRRK2 RNA guide
accugauauauuuccaccug

SEQ ID NO: 75498 - RNA, 20 nt, Artificial Sequence
  LRRK2 RNA guide
acuuuuuccagguggaaaua

SEQ ID NO: 75499 - RNA, 20 nt, Artificial Sequence
  LRRK2 RNA guide
agaccugauauauuuccacc

SEQ ID NO: 75500 - RNA, 20 nt, Artificial Sequence
  LRRK2 RNA guide
agguggaaauauaucagguc

SEQ ID NO: 75501 - RNA, 20 nt, Artificial Sequence
  LRRK2 RNA guide
auagaccugauauauuucca

SEQ ID NO: 75502 - RNA, 20 nt, Artificial Sequence
  LRRK2 RNA guide
auauauuuccaccuggaaaa

SEQ ID NO: 75503 - RNA, 20 nt, Artificial Sequence
  LRRK2 RNA guide
auauuuccaccuggaaaaag

SEQ ID NO: 75504 - RNA, 20 nt, Artificial Sequence
  LRRK2 RNA guide
augcccacuuuuuccaggug

SEQ ID NO: 75505 - RNA, 20 nt, Artificial Sequence
  LRRK2 RNA guide
auuccauagaccugauauau

SEQ ID NO: 75506 - RNA, 20 nt, Artificial Sequence
  LRRK2 RNA guide
auuuccaccuggaaaaagug

SEQ ID NO: 75507 - RNA, 20 nt, Artificial Sequence
  LRRK2 RNA guide
cacuuuuuccagguggaaau

SEQ ID NO: 75508 - RNA, 20 nt, Artificial Sequence
  LRRK2 RNA guide
cagguggaaauauaucaggu

SEQ ID NO: 75509 - RNA, 20 nt, Artificial Sequence
  LRRK2 RNA guide
cauagaccugauauauuucc

SEQ ID NO: 75510 - RNA, 20 nt, Artificial Sequence
  LRRK2 RNA guide
caugcccacuuuuuccaggu

SEQ ID NO: 75511 - RNA, 20 nt, Artificial Sequence
  LRRK2 RNA guide
ccacuuuuuccagguggaaa

SEQ ID NO: 75512 - RNA, 20 nt, Artificial Sequence
  LRRK2 RNA guide
ccagguggaaauauaucagg

SEQ ID NO: 75513 - RNA, 20 nt, Artificial Sequence
  LRRK2 RNA guide
ccauagaccugauauauuuc

SEQ ID NO: 75514 - RNA, 20 nt, Artificial Sequence
  LRRK2 RNA guide
ccaugcccacuuuuuccagg

SEQ ID NO: 75515 - RNA, 20 nt, Artificial Sequence
  LRRK2 RNA guide
cccacuuuuuccagguggaa

SEQ ID NO: 75516 - RNA, 20 nt, Artificial Sequence
  LRRK2 RNA guide
cccaugcccacuuuuuccag

SEQ ID NO: 75517 - RNA, 20 nt, Artificial Sequence
  LRRK2 RNA guide
ccugauauauuuccaccugg

SEQ ID NO: 75518 - RNA, 20 nt, Artificial Sequence
  LRRK2 RNA guide
cugauauauuuccaccugga

SEQ ID NO: 75519 - RNA, 20 nt, Artificial Sequence
  LRRK2 RNA guide
cuuuuuccagguggaaauau

SEQ ID NO: 75520 - RNA, 20 nt, Artificial Sequence
  LRRK2 RNA guide
gaaauauaucaggucuaugg

SEQ ID NO: 75521 - RNA, 20 nt, Artificial Sequence
  LRRK2 RNA guide
gaaauuccauagaccugaua

SEQ ID NO: 75522 - RNA, 20 nt, Artificial Sequence
  LRRK2 RNA guide
gaccugauauauuuccaccu

SEQ ID NO: 75523 - RNA, 20 nt, Artificial Sequence
  LRRK2 RNA guide
gauauauuuccaccuggaaa

SEQ ID NO: 75524 - RNA, 20 nt, Artificial Sequence
  LRRK2 RNA guide
gcccacuuuuuccaggugga

SEQ ID NO: 75525 - RNA, 20 nt, Artificial Sequence
  LRRK2 RNA guide
ggaaauauaucaggucuaug

SEQ ID NO: 75526 - RNA, 20 nt, Artificial Sequence
  LRRK2 RNA guide
gguggaaauauaucaggucu

SEQ ID NO: 75527 - RNA, 20 nt, Artificial Sequence
  LRRK2 RNA guide
guggaaauauaucaggucua

SEQ ID NO: 75528 - RNA, 20 nt, Artificial Sequence
  LRRK2 RNA guide
uagaccugauauauuuccac

SEQ ID NO: 75529 - RNA, 20 nt, Artificial Sequence
  LRRK2 RNA guide
uauauuuccaccuggaaaaa

SEQ ID NO: 75530 - RNA, 20 nt, Artificial Sequence
  LRRK2 RNA guide
uauuuccaccuggaaaaagu

SEQ ID NO: 75531 - RNA, 20 nt, Artificial Sequence
  LRRK2 RNA guide
uccagguggaaauauaucag

SEQ ID NO: 75532 - RNA, 20 nt, Artificial Sequence
  LRRK2 RNA guide
uccauagaccugauauauuu

SEQ ID NO: 75533 - RNA, 20 nt, Artificial Sequence
  LRRK2 RNA guide
ugauauauuuccaccuggaa

SEQ ID NO: 75534 - RNA, 20 nt, Artificial Sequence
  LRRK2 RNA guide
ugcccacuuuuuccaggugg

SEQ ID NO: 75535 - RNA, 20 nt, Artificial Sequence
  LRRK2 RNA guide
uggaaauauaucaggucuau

SEQ ID NO: 75536 - RNA, 20 nt, Artificial Sequence
  LRRK2 RNA guide
uuccaccuggaaaaaguggg

SEQ ID NO: 75537 - RNA, 20 nt, Artificial Sequence
  LRRK2 RNA guide
uuccagguggaaauauauca

SEQ ID NO: 75538 - RNA, 20 nt, Artificial Sequence
  LRRK2 RNA guide
uuccauagaccugauauauu

SEQ ID NO: 75539 - RNA, 20 nt, Artificial Sequence
  LRRK2 RNA guide
uuuccaccuggaaaaagugg

SEQ ID NO: 75540 - RNA, 20 nt, Artificial Sequence
  LRRK2 RNA guide
uuuccagguggaaauauauc

SEQ ID NO: 75541 - RNA, 20 nt, Artificial Sequence
  LRRK2 RNA guide
uuuuccagguggaaauauau

SEQ ID NO: 75542 - RNA, 21 nt, Artificial Sequence
  LRRK2 RNA guide
accugauauauuuccaccugg

SEQ ID NO: 75543 - RNA, 21 nt, Artificial Sequence
  LRRK2 RNA guide
acuuuuuccagguggaaauau

SEQ ID NO: 75544 - RNA, 21 nt, Artificial Sequence
  LRRK2 RNA guide
agaccugauauauuuccaccu

SEQ ID NO: 75545 - RNA, 21 nt, Artificial Sequence
  LRRK2 RNA guide
agguggaaauauaucaggucu

SEQ ID NO: 75546 - RNA, 21 nt, Artificial Sequence
  LRRK2 RNA guide
auagaccugauauauuuccac

SEQ ID NO: 75547 - RNA, 21 nt, Artificial Sequence
  LRRK2 RNA guide
auauuuccaccuggaaaaagu

SEQ ID NO: 75548 - RNA, 21 nt, Artificial Sequence
  LRRK2 RNA guide
augcccacuuuuuccaggugg

SEQ ID NO: 75549 - RNA, 21 nt, Artificial Sequence
  LRRK2 RNA guide
auuuccaccuggaaaaagugg

SEQ ID NO: 75550 - RNA, 21 nt, Artificial Sequence
  LRRK2 RNA guide
cacuuuuuccagguggaaaua

SEQ ID NO: 75551 - RNA, 21 nt, Artificial Sequence
  LRRK2 RNA guide
cagguggaaauauaucagguc

SEQ ID NO: 75552 - RNA, 21 nt, Artificial Sequence
  LRRK2 RNA guide
cauagaccugauauauuucca

SEQ ID NO: 75553 - RNA, 21 nt, Artificial Sequence
  LRRK2 RNA guide
caugcccacuuuuuccaggug

SEQ ID NO: 75554 - RNA, 21 nt, Artificial Sequence
  LRRK2 RNA guide
ccacuuuuuccagguggaaau

SEQ ID NO: 75555 - RNA, 21 nt, Artificial Sequence
  LRRK2 RNA guide
ccagguggaaauauaucaggu

SEQ ID NO: 75556 - RNA, 21 nt, Artificial Sequence
  LRRK2 RNA guide
ccauagaccugauauauuucc

SEQ ID NO: 75557 - RNA, 21 nt, Artificial Sequence
  LRRK2 RNA guide
ccaugcccacuuuuuccaggu

SEQ ID NO: 75558 - RNA, 21 nt, Artificial Sequence
  LRRK2 RNA guide
cccacuuuuuccagguggaaa

SEQ ID NO: 75559 - RNA, 21 nt, Artificial Sequence
  LRRK2 RNA guide
cccaugcccacuuuuuccagg

SEQ ID NO: 75560 - RNA, 21 nt, Artificial Sequence
  LRRK2 RNA guide
ccugauauauuuccaccugga

SEQ ID NO: 75561 - RNA, 21 nt, Artificial Sequence
  LRRK2 RNA guide
cugauauauuuccaccuggaa

SEQ ID NO: 75562 - RNA, 21 nt, Artificial Sequence
  LRRK2 RNA guide
cuuuuuccagguggaaauaua

SEQ ID NO: 75563 - RNA, 21 nt, Artificial Sequence
  LRRK2 RNA guide
gaaauauaucaggucuaugga

SEQ ID NO: 75564 - RNA, 21 nt, Artificial Sequence
  LRRK2 RNA guide
gaaauuccauagaccugauau

SEQ ID NO: 75565 - RNA, 21 nt, Artificial Sequence
  LRRK2 RNA guide
gaccugauauauuuccaccug

SEQ ID NO: 75566 - RNA, 21 nt, Artificial Sequence
  LRRK2 RNA guide
gauauauuuccaccuggaaaa

SEQ ID NO: 75567 - RNA, 21 nt, Artificial Sequence
  LRRK2 RNA guide
gcccacuuuuuccagguggaa

SEQ ID NO: 75568 - RNA, 21 nt, Artificial Sequence
  LRRK2 RNA guide
ggaaauauaucaggucuaugg

SEQ ID NO: 75569 - RNA, 21 nt, Artificial Sequence
  LRRK2 RNA guide
gguggaaauauaucaggucua

SEQ ID NO: 75570 - RNA, 21 nt, Artificial Sequence
  LRRK2 RNA guide
guggaaauauaucaggucuau

SEQ ID NO: 75571 - RNA, 21 nt, Artificial Sequence
  LRRK2 RNA guide
uagaccugauauauuuccacc

SEQ ID NO: 75572 - RNA, 21 nt, Artificial Sequence
  LRRK2 RNA guide
uauauuuccaccuggaaaaag

SEQ ID NO: 75573 - RNA, 21 nt, Artificial Sequence
  LRRK2 RNA guide
uauuuccaccuggaaaaagug

SEQ ID NO: 75574 - RNA, 21 nt, Artificial Sequence
  LRRK2 RNA guide
uccagguggaaauauaucagg

SEQ ID NO: 75575 - RNA, 21 nt, Artificial Sequence
  LRRK2 RNA guide
uccauagaccugauauauuuc

SEQ ID NO: 75576 - RNA, 21 nt, Artificial Sequence
  LRRK2 RNA guide
ucccaugcccacuuuuuccag

SEQ ID NO: 75577 - RNA, 21 nt, Artificial Sequence
  LRRK2 RNA guide
ugaaauuccauagaccugaua

SEQ ID NO: 75578 - RNA, 21 nt, Artificial Sequence
  LRRK2 RNA guide
ugauauauuuccaccuggaaa

SEQ ID NO: 75579 - RNA, 21 nt, Artificial Sequence
  LRRK2 RNA guide
ugcccacuuuuuccaggugga

SEQ ID NO: 75580 - RNA, 21 nt, Artificial Sequence
  LRRK2 RNA guide
uggaaauauaucaggucuaug

SEQ ID NO: 75581 - RNA, 21 nt, Artificial Sequence
  LRRK2 RNA guide
uuccaccuggaaaaagugggc

SEQ ID NO: 75582 - RNA, 21 nt, Artificial Sequence
  LRRK2 RNA guide
uuccagguggaaauauaucag

SEQ ID NO: 75583 - RNA, 21 nt, Artificial Sequence
  LRRK2 RNA guide
uuuccaccuggaaaaaguggg

SEQ ID NO: 75584 - RNA, 21 nt, Artificial Sequence
  LRRK2 RNA guide
uuuccagguggaaauauauca

SEQ ID NO: 75585 - RNA, 21 nt, Artificial Sequence
  LRRK2 RNA guide
uuuuccagguggaaauauauc

SEQ ID NO: 75586 - RNA, 22 nt, Artificial Sequence
  LRRK2 RNA guide
accugauauauuuccaccugga

SEQ ID NO: 75587 - RNA, 22 nt, Artificial Sequence
  LRRK2 RNA guide
acuuuuuccagguggaaauaua

SEQ ID NO: 75588 - RNA, 22 nt, Artificial Sequence
  LRRK2 RNA guide
agaccugauauauuuccaccug

SEQ ID NO: 75589 - RNA, 22 nt, Artificial Sequence
  LRRK2 RNA guide
agguggaaauauaucaggucua

SEQ ID NO: 75590 - RNA, 22 nt, Artificial Sequence
  LRRK2 RNA guide
auagaccugauauauuuccacc

SEQ ID NO: 75591 - RNA, 22 nt, Artificial Sequence
  LRRK2 RNA guide
auauauuuccaccuggaaaaag

SEQ ID NO: 75592 - RNA, 22 nt, Artificial Sequence
  LRRK2 RNA guide
auauuuccaccuggaaaaagug

SEQ ID NO: 75593 - RNA, 22 nt, Artificial Sequence
  LRRK2 RNA guide
augaaauuccauagaccugaua

SEQ ID NO: 75594 - RNA, 22 nt, Artificial Sequence
  LRRK2 RNA guide
augcccacuuuuuccaggugga

SEQ ID NO: 75595 - RNA, 22 nt, Artificial Sequence
  LRRK2 RNA guide
auuuccaccuggaaaaaguggg

SEQ ID NO: 75596 - RNA, 22 nt, Artificial Sequence
  LRRK2 RNA guide
cacuuuuuccagguggaaauau

SEQ ID NO: 75597 - RNA, 22 nt, Artificial Sequence
  LRRK2 RNA guide
cagguggaaauauaucaggucu

SEQ ID NO: 75598 - RNA, 22 nt, Artificial Sequence
  LRRK2 RNA guide
cauagaccugauauauuuccac

SEQ ID NO: 75599 - RNA, 22 nt, Artificial Sequence
  LRRK2 RNA guide
caugcccacuuuuuccaggugg

SEQ ID NO: 75600 - RNA, 22 nt, Artificial Sequence
  LRRK2 RNA guide
ccacuuuuuccagguggaaaua

SEQ ID NO: 75601 - RNA, 22 nt, Artificial Sequence
  LRRK2 RNA guide
ccagguggaaauauaucagguc

SEQ ID NO: 75602 - RNA, 22 nt, Artificial Sequence
  LRRK2 RNA guide
ccauagaccugauauauuucca

SEQ ID NO: 75603 - RNA, 22 nt, Artificial Sequence
  LRRK2 RNA guide
ccaugcccacuuuuuccaggug

SEQ ID NO: 75604 - RNA, 22 nt, Artificial Sequence
  LRRK2 RNA guide
cccacuuuuuccagguggaaau

SEQ ID NO: 75605 - RNA, 22 nt, Artificial Sequence
  LRRK2 RNA guide
cccaugcccacuuuuuccaggu

SEQ ID NO: 75606 - RNA, 22 nt, Artificial Sequence
  LRRK2 RNA guide
ccugauauauuuccaccuggaa

SEQ ID NO: 75607 - RNA, 22 nt, Artificial Sequence
  LRRK2 RNA guide
cugauauauuuccaccuggaaa

SEQ ID NO: 75608 - RNA, 22 nt, Artificial Sequence
  LRRK2 RNA guide
cuuuuuccagguggaaauauau

SEQ ID NO: 75609 - RNA, 22 nt, Artificial Sequence
  LRRK2 RNA guide
gaaauauaucaggucuauggaa

SEQ ID NO: 75610 - RNA, 22 nt, Artificial Sequence
  LRRK2 RNA guide
gaaauuccauagaccugauaua

SEQ ID NO: 75611 - RNA, 22 nt, Artificial Sequence
  LRRK2 RNA guide
gaccugauauauuuccaccugg

SEQ ID NO: 75612 - RNA, 22 nt, Artificial Sequence
  LRRK2 RNA guide
gauauauuuccaccuggaaaaa

SEQ ID NO: 75613 - RNA, 22 nt, Artificial Sequence
  LRRK2 RNA guide
gcccacuuuuuccagguggaaa

SEQ ID NO: 75614 - RNA, 22 nt, Artificial Sequence
  LRRK2 RNA guide
ggaaauauaucaggucuaugga

SEQ ID NO: 75615 - RNA, 22 nt, Artificial Sequence
  LRRK2 RNA guide
gguggaaauauaucaggucuau

SEQ ID NO: 75616 - RNA, 22 nt, Artificial Sequence
  LRRK2 RNA guide
gucccaugcccacuuuuuccag

SEQ ID NO: 75617 - RNA, 22 nt, Artificial Sequence
  LRRK2 RNA guide
guggaaauauaucaggucuaug

SEQ ID NO: 75618 - RNA, 22 nt, Artificial Sequence
  LRRK2 RNA guide
uagaccugauauauuuccaccu

SEQ ID NO: 75619 - RNA, 22 nt, Artificial Sequence
  LRRK2 RNA guide
uauauuuccaccuggaaaaagu

SEQ ID NO: 75620 - RNA, 22 nt, Artificial Sequence
  LRRK2 RNA guide
uauuuccaccuggaaaaagugg

SEQ ID NO: 75621 - RNA, 22 nt, Artificial Sequence
  LRRK2 RNA guide
uccagguggaaauauaucaggu

SEQ ID NO: 75622 - RNA, 22 nt, Artificial Sequence
  LRRK2 RNA guide
uccauagaccugauauauuucc

SEQ ID NO: 75623 - RNA, 22 nt, Artificial Sequence
  LRRK2 RNA guide
ucccaugcccacuuuuuccagg

SEQ ID NO: 75624 - RNA, 22 nt, Artificial Sequence
  LRRK2 RNA guide
ugaaauuccauagaccugauau

SEQ ID NO: 75625 - RNA, 22 nt, Artificial Sequence
  LRRK2 RNA guide
ugauauauuuccaccuggaaaa

SEQ ID NO: 75626 - RNA, 22 nt, Artificial Sequence
  LRRK2 RNA guide
ugcccacuuuuuccagguggaa

SEQ ID NO: 75627 - RNA, 22 nt, Artificial Sequence
  LRRK2 RNA guide
uggaaauauaucaggucuaugg

SEQ ID NO: 75628 - RNA, 22 nt, Artificial Sequence
  LRRK2 RNA guide
uuccaccuggaaaaagugggca

SEQ ID NO: 75629 - RNA, 22 nt, Artificial Sequence
  LRRK2 RNA guide
uuccagguggaaauauaucagg

SEQ ID NO: 75630 - RNA, 22 nt, Artificial Sequence
  LRRK2 RNA guide
uuccauagaccugauauauuuc

SEQ ID NO: 75631 - RNA, 22 nt, Artificial Sequence
  LRRK2 RNA guide
uuuccaccuggaaaaagugggc

SEQ ID NO: 75632 - RNA, 22 nt, Artificial Sequence
  LRRK2 RNA guide
uuuccagguggaaauauaucag

SEQ ID NO: 75633 - RNA, 22 nt, Artificial Sequence
  LRRK2 RNA guide
uuuuccagguggaaauauauca

SEQ ID NO: 75634 - RNA, 22 nt, Artificial Sequence
  LRRK2 RNA guide
uuuuuccagguggaaauauauc

SEQ ID NO: 75635 - RNA, 20 nt, Artificial Sequence
  LRRK2 RNA guide
accugauauauucccaccug

SEQ ID NO: 75636 - RNA, 20 nt, Artificial Sequence
  LRRK2 RNA guide
acuuuuuccaggugggaaua

SEQ ID NO: 75637 - RNA, 20 nt, Artificial Sequence
  LRRK2 RNA guide
agaccugauauauucccacc

SEQ ID NO: 75638 - RNA, 20 nt, Artificial Sequence
  LRRK2 RNA guide
aggugggaauauaucagguc

SEQ ID NO: 75639 - RNA, 20 nt, Artificial Sequence
  LRRK2 RNA guide
auagaccugauauauuccca

SEQ ID NO: 75640 - RNA, 20 nt, Artificial Sequence
  LRRK2 RNA guide
auauauucccaccuggaaaa

SEQ ID NO: 75641 - RNA, 20 nt, Artificial Sequence
  LRRK2 RNA guide
auauucccaccuggaaaaag

SEQ ID NO: 75642 - RNA, 20 nt, Artificial Sequence
  LRRK2 RNA guide
auucccaccuggaaaaagug

SEQ ID NO: 75643 - RNA, 20 nt, Artificial Sequence
  LRRK2 RNA guide
cacuuuuuccaggugggaau

SEQ ID NO: 75644 - RNA, 20 nt, Artificial Sequence
  LRRK2 RNA guide
caggugggaauauaucaggu

SEQ ID NO: 75645 - RNA, 20 nt, Artificial Sequence
  LRRK2 RNA guide
cauagaccugauauauuccc

SEQ ID NO: 75646 - RNA, 20 nt, Artificial Sequence
  LRRK2 RNA guide
ccacuuuuuccaggugggaa

SEQ ID NO: 75647 - RNA, 20 nt, Artificial Sequence
  LRRK2 RNA guide
ccaggugggaauauaucagg

SEQ ID NO: 75648 - RNA, 20 nt, Artificial Sequence
  LRRK2 RNA guide
ccauagaccugauauauucc

SEQ ID NO: 75649 - RNA, 20 nt, Artificial Sequence
  LRRK2 RNA guide
cccacuuuuuccagguggga

SEQ ID NO: 75650 - RNA, 20 nt, Artificial Sequence
  LRRK2 RNA guide
ccugauauauucccaccugg

SEQ ID NO: 75651 - RNA, 20 nt, Artificial Sequence
  LRRK2 RNA guide
cugauauauucccaccugga

SEQ ID NO: 75652 - RNA, 20 nt, Artificial Sequence
  LRRK2 RNA guide
cuuuuuccaggugggaauau

SEQ ID NO: 75653 - RNA, 20 nt, Artificial Sequence
  LRRK2 RNA guide
gaccugauauauucccaccu

SEQ ID NO: 75654 - RNA, 20 nt, Artificial Sequence
  LRRK2 RNA guide
gauauauucccaccuggaaa

SEQ ID NO: 75655 - RNA, 20 nt, Artificial Sequence
  LRRK2 RNA guide
gcccacuuuuuccagguggg

SEQ ID NO: 75656 - RNA, 20 nt, Artificial Sequence
  LRRK2 RNA guide
ggaauauaucaggucuaugg

SEQ ID NO: 75657 - RNA, 20 nt, Artificial Sequence
  LRRK2 RNA guide
gggaauauaucaggucuaug

SEQ ID NO: 75658 - RNA, 20 nt, Artificial Sequence
  LRRK2 RNA guide
ggugggaauauaucaggucu

SEQ ID NO: 75659 - RNA, 20 nt, Artificial Sequence
  LRRK2 RNA guide
gugggaauauaucaggucua

SEQ ID NO: 75660 - RNA, 20 nt, Artificial Sequence
  LRRK2 RNA guide
uagaccugauauauucccac

SEQ ID NO: 75661 - RNA, 20 nt, Artificial Sequence
  LRRK2 RNA guide
uauauucccaccuggaaaaa

SEQ ID NO: 75662 - RNA, 20 nt, Artificial Sequence
  LRRK2 RNA guide
uauucccaccuggaaaaagu

SEQ ID NO: 75663 - RNA, 20 nt, Artificial Sequence
  LRRK2 RNA guide
uccaggugggaauauaucag

SEQ ID NO: 75664 - RNA, 20 nt, Artificial Sequence
  LRRK2 RNA guide
uccauagaccugauauauuc

SEQ ID NO: 75665 - RNA, 20 nt, Artificial Sequence
  LRRK2 RNA guide
ucccaccuggaaaaaguggg

SEQ ID NO: 75666 - RNA, 20 nt, Artificial Sequence
  LRRK2 RNA guide
ugauauauucccaccuggaa

SEQ ID NO: 75667 - RNA, 20 nt, Artificial Sequence
  LRRK2 RNA guide
ugggaauauaucaggucuau

SEQ ID NO: 75668 - RNA, 20 nt, Artificial Sequence
  LRRK2 RNA guide
uuccaggugggaauauauca

SEQ ID NO: 75669 - RNA, 20 nt, Artificial Sequence
  LRRK2 RNA guide
uucccaccuggaaaaagugg

SEQ ID NO: 75670 - RNA, 20 nt, Artificial Sequence
  LRRK2 RNA guide
uuuccaggugggaauauauc

SEQ ID NO: 75671 - RNA, 20 nt, Artificial Sequence
  LRRK2 RNA guide
uuuuccaggugggaauauau

SEQ ID NO: 75672 - RNA, 20 nt, Artificial Sequence
  LRRK2 RNA guide
uuuuuccaggugggaauaua

SEQ ID NO: 75673 - RNA, 21 nt, Artificial Sequence
  LRRK2 RNA guide
accugauauauucccaccugg

SEQ ID NO: 75674 - RNA, 21 nt, Artificial Sequence
  LRRK2 RNA guide
acuuuuuccaggugggaauau

SEQ ID NO: 75675 - RNA, 21 nt, Artificial Sequence
  LRRK2 RNA guide
agaccugauauauucccaccu

SEQ ID NO: 75676 - RNA, 21 nt, Artificial Sequence
  LRRK2 RNA guide
aggugggaauauaucaggucu

SEQ ID NO: 75677 - RNA, 21 nt, Artificial Sequence
  LRRK2 RNA guide
auagaccugauauauucccac

SEQ ID NO: 75678 - RNA, 21 nt, Artificial Sequence
  LRRK2 RNA guide
auauauucccaccuggaaaaa

SEQ ID NO: 75679 - RNA, 21 nt, Artificial Sequence
  LRRK2 RNA guide
auauucccaccuggaaaaagu

SEQ ID NO: 75680 - RNA, 21 nt, Artificial Sequence
  LRRK2 RNA guide
auucccaccuggaaaaagugg

SEQ ID NO: 75681 - RNA, 21 nt, Artificial Sequence
  LRRK2 RNA guide
cacuuuuuccaggugggaaua

SEQ ID NO: 75682 - RNA, 21 nt, Artificial Sequence
  LRRK2 RNA guide
caggugggaauauaucagguc

SEQ ID NO: 75683 - RNA, 21 nt, Artificial Sequence
  LRRK2 RNA guide
cauagaccugauauauuccca

SEQ ID NO: 75684 - RNA, 21 nt, Artificial Sequence
  LRRK2 RNA guide
ccacuuuuuccaggugggaau

SEQ ID NO: 75685 - RNA, 21 nt, Artificial Sequence
  LRRK2 RNA guide
ccaggugggaauauaucaggu

SEQ ID NO: 75686 - RNA, 21 nt, Artificial Sequence
  LRRK2 RNA guide
ccauagaccugauauauuccc

SEQ ID NO: 75687 - RNA, 21 nt, Artificial Sequence
  LRRK2 RNA guide
cccacuuuuuccaggugggaa

SEQ ID NO: 75688 - RNA, 21 nt, Artificial Sequence
  LRRK2 RNA guide
ccugauauauucccaccugga

SEQ ID NO: 75689 - RNA, 21 nt, Artificial Sequence
  LRRK2 RNA guide
cugauauauucccaccuggaa

SEQ ID NO: 75690 - RNA, 21 nt, Artificial Sequence
  LRRK2 RNA guide
cuuuuuccaggugggaauaua

SEQ ID NO: 75691 - RNA, 21 nt, Artificial Sequence
  LRRK2 RNA guide
gaccugauauauucccaccug

SEQ ID NO: 75692 - RNA, 21 nt, Artificial Sequence
  LRRK2 RNA guide
gauauauucccaccuggaaaa

SEQ ID NO: 75693 - RNA, 21 nt, Artificial Sequence
  LRRK2 RNA guide
gcccacuuuuuccagguggga

SEQ ID NO: 75694 - RNA, 21 nt, Artificial Sequence
  LRRK2 RNA guide
ggaauauaucaggucuaugga

SEQ ID NO: 75695 - RNA, 21 nt, Artificial Sequence
  LRRK2 RNA guide
gggaauauaucaggucuaugg

SEQ ID NO: 75696 - RNA, 21 nt, Artificial Sequence
  LRRK2 RNA guide
ggugggaauauaucaggucua

SEQ ID NO: 75697 - RNA, 21 nt, Artificial Sequence
  LRRK2 RNA guide
gugggaauauaucaggucuau

SEQ ID NO: 75698 - RNA, 21 nt, Artificial Sequence
  LRRK2 RNA guide
uagaccugauauauucccacc

SEQ ID NO: 75699 - RNA, 21 nt, Artificial Sequence
  LRRK2 RNA guide
uauauucccaccuggaaaaag

SEQ ID NO: 75700 - RNA, 21 nt, Artificial Sequence
  LRRK2 RNA guide
uauucccaccuggaaaaagug

SEQ ID NO: 75701 - RNA, 21 nt, Artificial Sequence
  LRRK2 RNA guide
uccaggugggaauauaucagg

SEQ ID NO: 75702 - RNA, 21 nt, Artificial Sequence
  LRRK2 RNA guide
uccauagaccugauauauucc

SEQ ID NO: 75703 - RNA, 21 nt, Artificial Sequence
  LRRK2 RNA guide
ucccaccuggaaaaagugggc

SEQ ID NO: 75704 - RNA, 21 nt, Artificial Sequence
  LRRK2 RNA guide
ugauauauucccaccuggaaa

SEQ ID NO: 75705 - RNA, 21 nt, Artificial Sequence
  LRRK2 RNA guide
ugcccacuuuuuccagguggg

SEQ ID NO: 75706 - RNA, 21 nt, Artificial Sequence
  LRRK2 RNA guide
ugggaauauaucaggucuaug

SEQ ID NO: 75707 - RNA, 21 nt, Artificial Sequence
  LRRK2 RNA guide
uuccaggugggaauauaucag

SEQ ID NO: 75708 - RNA, 21 nt, Artificial Sequence
  LRRK2 RNA guide
uuccauagaccugauauauuc

SEQ ID NO: 75709 - RNA, 21 nt, Artificial Sequence
  LRRK2 RNA guide
uucccaccuggaaaaaguggg

SEQ ID NO: 75710 - RNA, 21 nt, Artificial Sequence
  LRRK2 RNA guide
uuuccaggugggaauauauca

SEQ ID NO: 75711 - RNA, 21 nt, Artificial Sequence
  LRRK2 RNA guide
uuuuccaggugggaauauauc

SEQ ID NO: 75712 - RNA, 21 nt, Artificial Sequence
  LRRK2 RNA guide
uuuuuccaggugggaauauau

SEQ ID NO: 75713 - RNA, 22 nt, Artificial Sequence
  LRRK2 RNA guide
accugauauauucccaccugga

SEQ ID NO: 75714 - RNA, 22 nt, Artificial Sequence
  LRRK2 RNA guide
acuuuuuccaggugggaauaua

SEQ ID NO: 75715 - RNA, 22 nt, Artificial Sequence
  LRRK2 RNA guide
agaccugauauauucccaccug

SEQ ID NO: 75716 - RNA, 22 nt, Artificial Sequence
  LRRK2 RNA guide
aggugggaauauaucaggucua

SEQ ID NO: 75717 - RNA, 22 nt, Artificial Sequence
  LRRK2 RNA guide
auagaccugauauauucccacc

SEQ ID NO: 75718 - RNA, 22 nt, Artificial Sequence
  LRRK2 RNA guide
auauauucccaccuggaaaaag

SEQ ID NO: 75719 - RNA, 22 nt, Artificial Sequence
  LRRK2 RNA guide
auauucccaccuggaaaaagug

SEQ ID NO: 75720 - RNA, 22 nt, Artificial Sequence
  LRRK2 RNA guide
augcccacuuuuuccagguggg

SEQ ID NO: 75721 - RNA, 22 nt, Artificial Sequence
  LRRK2 RNA guide
auuccauagaccugauauauuc

SEQ ID NO: 75722 - RNA, 22 nt, Artificial Sequence
  LRRK2 RNA guide
auucccaccuggaaaaaguggg

SEQ ID NO: 75723 - RNA, 22 nt, Artificial Sequence
  LRRK2 RNA guide
cacuuuuuccaggugggaauau

SEQ ID NO: 75724 - RNA, 22 nt, Artificial Sequence
  LRRK2 RNA guide
caggugggaauauaucaggucu

SEQ ID NO: 75725 - RNA, 22 nt, Artificial Sequence
  LRRK2 RNA guide
cauagaccugauauauucccac

SEQ ID NO: 75726 - RNA, 22 nt, Artificial Sequence
  LRRK2 RNA guide
ccacuuuuuccaggugggaaua

SEQ ID NO: 75727 - RNA, 22 nt, Artificial Sequence
  LRRK2 RNA guide
ccaggugggaauauaucagguc

SEQ ID NO: 75728 - RNA, 22 nt, Artificial Sequence
  LRRK2 RNA guide
ccauagaccugauauauuccca

SEQ ID NO: 75729 - RNA, 22 nt, Artificial Sequence
  LRRK2 RNA guide
cccacuuuuuccaggugggaau

SEQ ID NO: 75730 - RNA, 22 nt, Artificial Sequence
  LRRK2 RNA guide
ccugauauauucccaccuggaa

SEQ ID NO: 75731 - RNA, 22 nt, Artificial Sequence
  LRRK2 RNA guide
cugauauauucccaccuggaaa

SEQ ID NO: 75732 - RNA, 22 nt, Artificial Sequence
  LRRK2 RNA guide
cuuuuuccaggugggaauauau

SEQ ID NO: 75733 - RNA, 22 nt, Artificial Sequence
  LRRK2 RNA guide
gaccugauauauucccaccugg

SEQ ID NO: 75734 - RNA, 22 nt, Artificial Sequence
  LRRK2 RNA guide
gauauauucccaccuggaaaaa

SEQ ID NO: 75735 - RNA, 22 nt, Artificial Sequence
  LRRK2 RNA guide
gcccacuuuuuccaggugggaa

SEQ ID NO: 75736 - RNA, 22 nt, Artificial Sequence
  LRRK2 RNA guide
ggaauauaucaggucuauggaa

SEQ ID NO: 75737 - RNA, 22 nt, Artificial Sequence
  LRRK2 RNA guide
gggaauauaucaggucuaugga

SEQ ID NO: 75738 - RNA, 22 nt, Artificial Sequence
  LRRK2 RNA guide
ggugggaauauaucaggucuau

SEQ ID NO: 75739 - RNA, 22 nt, Artificial Sequence
  LRRK2 RNA guide
gugggaauauaucaggucuaug

SEQ ID NO: 75740 - RNA, 22 nt, Artificial Sequence
  LRRK2 RNA guide
uagaccugauauauucccaccu

SEQ ID NO: 75741 - RNA, 22 nt, Artificial Sequence
  LRRK2 RNA guide
uauauucccaccuggaaaaagu

SEQ ID NO: 75742 - RNA, 22 nt, Artificial Sequence
  LRRK2 RNA guide
uauucccaccuggaaaaagugg

SEQ ID NO: 75743 - RNA, 22 nt, Artificial Sequence
  LRRK2 RNA guide
uccaggugggaauauaucaggu

SEQ ID NO: 75744 - RNA, 22 nt, Artificial Sequence
  LRRK2 RNA guide
uccauagaccugauauauuccc

SEQ ID NO: 75745 - RNA, 22 nt, Artificial Sequence
  LRRK2 RNA guide
ucccaccuggaaaaagugggca

SEQ ID NO: 75746 - RNA, 22 nt, Artificial Sequence
  LRRK2 RNA guide
ugauauauucccaccuggaaaa

SEQ ID NO: 75747 - RNA, 22 nt, Artificial Sequence
  LRRK2 RNA guide
ugcccacuuuuuccagguggga

SEQ ID NO: 75748 - RNA, 22 nt, Artificial Sequence
  LRRK2 RNA guide
ugggaauauaucaggucuaugg

SEQ ID NO: 75749 - RNA, 22 nt, Artificial Sequence
  LRRK2 RNA guide
uuccaggugggaauauaucagg

SEQ ID NO: 75750 - RNA, 22 nt, Artificial Sequence
  LRRK2 RNA guide
uuccauagaccugauauauucc

SEQ ID NO: 75751 - RNA, 22 nt, Artificial Sequence
  LRRK2 RNA guide
uucccaccuggaaaaagugggc

SEQ ID NO: 75752 - RNA, 22 nt, Artificial Sequence
  LRRK2 RNA guide
uuuccaggugggaauauaucag

SEQ ID NO: 75753 - RNA, 22 nt, Artificial Sequence
  LRRK2 RNA guide
uuuuccaggugggaauauauca

SEQ ID NO: 75754 - RNA, 22 nt, Artificial Sequence
  LRRK2 RNA guide
uuuuuccaggugggaauauauc

SEQ ID NO: 75755 - RNA, 20 nt, Artificial Sequence
  LRRK2 RNA guide
aaaaaugagcagaucuuuca

SEQ ID NO: 75756 - RNA, 20 nt, Artificial Sequence
  LRRK2 RNA guide
aaaaugagcagaucuuucaa

SEQ ID NO: 75757 - RNA, 20 nt, Artificial Sequence
  LRRK2 RNA guide
aaaugagcagaucuuucaag

SEQ ID NO: 75758 - RNA, 20 nt, Artificial Sequence
  LRRK2 RNA guide
aaugagcagaucuuucaaga

SEQ ID NO: 75759 - RNA, 20 nt, Artificial Sequence
  LRRK2 RNA guide
acaaaaaugagcagaucuuu

SEQ ID NO: 75760 - RNA, 20 nt, Artificial Sequence
  LRRK2 RNA guide
acagugauuuucucuugaaa

SEQ ID NO: 75761 - RNA, 20 nt, Artificial Sequence
  LRRK2 RNA guide
agaucuuucaagagaaaauc

SEQ ID NO: 75762 - RNA, 20 nt, Artificial Sequence
  LRRK2 RNA guide
agcagaucuuucaagagaaa

SEQ ID NO: 75763 - RNA, 20 nt, Artificial Sequence
  LRRK2 RNA guide
agugauuuucucuugaaaga

SEQ ID NO: 75764 - RNA, 20 nt, Artificial Sequence
  LRRK2 RNA guide
aucuuucaagagaaaaucac

SEQ ID NO: 75765 - RNA, 20 nt, Artificial Sequence
  LRRK2 RNA guide
augacaaaaaugagcagauc

SEQ ID NO: 75766 - RNA, 20 nt, Artificial Sequence
  LRRK2 RNA guide
augagcagaucuuucaagag

SEQ ID NO: 75767 - RNA, 20 nt, Artificial Sequence
  LRRK2 RNA guide
augggacagugauuuucucu

SEQ ID NO: 75768 - RNA, 20 nt, Artificial Sequence
  LRRK2 RNA guide
auuuucucuugaaagaucug

SEQ ID NO: 75769 - RNA, 20 nt, Artificial Sequence
  LRRK2 RNA guide
caaaaaugagcagaucuuuc

SEQ ID NO: 75770 - RNA, 20 nt, Artificial Sequence
  LRRK2 RNA guide
caagagaaaaucacuguccc

SEQ ID NO: 75771 - RNA, 20 nt, Artificial Sequence
  LRRK2 RNA guide
cagaucuuucaagagaaaau

SEQ ID NO: 75772 - RNA, 20 nt, Artificial Sequence
  LRRK2 RNA guide
cagugauuuucucuugaaag

SEQ ID NO: 75773 - RNA, 20 nt, Artificial Sequence
  LRRK2 RNA guide
caugggacagugauuuucuc

SEQ ID NO: 75774 - RNA, 20 nt, Artificial Sequence
  LRRK2 RNA guide
cucuugaaagaucugcucau

SEQ ID NO: 75775 - RNA, 20 nt, Artificial Sequence
  LRRK2 RNA guide
cuugaaagaucugcucauuu

SEQ ID NO: 75776 - RNA, 20 nt, Artificial Sequence
  LRRK2 RNA guide
cuuucaagagaaaaucacug

SEQ ID NO: 75777 - RNA, 20 nt, Artificial Sequence
  LRRK2 RNA guide
gacaaaaaugagcagaucuu

SEQ ID NO: 75778 - RNA, 20 nt, Artificial Sequence
  LRRK2 RNA guide
gacagugauuuucucuugaa

SEQ ID NO: 75779 - RNA, 20 nt, Artificial Sequence
  LRRK2 RNA guide
gagcagaucuuucaagagaa

SEQ ID NO: 75780 - RNA, 20 nt, Artificial Sequence
  LRRK2 RNA guide
gaucuuucaagagaaaauca

SEQ ID NO: 75781 - RNA, 20 nt, Artificial Sequence
  LRRK2 RNA guide
gauuuucucuugaaagaucu

SEQ ID NO: 75782 - RNA, 20 nt, Artificial Sequence
  LRRK2 RNA guide
gcagaucuuucaagagaaaa

SEQ ID NO: 75783 - RNA, 20 nt, Artificial Sequence
  LRRK2 RNA guide
gcaugggacagugauuuucu

SEQ ID NO: 75784 - RNA, 20 nt, Artificial Sequence
  LRRK2 RNA guide
ggacagugauuuucucuuga

SEQ ID NO: 75785 - RNA, 20 nt, Artificial Sequence
  LRRK2 RNA guide
ggcaugggacagugauuuuc

SEQ ID NO: 75786 - RNA, 20 nt, Artificial Sequence
  LRRK2 RNA guide
gggacagugauuuucucuug

SEQ ID NO: 75787 - RNA, 20 nt, Artificial Sequence
  LRRK2 RNA guide
gggcaugggacagugauuuu

SEQ ID NO: 75788 - RNA, 20 nt, Artificial Sequence
  LRRK2 RNA guide
gugauuuucucuugaaagau

SEQ ID NO: 75789 - RNA, 20 nt, Artificial Sequence
  LRRK2 RNA guide
ucaagagaaaaucacugucc

SEQ ID NO: 75790 - RNA, 20 nt, Artificial Sequence
  LRRK2 RNA guide
ucucuugaaagaucugcuca

SEQ ID NO: 75791 - RNA, 20 nt, Artificial Sequence
  LRRK2 RNA guide
ucuugaaagaucugcucauu

SEQ ID NO: 75792 - RNA, 20 nt, Artificial Sequence
  LRRK2 RNA guide
ucuuucaagagaaaaucacu

SEQ ID NO: 75793 - RNA, 20 nt, Artificial Sequence
  LRRK2 RNA guide
ugacaaaaaugagcagaucu

SEQ ID NO: 75794 - RNA, 20 nt, Artificial Sequence
  LRRK2 RNA guide
ugagcagaucuuucaagaga

SEQ ID NO: 75795 - RNA, 20 nt, Artificial Sequence
  LRRK2 RNA guide
ugauuuucucuugaaagauc

SEQ ID NO: 75796 - RNA, 20 nt, Artificial Sequence
  LRRK2 RNA guide
ugggacagugauuuucucuu

SEQ ID NO: 75797 - RNA, 20 nt, Artificial Sequence
  LRRK2 RNA guide
uucaagagaaaaucacuguc

SEQ ID NO: 75798 - RNA, 20 nt, Artificial Sequence
  LRRK2 RNA guide
uucucuugaaagaucugcuc

SEQ ID NO: 75799 - RNA, 20 nt, Artificial Sequence
  LRRK2 RNA guide
uugaaagaucugcucauuuu

SEQ ID NO: 75800 - RNA, 20 nt, Artificial Sequence
  LRRK2 RNA guide
uuucaagagaaaaucacugu

SEQ ID NO: 75801 - RNA, 20 nt, Artificial Sequence
  LRRK2 RNA guide
uuucucuugaaagaucugcu

SEQ ID NO: 75802 - RNA, 20 nt, Artificial Sequence
  LRRK2 RNA guide
uuuucucuugaaagaucugc

SEQ ID NO: 75803 - RNA, 21 nt, Artificial Sequence
  LRRK2 RNA guide
aaaaugagcagaucuuucaag

SEQ ID NO: 75804 - RNA, 21 nt, Artificial Sequence
  LRRK2 RNA guide
aaaugagcagaucuuucaaga

SEQ ID NO: 75805 - RNA, 21 nt, Artificial Sequence
  LRRK2 RNA guide
aaugagcagaucuuucaagag

SEQ ID NO: 75806 - RNA, 21 nt, Artificial Sequence
  LRRK2 RNA guide
acaaaaaugagcagaucuuuc

SEQ ID NO: 75807 - RNA, 21 nt, Artificial Sequence
  LRRK2 RNA guide
acagugauuuucucuugaaag

SEQ ID NO: 75808 - RNA, 21 nt, Artificial Sequence
  LRRK2 RNA guide
agcagaucuuucaagagaaaa

SEQ ID NO: 75809 - RNA, 21 nt, Artificial Sequence
  LRRK2 RNA guide
augacaaaaaugagcagaucu

SEQ ID NO: 75810 - RNA, 21 nt, Artificial Sequence
  LRRK2 RNA guide
augagcagaucuuucaagaga

SEQ ID NO: 75811 - RNA, 21 nt, Artificial Sequence
  LRRK2 RNA guide
augggacagugauuuucucuu

SEQ ID NO: 75812 - RNA, 21 nt, Artificial Sequence
  LRRK2 RNA guide
auuuucucuugaaagaucugc

SEQ ID NO: 75813 - RNA, 21 nt, Artificial Sequence
  LRRK2 RNA guide
caaaaaugagcagaucuuuca

SEQ ID NO: 75814 - RNA, 21 nt, Artificial Sequence
  LRRK2 RNA guide
caagagaaaaucacuguccca

SEQ ID NO: 75815 - RNA, 21 nt, Artificial Sequence
  LRRK2 RNA guide
cagaucuuucaagagaaaauc

SEQ ID NO: 75816 - RNA, 21 nt, Artificial Sequence
  LRRK2 RNA guide
cagugauuuucucuugaaaga

SEQ ID NO: 75817 - RNA, 21 nt, Artificial Sequence
  LRRK2 RNA guide
caugacaaaaaugagcagauc

SEQ ID NO: 75818 - RNA, 21 nt, Artificial Sequence
  LRRK2 RNA guide
caugggacagugauuuucucu

SEQ ID NO: 75819 - RNA, 21 nt, Artificial Sequence
  LRRK2 RNA guide
cucuugaaagaucugcucauu

SEQ ID NO: 75820 - RNA, 21 nt, Artificial Sequence
  LRRK2 RNA guide
cuugaaagaucugcucauuuu

SEQ ID NO: 75821 - RNA, 21 nt, Artificial Sequence
  LRRK2 RNA guide
cuuucaagagaaaaucacugu

SEQ ID NO: 75822 - RNA, 21 nt, Artificial Sequence
  LRRK2 RNA guide
gacaaaaaugagcagaucuuu

SEQ ID NO: 75823 - RNA, 21 nt, Artificial Sequence
  LRRK2 RNA guide
gacagugauuuucucuugaaa

SEQ ID NO: 75824 - RNA, 21 nt, Artificial Sequence
  LRRK2 RNA guide
gagcagaucuuucaagagaaa

SEQ ID NO: 75825 - RNA, 21 nt, Artificial Sequence
  LRRK2 RNA guide
gaucuuucaagagaaaaucac

SEQ ID NO: 75826 - RNA, 21 nt, Artificial Sequence
  LRRK2 RNA guide
gauuuucucuugaaagaucug

SEQ ID NO: 75827 - RNA, 21 nt, Artificial Sequence
  LRRK2 RNA guide
gcagaucuuucaagagaaaau

SEQ ID NO: 75828 - RNA, 21 nt, Artificial Sequence
  LRRK2 RNA guide
gcaugggacagugauuuucuc

SEQ ID NO: 75829 - RNA, 21 nt, Artificial Sequence
  LRRK2 RNA guide
ggacagugauuuucucuugaa

SEQ ID NO: 75830 - RNA, 21 nt, Artificial Sequence
  LRRK2 RNA guide
ggcaugggacagugauuuucu

SEQ ID NO: 75831 - RNA, 21 nt, Artificial Sequence
  LRRK2 RNA guide
gggacagugauuuucucuuga

SEQ ID NO: 75832 - RNA, 21 nt, Artificial Sequence
  LRRK2 RNA guide
gggcaugggacagugauuuuc

SEQ ID NO: 75833 - RNA, 21 nt, Artificial Sequence
  LRRK2 RNA guide
gugauuuucucuugaaagauc

SEQ ID NO: 75834 - RNA, 21 nt, Artificial Sequence
  LRRK2 RNA guide
ucaagagaaaaucacuguccc

SEQ ID NO: 75835 - RNA, 21 nt, Artificial Sequence
  LRRK2 RNA guide
ucucuugaaagaucugcucau

SEQ ID NO: 75836 - RNA, 21 nt, Artificial Sequence
  LRRK2 RNA guide
ucuugaaagaucugcucauuu

SEQ ID NO: 75837 - RNA, 21 nt, Artificial Sequence
  LRRK2 RNA guide
ucuuucaagagaaaaucacug

SEQ ID NO: 75838 - RNA, 21 nt, Artificial Sequence
  LRRK2 RNA guide
ugacaaaaaugagcagaucuu

SEQ ID NO: 75839 - RNA, 21 nt, Artificial Sequence
  LRRK2 RNA guide
ugagcagaucuuucaagagaa

SEQ ID NO: 75840 - RNA, 21 nt, Artificial Sequence
  LRRK2 RNA guide
ugggacagugauuuucucuug

SEQ ID NO: 75841 - RNA, 21 nt, Artificial Sequence
  LRRK2 RNA guide
ugggcaugggacagugauuuu

SEQ ID NO: 75842 - RNA, 21 nt, Artificial Sequence
  LRRK2 RNA guide
uucaagagaaaaucacugucc

SEQ ID NO: 75843 - RNA, 21 nt, Artificial Sequence
  LRRK2 RNA guide
uucucuugaaagaucugcuca

SEQ ID NO: 75844 - RNA, 21 nt, Artificial Sequence
  LRRK2 RNA guide
uuucaagagaaaaucacuguc

SEQ ID NO: 75845 - RNA, 21 nt, Artificial Sequence
  LRRK2 RNA guide
uuucucuugaaagaucugcuc

SEQ ID NO: 75846 - RNA, 21 nt, Artificial Sequence
  LRRK2 RNA guide
uuuucucuugaaagaucugcu

SEQ ID NO: 75847 - RNA, 22 nt, Artificial Sequence
  LRRK2 RNA guide
aaaaaugagcagaucuuucaag

SEQ ID NO: 75848 - RNA, 22 nt, Artificial Sequence
  LRRK2 RNA guide
aaaaugagcagaucuuucaaga

SEQ ID NO: 75849 - RNA, 22 nt, Artificial Sequence
  LRRK2 RNA guide
aaaugagcagaucuuucaagag

SEQ ID NO: 75850 - RNA, 22 nt, Artificial Sequence
  LRRK2 RNA guide
aaugagcagaucuuucaagaga

SEQ ID NO: 75851 - RNA, 22 nt, Artificial Sequence
  LRRK2 RNA guide
acaaaaaugagcagaucuuuca

SEQ ID NO: 75852 - RNA, 22 nt, Artificial Sequence
  LRRK2 RNA guide
acagugauuuucucuugaaaga

SEQ ID NO: 75853 - RNA, 22 nt, Artificial Sequence
  LRRK2 RNA guide
agaucuuucaagagaaaaucac

SEQ ID NO: 75854 - RNA, 22 nt, Artificial Sequence
  LRRK2 RNA guide
agcagaucuuucaagagaaaau

SEQ ID NO: 75855 - RNA, 22 nt, Artificial Sequence
  LRRK2 RNA guide
agugauuuucucuugaaagauc

SEQ ID NO: 75856 - RNA, 22 nt, Artificial Sequence
  LRRK2 RNA guide
aucuuucaagagaaaaucacug

SEQ ID NO: 75857 - RNA, 22 nt, Artificial Sequence
  LRRK2 RNA guide
augacaaaaaugagcagaucuu

SEQ ID NO: 75858 - RNA, 22 nt, Artificial Sequence
  LRRK2 RNA guide
augagcagaucuuucaagagaa

SEQ ID NO: 75859 - RNA, 22 nt, Artificial Sequence
  LRRK2 RNA guide
augggacagugauuuucucuug

SEQ ID NO: 75860 - RNA, 22 nt, Artificial Sequence
  LRRK2 RNA guide
auuuucucuugaaagaucugcu

SEQ ID NO: 75861 - RNA, 22 nt, Artificial Sequence
  LRRK2 RNA guide
caaaaaugagcagaucuuucaa

SEQ ID NO: 75862 - RNA, 22 nt, Artificial Sequence
  LRRK2 RNA guide
caagagaaaaucacugucccau

SEQ ID NO: 75863 - RNA, 22 nt, Artificial Sequence
  LRRK2 RNA guide
cagaucuuucaagagaaaauca

SEQ ID NO: 75864 - RNA, 22 nt, Artificial Sequence
  LRRK2 RNA guide
cagugauuuucucuugaaagau

SEQ ID NO: 75865 - RNA, 22 nt, Artificial Sequence
  LRRK2 RNA guide
caugacaaaaaugagcagaucu

SEQ ID NO: 75866 - RNA, 22 nt, Artificial Sequence
  LRRK2 RNA guide
caugggacagugauuuucucuu

SEQ ID NO: 75867 - RNA, 22 nt, Artificial Sequence
  LRRK2 RNA guide
ccaugacaaaaaugagcagauc

SEQ ID NO: 75868 - RNA, 22 nt, Artificial Sequence
  LRRK2 RNA guide
cucuugaaagaucugcucauuu

SEQ ID NO: 75869 - RNA, 22 nt, Artificial Sequence
  LRRK2 RNA guide
cuugaaagaucugcucauuuuu

SEQ ID NO: 75870 - RNA, 22 nt, Artificial Sequence
  LRRK2 RNA guide
cuuucaagagaaaaucacuguc

SEQ ID NO: 75871 - RNA, 22 nt, Artificial Sequence
  LRRK2 RNA guide
gacaaaaaugagcagaucuuuc

SEQ ID NO: 75872 - RNA, 22 nt, Artificial Sequence
  LRRK2 RNA guide
gacagugauuuucucuugaaag

SEQ ID NO: 75873 - RNA, 22 nt, Artificial Sequence
  LRRK2 RNA guide
gagcagaucuuucaagagaaaa

SEQ ID NO: 75874 - RNA, 22 nt, Artificial Sequence
  LRRK2 RNA guide
gaucuuucaagagaaaaucacu

SEQ ID NO: 75875 - RNA, 22 nt, Artificial Sequence
  LRRK2 RNA guide
gauuuucucuugaaagaucugc

SEQ ID NO: 75876 - RNA, 22 nt, Artificial Sequence
  LRRK2 RNA guide
gcagaucuuucaagagaaaauc

SEQ ID NO: 75877 - RNA, 22 nt, Artificial Sequence
  LRRK2 RNA guide
gcaugggacagugauuuucucu

SEQ ID NO: 75878 - RNA, 22 nt, Artificial Sequence
  LRRK2 RNA guide
ggacagugauuuucucuugaaa

SEQ ID NO: 75879 - RNA, 22 nt, Artificial Sequence
  LRRK2 RNA guide
ggcaugggacagugauuuucuc

SEQ ID NO: 75880 - RNA, 22 nt, Artificial Sequence
  LRRK2 RNA guide
gggacagugauuuucucuugaa

SEQ ID NO: 75881 - RNA, 22 nt, Artificial Sequence
  LRRK2 RNA guide
gggcaugggacagugauuuucu

SEQ ID NO: 75882 - RNA, 22 nt, Artificial Sequence
  LRRK2 RNA guide
gugauuuucucuugaaagaucu

SEQ ID NO: 75883 - RNA, 22 nt, Artificial Sequence
  LRRK2 RNA guide
gugggcaugggacagugauuuu

SEQ ID NO: 75884 - RNA, 22 nt, Artificial Sequence
  LRRK2 RNA guide
ucaagagaaaaucacuguccca

SEQ ID NO: 75885 - RNA, 22 nt, Artificial Sequence
  LRRK2 RNA guide
ucucuugaaagaucugcucauu

SEQ ID NO: 75886 - RNA, 22 nt, Artificial Sequence
  LRRK2 RNA guide
ucuugaaagaucugcucauuuu

SEQ ID NO: 75887 - RNA, 22 nt, Artificial Sequence
  LRRK2 RNA guide
ucuuucaagagaaaaucacugu

SEQ ID NO: 75888 - RNA, 22 nt, Artificial Sequence
  LRRK2 RNA guide
ugacaaaaaugagcagaucuuu

SEQ ID NO: 75889 - RNA, 22 nt, Artificial Sequence
  LRRK2 RNA guide
ugagcagaucuuucaagagaaa

SEQ ID NO: 75890 - RNA, 22 nt, Artificial Sequence
  LRRK2 RNA guide
ugauuuucucuugaaagaucug

SEQ ID NO: 75891 - RNA, 22 nt, Artificial Sequence
  LRRK2 RNA guide
ugggacagugauuuucucuuga

SEQ ID NO: 75892 - RNA, 22 nt, Artificial Sequence
  LRRK2 RNA guide
ugggcaugggacagugauuuuc

SEQ ID NO: 75893 - RNA, 22 nt, Artificial Sequence
  LRRK2 RNA guide
uucaagagaaaaucacuguccc

SEQ ID NO: 75894 - RNA, 22 nt, Artificial Sequence
  LRRK2 RNA guide
uucucuugaaagaucugcucau

SEQ ID NO: 75895 - RNA, 22 nt, Artificial Sequence
  LRRK2 RNA guide
uugaaagaucugcucauuuuug

SEQ ID NO: 75896 - RNA, 22 nt, Artificial Sequence
  LRRK2 RNA guide
uuucaagagaaaaucacugucc

SEQ ID NO: 75897 - RNA, 22 nt, Artificial Sequence
  LRRK2 RNA guide
uuucucuugaaagaucugcuca

SEQ ID NO: 75898 - RNA, 22 nt, Artificial Sequence
  LRRK2 RNA guide
uuuucucuugaaagaucugcuc

SEQ ID NO: 75899 - RNA, 20 nt, Artificial Sequence
  LRRK2 RNA guide
aaaaaugagcagaucuuucc

SEQ ID NO: 75900 - RNA, 20 nt, Artificial Sequence
  LRRK2 RNA guide
aaaaugagcagaucuuucca

SEQ ID NO: 75901 - RNA, 20 nt, Artificial Sequence
  LRRK2 RNA guide
aaaugagcagaucuuuccag

SEQ ID NO: 75902 - RNA, 20 nt, Artificial Sequence
  LRRK2 RNA guide
aaugagcagaucuuuccaga

SEQ ID NO: 75903 - RNA, 20 nt, Artificial Sequence
  LRRK2 RNA guide
acagugauuuucucuggaaa

SEQ ID NO: 75904 - RNA, 20 nt, Artificial Sequence
  LRRK2 RNA guide
agaucuuuccagagaaaauc

SEQ ID NO: 75905 - RNA, 20 nt, Artificial Sequence
  LRRK2 RNA guide
agcagaucuuuccagagaaa

SEQ ID NO: 75906 - RNA, 20 nt, Artificial Sequence
  LRRK2 RNA guide
agugauuuucucuggaaaga

SEQ ID NO: 75907 - RNA, 20 nt, Artificial Sequence
  LRRK2 RNA guide
aucuuuccagagaaaaucac

SEQ ID NO: 75908 - RNA, 20 nt, Artificial Sequence
  LRRK2 RNA guide
augagcagaucuuuccagag

SEQ ID NO: 75909 - RNA, 20 nt, Artificial Sequence
  LRRK2 RNA guide
auuuucucuggaaagaucug

SEQ ID NO: 75910 - RNA, 20 nt, Artificial Sequence
  LRRK2 RNA guide
cagaucuuuccagagaaaau

SEQ ID NO: 75911 - RNA, 20 nt, Artificial Sequence
  LRRK2 RNA guide
cagugauuuucucuggaaag

SEQ ID NO: 75912 - RNA, 20 nt, Artificial Sequence
  LRRK2 RNA guide
ccagagaaaaucacuguccc

SEQ ID NO: 75913 - RNA, 20 nt, Artificial Sequence
  LRRK2 RNA guide
cucuggaaagaucugcucau

SEQ ID NO: 75914 - RNA, 20 nt, Artificial Sequence
  LRRK2 RNA guide
cuggaaagaucugcucauuu

SEQ ID NO: 75915 - RNA, 20 nt, Artificial Sequence
  LRRK2 RNA guide
cuuuccagagaaaaucacug

SEQ ID NO: 75916 - RNA, 20 nt, Artificial Sequence
  LRRK2 RNA guide
gacagugauuuucucuggaa

SEQ ID NO: 75917 - RNA, 20 nt, Artificial Sequence
  LRRK2 RNA guide
gagcagaucuuuccagagaa

SEQ ID NO: 75918 - RNA, 20 nt, Artificial Sequence
  LRRK2 RNA guide
gaucuuuccagagaaaauca

SEQ ID NO: 75919 - RNA, 20 nt, Artificial Sequence
  LRRK2 RNA guide
gauuuucucuggaaagaucu

SEQ ID NO: 75920 - RNA, 20 nt, Artificial Sequence
  LRRK2 RNA guide
gcagaucuuuccagagaaaa

SEQ ID NO: 75921 - RNA, 20 nt, Artificial Sequence
  LRRK2 RNA guide
ggacagugauuuucucugga

SEQ ID NO: 75922 - RNA, 20 nt, Artificial Sequence
  LRRK2 RNA guide
gggacagugauuuucucugg

SEQ ID NO: 75923 - RNA, 20 nt, Artificial Sequence
  LRRK2 RNA guide
gugauuuucucuggaaagau

SEQ ID NO: 75924 - RNA, 20 nt, Artificial Sequence
  LRRK2 RNA guide
uccagagaaaaucacugucc

SEQ ID NO: 75925 - RNA, 20 nt, Artificial Sequence
  LRRK2 RNA guide
ucucuggaaagaucugcuca

SEQ ID NO: 75926 - RNA, 20 nt, Artificial Sequence
  LRRK2 RNA guide
ucuggaaagaucugcucauu

SEQ ID NO: 75927 - RNA, 20 nt, Artificial Sequence
  LRRK2 RNA guide
ucuuuccagagaaaaucacu

SEQ ID NO: 75928 - RNA, 20 nt, Artificial Sequence
  LRRK2 RNA guide
ugagcagaucuuuccagaga

SEQ ID NO: 75929 - RNA, 20 nt, Artificial Sequence
  LRRK2 RNA guide
ugauuuucucuggaaagauc

SEQ ID NO: 75930 - RNA, 20 nt, Artificial Sequence
  LRRK2 RNA guide
uggaaagaucugcucauuuu

SEQ ID NO: 75931 - RNA, 20 nt, Artificial Sequence
  LRRK2 RNA guide
ugggacagugauuuucucug

SEQ ID NO: 75932 - RNA, 20 nt, Artificial Sequence
  LRRK2 RNA guide
uuccagagaaaaucacuguc

SEQ ID NO: 75933 - RNA, 20 nt, Artificial Sequence
  LRRK2 RNA guide
uucucuggaaagaucugcuc

SEQ ID NO: 75934 - RNA, 20 nt, Artificial Sequence
  LRRK2 RNA guide
uuuccagagaaaaucacugu

SEQ ID NO: 75935 - RNA, 20 nt, Artificial Sequence
  LRRK2 RNA guide
uuucucuggaaagaucugcu

SEQ ID NO: 75936 - RNA, 20 nt, Artificial Sequence
  LRRK2 RNA guide
uuuucucuggaaagaucugc

SEQ ID NO: 75937 - RNA, 21 nt, Artificial Sequence
  LRRK2 RNA guide
aaaaaugagcagaucuuucca

SEQ ID NO: 75938 - RNA, 21 nt, Artificial Sequence
  LRRK2 RNA guide
aaaaugagcagaucuuuccag

SEQ ID NO: 75939 - RNA, 21 nt, Artificial Sequence
  LRRK2 RNA guide
aaaugagcagaucuuuccaga

SEQ ID NO: 75940 - RNA, 21 nt, Artificial Sequence
  LRRK2 RNA guide
aaugagcagaucuuuccagag

SEQ ID NO: 75941 - RNA, 21 nt, Artificial Sequence
  LRRK2 RNA guide
acagugauuuucucuggaaag

SEQ ID NO: 75942 - RNA, 21 nt, Artificial Sequence
  LRRK2 RNA guide
agaucuuuccagagaaaauca

SEQ ID NO: 75943 - RNA, 21 nt, Artificial Sequence
  LRRK2 RNA guide
agcagaucuuuccagagaaaa

SEQ ID NO: 75944 - RNA, 21 nt, Artificial Sequence
  LRRK2 RNA guide
agugauuuucucuggaaagau

SEQ ID NO: 75945 - RNA, 21 nt, Artificial Sequence
  LRRK2 RNA guide
aucuuuccagagaaaaucacu

SEQ ID NO: 75946 - RNA, 21 nt, Artificial Sequence
  LRRK2 RNA guide
augagcagaucuuuccagaga

SEQ ID NO: 75947 - RNA, 21 nt, Artificial Sequence
  LRRK2 RNA guide
augggacagugauuuucucug

SEQ ID NO: 75948 - RNA, 21 nt, Artificial Sequence
  LRRK2 RNA guide
auuuucucuggaaagaucugc

SEQ ID NO: 75949 - RNA, 21 nt, Artificial Sequence
  LRRK2 RNA guide
caaaaaugagcagaucuuucc

SEQ ID NO: 75950 - RNA, 21 nt, Artificial Sequence
  LRRK2 RNA guide
cagaucuuuccagagaaaauc

SEQ ID NO: 75951 - RNA, 21 nt, Artificial Sequence
  LRRK2 RNA guide
cagugauuuucucuggaaaga

SEQ ID NO: 75952 - RNA, 21 nt, Artificial Sequence
  LRRK2 RNA guide
ccagagaaaaucacuguccca

SEQ ID NO: 75953 - RNA, 21 nt, Artificial Sequence
  LRRK2 RNA guide
cucuggaaagaucugcucauu

SEQ ID NO: 75954 - RNA, 21 nt, Artificial Sequence
  LRRK2 RNA guide
cuggaaagaucugcucauuuu

SEQ ID NO: 75955 - RNA, 21 nt, Artificial Sequence
  LRRK2 RNA guide
cuuuccagagaaaaucacugu

SEQ ID NO: 75956 - RNA, 21 nt, Artificial Sequence
  LRRK2 RNA guide
gacagugauuuucucuggaaa

SEQ ID NO: 75957 - RNA, 21 nt, Artificial Sequence
  LRRK2 RNA guide
gagcagaucuuuccagagaaa

SEQ ID NO: 75958 - RNA, 21 nt, Artificial Sequence
  LRRK2 RNA guide
gaucuuuccagagaaaaucac

SEQ ID NO: 75959 - RNA, 21 nt, Artificial Sequence
  LRRK2 RNA guide
gauuuucucuggaaagaucug

SEQ ID NO: 75960 - RNA, 21 nt, Artificial Sequence
  LRRK2 RNA guide
gcagaucuuuccagagaaaau

SEQ ID NO: 75961 - RNA, 21 nt, Artificial Sequence
  LRRK2 RNA guide
ggacagugauuuucucuggaa

SEQ ID NO: 75962 - RNA, 21 nt, Artificial Sequence
  LRRK2 RNA guide
gggacagugauuuucucugga

SEQ ID NO: 75963 - RNA, 21 nt, Artificial Sequence
  LRRK2 RNA guide
gugauuuucucuggaaagauc

SEQ ID NO: 75964 - RNA, 21 nt, Artificial Sequence
  LRRK2 RNA guide
uccagagaaaaucacuguccc

SEQ ID NO: 75965 - RNA, 21 nt, Artificial Sequence
  LRRK2 RNA guide
ucucuggaaagaucugcucau

SEQ ID NO: 75966 - RNA, 21 nt, Artificial Sequence
  LRRK2 RNA guide
ucuggaaagaucugcucauuu

SEQ ID NO: 75967 - RNA, 21 nt, Artificial Sequence
  LRRK2 RNA guide
ucuuuccagagaaaaucacug

SEQ ID NO: 75968 - RNA, 21 nt, Artificial Sequence
  LRRK2 RNA guide
ugagcagaucuuuccagagaa

SEQ ID NO: 75969 - RNA, 21 nt, Artificial Sequence
  LRRK2 RNA guide
ugauuuucucuggaaagaucu

SEQ ID NO: 75970 - RNA, 21 nt, Artificial Sequence
  LRRK2 RNA guide
uggaaagaucugcucauuuuu

SEQ ID NO: 75971 - RNA, 21 nt, Artificial Sequence
  LRRK2 RNA guide
ugggacagugauuuucucugg

SEQ ID NO: 75972 - RNA, 21 nt, Artificial Sequence
  LRRK2 RNA guide
uuccagagaaaaucacugucc

SEQ ID NO: 75973 - RNA, 21 nt, Artificial Sequence
  LRRK2 RNA guide
uucucuggaaagaucugcuca

SEQ ID NO: 75974 - RNA, 21 nt, Artificial Sequence
  LRRK2 RNA guide
uuuccagagaaaaucacuguc

SEQ ID NO: 75975 - RNA, 21 nt, Artificial Sequence
  LRRK2 RNA guide
uuucucuggaaagaucugcuc

SEQ ID NO: 75976 - RNA, 21 nt, Artificial Sequence
  LRRK2 RNA guide
uuuucucuggaaagaucugcu

SEQ ID NO: 75977 - RNA, 22 nt, Artificial Sequence
  LRRK2 RNA guide
aaaaaugagcagaucuuuccag

SEQ ID NO: 75978 - RNA, 22 nt, Artificial Sequence
  LRRK2 RNA guide
aaaaugagcagaucuuuccaga

SEQ ID NO: 75979 - RNA, 22 nt, Artificial Sequence
  LRRK2 RNA guide
aaaugagcagaucuuuccagag

SEQ ID NO: 75980 - RNA, 22 nt, Artificial Sequence
  LRRK2 RNA guide
aaugagcagaucuuuccagaga

SEQ ID NO: 75981 - RNA, 22 nt, Artificial Sequence
  LRRK2 RNA guide
acaaaaaugagcagaucuuucc

SEQ ID NO: 75982 - RNA, 22 nt, Artificial Sequence
  LRRK2 RNA guide
acagugauuuucucuggaaaga

SEQ ID NO: 75983 - RNA, 22 nt, Artificial Sequence
  LRRK2 RNA guide
agaucuuuccagagaaaaucac

SEQ ID NO: 75984 - RNA, 22 nt, Artificial Sequence
  LRRK2 RNA guide
agcagaucuuuccagagaaaau

SEQ ID NO: 75985 - RNA, 22 nt, Artificial Sequence
  LRRK2 RNA guide
agugauuuucucuggaaagauc

SEQ ID NO: 75986 - RNA, 22 nt, Artificial Sequence
  LRRK2 RNA guide
aucuuuccagagaaaaucacug

SEQ ID NO: 75987 - RNA, 22 nt, Artificial Sequence
  LRRK2 RNA guide
augagcagaucuuuccagagaa

SEQ ID NO: 75988 - RNA, 22 nt, Artificial Sequence
  LRRK2 RNA guide
augggacagugauuuucucugg

SEQ ID NO: 75989 - RNA, 22 nt, Artificial Sequence
  LRRK2 RNA guide
auuuucucuggaaagaucugcu

SEQ ID NO: 75990 - RNA, 22 nt, Artificial Sequence
  LRRK2 RNA guide
caaaaaugagcagaucuuucca

SEQ ID NO: 75991 - RNA, 22 nt, Artificial Sequence
  LRRK2 RNA guide
cagaucuuuccagagaaaauca

SEQ ID NO: 75992 - RNA, 22 nt, Artificial Sequence
  LRRK2 RNA guide
cagugauuuucucuggaaagau

SEQ ID NO: 75993 - RNA, 22 nt, Artificial Sequence
  LRRK2 RNA guide
caugggacagugauuuucucug

SEQ ID NO: 75994 - RNA, 22 nt, Artificial Sequence
  LRRK2 RNA guide
ccagagaaaaucacugucccau

SEQ ID NO: 75995 - RNA, 22 nt, Artificial Sequence
  LRRK2 RNA guide
cucuggaaagaucugcucauuu

SEQ ID NO: 75996 - RNA, 22 nt, Artificial Sequence
  LRRK2 RNA guide
cuggaaagaucugcucauuuuu

SEQ ID NO: 75997 - RNA, 22 nt, Artificial Sequence
  LRRK2 RNA guide
cuuuccagagaaaaucacuguc

SEQ ID NO: 75998 - RNA, 22 nt, Artificial Sequence
  LRRK2 RNA guide
gacagugauuuucucuggaaag

SEQ ID NO: 75999 - RNA, 22 nt, Artificial Sequence
  LRRK2 RNA guide
gagcagaucuuuccagagaaaa

SEQ ID NO: 76000 - RNA, 22 nt, Artificial Sequence
  LRRK2 RNA guide
gaucuuuccagagaaaaucacu

SEQ ID NO: 76001 - RNA, 22 nt, Artificial Sequence
  LRRK2 RNA guide
gauuuucucuggaaagaucugc

SEQ ID NO: 76002 - RNA, 22 nt, Artificial Sequence
  LRRK2 RNA guide
gcagaucuuuccagagaaaauc

SEQ ID NO: 76003 - RNA, 22 nt, Artificial Sequence
  LRRK2 RNA guide
ggacagugauuuucucuggaaa

SEQ ID NO: 76004 - RNA, 22 nt, Artificial Sequence
  LRRK2 RNA guide
gggacagugauuuucucuggaa

SEQ ID NO: 76005 - RNA, 22 nt, Artificial Sequence
  LRRK2 RNA guide
gugauuuucucuggaaagaucu

SEQ ID NO: 76006 - RNA, 22 nt, Artificial Sequence
  LRRK2 RNA guide
uccagagaaaaucacuguccca

SEQ ID NO: 76007 - RNA, 22 nt, Artificial Sequence
  LRRK2 RNA guide
ucucuggaaagaucugcucauu

SEQ ID NO: 76008 - RNA, 22 nt, Artificial Sequence
  LRRK2 RNA guide
ucuggaaagaucugcucauuuu

SEQ ID NO: 76009 - RNA, 22 nt, Artificial Sequence
  LRRK2 RNA guide
ucuuuccagagaaaaucacugu

SEQ ID NO: 76010 - RNA, 22 nt, Artificial Sequence
  LRRK2 RNA guide
ugagcagaucuuuccagagaaa

SEQ ID NO: 76011 - RNA, 22 nt, Artificial Sequence
  LRRK2 RNA guide
ugauuuucucuggaaagaucug

SEQ ID NO: 76012 - RNA, 22 nt, Artificial Sequence
  LRRK2 RNA guide
uggaaagaucugcucauuuuug

SEQ ID NO: 76013 - RNA, 22 nt, Artificial Sequence
  LRRK2 RNA guide
ugggacagugauuuucucugga

SEQ ID NO: 76014 - RNA, 22 nt, Artificial Sequence
  LRRK2 RNA guide
uuccagagaaaaucacuguccc

SEQ ID NO: 76015 - RNA, 22 nt, Artificial Sequence
  LRRK2 RNA guide
uucucuggaaagaucugcucau

SEQ ID NO: 76016 - RNA, 22 nt, Artificial Sequence
  LRRK2 RNA guide
uuuccagagaaaaucacugucc

SEQ ID NO: 76017 - RNA, 22 nt, Artificial Sequence
  LRRK2 RNA guide
uuucucuggaaagaucugcuca

SEQ ID NO: 76018 - RNA, 22 nt, Artificial Sequence
  LRRK2 RNA guide
uuuucucuggaaagaucugcuc

SEQ ID NO: 76019 - RNA, 20 nt, Artificial Sequence
  LRRK2 RNA guide
aagccuugucugcuuaauug

SEQ ID NO: 76020 - RNA, 20 nt, Artificial Sequence
  LRRK2 RNA guide
aauuggacaguggaucucuc

SEQ ID NO: 76021 - RNA, 20 nt, Artificial Sequence
  LRRK2 RNA guide
acagggacccgagagaucca

SEQ ID NO: 76022 - RNA, 20 nt, Artificial Sequence
  LRRK2 RNA guide
acccgagagauccacugucc

SEQ ID NO: 76023 - RNA, 20 nt, Artificial Sequence
  LRRK2 RNA guide
acuguccaauuaagcagaca

SEQ ID NO: 76024 - RNA, 20 nt, Artificial Sequence
  LRRK2 RNA guide
agagauccacuguccaauua

SEQ ID NO: 76025 - RNA, 20 nt, Artificial Sequence
  LRRK2 RNA guide
agauccacuguccaauuaag

SEQ ID NO: 76026 - RNA, 20 nt, Artificial Sequence
  LRRK2 RNA guide
agccuugucugcuuaauugg

SEQ ID NO: 76027 - RNA, 20 nt, Artificial Sequence
  LRRK2 RNA guide
agggacccgagagauccacu

SEQ ID NO: 76028 - RNA, 20 nt, Artificial Sequence
  LRRK2 RNA guide
auccacuguccaauuaagca

SEQ ID NO: 76029 - RNA, 20 nt, Artificial Sequence
  LRRK2 RNA guide
auuggacaguggaucucucg

SEQ ID NO: 76030 - RNA, 20 nt, Artificial Sequence
  LRRK2 RNA guide
cacuguccaauuaagcagac

SEQ ID NO: 76031 - RNA, 20 nt, Artificial Sequence
  LRRK2 RNA guide
cagggacccgagagauccac

SEQ ID NO: 76032 - RNA, 20 nt, Artificial Sequence
  LRRK2 RNA guide
ccacuguccaauuaagcaga

SEQ ID NO: 76033 - RNA, 20 nt, Artificial Sequence
  LRRK2 RNA guide
cccgagagauccacugucca

SEQ ID NO: 76034 - RNA, 20 nt, Artificial Sequence
  LRRK2 RNA guide
ccgagagauccacuguccaa

SEQ ID NO: 76035 - RNA, 20 nt, Artificial Sequence
  LRRK2 RNA guide
ccuugucugcuuaauuggac

SEQ ID NO: 76036 - RNA, 20 nt, Artificial Sequence
  LRRK2 RNA guide
cgagagauccacuguccaau

SEQ ID NO: 76037 - RNA, 20 nt, Artificial Sequence
  LRRK2 RNA guide
cugcuuaauuggacagugga

SEQ ID NO: 76038 - RNA, 20 nt, Artificial Sequence
  LRRK2 RNA guide
cuguccaauuaagcagacaa

SEQ ID NO: 76039 - RNA, 20 nt, Artificial Sequence
  LRRK2 RNA guide
cuuaauuggacaguggaucu

SEQ ID NO: 76040 - RNA, 20 nt, Artificial Sequence
  LRRK2 RNA guide
cuugucugcuuaauuggaca

SEQ ID NO: 76041 - RNA, 20 nt, Artificial Sequence
  LRRK2 RNA guide
gaagccuugucugcuuaauu

SEQ ID NO: 76042 - RNA, 20 nt, Artificial Sequence
  LRRK2 RNA guide
gacccgagagauccacuguc

SEQ ID NO: 76043 - RNA, 20 nt, Artificial Sequence
  LRRK2 RNA guide
gagagauccacuguccaauu

SEQ ID NO: 76044 - RNA, 20 nt, Artificial Sequence
  LRRK2 RNA guide
gagauccacuguccaauuaa

SEQ ID NO: 76045 - RNA, 20 nt, Artificial Sequence
  LRRK2 RNA guide
gauccacuguccaauuaagc

SEQ ID NO: 76046 - RNA, 20 nt, Artificial Sequence
  LRRK2 RNA guide
gccuugucugcuuaauugga

SEQ ID NO: 76047 - RNA, 20 nt, Artificial Sequence
  LRRK2 RNA guide
gcuuaauuggacaguggauc

SEQ ID NO: 76048 - RNA, 20 nt, Artificial Sequence
  LRRK2 RNA guide
ggacaguggaucucucgggu

SEQ ID NO: 76049 - RNA, 20 nt, Artificial Sequence
  LRRK2 RNA guide
ggacccgagagauccacugu

SEQ ID NO: 76050 - RNA, 20 nt, Artificial Sequence
  LRRK2 RNA guide
gggacccgagagauccacug

SEQ ID NO: 76051 - RNA, 20 nt, Artificial Sequence
  LRRK2 RNA guide
guccaauuaagcagacaagg

SEQ ID NO: 76052 - RNA, 20 nt, Artificial Sequence
  LRRK2 RNA guide
gucugcuuaauuggacagug

SEQ ID NO: 76053 - RNA, 20 nt, Artificial Sequence
  LRRK2 RNA guide
guugaagccuugucugcuua

SEQ ID NO: 76054 - RNA, 20 nt, Artificial Sequence
  LRRK2 RNA guide
uaauuggacaguggaucucu

SEQ ID NO: 76055 - RNA, 20 nt, Artificial Sequence
  LRRK2 RNA guide
uccaauuaagcagacaaggc

SEQ ID NO: 76056 - RNA, 20 nt, Artificial Sequence
  LRRK2 RNA guide
uccacuguccaauuaagcag

SEQ ID NO: 76057 - RNA, 20 nt, Artificial Sequence
  LRRK2 RNA guide
ucugcuuaauuggacagugg

SEQ ID NO: 76058 - RNA, 20 nt, Artificial Sequence
  LRRK2 RNA guide
ugaagccuugucugcuuaau

SEQ ID NO: 76059 - RNA, 20 nt, Artificial Sequence
  LRRK2 RNA guide
ugcuuaauuggacaguggau

SEQ ID NO: 76060 - RNA, 20 nt, Artificial Sequence
  LRRK2 RNA guide
uggacaguggaucucucggg

SEQ ID NO: 76061 - RNA, 20 nt, Artificial Sequence
  LRRK2 RNA guide
uguccaauuaagcagacaag

SEQ ID NO: 76062 - RNA, 20 nt, Artificial Sequence
  LRRK2 RNA guide
ugucugcuuaauuggacagu

SEQ ID NO: 76063 - RNA, 20 nt, Artificial Sequence
  LRRK2 RNA guide
uuaauuggacaguggaucuc

SEQ ID NO: 76064 - RNA, 20 nt, Artificial Sequence
  LRRK2 RNA guide
uugaagccuugucugcuuaa

SEQ ID NO: 76065 - RNA, 20 nt, Artificial Sequence
  LRRK2 RNA guide
uuggacaguggaucucucgg

SEQ ID NO: 76066 - RNA, 20 nt, Artificial Sequence
  LRRK2 RNA guide
uugucugcuuaauuggacag

SEQ ID NO: 76067 - RNA, 21 nt, Artificial Sequence
  LRRK2 RNA guide
aagccuugucugcuuaauugg

SEQ ID NO: 76068 - RNA, 21 nt, Artificial Sequence
  LRRK2 RNA guide
aauuggacaguggaucucucg

SEQ ID NO: 76069 - RNA, 21 nt, Artificial Sequence
  LRRK2 RNA guide
acagggacccgagagauccac

SEQ ID NO: 76070 - RNA, 21 nt, Artificial Sequence
  LRRK2 RNA guide
acccgagagauccacugucca

SEQ ID NO: 76071 - RNA, 21 nt, Artificial Sequence
  LRRK2 RNA guide
acuguccaauuaagcagacaa

SEQ ID NO: 76072 - RNA, 21 nt, Artificial Sequence
  LRRK2 RNA guide
agagauccacuguccaauuaa

SEQ ID NO: 76073 - RNA, 21 nt, Artificial Sequence
  LRRK2 RNA guide
agauccacuguccaauuaagc

SEQ ID NO: 76074 - RNA, 21 nt, Artificial Sequence
  LRRK2 RNA guide
agccuugucugcuuaauugga

SEQ ID NO: 76075 - RNA, 21 nt, Artificial Sequence
  LRRK2 RNA guide
agggacccgagagauccacug

SEQ ID NO: 76076 - RNA, 21 nt, Artificial Sequence
  LRRK2 RNA guide
auccacuguccaauuaagcag

SEQ ID NO: 76077 - RNA, 21 nt, Artificial Sequence
  LRRK2 RNA guide
auuggacaguggaucucucgg

SEQ ID NO: 76078 - RNA, 21 nt, Artificial Sequence
  LRRK2 RNA guide
cacagggacccgagagaucca

SEQ ID NO: 76079 - RNA, 21 nt, Artificial Sequence
  LRRK2 RNA guide
cacuguccaauuaagcagaca

SEQ ID NO: 76080 - RNA, 21 nt, Artificial Sequence
  LRRK2 RNA guide
cagggacccgagagauccacu

SEQ ID NO: 76081 - RNA, 21 nt, Artificial Sequence
  LRRK2 RNA guide
ccacuguccaauuaagcagac

SEQ ID NO: 76082 - RNA, 21 nt, Artificial Sequence
  LRRK2 RNA guide
cccgagagauccacuguccaa

SEQ ID NO: 76083 - RNA, 21 nt, Artificial Sequence
  LRRK2 RNA guide
ccgagagauccacuguccaau

SEQ ID NO: 76084 - RNA, 21 nt, Artificial Sequence
  LRRK2 RNA guide
ccuugucugcuuaauuggaca

SEQ ID NO: 76085 - RNA, 21 nt, Artificial Sequence
  LRRK2 RNA guide
cgagagauccacuguccaauu

SEQ ID NO: 76086 - RNA, 21 nt, Artificial Sequence
  LRRK2 RNA guide
cugcuuaauuggacaguggau

SEQ ID NO: 76087 - RNA, 21 nt, Artificial Sequence
  LRRK2 RNA guide
cuguccaauuaagcagacaag

SEQ ID NO: 76088 - RNA, 21 nt, Artificial Sequence
  LRRK2 RNA guide
cuuaauuggacaguggaucuc

SEQ ID NO: 76089 - RNA, 21 nt, Artificial Sequence
  LRRK2 RNA guide
cuugucugcuuaauuggacag

SEQ ID NO: 76090 - RNA, 21 nt, Artificial Sequence
  LRRK2 RNA guide
gaagccuugucugcuuaauug

SEQ ID NO: 76091 - RNA, 21 nt, Artificial Sequence
  LRRK2 RNA guide
gacccgagagauccacugucc

SEQ ID NO: 76092 - RNA, 21 nt, Artificial Sequence
  LRRK2 RNA guide
gagagauccacuguccaauua

SEQ ID NO: 76093 - RNA, 21 nt, Artificial Sequence
  LRRK2 RNA guide
gagauccacuguccaauuaag

SEQ ID NO: 76094 - RNA, 21 nt, Artificial Sequence
  LRRK2 RNA guide
gauccacuguccaauuaagca

SEQ ID NO: 76095 - RNA, 21 nt, Artificial Sequence
  LRRK2 RNA guide
gccuugucugcuuaauuggac

SEQ ID NO: 76096 - RNA, 21 nt, Artificial Sequence
  LRRK2 RNA guide
gcuuaauuggacaguggaucu

SEQ ID NO: 76097 - RNA, 21 nt, Artificial Sequence
  LRRK2 RNA guide
ggacaguggaucucucggguc

SEQ ID NO: 76098 - RNA, 21 nt, Artificial Sequence
  LRRK2 RNA guide
ggacccgagagauccacuguc

SEQ ID NO: 76099 - RNA, 21 nt, Artificial Sequence
  LRRK2 RNA guide
gggacccgagagauccacugu

SEQ ID NO: 76100 - RNA, 21 nt, Artificial Sequence
  LRRK2 RNA guide
guccaauuaagcagacaaggc

SEQ ID NO: 76101 - RNA, 21 nt, Artificial Sequence
  LRRK2 RNA guide
gucugcuuaauuggacagugg

SEQ ID NO: 76102 - RNA, 21 nt, Artificial Sequence
  LRRK2 RNA guide
guugaagccuugucugcuuaa

SEQ ID NO: 76103 - RNA, 21 nt, Artificial Sequence
  LRRK2 RNA guide
uaauuggacaguggaucucuc

SEQ ID NO: 76104 - RNA, 21 nt, Artificial Sequence
  LRRK2 RNA guide
uccaauuaagcagacaaggcu

SEQ ID NO: 76105 - RNA, 21 nt, Artificial Sequence
  LRRK2 RNA guide
uccacuguccaauuaagcaga

SEQ ID NO: 76106 - RNA, 21 nt, Artificial Sequence
  LRRK2 RNA guide
ucugcuuaauuggacagugga

SEQ ID NO: 76107 - RNA, 21 nt, Artificial Sequence
  LRRK2 RNA guide
ugaagccuugucugcuuaauu

SEQ ID NO: 76108 - RNA, 21 nt, Artificial Sequence
  LRRK2 RNA guide
ugcuuaauuggacaguggauc

SEQ ID NO: 76109 - RNA, 21 nt, Artificial Sequence
  LRRK2 RNA guide
uggacaguggaucucucgggu

SEQ ID NO: 76110 - RNA, 21 nt, Artificial Sequence
  LRRK2 RNA guide
uguccaauuaagcagacaagg

SEQ ID NO: 76111 - RNA, 21 nt, Artificial Sequence
  LRRK2 RNA guide
ugucugcuuaauuggacagug

SEQ ID NO: 76112 - RNA, 21 nt, Artificial Sequence
  LRRK2 RNA guide
uguugaagccuugucugcuua

SEQ ID NO: 76113 - RNA, 21 nt, Artificial Sequence
  LRRK2 RNA guide
uuaauuggacaguggaucucu

SEQ ID NO: 76114 - RNA, 21 nt, Artificial Sequence
  LRRK2 RNA guide
uugaagccuugucugcuuaau

SEQ ID NO: 76115 - RNA, 21 nt, Artificial Sequence
  LRRK2 RNA guide
uuggacaguggaucucucggg

SEQ ID NO: 76116 - RNA, 21 nt, Artificial Sequence
  LRRK2 RNA guide
uugucugcuuaauuggacagu

SEQ ID NO: 76117 - RNA, 22 nt, Artificial Sequence
  LRRK2 RNA guide
aagccuugucugcuuaauugga

SEQ ID NO: 76118 - RNA, 22 nt, Artificial Sequence
  LRRK2 RNA guide
aauuggacaguggaucucucgg

SEQ ID NO: 76119 - RNA, 22 nt, Artificial Sequence
  LRRK2 RNA guide
acagggacccgagagauccacu

SEQ ID NO: 76120 - RNA, 22 nt, Artificial Sequence
  LRRK2 RNA guide
acccgagagauccacuguccaa

SEQ ID NO: 76121 - RNA, 22 nt, Artificial Sequence
  LRRK2 RNA guide
acuguccaauuaagcagacaag

SEQ ID NO: 76122 - RNA, 22 nt, Artificial Sequence
  LRRK2 RNA guide
agagauccacuguccaauuaag

SEQ ID NO: 76123 - RNA, 22 nt, Artificial Sequence
  LRRK2 RNA guide
agauccacuguccaauuaagca

SEQ ID NO: 76124 - RNA, 22 nt, Artificial Sequence
  LRRK2 RNA guide
agccuugucugcuuaauuggac

SEQ ID NO: 76125 - RNA, 22 nt, Artificial Sequence
  LRRK2 RNA guide
agggacccgagagauccacugu

SEQ ID NO: 76126 - RNA, 22 nt, Artificial Sequence
  LRRK2 RNA guide
auccacuguccaauuaagcaga

SEQ ID NO: 76127 - RNA, 22 nt, Artificial Sequence
  LRRK2 RNA guide
auuggacaguggaucucucggg

SEQ ID NO: 76128 - RNA, 22 nt, Artificial Sequence
  LRRK2 RNA guide
cacagggacccgagagauccac

SEQ ID NO: 76129 - RNA, 22 nt, Artificial Sequence
  LRRK2 RNA guide
cacuguccaauuaagcagacaa

SEQ ID NO: 76130 - RNA, 22 nt, Artificial Sequence
  LRRK2 RNA guide
cagggacccgagagauccacug

SEQ ID NO: 76131 - RNA, 22 nt, Artificial Sequence
  LRRK2 RNA guide
ccacagggacccgagagaucca

SEQ ID NO: 76132 - RNA, 22 nt, Artificial Sequence
  LRRK2 RNA guide
ccacuguccaauuaagcagaca

SEQ ID NO: 76133 - RNA, 22 nt, Artificial Sequence
  LRRK2 RNA guide
cccgagagauccacuguccaau

SEQ ID NO: 76134 - RNA, 22 nt, Artificial Sequence
  LRRK2 RNA guide
ccgagagauccacuguccaauu

SEQ ID NO: 76135 - RNA, 22 nt, Artificial Sequence
  LRRK2 RNA guide
ccuugucugcuuaauuggacag

SEQ ID NO: 76136 - RNA, 22 nt, Artificial Sequence
  LRRK2 RNA guide
cgagagauccacuguccaauua

SEQ ID NO: 76137 - RNA, 22 nt, Artificial Sequence
  LRRK2 RNA guide
cugcuuaauuggacaguggauc

SEQ ID NO: 76138 - RNA, 22 nt, Artificial Sequence
  LRRK2 RNA guide
cuguccaauuaagcagacaagg

SEQ ID NO: 76139 - RNA, 22 nt, Artificial Sequence
  LRRK2 RNA guide
cuuaauuggacaguggaucucu

SEQ ID NO: 76140 - RNA, 22 nt, Artificial Sequence
  LRRK2 RNA guide
cuugucugcuuaauuggacagu

SEQ ID NO: 76141 - RNA, 22 nt, Artificial Sequence
  LRRK2 RNA guide
gaagccuugucugcuuaauugg

SEQ ID NO: 76142 - RNA, 22 nt, Artificial Sequence
  LRRK2 RNA guide
gacccgagagauccacugucca

SEQ ID NO: 76143 - RNA, 22 nt, Artificial Sequence
  LRRK2 RNA guide
gagagauccacuguccaauuaa

SEQ ID NO: 76144 - RNA, 22 nt, Artificial Sequence
  LRRK2 RNA guide
gagauccacuguccaauuaagc

SEQ ID NO: 76145 - RNA, 22 nt, Artificial Sequence
  LRRK2 RNA guide
gauccacuguccaauuaagcag

SEQ ID NO: 76146 - RNA, 22 nt, Artificial Sequence
  LRRK2 RNA guide
gccuugucugcuuaauuggaca

SEQ ID NO: 76147 - RNA, 22 nt, Artificial Sequence
  LRRK2 RNA guide
gcuuaauuggacaguggaucuc

SEQ ID NO: 76148 - RNA, 22 nt, Artificial Sequence
  LRRK2 RNA guide
ggacaguggaucucucgggucc

SEQ ID NO: 76149 - RNA, 22 nt, Artificial Sequence
  LRRK2 RNA guide
ggacccgagagauccacugucc

SEQ ID NO: 76150 - RNA, 22 nt, Artificial Sequence
  LRRK2 RNA guide
gggacccgagagauccacuguc

SEQ ID NO: 76151 - RNA, 22 nt, Artificial Sequence
  LRRK2 RNA guide
guccaauuaagcagacaaggcu

SEQ ID NO: 76152 - RNA, 22 nt, Artificial Sequence
  LRRK2 RNA guide
gucugcuuaauuggacagugga

SEQ ID NO: 76153 - RNA, 22 nt, Artificial Sequence
  LRRK2 RNA guide
guugaagccuugucugcuuaau

SEQ ID NO: 76154 - RNA, 22 nt, Artificial Sequence
  LRRK2 RNA guide
uaauuggacaguggaucucucg

SEQ ID NO: 76155 - RNA, 22 nt, Artificial Sequence
  LRRK2 RNA guide
uccaauuaagcagacaaggcuu

SEQ ID NO: 76156 - RNA, 22 nt, Artificial Sequence
  LRRK2 RNA guide
uccacuguccaauuaagcagac

SEQ ID NO: 76157 - RNA, 22 nt, Artificial Sequence
  LRRK2 RNA guide
ucugcuuaauuggacaguggau

SEQ ID NO: 76158 - RNA, 22 nt, Artificial Sequence
  LRRK2 RNA guide
ugaagccuugucugcuuaauug

SEQ ID NO: 76159 - RNA, 22 nt, Artificial Sequence
  LRRK2 RNA guide
ugcuuaauuggacaguggaucu

SEQ ID NO: 76160 - RNA, 22 nt, Artificial Sequence
  LRRK2 RNA guide
uggacaguggaucucucggguc

SEQ ID NO: 76161 - RNA, 22 nt, Artificial Sequence
  LRRK2 RNA guide
uguccaauuaagcagacaaggc

SEQ ID NO: 76162 - RNA, 22 nt, Artificial Sequence
  LRRK2 RNA guide
ugucugcuuaauuggacagugg

SEQ ID NO: 76163 - RNA, 22 nt, Artificial Sequence
  LRRK2 RNA guide
uguugaagccuugucugcuuaa

SEQ ID NO: 76164 - RNA, 22 nt, Artificial Sequence
  LRRK2 RNA guide
uuaauuggacaguggaucucuc

SEQ ID NO: 76165 - RNA, 22 nt, Artificial Sequence
  LRRK2 RNA guide
uugaagccuugucugcuuaauu

SEQ ID NO: 76166 - RNA, 22 nt, Artificial Sequence
  LRRK2 RNA guide
uuggacaguggaucucucgggu

SEQ ID NO: 76167 - RNA, 22 nt, Artificial Sequence
  LRRK2 RNA guide
uugucugcuuaauuggacagug

SEQ ID NO: 76168 - RNA, 22 nt, Artificial Sequence
  LRRK2 RNA guide
uuguugaagccuugucugcuua

SEQ ID NO: 76169 - RNA, 20 nt, Artificial Sequence
  LRRK2 RNA guide
aauugaacaguggaucucuc

SEQ ID NO: 76170 - RNA, 20 nt, Artificial Sequence
  LRRK2 RNA guide
acccgagagauccacuguuc

SEQ ID NO: 76171 - RNA, 20 nt, Artificial Sequence
  LRRK2 RNA guide
acuguucaauuaagcagaca

SEQ ID NO: 76172 - RNA, 20 nt, Artificial Sequence
  LRRK2 RNA guide
agagauccacuguucaauua

SEQ ID NO: 76173 - RNA, 20 nt, Artificial Sequence
  LRRK2 RNA guide
agauccacuguucaauuaag

SEQ ID NO: 76174 - RNA, 20 nt, Artificial Sequence
  LRRK2 RNA guide
agccuugucugcuuaauuga

SEQ ID NO: 76175 - RNA, 20 nt, Artificial Sequence
  LRRK2 RNA guide
auccacuguucaauuaagca

SEQ ID NO: 76176 - RNA, 20 nt, Artificial Sequence
  LRRK2 RNA guide
auugaacaguggaucucucg

SEQ ID NO: 76177 - RNA, 20 nt, Artificial Sequence
  LRRK2 RNA guide
cacuguucaauuaagcagac

SEQ ID NO: 76178 - RNA, 20 nt, Artificial Sequence
  LRRK2 RNA guide
ccacuguucaauuaagcaga

SEQ ID NO: 76179 - RNA, 20 nt, Artificial Sequence
  LRRK2 RNA guide
cccgagagauccacuguuca

SEQ ID NO: 76180 - RNA, 20 nt, Artificial Sequence
  LRRK2 RNA guide
ccgagagauccacuguucaa

SEQ ID NO: 76181 - RNA, 20 nt, Artificial Sequence
  LRRK2 RNA guide
ccuugucugcuuaauugaac

SEQ ID NO: 76182 - RNA, 20 nt, Artificial Sequence
  LRRK2 RNA guide
cgagagauccacuguucaau

SEQ ID NO: 76183 - RNA, 20 nt, Artificial Sequence
  LRRK2 RNA guide
cugcuuaauugaacagugga

SEQ ID NO: 76184 - RNA, 20 nt, Artificial Sequence
  LRRK2 RNA guide
cuguucaauuaagcagacaa

SEQ ID NO: 76185 - RNA, 20 nt, Artificial Sequence
  LRRK2 RNA guide
cuuaauugaacaguggaucu

SEQ ID NO: 76186 - RNA, 20 nt, Artificial Sequence
  LRRK2 RNA guide
cuugucugcuuaauugaaca

SEQ ID NO: 76187 - RNA, 20 nt, Artificial Sequence
  LRRK2 RNA guide
gaacaguggaucucucgggu

SEQ ID NO: 76188 - RNA, 20 nt, Artificial Sequence
  LRRK2 RNA guide
gacccgagagauccacuguu

SEQ ID NO: 76189 - RNA, 20 nt, Artificial Sequence
  LRRK2 RNA guide
gagagauccacuguucaauu

SEQ ID NO: 76190 - RNA, 20 nt, Artificial Sequence
  LRRK2 RNA guide
gagauccacuguucaauuaa

SEQ ID NO: 76191 - RNA, 20 nt, Artificial Sequence
  LRRK2 RNA guide
gauccacuguucaauuaagc

SEQ ID NO: 76192 - RNA, 20 nt, Artificial Sequence
  LRRK2 RNA guide
gccuugucugcuuaauugaa

SEQ ID NO: 76193 - RNA, 20 nt, Artificial Sequence
  LRRK2 RNA guide
gcuuaauugaacaguggauc

SEQ ID NO: 76194 - RNA, 20 nt, Artificial Sequence
  LRRK2 RNA guide
gucugcuuaauugaacagug

SEQ ID NO: 76195 - RNA, 20 nt, Artificial Sequence
  LRRK2 RNA guide
guucaauuaagcagacaagg

SEQ ID NO: 76196 - RNA, 20 nt, Artificial Sequence
  LRRK2 RNA guide
uaauugaacaguggaucucu

SEQ ID NO: 76197 - RNA, 20 nt, Artificial Sequence
  LRRK2 RNA guide
uccacuguucaauuaagcag

SEQ ID NO: 76198 - RNA, 20 nt, Artificial Sequence
  LRRK2 RNA guide
ucugcuuaauugaacagugg

SEQ ID NO: 76199 - RNA, 20 nt, Artificial Sequence
  LRRK2 RNA guide
ugaacaguggaucucucggg

SEQ ID NO: 76200 - RNA, 20 nt, Artificial Sequence
  LRRK2 RNA guide
ugcuuaauugaacaguggau

SEQ ID NO: 76201 - RNA, 20 nt, Artificial Sequence
  LRRK2 RNA guide
ugucugcuuaauugaacagu

SEQ ID NO: 76202 - RNA, 20 nt, Artificial Sequence
  LRRK2 RNA guide
uguucaauuaagcagacaag

SEQ ID NO: 76203 - RNA, 20 nt, Artificial Sequence
  LRRK2 RNA guide
uuaauugaacaguggaucuc

SEQ ID NO: 76204 - RNA, 20 nt, Artificial Sequence
  LRRK2 RNA guide
uucaauuaagcagacaaggc

SEQ ID NO: 76205 - RNA, 20 nt, Artificial Sequence
  LRRK2 RNA guide
uugaacaguggaucucucgg

SEQ ID NO: 76206 - RNA, 20 nt, Artificial Sequence
  LRRK2 RNA guide
uugucugcuuaauugaacag

SEQ ID NO: 76207 - RNA, 21 nt, Artificial Sequence
  LRRK2 RNA guide
aagccuugucugcuuaauuga

SEQ ID NO: 76208 - RNA, 21 nt, Artificial Sequence
  LRRK2 RNA guide
aauugaacaguggaucucucg

SEQ ID NO: 76209 - RNA, 21 nt, Artificial Sequence
  LRRK2 RNA guide
acccgagagauccacuguuca

SEQ ID NO: 76210 - RNA, 21 nt, Artificial Sequence
  LRRK2 RNA guide
acuguucaauuaagcagacaa

SEQ ID NO: 76211 - RNA, 21 nt, Artificial Sequence
  LRRK2 RNA guide
agagauccacuguucaauuaa

SEQ ID NO: 76212 - RNA, 21 nt, Artificial Sequence
  LRRK2 RNA guide
agauccacuguucaauuaagc

SEQ ID NO: 76213 - RNA, 21 nt, Artificial Sequence
  LRRK2 RNA guide
agccuugucugcuuaauugaa

SEQ ID NO: 76214 - RNA, 21 nt, Artificial Sequence
  LRRK2 RNA guide
auccacuguucaauuaagcag

SEQ ID NO: 76215 - RNA, 21 nt, Artificial Sequence
  LRRK2 RNA guide
auugaacaguggaucucucgg

SEQ ID NO: 76216 - RNA, 21 nt, Artificial Sequence
  LRRK2 RNA guide
cacuguucaauuaagcagaca

SEQ ID NO: 76217 - RNA, 21 nt, Artificial Sequence
  LRRK2 RNA guide
ccacuguucaauuaagcagac

SEQ ID NO: 76218 - RNA, 21 nt, Artificial Sequence
  LRRK2 RNA guide
cccgagagauccacuguucaa

SEQ ID NO: 76219 - RNA, 21 nt, Artificial Sequence
  LRRK2 RNA guide
ccgagagauccacuguucaau

SEQ ID NO: 76220 - RNA, 21 nt, Artificial Sequence
  LRRK2 RNA guide
ccuugucugcuuaauugaaca

SEQ ID NO: 76221 - RNA, 21 nt, Artificial Sequence
  LRRK2 RNA guide
cgagagauccacuguucaauu

SEQ ID NO: 76222 - RNA, 21 nt, Artificial Sequence
  LRRK2 RNA guide
cugcuuaauugaacaguggau

SEQ ID NO: 76223 - RNA, 21 nt, Artificial Sequence
  LRRK2 RNA guide
cuguucaauuaagcagacaag

SEQ ID NO: 76224 - RNA, 21 nt, Artificial Sequence
  LRRK2 RNA guide
cuuaauugaacaguggaucuc

SEQ ID NO: 76225 - RNA, 21 nt, Artificial Sequence
  LRRK2 RNA guide
cuugucugcuuaauugaacag

SEQ ID NO: 76226 - RNA, 21 nt, Artificial Sequence
  LRRK2 RNA guide
gaacaguggaucucucggguc

SEQ ID NO: 76227 - RNA, 21 nt, Artificial Sequence
  LRRK2 RNA guide
gacccgagagauccacuguuc

SEQ ID NO: 76228 - RNA, 21 nt, Artificial Sequence
  LRRK2 RNA guide
gagagauccacuguucaauua

SEQ ID NO: 76229 - RNA, 21 nt, Artificial Sequence
  LRRK2 RNA guide
gagauccacuguucaauuaag

SEQ ID NO: 76230 - RNA, 21 nt, Artificial Sequence
  LRRK2 RNA guide
gauccacuguucaauuaagca

SEQ ID NO: 76231 - RNA, 21 nt, Artificial Sequence
  LRRK2 RNA guide
gccuugucugcuuaauugaac

SEQ ID NO: 76232 - RNA, 21 nt, Artificial Sequence
  LRRK2 RNA guide
gcuuaauugaacaguggaucu

SEQ ID NO: 76233 - RNA, 21 nt, Artificial Sequence
  LRRK2 RNA guide
ggacccgagagauccacuguu

SEQ ID NO: 76234 - RNA, 21 nt, Artificial Sequence
  LRRK2 RNA guide
gucugcuuaauugaacagugg

SEQ ID NO: 76235 - RNA, 21 nt, Artificial Sequence
  LRRK2 RNA guide
guucaauuaagcagacaaggc

SEQ ID NO: 76236 - RNA, 21 nt, Artificial Sequence
  LRRK2 RNA guide
uaauugaacaguggaucucuc

SEQ ID NO: 76237 - RNA, 21 nt, Artificial Sequence
  LRRK2 RNA guide
uccacuguucaauuaagcaga

SEQ ID NO: 76238 - RNA, 21 nt, Artificial Sequence
  LRRK2 RNA guide
ucugcuuaauugaacagugga

SEQ ID NO: 76239 - RNA, 21 nt, Artificial Sequence
  LRRK2 RNA guide
ugaacaguggaucucucgggu

SEQ ID NO: 76240 - RNA, 21 nt, Artificial Sequence
  LRRK2 RNA guide
ugcuuaauugaacaguggauc

SEQ ID NO: 76241 - RNA, 21 nt, Artificial Sequence
  LRRK2 RNA guide
ugucugcuuaauugaacagug

SEQ ID NO: 76242 - RNA, 21 nt, Artificial Sequence
  LRRK2 RNA guide
uguucaauuaagcagacaagg

SEQ ID NO: 76243 - RNA, 21 nt, Artificial Sequence
  LRRK2 RNA guide
uuaauugaacaguggaucucu

SEQ ID NO: 76244 - RNA, 21 nt, Artificial Sequence
  LRRK2 RNA guide
uucaauuaagcagacaaggcu

SEQ ID NO: 76245 - RNA, 21 nt, Artificial Sequence
  LRRK2 RNA guide
uugaacaguggaucucucggg

SEQ ID NO: 76246 - RNA, 21 nt, Artificial Sequence
  LRRK2 RNA guide
uugucugcuuaauugaacagu

SEQ ID NO: 76247 - RNA, 22 nt, Artificial Sequence
  LRRK2 RNA guide
aagccuugucugcuuaauugaa

SEQ ID NO: 76248 - RNA, 22 nt, Artificial Sequence
  LRRK2 RNA guide
aauugaacaguggaucucucgg

SEQ ID NO: 76249 - RNA, 22 nt, Artificial Sequence
  LRRK2 RNA guide
acccgagagauccacuguucaa

SEQ ID NO: 76250 - RNA, 22 nt, Artificial Sequence
  LRRK2 RNA guide
acuguucaauuaagcagacaag

SEQ ID NO: 76251 - RNA, 22 nt, Artificial Sequence
  LRRK2 RNA guide
agagauccacuguucaauuaag

SEQ ID NO: 76252 - RNA, 22 nt, Artificial Sequence
  LRRK2 RNA guide
agauccacuguucaauuaagca

SEQ ID NO: 76253 - RNA, 22 nt, Artificial Sequence
  LRRK2 RNA guide
agccuugucugcuuaauugaac

SEQ ID NO: 76254 - RNA, 22 nt, Artificial Sequence
  LRRK2 RNA guide
auccacuguucaauuaagcaga

SEQ ID NO: 76255 - RNA, 22 nt, Artificial Sequence
  LRRK2 RNA guide
auugaacaguggaucucucggg

SEQ ID NO: 76256 - RNA, 22 nt, Artificial Sequence
  LRRK2 RNA guide
cacuguucaauuaagcagacaa

SEQ ID NO: 76257 - RNA, 22 nt, Artificial Sequence
  LRRK2 RNA guide
ccacuguucaauuaagcagaca

SEQ ID NO: 76258 - RNA, 22 nt, Artificial Sequence
  LRRK2 RNA guide
cccgagagauccacuguucaau

SEQ ID NO: 76259 - RNA, 22 nt, Artificial Sequence
  LRRK2 RNA guide
ccgagagauccacuguucaauu

SEQ ID NO: 76260 - RNA, 22 nt, Artificial Sequence
  LRRK2 RNA guide
ccuugucugcuuaauugaacag

SEQ ID NO: 76261 - RNA, 22 nt, Artificial Sequence
  LRRK2 RNA guide
cgagagauccacuguucaauua

SEQ ID NO: 76262 - RNA, 22 nt, Artificial Sequence
  LRRK2 RNA guide
cugcuuaauugaacaguggauc

SEQ ID NO: 76263 - RNA, 22 nt, Artificial Sequence
  LRRK2 RNA guide
cuguucaauuaagcagacaagg

SEQ ID NO: 76264 - RNA, 22 nt, Artificial Sequence
  LRRK2 RNA guide
cuuaauugaacaguggaucucu

SEQ ID NO: 76265 - RNA, 22 nt, Artificial Sequence
  LRRK2 RNA guide
cuugucugcuuaauugaacagu

SEQ ID NO: 76266 - RNA, 22 nt, Artificial Sequence
  LRRK2 RNA guide
gaacaguggaucucucgggucc

SEQ ID NO: 76267 - RNA, 22 nt, Artificial Sequence
  LRRK2 RNA guide
gaagccuugucugcuuaauuga

SEQ ID NO: 76268 - RNA, 22 nt, Artificial Sequence
  LRRK2 RNA guide
gacccgagagauccacuguuca

SEQ ID NO: 76269 - RNA, 22 nt, Artificial Sequence
  LRRK2 RNA guide
gagagauccacuguucaauuaa

SEQ ID NO: 76270 - RNA, 22 nt, Artificial Sequence
  LRRK2 RNA guide
gagauccacuguucaauuaagc

SEQ ID NO: 76271 - RNA, 22 nt, Artificial Sequence
  LRRK2 RNA guide
gauccacuguucaauuaagcag

SEQ ID NO: 76272 - RNA, 22 nt, Artificial Sequence
  LRRK2 RNA guide
gccuugucugcuuaauugaaca

SEQ ID NO: 76273 - RNA, 22 nt, Artificial Sequence
  LRRK2 RNA guide
gcuuaauugaacaguggaucuc

SEQ ID NO: 76274 - RNA, 22 nt, Artificial Sequence
  LRRK2 RNA guide
ggacccgagagauccacuguuc

SEQ ID NO: 76275 - RNA, 22 nt, Artificial Sequence
  LRRK2 RNA guide
gggacccgagagauccacuguu

SEQ ID NO: 76276 - RNA, 22 nt, Artificial Sequence
  LRRK2 RNA guide
gucugcuuaauugaacagugga

SEQ ID NO: 76277 - RNA, 22 nt, Artificial Sequence
  LRRK2 RNA guide
guucaauuaagcagacaaggcu

SEQ ID NO: 76278 - RNA, 22 nt, Artificial Sequence
  LRRK2 RNA guide
uaauugaacaguggaucucucg

SEQ ID NO: 76279 - RNA, 22 nt, Artificial Sequence
  LRRK2 RNA guide
uccacuguucaauuaagcagac

SEQ ID NO: 76280 - RNA, 22 nt, Artificial Sequence
  LRRK2 RNA guide
ucugcuuaauugaacaguggau

SEQ ID NO: 76281 - RNA, 22 nt, Artificial Sequence
  LRRK2 RNA guide
ugaacaguggaucucucggguc

SEQ ID NO: 76282 - RNA, 22 nt, Artificial Sequence
  LRRK2 RNA guide
ugcuuaauugaacaguggaucu

SEQ ID NO: 76283 - RNA, 22 nt, Artificial Sequence
  LRRK2 RNA guide
ugucugcuuaauugaacagugg

SEQ ID NO: 76284 - RNA, 22 nt, Artificial Sequence
  LRRK2 RNA guide
uguucaauuaagcagacaaggc

SEQ ID NO: 76285 - RNA, 22 nt, Artificial Sequence
  LRRK2 RNA guide
uuaauugaacaguggaucucuc

SEQ ID NO: 76286 - RNA, 22 nt, Artificial Sequence
  LRRK2 RNA guide
uucaauuaagcagacaaggcuu

SEQ ID NO: 76287 - RNA, 22 nt, Artificial Sequence
  LRRK2 RNA guide
uugaacaguggaucucucgggu

SEQ ID NO: 76288 - RNA, 22 nt, Artificial Sequence
  LRRK2 RNA guide
uugucugcuuaauugaacagug

SEQ ID NO: 76289 - RNA, 20 nt, Artificial Sequence
  LRRK2 RNA guide
aacucagcuggcugcuagcu

SEQ ID NO: 76290 - RNA, 20 nt, Artificial Sequence
  LRRK2 RNA guide
acucagcuggcugcuagcug

SEQ ID NO: 76291 - RNA, 20 nt, Artificial Sequence
  LRRK2 RNA guide
acucuguggucuaggccagc

SEQ ID NO: 76292 - RNA, 20 nt, Artificial Sequence
  LRRK2 RNA guide
agcuggccuagaccacagag

SEQ ID NO: 76293 - RNA, 20 nt, Artificial Sequence
  LRRK2 RNA guide
agcuggcugcuagcuggccu

SEQ ID NO: 76294 - RNA, 20 nt, Artificial Sequence
  LRRK2 RNA guide
cacucuguggucuaggccag

SEQ ID NO: 76295 - RNA, 20 nt, Artificial Sequence
  LRRK2 RNA guide
cagcuggcugcuagcuggcc

SEQ ID NO: 76296 - RNA, 20 nt, Artificial Sequence
  LRRK2 RNA guide
ccuagaccacagagugaaga

SEQ ID NO: 76297 - RNA, 20 nt, Artificial Sequence
  LRRK2 RNA guide
cuagaccacagagugaagaa

SEQ ID NO: 76298 - RNA, 20 nt, Artificial Sequence
  LRRK2 RNA guide
cuagcuggccuagaccacag

SEQ ID NO: 76299 - RNA, 20 nt, Artificial Sequence
  LRRK2 RNA guide
cuaggccagcuagcagccag

SEQ ID NO: 76300 - RNA, 20 nt, Artificial Sequence
  LRRK2 RNA guide
cucagcuggcugcuagcugg

SEQ ID NO: 76301 - RNA, 20 nt, Artificial Sequence
  LRRK2 RNA guide
cucugcuucuucacucugug

SEQ ID NO: 76302 - RNA, 20 nt, Artificial Sequence
  LRRK2 RNA guide
cucuguggucuaggccagcu

SEQ ID NO: 76303 - RNA, 20 nt, Artificial Sequence
  LRRK2 RNA guide
cugcuagcuggccuagacca

SEQ ID NO: 76304 - RNA, 20 nt, Artificial Sequence
  LRRK2 RNA guide
cugcuucuucacucuguggu

SEQ ID NO: 76305 - RNA, 20 nt, Artificial Sequence
  LRRK2 RNA guide
cuggccuagaccacagagug

SEQ ID NO: 76306 - RNA, 20 nt, Artificial Sequence
  LRRK2 RNA guide
cuggcugcuagcuggccuag

SEQ ID NO: 76307 - RNA, 20 nt, Artificial Sequence
  LRRK2 RNA guide
cuguggucuaggccagcuag

SEQ ID NO: 76308 - RNA, 20 nt, Artificial Sequence
  LRRK2 RNA guide
cuucacucuguggucuaggc

SEQ ID NO: 76309 - RNA, 20 nt, Artificial Sequence
  LRRK2 RNA guide
cuucuucacucuguggucua

SEQ ID NO: 76310 - RNA, 20 nt, Artificial Sequence
  LRRK2 RNA guide
gccuagaccacagagugaag

SEQ ID NO: 76311 - RNA, 20 nt, Artificial Sequence
  LRRK2 RNA guide
gcuagcuggccuagaccaca

SEQ ID NO: 76312 - RNA, 20 nt, Artificial Sequence
  LRRK2 RNA guide
gcugcuagcuggccuagacc

SEQ ID NO: 76313 - RNA, 20 nt, Artificial Sequence
  LRRK2 RNA guide
gcuggccuagaccacagagu

SEQ ID NO: 76314 - RNA, 20 nt, Artificial Sequence
  LRRK2 RNA guide
gcuggcugcuagcuggccua

SEQ ID NO: 76315 - RNA, 20 nt, Artificial Sequence
  LRRK2 RNA guide
gcuucuucacucuguggucu

SEQ ID NO: 76316 - RNA, 20 nt, Artificial Sequence
  LRRK2 RNA guide
ggccuagaccacagagugaa

SEQ ID NO: 76317 - RNA, 20 nt, Artificial Sequence
  LRRK2 RNA guide
ggcugcuagcuggccuagac

SEQ ID NO: 76318 - RNA, 20 nt, Artificial Sequence
  LRRK2 RNA guide
ggucuaggccagcuagcagc

SEQ ID NO: 76319 - RNA, 20 nt, Artificial Sequence
  LRRK2 RNA guide
gucuaggccagcuagcagcc

SEQ ID NO: 76320 - RNA, 20 nt, Artificial Sequence
  LRRK2 RNA guide
guggucuaggccagcuagca

SEQ ID NO: 76321 - RNA, 20 nt, Artificial Sequence
  LRRK2 RNA guide
uagcuggccuagaccacaga

SEQ ID NO: 76322 - RNA, 20 nt, Artificial Sequence
  LRRK2 RNA guide
uaggccagcuagcagccagc

SEQ ID NO: 76323 - RNA, 20 nt, Artificial Sequence
  LRRK2 RNA guide
ucacucuguggucuaggcca

SEQ ID NO: 76324 - RNA, 20 nt, Artificial Sequence
  LRRK2 RNA guide
ucagcuggcugcuagcuggc

SEQ ID NO: 76325 - RNA, 20 nt, Artificial Sequence
  LRRK2 RNA guide
ucuaggccagcuagcagcca

SEQ ID NO: 76326 - RNA, 20 nt, Artificial Sequence
  LRRK2 RNA guide
ucugcuucuucacucugugg

SEQ ID NO: 76327 - RNA, 20 nt, Artificial Sequence
  LRRK2 RNA guide
ucuguggucuaggccagcua

SEQ ID NO: 76328 - RNA, 20 nt, Artificial Sequence
  LRRK2 RNA guide
ucuucacucuguggucuagg

SEQ ID NO: 76329 - RNA, 20 nt, Artificial Sequence
  LRRK2 RNA guide
ugcuagcuggccuagaccac

SEQ ID NO: 76330 - RNA, 20 nt, Artificial Sequence
  LRRK2 RNA guide
ugcuucuucacucugugguc

SEQ ID NO: 76331 - RNA, 20 nt, Artificial Sequence
  LRRK2 RNA guide
uggccuagaccacagaguga

SEQ ID NO: 76332 - RNA, 20 nt, Artificial Sequence
  LRRK2 RNA guide
uggcugcuagcuggccuaga

SEQ ID NO: 76333 - RNA, 20 nt, Artificial Sequence
  LRRK2 RNA guide
uggucuaggccagcuagcag

SEQ ID NO: 76334 - RNA, 20 nt, Artificial Sequence
  LRRK2 RNA guide
uguggucuaggccagcuagc

SEQ ID NO: 76335 - RNA, 20 nt, Artificial Sequence
  LRRK2 RNA guide
uucacucuguggucuaggcc

SEQ ID NO: 76336 - RNA, 20 nt, Artificial Sequence
  LRRK2 RNA guide
uucuucacucuguggucuag

SEQ ID NO: 76337 - RNA, 21 nt, Artificial Sequence
  LRRK2 RNA guide
aacucagcuggcugcuagcug

SEQ ID NO: 76338 - RNA, 21 nt, Artificial Sequence
  LRRK2 RNA guide
acucagcuggcugcuagcugg

SEQ ID NO: 76339 - RNA, 21 nt, Artificial Sequence
  LRRK2 RNA guide
acucuguggucuaggccagcu

SEQ ID NO: 76340 - RNA, 21 nt, Artificial Sequence
  LRRK2 RNA guide
agcuggccuagaccacagagu

SEQ ID NO: 76341 - RNA, 21 nt, Artificial Sequence
  LRRK2 RNA guide
agcuggcugcuagcuggccua

SEQ ID NO: 76342 - RNA, 21 nt, Artificial Sequence
  LRRK2 RNA guide
cacucuguggucuaggccagc

SEQ ID NO: 76343 - RNA, 21 nt, Artificial Sequence
  LRRK2 RNA guide
cagcuggcugcuagcuggccu

SEQ ID NO: 76344 - RNA, 21 nt, Artificial Sequence
  LRRK2 RNA guide
ccuagaccacagagugaagaa

SEQ ID NO: 76345 - RNA, 21 nt, Artificial Sequence
  LRRK2 RNA guide
cuagaccacagagugaagaag

SEQ ID NO: 76346 - RNA, 21 nt, Artificial Sequence
  LRRK2 RNA guide
cuagcuggccuagaccacaga

SEQ ID NO: 76347 - RNA, 21 nt, Artificial Sequence
  LRRK2 RNA guide
cuaggccagcuagcagccagc

SEQ ID NO: 76348 - RNA, 21 nt, Artificial Sequence
  LRRK2 RNA guide
cucagcuggcugcuagcuggc

SEQ ID NO: 76349 - RNA, 21 nt, Artificial Sequence
  LRRK2 RNA guide
cucugcuucuucacucugugg

SEQ ID NO: 76350 - RNA, 21 nt, Artificial Sequence
  LRRK2 RNA guide
cucuguggucuaggccagcua

SEQ ID NO: 76351 - RNA, 21 nt, Artificial Sequence
  LRRK2 RNA guide
cugcuagcuggccuagaccac

SEQ ID NO: 76352 - RNA, 21 nt, Artificial Sequence
  LRRK2 RNA guide
cugcuucuucacucugugguc

SEQ ID NO: 76353 - RNA, 21 nt, Artificial Sequence
  LRRK2 RNA guide
cuggccuagaccacagaguga

SEQ ID NO: 76354 - RNA, 21 nt, Artificial Sequence
  LRRK2 RNA guide
cuggcugcuagcuggccuaga

SEQ ID NO: 76355 - RNA, 21 nt, Artificial Sequence
  LRRK2 RNA guide
cuguggucuaggccagcuagc

SEQ ID NO: 76356 - RNA, 21 nt, Artificial Sequence
  LRRK2 RNA guide
cuucacucuguggucuaggcc

SEQ ID NO: 76357 - RNA, 21 nt, Artificial Sequence
  LRRK2 RNA guide
cuucuucacucuguggucuag

SEQ ID NO: 76358 - RNA, 21 nt, Artificial Sequence
  LRRK2 RNA guide
gaacucagcuggcugcuagcu

SEQ ID NO: 76359 - RNA, 21 nt, Artificial Sequence
  LRRK2 RNA guide
gccuagaccacagagugaaga

SEQ ID NO: 76360 - RNA, 21 nt, Artificial Sequence
  LRRK2 RNA guide
gcuagcuggccuagaccacag

SEQ ID NO: 76361 - RNA, 21 nt, Artificial Sequence
  LRRK2 RNA guide
gcucugcuucuucacucugug

SEQ ID NO: 76362 - RNA, 21 nt, Artificial Sequence
  LRRK2 RNA guide
gcugcuagcuggccuagacca

SEQ ID NO: 76363 - RNA, 21 nt, Artificial Sequence
  LRRK2 RNA guide
gcuggccuagaccacagagug

SEQ ID NO: 76364 - RNA, 21 nt, Artificial Sequence
  LRRK2 RNA guide
gcuggcugcuagcuggccuag

SEQ ID NO: 76365 - RNA, 21 nt, Artificial Sequence
  LRRK2 RNA guide
gcuucuucacucuguggucua

SEQ ID NO: 76366 - RNA, 21 nt, Artificial Sequence
  LRRK2 RNA guide
ggccuagaccacagagugaag

SEQ ID NO: 76367 - RNA, 21 nt, Artificial Sequence
  LRRK2 RNA guide
ggcugcuagcuggccuagacc

SEQ ID NO: 76368 - RNA, 21 nt, Artificial Sequence
  LRRK2 RNA guide
ggucuaggccagcuagcagcc

SEQ ID NO: 76369 - RNA, 21 nt, Artificial Sequence
  LRRK2 RNA guide
gucuaggccagcuagcagcca

SEQ ID NO: 76370 - RNA, 21 nt, Artificial Sequence
  LRRK2 RNA guide
guggucuaggccagcuagcag

SEQ ID NO: 76371 - RNA, 21 nt, Artificial Sequence
  LRRK2 RNA guide
uagcuggccuagaccacagag

SEQ ID NO: 76372 - RNA, 21 nt, Artificial Sequence
  LRRK2 RNA guide
uaggccagcuagcagccagcu

SEQ ID NO: 76373 - RNA, 21 nt, Artificial Sequence
  LRRK2 RNA guide
ucacucuguggucuaggccag

SEQ ID NO: 76374 - RNA, 21 nt, Artificial Sequence
  LRRK2 RNA guide
ucagcuggcugcuagcuggcc

SEQ ID NO: 76375 - RNA, 21 nt, Artificial Sequence
  LRRK2 RNA guide
ucuaggccagcuagcagccag

SEQ ID NO: 76376 - RNA, 21 nt, Artificial Sequence
  LRRK2 RNA guide
ucugcuucuucacucuguggu

SEQ ID NO: 76377 - RNA, 21 nt, Artificial Sequence
  LRRK2 RNA guide
ucuguggucuaggccagcuag

SEQ ID NO: 76378 - RNA, 21 nt, Artificial Sequence
  LRRK2 RNA guide
ucuucacucuguggucuaggc

SEQ ID NO: 76379 - RNA, 21 nt, Artificial Sequence
  LRRK2 RNA guide
ugcuagcuggccuagaccaca

SEQ ID NO: 76380 - RNA, 21 nt, Artificial Sequence
  LRRK2 RNA guide
ugcuucuucacucuguggucu

SEQ ID NO: 76381 - RNA, 21 nt, Artificial Sequence
  LRRK2 RNA guide
uggccuagaccacagagugaa

SEQ ID NO: 76382 - RNA, 21 nt, Artificial Sequence
  LRRK2 RNA guide
uggcugcuagcuggccuagac

SEQ ID NO: 76383 - RNA, 21 nt, Artificial Sequence
  LRRK2 RNA guide
uggucuaggccagcuagcagc

SEQ ID NO: 76384 - RNA, 21 nt, Artificial Sequence
  LRRK2 RNA guide
uguggucuaggccagcuagca

SEQ ID NO: 76385 - RNA, 21 nt, Artificial Sequence
  LRRK2 RNA guide
uucacucuguggucuaggcca

SEQ ID NO: 76386 - RNA, 21 nt, Artificial Sequence
  LRRK2 RNA guide
uucuucacucuguggucuagg

SEQ ID NO: 76387 - RNA, 22 nt, Artificial Sequence
  LRRK2 RNA guide
aacucagcuggcugcuagcugg

SEQ ID NO: 76388 - RNA, 22 nt, Artificial Sequence
  LRRK2 RNA guide
acucagcuggcugcuagcuggc

SEQ ID NO: 76389 - RNA, 22 nt, Artificial Sequence
  LRRK2 RNA guide
acucuguggucuaggccagcua

SEQ ID NO: 76390 - RNA, 22 nt, Artificial Sequence
  LRRK2 RNA guide
agcucugcuucuucacucugug

SEQ ID NO: 76391 - RNA, 22 nt, Artificial Sequence
  LRRK2 RNA guide
agcuggccuagaccacagagug

SEQ ID NO: 76392 - RNA, 22 nt, Artificial Sequence
  LRRK2 RNA guide
agcuggcugcuagcuggccuag

SEQ ID NO: 76393 - RNA, 22 nt, Artificial Sequence
  LRRK2 RNA guide
cacucuguggucuaggccagcu

SEQ ID NO: 76394 - RNA, 22 nt, Artificial Sequence
  LRRK2 RNA guide
cagcuggcugcuagcuggccua

SEQ ID NO: 76395 - RNA, 22 nt, Artificial Sequence
  LRRK2 RNA guide
ccuagaccacagagugaagaag

SEQ ID NO: 76396 - RNA, 22 nt, Artificial Sequence
  LRRK2 RNA guide
cuagaccacagagugaagaagc

SEQ ID NO: 76397 - RNA, 22 nt, Artificial Sequence
  LRRK2 RNA guide
cuagcuggccuagaccacagag

SEQ ID NO: 76398 - RNA, 22 nt, Artificial Sequence
  LRRK2 RNA guide
cuaggccagcuagcagccagcu

SEQ ID NO: 76399 - RNA, 22 nt, Artificial Sequence
  LRRK2 RNA guide
cucagcuggcugcuagcuggcc

SEQ ID NO: 76400 - RNA, 22 nt, Artificial Sequence
  LRRK2 RNA guide
cucugcuucuucacucuguggu

SEQ ID NO: 76401 - RNA, 22 nt, Artificial Sequence
  LRRK2 RNA guide
cucuguggucuaggccagcuag

SEQ ID NO: 76402 - RNA, 22 nt, Artificial Sequence
  LRRK2 RNA guide
cugcuagcuggccuagaccaca

SEQ ID NO: 76403 - RNA, 22 nt, Artificial Sequence
  LRRK2 RNA guide
cugcuucuucacucuguggucu

SEQ ID NO: 76404 - RNA, 22 nt, Artificial Sequence
  LRRK2 RNA guide
cuggccuagaccacagagugaa

SEQ ID NO: 76405 - RNA, 22 nt, Artificial Sequence
  LRRK2 RNA guide
cuggcugcuagcuggccuagac

SEQ ID NO: 76406 - RNA, 22 nt, Artificial Sequence
  LRRK2 RNA guide
cuguggucuaggccagcuagca

SEQ ID NO: 76407 - RNA, 22 nt, Artificial Sequence
  LRRK2 RNA guide
cuucacucuguggucuaggcca

SEQ ID NO: 76408 - RNA, 22 nt, Artificial Sequence
  LRRK2 RNA guide
cuucuucacucuguggucuagg

SEQ ID NO: 76409 - RNA, 22 nt, Artificial Sequence
  LRRK2 RNA guide
gaacucagcuggcugcuagcug

SEQ ID NO: 76410 - RNA, 22 nt, Artificial Sequence
  LRRK2 RNA guide
gccuagaccacagagugaagaa

SEQ ID NO: 76411 - RNA, 22 nt, Artificial Sequence
  LRRK2 RNA guide
gcuagcuggccuagaccacaga

SEQ ID NO: 76412 - RNA, 22 nt, Artificial Sequence
  LRRK2 RNA guide
gcucugcuucuucacucugugg

SEQ ID NO: 76413 - RNA, 22 nt, Artificial Sequence
  LRRK2 RNA guide
gcugcuagcuggccuagaccac

SEQ ID NO: 76414 - RNA, 22 nt, Artificial Sequence
  LRRK2 RNA guide
gcuggccuagaccacagaguga

SEQ ID NO: 76415 - RNA, 22 nt, Artificial Sequence
  LRRK2 RNA guide
gcuggcugcuagcuggccuaga

SEQ ID NO: 76416 - RNA, 22 nt, Artificial Sequence
  LRRK2 RNA guide
gcuucuucacucuguggucuag

SEQ ID NO: 76417 - RNA, 22 nt, Artificial Sequence
  LRRK2 RNA guide
ggccuagaccacagagugaaga

SEQ ID NO: 76418 - RNA, 22 nt, Artificial Sequence
  LRRK2 RNA guide
ggcugcuagcuggccuagacca

SEQ ID NO: 76419 - RNA, 22 nt, Artificial Sequence
  LRRK2 RNA guide
ggucuaggccagcuagcagcca

SEQ ID NO: 76420 - RNA, 22 nt, Artificial Sequence
  LRRK2 RNA guide
gucuaggccagcuagcagccag

SEQ ID NO: 76421 - RNA, 22 nt, Artificial Sequence
  LRRK2 RNA guide
guggucuaggccagcuagcagc

SEQ ID NO: 76422 - RNA, 22 nt, Artificial Sequence
  LRRK2 RNA guide
uagcuggccuagaccacagagu

SEQ ID NO: 76423 - RNA, 22 nt, Artificial Sequence
  LRRK2 RNA guide
uaggccagcuagcagccagcug

SEQ ID NO: 76424 - RNA, 22 nt, Artificial Sequence
  LRRK2 RNA guide
ucacucuguggucuaggccagc

SEQ ID NO: 76425 - RNA, 22 nt, Artificial Sequence
  LRRK2 RNA guide
ucagcuggcugcuagcuggccu

SEQ ID NO: 76426 - RNA, 22 nt, Artificial Sequence
  LRRK2 RNA guide
ucuaggccagcuagcagccagc

SEQ ID NO: 76427 - RNA, 22 nt, Artificial Sequence
  LRRK2 RNA guide
ucugcuucuucacucugugguc

SEQ ID NO: 76428 - RNA, 22 nt, Artificial Sequence
  LRRK2 RNA guide
ucuguggucuaggccagcuagc

SEQ ID NO: 76429 - RNA, 22 nt, Artificial Sequence
  LRRK2 RNA guide
ucuucacucuguggucuaggcc

SEQ ID NO: 76430 - RNA, 22 nt, Artificial Sequence
  LRRK2 RNA guide
ugaacucagcuggcugcuagcu

SEQ ID NO: 76431 - RNA, 22 nt, Artificial Sequence
  LRRK2 RNA guide
ugcuagcuggccuagaccacag

SEQ ID NO: 76432 - RNA, 22 nt, Artificial Sequence
  LRRK2 RNA guide
ugcuucuucacucuguggucua

SEQ ID NO: 76433 - RNA, 22 nt, Artificial Sequence
  LRRK2 RNA guide
uggccuagaccacagagugaag

SEQ ID NO: 76434 - RNA, 22 nt, Artificial Sequence
  LRRK2 RNA guide
uggcugcuagcuggccuagacc

SEQ ID NO: 76435 - RNA, 22 nt, Artificial Sequence
  LRRK2 RNA guide
uggucuaggccagcuagcagcc

SEQ ID NO: 76436 - RNA, 22 nt, Artificial Sequence
  LRRK2 RNA guide
uguggucuaggccagcuagcag

SEQ ID NO: 76437 - RNA, 22 nt, Artificial Sequence
  LRRK2 RNA guide
uucacucuguggucuaggccag

SEQ ID NO: 76438 - RNA, 22 nt, Artificial Sequence
  LRRK2 RNA guide
uucuucacucuguggucuaggc

SEQ ID NO: 76439 - RNA, 20 nt, Artificial Sequence
  LRRK2 RNA guide
acucuguggucugggccagc

SEQ ID NO: 76440 - RNA, 20 nt, Artificial Sequence
  LRRK2 RNA guide
agcuggcccagaccacagag

SEQ ID NO: 76441 - RNA, 20 nt, Artificial Sequence
  LRRK2 RNA guide
agcuggcugcuagcuggccc

SEQ ID NO: 76442 - RNA, 20 nt, Artificial Sequence
  LRRK2 RNA guide
cacucuguggucugggccag

SEQ ID NO: 76443 - RNA, 20 nt, Artificial Sequence
  LRRK2 RNA guide
ccagaccacagagugaagaa

SEQ ID NO: 76444 - RNA, 20 nt, Artificial Sequence
  LRRK2 RNA guide
cccagaccacagagugaaga

SEQ ID NO: 76445 - RNA, 20 nt, Artificial Sequence
  LRRK2 RNA guide
cuagcuggcccagaccacag

SEQ ID NO: 76446 - RNA, 20 nt, Artificial Sequence
  LRRK2 RNA guide
cucuguggucugggccagcu

SEQ ID NO: 76447 - RNA, 20 nt, Artificial Sequence
  LRRK2 RNA guide
cugcuagcuggcccagacca

SEQ ID NO: 76448 - RNA, 20 nt, Artificial Sequence
  LRRK2 RNA guide
cuggcccagaccacagagug

SEQ ID NO: 76449 - RNA, 20 nt, Artificial Sequence
  LRRK2 RNA guide
cuggcugcuagcuggcccag

SEQ ID NO: 76450 - RNA, 20 nt, Artificial Sequence
  LRRK2 RNA guide
cugggccagcuagcagccag

SEQ ID NO: 76451 - RNA, 20 nt, Artificial Sequence
  LRRK2 RNA guide
cuguggucugggccagcuag

SEQ ID NO: 76452 - RNA, 20 nt, Artificial Sequence
  LRRK2 RNA guide
cuucacucuguggucugggc

SEQ ID NO: 76453 - RNA, 20 nt, Artificial Sequence
  LRRK2 RNA guide
cuucuucacucuguggucug

SEQ ID NO: 76454 - RNA, 20 nt, Artificial Sequence
  LRRK2 RNA guide
gcccagaccacagagugaag

SEQ ID NO: 76455 - RNA, 20 nt, Artificial Sequence
  LRRK2 RNA guide
gcuagcuggcccagaccaca

SEQ ID NO: 76456 - RNA, 20 nt, Artificial Sequence
  LRRK2 RNA guide
gcugcuagcuggcccagacc

SEQ ID NO: 76457 - RNA, 20 nt, Artificial Sequence
  LRRK2 RNA guide
gcuggcccagaccacagagu

SEQ ID NO: 76458 - RNA, 20 nt, Artificial Sequence
  LRRK2 RNA guide
gcuggcugcuagcuggccca

SEQ ID NO: 76459 - RNA, 20 nt, Artificial Sequence
  LRRK2 RNA guide
ggcccagaccacagagugaa

SEQ ID NO: 76460 - RNA, 20 nt, Artificial Sequence
  LRRK2 RNA guide
ggcugcuagcuggcccagac

SEQ ID NO: 76461 - RNA, 20 nt, Artificial Sequence
  LRRK2 RNA guide
ggucugggccagcuagcagc

SEQ ID NO: 76462 - RNA, 20 nt, Artificial Sequence
  LRRK2 RNA guide
gucugggccagcuagcagcc

SEQ ID NO: 76463 - RNA, 20 nt, Artificial Sequence
  LRRK2 RNA guide
guggucugggccagcuagca

SEQ ID NO: 76464 - RNA, 20 nt, Artificial Sequence
  LRRK2 RNA guide
uagcuggcccagaccacaga

SEQ ID NO: 76465 - RNA, 20 nt, Artificial Sequence
  LRRK2 RNA guide
ucacucuguggucugggcca

SEQ ID NO: 76466 - RNA, 20 nt, Artificial Sequence
  LRRK2 RNA guide
ucugggccagcuagcagcca

SEQ ID NO: 76467 - RNA, 20 nt, Artificial Sequence
  LRRK2 RNA guide
ucuguggucugggccagcua

SEQ ID NO: 76468 - RNA, 20 nt, Artificial Sequence
  LRRK2 RNA guide
ucuucacucuguggucuggg

SEQ ID NO: 76469 - RNA, 20 nt, Artificial Sequence
  LRRK2 RNA guide
ugcuagcuggcccagaccac

SEQ ID NO: 76470 - RNA, 20 nt, Artificial Sequence
  LRRK2 RNA guide
uggcccagaccacagaguga

SEQ ID NO: 76471 - RNA, 20 nt, Artificial Sequence
  LRRK2 RNA guide
uggcugcuagcuggcccaga

SEQ ID NO: 76472 - RNA, 20 nt, Artificial Sequence
  LRRK2 RNA guide
ugggccagcuagcagccagc

SEQ ID NO: 76473 - RNA, 20 nt, Artificial Sequence
  LRRK2 RNA guide
uggucugggccagcuagcag

SEQ ID NO: 76474 - RNA, 20 nt, Artificial Sequence
  LRRK2 RNA guide
uguggucugggccagcuagc

SEQ ID NO: 76475 - RNA, 20 nt, Artificial Sequence
  LRRK2 RNA guide
uucacucuguggucugggcc

SEQ ID NO: 76476 - RNA, 20 nt, Artificial Sequence
  LRRK2 RNA guide
uucuucacucuguggucugg

SEQ ID NO: 76477 - RNA, 21 nt, Artificial Sequence
  LRRK2 RNA guide
acucuguggucugggccagcu

SEQ ID NO: 76478 - RNA, 21 nt, Artificial Sequence
  LRRK2 RNA guide
agcuggcccagaccacagagu

SEQ ID NO: 76479 - RNA, 21 nt, Artificial Sequence
  LRRK2 RNA guide
agcuggcugcuagcuggccca

SEQ ID NO: 76480 - RNA, 21 nt, Artificial Sequence
  LRRK2 RNA guide
cacucuguggucugggccagc

SEQ ID NO: 76481 - RNA, 21 nt, Artificial Sequence
  LRRK2 RNA guide
cagcuggcugcuagcuggccc

SEQ ID NO: 76482 - RNA, 21 nt, Artificial Sequence
  LRRK2 RNA guide
ccagaccacagagugaagaag

SEQ ID NO: 76483 - RNA, 21 nt, Artificial Sequence
  LRRK2 RNA guide
cccagaccacagagugaagaa

SEQ ID NO: 76484 - RNA, 21 nt, Artificial Sequence
  LRRK2 RNA guide
cuagcuggcccagaccacaga

SEQ ID NO: 76485 - RNA, 21 nt, Artificial Sequence
  LRRK2 RNA guide
cucuguggucugggccagcua

SEQ ID NO: 76486 - RNA, 21 nt, Artificial Sequence
  LRRK2 RNA guide
cugcuagcuggcccagaccac

SEQ ID NO: 76487 - RNA, 21 nt, Artificial Sequence
  LRRK2 RNA guide
cuggcccagaccacagaguga

SEQ ID NO: 76488 - RNA, 21 nt, Artificial Sequence
  LRRK2 RNA guide
cuggcugcuagcuggcccaga

SEQ ID NO: 76489 - RNA, 21 nt, Artificial Sequence
  LRRK2 RNA guide
cugggccagcuagcagccagc

SEQ ID NO: 76490 - RNA, 21 nt, Artificial Sequence
  LRRK2 RNA guide
cuguggucugggccagcuagc

SEQ ID NO: 76491 - RNA, 21 nt, Artificial Sequence
  LRRK2 RNA guide
cuucacucuguggucugggcc

SEQ ID NO: 76492 - RNA, 21 nt, Artificial Sequence
  LRRK2 RNA guide
cuucuucacucuguggucugg

SEQ ID NO: 76493 - RNA, 21 nt, Artificial Sequence
  LRRK2 RNA guide
gcccagaccacagagugaaga

SEQ ID NO: 76494 - RNA, 21 nt, Artificial Sequence
  LRRK2 RNA guide
gcuagcuggcccagaccacag

SEQ ID NO: 76495 - RNA, 21 nt, Artificial Sequence
  LRRK2 RNA guide
gcugcuagcuggcccagacca

SEQ ID NO: 76496 - RNA, 21 nt, Artificial Sequence
  LRRK2 RNA guide
gcuggcccagaccacagagug

SEQ ID NO: 76497 - RNA, 21 nt, Artificial Sequence
  LRRK2 RNA guide
gcuggcugcuagcuggcccag

SEQ ID NO: 76498 - RNA, 21 nt, Artificial Sequence
  LRRK2 RNA guide
gcuucuucacucuguggucug

SEQ ID NO: 76499 - RNA, 21 nt, Artificial Sequence
  LRRK2 RNA guide
ggcccagaccacagagugaag

SEQ ID NO: 76500 - RNA, 21 nt, Artificial Sequence
  LRRK2 RNA guide
ggcugcuagcuggcccagacc

SEQ ID NO: 76501 - RNA, 21 nt, Artificial Sequence
  LRRK2 RNA guide
ggucugggccagcuagcagcc

SEQ ID NO: 76502 - RNA, 21 nt, Artificial Sequence
  LRRK2 RNA guide
gucugggccagcuagcagcca

SEQ ID NO: 76503 - RNA, 21 nt, Artificial Sequence
  LRRK2 RNA guide
guggucugggccagcuagcag

SEQ ID NO: 76504 - RNA, 21 nt, Artificial Sequence
  LRRK2 RNA guide
uagcuggcccagaccacagag

SEQ ID NO: 76505 - RNA, 21 nt, Artificial Sequence
  LRRK2 RNA guide
ucacucuguggucugggccag

SEQ ID NO: 76506 - RNA, 21 nt, Artificial Sequence
  LRRK2 RNA guide
ucugggccagcuagcagccag

SEQ ID NO: 76507 - RNA, 21 nt, Artificial Sequence
  LRRK2 RNA guide
ucuguggucugggccagcuag

SEQ ID NO: 76508 - RNA, 21 nt, Artificial Sequence
  LRRK2 RNA guide
ucuucacucuguggucugggc

SEQ ID NO: 76509 - RNA, 21 nt, Artificial Sequence
  LRRK2 RNA guide
ugcuagcuggcccagaccaca

SEQ ID NO: 76510 - RNA, 21 nt, Artificial Sequence
  LRRK2 RNA guide
uggcccagaccacagagugaa

SEQ ID NO: 76511 - RNA, 21 nt, Artificial Sequence
  LRRK2 RNA guide
uggcugcuagcuggcccagac

SEQ ID NO: 76512 - RNA, 21 nt, Artificial Sequence
  LRRK2 RNA guide
ugggccagcuagcagccagcu

SEQ ID NO: 76513 - RNA, 21 nt, Artificial Sequence
  LRRK2 RNA guide
uggucugggccagcuagcagc

SEQ ID NO: 76514 - RNA, 21 nt, Artificial Sequence
  LRRK2 RNA guide
uguggucugggccagcuagca

SEQ ID NO: 76515 - RNA, 21 nt, Artificial Sequence
  LRRK2 RNA guide
uucacucuguggucugggcca

SEQ ID NO: 76516 - RNA, 21 nt, Artificial Sequence
  LRRK2 RNA guide
uucuucacucuguggucuggg

SEQ ID NO: 76517 - RNA, 22 nt, Artificial Sequence
  LRRK2 RNA guide
acucuguggucugggccagcua

SEQ ID NO: 76518 - RNA, 22 nt, Artificial Sequence
  LRRK2 RNA guide
agcuggcccagaccacagagug

SEQ ID NO: 76519 - RNA, 22 nt, Artificial Sequence
  LRRK2 RNA guide
agcuggcugcuagcuggcccag

SEQ ID NO: 76520 - RNA, 22 nt, Artificial Sequence
  LRRK2 RNA guide
cacucuguggucugggccagcu

SEQ ID NO: 76521 - RNA, 22 nt, Artificial Sequence
  LRRK2 RNA guide
cagcuggcugcuagcuggccca

SEQ ID NO: 76522 - RNA, 22 nt, Artificial Sequence
  LRRK2 RNA guide
ccagaccacagagugaagaagc

SEQ ID NO: 76523 - RNA, 22 nt, Artificial Sequence
  LRRK2 RNA guide
cccagaccacagagugaagaag

SEQ ID NO: 76524 - RNA, 22 nt, Artificial Sequence
  LRRK2 RNA guide
cuagcuggcccagaccacagag

SEQ ID NO: 76525 - RNA, 22 nt, Artificial Sequence
  LRRK2 RNA guide
cucuguggucugggccagcuag

SEQ ID NO: 76526 - RNA, 22 nt, Artificial Sequence
  LRRK2 RNA guide
cugcuagcuggcccagaccaca

SEQ ID NO: 76527 - RNA, 22 nt, Artificial Sequence
  LRRK2 RNA guide
cuggcccagaccacagagugaa

SEQ ID NO: 76528 - RNA, 22 nt, Artificial Sequence
  LRRK2 RNA guide
cuggcugcuagcuggcccagac

SEQ ID NO: 76529 - RNA, 22 nt, Artificial Sequence
  LRRK2 RNA guide
cugggccagcuagcagccagcu

SEQ ID NO: 76530 - RNA, 22 nt, Artificial Sequence
  LRRK2 RNA guide
cuguggucugggccagcuagca

SEQ ID NO: 76531 - RNA, 22 nt, Artificial Sequence
  LRRK2 RNA guide
cuucacucuguggucugggcca

SEQ ID NO: 76532 - RNA, 22 nt, Artificial Sequence
  LRRK2 RNA guide
cuucuucacucuguggucuggg

SEQ ID NO: 76533 - RNA, 22 nt, Artificial Sequence
  LRRK2 RNA guide
gcccagaccacagagugaagaa

SEQ ID NO: 76534 - RNA, 22 nt, Artificial Sequence
  LRRK2 RNA guide
gcuagcuggcccagaccacaga

SEQ ID NO: 76535 - RNA, 22 nt, Artificial Sequence
  LRRK2 RNA guide
gcugcuagcuggcccagaccac

SEQ ID NO: 76536 - RNA, 22 nt, Artificial Sequence
  LRRK2 RNA guide
gcuggcccagaccacagaguga

SEQ ID NO: 76537 - RNA, 22 nt, Artificial Sequence
  LRRK2 RNA guide
gcuggcugcuagcuggcccaga

SEQ ID NO: 76538 - RNA, 22 nt, Artificial Sequence
  LRRK2 RNA guide
gcuucuucacucuguggucugg

SEQ ID NO: 76539 - RNA, 22 nt, Artificial Sequence
  LRRK2 RNA guide
ggcccagaccacagagugaaga

SEQ ID NO: 76540 - RNA, 22 nt, Artificial Sequence
  LRRK2 RNA guide
ggcugcuagcuggcccagacca

SEQ ID NO: 76541 - RNA, 22 nt, Artificial Sequence
  LRRK2 RNA guide
ggucugggccagcuagcagcca

SEQ ID NO: 76542 - RNA, 22 nt, Artificial Sequence
  LRRK2 RNA guide
gucugggccagcuagcagccag

SEQ ID NO: 76543 - RNA, 22 nt, Artificial Sequence
  LRRK2 RNA guide
guggucugggccagcuagcagc

SEQ ID NO: 76544 - RNA, 22 nt, Artificial Sequence
  LRRK2 RNA guide
uagcuggcccagaccacagagu

SEQ ID NO: 76545 - RNA, 22 nt, Artificial Sequence
  LRRK2 RNA guide
ucacucuguggucugggccagc

SEQ ID NO: 76546 - RNA, 22 nt, Artificial Sequence
  LRRK2 RNA guide
ucagcuggcugcuagcuggccc

SEQ ID NO: 76547 - RNA, 22 nt, Artificial Sequence
  LRRK2 RNA guide
ucugggccagcuagcagccagc

SEQ ID NO: 76548 - RNA, 22 nt, Artificial Sequence
  LRRK2 RNA guide
ucuguggucugggccagcuagc

SEQ ID NO: 76549 - RNA, 22 nt, Artificial Sequence
  LRRK2 RNA guide
ucuucacucuguggucugggcc

SEQ ID NO: 76550 - RNA, 22 nt, Artificial Sequence
  LRRK2 RNA guide
ugcuagcuggcccagaccacag

SEQ ID NO: 76551 - RNA, 22 nt, Artificial Sequence
  LRRK2 RNA guide
ugcuucuucacucuguggucug

SEQ ID NO: 76552 - RNA, 22 nt, Artificial Sequence
  LRRK2 RNA guide
uggcccagaccacagagugaag

SEQ ID NO: 76553 - RNA, 22 nt, Artificial Sequence
  LRRK2 RNA guide
uggcugcuagcuggcccagacc

SEQ ID NO: 76554 - RNA, 22 nt, Artificial Sequence
  LRRK2 RNA guide
ugggccagcuagcagccagcug

SEQ ID NO: 76555 - RNA, 22 nt, Artificial Sequence
  LRRK2 RNA guide
uggucugggccagcuagcagcc

SEQ ID NO: 76556 - RNA, 22 nt, Artificial Sequence
  LRRK2 RNA guide
uguggucugggccagcuagcag

SEQ ID NO: 76557 - RNA, 22 nt, Artificial Sequence
  LRRK2 RNA guide
uucacucuguggucugggccag

SEQ ID NO: 76558 - RNA, 22 nt, Artificial Sequence
  LRRK2 RNA guide
uucuucacucuguggucugggc

SEQ ID NO: 76559 - RNA, 20 nt, Artificial Sequence
  LRRK2 RNA guide
aaaaugaaaggccaugaguc

SEQ ID NO: 76560 - RNA, 20 nt, Artificial Sequence
  LRRK2 RNA guide
aaaggccaugagucugaacc

SEQ ID NO: 76561 - RNA, 20 nt, Artificial Sequence
  LRRK2 RNA guide
aaaugaaaggccaugagucu

SEQ ID NO: 76562 - RNA, 20 nt, Artificial Sequence
  LRRK2 RNA guide
aaccaaggugaacucagcug

SEQ ID NO: 76563 - RNA, 20 nt, Artificial Sequence
  LRRK2 RNA guide
aaggccaugagucugaacca

SEQ ID NO: 76564 - RNA, 20 nt, Artificial Sequence
  LRRK2 RNA guide
aaugaaaggccaugagucug

SEQ ID NO: 76565 - RNA, 20 nt, Artificial Sequence
  LRRK2 RNA guide
accuugguucagacucaugg

SEQ ID NO: 76566 - RNA, 20 nt, Artificial Sequence
  LRRK2 RNA guide
agcagccagcugaguucacc

SEQ ID NO: 76567 - RNA, 20 nt, Artificial Sequence
  LRRK2 RNA guide
agccagcugaguucaccuug

SEQ ID NO: 76568 - RNA, 20 nt, Artificial Sequence
  LRRK2 RNA guide
agcugaguucaccuugguuc

SEQ ID NO: 76569 - RNA, 20 nt, Artificial Sequence
  LRRK2 RNA guide
aggccaugagucugaaccaa

SEQ ID NO: 76570 - RNA, 20 nt, Artificial Sequence
  LRRK2 RNA guide
agucugaaccaaggugaacu

SEQ ID NO: 76571 - RNA, 20 nt, Artificial Sequence
  LRRK2 RNA guide
aguucaccuugguucagacu

SEQ ID NO: 76572 - RNA, 20 nt, Artificial Sequence
  LRRK2 RNA guide
augaaaggccaugagucuga

SEQ ID NO: 76573 - RNA, 20 nt, Artificial Sequence
  LRRK2 RNA guide
augagucugaaccaagguga

SEQ ID NO: 76574 - RNA, 20 nt, Artificial Sequence
  LRRK2 RNA guide
caccuugguucagacucaug

SEQ ID NO: 76575 - RNA, 20 nt, Artificial Sequence
  LRRK2 RNA guide
cagccagcugaguucaccuu

SEQ ID NO: 76576 - RNA, 20 nt, Artificial Sequence
  LRRK2 RNA guide
cagcugaguucaccuugguu

SEQ ID NO: 76577 - RNA, 20 nt, Artificial Sequence
  LRRK2 RNA guide
caugagucugaaccaaggug

SEQ ID NO: 76578 - RNA, 20 nt, Artificial Sequence
  LRRK2 RNA guide
ccagcugaguucaccuuggu

SEQ ID NO: 76579 - RNA, 20 nt, Artificial Sequence
  LRRK2 RNA guide
ccaugagucugaaccaaggu

SEQ ID NO: 76580 - RNA, 20 nt, Artificial Sequence
  LRRK2 RNA guide
ccuugguucagacucauggc

SEQ ID NO: 76581 - RNA, 20 nt, Artificial Sequence
  LRRK2 RNA guide
cugaaccaaggugaacucag

SEQ ID NO: 76582 - RNA, 20 nt, Artificial Sequence
  LRRK2 RNA guide
cugaguucaccuugguucag

SEQ ID NO: 76583 - RNA, 20 nt, Artificial Sequence
  LRRK2 RNA guide
cuugguucagacucauggcc

SEQ ID NO: 76584 - RNA, 20 nt, Artificial Sequence
  LRRK2 RNA guide
gaaaaugaaaggccaugagu

SEQ ID NO: 76585 - RNA, 20 nt, Artificial Sequence
  LRRK2 RNA guide
gaaaggccaugagucugaac

SEQ ID NO: 76586 - RNA, 20 nt, Artificial Sequence
  LRRK2 RNA guide
gaaccaaggugaacucagcu

SEQ ID NO: 76587 - RNA, 20 nt, Artificial Sequence
  LRRK2 RNA guide
gagucugaaccaaggugaac

SEQ ID NO: 76588 - RNA, 20 nt, Artificial Sequence
  LRRK2 RNA guide
gaguucaccuugguucagac

SEQ ID NO: 76589 - RNA, 20 nt, Artificial Sequence
  LRRK2 RNA guide
gcagccagcugaguucaccu

SEQ ID NO: 76590 - RNA, 20 nt, Artificial Sequence
  LRRK2 RNA guide
gccagcugaguucaccuugg

SEQ ID NO: 76591 - RNA, 20 nt, Artificial Sequence
  LRRK2 RNA guide
gccaugagucugaaccaagg

SEQ ID NO: 76592 - RNA, 20 nt, Artificial Sequence
  LRRK2 RNA guide
gcugaguucaccuugguuca

SEQ ID NO: 76593 - RNA, 20 nt, Artificial Sequence
  LRRK2 RNA guide
ggccaugagucugaaccaag

SEQ ID NO: 76594 - RNA, 20 nt, Artificial Sequence
  LRRK2 RNA guide
gguucagacucauggccuuu

SEQ ID NO: 76595 - RNA, 20 nt, Artificial Sequence
  LRRK2 RNA guide
gucugaaccaaggugaacuc

SEQ ID NO: 76596 - RNA, 20 nt, Artificial Sequence
  LRRK2 RNA guide
guucaccuugguucagacuc

SEQ ID NO: 76597 - RNA, 20 nt, Artificial Sequence
  LRRK2 RNA guide
guucagacucauggccuuuc

SEQ ID NO: 76598 - RNA, 20 nt, Artificial Sequence
  LRRK2 RNA guide
ucaccuugguucagacucau

SEQ ID NO: 76599 - RNA, 20 nt, Artificial Sequence
  LRRK2 RNA guide
ucugaaccaaggugaacuca

SEQ ID NO: 76600 - RNA, 20 nt, Artificial Sequence
  LRRK2 RNA guide
ugaaaggccaugagucugaa

SEQ ID NO: 76601 - RNA, 20 nt, Artificial Sequence
  LRRK2 RNA guide
ugaaccaaggugaacucagc

SEQ ID NO: 76602 - RNA, 20 nt, Artificial Sequence
  LRRK2 RNA guide
ugagucugaaccaaggugaa

SEQ ID NO: 76603 - RNA, 20 nt, Artificial Sequence
  LRRK2 RNA guide
ugaguucaccuugguucaga

SEQ ID NO: 76604 - RNA, 20 nt, Artificial Sequence
  LRRK2 RNA guide
ugguucagacucauggccuu

SEQ ID NO: 76605 - RNA, 20 nt, Artificial Sequence
  LRRK2 RNA guide
uucaccuugguucagacuca

SEQ ID NO: 76606 - RNA, 20 nt, Artificial Sequence
  LRRK2 RNA guide
uugguucagacucauggccu

SEQ ID NO: 76607 - RNA, 21 nt, Artificial Sequence
  LRRK2 RNA guide
aaaaugaaaggccaugagucu

SEQ ID NO: 76608 - RNA, 21 nt, Artificial Sequence
  LRRK2 RNA guide
aaaggccaugagucugaacca

SEQ ID NO: 76609 - RNA, 21 nt, Artificial Sequence
  LRRK2 RNA guide
aaaugaaaggccaugagucug

SEQ ID NO: 76610 - RNA, 21 nt, Artificial Sequence
  LRRK2 RNA guide
aaccaaggugaacucagcugg

SEQ ID NO: 76611 - RNA, 21 nt, Artificial Sequence
  LRRK2 RNA guide
aaggccaugagucugaaccaa

SEQ ID NO: 76612 - RNA, 21 nt, Artificial Sequence
  LRRK2 RNA guide
aaugaaaggccaugagucuga

SEQ ID NO: 76613 - RNA, 21 nt, Artificial Sequence
  LRRK2 RNA guide
accuugguucagacucauggc

SEQ ID NO: 76614 - RNA, 21 nt, Artificial Sequence
  LRRK2 RNA guide
agcagccagcugaguucaccu

SEQ ID NO: 76615 - RNA, 21 nt, Artificial Sequence
  LRRK2 RNA guide
agccagcugaguucaccuugg

SEQ ID NO: 76616 - RNA, 21 nt, Artificial Sequence
  LRRK2 RNA guide
agcugaguucaccuugguuca

SEQ ID NO: 76617 - RNA, 21 nt, Artificial Sequence
  LRRK2 RNA guide
aggccaugagucugaaccaag

SEQ ID NO: 76618 - RNA, 21 nt, Artificial Sequence
  LRRK2 RNA guide
agucugaaccaaggugaacuc

SEQ ID NO: 76619 - RNA, 21 nt, Artificial Sequence
  LRRK2 RNA guide
aguucaccuugguucagacuc

SEQ ID NO: 76620 - RNA, 21 nt, Artificial Sequence
  LRRK2 RNA guide
augaaaggccaugagucugaa

SEQ ID NO: 76621 - RNA, 21 nt, Artificial Sequence
  LRRK2 RNA guide
augagucugaaccaaggugaa

SEQ ID NO: 76622 - RNA, 21 nt, Artificial Sequence
  LRRK2 RNA guide
caccuugguucagacucaugg

SEQ ID NO: 76623 - RNA, 21 nt, Artificial Sequence
  LRRK2 RNA guide
cagccagcugaguucaccuug

SEQ ID NO: 76624 - RNA, 21 nt, Artificial Sequence
  LRRK2 RNA guide
cagcugaguucaccuugguuc

SEQ ID NO: 76625 - RNA, 21 nt, Artificial Sequence
  LRRK2 RNA guide
caugagucugaaccaagguga

SEQ ID NO: 76626 - RNA, 21 nt, Artificial Sequence
  LRRK2 RNA guide
ccagcugaguucaccuugguu

SEQ ID NO: 76627 - RNA, 21 nt, Artificial Sequence
  LRRK2 RNA guide
ccaugagucugaaccaaggug

SEQ ID NO: 76628 - RNA, 21 nt, Artificial Sequence
  LRRK2 RNA guide
ccuugguucagacucauggcc

SEQ ID NO: 76629 - RNA, 21 nt, Artificial Sequence
  LRRK2 RNA guide
cugaaccaaggugaacucagc

SEQ ID NO: 76630 - RNA, 21 nt, Artificial Sequence
  LRRK2 RNA guide
cugaguucaccuugguucaga

SEQ ID NO: 76631 - RNA, 21 nt, Artificial Sequence
  LRRK2 RNA guide
cuugguucagacucauggccu

SEQ ID NO: 76632 - RNA, 21 nt, Artificial Sequence
  LRRK2 RNA guide
gaaaaugaaaggccaugaguc

SEQ ID NO: 76633 - RNA, 21 nt, Artificial Sequence
  LRRK2 RNA guide
gaaaggccaugagucugaacc

SEQ ID NO: 76634 - RNA, 21 nt, Artificial Sequence
  LRRK2 RNA guide
gaaccaaggugaacucagcug

SEQ ID NO: 76635 - RNA, 21 nt, Artificial Sequence
  LRRK2 RNA guide
gagucugaaccaaggugaacu

SEQ ID NO: 76636 - RNA, 21 nt, Artificial Sequence
  LRRK2 RNA guide
gaguucaccuugguucagacu

SEQ ID NO: 76637 - RNA, 21 nt, Artificial Sequence
  LRRK2 RNA guide
gcagccagcugaguucaccuu

SEQ ID NO: 76638 - RNA, 21 nt, Artificial Sequence
  LRRK2 RNA guide
gccagcugaguucaccuuggu

SEQ ID NO: 76639 - RNA, 21 nt, Artificial Sequence
  LRRK2 RNA guide
gccaugagucugaaccaaggu

SEQ ID NO: 76640 - RNA, 21 nt, Artificial Sequence
  LRRK2 RNA guide
gcugaguucaccuugguucag

SEQ ID NO: 76641 - RNA, 21 nt, Artificial Sequence
  LRRK2 RNA guide
ggccaugagucugaaccaagg

SEQ ID NO: 76642 - RNA, 21 nt, Artificial Sequence
  LRRK2 RNA guide
gguucagacucauggccuuuc

SEQ ID NO: 76643 - RNA, 21 nt, Artificial Sequence
  LRRK2 RNA guide
gucugaaccaaggugaacuca

SEQ ID NO: 76644 - RNA, 21 nt, Artificial Sequence
  LRRK2 RNA guide
guucaccuugguucagacuca

SEQ ID NO: 76645 - RNA, 21 nt, Artificial Sequence
  LRRK2 RNA guide
guucagacucauggccuuuca

SEQ ID NO: 76646 - RNA, 21 nt, Artificial Sequence
  LRRK2 RNA guide
uagcagccagcugaguucacc

SEQ ID NO: 76647 - RNA, 21 nt, Artificial Sequence
  LRRK2 RNA guide
ucaccuugguucagacucaug

SEQ ID NO: 76648 - RNA, 21 nt, Artificial Sequence
  LRRK2 RNA guide
ucugaaccaaggugaacucag

SEQ ID NO: 76649 - RNA, 21 nt, Artificial Sequence
  LRRK2 RNA guide
ugaaaaugaaaggccaugagu

SEQ ID NO: 76650 - RNA, 21 nt, Artificial Sequence
  LRRK2 RNA guide
ugaaaggccaugagucugaac

SEQ ID NO: 76651 - RNA, 21 nt, Artificial Sequence
  LRRK2 RNA guide
ugaaccaaggugaacucagcu

SEQ ID NO: 76652 - RNA, 21 nt, Artificial Sequence
  LRRK2 RNA guide
ugagucugaaccaaggugaac

SEQ ID NO: 76653 - RNA, 21 nt, Artificial Sequence
  LRRK2 RNA guide
ugaguucaccuugguucagac

SEQ ID NO: 76654 - RNA, 21 nt, Artificial Sequence
  LRRK2 RNA guide
ugguucagacucauggccuuu

SEQ ID NO: 76655 - RNA, 21 nt, Artificial Sequence
  LRRK2 RNA guide
uucaccuugguucagacucau

SEQ ID NO: 76656 - RNA, 21 nt, Artificial Sequence
  LRRK2 RNA guide
uugguucagacucauggccuu

SEQ ID NO: 76657 - RNA, 22 nt, Artificial Sequence
  LRRK2 RNA guide
aaaaugaaaggccaugagucug

SEQ ID NO: 76658 - RNA, 22 nt, Artificial Sequence
  LRRK2 RNA guide
aaaggccaugagucugaaccaa

SEQ ID NO: 76659 - RNA, 22 nt, Artificial Sequence
  LRRK2 RNA guide
aaaugaaaggccaugagucuga

SEQ ID NO: 76660 - RNA, 22 nt, Artificial Sequence
  LRRK2 RNA guide
aaccaaggugaacucagcuggc

SEQ ID NO: 76661 - RNA, 22 nt, Artificial Sequence
  LRRK2 RNA guide
aaggccaugagucugaaccaag

SEQ ID NO: 76662 - RNA, 22 nt, Artificial Sequence
  LRRK2 RNA guide
aaugaaaggccaugagucugaa

SEQ ID NO: 76663 - RNA, 22 nt, Artificial Sequence
  LRRK2 RNA guide
accuugguucagacucauggcc

SEQ ID NO: 76664 - RNA, 22 nt, Artificial Sequence
  LRRK2 RNA guide
agcagccagcugaguucaccuu

SEQ ID NO: 76665 - RNA, 22 nt, Artificial Sequence
  LRRK2 RNA guide
agccagcugaguucaccuuggu

SEQ ID NO: 76666 - RNA, 22 nt, Artificial Sequence
  LRRK2 RNA guide
agcugaguucaccuugguucag

SEQ ID NO: 76667 - RNA, 22 nt, Artificial Sequence
  LRRK2 RNA guide
aggccaugagucugaaccaagg

SEQ ID NO: 76668 - RNA, 22 nt, Artificial Sequence
  LRRK2 RNA guide
agucugaaccaaggugaacuca

SEQ ID NO: 76669 - RNA, 22 nt, Artificial Sequence
  LRRK2 RNA guide
aguucaccuugguucagacuca

SEQ ID NO: 76670 - RNA, 22 nt, Artificial Sequence
  LRRK2 RNA guide
augaaaggccaugagucugaac

SEQ ID NO: 76671 - RNA, 22 nt, Artificial Sequence
  LRRK2 RNA guide
augagucugaaccaaggugaac

SEQ ID NO: 76672 - RNA, 22 nt, Artificial Sequence
  LRRK2 RNA guide
caccuugguucagacucauggc

SEQ ID NO: 76673 - RNA, 22 nt, Artificial Sequence
  LRRK2 RNA guide
cagccagcugaguucaccuugg

SEQ ID NO: 76674 - RNA, 22 nt, Artificial Sequence
  LRRK2 RNA guide
cagcugaguucaccuugguuca

SEQ ID NO: 76675 - RNA, 22 nt, Artificial Sequence
  LRRK2 RNA guide
caugagucugaaccaaggugaa

SEQ ID NO: 76676 - RNA, 22 nt, Artificial Sequence
  LRRK2 RNA guide
ccagcugaguucaccuugguuc

SEQ ID NO: 76677 - RNA, 22 nt, Artificial Sequence
  LRRK2 RNA guide
ccaugagucugaaccaagguga

SEQ ID NO: 76678 - RNA, 22 nt, Artificial Sequence
  LRRK2 RNA guide
ccuugguucagacucauggccu

SEQ ID NO: 76679 - RNA, 22 nt, Artificial Sequence
  LRRK2 RNA guide
cuagcagccagcugaguucacc

SEQ ID NO: 76680 - RNA, 22 nt, Artificial Sequence
  LRRK2 RNA guide
cugaaaaugaaaggccaugagu

SEQ ID NO: 76681 - RNA, 22 nt, Artificial Sequence
  LRRK2 RNA guide
cugaaccaaggugaacucagcu

SEQ ID NO: 76682 - RNA, 22 nt, Artificial Sequence
  LRRK2 RNA guide
cugaguucaccuugguucagac

SEQ ID NO: 76683 - RNA, 22 nt, Artificial Sequence
  LRRK2 RNA guide
cuugguucagacucauggccuu

SEQ ID NO: 76684 - RNA, 22 nt, Artificial Sequence
  LRRK2 RNA guide
gaaaaugaaaggccaugagucu

SEQ ID NO: 76685 - RNA, 22 nt, Artificial Sequence
  LRRK2 RNA guide
gaaaggccaugagucugaacca

SEQ ID NO: 76686 - RNA, 22 nt, Artificial Sequence
  LRRK2 RNA guide
gaaccaaggugaacucagcugg

SEQ ID NO: 76687 - RNA, 22 nt, Artificial Sequence
  LRRK2 RNA guide
gagucugaaccaaggugaacuc

SEQ ID NO: 76688 - RNA, 22 nt, Artificial Sequence
  LRRK2 RNA guide
gaguucaccuugguucagacuc

SEQ ID NO: 76689 - RNA, 22 nt, Artificial Sequence
  LRRK2 RNA guide
gcagccagcugaguucaccuug

SEQ ID NO: 76690 - RNA, 22 nt, Artificial Sequence
  LRRK2 RNA guide
gccagcugaguucaccuugguu

SEQ ID NO: 76691 - RNA, 22 nt, Artificial Sequence
  LRRK2 RNA guide
gccaugagucugaaccaaggug

SEQ ID NO: 76692 - RNA, 22 nt, Artificial Sequence
  LRRK2 RNA guide
gcugaguucaccuugguucaga

SEQ ID NO: 76693 - RNA, 22 nt, Artificial Sequence
  LRRK2 RNA guide
ggccaugagucugaaccaaggu

SEQ ID NO: 76694 - RNA, 22 nt, Artificial Sequence
  LRRK2 RNA guide
gguucagacucauggccuuuca

SEQ ID NO: 76695 - RNA, 22 nt, Artificial Sequence
  LRRK2 RNA guide
gucugaaccaaggugaacucag

SEQ ID NO: 76696 - RNA, 22 nt, Artificial Sequence
  LRRK2 RNA guide
guucaccuugguucagacucau

SEQ ID NO: 76697 - RNA, 22 nt, Artificial Sequence
  LRRK2 RNA guide
guucagacucauggccuuucau

SEQ ID NO: 76698 - RNA, 22 nt, Artificial Sequence
  LRRK2 RNA guide
uagcagccagcugaguucaccu

SEQ ID NO: 76699 - RNA, 22 nt, Artificial Sequence
  LRRK2 RNA guide
ucaccuugguucagacucaugg

SEQ ID NO: 76700 - RNA, 22 nt, Artificial Sequence
  LRRK2 RNA guide
ucugaaccaaggugaacucagc

SEQ ID NO: 76701 - RNA, 22 nt, Artificial Sequence
  LRRK2 RNA guide
ugaaaaugaaaggccaugaguc

SEQ ID NO: 76702 - RNA, 22 nt, Artificial Sequence
  LRRK2 RNA guide
ugaaaggccaugagucugaacc

SEQ ID NO: 76703 - RNA, 22 nt, Artificial Sequence
  LRRK2 RNA guide
ugaaccaaggugaacucagcug

SEQ ID NO: 76704 - RNA, 22 nt, Artificial Sequence
  LRRK2 RNA guide
ugagucugaaccaaggugaacu

SEQ ID NO: 76705 - RNA, 22 nt, Artificial Sequence
  LRRK2 RNA guide
ugaguucaccuugguucagacu

SEQ ID NO: 76706 - RNA, 22 nt, Artificial Sequence
  LRRK2 RNA guide
ugguucagacucauggccuuuc

SEQ ID NO: 76707 - RNA, 22 nt, Artificial Sequence
  LRRK2 RNA guide
uucaccuugguucagacucaug

SEQ ID NO: 76708 - RNA, 22 nt, Artificial Sequence
  LRRK2 RNA guide
uugguucagacucauggccuuu

SEQ ID NO: 76709 - RNA, 20 nt, Artificial Sequence
  LRRK2 RNA guide
aaaggccaugagucugaucc

SEQ ID NO: 76710 - RNA, 20 nt, Artificial Sequence
  LRRK2 RNA guide
aaggccaugagucugaucca

SEQ ID NO: 76711 - RNA, 20 nt, Artificial Sequence
  LRRK2 RNA guide
accuuggaucagacucaugg

SEQ ID NO: 76712 - RNA, 20 nt, Artificial Sequence
  LRRK2 RNA guide
agcugaguucaccuuggauc

SEQ ID NO: 76713 - RNA, 20 nt, Artificial Sequence
  LRRK2 RNA guide
aggccaugagucugauccaa

SEQ ID NO: 76714 - RNA, 20 nt, Artificial Sequence
  LRRK2 RNA guide
agucugauccaaggugaacu

SEQ ID NO: 76715 - RNA, 20 nt, Artificial Sequence
  LRRK2 RNA guide
aguucaccuuggaucagacu

SEQ ID NO: 76716 - RNA, 20 nt, Artificial Sequence
  LRRK2 RNA guide
auccaaggugaacucagcug

SEQ ID NO: 76717 - RNA, 20 nt, Artificial Sequence
  LRRK2 RNA guide
augagucugauccaagguga

SEQ ID NO: 76718 - RNA, 20 nt, Artificial Sequence
  LRRK2 RNA guide
caccuuggaucagacucaug

SEQ ID NO: 76719 - RNA, 20 nt, Artificial Sequence
  LRRK2 RNA guide
cagcugaguucaccuuggau

SEQ ID NO: 76720 - RNA, 20 nt, Artificial Sequence
  LRRK2 RNA guide
caugagucugauccaaggug

SEQ ID NO: 76721 - RNA, 20 nt, Artificial Sequence
  LRRK2 RNA guide
ccagcugaguucaccuugga

SEQ ID NO: 76722 - RNA, 20 nt, Artificial Sequence
  LRRK2 RNA guide
ccaugagucugauccaaggu

SEQ ID NO: 76723 - RNA, 20 nt, Artificial Sequence
  LRRK2 RNA guide
ccuuggaucagacucauggc

SEQ ID NO: 76724 - RNA, 20 nt, Artificial Sequence
  LRRK2 RNA guide
cugaguucaccuuggaucag

SEQ ID NO: 76725 - RNA, 20 nt, Artificial Sequence
  LRRK2 RNA guide
cugauccaaggugaacucag

SEQ ID NO: 76726 - RNA, 20 nt, Artificial Sequence
  LRRK2 RNA guide
cuuggaucagacucauggcc

SEQ ID NO: 76727 - RNA, 20 nt, Artificial Sequence
  LRRK2 RNA guide
gaaaggccaugagucugauc

SEQ ID NO: 76728 - RNA, 20 nt, Artificial Sequence
  LRRK2 RNA guide
gagucugauccaaggugaac

SEQ ID NO: 76729 - RNA, 20 nt, Artificial Sequence
  LRRK2 RNA guide
gaguucaccuuggaucagac

SEQ ID NO: 76730 - RNA, 20 nt, Artificial Sequence
  LRRK2 RNA guide
gaucagacucauggccuuuc

SEQ ID NO: 76731 - RNA, 20 nt, Artificial Sequence
  LRRK2 RNA guide
gauccaaggugaacucagcu

SEQ ID NO: 76732 - RNA, 20 nt, Artificial Sequence
  LRRK2 RNA guide
gccaugagucugauccaagg

SEQ ID NO: 76733 - RNA, 20 nt, Artificial Sequence
  LRRK2 RNA guide
gcugaguucaccuuggauca

SEQ ID NO: 76734 - RNA, 20 nt, Artificial Sequence
  LRRK2 RNA guide
ggaucagacucauggccuuu

SEQ ID NO: 76735 - RNA, 20 nt, Artificial Sequence
  LRRK2 RNA guide
ggccaugagucugauccaag

SEQ ID NO: 76736 - RNA, 20 nt, Artificial Sequence
  LRRK2 RNA guide
gucugauccaaggugaacuc

SEQ ID NO: 76737 - RNA, 20 nt, Artificial Sequence
  LRRK2 RNA guide
guucaccuuggaucagacuc

SEQ ID NO: 76738 - RNA, 20 nt, Artificial Sequence
  LRRK2 RNA guide
ucaccuuggaucagacucau

SEQ ID NO: 76739 - RNA, 20 nt, Artificial Sequence
  LRRK2 RNA guide
ucugauccaaggugaacuca

SEQ ID NO: 76740 - RNA, 20 nt, Artificial Sequence
  LRRK2 RNA guide
ugaaaggccaugagucugau

SEQ ID NO: 76741 - RNA, 20 nt, Artificial Sequence
  LRRK2 RNA guide
ugagucugauccaaggugaa

SEQ ID NO: 76742 - RNA, 20 nt, Artificial Sequence
  LRRK2 RNA guide
ugaguucaccuuggaucaga

SEQ ID NO: 76743 - RNA, 20 nt, Artificial Sequence
  LRRK2 RNA guide
ugauccaaggugaacucagc

SEQ ID NO: 76744 - RNA, 20 nt, Artificial Sequence
  LRRK2 RNA guide
uggaucagacucauggccuu

SEQ ID NO: 76745 - RNA, 20 nt, Artificial Sequence
  LRRK2 RNA guide
uucaccuuggaucagacuca

SEQ ID NO: 76746 - RNA, 20 nt, Artificial Sequence
  LRRK2 RNA guide
uuggaucagacucauggccu

SEQ ID NO: 76747 - RNA, 21 nt, Artificial Sequence
  LRRK2 RNA guide
aaaggccaugagucugaucca

SEQ ID NO: 76748 - RNA, 21 nt, Artificial Sequence
  LRRK2 RNA guide
aaggccaugagucugauccaa

SEQ ID NO: 76749 - RNA, 21 nt, Artificial Sequence
  LRRK2 RNA guide
accuuggaucagacucauggc

SEQ ID NO: 76750 - RNA, 21 nt, Artificial Sequence
  LRRK2 RNA guide
agcugaguucaccuuggauca

SEQ ID NO: 76751 - RNA, 21 nt, Artificial Sequence
  LRRK2 RNA guide
aggccaugagucugauccaag

SEQ ID NO: 76752 - RNA, 21 nt, Artificial Sequence
  LRRK2 RNA guide
agucugauccaaggugaacuc

SEQ ID NO: 76753 - RNA, 21 nt, Artificial Sequence
  LRRK2 RNA guide
aguucaccuuggaucagacuc

SEQ ID NO: 76754 - RNA, 21 nt, Artificial Sequence
  LRRK2 RNA guide
auccaaggugaacucagcugg

SEQ ID NO: 76755 - RNA, 21 nt, Artificial Sequence
  LRRK2 RNA guide
augaaaggccaugagucugau

SEQ ID NO: 76756 - RNA, 21 nt, Artificial Sequence
  LRRK2 RNA guide
augagucugauccaaggugaa

SEQ ID NO: 76757 - RNA, 21 nt, Artificial Sequence
  LRRK2 RNA guide
caccuuggaucagacucaugg

SEQ ID NO: 76758 - RNA, 21 nt, Artificial Sequence
  LRRK2 RNA guide
cagcugaguucaccuuggauc

SEQ ID NO: 76759 - RNA, 21 nt, Artificial Sequence
  LRRK2 RNA guide
caugagucugauccaagguga

SEQ ID NO: 76760 - RNA, 21 nt, Artificial Sequence
  LRRK2 RNA guide
ccagcugaguucaccuuggau

SEQ ID NO: 76761 - RNA, 21 nt, Artificial Sequence
  LRRK2 RNA guide
ccaugagucugauccaaggug

SEQ ID NO: 76762 - RNA, 21 nt, Artificial Sequence
  LRRK2 RNA guide
ccuuggaucagacucauggcc

SEQ ID NO: 76763 - RNA, 21 nt, Artificial Sequence
  LRRK2 RNA guide
cugaguucaccuuggaucaga

SEQ ID NO: 76764 - RNA, 21 nt, Artificial Sequence
  LRRK2 RNA guide
cugauccaaggugaacucagc

SEQ ID NO: 76765 - RNA, 21 nt, Artificial Sequence
  LRRK2 RNA guide
cuuggaucagacucauggccu

SEQ ID NO: 76766 - RNA, 21 nt, Artificial Sequence
  LRRK2 RNA guide
gaaaggccaugagucugaucc

SEQ ID NO: 76767 - RNA, 21 nt, Artificial Sequence
  LRRK2 RNA guide
gagucugauccaaggugaacu

SEQ ID NO: 76768 - RNA, 21 nt, Artificial Sequence
  LRRK2 RNA guide
gaguucaccuuggaucagacu

SEQ ID NO: 76769 - RNA, 21 nt, Artificial Sequence
  LRRK2 RNA guide
gaucagacucauggccuuuca

SEQ ID NO: 76770 - RNA, 21 nt, Artificial Sequence
  LRRK2 RNA guide
gauccaaggugaacucagcug

SEQ ID NO: 76771 - RNA, 21 nt, Artificial Sequence
  LRRK2 RNA guide
gccagcugaguucaccuugga

SEQ ID NO: 76772 - RNA, 21 nt, Artificial Sequence
  LRRK2 RNA guide
gccaugagucugauccaaggu

SEQ ID NO: 76773 - RNA, 21 nt, Artificial Sequence
  LRRK2 RNA guide
gcugaguucaccuuggaucag

SEQ ID NO: 76774 - RNA, 21 nt, Artificial Sequence
  LRRK2 RNA guide
ggaucagacucauggccuuuc

SEQ ID NO: 76775 - RNA, 21 nt, Artificial Sequence
  LRRK2 RNA guide
ggccaugagucugauccaagg

SEQ ID NO: 76776 - RNA, 21 nt, Artificial Sequence
  LRRK2 RNA guide
gucugauccaaggugaacuca

SEQ ID NO: 76777 - RNA, 21 nt, Artificial Sequence
  LRRK2 RNA guide
guucaccuuggaucagacuca

SEQ ID NO: 76778 - RNA, 21 nt, Artificial Sequence
  LRRK2 RNA guide
ucaccuuggaucagacucaug

SEQ ID NO: 76779 - RNA, 21 nt, Artificial Sequence
  LRRK2 RNA guide
ucugauccaaggugaacucag

SEQ ID NO: 76780 - RNA, 21 nt, Artificial Sequence
  LRRK2 RNA guide
ugaaaggccaugagucugauc

SEQ ID NO: 76781 - RNA, 21 nt, Artificial Sequence
  LRRK2 RNA guide
ugagucugauccaaggugaac

SEQ ID NO: 76782 - RNA, 21 nt, Artificial Sequence
  LRRK2 RNA guide
ugaguucaccuuggaucagac

SEQ ID NO: 76783 - RNA, 21 nt, Artificial Sequence
  LRRK2 RNA guide
ugauccaaggugaacucagcu

SEQ ID NO: 76784 - RNA, 21 nt, Artificial Sequence
  LRRK2 RNA guide
uggaucagacucauggccuuu

SEQ ID NO: 76785 - RNA, 21 nt, Artificial Sequence
  LRRK2 RNA guide
uucaccuuggaucagacucau

SEQ ID NO: 76786 - RNA, 21 nt, Artificial Sequence
  LRRK2 RNA guide
uuggaucagacucauggccuu

SEQ ID NO: 76787 - RNA, 22 nt, Artificial Sequence
  LRRK2 RNA guide
aaaggccaugagucugauccaa

SEQ ID NO: 76788 - RNA, 22 nt, Artificial Sequence
  LRRK2 RNA guide
aaggccaugagucugauccaag

SEQ ID NO: 76789 - RNA, 22 nt, Artificial Sequence
  LRRK2 RNA guide
aaugaaaggccaugagucugau

SEQ ID NO: 76790 - RNA, 22 nt, Artificial Sequence
  LRRK2 RNA guide
accuuggaucagacucauggcc

SEQ ID NO: 76791 - RNA, 22 nt, Artificial Sequence
  LRRK2 RNA guide
agccagcugaguucaccuugga

SEQ ID NO: 76792 - RNA, 22 nt, Artificial Sequence
  LRRK2 RNA guide
agcugaguucaccuuggaucag

SEQ ID NO: 76793 - RNA, 22 nt, Artificial Sequence
  LRRK2 RNA guide
aggccaugagucugauccaagg

SEQ ID NO: 76794 - RNA, 22 nt, Artificial Sequence
  LRRK2 RNA guide
agucugauccaaggugaacuca

SEQ ID NO: 76795 - RNA, 22 nt, Artificial Sequence
  LRRK2 RNA guide
aguucaccuuggaucagacuca

SEQ ID NO: 76796 - RNA, 22 nt, Artificial Sequence
  LRRK2 RNA guide
auccaaggugaacucagcuggc

SEQ ID NO: 76797 - RNA, 22 nt, Artificial Sequence
  LRRK2 RNA guide
augaaaggccaugagucugauc

SEQ ID NO: 76798 - RNA, 22 nt, Artificial Sequence
  LRRK2 RNA guide
augagucugauccaaggugaac

SEQ ID NO: 76799 - RNA, 22 nt, Artificial Sequence
  LRRK2 RNA guide
caccuuggaucagacucauggc

SEQ ID NO: 76800 - RNA, 22 nt, Artificial Sequence
  LRRK2 RNA guide
cagcugaguucaccuuggauca

SEQ ID NO: 76801 - RNA, 22 nt, Artificial Sequence
  LRRK2 RNA guide
caugagucugauccaaggugaa

SEQ ID NO: 76802 - RNA, 22 nt, Artificial Sequence
  LRRK2 RNA guide
ccagcugaguucaccuuggauc

SEQ ID NO: 76803 - RNA, 22 nt, Artificial Sequence
  LRRK2 RNA guide
ccaugagucugauccaagguga

SEQ ID NO: 76804 - RNA, 22 nt, Artificial Sequence
  LRRK2 RNA guide
ccuuggaucagacucauggccu

SEQ ID NO: 76805 - RNA, 22 nt, Artificial Sequence
  LRRK2 RNA guide
cugaguucaccuuggaucagac

SEQ ID NO: 76806 - RNA, 22 nt, Artificial Sequence
  LRRK2 RNA guide
cugauccaaggugaacucagcu

SEQ ID NO: 76807 - RNA, 22 nt, Artificial Sequence
  LRRK2 RNA guide
cuuggaucagacucauggccuu

SEQ ID NO: 76808 - RNA, 22 nt, Artificial Sequence
  LRRK2 RNA guide
gaaaggccaugagucugaucca

SEQ ID NO: 76809 - RNA, 22 nt, Artificial Sequence
  LRRK2 RNA guide
gagucugauccaaggugaacuc

SEQ ID NO: 76810 - RNA, 22 nt, Artificial Sequence
  LRRK2 RNA guide
gaguucaccuuggaucagacuc

SEQ ID NO: 76811 - RNA, 22 nt, Artificial Sequence
  LRRK2 RNA guide
gaucagacucauggccuuucau

SEQ ID NO: 76812 - RNA, 22 nt, Artificial Sequence
  LRRK2 RNA guide
gauccaaggugaacucagcugg

SEQ ID NO: 76813 - RNA, 22 nt, Artificial Sequence
  LRRK2 RNA guide
gccagcugaguucaccuuggau

SEQ ID NO: 76814 - RNA, 22 nt, Artificial Sequence
  LRRK2 RNA guide
gccaugagucugauccaaggug

SEQ ID NO: 76815 - RNA, 22 nt, Artificial Sequence
  LRRK2 RNA guide
gcugaguucaccuuggaucaga

SEQ ID NO: 76816 - RNA, 22 nt, Artificial Sequence
  LRRK2 RNA guide
ggaucagacucauggccuuuca

SEQ ID NO: 76817 - RNA, 22 nt, Artificial Sequence
  LRRK2 RNA guide
ggccaugagucugauccaaggu

SEQ ID NO: 76818 - RNA, 22 nt, Artificial Sequence
  LRRK2 RNA guide
gucugauccaaggugaacucag

SEQ ID NO: 76819 - RNA, 22 nt, Artificial Sequence
  LRRK2 RNA guide
guucaccuuggaucagacucau

SEQ ID NO: 76820 - RNA, 22 nt, Artificial Sequence
  LRRK2 RNA guide
ucaccuuggaucagacucaugg

SEQ ID NO: 76821 - RNA, 22 nt, Artificial Sequence
  LRRK2 RNA guide
ucugauccaaggugaacucagc

SEQ ID NO: 76822 - RNA, 22 nt, Artificial Sequence
  LRRK2 RNA guide
ugaaaggccaugagucugaucc

SEQ ID NO: 76823 - RNA, 22 nt, Artificial Sequence
  LRRK2 RNA guide
ugagucugauccaaggugaacu

SEQ ID NO: 76824 - RNA, 22 nt, Artificial Sequence
  LRRK2 RNA guide
ugaguucaccuuggaucagacu

SEQ ID NO: 76825 - RNA, 22 nt, Artificial Sequence
  LRRK2 RNA guide
ugauccaaggugaacucagcug

SEQ ID NO: 76826 - RNA, 22 nt, Artificial Sequence
  LRRK2 RNA guide
uggaucagacucauggccuuuc

SEQ ID NO: 76827 - RNA, 22 nt, Artificial Sequence
  LRRK2 RNA guide
uucaccuuggaucagacucaug

SEQ ID NO: 76828 - RNA, 22 nt, Artificial Sequence
  LRRK2 RNA guide
uuggaucagacucauggccuuu

SEQ ID NO: 76829 - RNA, 20 nt, Artificial Sequence
  LRRK2 RNA guide
aagaguaggcagaaaagaaa

SEQ ID NO: 76830 - RNA, 20 nt, Artificial Sequence
  LRRK2 RNA guide
aagcagccugugagaagagu

SEQ ID NO: 76831 - RNA, 20 nt, Artificial Sequence
  LRRK2 RNA guide
aaucuuuucuuuucugccua

SEQ ID NO: 76832 - RNA, 20 nt, Artificial Sequence
  LRRK2 RNA guide
acuaagcagccugugagaag

SEQ ID NO: 76833 - RNA, 20 nt, Artificial Sequence
  LRRK2 RNA guide
acucuucucacaggcugcuu

SEQ ID NO: 76834 - RNA, 20 nt, Artificial Sequence
  LRRK2 RNA guide
agaagaguaggcagaaaaga

SEQ ID NO: 76835 - RNA, 20 nt, Artificial Sequence
  LRRK2 RNA guide
agaguaggcagaaaagaaaa

SEQ ID NO: 76836 - RNA, 20 nt, Artificial Sequence
  LRRK2 RNA guide
agcagccugugagaagagua

SEQ ID NO: 76837 - RNA, 20 nt, Artificial Sequence
  LRRK2 RNA guide
agccugugagaagaguaggc

SEQ ID NO: 76838 - RNA, 20 nt, Artificial Sequence
  LRRK2 RNA guide
aguacuaagcagccugugag

SEQ ID NO: 76839 - RNA, 20 nt, Artificial Sequence
  LRRK2 RNA guide
aguaggcagaaaagaaaaga

SEQ ID NO: 76840 - RNA, 20 nt, Artificial Sequence
  LRRK2 RNA guide
aucuuuucuuuucugccuac

SEQ ID NO: 76841 - RNA, 20 nt, Artificial Sequence
  LRRK2 RNA guide
cagccugugagaagaguagg

SEQ ID NO: 76842 - RNA, 20 nt, Artificial Sequence
  LRRK2 RNA guide
ccuaaucuuuucuuuucugc

SEQ ID NO: 76843 - RNA, 20 nt, Artificial Sequence
  LRRK2 RNA guide
ccuacucuucucacaggcug

SEQ ID NO: 76844 - RNA, 20 nt, Artificial Sequence
  LRRK2 RNA guide
ccugugagaagaguaggcag

SEQ ID NO: 76845 - RNA, 20 nt, Artificial Sequence
  LRRK2 RNA guide
cuaagcagccugugagaaga

SEQ ID NO: 76846 - RNA, 20 nt, Artificial Sequence
  LRRK2 RNA guide
cuaaucuuuucuuuucugcc

SEQ ID NO: 76847 - RNA, 20 nt, Artificial Sequence
  LRRK2 RNA guide
cuacucuucucacaggcugc

SEQ ID NO: 76848 - RNA, 20 nt, Artificial Sequence
  LRRK2 RNA guide
cugccuacucuucucacagg

SEQ ID NO: 76849 - RNA, 20 nt, Artificial Sequence
  LRRK2 RNA guide
cugugagaagaguaggcaga

SEQ ID NO: 76850 - RNA, 20 nt, Artificial Sequence
  LRRK2 RNA guide
cuuuucugccuacucuucuc

SEQ ID NO: 76851 - RNA, 20 nt, Artificial Sequence
  LRRK2 RNA guide
cuuuucuuuucugccuacuc

SEQ ID NO: 76852 - RNA, 20 nt, Artificial Sequence
  LRRK2 RNA guide
gaagaguaggcagaaaagaa

SEQ ID NO: 76853 - RNA, 20 nt, Artificial Sequence
  LRRK2 RNA guide
gagaagaguaggcagaaaag

SEQ ID NO: 76854 - RNA, 20 nt, Artificial Sequence
  LRRK2 RNA guide
gaguaggcagaaaagaaaag

SEQ ID NO: 76855 - RNA, 20 nt, Artificial Sequence
  LRRK2 RNA guide
gcagccugugagaagaguag

SEQ ID NO: 76856 - RNA, 20 nt, Artificial Sequence
  LRRK2 RNA guide
gccuaaucuuuucuuuucug

SEQ ID NO: 76857 - RNA, 20 nt, Artificial Sequence
  LRRK2 RNA guide
gccuacucuucucacaggcu

SEQ ID NO: 76858 - RNA, 20 nt, Artificial Sequence
  LRRK2 RNA guide
gccugugagaagaguaggca

SEQ ID NO: 76859 - RNA, 20 nt, Artificial Sequence
  LRRK2 RNA guide
guacuaagcagccugugaga

SEQ ID NO: 76860 - RNA, 20 nt, Artificial Sequence
  LRRK2 RNA guide
gugagaagaguaggcagaaa

SEQ ID NO: 76861 - RNA, 20 nt, Artificial Sequence
  LRRK2 RNA guide
uaagcagccugugagaagag

SEQ ID NO: 76862 - RNA, 20 nt, Artificial Sequence
  LRRK2 RNA guide
uaaucuuuucuuuucugccu

SEQ ID NO: 76863 - RNA, 20 nt, Artificial Sequence
  LRRK2 RNA guide
uacuaagcagccugugagaa

SEQ ID NO: 76864 - RNA, 20 nt, Artificial Sequence
  LRRK2 RNA guide
uacucuucucacaggcugcu

SEQ ID NO: 76865 - RNA, 20 nt, Artificial Sequence
  LRRK2 RNA guide
ucugccuacucuucucacag

SEQ ID NO: 76866 - RNA, 20 nt, Artificial Sequence
  LRRK2 RNA guide
ucuuuucugccuacucuucu

SEQ ID NO: 76867 - RNA, 20 nt, Artificial Sequence
  LRRK2 RNA guide
ucuuuucuuuucugccuacu

SEQ ID NO: 76868 - RNA, 20 nt, Artificial Sequence
  LRRK2 RNA guide
ugagaagaguaggcagaaaa

SEQ ID NO: 76869 - RNA, 20 nt, Artificial Sequence
  LRRK2 RNA guide
ugccuacucuucucacaggc

SEQ ID NO: 76870 - RNA, 20 nt, Artificial Sequence
  LRRK2 RNA guide
ugugagaagaguaggcagaa

SEQ ID NO: 76871 - RNA, 20 nt, Artificial Sequence
  LRRK2 RNA guide
uucugccuacucuucucaca

SEQ ID NO: 76872 - RNA, 20 nt, Artificial Sequence
  LRRK2 RNA guide
uucuuuucugccuacucuuc

SEQ ID NO: 76873 - RNA, 20 nt, Artificial Sequence
  LRRK2 RNA guide
uuucugccuacucuucucac

SEQ ID NO: 76874 - RNA, 20 nt, Artificial Sequence
  LRRK2 RNA guide
uuucuuuucugccuacucuu

SEQ ID NO: 76875 - RNA, 20 nt, Artificial Sequence
  LRRK2 RNA guide
uuuucugccuacucuucuca

SEQ ID NO: 76876 - RNA, 20 nt, Artificial Sequence
  LRRK2 RNA guide
uuuucuuuucugccuacucu

SEQ ID NO: 76877 - RNA, 21 nt, Artificial Sequence
  LRRK2 RNA guide
aagaguaggcagaaaagaaaa

SEQ ID NO: 76878 - RNA, 21 nt, Artificial Sequence
  LRRK2 RNA guide
aagcagccugugagaagagua

SEQ ID NO: 76879 - RNA, 21 nt, Artificial Sequence
  LRRK2 RNA guide
aaguacuaagcagccugugag

SEQ ID NO: 76880 - RNA, 21 nt, Artificial Sequence
  LRRK2 RNA guide
aaucuuuucuuuucugccuac

SEQ ID NO: 76881 - RNA, 21 nt, Artificial Sequence
  LRRK2 RNA guide
acuaagcagccugugagaaga

SEQ ID NO: 76882 - RNA, 21 nt, Artificial Sequence
  LRRK2 RNA guide
acucuucucacaggcugcuua

SEQ ID NO: 76883 - RNA, 21 nt, Artificial Sequence
  LRRK2 RNA guide
agaagaguaggcagaaaagaa

SEQ ID NO: 76884 - RNA, 21 nt, Artificial Sequence
  LRRK2 RNA guide
agaguaggcagaaaagaaaag

SEQ ID NO: 76885 - RNA, 21 nt, Artificial Sequence
  LRRK2 RNA guide
agcagccugugagaagaguag

SEQ ID NO: 76886 - RNA, 21 nt, Artificial Sequence
  LRRK2 RNA guide
agccugugagaagaguaggca

SEQ ID NO: 76887 - RNA, 21 nt, Artificial Sequence
  LRRK2 RNA guide
aguacuaagcagccugugaga

SEQ ID NO: 76888 - RNA, 21 nt, Artificial Sequence
  LRRK2 RNA guide
aguaggcagaaaagaaaagau

SEQ ID NO: 76889 - RNA, 21 nt, Artificial Sequence
  LRRK2 RNA guide
aucuuuucuuuucugccuacu

SEQ ID NO: 76890 - RNA, 21 nt, Artificial Sequence
  LRRK2 RNA guide
cagccugugagaagaguaggc

SEQ ID NO: 76891 - RNA, 21 nt, Artificial Sequence
  LRRK2 RNA guide
ccuaaucuuuucuuuucugcc

SEQ ID NO: 76892 - RNA, 21 nt, Artificial Sequence
  LRRK2 RNA guide
ccuacucuucucacaggcugc

SEQ ID NO: 76893 - RNA, 21 nt, Artificial Sequence
  LRRK2 RNA guide
ccugugagaagaguaggcaga

SEQ ID NO: 76894 - RNA, 21 nt, Artificial Sequence
  LRRK2 RNA guide
cuaagcagccugugagaagag

SEQ ID NO: 76895 - RNA, 21 nt, Artificial Sequence
  LRRK2 RNA guide
cuaaucuuuucuuuucugccu

SEQ ID NO: 76896 - RNA, 21 nt, Artificial Sequence
  LRRK2 RNA guide
cuacucuucucacaggcugcu

SEQ ID NO: 76897 - RNA, 21 nt, Artificial Sequence
  LRRK2 RNA guide
cugccuacucuucucacaggc

SEQ ID NO: 76898 - RNA, 21 nt, Artificial Sequence
  LRRK2 RNA guide
cugugagaagaguaggcagaa

SEQ ID NO: 76899 - RNA, 21 nt, Artificial Sequence
  LRRK2 RNA guide
cuuuucugccuacucuucuca

SEQ ID NO: 76900 - RNA, 21 nt, Artificial Sequence
  LRRK2 RNA guide
cuuuucuuuucugccuacucu

SEQ ID NO: 76901 - RNA, 21 nt, Artificial Sequence
  LRRK2 RNA guide
gaagaguaggcagaaaagaaa

SEQ ID NO: 76902 - RNA, 21 nt, Artificial Sequence
  LRRK2 RNA guide
gagaagaguaggcagaaaaga

SEQ ID NO: 76903 - RNA, 21 nt, Artificial Sequence
  LRRK2 RNA guide
gaguaggcagaaaagaaaaga

SEQ ID NO: 76904 - RNA, 21 nt, Artificial Sequence
  LRRK2 RNA guide
gcagccugugagaagaguagg

SEQ ID NO: 76905 - RNA, 21 nt, Artificial Sequence
  LRRK2 RNA guide
gccuaaucuuuucuuuucugc

SEQ ID NO: 76906 - RNA, 21 nt, Artificial Sequence
  LRRK2 RNA guide
gccuacucuucucacaggcug

SEQ ID NO: 76907 - RNA, 21 nt, Artificial Sequence
  LRRK2 RNA guide
gccugugagaagaguaggcag

SEQ ID NO: 76908 - RNA, 21 nt, Artificial Sequence
  LRRK2 RNA guide
ggccuaaucuuuucuuuucug

SEQ ID NO: 76909 - RNA, 21 nt, Artificial Sequence
  LRRK2 RNA guide
guacuaagcagccugugagaa

SEQ ID NO: 76910 - RNA, 21 nt, Artificial Sequence
  LRRK2 RNA guide
gugagaagaguaggcagaaaa

SEQ ID NO: 76911 - RNA, 21 nt, Artificial Sequence
  LRRK2 RNA guide
uaagcagccugugagaagagu

SEQ ID NO: 76912 - RNA, 21 nt, Artificial Sequence
  LRRK2 RNA guide
uacuaagcagccugugagaag

SEQ ID NO: 76913 - RNA, 21 nt, Artificial Sequence
  LRRK2 RNA guide
uacucuucucacaggcugcuu

SEQ ID NO: 76914 - RNA, 21 nt, Artificial Sequence
  LRRK2 RNA guide
ucugccuacucuucucacagg

SEQ ID NO: 76915 - RNA, 21 nt, Artificial Sequence
  LRRK2 RNA guide
ucuuuucugccuacucuucuc

SEQ ID NO: 76916 - RNA, 21 nt, Artificial Sequence
  LRRK2 RNA guide
ucuuuucuuuucugccuacuc

SEQ ID NO: 76917 - RNA, 21 nt, Artificial Sequence
  LRRK2 RNA guide
ugagaagaguaggcagaaaag

SEQ ID NO: 76918 - RNA, 21 nt, Artificial Sequence
  LRRK2 RNA guide
ugccuacucuucucacaggcu

SEQ ID NO: 76919 - RNA, 21 nt, Artificial Sequence
  LRRK2 RNA guide
ugugagaagaguaggcagaaa

SEQ ID NO: 76920 - RNA, 21 nt, Artificial Sequence
  LRRK2 RNA guide
uucugccuacucuucucacag

SEQ ID NO: 76921 - RNA, 21 nt, Artificial Sequence
  LRRK2 RNA guide
uucuuuucugccuacucuucu

SEQ ID NO: 76922 - RNA, 21 nt, Artificial Sequence
  LRRK2 RNA guide
uuucugccuacucuucucaca

SEQ ID NO: 76923 - RNA, 21 nt, Artificial Sequence
  LRRK2 RNA guide
uuucuuuucugccuacucuuc

SEQ ID NO: 76924 - RNA, 21 nt, Artificial Sequence
  LRRK2 RNA guide
uuuucugccuacucuucucac

SEQ ID NO: 76925 - RNA, 21 nt, Artificial Sequence
  LRRK2 RNA guide
uuuucuuuucugccuacucuu

SEQ ID NO: 76926 - RNA, 22 nt, Artificial Sequence
  LRRK2 RNA guide
aaaguacuaagcagccugugag

SEQ ID NO: 76927 - RNA, 22 nt, Artificial Sequence
  LRRK2 RNA guide
aagaguaggcagaaaagaaaag

SEQ ID NO: 76928 - RNA, 22 nt, Artificial Sequence
  LRRK2 RNA guide
aagcagccugugagaagaguag

SEQ ID NO: 76929 - RNA, 22 nt, Artificial Sequence
  LRRK2 RNA guide
aaguacuaagcagccugugaga

SEQ ID NO: 76930 - RNA, 22 nt, Artificial Sequence
  LRRK2 RNA guide
aaucuuuucuuuucugccuacu

SEQ ID NO: 76931 - RNA, 22 nt, Artificial Sequence
  LRRK2 RNA guide
acuaagcagccugugagaagag

SEQ ID NO: 76932 - RNA, 22 nt, Artificial Sequence
  LRRK2 RNA guide
acucuucucacaggcugcuuag

SEQ ID NO: 76933 - RNA, 22 nt, Artificial Sequence
  LRRK2 RNA guide
agaagaguaggcagaaaagaaa

SEQ ID NO: 76934 - RNA, 22 nt, Artificial Sequence
  LRRK2 RNA guide
agaguaggcagaaaagaaaaga

SEQ ID NO: 76935 - RNA, 22 nt, Artificial Sequence
  LRRK2 RNA guide
agcagccugugagaagaguagg

SEQ ID NO: 76936 - RNA, 22 nt, Artificial Sequence
  LRRK2 RNA guide
agccugugagaagaguaggcag

SEQ ID NO: 76937 - RNA, 22 nt, Artificial Sequence
  LRRK2 RNA guide
aguacuaagcagccugugagaa

SEQ ID NO: 76938 - RNA, 22 nt, Artificial Sequence
  LRRK2 RNA guide
aguaggcagaaaagaaaagauu

SEQ ID NO: 76939 - RNA, 22 nt, Artificial Sequence
  LRRK2 RNA guide
aucuuuucuuuucugccuacuc

SEQ ID NO: 76940 - RNA, 22 nt, Artificial Sequence
  LRRK2 RNA guide
cagccugugagaagaguaggca

SEQ ID NO: 76941 - RNA, 22 nt, Artificial Sequence
  LRRK2 RNA guide
ccuaaucuuuucuuuucugccu

SEQ ID NO: 76942 - RNA, 22 nt, Artificial Sequence
  LRRK2 RNA guide
ccuacucuucucacaggcugcu

SEQ ID NO: 76943 - RNA, 22 nt, Artificial Sequence
  LRRK2 RNA guide
ccugugagaagaguaggcagaa

SEQ ID NO: 76944 - RNA, 22 nt, Artificial Sequence
  LRRK2 RNA guide
cuaagcagccugugagaagagu

SEQ ID NO: 76945 - RNA, 22 nt, Artificial Sequence
  LRRK2 RNA guide
cuaaucuuuucuuuucugccua

SEQ ID NO: 76946 - RNA, 22 nt, Artificial Sequence
  LRRK2 RNA guide
cuacucuucucacaggcugcuu

SEQ ID NO: 76947 - RNA, 22 nt, Artificial Sequence
  LRRK2 RNA guide
cugccuacucuucucacaggcu

SEQ ID NO: 76948 - RNA, 22 nt, Artificial Sequence
  LRRK2 RNA guide
cugugagaagaguaggcagaaa

SEQ ID NO: 76949 - RNA, 22 nt, Artificial Sequence
  LRRK2 RNA guide
cuuuucugccuacucuucucac

SEQ ID NO: 76950 - RNA, 22 nt, Artificial Sequence
  LRRK2 RNA guide
cuuuucuuuucugccuacucuu

SEQ ID NO: 76951 - RNA, 22 nt, Artificial Sequence
  LRRK2 RNA guide
gaagaguaggcagaaaagaaaa

SEQ ID NO: 76952 - RNA, 22 nt, Artificial Sequence
  LRRK2 RNA guide
gagaagaguaggcagaaaagaa

SEQ ID NO: 76953 - RNA, 22 nt, Artificial Sequence
  LRRK2 RNA guide
gaguaggcagaaaagaaaagau

SEQ ID NO: 76954 - RNA, 22 nt, Artificial Sequence
  LRRK2 RNA guide
gcagccugugagaagaguaggc

SEQ ID NO: 76955 - RNA, 22 nt, Artificial Sequence
  LRRK2 RNA guide
gccuaaucuuuucuuuucugcc

SEQ ID NO: 76956 - RNA, 22 nt, Artificial Sequence
  LRRK2 RNA guide
gccuacucuucucacaggcugc

SEQ ID NO: 76957 - RNA, 22 nt, Artificial Sequence
  LRRK2 RNA guide
gccugugagaagaguaggcaga

SEQ ID NO: 76958 - RNA, 22 nt, Artificial Sequence
  LRRK2 RNA guide
ggccuaaucuuuucuuuucugc

SEQ ID NO: 76959 - RNA, 22 nt, Artificial Sequence
  LRRK2 RNA guide
gggccuaaucuuuucuuuucug

SEQ ID NO: 76960 - RNA, 22 nt, Artificial Sequence
  LRRK2 RNA guide
guacuaagcagccugugagaag

SEQ ID NO: 76961 - RNA, 22 nt, Artificial Sequence
  LRRK2 RNA guide
gugagaagaguaggcagaaaag

SEQ ID NO: 76962 - RNA, 22 nt, Artificial Sequence
  LRRK2 RNA guide
uaagcagccugugagaagagua

SEQ ID NO: 76963 - RNA, 22 nt, Artificial Sequence
  LRRK2 RNA guide
uaaucuuuucuuuucugccuac

SEQ ID NO: 76964 - RNA, 22 nt, Artificial Sequence
  LRRK2 RNA guide
uacuaagcagccugugagaaga

SEQ ID NO: 76965 - RNA, 22 nt, Artificial Sequence
  LRRK2 RNA guide
uacucuucucacaggcugcuua

SEQ ID NO: 76966 - RNA, 22 nt, Artificial Sequence
  LRRK2 RNA guide
ucugccuacucuucucacaggc

SEQ ID NO: 76967 - RNA, 22 nt, Artificial Sequence
  LRRK2 RNA guide
ucuuuucugccuacucuucuca

SEQ ID NO: 76968 - RNA, 22 nt, Artificial Sequence
  LRRK2 RNA guide
ucuuuucuuuucugccuacucu

SEQ ID NO: 76969 - RNA, 22 nt, Artificial Sequence
  LRRK2 RNA guide
ugagaagaguaggcagaaaaga

SEQ ID NO: 76970 - RNA, 22 nt, Artificial Sequence
  LRRK2 RNA guide
ugccuacucuucucacaggcug

SEQ ID NO: 76971 - RNA, 22 nt, Artificial Sequence
  LRRK2 RNA guide
ugugagaagaguaggcagaaaa

SEQ ID NO: 76972 - RNA, 22 nt, Artificial Sequence
  LRRK2 RNA guide
uucugccuacucuucucacagg

SEQ ID NO: 76973 - RNA, 22 nt, Artificial Sequence
  LRRK2 RNA guide
uucuuuucugccuacucuucuc

SEQ ID NO: 76974 - RNA, 22 nt, Artificial Sequence
  LRRK2 RNA guide
uuucugccuacucuucucacag

SEQ ID NO: 76975 - RNA, 22 nt, Artificial Sequence
  LRRK2 RNA guide
uuucuuuucugccuacucuucu

SEQ ID NO: 76976 - RNA, 22 nt, Artificial Sequence
  LRRK2 RNA guide
uuuucugccuacucuucucaca

SEQ ID NO: 76977 - RNA, 22 nt, Artificial Sequence
  LRRK2 RNA guide
uuuucuuuucugccuacucuuc

SEQ ID NO: 76978 - RNA, 20 nt, Artificial Sequence
  LRRK2 RNA guide
aagaauaggcagaaaagaaa

SEQ ID NO: 76979 - RNA, 20 nt, Artificial Sequence
  LRRK2 RNA guide
aagcagccugugagaagaau

SEQ ID NO: 76980 - RNA, 20 nt, Artificial Sequence
  LRRK2 RNA guide
aauaggcagaaaagaaaaga

SEQ ID NO: 76981 - RNA, 20 nt, Artificial Sequence
  LRRK2 RNA guide
agaagaauaggcagaaaaga

SEQ ID NO: 76982 - RNA, 20 nt, Artificial Sequence
  LRRK2 RNA guide
agaauaggcagaaaagaaaa

SEQ ID NO: 76983 - RNA, 20 nt, Artificial Sequence
  LRRK2 RNA guide
agcagccugugagaagaaua

SEQ ID NO: 76984 - RNA, 20 nt, Artificial Sequence
  LRRK2 RNA guide
agccugugagaagaauaggc

SEQ ID NO: 76985 - RNA, 20 nt, Artificial Sequence
  LRRK2 RNA guide
aucuuuucuuuucugccuau

SEQ ID NO: 76986 - RNA, 20 nt, Artificial Sequence
  LRRK2 RNA guide
auucuucucacaggcugcuu

SEQ ID NO: 76987 - RNA, 20 nt, Artificial Sequence
  LRRK2 RNA guide
cagccugugagaagaauagg

SEQ ID NO: 76988 - RNA, 20 nt, Artificial Sequence
  LRRK2 RNA guide
ccuauucuucucacaggcug

SEQ ID NO: 76989 - RNA, 20 nt, Artificial Sequence
  LRRK2 RNA guide
ccugugagaagaauaggcag

SEQ ID NO: 76990 - RNA, 20 nt, Artificial Sequence
  LRRK2 RNA guide
cuauucuucucacaggcugc

SEQ ID NO: 76991 - RNA, 20 nt, Artificial Sequence
  LRRK2 RNA guide
cugccuauucuucucacagg

SEQ ID NO: 76992 - RNA, 20 nt, Artificial Sequence
  LRRK2 RNA guide
cugugagaagaauaggcaga

SEQ ID NO: 76993 - RNA, 20 nt, Artificial Sequence
  LRRK2 RNA guide
cuuuucugccuauucuucuc

SEQ ID NO: 76994 - RNA, 20 nt, Artificial Sequence
  LRRK2 RNA guide
cuuuucuuuucugccuauuc

SEQ ID NO: 76995 - RNA, 20 nt, Artificial Sequence
  LRRK2 RNA guide
gaagaauaggcagaaaagaa

SEQ ID NO: 76996 - RNA, 20 nt, Artificial Sequence
  LRRK2 RNA guide
gaauaggcagaaaagaaaag

SEQ ID NO: 76997 - RNA, 20 nt, Artificial Sequence
  LRRK2 RNA guide
gagaagaauaggcagaaaag

SEQ ID NO: 76998 - RNA, 20 nt, Artificial Sequence
  LRRK2 RNA guide
gcagccugugagaagaauag

SEQ ID NO: 76999 - RNA, 20 nt, Artificial Sequence
  LRRK2 RNA guide
gccuauucuucucacaggcu

SEQ ID NO: 77000 - RNA, 20 nt, Artificial Sequence
  LRRK2 RNA guide
gccugugagaagaauaggca

SEQ ID NO: 77001 - RNA, 20 nt, Artificial Sequence
  LRRK2 RNA guide
gugagaagaauaggcagaaa

SEQ ID NO: 77002 - RNA, 20 nt, Artificial Sequence
  LRRK2 RNA guide
uaagcagccugugagaagaa

SEQ ID NO: 77003 - RNA, 20 nt, Artificial Sequence
  LRRK2 RNA guide
uauucuucucacaggcugcu

SEQ ID NO: 77004 - RNA, 20 nt, Artificial Sequence
  LRRK2 RNA guide
ucugccuauucuucucacag

SEQ ID NO: 77005 - RNA, 20 nt, Artificial Sequence
  LRRK2 RNA guide
ucuuuucugccuauucuucu

SEQ ID NO: 77006 - RNA, 20 nt, Artificial Sequence
  LRRK2 RNA guide
ucuuuucuuuucugccuauu

SEQ ID NO: 77007 - RNA, 20 nt, Artificial Sequence
  LRRK2 RNA guide
ugagaagaauaggcagaaaa

SEQ ID NO: 77008 - RNA, 20 nt, Artificial Sequence
  LRRK2 RNA guide
ugccuauucuucucacaggc

SEQ ID NO: 77009 - RNA, 20 nt, Artificial Sequence
  LRRK2 RNA guide
ugugagaagaauaggcagaa

SEQ ID NO: 77010 - RNA, 20 nt, Artificial Sequence
  LRRK2 RNA guide
uucugccuauucuucucaca

SEQ ID NO: 77011 - RNA, 20 nt, Artificial Sequence
  LRRK2 RNA guide
uucuuuucugccuauucuuc

SEQ ID NO: 77012 - RNA, 20 nt, Artificial Sequence
  LRRK2 RNA guide
uuucugccuauucuucucac

SEQ ID NO: 77013 - RNA, 20 nt, Artificial Sequence
  LRRK2 RNA guide
uuucuuuucugccuauucuu

SEQ ID NO: 77014 - RNA, 20 nt, Artificial Sequence
  LRRK2 RNA guide
uuuucugccuauucuucuca

SEQ ID NO: 77015 - RNA, 20 nt, Artificial Sequence
  LRRK2 RNA guide
uuuucuuuucugccuauucu

SEQ ID NO: 77016 - RNA, 21 nt, Artificial Sequence
  LRRK2 RNA guide
aagcagccugugagaagaaua

SEQ ID NO: 77017 - RNA, 21 nt, Artificial Sequence
  LRRK2 RNA guide
agaagaauaggcagaaaagaa

SEQ ID NO: 77018 - RNA, 21 nt, Artificial Sequence
  LRRK2 RNA guide
agaauaggcagaaaagaaaag

SEQ ID NO: 77019 - RNA, 21 nt, Artificial Sequence
  LRRK2 RNA guide
agcagccugugagaagaauag

SEQ ID NO: 77020 - RNA, 21 nt, Artificial Sequence
  LRRK2 RNA guide
agccugugagaagaauaggca

SEQ ID NO: 77021 - RNA, 21 nt, Artificial Sequence
  LRRK2 RNA guide
auucuucucacaggcugcuua

SEQ ID NO: 77022 - RNA, 21 nt, Artificial Sequence
  LRRK2 RNA guide
cagccugugagaagaauaggc

SEQ ID NO: 77023 - RNA, 21 nt, Artificial Sequence
  LRRK2 RNA guide
ccuauucuucucacaggcugc

SEQ ID NO: 77024 - RNA, 21 nt, Artificial Sequence
  LRRK2 RNA guide
ccugugagaagaauaggcaga

SEQ ID NO: 77025 - RNA, 21 nt, Artificial Sequence
  LRRK2 RNA guide
cuaagcagccugugagaagaa

SEQ ID NO: 77026 - RNA, 21 nt, Artificial Sequence
  LRRK2 RNA guide
cuauucuucucacaggcugcu

SEQ ID NO: 77027 - RNA, 21 nt, Artificial Sequence
  LRRK2 RNA guide
cugccuauucuucucacaggc

SEQ ID NO: 77028 - RNA, 21 nt, Artificial Sequence
  LRRK2 RNA guide
cugugagaagaauaggcagaa

SEQ ID NO: 77029 - RNA, 21 nt, Artificial Sequence
  LRRK2 RNA guide
cuuuucugccuauucuucuca

SEQ ID NO: 77030 - RNA, 21 nt, Artificial Sequence
  LRRK2 RNA guide
cuuuucuuuucugccuauucu

SEQ ID NO: 77031 - RNA, 21 nt, Artificial Sequence
  LRRK2 RNA guide
gaagaauaggcagaaaagaaa

SEQ ID NO: 77032 - RNA, 21 nt, Artificial Sequence
  LRRK2 RNA guide
gaauaggcagaaaagaaaaga

SEQ ID NO: 77033 - RNA, 21 nt, Artificial Sequence
  LRRK2 RNA guide
gagaagaauaggcagaaaaga

SEQ ID NO: 77034 - RNA, 21 nt, Artificial Sequence
  LRRK2 RNA guide
gcagccugugagaagaauagg

SEQ ID NO: 77035 - RNA, 21 nt, Artificial Sequence
  LRRK2 RNA guide
gccuauucuucucacaggcug

SEQ ID NO: 77036 - RNA, 21 nt, Artificial Sequence
  LRRK2 RNA guide
gccugugagaagaauaggcag

SEQ ID NO: 77037 - RNA, 21 nt, Artificial Sequence
  LRRK2 RNA guide
gugagaagaauaggcagaaaa

SEQ ID NO: 77038 - RNA, 21 nt, Artificial Sequence
  LRRK2 RNA guide
uaagcagccugugagaagaau

SEQ ID NO: 77039 - RNA, 21 nt, Artificial Sequence
  LRRK2 RNA guide
uauucuucucacaggcugcuu

SEQ ID NO: 77040 - RNA, 21 nt, Artificial Sequence
  LRRK2 RNA guide
ucugccuauucuucucacagg

SEQ ID NO: 77041 - RNA, 21 nt, Artificial Sequence
  LRRK2 RNA guide
ucuuuucugccuauucuucuc

SEQ ID NO: 77042 - RNA, 21 nt, Artificial Sequence
  LRRK2 RNA guide
ucuuuucuuuucugccuauuc

SEQ ID NO: 77043 - RNA, 21 nt, Artificial Sequence
  LRRK2 RNA guide
ugagaagaauaggcagaaaag

SEQ ID NO: 77044 - RNA, 21 nt, Artificial Sequence
  LRRK2 RNA guide
ugccuauucuucucacaggcu

SEQ ID NO: 77045 - RNA, 21 nt, Artificial Sequence
  LRRK2 RNA guide
ugugagaagaauaggcagaaa

SEQ ID NO: 77046 - RNA, 21 nt, Artificial Sequence
  LRRK2 RNA guide
uucugccuauucuucucacag

SEQ ID NO: 77047 - RNA, 21 nt, Artificial Sequence
  LRRK2 RNA guide
uucuuuucugccuauucuucu

SEQ ID NO: 77048 - RNA, 21 nt, Artificial Sequence
  LRRK2 RNA guide
uuucugccuauucuucucaca

SEQ ID NO: 77049 - RNA, 21 nt, Artificial Sequence
  LRRK2 RNA guide
uuucuuuucugccuauucuuc

SEQ ID NO: 77050 - RNA, 21 nt, Artificial Sequence
  LRRK2 RNA guide
uuuucugccuauucuucucac

SEQ ID NO: 77051 - RNA, 22 nt, Artificial Sequence
  LRRK2 RNA guide
aagaauaggcagaaaagaaaag

SEQ ID NO: 77052 - RNA, 22 nt, Artificial Sequence
  LRRK2 RNA guide
aagcagccugugagaagaauag

SEQ ID NO: 77053 - RNA, 22 nt, Artificial Sequence
  LRRK2 RNA guide
acuaagcagccugugagaagaa

SEQ ID NO: 77054 - RNA, 22 nt, Artificial Sequence
  LRRK2 RNA guide
agaagaauaggcagaaaagaaa

SEQ ID NO: 77055 - RNA, 22 nt, Artificial Sequence
  LRRK2 RNA guide
agaauaggcagaaaagaaaaga

SEQ ID NO: 77056 - RNA, 22 nt, Artificial Sequence
  LRRK2 RNA guide
agcagccugugagaagaauagg

SEQ ID NO: 77057 - RNA, 22 nt, Artificial Sequence
  LRRK2 RNA guide
agccugugagaagaauaggcag

SEQ ID NO: 77058 - RNA, 22 nt, Artificial Sequence
  LRRK2 RNA guide
aucuuuucuuuucugccuauuc

SEQ ID NO: 77059 - RNA, 22 nt, Artificial Sequence
  LRRK2 RNA guide
auucuucucacaggcugcuuag

SEQ ID NO: 77060 - RNA, 22 nt, Artificial Sequence
  LRRK2 RNA guide
cagccugugagaagaauaggca

SEQ ID NO: 77061 - RNA, 22 nt, Artificial Sequence
  LRRK2 RNA guide
ccuauucuucucacaggcugcu

SEQ ID NO: 77062 - RNA, 22 nt, Artificial Sequence
  LRRK2 RNA guide
ccugugagaagaauaggcagaa

SEQ ID NO: 77063 - RNA, 22 nt, Artificial Sequence
  LRRK2 RNA guide
cuaagcagccugugagaagaau

SEQ ID NO: 77064 - RNA, 22 nt, Artificial Sequence
  LRRK2 RNA guide
cuauucuucucacaggcugcuu

SEQ ID NO: 77065 - RNA, 22 nt, Artificial Sequence
  LRRK2 RNA guide
cugccuauucuucucacaggcu

SEQ ID NO: 77066 - RNA, 22 nt, Artificial Sequence
  LRRK2 RNA guide
cugugagaagaauaggcagaaa

SEQ ID NO: 77067 - RNA, 22 nt, Artificial Sequence
  LRRK2 RNA guide
cuuuucugccuauucuucucac

SEQ ID NO: 77068 - RNA, 22 nt, Artificial Sequence
  LRRK2 RNA guide
cuuuucuuuucugccuauucuu

SEQ ID NO: 77069 - RNA, 22 nt, Artificial Sequence
  LRRK2 RNA guide
gaagaauaggcagaaaagaaaa

SEQ ID NO: 77070 - RNA, 22 nt, Artificial Sequence
  LRRK2 RNA guide
gaauaggcagaaaagaaaagau

SEQ ID NO: 77071 - RNA, 22 nt, Artificial Sequence
  LRRK2 RNA guide
gagaagaauaggcagaaaagaa

SEQ ID NO: 77072 - RNA, 22 nt, Artificial Sequence
  LRRK2 RNA guide
gcagccugugagaagaauaggc

SEQ ID NO: 77073 - RNA, 22 nt, Artificial Sequence
  LRRK2 RNA guide
gccuauucuucucacaggcugc

SEQ ID NO: 77074 - RNA, 22 nt, Artificial Sequence
  LRRK2 RNA guide
gccugugagaagaauaggcaga

SEQ ID NO: 77075 - RNA, 22 nt, Artificial Sequence
  LRRK2 RNA guide
gugagaagaauaggcagaaaag

SEQ ID NO: 77076 - RNA, 22 nt, Artificial Sequence
  LRRK2 RNA guide
uaagcagccugugagaagaaua

SEQ ID NO: 77077 - RNA, 22 nt, Artificial Sequence
  LRRK2 RNA guide
uauucuucucacaggcugcuua

SEQ ID NO: 77078 - RNA, 22 nt, Artificial Sequence
  LRRK2 RNA guide
ucugccuauucuucucacaggc

SEQ ID NO: 77079 - RNA, 22 nt, Artificial Sequence
  LRRK2 RNA guide
ucuuuucugccuauucuucuca

SEQ ID NO: 77080 - RNA, 22 nt, Artificial Sequence
  LRRK2 RNA guide
ucuuuucuuuucugccuauucu

SEQ ID NO: 77081 - RNA, 22 nt, Artificial Sequence
  LRRK2 RNA guide
ugagaagaauaggcagaaaaga

SEQ ID NO: 77082 - RNA, 22 nt, Artificial Sequence
  LRRK2 RNA guide
ugccuauucuucucacaggcug

SEQ ID NO: 77083 - RNA, 22 nt, Artificial Sequence
  LRRK2 RNA guide
ugugagaagaauaggcagaaaa

SEQ ID NO: 77084 - RNA, 22 nt, Artificial Sequence
  LRRK2 RNA guide
uucugccuauucuucucacagg

SEQ ID NO: 77085 - RNA, 22 nt, Artificial Sequence
  LRRK2 RNA guide
uucuuuucugccuauucuucuc

SEQ ID NO: 77086 - RNA, 22 nt, Artificial Sequence
  LRRK2 RNA guide
uuucugccuauucuucucacag

SEQ ID NO: 77087 - RNA, 22 nt, Artificial Sequence
  LRRK2 RNA guide
uuucuuuucugccuauucuucu

SEQ ID NO: 77088 - RNA, 22 nt, Artificial Sequence
  LRRK2 RNA guide
uuuucugccuauucuucucaca

SEQ ID NO: 77089 - RNA, 22 nt, Artificial Sequence
  LRRK2 RNA guide
uuuucuuuucugccuauucuuc

SEQ ID NO: 77090 - RNA, 20 nt, Artificial Sequence
  LRRK2 RNA guide
aaagcuuacaaaguacuaag

SEQ ID NO: 77091 - RNA, 20 nt, Artificial Sequence
  LRRK2 RNA guide
aagcuuacaaaguacuaagc

SEQ ID NO: 77092 - RNA, 20 nt, Artificial Sequence
  LRRK2 RNA guide
acaggcugcuuaguacuuug

SEQ ID NO: 77093 - RNA, 20 nt, Artificial Sequence
  LRRK2 RNA guide
agcuuacaaaguacuaagca

SEQ ID NO: 77094 - RNA, 20 nt, Artificial Sequence
  LRRK2 RNA guide
aggcugcuuaguacuuugua

SEQ ID NO: 77095 - RNA, 20 nt, Artificial Sequence
  LRRK2 RNA guide
caggcugcuuaguacuuugu

SEQ ID NO: 77096 - RNA, 20 nt, Artificial Sequence
  LRRK2 RNA guide
cugcuuaguacuuuguaagc

SEQ ID NO: 77097 - RNA, 20 nt, Artificial Sequence
  LRRK2 RNA guide
cuuaguacuuuguaagcuuu

SEQ ID NO: 77098 - RNA, 20 nt, Artificial Sequence
  LRRK2 RNA guide
gcugcuuaguacuuuguaag

SEQ ID NO: 77099 - RNA, 20 nt, Artificial Sequence
  LRRK2 RNA guide
gcuuaguacuuuguaagcuu

SEQ ID NO: 77100 - RNA, 20 nt, Artificial Sequence
  LRRK2 RNA guide
ggcugcuuaguacuuuguaa

SEQ ID NO: 77101 - RNA, 20 nt, Artificial Sequence
  LRRK2 RNA guide
ugcuuaguacuuuguaagcu

SEQ ID NO: 77102 - RNA, 21 nt, Artificial Sequence
  LRRK2 RNA guide
aaagcuuacaaaguacuaagc

SEQ ID NO: 77103 - RNA, 21 nt, Artificial Sequence
  LRRK2 RNA guide
aagcuuacaaaguacuaagca

SEQ ID NO: 77104 - RNA, 21 nt, Artificial Sequence
  LRRK2 RNA guide
acaggcugcuuaguacuuugu

SEQ ID NO: 77105 - RNA, 21 nt, Artificial Sequence
  LRRK2 RNA guide
agcuuacaaaguacuaagcag

SEQ ID NO: 77106 - RNA, 21 nt, Artificial Sequence
  LRRK2 RNA guide
aggcugcuuaguacuuuguaa

SEQ ID NO: 77107 - RNA, 21 nt, Artificial Sequence
  LRRK2 RNA guide
cacaggcugcuuaguacuuug

SEQ ID NO: 77108 - RNA, 21 nt, Artificial Sequence
  LRRK2 RNA guide
caggcugcuuaguacuuugua

SEQ ID NO: 77109 - RNA, 21 nt, Artificial Sequence
  LRRK2 RNA guide
cugcuuaguacuuuguaagcu

SEQ ID NO: 77110 - RNA, 21 nt, Artificial Sequence
  LRRK2 RNA guide
gcugcuuaguacuuuguaagc

SEQ ID NO: 77111 - RNA, 21 nt, Artificial Sequence
  LRRK2 RNA guide
gcuuaguacuuuguaagcuuu

SEQ ID NO: 77112 - RNA, 21 nt, Artificial Sequence
  LRRK2 RNA guide
ggcugcuuaguacuuuguaag

SEQ ID NO: 77113 - RNA, 21 nt, Artificial Sequence
  LRRK2 RNA guide
ugcuuaguacuuuguaagcuu

SEQ ID NO: 77114 - RNA, 22 nt, Artificial Sequence
  LRRK2 RNA guide
aaaagcuuacaaaguacuaagc

SEQ ID NO: 77115 - RNA, 22 nt, Artificial Sequence
  LRRK2 RNA guide
aaagcuuacaaaguacuaagca

SEQ ID NO: 77116 - RNA, 22 nt, Artificial Sequence
  LRRK2 RNA guide
aagcuuacaaaguacuaagcag

SEQ ID NO: 77117 - RNA, 22 nt, Artificial Sequence
  LRRK2 RNA guide
acaggcugcuuaguacuuugua

SEQ ID NO: 77118 - RNA, 22 nt, Artificial Sequence
  LRRK2 RNA guide
agcuuacaaaguacuaagcagc

SEQ ID NO: 77119 - RNA, 22 nt, Artificial Sequence
  LRRK2 RNA guide
aggcugcuuaguacuuuguaag

SEQ ID NO: 77120 - RNA, 22 nt, Artificial Sequence
  LRRK2 RNA guide
cacaggcugcuuaguacuuugu

SEQ ID NO: 77121 - RNA, 22 nt, Artificial Sequence
  LRRK2 RNA guide
caggcugcuuaguacuuuguaa

SEQ ID NO: 77122 - RNA, 22 nt, Artificial Sequence
  LRRK2 RNA guide
cugcuuaguacuuuguaagcuu

SEQ ID NO: 77123 - RNA, 22 nt, Artificial Sequence
  LRRK2 RNA guide
gcugcuuaguacuuuguaagcu

SEQ ID NO: 77124 - RNA, 22 nt, Artificial Sequence
  LRRK2 RNA guide
gcuuaguacuuuguaagcuuuu

SEQ ID NO: 77125 - RNA, 22 nt, Artificial Sequence
  LRRK2 RNA guide
ggcugcuuaguacuuuguaagc

SEQ ID NO: 77126 - RNA, 22 nt, Artificial Sequence
  LRRK2 RNA guide
ucacaggcugcuuaguacuuug

SEQ ID NO: 77127 - RNA, 22 nt, Artificial Sequence
  LRRK2 RNA guide
ugcuuaguacuuuguaagcuuu

SEQ ID NO: 77128 - RNA, 20 nt, Artificial Sequence
  LRRK2 RNA guide
aaauaacaauaacucccacu

SEQ ID NO: 77129 - RNA, 20 nt, Artificial Sequence
  LRRK2 RNA guide
aacaauaacucccacuccug

SEQ ID NO: 77130 - RNA, 20 nt, Artificial Sequence
  LRRK2 RNA guide
aacucccacuccugcuaaua

SEQ ID NO: 77131 - RNA, 20 nt, Artificial Sequence
  LRRK2 RNA guide
aauaacaauaacucccacuc

SEQ ID NO: 77132 - RNA, 20 nt, Artificial Sequence
  LRRK2 RNA guide
aauaacucccacuccugcua

SEQ ID NO: 77133 - RNA, 20 nt, Artificial Sequence
  LRRK2 RNA guide
acaauaacucccacuccugc

SEQ ID NO: 77134 - RNA, 20 nt, Artificial Sequence
  LRRK2 RNA guide
acucccacuccugcuaauac

SEQ ID NO: 77135 - RNA, 20 nt, Artificial Sequence
  LRRK2 RNA guide
agcaggagugggaguuauug

SEQ ID NO: 77136 - RNA, 20 nt, Artificial Sequence
  LRRK2 RNA guide
agcaguauuagcaggagugg

SEQ ID NO: 77137 - RNA, 20 nt, Artificial Sequence
  LRRK2 RNA guide
aggagugggaguuauuguua

SEQ ID NO: 77138 - RNA, 20 nt, Artificial Sequence
  LRRK2 RNA guide
aguagcaguauuagcaggag

SEQ ID NO: 77139 - RNA, 20 nt, Artificial Sequence
  LRRK2 RNA guide
aguauuagcaggagugggag

SEQ ID NO: 77140 - RNA, 20 nt, Artificial Sequence
  LRRK2 RNA guide
agugggaguuauuguuauuu

SEQ ID NO: 77141 - RNA, 20 nt, Artificial Sequence
  LRRK2 RNA guide
auaacaauaacucccacucc

SEQ ID NO: 77142 - RNA, 20 nt, Artificial Sequence
  LRRK2 RNA guide
auaacucccacuccugcuaa

SEQ ID NO: 77143 - RNA, 20 nt, Artificial Sequence
  LRRK2 RNA guide
auuagcaggagugggaguua

SEQ ID NO: 77144 - RNA, 20 nt, Artificial Sequence
  LRRK2 RNA guide
caauaacucccacuccugcu

SEQ ID NO: 77145 - RNA, 20 nt, Artificial Sequence
  LRRK2 RNA guide
caggagugggaguuauuguu

SEQ ID NO: 77146 - RNA, 20 nt, Artificial Sequence
  LRRK2 RNA guide
caguauuagcaggaguggga

SEQ ID NO: 77147 - RNA, 20 nt, Artificial Sequence
  LRRK2 RNA guide
cccacuccugcuaauacugc

SEQ ID NO: 77148 - RNA, 20 nt, Artificial Sequence
  LRRK2 RNA guide
cucccacuccugcuaauacu

SEQ ID NO: 77149 - RNA, 20 nt, Artificial Sequence
  LRRK2 RNA guide
gagugggaguuauuguuauu

SEQ ID NO: 77150 - RNA, 20 nt, Artificial Sequence
  LRRK2 RNA guide
gcaggagugggaguuauugu

SEQ ID NO: 77151 - RNA, 20 nt, Artificial Sequence
  LRRK2 RNA guide
gcaguauuagcaggaguggg

SEQ ID NO: 77152 - RNA, 20 nt, Artificial Sequence
  LRRK2 RNA guide
ggagugggaguuauuguuau

SEQ ID NO: 77153 - RNA, 20 nt, Artificial Sequence
  LRRK2 RNA guide
guagcaguauuagcaggagu

SEQ ID NO: 77154 - RNA, 20 nt, Artificial Sequence
  LRRK2 RNA guide
guaguagcaguauuagcagg

SEQ ID NO: 77155 - RNA, 20 nt, Artificial Sequence
  LRRK2 RNA guide
guauuagcaggagugggagu

SEQ ID NO: 77156 - RNA, 20 nt, Artificial Sequence
  LRRK2 RNA guide
gugggaguuauuguuauuua

SEQ ID NO: 77157 - RNA, 20 nt, Artificial Sequence
  LRRK2 RNA guide
uaaauaacaauaacucccac

SEQ ID NO: 77158 - RNA, 20 nt, Artificial Sequence
  LRRK2 RNA guide
uaacaauaacucccacuccu

SEQ ID NO: 77159 - RNA, 20 nt, Artificial Sequence
  LRRK2 RNA guide
uaacucccacuccugcuaau

SEQ ID NO: 77160 - RNA, 20 nt, Artificial Sequence
  LRRK2 RNA guide
uagcaggagugggaguuauu

SEQ ID NO: 77161 - RNA, 20 nt, Artificial Sequence
  LRRK2 RNA guide
uagcaguauuagcaggagug

SEQ ID NO: 77162 - RNA, 20 nt, Artificial Sequence
  LRRK2 RNA guide
uaguagcaguauuagcagga

SEQ ID NO: 77163 - RNA, 20 nt, Artificial Sequence
  LRRK2 RNA guide
uauuagcaggagugggaguu

SEQ ID NO: 77164 - RNA, 20 nt, Artificial Sequence
  LRRK2 RNA guide
ucccacuccugcuaauacug

SEQ ID NO: 77165 - RNA, 20 nt, Artificial Sequence
  LRRK2 RNA guide
uuagcaggagugggaguuau

SEQ ID NO: 77166 - RNA, 21 nt, Artificial Sequence
  LRRK2 RNA guide
aaauaacaauaacucccacuc

SEQ ID NO: 77167 - RNA, 21 nt, Artificial Sequence
  LRRK2 RNA guide
aacaauaacucccacuccugc

SEQ ID NO: 77168 - RNA, 21 nt, Artificial Sequence
  LRRK2 RNA guide
aacucccacuccugcuaauac

SEQ ID NO: 77169 - RNA, 21 nt, Artificial Sequence
  LRRK2 RNA guide
aauaacaauaacucccacucc

SEQ ID NO: 77170 - RNA, 21 nt, Artificial Sequence
  LRRK2 RNA guide
aauaacucccacuccugcuaa

SEQ ID NO: 77171 - RNA, 21 nt, Artificial Sequence
  LRRK2 RNA guide
acaauaacucccacuccugcu

SEQ ID NO: 77172 - RNA, 21 nt, Artificial Sequence
  LRRK2 RNA guide
acucccacuccugcuaauacu

SEQ ID NO: 77173 - RNA, 21 nt, Artificial Sequence
  LRRK2 RNA guide
agcaggagugggaguuauugu

SEQ ID NO: 77174 - RNA, 21 nt, Artificial Sequence
  LRRK2 RNA guide
agcaguauuagcaggaguggg

SEQ ID NO: 77175 - RNA, 21 nt, Artificial Sequence
  LRRK2 RNA guide
aggagugggaguuauuguuau

SEQ ID NO: 77176 - RNA, 21 nt, Artificial Sequence
  LRRK2 RNA guide
aguagcaguauuagcaggagu

SEQ ID NO: 77177 - RNA, 21 nt, Artificial Sequence
  LRRK2 RNA guide
aguaguagcaguauuagcagg

SEQ ID NO: 77178 - RNA, 21 nt, Artificial Sequence
  LRRK2 RNA guide
aguauuagcaggagugggagu

SEQ ID NO: 77179 - RNA, 21 nt, Artificial Sequence
  LRRK2 RNA guide
auaacaauaacucccacuccu

SEQ ID NO: 77180 - RNA, 21 nt, Artificial Sequence
  LRRK2 RNA guide
auaacucccacuccugcuaau

SEQ ID NO: 77181 - RNA, 21 nt, Artificial Sequence
  LRRK2 RNA guide
auuagcaggagugggaguuau

SEQ ID NO: 77182 - RNA, 21 nt, Artificial Sequence
  LRRK2 RNA guide
caauaacucccacuccugcua

SEQ ID NO: 77183 - RNA, 21 nt, Artificial Sequence
  LRRK2 RNA guide
caggagugggaguuauuguua

SEQ ID NO: 77184 - RNA, 21 nt, Artificial Sequence
  LRRK2 RNA guide
caguauuagcaggagugggag

SEQ ID NO: 77185 - RNA, 21 nt, Artificial Sequence
  LRRK2 RNA guide
cccacuccugcuaauacugcu

SEQ ID NO: 77186 - RNA, 21 nt, Artificial Sequence
  LRRK2 RNA guide
cucccacuccugcuaauacug

SEQ ID NO: 77187 - RNA, 21 nt, Artificial Sequence
  LRRK2 RNA guide
gagugggaguuauuguuauuu

SEQ ID NO: 77188 - RNA, 21 nt, Artificial Sequence
  LRRK2 RNA guide
gcaggagugggaguuauuguu

SEQ ID NO: 77189 - RNA, 21 nt, Artificial Sequence
  LRRK2 RNA guide
gcaguauuagcaggaguggga

SEQ ID NO: 77190 - RNA, 21 nt, Artificial Sequence
  LRRK2 RNA guide
ggagugggaguuauuguuauu

SEQ ID NO: 77191 - RNA, 21 nt, Artificial Sequence
  LRRK2 RNA guide
guagcaguauuagcaggagug

SEQ ID NO: 77192 - RNA, 21 nt, Artificial Sequence
  LRRK2 RNA guide
guaguagcaguauuagcagga

SEQ ID NO: 77193 - RNA, 21 nt, Artificial Sequence
  LRRK2 RNA guide
guauuagcaggagugggaguu

SEQ ID NO: 77194 - RNA, 21 nt, Artificial Sequence
  LRRK2 RNA guide
uaacaauaacucccacuccug

SEQ ID NO: 77195 - RNA, 21 nt, Artificial Sequence
  LRRK2 RNA guide
uaacucccacuccugcuaaua

SEQ ID NO: 77196 - RNA, 21 nt, Artificial Sequence
  LRRK2 RNA guide
uagcaggagugggaguuauug

SEQ ID NO: 77197 - RNA, 21 nt, Artificial Sequence
  LRRK2 RNA guide
uagcaguauuagcaggagugg

SEQ ID NO: 77198 - RNA, 21 nt, Artificial Sequence
  LRRK2 RNA guide
uaguagcaguauuagcaggag

SEQ ID NO: 77199 - RNA, 21 nt, Artificial Sequence
  LRRK2 RNA guide
uauuagcaggagugggaguua

SEQ ID NO: 77200 - RNA, 21 nt, Artificial Sequence
  LRRK2 RNA guide
ucccacuccugcuaauacugc

SEQ ID NO: 77201 - RNA, 21 nt, Artificial Sequence
  LRRK2 RNA guide
uuagcaggagugggaguuauu

SEQ ID NO: 77202 - RNA, 22 nt, Artificial Sequence
  LRRK2 RNA guide
aaauaacaauaacucccacucc

SEQ ID NO: 77203 - RNA, 22 nt, Artificial Sequence
  LRRK2 RNA guide
aacaauaacucccacuccugcu

SEQ ID NO: 77204 - RNA, 22 nt, Artificial Sequence
  LRRK2 RNA guide
aacucccacuccugcuaauacu

SEQ ID NO: 77205 - RNA, 22 nt, Artificial Sequence
  LRRK2 RNA guide
aauaacaauaacucccacuccu

SEQ ID NO: 77206 - RNA, 22 nt, Artificial Sequence
  LRRK2 RNA guide
aauaacucccacuccugcuaau

SEQ ID NO: 77207 - RNA, 22 nt, Artificial Sequence
  LRRK2 RNA guide
acaauaacucccacuccugcua

SEQ ID NO: 77208 - RNA, 22 nt, Artificial Sequence
  LRRK2 RNA guide
acucccacuccugcuaauacug

SEQ ID NO: 77209 - RNA, 22 nt, Artificial Sequence
  LRRK2 RNA guide
agcaggagugggaguuauuguu

SEQ ID NO: 77210 - RNA, 22 nt, Artificial Sequence
  LRRK2 RNA guide
agcaguauuagcaggaguggga

SEQ ID NO: 77211 - RNA, 22 nt, Artificial Sequence
  LRRK2 RNA guide
aggagugggaguuauuguuauu

SEQ ID NO: 77212 - RNA, 22 nt, Artificial Sequence
  LRRK2 RNA guide
aguagcaguauuagcaggagug

SEQ ID NO: 77213 - RNA, 22 nt, Artificial Sequence
  LRRK2 RNA guide
aguaguagcaguauuagcagga

SEQ ID NO: 77214 - RNA, 22 nt, Artificial Sequence
  LRRK2 RNA guide
aguauuagcaggagugggaguu

SEQ ID NO: 77215 - RNA, 22 nt, Artificial Sequence
  LRRK2 RNA guide
auaacaauaacucccacuccug

SEQ ID NO: 77216 - RNA, 22 nt, Artificial Sequence
  LRRK2 RNA guide
auaacucccacuccugcuaaua

SEQ ID NO: 77217 - RNA, 22 nt, Artificial Sequence
  LRRK2 RNA guide
auuagcaggagugggaguuauu

SEQ ID NO: 77218 - RNA, 22 nt, Artificial Sequence
  LRRK2 RNA guide
caauaacucccacuccugcuaa

SEQ ID NO: 77219 - RNA, 22 nt, Artificial Sequence
  LRRK2 RNA guide
caggagugggaguuauuguuau

SEQ ID NO: 77220 - RNA, 22 nt, Artificial Sequence
  LRRK2 RNA guide
caguauuagcaggagugggagu

SEQ ID NO: 77221 - RNA, 22 nt, Artificial Sequence
  LRRK2 RNA guide
cccacuccugcuaauacugcua

SEQ ID NO: 77222 - RNA, 22 nt, Artificial Sequence
  LRRK2 RNA guide
cucccacuccugcuaauacugc

SEQ ID NO: 77223 - RNA, 22 nt, Artificial Sequence
  LRRK2 RNA guide
gagugggaguuauuguuauuua

SEQ ID NO: 77224 - RNA, 22 nt, Artificial Sequence
  LRRK2 RNA guide
gcaggagugggaguuauuguua

SEQ ID NO: 77225 - RNA, 22 nt, Artificial Sequence
  LRRK2 RNA guide
gcaguauuagcaggagugggag

SEQ ID NO: 77226 - RNA, 22 nt, Artificial Sequence
  LRRK2 RNA guide
ggagugggaguuauuguuauuu

SEQ ID NO: 77227 - RNA, 22 nt, Artificial Sequence
  LRRK2 RNA guide
guagcaguauuagcaggagugg

SEQ ID NO: 77228 - RNA, 22 nt, Artificial Sequence
  LRRK2 RNA guide
guaguagcaguauuagcaggag

SEQ ID NO: 77229 - RNA, 22 nt, Artificial Sequence
  LRRK2 RNA guide
guauuagcaggagugggaguua

SEQ ID NO: 77230 - RNA, 22 nt, Artificial Sequence
  LRRK2 RNA guide
uaaauaacaauaacucccacuc

SEQ ID NO: 77231 - RNA, 22 nt, Artificial Sequence
  LRRK2 RNA guide
uaacaauaacucccacuccugc

SEQ ID NO: 77232 - RNA, 22 nt, Artificial Sequence
  LRRK2 RNA guide
uaacucccacuccugcuaauac

SEQ ID NO: 77233 - RNA, 22 nt, Artificial Sequence
  LRRK2 RNA guide
uagcaggagugggaguuauugu

SEQ ID NO: 77234 - RNA, 22 nt, Artificial Sequence
  LRRK2 RNA guide
uagcaguauuagcaggaguggg

SEQ ID NO: 77235 - RNA, 22 nt, Artificial Sequence
  LRRK2 RNA guide
uaguagcaguauuagcaggagu

SEQ ID NO: 77236 - RNA, 22 nt, Artificial Sequence
  LRRK2 RNA guide
uaguaguagcaguauuagcagg

SEQ ID NO: 77237 - RNA, 22 nt, Artificial Sequence
  LRRK2 RNA guide
uauuagcaggagugggaguuau

SEQ ID NO: 77238 - RNA, 22 nt, Artificial Sequence
  LRRK2 RNA guide
ucccacuccugcuaauacugcu

SEQ ID NO: 77239 - RNA, 22 nt, Artificial Sequence
  LRRK2 RNA guide
uuagcaggagugggaguuauug

SEQ ID NO: 77240 - RNA, 20 nt, Artificial Sequence
  LRRK2 RNA guide
aacaauaacucucacuccug

SEQ ID NO: 77241 - RNA, 20 nt, Artificial Sequence
  LRRK2 RNA guide
aacucucacuccugcuaaua

SEQ ID NO: 77242 - RNA, 20 nt, Artificial Sequence
  LRRK2 RNA guide
aauaacaauaacucucacuc

SEQ ID NO: 77243 - RNA, 20 nt, Artificial Sequence
  LRRK2 RNA guide
aauaacucucacuccugcua

SEQ ID NO: 77244 - RNA, 20 nt, Artificial Sequence
  LRRK2 RNA guide
acaauaacucucacuccugc

SEQ ID NO: 77245 - RNA, 20 nt, Artificial Sequence
  LRRK2 RNA guide
acucucacuccugcuaauac

SEQ ID NO: 77246 - RNA, 20 nt, Artificial Sequence
  LRRK2 RNA guide
agcaggagugagaguuauug

SEQ ID NO: 77247 - RNA, 20 nt, Artificial Sequence
  LRRK2 RNA guide
agcaguauuagcaggaguga

SEQ ID NO: 77248 - RNA, 20 nt, Artificial Sequence
  LRRK2 RNA guide
aggagugagaguuauuguua

SEQ ID NO: 77249 - RNA, 20 nt, Artificial Sequence
  LRRK2 RNA guide
aguauuagcaggagugagag

SEQ ID NO: 77250 - RNA, 20 nt, Artificial Sequence
  LRRK2 RNA guide
auaacaauaacucucacucc

SEQ ID NO: 77251 - RNA, 20 nt, Artificial Sequence
  LRRK2 RNA guide
auaacucucacuccugcuaa

SEQ ID NO: 77252 - RNA, 20 nt, Artificial Sequence
  LRRK2 RNA guide
auuagcaggagugagaguua

SEQ ID NO: 77253 - RNA, 20 nt, Artificial Sequence
  LRRK2 RNA guide
caauaacucucacuccugcu

SEQ ID NO: 77254 - RNA, 20 nt, Artificial Sequence
  LRRK2 RNA guide
caggagugagaguuauuguu

SEQ ID NO: 77255 - RNA, 20 nt, Artificial Sequence
  LRRK2 RNA guide
caguauuagcaggagugaga

SEQ ID NO: 77256 - RNA, 20 nt, Artificial Sequence
  LRRK2 RNA guide
cucacuccugcuaauacugc

SEQ ID NO: 77257 - RNA, 20 nt, Artificial Sequence
  LRRK2 RNA guide
cucucacuccugcuaauacu

SEQ ID NO: 77258 - RNA, 20 nt, Artificial Sequence
  LRRK2 RNA guide
gagugagaguuauuguuauu

SEQ ID NO: 77259 - RNA, 20 nt, Artificial Sequence
  LRRK2 RNA guide
gcaggagugagaguuauugu

SEQ ID NO: 77260 - RNA, 20 nt, Artificial Sequence
  LRRK2 RNA guide
gcaguauuagcaggagugag

SEQ ID NO: 77261 - RNA, 20 nt, Artificial Sequence
  LRRK2 RNA guide
ggagugagaguuauuguuau

SEQ ID NO: 77262 - RNA, 20 nt, Artificial Sequence
  LRRK2 RNA guide
guauuagcaggagugagagu

SEQ ID NO: 77263 - RNA, 20 nt, Artificial Sequence
  LRRK2 RNA guide
uaacaauaacucucacuccu

SEQ ID NO: 77264 - RNA, 20 nt, Artificial Sequence
  LRRK2 RNA guide
uaacucucacuccugcuaau

SEQ ID NO: 77265 - RNA, 20 nt, Artificial Sequence
  LRRK2 RNA guide
uagcaggagugagaguuauu

SEQ ID NO: 77266 - RNA, 20 nt, Artificial Sequence
  LRRK2 RNA guide
uauuagcaggagugagaguu

SEQ ID NO: 77267 - RNA, 20 nt, Artificial Sequence
  LRRK2 RNA guide
ucucacuccugcuaauacug

SEQ ID NO: 77268 - RNA, 20 nt, Artificial Sequence
  LRRK2 RNA guide
uuagcaggagugagaguuau

SEQ ID NO: 77269 - RNA, 21 nt, Artificial Sequence
  LRRK2 RNA guide
aacaauaacucucacuccugc

SEQ ID NO: 77270 - RNA, 21 nt, Artificial Sequence
  LRRK2 RNA guide
aacucucacuccugcuaauac

SEQ ID NO: 77271 - RNA, 21 nt, Artificial Sequence
  LRRK2 RNA guide
aauaacaauaacucucacucc

SEQ ID NO: 77272 - RNA, 21 nt, Artificial Sequence
  LRRK2 RNA guide
aauaacucucacuccugcuaa

SEQ ID NO: 77273 - RNA, 21 nt, Artificial Sequence
  LRRK2 RNA guide
acaauaacucucacuccugcu

SEQ ID NO: 77274 - RNA, 21 nt, Artificial Sequence
  LRRK2 RNA guide
acucucacuccugcuaauacu

SEQ ID NO: 77275 - RNA, 21 nt, Artificial Sequence
  LRRK2 RNA guide
agcaggagugagaguuauugu

SEQ ID NO: 77276 - RNA, 21 nt, Artificial Sequence
  LRRK2 RNA guide
agcaguauuagcaggagugag

SEQ ID NO: 77277 - RNA, 21 nt, Artificial Sequence
  LRRK2 RNA guide
aggagugagaguuauuguuau

SEQ ID NO: 77278 - RNA, 21 nt, Artificial Sequence
  LRRK2 RNA guide
aguauuagcaggagugagagu

SEQ ID NO: 77279 - RNA, 21 nt, Artificial Sequence
  LRRK2 RNA guide
auaacaauaacucucacuccu

SEQ ID NO: 77280 - RNA, 21 nt, Artificial Sequence
  LRRK2 RNA guide
auaacucucacuccugcuaau

SEQ ID NO: 77281 - RNA, 21 nt, Artificial Sequence
  LRRK2 RNA guide
auuagcaggagugagaguuau

SEQ ID NO: 77282 - RNA, 21 nt, Artificial Sequence
  LRRK2 RNA guide
caauaacucucacuccugcua

SEQ ID NO: 77283 - RNA, 21 nt, Artificial Sequence
  LRRK2 RNA guide
caggagugagaguuauuguua

SEQ ID NO: 77284 - RNA, 21 nt, Artificial Sequence
  LRRK2 RNA guide
caguauuagcaggagugagag

SEQ ID NO: 77285 - RNA, 21 nt, Artificial Sequence
  LRRK2 RNA guide
cucacuccugcuaauacugcu

SEQ ID NO: 77286 - RNA, 21 nt, Artificial Sequence
  LRRK2 RNA guide
cucucacuccugcuaauacug

SEQ ID NO: 77287 - RNA, 21 nt, Artificial Sequence
  LRRK2 RNA guide
gcaggagugagaguuauuguu

SEQ ID NO: 77288 - RNA, 21 nt, Artificial Sequence
  LRRK2 RNA guide
gcaguauuagcaggagugaga

SEQ ID NO: 77289 - RNA, 21 nt, Artificial Sequence
  LRRK2 RNA guide
ggagugagaguuauuguuauu

SEQ ID NO: 77290 - RNA, 21 nt, Artificial Sequence
  LRRK2 RNA guide
guauuagcaggagugagaguu

SEQ ID NO: 77291 - RNA, 21 nt, Artificial Sequence
  LRRK2 RNA guide
uaacaauaacucucacuccug

SEQ ID NO: 77292 - RNA, 21 nt, Artificial Sequence
  LRRK2 RNA guide
uaacucucacuccugcuaaua

SEQ ID NO: 77293 - RNA, 21 nt, Artificial Sequence
  LRRK2 RNA guide
uagcaggagugagaguuauug

SEQ ID NO: 77294 - RNA, 21 nt, Artificial Sequence
  LRRK2 RNA guide
uagcaguauuagcaggaguga

SEQ ID NO: 77295 - RNA, 21 nt, Artificial Sequence
  LRRK2 RNA guide
uauuagcaggagugagaguua

SEQ ID NO: 77296 - RNA, 21 nt, Artificial Sequence
  LRRK2 RNA guide
ucucacuccugcuaauacugc

SEQ ID NO: 77297 - RNA, 21 nt, Artificial Sequence
  LRRK2 RNA guide
uuagcaggagugagaguuauu

SEQ ID NO: 77298 - RNA, 22 nt, Artificial Sequence
  LRRK2 RNA guide
aaauaacaauaacucucacucc

SEQ ID NO: 77299 - RNA, 22 nt, Artificial Sequence
  LRRK2 RNA guide
aacaauaacucucacuccugcu

SEQ ID NO: 77300 - RNA, 22 nt, Artificial Sequence
  LRRK2 RNA guide
aacucucacuccugcuaauacu

SEQ ID NO: 77301 - RNA, 22 nt, Artificial Sequence
  LRRK2 RNA guide
aauaacaauaacucucacuccu

SEQ ID NO: 77302 - RNA, 22 nt, Artificial Sequence
  LRRK2 RNA guide
aauaacucucacuccugcuaau

SEQ ID NO: 77303 - RNA, 22 nt, Artificial Sequence
  LRRK2 RNA guide
acaauaacucucacuccugcua

SEQ ID NO: 77304 - RNA, 22 nt, Artificial Sequence
  LRRK2 RNA guide
acucucacuccugcuaauacug

SEQ ID NO: 77305 - RNA, 22 nt, Artificial Sequence
  LRRK2 RNA guide
agcaggagugagaguuauuguu

SEQ ID NO: 77306 - RNA, 22 nt, Artificial Sequence
  LRRK2 RNA guide
agcaguauuagcaggagugaga

SEQ ID NO: 77307 - RNA, 22 nt, Artificial Sequence
  LRRK2 RNA guide
aggagugagaguuauuguuauu

SEQ ID NO: 77308 - RNA, 22 nt, Artificial Sequence
  LRRK2 RNA guide
aguauuagcaggagugagaguu

SEQ ID NO: 77309 - RNA, 22 nt, Artificial Sequence
  LRRK2 RNA guide
auaacaauaacucucacuccug

SEQ ID NO: 77310 - RNA, 22 nt, Artificial Sequence
  LRRK2 RNA guide
auaacucucacuccugcuaaua

SEQ ID NO: 77311 - RNA, 22 nt, Artificial Sequence
  LRRK2 RNA guide
auuagcaggagugagaguuauu

SEQ ID NO: 77312 - RNA, 22 nt, Artificial Sequence
  LRRK2 RNA guide
caauaacucucacuccugcuaa

SEQ ID NO: 77313 - RNA, 22 nt, Artificial Sequence
  LRRK2 RNA guide
caggagugagaguuauuguuau

SEQ ID NO: 77314 - RNA, 22 nt, Artificial Sequence
  LRRK2 RNA guide
caguauuagcaggagugagagu

SEQ ID NO: 77315 - RNA, 22 nt, Artificial Sequence
  LRRK2 RNA guide
cucacuccugcuaauacugcua

SEQ ID NO: 77316 - RNA, 22 nt, Artificial Sequence
  LRRK2 RNA guide
cucucacuccugcuaauacugc

SEQ ID NO: 77317 - RNA, 22 nt, Artificial Sequence
  LRRK2 RNA guide
gcaggagugagaguuauuguua

SEQ ID NO: 77318 - RNA, 22 nt, Artificial Sequence
  LRRK2 RNA guide
gcaguauuagcaggagugagag

SEQ ID NO: 77319 - RNA, 22 nt, Artificial Sequence
  LRRK2 RNA guide
ggagugagaguuauuguuauuu

SEQ ID NO: 77320 - RNA, 22 nt, Artificial Sequence
  LRRK2 RNA guide
guagcaguauuagcaggaguga

SEQ ID NO: 77321 - RNA, 22 nt, Artificial Sequence
  LRRK2 RNA guide
guauuagcaggagugagaguua

SEQ ID NO: 77322 - RNA, 22 nt, Artificial Sequence
  LRRK2 RNA guide
uaacaauaacucucacuccugc

SEQ ID NO: 77323 - RNA, 22 nt, Artificial Sequence
  LRRK2 RNA guide
uaacucucacuccugcuaauac

SEQ ID NO: 77324 - RNA, 22 nt, Artificial Sequence
  LRRK2 RNA guide
uagcaggagugagaguuauugu

SEQ ID NO: 77325 - RNA, 22 nt, Artificial Sequence
  LRRK2 RNA guide
uagcaguauuagcaggagugag

SEQ ID NO: 77326 - RNA, 22 nt, Artificial Sequence
  LRRK2 RNA guide
uauuagcaggagugagaguuau

SEQ ID NO: 77327 - RNA, 22 nt, Artificial Sequence
  LRRK2 RNA guide
ucucacuccugcuaauacugcu

SEQ ID NO: 77328 - RNA, 22 nt, Artificial Sequence
  LRRK2 RNA guide
uuagcaggagugagaguuauug

SEQ ID NO: 77329 - RNA, 20 nt, Artificial Sequence
  LRRK2 RNA guide
aauaauagcacauaugucag

SEQ ID NO: 77330 - RNA, 20 nt, Artificial Sequence
  LRRK2 RNA guide
aauagcacauaugucagagg

SEQ ID NO: 77331 - RNA, 20 nt, Artificial Sequence
  LRRK2 RNA guide
acccucugacauaugugcua

SEQ ID NO: 77332 - RNA, 20 nt, Artificial Sequence
  LRRK2 RNA guide
agcacauaugucagaggguc

SEQ ID NO: 77333 - RNA, 20 nt, Artificial Sequence
  LRRK2 RNA guide
aggacccucugacauaugug

SEQ ID NO: 77334 - RNA, 20 nt, Artificial Sequence
  LRRK2 RNA guide
auaauagcacauaugucaga

SEQ ID NO: 77335 - RNA, 20 nt, Artificial Sequence
  LRRK2 RNA guide
auagcacauaugucagaggg

SEQ ID NO: 77336 - RNA, 20 nt, Artificial Sequence
  LRRK2 RNA guide
cccucugacauaugugcuau

SEQ ID NO: 77337 - RNA, 20 nt, Artificial Sequence
  LRRK2 RNA guide
ccucugacauaugugcuauu

SEQ ID NO: 77338 - RNA, 20 nt, Artificial Sequence
  LRRK2 RNA guide
ccuuaggacccucugacaua

SEQ ID NO: 77339 - RNA, 20 nt, Artificial Sequence
  LRRK2 RNA guide
cucugacauaugugcuauua

SEQ ID NO: 77340 - RNA, 20 nt, Artificial Sequence
  LRRK2 RNA guide
cugacauaugugcuauuauu

SEQ ID NO: 77341 - RNA, 20 nt, Artificial Sequence
  LRRK2 RNA guide
cuuaggacccucugacauau

SEQ ID NO: 77342 - RNA, 20 nt, Artificial Sequence
  LRRK2 RNA guide
gacccucugacauaugugcu

SEQ ID NO: 77343 - RNA, 20 nt, Artificial Sequence
  LRRK2 RNA guide
ggacccucugacauaugugc

SEQ ID NO: 77344 - RNA, 20 nt, Artificial Sequence
  LRRK2 RNA guide
uaauagcacauaugucagag

SEQ ID NO: 77345 - RNA, 20 nt, Artificial Sequence
  LRRK2 RNA guide
uagcacauaugucagagggu

SEQ ID NO: 77346 - RNA, 20 nt, Artificial Sequence
  LRRK2 RNA guide
uaggacccucugacauaugu

SEQ ID NO: 77347 - RNA, 20 nt, Artificial Sequence
  LRRK2 RNA guide
ucugacauaugugcuauuau

SEQ ID NO: 77348 - RNA, 20 nt, Artificial Sequence
  LRRK2 RNA guide
uuaggacccucugacauaug

SEQ ID NO: 77349 - RNA, 21 nt, Artificial Sequence
  LRRK2 RNA guide
aauagcacauaugucagaggg

SEQ ID NO: 77350 - RNA, 21 nt, Artificial Sequence
  LRRK2 RNA guide
acccucugacauaugugcuau

SEQ ID NO: 77351 - RNA, 21 nt, Artificial Sequence
  LRRK2 RNA guide
agcacauaugucagagggucc

SEQ ID NO: 77352 - RNA, 21 nt, Artificial Sequence
  LRRK2 RNA guide
aggacccucugacauaugugc

SEQ ID NO: 77353 - RNA, 21 nt, Artificial Sequence
  LRRK2 RNA guide
auaauagcacauaugucagag

SEQ ID NO: 77354 - RNA, 21 nt, Artificial Sequence
  LRRK2 RNA guide
auagcacauaugucagagggu

SEQ ID NO: 77355 - RNA, 21 nt, Artificial Sequence
  LRRK2 RNA guide
cccucugacauaugugcuauu

SEQ ID NO: 77356 - RNA, 21 nt, Artificial Sequence
  LRRK2 RNA guide
ccucugacauaugugcuauua

SEQ ID NO: 77357 - RNA, 21 nt, Artificial Sequence
  LRRK2 RNA guide
ccuuaggacccucugacauau

SEQ ID NO: 77358 - RNA, 21 nt, Artificial Sequence
  LRRK2 RNA guide
cucugacauaugugcuauuau

SEQ ID NO: 77359 - RNA, 21 nt, Artificial Sequence
  LRRK2 RNA guide
cuuaggacccucugacauaug

SEQ ID NO: 77360 - RNA, 21 nt, Artificial Sequence
  LRRK2 RNA guide
gacccucugacauaugugcua

SEQ ID NO: 77361 - RNA, 21 nt, Artificial Sequence
  LRRK2 RNA guide
ggacccucugacauaugugcu

SEQ ID NO: 77362 - RNA, 21 nt, Artificial Sequence
  LRRK2 RNA guide
uaauagcacauaugucagagg

SEQ ID NO: 77363 - RNA, 21 nt, Artificial Sequence
  LRRK2 RNA guide
uagcacauaugucagaggguc

SEQ ID NO: 77364 - RNA, 21 nt, Artificial Sequence
  LRRK2 RNA guide
uaggacccucugacauaugug

SEQ ID NO: 77365 - RNA, 21 nt, Artificial Sequence
  LRRK2 RNA guide
uccuuaggacccucugacaua

SEQ ID NO: 77366 - RNA, 21 nt, Artificial Sequence
  LRRK2 RNA guide
uuaggacccucugacauaugu

SEQ ID NO: 77367 - RNA, 22 nt, Artificial Sequence
  LRRK2 RNA guide
aauaauagcacauaugucagag

SEQ ID NO: 77368 - RNA, 22 nt, Artificial Sequence
  LRRK2 RNA guide
aauagcacauaugucagagggu

SEQ ID NO: 77369 - RNA, 22 nt, Artificial Sequence
  LRRK2 RNA guide
acccucugacauaugugcuauu

SEQ ID NO: 77370 - RNA, 22 nt, Artificial Sequence
  LRRK2 RNA guide
agcacauaugucagaggguccu

SEQ ID NO: 77371 - RNA, 22 nt, Artificial Sequence
  LRRK2 RNA guide
aggacccucugacauaugugcu

SEQ ID NO: 77372 - RNA, 22 nt, Artificial Sequence
  LRRK2 RNA guide
auaauagcacauaugucagagg

SEQ ID NO: 77373 - RNA, 22 nt, Artificial Sequence
  LRRK2 RNA guide
auagcacauaugucagaggguc

SEQ ID NO: 77374 - RNA, 22 nt, Artificial Sequence
  LRRK2 RNA guide
auccuuaggacccucugacaua

SEQ ID NO: 77375 - RNA, 22 nt, Artificial Sequence
  LRRK2 RNA guide
cccucugacauaugugcuauua

SEQ ID NO: 77376 - RNA, 22 nt, Artificial Sequence
  LRRK2 RNA guide
ccucugacauaugugcuauuau

SEQ ID NO: 77377 - RNA, 22 nt, Artificial Sequence
  LRRK2 RNA guide
ccuuaggacccucugacauaug

SEQ ID NO: 77378 - RNA, 22 nt, Artificial Sequence
  LRRK2 RNA guide
cucugacauaugugcuauuauu

SEQ ID NO: 77379 - RNA, 22 nt, Artificial Sequence
  LRRK2 RNA guide
cuuaggacccucugacauaugu

SEQ ID NO: 77380 - RNA, 22 nt, Artificial Sequence
  LRRK2 RNA guide
gacccucugacauaugugcuau

SEQ ID NO: 77381 - RNA, 22 nt, Artificial Sequence
  LRRK2 RNA guide
ggacccucugacauaugugcua

SEQ ID NO: 77382 - RNA, 22 nt, Artificial Sequence
  LRRK2 RNA guide
uaauagcacauaugucagaggg

SEQ ID NO: 77383 - RNA, 22 nt, Artificial Sequence
  LRRK2 RNA guide
uagcacauaugucagagggucc

SEQ ID NO: 77384 - RNA, 22 nt, Artificial Sequence
  LRRK2 RNA guide
uaggacccucugacauaugugc

SEQ ID NO: 77385 - RNA, 22 nt, Artificial Sequence
  LRRK2 RNA guide
uccuuaggacccucugacauau

SEQ ID NO: 77386 - RNA, 22 nt, Artificial Sequence
  LRRK2 RNA guide
uuaggacccucugacauaugug

SEQ ID NO: 77387 - RNA, 20 nt, Artificial Sequence
  LRRK2 RNA guide
aacacauaugucagaggguc

SEQ ID NO: 77388 - RNA, 20 nt, Artificial Sequence
  LRRK2 RNA guide
aauaacacauaugucagagg

SEQ ID NO: 77389 - RNA, 20 nt, Artificial Sequence
  LRRK2 RNA guide
acccucugacauauguguua

SEQ ID NO: 77390 - RNA, 20 nt, Artificial Sequence
  LRRK2 RNA guide
auaacacauaugucagaggg

SEQ ID NO: 77391 - RNA, 20 nt, Artificial Sequence
  LRRK2 RNA guide
cccucugacauauguguuau

SEQ ID NO: 77392 - RNA, 20 nt, Artificial Sequence
  LRRK2 RNA guide
ccucugacauauguguuauu

SEQ ID NO: 77393 - RNA, 20 nt, Artificial Sequence
  LRRK2 RNA guide
cucugacauauguguuauua

SEQ ID NO: 77394 - RNA, 20 nt, Artificial Sequence
  LRRK2 RNA guide
gacccucugacauauguguu

SEQ ID NO: 77395 - RNA, 20 nt, Artificial Sequence
  LRRK2 RNA guide
ggacccucugacauaugugu

SEQ ID NO: 77396 - RNA, 20 nt, Artificial Sequence
  LRRK2 RNA guide
uaacacauaugucagagggu

SEQ ID NO: 77397 - RNA, 20 nt, Artificial Sequence
  LRRK2 RNA guide
uaauaacacauaugucagag

SEQ ID NO: 77398 - RNA, 21 nt, Artificial Sequence
  LRRK2 RNA guide
aacacauaugucagagggucc

SEQ ID NO: 77399 - RNA, 21 nt, Artificial Sequence
  LRRK2 RNA guide
aauaacacauaugucagaggg

SEQ ID NO: 77400 - RNA, 21 nt, Artificial Sequence
  LRRK2 RNA guide
acccucugacauauguguuau

SEQ ID NO: 77401 - RNA, 21 nt, Artificial Sequence
  LRRK2 RNA guide
aggacccucugacauaugugu

SEQ ID NO: 77402 - RNA, 21 nt, Artificial Sequence
  LRRK2 RNA guide
auaacacauaugucagagggu

SEQ ID NO: 77403 - RNA, 21 nt, Artificial Sequence
  LRRK2 RNA guide
cccucugacauauguguuauu

SEQ ID NO: 77404 - RNA, 21 nt, Artificial Sequence
  LRRK2 RNA guide
ccucugacauauguguuauua

SEQ ID NO: 77405 - RNA, 21 nt, Artificial Sequence
  LRRK2 RNA guide
gacccucugacauauguguua

SEQ ID NO: 77406 - RNA, 21 nt, Artificial Sequence
  LRRK2 RNA guide
ggacccucugacauauguguu

SEQ ID NO: 77407 - RNA, 21 nt, Artificial Sequence
  LRRK2 RNA guide
uaacacauaugucagaggguc

SEQ ID NO: 77408 - RNA, 21 nt, Artificial Sequence
  LRRK2 RNA guide
uaauaacacauaugucagagg

SEQ ID NO: 77409 - RNA, 22 nt, Artificial Sequence
  LRRK2 RNA guide
aacacauaugucagaggguccu

SEQ ID NO: 77410 - RNA, 22 nt, Artificial Sequence
  LRRK2 RNA guide
aauaacacauaugucagagggu

SEQ ID NO: 77411 - RNA, 22 nt, Artificial Sequence
  LRRK2 RNA guide
acccucugacauauguguuauu

SEQ ID NO: 77412 - RNA, 22 nt, Artificial Sequence
  LRRK2 RNA guide
aggacccucugacauauguguu

SEQ ID NO: 77413 - RNA, 22 nt, Artificial Sequence
  LRRK2 RNA guide
auaacacauaugucagaggguc

SEQ ID NO: 77414 - RNA, 22 nt, Artificial Sequence
  LRRK2 RNA guide
auaauaacacauaugucagagg

SEQ ID NO: 77415 - RNA, 22 nt, Artificial Sequence
  LRRK2 RNA guide
cccucugacauauguguuauua

SEQ ID NO: 77416 - RNA, 22 nt, Artificial Sequence
  LRRK2 RNA guide
ccucugacauauguguuauuau

SEQ ID NO: 77417 - RNA, 22 nt, Artificial Sequence
  LRRK2 RNA guide
gacccucugacauauguguuau

SEQ ID NO: 77418 - RNA, 22 nt, Artificial Sequence
  LRRK2 RNA guide
ggacccucugacauauguguua

SEQ ID NO: 77419 - RNA, 22 nt, Artificial Sequence
  LRRK2 RNA guide
uaacacauaugucagagggucc

SEQ ID NO: 77420 - RNA, 22 nt, Artificial Sequence
  LRRK2 RNA guide
uaauaacacauaugucagaggg

SEQ ID NO: 77421 - RNA, 22 nt, Artificial Sequence
  LRRK2 RNA guide
uaggacccucugacauaugugu

SEQ ID NO: 77422 - RNA, 20 nt, Artificial Sequence
  LRRK2 RNA guide
aucuucaaaauguggacaga

SEQ ID NO: 77423 - RNA, 20 nt, Artificial Sequence
  LRRK2 RNA guide
auuaucuucaaaauguggac

SEQ ID NO: 77424 - RNA, 20 nt, Artificial Sequence
  LRRK2 RNA guide
ccaaaccauaauuaucuuca

SEQ ID NO: 77425 - RNA, 20 nt, Artificial Sequence
  LRRK2 RNA guide
cuguccacauuuugaagaua

SEQ ID NO: 77426 - RNA, 20 nt, Artificial Sequence
  LRRK2 RNA guide
cugugucuguccacauuuug

SEQ ID NO: 77427 - RNA, 20 nt, Artificial Sequence
  LRRK2 RNA guide
gaagauaauuaugguuugga

SEQ ID NO: 77428 - RNA, 20 nt, Artificial Sequence
  LRRK2 RNA guide
gcugugucuguccacauuuu

SEQ ID NO: 77429 - RNA, 20 nt, Artificial Sequence
  LRRK2 RNA guide
guccacauuuugaagauaau

SEQ ID NO: 77430 - RNA, 20 nt, Artificial Sequence
  LRRK2 RNA guide
gucuguccacauuuugaaga

SEQ ID NO: 77431 - RNA, 20 nt, Artificial Sequence
  LRRK2 RNA guide
gugucuguccacauuuugaa

SEQ ID NO: 77432 - RNA, 20 nt, Artificial Sequence
  LRRK2 RNA guide
uaucuucaaaauguggacag

SEQ ID NO: 77433 - RNA, 20 nt, Artificial Sequence
  LRRK2 RNA guide
uccaaaccauaauuaucuuc

SEQ ID NO: 77434 - RNA, 20 nt, Artificial Sequence
  LRRK2 RNA guide
ucuguccacauuuugaagau

SEQ ID NO: 77435 - RNA, 20 nt, Artificial Sequence
  LRRK2 RNA guide
ucuucaaaauguggacagac

SEQ ID NO: 77436 - RNA, 20 nt, Artificial Sequence
  LRRK2 RNA guide
ugaagauaauuaugguuugg

SEQ ID NO: 77437 - RNA, 20 nt, Artificial Sequence
  LRRK2 RNA guide
ugcugugucuguccacauuu

SEQ ID NO: 77438 - RNA, 20 nt, Artificial Sequence
  LRRK2 RNA guide
uguccacauuuugaagauaa

SEQ ID NO: 77439 - RNA, 20 nt, Artificial Sequence
  LRRK2 RNA guide
ugucuguccacauuuugaag

SEQ ID NO: 77440 - RNA, 20 nt, Artificial Sequence
  LRRK2 RNA guide
ugugucuguccacauuuuga

SEQ ID NO: 77441 - RNA, 20 nt, Artificial Sequence
  LRRK2 RNA guide
uuaucuucaaaauguggaca

SEQ ID NO: 77442 - RNA, 21 nt, Artificial Sequence
  LRRK2 RNA guide
aucuucaaaauguggacagac

SEQ ID NO: 77443 - RNA, 21 nt, Artificial Sequence
  LRRK2 RNA guide
cuguccacauuuugaagauaa

SEQ ID NO: 77444 - RNA, 21 nt, Artificial Sequence
  LRRK2 RNA guide
cugugucuguccacauuuuga

SEQ ID NO: 77445 - RNA, 21 nt, Artificial Sequence
  LRRK2 RNA guide
gcugugucuguccacauuuug

SEQ ID NO: 77446 - RNA, 21 nt, Artificial Sequence
  LRRK2 RNA guide
gucuguccacauuuugaagau

SEQ ID NO: 77447 - RNA, 21 nt, Artificial Sequence
  LRRK2 RNA guide
gugcugugucuguccacauuu

SEQ ID NO: 77448 - RNA, 21 nt, Artificial Sequence
  LRRK2 RNA guide
gugucuguccacauuuugaag

SEQ ID NO: 77449 - RNA, 21 nt, Artificial Sequence
  LRRK2 RNA guide
uaucuucaaaauguggacaga

SEQ ID NO: 77450 - RNA, 21 nt, Artificial Sequence
  LRRK2 RNA guide
ucuguccacauuuugaagaua

SEQ ID NO: 77451 - RNA, 21 nt, Artificial Sequence
  LRRK2 RNA guide
ucuucaaaauguggacagaca

SEQ ID NO: 77452 - RNA, 21 nt, Artificial Sequence
  LRRK2 RNA guide
ugcugugucuguccacauuuu

SEQ ID NO: 77453 - RNA, 21 nt, Artificial Sequence
  LRRK2 RNA guide
ugucuguccacauuuugaaga

SEQ ID NO: 77454 - RNA, 21 nt, Artificial Sequence
  LRRK2 RNA guide
ugugucuguccacauuuugaa

SEQ ID NO: 77455 - RNA, 21 nt, Artificial Sequence
  LRRK2 RNA guide
uuaucuucaaaauguggacag

SEQ ID NO: 77456 - RNA, 22 nt, Artificial Sequence
  LRRK2 RNA guide
aucuucaaaauguggacagaca

SEQ ID NO: 77457 - RNA, 22 nt, Artificial Sequence
  LRRK2 RNA guide
auuaucuucaaaauguggacag

SEQ ID NO: 77458 - RNA, 22 nt, Artificial Sequence
  LRRK2 RNA guide
cuguccacauuuugaagauaau

SEQ ID NO: 77459 - RNA, 22 nt, Artificial Sequence
  LRRK2 RNA guide
cugugucuguccacauuuugaa

SEQ ID NO: 77460 - RNA, 22 nt, Artificial Sequence
  LRRK2 RNA guide
gcugugucuguccacauuuuga

SEQ ID NO: 77461 - RNA, 22 nt, Artificial Sequence
  LRRK2 RNA guide
ggugaaaauauccaaaccauaa

SEQ ID NO: 77462 - RNA, 22 nt, Artificial Sequence
  LRRK2 RNA guide
ggugcugugucuguccacauuu

SEQ ID NO: 77463 - RNA, 22 nt, Artificial Sequence
  LRRK2 RNA guide
gucuguccacauuuugaagaua

SEQ ID NO: 77464 - RNA, 22 nt, Artificial Sequence
  LRRK2 RNA guide
gugcugugucuguccacauuuu

SEQ ID NO: 77465 - RNA, 22 nt, Artificial Sequence
  LRRK2 RNA guide
gugucuguccacauuuugaaga

SEQ ID NO: 77466 - RNA, 22 nt, Artificial Sequence
  LRRK2 RNA guide
uaucuucaaaauguggacagac

SEQ ID NO: 77467 - RNA, 22 nt, Artificial Sequence
  LRRK2 RNA guide
ucuguccacauuuugaagauaa

SEQ ID NO: 77468 - RNA, 22 nt, Artificial Sequence
  LRRK2 RNA guide
ucuucaaaauguggacagacac

SEQ ID NO: 77469 - RNA, 22 nt, Artificial Sequence
  LRRK2 RNA guide
ugcugugucuguccacauuuug

SEQ ID NO: 77470 - RNA, 22 nt, Artificial Sequence
  LRRK2 RNA guide
ugucuguccacauuuugaagau

SEQ ID NO: 77471 - RNA, 22 nt, Artificial Sequence
  LRRK2 RNA guide
ugugucuguccacauuuugaag

SEQ ID NO: 77472 - RNA, 22 nt, Artificial Sequence
  LRRK2 RNA guide
uuaucuucaaaauguggacaga

SEQ ID NO: 77473 - RNA, 20 nt, Artificial Sequence
  LRRK2 RNA guide
auuuucaaaauguggacaga

SEQ ID NO: 77474 - RNA, 20 nt, Artificial Sequence
  LRRK2 RNA guide
cuguccacauuuugaaaaua

SEQ ID NO: 77475 - RNA, 20 nt, Artificial Sequence
  LRRK2 RNA guide
gucuguccacauuuugaaaa

SEQ ID NO: 77476 - RNA, 20 nt, Artificial Sequence
  LRRK2 RNA guide
uauuuucaaaauguggacag

SEQ ID NO: 77477 - RNA, 20 nt, Artificial Sequence
  LRRK2 RNA guide
ucuguccacauuuugaaaau

SEQ ID NO: 77478 - RNA, 20 nt, Artificial Sequence
  LRRK2 RNA guide
ugucuguccacauuuugaaa

SEQ ID NO: 77479 - RNA, 20 nt, Artificial Sequence
  LRRK2 RNA guide
uuuucaaaauguggacagac

SEQ ID NO: 77480 - RNA, 21 nt, Artificial Sequence
  LRRK2 RNA guide
auuuucaaaauguggacagac

SEQ ID NO: 77481 - RNA, 21 nt, Artificial Sequence
  LRRK2 RNA guide
gucuguccacauuuugaaaau

SEQ ID NO: 77482 - RNA, 21 nt, Artificial Sequence
  LRRK2 RNA guide
gugucuguccacauuuugaaa

SEQ ID NO: 77483 - RNA, 21 nt, Artificial Sequence
  LRRK2 RNA guide
ugucuguccacauuuugaaaa

SEQ ID NO: 77484 - RNA, 21 nt, Artificial Sequence
  LRRK2 RNA guide
uuuucaaaauguggacagaca

SEQ ID NO: 77485 - RNA, 22 nt, Artificial Sequence
  LRRK2 RNA guide
auuuucaaaauguggacagaca

SEQ ID NO: 77486 - RNA, 22 nt, Artificial Sequence
  LRRK2 RNA guide
gucuguccacauuuugaaaaua

SEQ ID NO: 77487 - RNA, 22 nt, Artificial Sequence
  LRRK2 RNA guide
gugucuguccacauuuugaaaa

SEQ ID NO: 77488 - RNA, 22 nt, Artificial Sequence
  LRRK2 RNA guide
uauuuucaaaauguggacagac

SEQ ID NO: 77489 - RNA, 22 nt, Artificial Sequence
  LRRK2 RNA guide
ugucuguccacauuuugaaaau

SEQ ID NO: 77490 - RNA, 22 nt, Artificial Sequence
  LRRK2 RNA guide
ugugucuguccacauuuugaaa

SEQ ID NO: 77491 - RNA, 22 nt, Artificial Sequence
  LRRK2 RNA guide
uuuucaaaauguggacagacac

SEQ ID NO: 77492 - RNA, 20 nt, Artificial Sequence
  LRRK2 RNA guide
aaauguauccaucugacuga

SEQ ID NO: 77493 - RNA, 20 nt, Artificial Sequence
  LRRK2 RNA guide
aacauuaacucagucagaug

SEQ ID NO: 77494 - RNA, 20 nt, Artificial Sequence
  LRRK2 RNA guide
aacucagucagauggauaca

SEQ ID NO: 77495 - RNA, 20 nt, Artificial Sequence
  LRRK2 RNA guide
aacuuggagaguuucaacau

SEQ ID NO: 77496 - RNA, 20 nt, Artificial Sequence
  LRRK2 RNA guide
aauguauccaucugacugag

SEQ ID NO: 77497 - RNA, 20 nt, Artificial Sequence
  LRRK2 RNA guide
acauuaacucagucagaugg

SEQ ID NO: 77498 - RNA, 20 nt, Artificial Sequence
  LRRK2 RNA guide
acucagucagauggauacau

SEQ ID NO: 77499 - RNA, 20 nt, Artificial Sequence
  LRRK2 RNA guide
acugaguuaauguugaaacu

SEQ ID NO: 77500 - RNA, 20 nt, Artificial Sequence
  LRRK2 RNA guide
acuuggagaguuucaacauu

SEQ ID NO: 77501 - RNA, 20 nt, Artificial Sequence
  LRRK2 RNA guide
agaguuucaacauuaacuca

SEQ ID NO: 77502 - RNA, 20 nt, Artificial Sequence
  LRRK2 RNA guide
aguuaauguugaaacucucc

SEQ ID NO: 77503 - RNA, 20 nt, Artificial Sequence
  LRRK2 RNA guide
aguuucaacauuaacucagu

SEQ ID NO: 77504 - RNA, 20 nt, Artificial Sequence
  LRRK2 RNA guide
auaaauguauccaucugacu

SEQ ID NO: 77505 - RNA, 20 nt, Artificial Sequence
  LRRK2 RNA guide
auccaucugacugaguuaau

SEQ ID NO: 77506 - RNA, 20 nt, Artificial Sequence
  LRRK2 RNA guide
aucugacugaguuaauguug

SEQ ID NO: 77507 - RNA, 20 nt, Artificial Sequence
  LRRK2 RNA guide
auguauccaucugacugagu

SEQ ID NO: 77508 - RNA, 20 nt, Artificial Sequence
  LRRK2 RNA guide
auuaacucagucagauggau

SEQ ID NO: 77509 - RNA, 20 nt, Artificial Sequence
  LRRK2 RNA guide
caacauuaacucagucagau

SEQ ID NO: 77510 - RNA, 20 nt, Artificial Sequence
  LRRK2 RNA guide
caucugacugaguuaauguu

SEQ ID NO: 77511 - RNA, 20 nt, Artificial Sequence
  LRRK2 RNA guide
cauuaacucagucagaugga

SEQ ID NO: 77512 - RNA, 20 nt, Artificial Sequence
  LRRK2 RNA guide
ccaucugacugaguuaaugu

SEQ ID NO: 77513 - RNA, 20 nt, Artificial Sequence
  LRRK2 RNA guide
cugacugaguuaauguugaa

SEQ ID NO: 77514 - RNA, 20 nt, Artificial Sequence
  LRRK2 RNA guide
cugaguuaauguugaaacuc

SEQ ID NO: 77515 - RNA, 20 nt, Artificial Sequence
  LRRK2 RNA guide
cuuggagaguuucaacauua

SEQ ID NO: 77516 - RNA, 20 nt, Artificial Sequence
  LRRK2 RNA guide
gacugaguuaauguugaaac

SEQ ID NO: 77517 - RNA, 20 nt, Artificial Sequence
  LRRK2 RNA guide
gagaguuucaacauuaacuc

SEQ ID NO: 77518 - RNA, 20 nt, Artificial Sequence
  LRRK2 RNA guide
gaguuaauguugaaacucuc

SEQ ID NO: 77519 - RNA, 20 nt, Artificial Sequence
  LRRK2 RNA guide
gaguuucaacauuaacucag

SEQ ID NO: 77520 - RNA, 20 nt, Artificial Sequence
  LRRK2 RNA guide
ggagaguuucaacauuaacu

SEQ ID NO: 77521 - RNA, 20 nt, Artificial Sequence
  LRRK2 RNA guide
guauccaucugacugaguua

SEQ ID NO: 77522 - RNA, 20 nt, Artificial Sequence
  LRRK2 RNA guide
guuucaacauuaacucaguc

SEQ ID NO: 77523 - RNA, 20 nt, Artificial Sequence
  LRRK2 RNA guide
uaaauguauccaucugacug

SEQ ID NO: 77524 - RNA, 20 nt, Artificial Sequence
  LRRK2 RNA guide
uaacucagucagauggauac

SEQ ID NO: 77525 - RNA, 20 nt, Artificial Sequence
  LRRK2 RNA guide
uaacuuggagaguuucaaca

SEQ ID NO: 77526 - RNA, 20 nt, Artificial Sequence
  LRRK2 RNA guide
uauaaauguauccaucugac

SEQ ID NO: 77527 - RNA, 20 nt, Artificial Sequence
  LRRK2 RNA guide
uauccaucugacugaguuaa

SEQ ID NO: 77528 - RNA, 20 nt, Artificial Sequence
  LRRK2 RNA guide
ucaacauuaacucagucaga

SEQ ID NO: 77529 - RNA, 20 nt, Artificial Sequence
  LRRK2 RNA guide
uccaucugacugaguuaaug

SEQ ID NO: 77530 - RNA, 20 nt, Artificial Sequence
  LRRK2 RNA guide
ucugacugaguuaauguuga

SEQ ID NO: 77531 - RNA, 20 nt, Artificial Sequence
  LRRK2 RNA guide
ugacugaguuaauguugaaa

SEQ ID NO: 77532 - RNA, 20 nt, Artificial Sequence
  LRRK2 RNA guide
ugaguuaauguugaaacucu

SEQ ID NO: 77533 - RNA, 20 nt, Artificial Sequence
  LRRK2 RNA guide
uggagaguuucaacauuaac

SEQ ID NO: 77534 - RNA, 20 nt, Artificial Sequence
  LRRK2 RNA guide
uguauccaucugacugaguu

SEQ ID NO: 77535 - RNA, 20 nt, Artificial Sequence
  LRRK2 RNA guide
uuaacucagucagauggaua

SEQ ID NO: 77536 - RNA, 20 nt, Artificial Sequence
  LRRK2 RNA guide
uucaacauuaacucagucag

SEQ ID NO: 77537 - RNA, 20 nt, Artificial Sequence
  LRRK2 RNA guide
uuggagaguuucaacauuaa

SEQ ID NO: 77538 - RNA, 20 nt, Artificial Sequence
  LRRK2 RNA guide
uuucaacauuaacucaguca

SEQ ID NO: 77539 - RNA, 21 nt, Artificial Sequence
  LRRK2 RNA guide
aaauguauccaucugacugag

SEQ ID NO: 77540 - RNA, 21 nt, Artificial Sequence
  LRRK2 RNA guide
aacauuaacucagucagaugg

SEQ ID NO: 77541 - RNA, 21 nt, Artificial Sequence
  LRRK2 RNA guide
aacucagucagauggauacau

SEQ ID NO: 77542 - RNA, 21 nt, Artificial Sequence
  LRRK2 RNA guide
aacuuggagaguuucaacauu

SEQ ID NO: 77543 - RNA, 21 nt, Artificial Sequence
  LRRK2 RNA guide
aauguauccaucugacugagu

SEQ ID NO: 77544 - RNA, 21 nt, Artificial Sequence
  LRRK2 RNA guide
acauuaacucagucagaugga

SEQ ID NO: 77545 - RNA, 21 nt, Artificial Sequence
  LRRK2 RNA guide
acucagucagauggauacauu

SEQ ID NO: 77546 - RNA, 21 nt, Artificial Sequence
  LRRK2 RNA guide
acugaguuaauguugaaacuc

SEQ ID NO: 77547 - RNA, 21 nt, Artificial Sequence
  LRRK2 RNA guide
acuuggagaguuucaacauua

SEQ ID NO: 77548 - RNA, 21 nt, Artificial Sequence
  LRRK2 RNA guide
agaguuucaacauuaacucag

SEQ ID NO: 77549 - RNA, 21 nt, Artificial Sequence
  LRRK2 RNA guide
aguuaauguugaaacucucca

SEQ ID NO: 77550 - RNA, 21 nt, Artificial Sequence
  LRRK2 RNA guide
aguuucaacauuaacucaguc

SEQ ID NO: 77551 - RNA, 21 nt, Artificial Sequence
  LRRK2 RNA guide
auaaauguauccaucugacug

SEQ ID NO: 77552 - RNA, 21 nt, Artificial Sequence
  LRRK2 RNA guide
auaacuuggagaguuucaaca

SEQ ID NO: 77553 - RNA, 21 nt, Artificial Sequence
  LRRK2 RNA guide
auccaucugacugaguuaaug

SEQ ID NO: 77554 - RNA, 21 nt, Artificial Sequence
  LRRK2 RNA guide
aucugacugaguuaauguuga

SEQ ID NO: 77555 - RNA, 21 nt, Artificial Sequence
  LRRK2 RNA guide
auguauccaucugacugaguu

SEQ ID NO: 77556 - RNA, 21 nt, Artificial Sequence
  LRRK2 RNA guide
auuaacucagucagauggaua

SEQ ID NO: 77557 - RNA, 21 nt, Artificial Sequence
  LRRK2 RNA guide
caacauuaacucagucagaug

SEQ ID NO: 77558 - RNA, 21 nt, Artificial Sequence
  LRRK2 RNA guide
caucugacugaguuaauguug

SEQ ID NO: 77559 - RNA, 21 nt, Artificial Sequence
  LRRK2 RNA guide
cauuaacucagucagauggau

SEQ ID NO: 77560 - RNA, 21 nt, Artificial Sequence
  LRRK2 RNA guide
ccaucugacugaguuaauguu

SEQ ID NO: 77561 - RNA, 21 nt, Artificial Sequence
  LRRK2 RNA guide
cugacugaguuaauguugaaa

SEQ ID NO: 77562 - RNA, 21 nt, Artificial Sequence
  LRRK2 RNA guide
cugaguuaauguugaaacucu

SEQ ID NO: 77563 - RNA, 21 nt, Artificial Sequence
  LRRK2 RNA guide
cuuggagaguuucaacauuaa

SEQ ID NO: 77564 - RNA, 21 nt, Artificial Sequence
  LRRK2 RNA guide
gacugaguuaauguugaaacu

SEQ ID NO: 77565 - RNA, 21 nt, Artificial Sequence
  LRRK2 RNA guide
gagaguuucaacauuaacuca

SEQ ID NO: 77566 - RNA, 21 nt, Artificial Sequence
  LRRK2 RNA guide
gaguuaauguugaaacucucc

SEQ ID NO: 77567 - RNA, 21 nt, Artificial Sequence
  LRRK2 RNA guide
gaguuucaacauuaacucagu

SEQ ID NO: 77568 - RNA, 21 nt, Artificial Sequence
  LRRK2 RNA guide
ggagaguuucaacauuaacuc

SEQ ID NO: 77569 - RNA, 21 nt, Artificial Sequence
  LRRK2 RNA guide
guauccaucugacugaguuaa

SEQ ID NO: 77570 - RNA, 21 nt, Artificial Sequence
  LRRK2 RNA guide
guuucaacauuaacucaguca

SEQ ID NO: 77571 - RNA, 21 nt, Artificial Sequence
  LRRK2 RNA guide
uaaauguauccaucugacuga

SEQ ID NO: 77572 - RNA, 21 nt, Artificial Sequence
  LRRK2 RNA guide
uaacucagucagauggauaca

SEQ ID NO: 77573 - RNA, 21 nt, Artificial Sequence
  LRRK2 RNA guide
uaacuuggagaguuucaacau

SEQ ID NO: 77574 - RNA, 21 nt, Artificial Sequence
  LRRK2 RNA guide
uauccaucugacugaguuaau

SEQ ID NO: 77575 - RNA, 21 nt, Artificial Sequence
  LRRK2 RNA guide
ucaacauuaacucagucagau

SEQ ID NO: 77576 - RNA, 21 nt, Artificial Sequence
  LRRK2 RNA guide
uccaucugacugaguuaaugu

SEQ ID NO: 77577 - RNA, 21 nt, Artificial Sequence
  LRRK2 RNA guide
ucugacugaguuaauguugaa

SEQ ID NO: 77578 - RNA, 21 nt, Artificial Sequence
  LRRK2 RNA guide
ugacugaguuaauguugaaac

SEQ ID NO: 77579 - RNA, 21 nt, Artificial Sequence
  LRRK2 RNA guide
ugaguuaauguugaaacucuc

SEQ ID NO: 77580 - RNA, 21 nt, Artificial Sequence
  LRRK2 RNA guide
uggagaguuucaacauuaacu

SEQ ID NO: 77581 - RNA, 21 nt, Artificial Sequence
  LRRK2 RNA guide
uguauccaucugacugaguua

SEQ ID NO: 77582 - RNA, 21 nt, Artificial Sequence
  LRRK2 RNA guide
uuaacucagucagauggauac

SEQ ID NO: 77583 - RNA, 21 nt, Artificial Sequence
  LRRK2 RNA guide
uucaacauuaacucagucaga

SEQ ID NO: 77584 - RNA, 21 nt, Artificial Sequence
  LRRK2 RNA guide
uuggagaguuucaacauuaac

SEQ ID NO: 77585 - RNA, 21 nt, Artificial Sequence
  LRRK2 RNA guide
uuucaacauuaacucagucag

SEQ ID NO: 77586 - RNA, 22 nt, Artificial Sequence
  LRRK2 RNA guide
aaauguauccaucugacugagu

SEQ ID NO: 77587 - RNA, 22 nt, Artificial Sequence
  LRRK2 RNA guide
aacauuaacucagucagaugga

SEQ ID NO: 77588 - RNA, 22 nt, Artificial Sequence
  LRRK2 RNA guide
aacucagucagauggauacauu

SEQ ID NO: 77589 - RNA, 22 nt, Artificial Sequence
  LRRK2 RNA guide
aacuuggagaguuucaacauua

SEQ ID NO: 77590 - RNA, 22 nt, Artificial Sequence
  LRRK2 RNA guide
aauaacuuggagaguuucaaca

SEQ ID NO: 77591 - RNA, 22 nt, Artificial Sequence
  LRRK2 RNA guide
aauguauccaucugacugaguu

SEQ ID NO: 77592 - RNA, 22 nt, Artificial Sequence
  LRRK2 RNA guide
acauuaacucagucagauggau

SEQ ID NO: 77593 - RNA, 22 nt, Artificial Sequence
  LRRK2 RNA guide
acucagucagauggauacauuu

SEQ ID NO: 77594 - RNA, 22 nt, Artificial Sequence
  LRRK2 RNA guide
acugaguuaauguugaaacucu

SEQ ID NO: 77595 - RNA, 22 nt, Artificial Sequence
  LRRK2 RNA guide
acuuggagaguuucaacauuaa

SEQ ID NO: 77596 - RNA, 22 nt, Artificial Sequence
  LRRK2 RNA guide
agaguuucaacauuaacucagu

SEQ ID NO: 77597 - RNA, 22 nt, Artificial Sequence
  LRRK2 RNA guide
aguuaauguugaaacucuccaa

SEQ ID NO: 77598 - RNA, 22 nt, Artificial Sequence
  LRRK2 RNA guide
aguuucaacauuaacucaguca

SEQ ID NO: 77599 - RNA, 22 nt, Artificial Sequence
  LRRK2 RNA guide
auaaauguauccaucugacuga

SEQ ID NO: 77600 - RNA, 22 nt, Artificial Sequence
  LRRK2 RNA guide
auaacuuggagaguuucaacau

SEQ ID NO: 77601 - RNA, 22 nt, Artificial Sequence
  LRRK2 RNA guide
auccaucugacugaguuaaugu

SEQ ID NO: 77602 - RNA, 22 nt, Artificial Sequence
  LRRK2 RNA guide
aucugacugaguuaauguugaa

SEQ ID NO: 77603 - RNA, 22 nt, Artificial Sequence
  LRRK2 RNA guide
auguauccaucugacugaguua

SEQ ID NO: 77604 - RNA, 22 nt, Artificial Sequence
  LRRK2 RNA guide
auuaacucagucagauggauac

SEQ ID NO: 77605 - RNA, 22 nt, Artificial Sequence
  LRRK2 RNA guide
caacauuaacucagucagaugg

SEQ ID NO: 77606 - RNA, 22 nt, Artificial Sequence
  LRRK2 RNA guide
caucugacugaguuaauguuga

SEQ ID NO: 77607 - RNA, 22 nt, Artificial Sequence
  LRRK2 RNA guide
cauuaacucagucagauggaua

SEQ ID NO: 77608 - RNA, 22 nt, Artificial Sequence
  LRRK2 RNA guide
ccaucugacugaguuaauguug

SEQ ID NO: 77609 - RNA, 22 nt, Artificial Sequence
  LRRK2 RNA guide
cugacugaguuaauguugaaac

SEQ ID NO: 77610 - RNA, 22 nt, Artificial Sequence
  LRRK2 RNA guide
cugaguuaauguugaaacucuc

SEQ ID NO: 77611 - RNA, 22 nt, Artificial Sequence
  LRRK2 RNA guide
cuuggagaguuucaacauuaac

SEQ ID NO: 77612 - RNA, 22 nt, Artificial Sequence
  LRRK2 RNA guide
gacugaguuaauguugaaacuc

SEQ ID NO: 77613 - RNA, 22 nt, Artificial Sequence
  LRRK2 RNA guide
gagaguuucaacauuaacucag

SEQ ID NO: 77614 - RNA, 22 nt, Artificial Sequence
  LRRK2 RNA guide
gaguuaauguugaaacucucca

SEQ ID NO: 77615 - RNA, 22 nt, Artificial Sequence
  LRRK2 RNA guide
gaguuucaacauuaacucaguc

SEQ ID NO: 77616 - RNA, 22 nt, Artificial Sequence
  LRRK2 RNA guide
gauauaaauguauccaucugac

SEQ ID NO: 77617 - RNA, 22 nt, Artificial Sequence
  LRRK2 RNA guide
ggagaguuucaacauuaacuca

SEQ ID NO: 77618 - RNA, 22 nt, Artificial Sequence
  LRRK2 RNA guide
guauccaucugacugaguuaau

SEQ ID NO: 77619 - RNA, 22 nt, Artificial Sequence
  LRRK2 RNA guide
guuucaacauuaacucagucag

SEQ ID NO: 77620 - RNA, 22 nt, Artificial Sequence
  LRRK2 RNA guide
uaaauguauccaucugacugag

SEQ ID NO: 77621 - RNA, 22 nt, Artificial Sequence
  LRRK2 RNA guide
uaacucagucagauggauacau

SEQ ID NO: 77622 - RNA, 22 nt, Artificial Sequence
  LRRK2 RNA guide
uaacuuggagaguuucaacauu

SEQ ID NO: 77623 - RNA, 22 nt, Artificial Sequence
  LRRK2 RNA guide
uauaaauguauccaucugacug

SEQ ID NO: 77624 - RNA, 22 nt, Artificial Sequence
  LRRK2 RNA guide
uauccaucugacugaguuaaug

SEQ ID NO: 77625 - RNA, 22 nt, Artificial Sequence
  LRRK2 RNA guide
ucaacauuaacucagucagaug

SEQ ID NO: 77626 - RNA, 22 nt, Artificial Sequence
  LRRK2 RNA guide
uccaucugacugaguuaauguu

SEQ ID NO: 77627 - RNA, 22 nt, Artificial Sequence
  LRRK2 RNA guide
ucugacugaguuaauguugaaa

SEQ ID NO: 77628 - RNA, 22 nt, Artificial Sequence
  LRRK2 RNA guide
ugacugaguuaauguugaaacu

SEQ ID NO: 77629 - RNA, 22 nt, Artificial Sequence
  LRRK2 RNA guide
ugaguuaauguugaaacucucc

SEQ ID NO: 77630 - RNA, 22 nt, Artificial Sequence
  LRRK2 RNA guide
uggagaguuucaacauuaacuc

SEQ ID NO: 77631 - RNA, 22 nt, Artificial Sequence
  LRRK2 RNA guide
uguauccaucugacugaguuaa

SEQ ID NO: 77632 - RNA, 22 nt, Artificial Sequence
  LRRK2 RNA guide
uuaacucagucagauggauaca

SEQ ID NO: 77633 - RNA, 22 nt, Artificial Sequence
  LRRK2 RNA guide
uucaacauuaacucagucagau

SEQ ID NO: 77634 - RNA, 22 nt, Artificial Sequence
  LRRK2 RNA guide
uuggagaguuucaacauuaacu

SEQ ID NO: 77635 - RNA, 22 nt, Artificial Sequence
  LRRK2 RNA guide
uuucaacauuaacucagucaga

SEQ ID NO: 77636 - RNA, 20 nt, Artificial Sequence
  LRRK2 RNA guide
aacauuaacucagucaguca

SEQ ID NO: 77637 - RNA, 20 nt, Artificial Sequence
  LRRK2 RNA guide
aacucagucagucagaugga

SEQ ID NO: 77638 - RNA, 20 nt, Artificial Sequence
  LRRK2 RNA guide
aauguauccaucugacugac

SEQ ID NO: 77639 - RNA, 20 nt, Artificial Sequence
  LRRK2 RNA guide
acauuaacucagucagucag

SEQ ID NO: 77640 - RNA, 20 nt, Artificial Sequence
  LRRK2 RNA guide
acucagucagucagauggau

SEQ ID NO: 77641 - RNA, 20 nt, Artificial Sequence
  LRRK2 RNA guide
acugacugaguuaauguuga

SEQ ID NO: 77642 - RNA, 20 nt, Artificial Sequence
  LRRK2 RNA guide
auccaucugacugacugagu

SEQ ID NO: 77643 - RNA, 20 nt, Artificial Sequence
  LRRK2 RNA guide
aucugacugacugaguuaau

SEQ ID NO: 77644 - RNA, 20 nt, Artificial Sequence
  LRRK2 RNA guide
auguauccaucugacugacu

SEQ ID NO: 77645 - RNA, 20 nt, Artificial Sequence
  LRRK2 RNA guide
auuaacucagucagucagau

SEQ ID NO: 77646 - RNA, 20 nt, Artificial Sequence
  LRRK2 RNA guide
caacauuaacucagucaguc

SEQ ID NO: 77647 - RNA, 20 nt, Artificial Sequence
  LRRK2 RNA guide
caucugacugacugaguuaa

SEQ ID NO: 77648 - RNA, 20 nt, Artificial Sequence
  LRRK2 RNA guide
cauuaacucagucagucaga

SEQ ID NO: 77649 - RNA, 20 nt, Artificial Sequence
  LRRK2 RNA guide
ccaucugacugacugaguua

SEQ ID NO: 77650 - RNA, 20 nt, Artificial Sequence
  LRRK2 RNA guide
cugacugacugaguuaaugu

SEQ ID NO: 77651 - RNA, 20 nt, Artificial Sequence
  LRRK2 RNA guide
gacugacugaguuaauguug

SEQ ID NO: 77652 - RNA, 20 nt, Artificial Sequence
  LRRK2 RNA guide
guauccaucugacugacuga

SEQ ID NO: 77653 - RNA, 20 nt, Artificial Sequence
  LRRK2 RNA guide
uaacucagucagucagaugg

SEQ ID NO: 77654 - RNA, 20 nt, Artificial Sequence
  LRRK2 RNA guide
uauccaucugacugacugag

SEQ ID NO: 77655 - RNA, 20 nt, Artificial Sequence
  LRRK2 RNA guide
ucaacauuaacucagucagu

SEQ ID NO: 77656 - RNA, 20 nt, Artificial Sequence
  LRRK2 RNA guide
uccaucugacugacugaguu

SEQ ID NO: 77657 - RNA, 20 nt, Artificial Sequence
  LRRK2 RNA guide
ucugacugacugaguuaaug

SEQ ID NO: 77658 - RNA, 20 nt, Artificial Sequence
  LRRK2 RNA guide
ugacugacugaguuaauguu

SEQ ID NO: 77659 - RNA, 20 nt, Artificial Sequence
  LRRK2 RNA guide
uguauccaucugacugacug

SEQ ID NO: 77660 - RNA, 20 nt, Artificial Sequence
  LRRK2 RNA guide
uuaacucagucagucagaug

SEQ ID NO: 77661 - RNA, 21 nt, Artificial Sequence
  LRRK2 RNA guide
aaauguauccaucugacugac

SEQ ID NO: 77662 - RNA, 21 nt, Artificial Sequence
  LRRK2 RNA guide
aacauuaacucagucagucag

SEQ ID NO: 77663 - RNA, 21 nt, Artificial Sequence
  LRRK2 RNA guide
aacucagucagucagauggau

SEQ ID NO: 77664 - RNA, 21 nt, Artificial Sequence
  LRRK2 RNA guide
aauguauccaucugacugacu

SEQ ID NO: 77665 - RNA, 21 nt, Artificial Sequence
  LRRK2 RNA guide
acauuaacucagucagucaga

SEQ ID NO: 77666 - RNA, 21 nt, Artificial Sequence
  LRRK2 RNA guide
acucagucagucagauggaua

SEQ ID NO: 77667 - RNA, 21 nt, Artificial Sequence
  LRRK2 RNA guide
acugacugaguuaauguugaa

SEQ ID NO: 77668 - RNA, 21 nt, Artificial Sequence
  LRRK2 RNA guide
auccaucugacugacugaguu

SEQ ID NO: 77669 - RNA, 21 nt, Artificial Sequence
  LRRK2 RNA guide
aucugacugacugaguuaaug

SEQ ID NO: 77670 - RNA, 21 nt, Artificial Sequence
  LRRK2 RNA guide
auguauccaucugacugacug

SEQ ID NO: 77671 - RNA, 21 nt, Artificial Sequence
  LRRK2 RNA guide
auuaacucagucagucagaug

SEQ ID NO: 77672 - RNA, 21 nt, Artificial Sequence
  LRRK2 RNA guide
caacauuaacucagucaguca

SEQ ID NO: 77673 - RNA, 21 nt, Artificial Sequence
  LRRK2 RNA guide
caucugacugacugaguuaau

SEQ ID NO: 77674 - RNA, 21 nt, Artificial Sequence
  LRRK2 RNA guide
cauuaacucagucagucagau

SEQ ID NO: 77675 - RNA, 21 nt, Artificial Sequence
  LRRK2 RNA guide
ccaucugacugacugaguuaa

SEQ ID NO: 77676 - RNA, 21 nt, Artificial Sequence
  LRRK2 RNA guide
cugacugacugaguuaauguu

SEQ ID NO: 77677 - RNA, 21 nt, Artificial Sequence
  LRRK2 RNA guide
gacugacugaguuaauguuga

SEQ ID NO: 77678 - RNA, 21 nt, Artificial Sequence
  LRRK2 RNA guide
guauccaucugacugacugag

SEQ ID NO: 77679 - RNA, 21 nt, Artificial Sequence
  LRRK2 RNA guide
uaacucagucagucagaugga

SEQ ID NO: 77680 - RNA, 21 nt, Artificial Sequence
  LRRK2 RNA guide
uauccaucugacugacugagu

SEQ ID NO: 77681 - RNA, 21 nt, Artificial Sequence
  LRRK2 RNA guide
ucaacauuaacucagucaguc

SEQ ID NO: 77682 - RNA, 21 nt, Artificial Sequence
  LRRK2 RNA guide
uccaucugacugacugaguua

SEQ ID NO: 77683 - RNA, 21 nt, Artificial Sequence
  LRRK2 RNA guide
ucugacugacugaguuaaugu

SEQ ID NO: 77684 - RNA, 21 nt, Artificial Sequence
  LRRK2 RNA guide
ugacugacugaguuaauguug

SEQ ID NO: 77685 - RNA, 21 nt, Artificial Sequence
  LRRK2 RNA guide
uguauccaucugacugacuga

SEQ ID NO: 77686 - RNA, 21 nt, Artificial Sequence
  LRRK2 RNA guide
uuaacucagucagucagaugg

SEQ ID NO: 77687 - RNA, 21 nt, Artificial Sequence
  LRRK2 RNA guide
uucaacauuaacucagucagu

SEQ ID NO: 77688 - RNA, 22 nt, Artificial Sequence
  LRRK2 RNA guide
aaauguauccaucugacugacu

SEQ ID NO: 77689 - RNA, 22 nt, Artificial Sequence
  LRRK2 RNA guide
aacauuaacucagucagucaga

SEQ ID NO: 77690 - RNA, 22 nt, Artificial Sequence
  LRRK2 RNA guide
aacucagucagucagauggaua

SEQ ID NO: 77691 - RNA, 22 nt, Artificial Sequence
  LRRK2 RNA guide
aauguauccaucugacugacug

SEQ ID NO: 77692 - RNA, 22 nt, Artificial Sequence
  LRRK2 RNA guide
acauuaacucagucagucagau

SEQ ID NO: 77693 - RNA, 22 nt, Artificial Sequence
  LRRK2 RNA guide
acucagucagucagauggauac

SEQ ID NO: 77694 - RNA, 22 nt, Artificial Sequence
  LRRK2 RNA guide
acugacugaguuaauguugaaa

SEQ ID NO: 77695 - RNA, 22 nt, Artificial Sequence
  LRRK2 RNA guide
auccaucugacugacugaguua

SEQ ID NO: 77696 - RNA, 22 nt, Artificial Sequence
  LRRK2 RNA guide
aucugacugacugaguuaaugu

SEQ ID NO: 77697 - RNA, 22 nt, Artificial Sequence
  LRRK2 RNA guide
auguauccaucugacugacuga

SEQ ID NO: 77698 - RNA, 22 nt, Artificial Sequence
  LRRK2 RNA guide
auuaacucagucagucagaugg

SEQ ID NO: 77699 - RNA, 22 nt, Artificial Sequence
  LRRK2 RNA guide
caacauuaacucagucagucag

SEQ ID NO: 77700 - RNA, 22 nt, Artificial Sequence
  LRRK2 RNA guide
caucugacugacugaguuaaug

SEQ ID NO: 77701 - RNA, 22 nt, Artificial Sequence
  LRRK2 RNA guide
cauuaacucagucagucagaug

SEQ ID NO: 77702 - RNA, 22 nt, Artificial Sequence
  LRRK2 RNA guide
ccaucugacugacugaguuaau

SEQ ID NO: 77703 - RNA, 22 nt, Artificial Sequence
  LRRK2 RNA guide
cugacugacugaguuaauguug

SEQ ID NO: 77704 - RNA, 22 nt, Artificial Sequence
  LRRK2 RNA guide
gacugacugaguuaauguugaa

SEQ ID NO: 77705 - RNA, 22 nt, Artificial Sequence
  LRRK2 RNA guide
guauccaucugacugacugagu

SEQ ID NO: 77706 - RNA, 22 nt, Artificial Sequence
  LRRK2 RNA guide
uaaauguauccaucugacugac

SEQ ID NO: 77707 - RNA, 22 nt, Artificial Sequence
  LRRK2 RNA guide
uaacucagucagucagauggau

SEQ ID NO: 77708 - RNA, 22 nt, Artificial Sequence
  LRRK2 RNA guide
uauccaucugacugacugaguu

SEQ ID NO: 77709 - RNA, 22 nt, Artificial Sequence
  LRRK2 RNA guide
ucaacauuaacucagucaguca

SEQ ID NO: 77710 - RNA, 22 nt, Artificial Sequence
  LRRK2 RNA guide
uccaucugacugacugaguuaa

SEQ ID NO: 77711 - RNA, 22 nt, Artificial Sequence
  LRRK2 RNA guide
ucugacugacugaguuaauguu

SEQ ID NO: 77712 - RNA, 22 nt, Artificial Sequence
  LRRK2 RNA guide
ugacugacugaguuaauguuga

SEQ ID NO: 77713 - RNA, 22 nt, Artificial Sequence
  LRRK2 RNA guide
uguauccaucugacugacugag

SEQ ID NO: 77714 - RNA, 22 nt, Artificial Sequence
  LRRK2 RNA guide
uuaacucagucagucagaugga

SEQ ID NO: 77715 - RNA, 22 nt, Artificial Sequence
  LRRK2 RNA guide
uucaacauuaacucagucaguc

SEQ ID NO: 77716 - RNA, 22 nt, Artificial Sequence
  LRRK2 RNA guide
uuucaacauuaacucagucagu

SEQ ID NO: 77717 - RNA, 20 nt, Artificial Sequence
  LRRK2 RNA guide
acauuuauaucauauccugc

SEQ ID NO: 77718 - RNA, 20 nt, Artificial Sequence
  LRRK2 RNA guide
agcaggauaugauauaaaug

SEQ ID NO: 77719 - RNA, 20 nt, Artificial Sequence
  LRRK2 RNA guide
agucagauggauacauuuau

SEQ ID NO: 77720 - RNA, 20 nt, Artificial Sequence
  LRRK2 RNA guide
cagauggauacauuuauauc

SEQ ID NO: 77721 - RNA, 20 nt, Artificial Sequence
  LRRK2 RNA guide
cagcaggauaugauauaaau

SEQ ID NO: 77722 - RNA, 20 nt, Artificial Sequence
  LRRK2 RNA guide
cagucagauggauacauuua

SEQ ID NO: 77723 - RNA, 20 nt, Artificial Sequence
  LRRK2 RNA guide
ccagcaggauaugauauaaa

SEQ ID NO: 77724 - RNA, 20 nt, Artificial Sequence
  LRRK2 RNA guide
cccagcaggauaugauauaa

SEQ ID NO: 77725 - RNA, 20 nt, Artificial Sequence
  LRRK2 RNA guide
cucagucagauggauacauu

SEQ ID NO: 77726 - RNA, 20 nt, Artificial Sequence
  LRRK2 RNA guide
cucccagcaggauaugauau

SEQ ID NO: 77727 - RNA, 20 nt, Artificial Sequence
  LRRK2 RNA guide
gauauaaauguauccaucug

SEQ ID NO: 77728 - RNA, 20 nt, Artificial Sequence
  LRRK2 RNA guide
gcaggauaugauauaaaugu

SEQ ID NO: 77729 - RNA, 20 nt, Artificial Sequence
  LRRK2 RNA guide
gucagauggauacauuuaua

SEQ ID NO: 77730 - RNA, 20 nt, Artificial Sequence
  LRRK2 RNA guide
ucagucagauggauacauuu

SEQ ID NO: 77731 - RNA, 20 nt, Artificial Sequence
  LRRK2 RNA guide
ucccagcaggauaugauaua

SEQ ID NO: 77732 - RNA, 21 nt, Artificial Sequence
  LRRK2 RNA guide
acucccagcaggauaugauau

SEQ ID NO: 77733 - RNA, 21 nt, Artificial Sequence
  LRRK2 RNA guide
cagcaggauaugauauaaaug

SEQ ID NO: 77734 - RNA, 21 nt, Artificial Sequence
  LRRK2 RNA guide
cagucagauggauacauuuau

SEQ ID NO: 77735 - RNA, 21 nt, Artificial Sequence
  LRRK2 RNA guide
ccagcaggauaugauauaaau

SEQ ID NO: 77736 - RNA, 21 nt, Artificial Sequence
  LRRK2 RNA guide
cccagcaggauaugauauaaa

SEQ ID NO: 77737 - RNA, 21 nt, Artificial Sequence
  LRRK2 RNA guide
cucagucagauggauacauuu

SEQ ID NO: 77738 - RNA, 21 nt, Artificial Sequence
  LRRK2 RNA guide
cucccagcaggauaugauaua

SEQ ID NO: 77739 - RNA, 21 nt, Artificial Sequence
  LRRK2 RNA guide
ucagucagauggauacauuua

SEQ ID NO: 77740 - RNA, 21 nt, Artificial Sequence
  LRRK2 RNA guide
ucccagcaggauaugauauaa

SEQ ID NO: 77741 - RNA, 22 nt, Artificial Sequence
  LRRK2 RNA guide
acauuuauaucauauccugcug

SEQ ID NO: 77742 - RNA, 22 nt, Artificial Sequence
  LRRK2 RNA guide
acucccagcaggauaugauaua

SEQ ID NO: 77743 - RNA, 22 nt, Artificial Sequence
  LRRK2 RNA guide
cacucccagcaggauaugauau

SEQ ID NO: 77744 - RNA, 22 nt, Artificial Sequence
  LRRK2 RNA guide
cagcaggauaugauauaaaugu

SEQ ID NO: 77745 - RNA, 22 nt, Artificial Sequence
  LRRK2 RNA guide
cagucagauggauacauuuaua

SEQ ID NO: 77746 - RNA, 22 nt, Artificial Sequence
  LRRK2 RNA guide
ccagcaggauaugauauaaaug

SEQ ID NO: 77747 - RNA, 22 nt, Artificial Sequence
  LRRK2 RNA guide
cccagcaggauaugauauaaau

SEQ ID NO: 77748 - RNA, 22 nt, Artificial Sequence
  LRRK2 RNA guide
cucagucagauggauacauuua

SEQ ID NO: 77749 - RNA, 22 nt, Artificial Sequence
  LRRK2 RNA guide
cucccagcaggauaugauauaa

SEQ ID NO: 77750 - RNA, 22 nt, Artificial Sequence
  LRRK2 RNA guide
gucagauggauacauuuauauc

SEQ ID NO: 77751 - RNA, 22 nt, Artificial Sequence
  LRRK2 RNA guide
ucagucagauggauacauuuau

SEQ ID NO: 77752 - RNA, 22 nt, Artificial Sequence
  LRRK2 RNA guide
ucccagcaggauaugauauaaa

SEQ ID NO: 77753 - RNA, 20 nt, Artificial Sequence
  LRRK2 RNA guide
aaauauauccaucugacuga

SEQ ID NO: 77754 - RNA, 20 nt, Artificial Sequence
  LRRK2 RNA guide
aacucagucagauggauaua

SEQ ID NO: 77755 - RNA, 20 nt, Artificial Sequence
  LRRK2 RNA guide
aauauauccaucugacugag

SEQ ID NO: 77756 - RNA, 20 nt, Artificial Sequence
  LRRK2 RNA guide
acucagucagauggauauau

SEQ ID NO: 77757 - RNA, 20 nt, Artificial Sequence
  LRRK2 RNA guide
auauauccaucugacugagu

SEQ ID NO: 77758 - RNA, 20 nt, Artificial Sequence
  LRRK2 RNA guide
cagucagauggauauauuua

SEQ ID NO: 77759 - RNA, 20 nt, Artificial Sequence
  LRRK2 RNA guide
cucagucagauggauauauu

SEQ ID NO: 77760 - RNA, 20 nt, Artificial Sequence
  LRRK2 RNA guide
uaaauauauccaucugacug

SEQ ID NO: 77761 - RNA, 20 nt, Artificial Sequence
  LRRK2 RNA guide
uaacucagucagauggauau

SEQ ID NO: 77762 - RNA, 20 nt, Artificial Sequence
  LRRK2 RNA guide
uauauccaucugacugaguu

SEQ ID NO: 77763 - RNA, 20 nt, Artificial Sequence
  LRRK2 RNA guide
ucagucagauggauauauuu

SEQ ID NO: 77764 - RNA, 21 nt, Artificial Sequence
  LRRK2 RNA guide
aaauauauccaucugacugag

SEQ ID NO: 77765 - RNA, 21 nt, Artificial Sequence
  LRRK2 RNA guide
aacucagucagauggauauau

SEQ ID NO: 77766 - RNA, 21 nt, Artificial Sequence
  LRRK2 RNA guide
aauauauccaucugacugagu

SEQ ID NO: 77767 - RNA, 21 nt, Artificial Sequence
  LRRK2 RNA guide
acucagucagauggauauauu

SEQ ID NO: 77768 - RNA, 21 nt, Artificial Sequence
  LRRK2 RNA guide
auauauccaucugacugaguu

SEQ ID NO: 77769 - RNA, 21 nt, Artificial Sequence
  LRRK2 RNA guide
cucagucagauggauauauuu

SEQ ID NO: 77770 - RNA, 21 nt, Artificial Sequence
  LRRK2 RNA guide
uaacucagucagauggauaua

SEQ ID NO: 77771 - RNA, 21 nt, Artificial Sequence
  LRRK2 RNA guide
uauauccaucugacugaguua

SEQ ID NO: 77772 - RNA, 21 nt, Artificial Sequence
  LRRK2 RNA guide
uuaacucagucagauggauau

SEQ ID NO: 77773 - RNA, 22 nt, Artificial Sequence
  LRRK2 RNA guide
aaauauauccaucugacugagu

SEQ ID NO: 77774 - RNA, 22 nt, Artificial Sequence
  LRRK2 RNA guide
aacucagucagauggauauauu

SEQ ID NO: 77775 - RNA, 22 nt, Artificial Sequence
  LRRK2 RNA guide
aauauauccaucugacugaguu

SEQ ID NO: 77776 - RNA, 22 nt, Artificial Sequence
  LRRK2 RNA guide
acucagucagauggauauauuu

SEQ ID NO: 77777 - RNA, 22 nt, Artificial Sequence
  LRRK2 RNA guide
auauauccaucugacugaguua

SEQ ID NO: 77778 - RNA, 22 nt, Artificial Sequence
  LRRK2 RNA guide
auuaacucagucagauggauau

SEQ ID NO: 77779 - RNA, 22 nt, Artificial Sequence
  LRRK2 RNA guide
ccagcaggauaugauauaaaua

SEQ ID NO: 77780 - RNA, 22 nt, Artificial Sequence
  LRRK2 RNA guide
cucagucagauggauauauuua

SEQ ID NO: 77781 - RNA, 22 nt, Artificial Sequence
  LRRK2 RNA guide
uaaauauauccaucugacugag

SEQ ID NO: 77782 - RNA, 22 nt, Artificial Sequence
  LRRK2 RNA guide
uaacucagucagauggauauau

SEQ ID NO: 77783 - RNA, 22 nt, Artificial Sequence
  LRRK2 RNA guide
uauauccaucugacugaguuaa

SEQ ID NO: 77784 - RNA, 22 nt, Artificial Sequence
  LRRK2 RNA guide
uuaacucagucagauggauaua

SEQ ID NO: 77785 - RNA, 20 nt, Artificial Sequence
  LRRK2 RNA guide
aaagugcaauugccauagga

SEQ ID NO: 77786 - RNA, 20 nt, Artificial Sequence
  LRRK2 RNA guide
aagugcaauugccauaggac

SEQ ID NO: 77787 - RNA, 20 nt, Artificial Sequence
  LRRK2 RNA guide
aauucuggguccuauggcaa

SEQ ID NO: 77788 - RNA, 20 nt, Artificial Sequence
  LRRK2 RNA guide
aauugccauaggacccagaa

SEQ ID NO: 77789 - RNA, 20 nt, Artificial Sequence
  LRRK2 RNA guide
acaguuaauucuggguccua

SEQ ID NO: 77790 - RNA, 20 nt, Artificial Sequence
  LRRK2 RNA guide
acccagaauuaacugucacu

SEQ ID NO: 77791 - RNA, 20 nt, Artificial Sequence
  LRRK2 RNA guide
aggacccagaauuaacuguc

SEQ ID NO: 77792 - RNA, 20 nt, Artificial Sequence
  LRRK2 RNA guide
agugacaguuaauucugggu

SEQ ID NO: 77793 - RNA, 20 nt, Artificial Sequence
  LRRK2 RNA guide
agugcaauugccauaggacc

SEQ ID NO: 77794 - RNA, 20 nt, Artificial Sequence
  LRRK2 RNA guide
aguuaauucuggguccuaug

SEQ ID NO: 77795 - RNA, 20 nt, Artificial Sequence
  LRRK2 RNA guide
auaggacccagaauuaacug

SEQ ID NO: 77796 - RNA, 20 nt, Artificial Sequence
  LRRK2 RNA guide
auucuggguccuauggcaau

SEQ ID NO: 77797 - RNA, 20 nt, Artificial Sequence
  LRRK2 RNA guide
auugccauaggacccagaau

SEQ ID NO: 77798 - RNA, 20 nt, Artificial Sequence
  LRRK2 RNA guide
caaaagugcaauugccauag

SEQ ID NO: 77799 - RNA, 20 nt, Artificial Sequence
  LRRK2 RNA guide
caauugccauaggacccaga

SEQ ID NO: 77800 - RNA, 20 nt, Artificial Sequence
  LRRK2 RNA guide
caguuaauucuggguccuau

SEQ ID NO: 77801 - RNA, 20 nt, Artificial Sequence
  LRRK2 RNA guide
cauaggacccagaauuaacu

SEQ ID NO: 77802 - RNA, 20 nt, Artificial Sequence
  LRRK2 RNA guide
ccauaggacccagaauuaac

SEQ ID NO: 77803 - RNA, 20 nt, Artificial Sequence
  LRRK2 RNA guide
cccagaauuaacugucacuc

SEQ ID NO: 77804 - RNA, 20 nt, Artificial Sequence
  LRRK2 RNA guide
cugggagugacaguuaauuc

SEQ ID NO: 77805 - RNA, 20 nt, Artificial Sequence
  LRRK2 RNA guide
cuggguccuauggcaauugc

SEQ ID NO: 77806 - RNA, 20 nt, Artificial Sequence
  LRRK2 RNA guide
gacaguuaauucuggguccu

SEQ ID NO: 77807 - RNA, 20 nt, Artificial Sequence
  LRRK2 RNA guide
gacccagaauuaacugucac

SEQ ID NO: 77808 - RNA, 20 nt, Artificial Sequence
  LRRK2 RNA guide
gagugacaguuaauucuggg

SEQ ID NO: 77809 - RNA, 20 nt, Artificial Sequence
  LRRK2 RNA guide
gcaauugccauaggacccag

SEQ ID NO: 77810 - RNA, 20 nt, Artificial Sequence
  LRRK2 RNA guide
gccauaggacccagaauuaa

SEQ ID NO: 77811 - RNA, 20 nt, Artificial Sequence
  LRRK2 RNA guide
gcugggagugacaguuaauu

SEQ ID NO: 77812 - RNA, 20 nt, Artificial Sequence
  LRRK2 RNA guide
ggacccagaauuaacuguca

SEQ ID NO: 77813 - RNA, 20 nt, Artificial Sequence
  LRRK2 RNA guide
ggagugacaguuaauucugg

SEQ ID NO: 77814 - RNA, 20 nt, Artificial Sequence
  LRRK2 RNA guide
gggagugacaguuaauucug

SEQ ID NO: 77815 - RNA, 20 nt, Artificial Sequence
  LRRK2 RNA guide
ggguccuauggcaauugcac

SEQ ID NO: 77816 - RNA, 20 nt, Artificial Sequence
  LRRK2 RNA guide
gugacaguuaauucuggguc

SEQ ID NO: 77817 - RNA, 20 nt, Artificial Sequence
  LRRK2 RNA guide
gugcaauugccauaggaccc

SEQ ID NO: 77818 - RNA, 20 nt, Artificial Sequence
  LRRK2 RNA guide
guuaauucuggguccuaugg

SEQ ID NO: 77819 - RNA, 20 nt, Artificial Sequence
  LRRK2 RNA guide
uaauucuggguccuauggca

SEQ ID NO: 77820 - RNA, 20 nt, Artificial Sequence
  LRRK2 RNA guide
uaggacccagaauuaacugu

SEQ ID NO: 77821 - RNA, 20 nt, Artificial Sequence
  LRRK2 RNA guide
ucaaaagugcaauugccaua

SEQ ID NO: 77822 - RNA, 20 nt, Artificial Sequence
  LRRK2 RNA guide
ucuggguccuauggcaauug

SEQ ID NO: 77823 - RNA, 20 nt, Artificial Sequence
  LRRK2 RNA guide
ugacaguuaauucugggucc

SEQ ID NO: 77824 - RNA, 20 nt, Artificial Sequence
  LRRK2 RNA guide
ugcaauugccauaggaccca

SEQ ID NO: 77825 - RNA, 20 nt, Artificial Sequence
  LRRK2 RNA guide
ugcugggagugacaguuaau

SEQ ID NO: 77826 - RNA, 20 nt, Artificial Sequence
  LRRK2 RNA guide
ugggagugacaguuaauucu

SEQ ID NO: 77827 - RNA, 20 nt, Artificial Sequence
  LRRK2 RNA guide
uggguccuauggcaauugca

SEQ ID NO: 77828 - RNA, 20 nt, Artificial Sequence
  LRRK2 RNA guide
uuaauucuggguccuauggc

SEQ ID NO: 77829 - RNA, 20 nt, Artificial Sequence
  LRRK2 RNA guide
uucuggguccuauggcaauu

SEQ ID NO: 77830 - RNA, 20 nt, Artificial Sequence
  LRRK2 RNA guide
uugccauaggacccagaauu

SEQ ID NO: 77831 - RNA, 21 nt, Artificial Sequence
  LRRK2 RNA guide
aaaagugcaauugccauagga

SEQ ID NO: 77832 - RNA, 21 nt, Artificial Sequence
  LRRK2 RNA guide
aaagugcaauugccauaggac

SEQ ID NO: 77833 - RNA, 21 nt, Artificial Sequence
  LRRK2 RNA guide
aagugcaauugccauaggacc

SEQ ID NO: 77834 - RNA, 21 nt, Artificial Sequence
  LRRK2 RNA guide
aauucuggguccuauggcaau

SEQ ID NO: 77835 - RNA, 21 nt, Artificial Sequence
  LRRK2 RNA guide
aauugccauaggacccagaau

SEQ ID NO: 77836 - RNA, 21 nt, Artificial Sequence
  LRRK2 RNA guide
acaguuaauucuggguccuau

SEQ ID NO: 77837 - RNA, 21 nt, Artificial Sequence
  LRRK2 RNA guide
acccagaauuaacugucacuc

SEQ ID NO: 77838 - RNA, 21 nt, Artificial Sequence
  LRRK2 RNA guide
aggacccagaauuaacuguca

SEQ ID NO: 77839 - RNA, 21 nt, Artificial Sequence
  LRRK2 RNA guide
agugacaguuaauucuggguc

SEQ ID NO: 77840 - RNA, 21 nt, Artificial Sequence
  LRRK2 RNA guide
agugcaauugccauaggaccc

SEQ ID NO: 77841 - RNA, 21 nt, Artificial Sequence
  LRRK2 RNA guide
aguuaauucuggguccuaugg

SEQ ID NO: 77842 - RNA, 21 nt, Artificial Sequence
  LRRK2 RNA guide
auaggacccagaauuaacugu

SEQ ID NO: 77843 - RNA, 21 nt, Artificial Sequence
  LRRK2 RNA guide
auucuggguccuauggcaauu

SEQ ID NO: 77844 - RNA, 21 nt, Artificial Sequence
  LRRK2 RNA guide
auugccauaggacccagaauu

SEQ ID NO: 77845 - RNA, 21 nt, Artificial Sequence
  LRRK2 RNA guide
caaaagugcaauugccauagg

SEQ ID NO: 77846 - RNA, 21 nt, Artificial Sequence
  LRRK2 RNA guide
caauugccauaggacccagaa

SEQ ID NO: 77847 - RNA, 21 nt, Artificial Sequence
  LRRK2 RNA guide
caguuaauucuggguccuaug

SEQ ID NO: 77848 - RNA, 21 nt, Artificial Sequence
  LRRK2 RNA guide
cauaggacccagaauuaacug

SEQ ID NO: 77849 - RNA, 21 nt, Artificial Sequence
  LRRK2 RNA guide
ccauaggacccagaauuaacu

SEQ ID NO: 77850 - RNA, 21 nt, Artificial Sequence
  LRRK2 RNA guide
cccagaauuaacugucacucc

SEQ ID NO: 77851 - RNA, 21 nt, Artificial Sequence
  LRRK2 RNA guide
cugcugggagugacaguuaau

SEQ ID NO: 77852 - RNA, 21 nt, Artificial Sequence
  LRRK2 RNA guide
cugggagugacaguuaauucu

SEQ ID NO: 77853 - RNA, 21 nt, Artificial Sequence
  LRRK2 RNA guide
cuggguccuauggcaauugca

SEQ ID NO: 77854 - RNA, 21 nt, Artificial Sequence
  LRRK2 RNA guide
gacaguuaauucuggguccua

SEQ ID NO: 77855 - RNA, 21 nt, Artificial Sequence
  LRRK2 RNA guide
gacccagaauuaacugucacu

SEQ ID NO: 77856 - RNA, 21 nt, Artificial Sequence
  LRRK2 RNA guide
gagugacaguuaauucugggu

SEQ ID NO: 77857 - RNA, 21 nt, Artificial Sequence
  LRRK2 RNA guide
gcaauugccauaggacccaga

SEQ ID NO: 77858 - RNA, 21 nt, Artificial Sequence
  LRRK2 RNA guide
gccauaggacccagaauuaac

SEQ ID NO: 77859 - RNA, 21 nt, Artificial Sequence
  LRRK2 RNA guide
gcugggagugacaguuaauuc

SEQ ID NO: 77860 - RNA, 21 nt, Artificial Sequence
  LRRK2 RNA guide
ggacccagaauuaacugucac

SEQ ID NO: 77861 - RNA, 21 nt, Artificial Sequence
  LRRK2 RNA guide
ggagugacaguuaauucuggg

SEQ ID NO: 77862 - RNA, 21 nt, Artificial Sequence
  LRRK2 RNA guide
gggagugacaguuaauucugg

SEQ ID NO: 77863 - RNA, 21 nt, Artificial Sequence
  LRRK2 RNA guide
ggguccuauggcaauugcacu

SEQ ID NO: 77864 - RNA, 21 nt, Artificial Sequence
  LRRK2 RNA guide
gucaaaagugcaauugccaua

SEQ ID NO: 77865 - RNA, 21 nt, Artificial Sequence
  LRRK2 RNA guide
gugacaguuaauucugggucc

SEQ ID NO: 77866 - RNA, 21 nt, Artificial Sequence
  LRRK2 RNA guide
gugcaauugccauaggaccca

SEQ ID NO: 77867 - RNA, 21 nt, Artificial Sequence
  LRRK2 RNA guide
guuaauucuggguccuauggc

SEQ ID NO: 77868 - RNA, 21 nt, Artificial Sequence
  LRRK2 RNA guide
uaauucuggguccuauggcaa

SEQ ID NO: 77869 - RNA, 21 nt, Artificial Sequence
  LRRK2 RNA guide
uaggacccagaauuaacuguc

SEQ ID NO: 77870 - RNA, 21 nt, Artificial Sequence
  LRRK2 RNA guide
ucaaaagugcaauugccauag

SEQ ID NO: 77871 - RNA, 21 nt, Artificial Sequence
  LRRK2 RNA guide
ucuggguccuauggcaauugc

SEQ ID NO: 77872 - RNA, 21 nt, Artificial Sequence
  LRRK2 RNA guide
ugacaguuaauucuggguccu

SEQ ID NO: 77873 - RNA, 21 nt, Artificial Sequence
  LRRK2 RNA guide
ugcaauugccauaggacccag

SEQ ID NO: 77874 - RNA, 21 nt, Artificial Sequence
  LRRK2 RNA guide
ugccauaggacccagaauuaa

SEQ ID NO: 77875 - RNA, 21 nt, Artificial Sequence
  LRRK2 RNA guide
ugcugggagugacaguuaauu

SEQ ID NO: 77876 - RNA, 21 nt, Artificial Sequence
  LRRK2 RNA guide
ugggagugacaguuaauucug

SEQ ID NO: 77877 - RNA, 21 nt, Artificial Sequence
  LRRK2 RNA guide
uggguccuauggcaauugcac

SEQ ID NO: 77878 - RNA, 21 nt, Artificial Sequence
  LRRK2 RNA guide
uuaauucuggguccuauggca

SEQ ID NO: 77879 - RNA, 21 nt, Artificial Sequence
  LRRK2 RNA guide
uucuggguccuauggcaauug

SEQ ID NO: 77880 - RNA, 21 nt, Artificial Sequence
  LRRK2 RNA guide
uugccauaggacccagaauua

SEQ ID NO: 77881 - RNA, 22 nt, Artificial Sequence
  LRRK2 RNA guide
aaaagugcaauugccauaggac

SEQ ID NO: 77882 - RNA, 22 nt, Artificial Sequence
  LRRK2 RNA guide
aaagugcaauugccauaggacc

SEQ ID NO: 77883 - RNA, 22 nt, Artificial Sequence
  LRRK2 RNA guide
aagugcaauugccauaggaccc

SEQ ID NO: 77884 - RNA, 22 nt, Artificial Sequence
  LRRK2 RNA guide
aauucuggguccuauggcaauu

SEQ ID NO: 77885 - RNA, 22 nt, Artificial Sequence
  LRRK2 RNA guide
aauugccauaggacccagaauu

SEQ ID NO: 77886 - RNA, 22 nt, Artificial Sequence
  LRRK2 RNA guide
acaguuaauucuggguccuaug

SEQ ID NO: 77887 - RNA, 22 nt, Artificial Sequence
  LRRK2 RNA guide
acccagaauuaacugucacucc

SEQ ID NO: 77888 - RNA, 22 nt, Artificial Sequence
  LRRK2 RNA guide
aggacccagaauuaacugucac

SEQ ID NO: 77889 - RNA, 22 nt, Artificial Sequence
  LRRK2 RNA guide
agucaaaagugcaauugccaua

SEQ ID NO: 77890 - RNA, 22 nt, Artificial Sequence
  LRRK2 RNA guide
agugacaguuaauucugggucc

SEQ ID NO: 77891 - RNA, 22 nt, Artificial Sequence
  LRRK2 RNA guide
agugcaauugccauaggaccca

SEQ ID NO: 77892 - RNA, 22 nt, Artificial Sequence
  LRRK2 RNA guide
aguuaauucuggguccuauggc

SEQ ID NO: 77893 - RNA, 22 nt, Artificial Sequence
  LRRK2 RNA guide
auaggacccagaauuaacuguc

SEQ ID NO: 77894 - RNA, 22 nt, Artificial Sequence
  LRRK2 RNA guide
auucuggguccuauggcaauug

SEQ ID NO: 77895 - RNA, 22 nt, Artificial Sequence
  LRRK2 RNA guide
auugccauaggacccagaauua

SEQ ID NO: 77896 - RNA, 22 nt, Artificial Sequence
  LRRK2 RNA guide
caaaagugcaauugccauagga

SEQ ID NO: 77897 - RNA, 22 nt, Artificial Sequence
  LRRK2 RNA guide
caauugccauaggacccagaau

SEQ ID NO: 77898 - RNA, 22 nt, Artificial Sequence
  LRRK2 RNA guide
caguuaauucuggguccuaugg

SEQ ID NO: 77899 - RNA, 22 nt, Artificial Sequence
  LRRK2 RNA guide
cauaggacccagaauuaacugu

SEQ ID NO: 77900 - RNA, 22 nt, Artificial Sequence
  LRRK2 RNA guide
ccauaggacccagaauuaacug

SEQ ID NO: 77901 - RNA, 22 nt, Artificial Sequence
  LRRK2 RNA guide
cccagaauuaacugucacuccc

SEQ ID NO: 77902 - RNA, 22 nt, Artificial Sequence
  LRRK2 RNA guide
ccugcugggagugacaguuaau

SEQ ID NO: 77903 - RNA, 22 nt, Artificial Sequence
  LRRK2 RNA guide
cugcugggagugacaguuaauu

SEQ ID NO: 77904 - RNA, 22 nt, Artificial Sequence
  LRRK2 RNA guide
cugggagugacaguuaauucug

SEQ ID NO: 77905 - RNA, 22 nt, Artificial Sequence
  LRRK2 RNA guide
cuggguccuauggcaauugcac

SEQ ID NO: 77906 - RNA, 22 nt, Artificial Sequence
  LRRK2 RNA guide
gacaguuaauucuggguccuau

SEQ ID NO: 77907 - RNA, 22 nt, Artificial Sequence
  LRRK2 RNA guide
gacccagaauuaacugucacuc

SEQ ID NO: 77908 - RNA, 22 nt, Artificial Sequence
  LRRK2 RNA guide
gagugacaguuaauucuggguc

SEQ ID NO: 77909 - RNA, 22 nt, Artificial Sequence
  LRRK2 RNA guide
gcaauugccauaggacccagaa

SEQ ID NO: 77910 - RNA, 22 nt, Artificial Sequence
  LRRK2 RNA guide
gccauaggacccagaauuaacu

SEQ ID NO: 77911 - RNA, 22 nt, Artificial Sequence
  LRRK2 RNA guide
gcugggagugacaguuaauucu

SEQ ID NO: 77912 - RNA, 22 nt, Artificial Sequence
  LRRK2 RNA guide
ggacccagaauuaacugucacu

SEQ ID NO: 77913 - RNA, 22 nt, Artificial Sequence
  LRRK2 RNA guide
ggagugacaguuaauucugggu

SEQ ID NO: 77914 - RNA, 22 nt, Artificial Sequence
  LRRK2 RNA guide
gggagugacaguuaauucuggg

SEQ ID NO: 77915 - RNA, 22 nt, Artificial Sequence
  LRRK2 RNA guide
ggguccuauggcaauugcacuu

SEQ ID NO: 77916 - RNA, 22 nt, Artificial Sequence
  LRRK2 RNA guide
gucaaaagugcaauugccauag

SEQ ID NO: 77917 - RNA, 22 nt, Artificial Sequence
  LRRK2 RNA guide
gugacaguuaauucuggguccu

SEQ ID NO: 77918 - RNA, 22 nt, Artificial Sequence
  LRRK2 RNA guide
gugcaauugccauaggacccag

SEQ ID NO: 77919 - RNA, 22 nt, Artificial Sequence
  LRRK2 RNA guide
guuaauucuggguccuauggca

SEQ ID NO: 77920 - RNA, 22 nt, Artificial Sequence
  LRRK2 RNA guide
uaauucuggguccuauggcaau

SEQ ID NO: 77921 - RNA, 22 nt, Artificial Sequence
  LRRK2 RNA guide
uaggacccagaauuaacuguca

SEQ ID NO: 77922 - RNA, 22 nt, Artificial Sequence
  LRRK2 RNA guide
ucaaaagugcaauugccauagg

SEQ ID NO: 77923 - RNA, 22 nt, Artificial Sequence
  LRRK2 RNA guide
ucuggguccuauggcaauugca

SEQ ID NO: 77924 - RNA, 22 nt, Artificial Sequence
  LRRK2 RNA guide
ugacaguuaauucuggguccua

SEQ ID NO: 77925 - RNA, 22 nt, Artificial Sequence
  LRRK2 RNA guide
ugcaauugccauaggacccaga

SEQ ID NO: 77926 - RNA, 22 nt, Artificial Sequence
  LRRK2 RNA guide
ugccauaggacccagaauuaac

SEQ ID NO: 77927 - RNA, 22 nt, Artificial Sequence
  LRRK2 RNA guide
ugcugggagugacaguuaauuc

SEQ ID NO: 77928 - RNA, 22 nt, Artificial Sequence
  LRRK2 RNA guide
ugggagugacaguuaauucugg

SEQ ID NO: 77929 - RNA, 22 nt, Artificial Sequence
  LRRK2 RNA guide
uggguccuauggcaauugcacu

SEQ ID NO: 77930 - RNA, 22 nt, Artificial Sequence
  LRRK2 RNA guide
uuaauucuggguccuauggcaa

SEQ ID NO: 77931 - RNA, 22 nt, Artificial Sequence
  LRRK2 RNA guide
uucuggguccuauggcaauugc

SEQ ID NO: 77932 - RNA, 22 nt, Artificial Sequence
  LRRK2 RNA guide
uugccauaggacccagaauuaa

SEQ ID NO: 77933 - RNA, 20 nt, Artificial Sequence
  LRRK2 RNA guide
aauucuguguccuauggcaa

SEQ ID NO: 77934 - RNA, 20 nt, Artificial Sequence
  LRRK2 RNA guide
aauugccauaggacacagaa

SEQ ID NO: 77935 - RNA, 20 nt, Artificial Sequence
  LRRK2 RNA guide
acacagaauuaacugucacu

SEQ ID NO: 77936 - RNA, 20 nt, Artificial Sequence
  LRRK2 RNA guide
acaguuaauucuguguccua

SEQ ID NO: 77937 - RNA, 20 nt, Artificial Sequence
  LRRK2 RNA guide
aggacacagaauuaacuguc

SEQ ID NO: 77938 - RNA, 20 nt, Artificial Sequence
  LRRK2 RNA guide
agugacaguuaauucugugu

SEQ ID NO: 77939 - RNA, 20 nt, Artificial Sequence
  LRRK2 RNA guide
agugcaauugccauaggaca

SEQ ID NO: 77940 - RNA, 20 nt, Artificial Sequence
  LRRK2 RNA guide
aguuaauucuguguccuaug

SEQ ID NO: 77941 - RNA, 20 nt, Artificial Sequence
  LRRK2 RNA guide
auaggacacagaauuaacug

SEQ ID NO: 77942 - RNA, 20 nt, Artificial Sequence
  LRRK2 RNA guide
auucuguguccuauggcaau

SEQ ID NO: 77943 - RNA, 20 nt, Artificial Sequence
  LRRK2 RNA guide
auugccauaggacacagaau

SEQ ID NO: 77944 - RNA, 20 nt, Artificial Sequence
  LRRK2 RNA guide
caauugccauaggacacaga

SEQ ID NO: 77945 - RNA, 20 nt, Artificial Sequence
  LRRK2 RNA guide
cacagaauuaacugucacuc

SEQ ID NO: 77946 - RNA, 20 nt, Artificial Sequence
  LRRK2 RNA guide
caguuaauucuguguccuau

SEQ ID NO: 77947 - RNA, 20 nt, Artificial Sequence
  LRRK2 RNA guide
cauaggacacagaauuaacu

SEQ ID NO: 77948 - RNA, 20 nt, Artificial Sequence
  LRRK2 RNA guide
ccauaggacacagaauuaac

SEQ ID NO: 77949 - RNA, 20 nt, Artificial Sequence
  LRRK2 RNA guide
cuguguccuauggcaauugc

SEQ ID NO: 77950 - RNA, 20 nt, Artificial Sequence
  LRRK2 RNA guide
gacacagaauuaacugucac

SEQ ID NO: 77951 - RNA, 20 nt, Artificial Sequence
  LRRK2 RNA guide
gacaguuaauucuguguccu

SEQ ID NO: 77952 - RNA, 20 nt, Artificial Sequence
  LRRK2 RNA guide
gagugacaguuaauucugug

SEQ ID NO: 77953 - RNA, 20 nt, Artificial Sequence
  LRRK2 RNA guide
gcaauugccauaggacacag

SEQ ID NO: 77954 - RNA, 20 nt, Artificial Sequence
  LRRK2 RNA guide
gccauaggacacagaauuaa

SEQ ID NO: 77955 - RNA, 20 nt, Artificial Sequence
  LRRK2 RNA guide
ggacacagaauuaacuguca

SEQ ID NO: 77956 - RNA, 20 nt, Artificial Sequence
  LRRK2 RNA guide
ggagugacaguuaauucugu

SEQ ID NO: 77957 - RNA, 20 nt, Artificial Sequence
  LRRK2 RNA guide
gugacaguuaauucuguguc

SEQ ID NO: 77958 - RNA, 20 nt, Artificial Sequence
  LRRK2 RNA guide
gugcaauugccauaggacac

SEQ ID NO: 77959 - RNA, 20 nt, Artificial Sequence
  LRRK2 RNA guide
guguccuauggcaauugcac

SEQ ID NO: 77960 - RNA, 20 nt, Artificial Sequence
  LRRK2 RNA guide
guuaauucuguguccuaugg

SEQ ID NO: 77961 - RNA, 20 nt, Artificial Sequence
  LRRK2 RNA guide
uaauucuguguccuauggca

SEQ ID NO: 77962 - RNA, 20 nt, Artificial Sequence
  LRRK2 RNA guide
uaggacacagaauuaacugu

SEQ ID NO: 77963 - RNA, 20 nt, Artificial Sequence
  LRRK2 RNA guide
ucuguguccuauggcaauug

SEQ ID NO: 77964 - RNA, 20 nt, Artificial Sequence
  LRRK2 RNA guide
ugacaguuaauucugugucc

SEQ ID NO: 77965 - RNA, 20 nt, Artificial Sequence
  LRRK2 RNA guide
ugcaauugccauaggacaca

SEQ ID NO: 77966 - RNA, 20 nt, Artificial Sequence
  LRRK2 RNA guide
ugccauaggacacagaauua

SEQ ID NO: 77967 - RNA, 20 nt, Artificial Sequence
  LRRK2 RNA guide
uguguccuauggcaauugca

SEQ ID NO: 77968 - RNA, 20 nt, Artificial Sequence
  LRRK2 RNA guide
uuaauucuguguccuauggc

SEQ ID NO: 77969 - RNA, 20 nt, Artificial Sequence
  LRRK2 RNA guide
uucuguguccuauggcaauu

SEQ ID NO: 77970 - RNA, 20 nt, Artificial Sequence
  LRRK2 RNA guide
uugccauaggacacagaauu

SEQ ID NO: 77971 - RNA, 21 nt, Artificial Sequence
  LRRK2 RNA guide
aagugcaauugccauaggaca

SEQ ID NO: 77972 - RNA, 21 nt, Artificial Sequence
  LRRK2 RNA guide
aauucuguguccuauggcaau

SEQ ID NO: 77973 - RNA, 21 nt, Artificial Sequence
  LRRK2 RNA guide
aauugccauaggacacagaau

SEQ ID NO: 77974 - RNA, 21 nt, Artificial Sequence
  LRRK2 RNA guide
acacagaauuaacugucacuc

SEQ ID NO: 77975 - RNA, 21 nt, Artificial Sequence
  LRRK2 RNA guide
acaguuaauucuguguccuau

SEQ ID NO: 77976 - RNA, 21 nt, Artificial Sequence
  LRRK2 RNA guide
aggacacagaauuaacuguca

SEQ ID NO: 77977 - RNA, 21 nt, Artificial Sequence
  LRRK2 RNA guide
agugacaguuaauucuguguc

SEQ ID NO: 77978 - RNA, 21 nt, Artificial Sequence
  LRRK2 RNA guide
agugcaauugccauaggacac

SEQ ID NO: 77979 - RNA, 21 nt, Artificial Sequence
  LRRK2 RNA guide
aguuaauucuguguccuaugg

SEQ ID NO: 77980 - RNA, 21 nt, Artificial Sequence
  LRRK2 RNA guide
auaggacacagaauuaacugu

SEQ ID NO: 77981 - RNA, 21 nt, Artificial Sequence
  LRRK2 RNA guide
auucuguguccuauggcaauu

SEQ ID NO: 77982 - RNA, 21 nt, Artificial Sequence
  LRRK2 RNA guide
auugccauaggacacagaauu

SEQ ID NO: 77983 - RNA, 21 nt, Artificial Sequence
  LRRK2 RNA guide
caauugccauaggacacagaa

SEQ ID NO: 77984 - RNA, 21 nt, Artificial Sequence
  LRRK2 RNA guide
cacagaauuaacugucacucc

SEQ ID NO: 77985 - RNA, 21 nt, Artificial Sequence
  LRRK2 RNA guide
caguuaauucuguguccuaug

SEQ ID NO: 77986 - RNA, 21 nt, Artificial Sequence
  LRRK2 RNA guide
cauaggacacagaauuaacug

SEQ ID NO: 77987 - RNA, 21 nt, Artificial Sequence
  LRRK2 RNA guide
ccauaggacacagaauuaacu

SEQ ID NO: 77988 - RNA, 21 nt, Artificial Sequence
  LRRK2 RNA guide
cuguguccuauggcaauugca

SEQ ID NO: 77989 - RNA, 21 nt, Artificial Sequence
  LRRK2 RNA guide
gacacagaauuaacugucacu

SEQ ID NO: 77990 - RNA, 21 nt, Artificial Sequence
  LRRK2 RNA guide
gacaguuaauucuguguccua

SEQ ID NO: 77991 - RNA, 21 nt, Artificial Sequence
  LRRK2 RNA guide
gagugacaguuaauucugugu

SEQ ID NO: 77992 - RNA, 21 nt, Artificial Sequence
  LRRK2 RNA guide
gcaauugccauaggacacaga

SEQ ID NO: 77993 - RNA, 21 nt, Artificial Sequence
  LRRK2 RNA guide
gccauaggacacagaauuaac

SEQ ID NO: 77994 - RNA, 21 nt, Artificial Sequence
  LRRK2 RNA guide
ggacacagaauuaacugucac

SEQ ID NO: 77995 - RNA, 21 nt, Artificial Sequence
  LRRK2 RNA guide
ggagugacaguuaauucugug

SEQ ID NO: 77996 - RNA, 21 nt, Artificial Sequence
  LRRK2 RNA guide
gggagugacaguuaauucugu

SEQ ID NO: 77997 - RNA, 21 nt, Artificial Sequence
  LRRK2 RNA guide
gugacaguuaauucugugucc

SEQ ID NO: 77998 - RNA, 21 nt, Artificial Sequence
  LRRK2 RNA guide
gugcaauugccauaggacaca

SEQ ID NO: 77999 - RNA, 21 nt, Artificial Sequence
  LRRK2 RNA guide
guguccuauggcaauugcacu

SEQ ID NO: 78000 - RNA, 21 nt, Artificial Sequence
  LRRK2 RNA guide
guuaauucuguguccuauggc

SEQ ID NO: 78001 - RNA, 21 nt, Artificial Sequence
  LRRK2 RNA guide
uaauucuguguccuauggcaa

SEQ ID NO: 78002 - RNA, 21 nt, Artificial Sequence
  LRRK2 RNA guide
uaggacacagaauuaacuguc

SEQ ID NO: 78003 - RNA, 21 nt, Artificial Sequence
  LRRK2 RNA guide
ucuguguccuauggcaauugc

SEQ ID NO: 78004 - RNA, 21 nt, Artificial Sequence
  LRRK2 RNA guide
ugacaguuaauucuguguccu

SEQ ID NO: 78005 - RNA, 21 nt, Artificial Sequence
  LRRK2 RNA guide
ugcaauugccauaggacacag

SEQ ID NO: 78006 - RNA, 21 nt, Artificial Sequence
  LRRK2 RNA guide
ugccauaggacacagaauuaa

SEQ ID NO: 78007 - RNA, 21 nt, Artificial Sequence
  LRRK2 RNA guide
uguguccuauggcaauugcac

SEQ ID NO: 78008 - RNA, 21 nt, Artificial Sequence
  LRRK2 RNA guide
uuaauucuguguccuauggca

SEQ ID NO: 78009 - RNA, 21 nt, Artificial Sequence
  LRRK2 RNA guide
uucuguguccuauggcaauug

SEQ ID NO: 78010 - RNA, 21 nt, Artificial Sequence
  LRRK2 RNA guide
uugccauaggacacagaauua

SEQ ID NO: 78011 - RNA, 22 nt, Artificial Sequence
  LRRK2 RNA guide
aaagugcaauugccauaggaca

SEQ ID NO: 78012 - RNA, 22 nt, Artificial Sequence
  LRRK2 RNA guide
aagugcaauugccauaggacac

SEQ ID NO: 78013 - RNA, 22 nt, Artificial Sequence
  LRRK2 RNA guide
aauucuguguccuauggcaauu

SEQ ID NO: 78014 - RNA, 22 nt, Artificial Sequence
  LRRK2 RNA guide
aauugccauaggacacagaauu

SEQ ID NO: 78015 - RNA, 22 nt, Artificial Sequence
  LRRK2 RNA guide
acacagaauuaacugucacucc

SEQ ID NO: 78016 - RNA, 22 nt, Artificial Sequence
  LRRK2 RNA guide
acaguuaauucuguguccuaug

SEQ ID NO: 78017 - RNA, 22 nt, Artificial Sequence
  LRRK2 RNA guide
aggacacagaauuaacugucac

SEQ ID NO: 78018 - RNA, 22 nt, Artificial Sequence
  LRRK2 RNA guide
agugacaguuaauucugugucc

SEQ ID NO: 78019 - RNA, 22 nt, Artificial Sequence
  LRRK2 RNA guide
agugcaauugccauaggacaca

SEQ ID NO: 78020 - RNA, 22 nt, Artificial Sequence
  LRRK2 RNA guide
aguuaauucuguguccuauggc

SEQ ID NO: 78021 - RNA, 22 nt, Artificial Sequence
  LRRK2 RNA guide
auaggacacagaauuaacuguc

SEQ ID NO: 78022 - RNA, 22 nt, Artificial Sequence
  LRRK2 RNA guide
auucuguguccuauggcaauug

SEQ ID NO: 78023 - RNA, 22 nt, Artificial Sequence
  LRRK2 RNA guide
auugccauaggacacagaauua

SEQ ID NO: 78024 - RNA, 22 nt, Artificial Sequence
  LRRK2 RNA guide
caauugccauaggacacagaau

SEQ ID NO: 78025 - RNA, 22 nt, Artificial Sequence
  LRRK2 RNA guide
cacagaauuaacugucacuccc

SEQ ID NO: 78026 - RNA, 22 nt, Artificial Sequence
  LRRK2 RNA guide
caguuaauucuguguccuaugg

SEQ ID NO: 78027 - RNA, 22 nt, Artificial Sequence
  LRRK2 RNA guide
cauaggacacagaauuaacugu

SEQ ID NO: 78028 - RNA, 22 nt, Artificial Sequence
  LRRK2 RNA guide
ccauaggacacagaauuaacug

SEQ ID NO: 78029 - RNA, 22 nt, Artificial Sequence
  LRRK2 RNA guide
cuguguccuauggcaauugcac

SEQ ID NO: 78030 - RNA, 22 nt, Artificial Sequence
  LRRK2 RNA guide
gacacagaauuaacugucacuc

SEQ ID NO: 78031 - RNA, 22 nt, Artificial Sequence
  LRRK2 RNA guide
gacaguuaauucuguguccuau

SEQ ID NO: 78032 - RNA, 22 nt, Artificial Sequence
  LRRK2 RNA guide
gagugacaguuaauucuguguc

SEQ ID NO: 78033 - RNA, 22 nt, Artificial Sequence
  LRRK2 RNA guide
gcaauugccauaggacacagaa

SEQ ID NO: 78034 - RNA, 22 nt, Artificial Sequence
  LRRK2 RNA guide
gccauaggacacagaauuaacu

SEQ ID NO: 78035 - RNA, 22 nt, Artificial Sequence
  LRRK2 RNA guide
ggacacagaauuaacugucacu

SEQ ID NO: 78036 - RNA, 22 nt, Artificial Sequence
  LRRK2 RNA guide
ggagugacaguuaauucugugu

SEQ ID NO: 78037 - RNA, 22 nt, Artificial Sequence
  LRRK2 RNA guide
gggagugacaguuaauucugug

SEQ ID NO: 78038 - RNA, 22 nt, Artificial Sequence
  LRRK2 RNA guide
gugacaguuaauucuguguccu

SEQ ID NO: 78039 - RNA, 22 nt, Artificial Sequence
  LRRK2 RNA guide
gugcaauugccauaggacacag

SEQ ID NO: 78040 - RNA, 22 nt, Artificial Sequence
  LRRK2 RNA guide
guguccuauggcaauugcacuu

SEQ ID NO: 78041 - RNA, 22 nt, Artificial Sequence
  LRRK2 RNA guide
guuaauucuguguccuauggca

SEQ ID NO: 78042 - RNA, 22 nt, Artificial Sequence
  LRRK2 RNA guide
uaauucuguguccuauggcaau

SEQ ID NO: 78043 - RNA, 22 nt, Artificial Sequence
  LRRK2 RNA guide
uaggacacagaauuaacuguca

SEQ ID NO: 78044 - RNA, 22 nt, Artificial Sequence
  LRRK2 RNA guide
ucuguguccuauggcaauugca

SEQ ID NO: 78045 - RNA, 22 nt, Artificial Sequence
  LRRK2 RNA guide
ugacaguuaauucuguguccua

SEQ ID NO: 78046 - RNA, 22 nt, Artificial Sequence
  LRRK2 RNA guide
ugcaauugccauaggacacaga

SEQ ID NO: 78047 - RNA, 22 nt, Artificial Sequence
  LRRK2 RNA guide
ugccauaggacacagaauuaac

SEQ ID NO: 78048 - RNA, 22 nt, Artificial Sequence
  LRRK2 RNA guide
ugggagugacaguuaauucugu

SEQ ID NO: 78049 - RNA, 22 nt, Artificial Sequence
  LRRK2 RNA guide
uguguccuauggcaauugcacu

SEQ ID NO: 78050 - RNA, 22 nt, Artificial Sequence
  LRRK2 RNA guide
uuaauucuguguccuauggcaa

SEQ ID NO: 78051 - RNA, 22 nt, Artificial Sequence
  LRRK2 RNA guide
uucuguguccuauggcaauugc

SEQ ID NO: 78052 - RNA, 22 nt, Artificial Sequence
  LRRK2 RNA guide
uugccauaggacacagaauuaa

SEQ ID NO: 78053 - RNA, 20 nt, Artificial Sequence
  LRRK2 RNA guide
aaugcgauaguauuuaacac

SEQ ID NO: 78054 - RNA, 20 nt, Artificial Sequence
  LRRK2 RNA guide
acauuuaacuaaugcgauag

SEQ ID NO: 78055 - RNA, 20 nt, Artificial Sequence
  LRRK2 RNA guide
acuaucgcauuaguuaaaug

SEQ ID NO: 78056 - RNA, 20 nt, Artificial Sequence
  LRRK2 RNA guide
auauggguguguuaaauacu

SEQ ID NO: 78057 - RNA, 20 nt, Artificial Sequence
  LRRK2 RNA guide
augcgauaguauuuaacaca

SEQ ID NO: 78058 - RNA, 20 nt, Artificial Sequence
  LRRK2 RNA guide
auggguguguuaaauacuau

SEQ ID NO: 78059 - RNA, 20 nt, Artificial Sequence
  LRRK2 RNA guide
cauuuaacuaaugcgauagu

SEQ ID NO: 78060 - RNA, 20 nt, Artificial Sequence
  LRRK2 RNA guide
cgauaguauuuaacacaccc

SEQ ID NO: 78061 - RNA, 20 nt, Artificial Sequence
  LRRK2 RNA guide
cuaaugcgauaguauuuaac

SEQ ID NO: 78062 - RNA, 20 nt, Artificial Sequence
  LRRK2 RNA guide
cuaucgcauuaguuaaaugu

SEQ ID NO: 78063 - RNA, 20 nt, Artificial Sequence
  LRRK2 RNA guide
gcgauaguauuuaacacacc

SEQ ID NO: 78064 - RNA, 20 nt, Artificial Sequence
  LRRK2 RNA guide
ggguguguuaaauacuaucg

SEQ ID NO: 78065 - RNA, 20 nt, Artificial Sequence
  LRRK2 RNA guide
gguguguuaaauacuaucgc

SEQ ID NO: 78066 - RNA, 20 nt, Artificial Sequence
  LRRK2 RNA guide
guguguuaaauacuaucgca

SEQ ID NO: 78067 - RNA, 20 nt, Artificial Sequence
  LRRK2 RNA guide
guguuaaauacuaucgcauu

SEQ ID NO: 78068 - RNA, 20 nt, Artificial Sequence
  LRRK2 RNA guide
guuaaauacuaucgcauuag

SEQ ID NO: 78069 - RNA, 20 nt, Artificial Sequence
  LRRK2 RNA guide
uauauggguguguuaaauac

SEQ ID NO: 78070 - RNA, 20 nt, Artificial Sequence
  LRRK2 RNA guide
uauggguguguuaaauacua

SEQ ID NO: 78071 - RNA, 20 nt, Artificial Sequence
  LRRK2 RNA guide
ugcgauaguauuuaacacac

SEQ ID NO: 78072 - RNA, 20 nt, Artificial Sequence
  LRRK2 RNA guide
uggguguguuaaauacuauc

SEQ ID NO: 78073 - RNA, 20 nt, Artificial Sequence
  LRRK2 RNA guide
uguguuaaauacuaucgcau

SEQ ID NO: 78074 - RNA, 21 nt, Artificial Sequence
  LRRK2 RNA guide
augcgauaguauuuaacacac

SEQ ID NO: 78075 - RNA, 21 nt, Artificial Sequence
  LRRK2 RNA guide
auggguguguuaaauacuauc

SEQ ID NO: 78076 - RNA, 21 nt, Artificial Sequence
  LRRK2 RNA guide
cgauaguauuuaacacaccca

SEQ ID NO: 78077 - RNA, 21 nt, Artificial Sequence
  LRRK2 RNA guide
gcgauaguauuuaacacaccc

SEQ ID NO: 78078 - RNA, 21 nt, Artificial Sequence
  LRRK2 RNA guide
ggguguguuaaauacuaucgc

SEQ ID NO: 78079 - RNA, 21 nt, Artificial Sequence
  LRRK2 RNA guide
gguguguuaaauacuaucgca

SEQ ID NO: 78080 - RNA, 21 nt, Artificial Sequence
  LRRK2 RNA guide
guguguuaaauacuaucgcau

SEQ ID NO: 78081 - RNA, 21 nt, Artificial Sequence
  LRRK2 RNA guide
ugcgauaguauuuaacacacc

SEQ ID NO: 78082 - RNA, 21 nt, Artificial Sequence
  LRRK2 RNA guide
uggguguguuaaauacuaucg

SEQ ID NO: 78083 - RNA, 22 nt, Artificial Sequence
  LRRK2 RNA guide
aaugcgauaguauuuaacacac

SEQ ID NO: 78084 - RNA, 22 nt, Artificial Sequence
  LRRK2 RNA guide
augcgauaguauuuaacacacc

SEQ ID NO: 78085 - RNA, 22 nt, Artificial Sequence
  LRRK2 RNA guide
auggguguguuaaauacuaucg

SEQ ID NO: 78086 - RNA, 22 nt, Artificial Sequence
  LRRK2 RNA guide
cgauaguauuuaacacacccau

SEQ ID NO: 78087 - RNA, 22 nt, Artificial Sequence
  LRRK2 RNA guide
cuaaugcgauaguauuuaacac

SEQ ID NO: 78088 - RNA, 22 nt, Artificial Sequence
  LRRK2 RNA guide
gcgauaguauuuaacacaccca

SEQ ID NO: 78089 - RNA, 22 nt, Artificial Sequence
  LRRK2 RNA guide
gcuuuaacauuuaacuaaugcg

SEQ ID NO: 78090 - RNA, 22 nt, Artificial Sequence
  LRRK2 RNA guide
ggcuuuaacauuuaacuaaugc

SEQ ID NO: 78091 - RNA, 22 nt, Artificial Sequence
  LRRK2 RNA guide
ggguguguuaaauacuaucgca

SEQ ID NO: 78092 - RNA, 22 nt, Artificial Sequence
  LRRK2 RNA guide
gguguguuaaauacuaucgcau

SEQ ID NO: 78093 - RNA, 22 nt, Artificial Sequence
  LRRK2 RNA guide
guguguuaaauacuaucgcauu

SEQ ID NO: 78094 - RNA, 22 nt, Artificial Sequence
  LRRK2 RNA guide
guguuaaauacuaucgcauuag

SEQ ID NO: 78095 - RNA, 22 nt, Artificial Sequence
  LRRK2 RNA guide
uauggguguguuaaauacuauc

SEQ ID NO: 78096 - RNA, 22 nt, Artificial Sequence
  LRRK2 RNA guide
ugcgauaguauuuaacacaccc

SEQ ID NO: 78097 - RNA, 22 nt, Artificial Sequence
  LRRK2 RNA guide
uggguguguuaaauacuaucgc

SEQ ID NO: 78098 - RNA, 20 nt, Artificial Sequence
  LRRK2 RNA guide
caauaguauuuaacacaccc

SEQ ID NO: 78099 - RNA, 20 nt, Artificial Sequence
  LRRK2 RNA guide
gcaauaguauuuaacacacc

SEQ ID NO: 78100 - RNA, 20 nt, Artificial Sequence
  LRRK2 RNA guide
ggguguguuaaauacuauug

SEQ ID NO: 78101 - RNA, 20 nt, Artificial Sequence
  LRRK2 RNA guide
gguguguuaaauacuauugc

SEQ ID NO: 78102 - RNA, 20 nt, Artificial Sequence
  LRRK2 RNA guide
guguguuaaauacuauugca

SEQ ID NO: 78103 - RNA, 20 nt, Artificial Sequence
  LRRK2 RNA guide
ugcaauaguauuuaacacac

SEQ ID NO: 78104 - RNA, 20 nt, Artificial Sequence
  LRRK2 RNA guide
uggguguguuaaauacuauu

SEQ ID NO: 78105 - RNA, 21 nt, Artificial Sequence
  LRRK2 RNA guide
caauaguauuuaacacaccca

SEQ ID NO: 78106 - RNA, 21 nt, Artificial Sequence
  LRRK2 RNA guide
gcaauaguauuuaacacaccc

SEQ ID NO: 78107 - RNA, 21 nt, Artificial Sequence
  LRRK2 RNA guide
ggguguguuaaauacuauugc

SEQ ID NO: 78108 - RNA, 21 nt, Artificial Sequence
  LRRK2 RNA guide
gguguguuaaauacuauugca

SEQ ID NO: 78109 - RNA, 21 nt, Artificial Sequence
  LRRK2 RNA guide
ugcaauaguauuuaacacacc

SEQ ID NO: 78110 - RNA, 21 nt, Artificial Sequence
  LRRK2 RNA guide
uggguguguuaaauacuauug

SEQ ID NO: 78111 - RNA, 22 nt, Artificial Sequence
  LRRK2 RNA guide
augcaauaguauuuaacacacc

SEQ ID NO: 78112 - RNA, 22 nt, Artificial Sequence
  LRRK2 RNA guide
auggguguguuaaauacuauug

SEQ ID NO: 78113 - RNA, 22 nt, Artificial Sequence
  LRRK2 RNA guide
caauaguauuuaacacacccau

SEQ ID NO: 78114 - RNA, 22 nt, Artificial Sequence
  LRRK2 RNA guide
gcaauaguauuuaacacaccca

SEQ ID NO: 78115 - RNA, 22 nt, Artificial Sequence
  LRRK2 RNA guide
ggguguguuaaauacuauugca

SEQ ID NO: 78116 - RNA, 22 nt, Artificial Sequence
  LRRK2 RNA guide
gguguguuaaauacuauugcau

SEQ ID NO: 78117 - RNA, 22 nt, Artificial Sequence
  LRRK2 RNA guide
ugcaauaguauuuaacacaccc

SEQ ID NO: 78118 - RNA, 22 nt, Artificial Sequence
  LRRK2 RNA guide
uggguguguuaaauacuauugc

SEQ ID NO: 78119 - RNA, 20 nt, Artificial Sequence
  LRRK2 RNA guide
aaaauguuaccggcuggaca

SEQ ID NO: 78120 - RNA, 20 nt, Artificial Sequence
  LRRK2 RNA guide
aaauaaaauguuaccggcug

SEQ ID NO: 78121 - RNA, 20 nt, Artificial Sequence
  LRRK2 RNA guide
aaauguuaccggcuggacau

SEQ ID NO: 78122 - RNA, 20 nt, Artificial Sequence
  LRRK2 RNA guide
aauaaaauguuaccggcugg

SEQ ID NO: 78123 - RNA, 20 nt, Artificial Sequence
  LRRK2 RNA guide
aauguuaccggcuggacaua

SEQ ID NO: 78124 - RNA, 20 nt, Artificial Sequence
  LRRK2 RNA guide
accggcuggacauacaugaa

SEQ ID NO: 78125 - RNA, 20 nt, Artificial Sequence
  LRRK2 RNA guide
agauauucauguauguccag

SEQ ID NO: 78126 - RNA, 20 nt, Artificial Sequence
  LRRK2 RNA guide
agccgguaacauuuuauuua

SEQ ID NO: 78127 - RNA, 20 nt, Artificial Sequence
  LRRK2 RNA guide
auaaaauguuaccggcugga

SEQ ID NO: 78128 - RNA, 20 nt, Artificial Sequence
  LRRK2 RNA guide
auauucauguauguccagcc

SEQ ID NO: 78129 - RNA, 20 nt, Artificial Sequence
  LRRK2 RNA guide
auguauguccagccgguaac

SEQ ID NO: 78130 - RNA, 20 nt, Artificial Sequence
  LRRK2 RNA guide
auguccagccgguaacauuu

SEQ ID NO: 78131 - RNA, 20 nt, Artificial Sequence
  LRRK2 RNA guide
auguuaccggcuggacauac

SEQ ID NO: 78132 - RNA, 20 nt, Artificial Sequence
  LRRK2 RNA guide
auucauguauguccagccgg

SEQ ID NO: 78133 - RNA, 20 nt, Artificial Sequence
  LRRK2 RNA guide
cagauauucauguaugucca

SEQ ID NO: 78134 - RNA, 20 nt, Artificial Sequence
  LRRK2 RNA guide
cagccgguaacauuuuauuu

SEQ ID NO: 78135 - RNA, 20 nt, Artificial Sequence
  LRRK2 RNA guide
cauguauguccagccgguaa

SEQ ID NO: 78136 - RNA, 20 nt, Artificial Sequence
  LRRK2 RNA guide
ccagccgguaacauuuuauu

SEQ ID NO: 78137 - RNA, 20 nt, Artificial Sequence
  LRRK2 RNA guide
ccggcuggacauacaugaau

SEQ ID NO: 78138 - RNA, 20 nt, Artificial Sequence
  LRRK2 RNA guide
cggguaaauaaaauguuacc

SEQ ID NO: 78139 - RNA, 20 nt, Artificial Sequence
  LRRK2 RNA guide
cgguaacauuuuauuuaccc

SEQ ID NO: 78140 - RNA, 20 nt, Artificial Sequence
  LRRK2 RNA guide
cuucggguaaauaaaauguu

SEQ ID NO: 78141 - RNA, 20 nt, Artificial Sequence
  LRRK2 RNA guide
gauauucauguauguccagc

SEQ ID NO: 78142 - RNA, 20 nt, Artificial Sequence
  LRRK2 RNA guide
gccgguaacauuuuauuuac

SEQ ID NO: 78143 - RNA, 20 nt, Artificial Sequence
  LRRK2 RNA guide
ggguaaauaaaauguuaccg

SEQ ID NO: 78144 - RNA, 20 nt, Artificial Sequence
  LRRK2 RNA guide
gguaaauaaaauguuaccgg

SEQ ID NO: 78145 - RNA, 20 nt, Artificial Sequence
  LRRK2 RNA guide
guaaauaaaauguuaccggc

SEQ ID NO: 78146 - RNA, 20 nt, Artificial Sequence
  LRRK2 RNA guide
guauguccagccgguaacau

SEQ ID NO: 78147 - RNA, 20 nt, Artificial Sequence
  LRRK2 RNA guide
guccagccgguaacauuuua

SEQ ID NO: 78148 - RNA, 20 nt, Artificial Sequence
  LRRK2 RNA guide
gucuucggguaaauaaaaug

SEQ ID NO: 78149 - RNA, 20 nt, Artificial Sequence
  LRRK2 RNA guide
guuaccggcuggacauacau

SEQ ID NO: 78150 - RNA, 20 nt, Artificial Sequence
  LRRK2 RNA guide
uaaaauguuaccggcuggac

SEQ ID NO: 78151 - RNA, 20 nt, Artificial Sequence
  LRRK2 RNA guide
uaaauaaaauguuaccggcu

SEQ ID NO: 78152 - RNA, 20 nt, Artificial Sequence
  LRRK2 RNA guide
uaccggcuggacauacauga

SEQ ID NO: 78153 - RNA, 20 nt, Artificial Sequence
  LRRK2 RNA guide
uauguccagccgguaacauu

SEQ ID NO: 78154 - RNA, 20 nt, Artificial Sequence
  LRRK2 RNA guide
uauucauguauguccagccg

SEQ ID NO: 78155 - RNA, 20 nt, Artificial Sequence
  LRRK2 RNA guide
ucagauauucauguaugucc

SEQ ID NO: 78156 - RNA, 20 nt, Artificial Sequence
  LRRK2 RNA guide
ucauguauguccagccggua

SEQ ID NO: 78157 - RNA, 20 nt, Artificial Sequence
  LRRK2 RNA guide
uccagccgguaacauuuuau

SEQ ID NO: 78158 - RNA, 20 nt, Artificial Sequence
  LRRK2 RNA guide
ucggguaaauaaaauguuac

SEQ ID NO: 78159 - RNA, 20 nt, Artificial Sequence
  LRRK2 RNA guide
ucuucggguaaauaaaaugu

SEQ ID NO: 78160 - RNA, 20 nt, Artificial Sequence
  LRRK2 RNA guide
uguauguccagccgguaaca

SEQ ID NO: 78161 - RNA, 20 nt, Artificial Sequence
  LRRK2 RNA guide
uguccagccgguaacauuuu

SEQ ID NO: 78162 - RNA, 20 nt, Artificial Sequence
  LRRK2 RNA guide
uguuaccggcuggacauaca

SEQ ID NO: 78163 - RNA, 20 nt, Artificial Sequence
  LRRK2 RNA guide
uuaccggcuggacauacaug

SEQ ID NO: 78164 - RNA, 20 nt, Artificial Sequence
  LRRK2 RNA guide
uucauguauguccagccggu

SEQ ID NO: 78165 - RNA, 21 nt, Artificial Sequence
  LRRK2 RNA guide
aaaauguuaccggcuggacau

SEQ ID NO: 78166 - RNA, 21 nt, Artificial Sequence
  LRRK2 RNA guide
aaauaaaauguuaccggcugg

SEQ ID NO: 78167 - RNA, 21 nt, Artificial Sequence
  LRRK2 RNA guide
aaauguuaccggcuggacaua

SEQ ID NO: 78168 - RNA, 21 nt, Artificial Sequence
  LRRK2 RNA guide
aauaaaauguuaccggcugga

SEQ ID NO: 78169 - RNA, 21 nt, Artificial Sequence
  LRRK2 RNA guide
aauguuaccggcuggacauac

SEQ ID NO: 78170 - RNA, 21 nt, Artificial Sequence
  LRRK2 RNA guide
accggcuggacauacaugaau

SEQ ID NO: 78171 - RNA, 21 nt, Artificial Sequence
  LRRK2 RNA guide
agauauucauguauguccagc

SEQ ID NO: 78172 - RNA, 21 nt, Artificial Sequence
  LRRK2 RNA guide
agccgguaacauuuuauuuac

SEQ ID NO: 78173 - RNA, 21 nt, Artificial Sequence
  LRRK2 RNA guide
agucuucggguaaauaaaaug

SEQ ID NO: 78174 - RNA, 21 nt, Artificial Sequence
  LRRK2 RNA guide
auaaaauguuaccggcuggac

SEQ ID NO: 78175 - RNA, 21 nt, Artificial Sequence
  LRRK2 RNA guide
auauucauguauguccagccg

SEQ ID NO: 78176 - RNA, 21 nt, Artificial Sequence
  LRRK2 RNA guide
aucagauauucauguaugucc

SEQ ID NO: 78177 - RNA, 21 nt, Artificial Sequence
  LRRK2 RNA guide
auguauguccagccgguaaca

SEQ ID NO: 78178 - RNA, 21 nt, Artificial Sequence
  LRRK2 RNA guide
auguccagccgguaacauuuu

SEQ ID NO: 78179 - RNA, 21 nt, Artificial Sequence
  LRRK2 RNA guide
auguuaccggcuggacauaca

SEQ ID NO: 78180 - RNA, 21 nt, Artificial Sequence
  LRRK2 RNA guide
auucauguauguccagccggu

SEQ ID NO: 78181 - RNA, 21 nt, Artificial Sequence
  LRRK2 RNA guide
cagauauucauguauguccag

SEQ ID NO: 78182 - RNA, 21 nt, Artificial Sequence
  LRRK2 RNA guide
cagccgguaacauuuuauuua

SEQ ID NO: 78183 - RNA, 21 nt, Artificial Sequence
  LRRK2 RNA guide
cauguauguccagccgguaac

SEQ ID NO: 78184 - RNA, 21 nt, Artificial Sequence
  LRRK2 RNA guide
ccagccgguaacauuuuauuu

SEQ ID NO: 78185 - RNA, 21 nt, Artificial Sequence
  LRRK2 RNA guide
ccggcuggacauacaugaaua

SEQ ID NO: 78186 - RNA, 21 nt, Artificial Sequence
  LRRK2 RNA guide
ccgguaacauuuuauuuaccc

SEQ ID NO: 78187 - RNA, 21 nt, Artificial Sequence
  LRRK2 RNA guide
cggguaaauaaaauguuaccg

SEQ ID NO: 78188 - RNA, 21 nt, Artificial Sequence
  LRRK2 RNA guide
cgguaacauuuuauuuacccg

SEQ ID NO: 78189 - RNA, 21 nt, Artificial Sequence
  LRRK2 RNA guide
gauauucauguauguccagcc

SEQ ID NO: 78190 - RNA, 21 nt, Artificial Sequence
  LRRK2 RNA guide
gccgguaacauuuuauuuacc

SEQ ID NO: 78191 - RNA, 21 nt, Artificial Sequence
  LRRK2 RNA guide
ggguaaauaaaauguuaccgg

SEQ ID NO: 78192 - RNA, 21 nt, Artificial Sequence
  LRRK2 RNA guide
gguaaauaaaauguuaccggc

SEQ ID NO: 78193 - RNA, 21 nt, Artificial Sequence
  LRRK2 RNA guide
guaaauaaaauguuaccggcu

SEQ ID NO: 78194 - RNA, 21 nt, Artificial Sequence
  LRRK2 RNA guide
guauguccagccgguaacauu

SEQ ID NO: 78195 - RNA, 21 nt, Artificial Sequence
  LRRK2 RNA guide
guccagccgguaacauuuuau

SEQ ID NO: 78196 - RNA, 21 nt, Artificial Sequence
  LRRK2 RNA guide
gucuucggguaaauaaaaugu

SEQ ID NO: 78197 - RNA, 21 nt, Artificial Sequence
  LRRK2 RNA guide
guuaccggcuggacauacaug

SEQ ID NO: 78198 - RNA, 21 nt, Artificial Sequence
  LRRK2 RNA guide
uaaaauguuaccggcuggaca

SEQ ID NO: 78199 - RNA, 21 nt, Artificial Sequence
  LRRK2 RNA guide
uaaauaaaauguuaccggcug

SEQ ID NO: 78200 - RNA, 21 nt, Artificial Sequence
  LRRK2 RNA guide
uaccggcuggacauacaugaa

SEQ ID NO: 78201 - RNA, 21 nt, Artificial Sequence
  LRRK2 RNA guide
uauguccagccgguaacauuu

SEQ ID NO: 78202 - RNA, 21 nt, Artificial Sequence
  LRRK2 RNA guide
uauucauguauguccagccgg

SEQ ID NO: 78203 - RNA, 21 nt, Artificial Sequence
  LRRK2 RNA guide
ucagauauucauguaugucca

SEQ ID NO: 78204 - RNA, 21 nt, Artificial Sequence
  LRRK2 RNA guide
ucauguauguccagccgguaa

SEQ ID NO: 78205 - RNA, 21 nt, Artificial Sequence
  LRRK2 RNA guide
uccagccgguaacauuuuauu

SEQ ID NO: 78206 - RNA, 21 nt, Artificial Sequence
  LRRK2 RNA guide
ucggguaaauaaaauguuacc

SEQ ID NO: 78207 - RNA, 21 nt, Artificial Sequence
  LRRK2 RNA guide
uguauguccagccgguaacau

SEQ ID NO: 78208 - RNA, 21 nt, Artificial Sequence
  LRRK2 RNA guide
uguccagccgguaacauuuua

SEQ ID NO: 78209 - RNA, 21 nt, Artificial Sequence
  LRRK2 RNA guide
uguuaccggcuggacauacau

SEQ ID NO: 78210 - RNA, 21 nt, Artificial Sequence
  LRRK2 RNA guide
uuaccggcuggacauacauga

SEQ ID NO: 78211 - RNA, 21 nt, Artificial Sequence
  LRRK2 RNA guide
uucauguauguccagccggua

SEQ ID NO: 78212 - RNA, 22 nt, Artificial Sequence
  LRRK2 RNA guide
aaaauguuaccggcuggacaua

SEQ ID NO: 78213 - RNA, 22 nt, Artificial Sequence
  LRRK2 RNA guide
aaauaaaauguuaccggcugga

SEQ ID NO: 78214 - RNA, 22 nt, Artificial Sequence
  LRRK2 RNA guide
aaauguuaccggcuggacauac

SEQ ID NO: 78215 - RNA, 22 nt, Artificial Sequence
  LRRK2 RNA guide
aauaaaauguuaccggcuggac

SEQ ID NO: 78216 - RNA, 22 nt, Artificial Sequence
  LRRK2 RNA guide
aauguuaccggcuggacauaca

SEQ ID NO: 78217 - RNA, 22 nt, Artificial Sequence
  LRRK2 RNA guide
accggcuggacauacaugaaua

SEQ ID NO: 78218 - RNA, 22 nt, Artificial Sequence
  LRRK2 RNA guide
agauauucauguauguccagcc

SEQ ID NO: 78219 - RNA, 22 nt, Artificial Sequence
  LRRK2 RNA guide
agccgguaacauuuuauuuacc

SEQ ID NO: 78220 - RNA, 22 nt, Artificial Sequence
  LRRK2 RNA guide
agucuucggguaaauaaaaugu

SEQ ID NO: 78221 - RNA, 22 nt, Artificial Sequence
  LRRK2 RNA guide
auaaaauguuaccggcuggaca

SEQ ID NO: 78222 - RNA, 22 nt, Artificial Sequence
  LRRK2 RNA guide
auauucauguauguccagccgg

SEQ ID NO: 78223 - RNA, 22 nt, Artificial Sequence
  LRRK2 RNA guide
aucagauauucauguaugucca

SEQ ID NO: 78224 - RNA, 22 nt, Artificial Sequence
  LRRK2 RNA guide
auguauguccagccgguaacau

SEQ ID NO: 78225 - RNA, 22 nt, Artificial Sequence
  LRRK2 RNA guide
auguccagccgguaacauuuua

SEQ ID NO: 78226 - RNA, 22 nt, Artificial Sequence
  LRRK2 RNA guide
auguuaccggcuggacauacau

SEQ ID NO: 78227 - RNA, 22 nt, Artificial Sequence
  LRRK2 RNA guide
auucauguauguccagccggua

SEQ ID NO: 78228 - RNA, 22 nt, Artificial Sequence
  LRRK2 RNA guide
cagauauucauguauguccagc

SEQ ID NO: 78229 - RNA, 22 nt, Artificial Sequence
  LRRK2 RNA guide
cagccgguaacauuuuauuuac

SEQ ID NO: 78230 - RNA, 22 nt, Artificial Sequence
  LRRK2 RNA guide
caucagauauucauguaugucc

SEQ ID NO: 78231 - RNA, 22 nt, Artificial Sequence
  LRRK2 RNA guide
cauguauguccagccgguaaca

SEQ ID NO: 78232 - RNA, 22 nt, Artificial Sequence
  LRRK2 RNA guide
ccagccgguaacauuuuauuua

SEQ ID NO: 78233 - RNA, 22 nt, Artificial Sequence
  LRRK2 RNA guide
ccggcuggacauacaugaauau

SEQ ID NO: 78234 - RNA, 22 nt, Artificial Sequence
  LRRK2 RNA guide
ccgguaacauuuuauuuacccg

SEQ ID NO: 78235 - RNA, 22 nt, Artificial Sequence
  LRRK2 RNA guide
cggguaaauaaaauguuaccgg

SEQ ID NO: 78236 - RNA, 22 nt, Artificial Sequence
  LRRK2 RNA guide
cgguaacauuuuauuuacccga

SEQ ID NO: 78237 - RNA, 22 nt, Artificial Sequence
  LRRK2 RNA guide
cuucggguaaauaaaauguuac

SEQ ID NO: 78238 - RNA, 22 nt, Artificial Sequence
  LRRK2 RNA guide
gauauucauguauguccagccg

SEQ ID NO: 78239 - RNA, 22 nt, Artificial Sequence
  LRRK2 RNA guide
gccgguaacauuuuauuuaccc

SEQ ID NO: 78240 - RNA, 22 nt, Artificial Sequence
  LRRK2 RNA guide
ggguaaauaaaauguuaccggc

SEQ ID NO: 78241 - RNA, 22 nt, Artificial Sequence
  LRRK2 RNA guide
gguaaauaaaauguuaccggcu

SEQ ID NO: 78242 - RNA, 22 nt, Artificial Sequence
  LRRK2 RNA guide
guaaauaaaauguuaccggcug

SEQ ID NO: 78243 - RNA, 22 nt, Artificial Sequence
  LRRK2 RNA guide
guauguccagccgguaacauuu

SEQ ID NO: 78244 - RNA, 22 nt, Artificial Sequence
  LRRK2 RNA guide
guccagccgguaacauuuuauu

SEQ ID NO: 78245 - RNA, 22 nt, Artificial Sequence
  LRRK2 RNA guide
gucuucggguaaauaaaauguu

SEQ ID NO: 78246 - RNA, 22 nt, Artificial Sequence
  LRRK2 RNA guide
guuaccggcuggacauacauga

SEQ ID NO: 78247 - RNA, 22 nt, Artificial Sequence
  LRRK2 RNA guide
uaaaauguuaccggcuggacau

SEQ ID NO: 78248 - RNA, 22 nt, Artificial Sequence
  LRRK2 RNA guide
uaaauaaaauguuaccggcugg

SEQ ID NO: 78249 - RNA, 22 nt, Artificial Sequence
  LRRK2 RNA guide
uaccggcuggacauacaugaau

SEQ ID NO: 78250 - RNA, 22 nt, Artificial Sequence
  LRRK2 RNA guide
uagucuucggguaaauaaaaug

SEQ ID NO: 78251 - RNA, 22 nt, Artificial Sequence
  LRRK2 RNA guide
uauguccagccgguaacauuuu

SEQ ID NO: 78252 - RNA, 22 nt, Artificial Sequence
  LRRK2 RNA guide
uauucauguauguccagccggu

SEQ ID NO: 78253 - RNA, 22 nt, Artificial Sequence
  LRRK2 RNA guide
ucagauauucauguauguccag

SEQ ID NO: 78254 - RNA, 22 nt, Artificial Sequence
  LRRK2 RNA guide
ucauguauguccagccgguaac

SEQ ID NO: 78255 - RNA, 22 nt, Artificial Sequence
  LRRK2 RNA guide
uccagccgguaacauuuuauuu

SEQ ID NO: 78256 - RNA, 22 nt, Artificial Sequence
  LRRK2 RNA guide
ucggguaaauaaaauguuaccg

SEQ ID NO: 78257 - RNA, 22 nt, Artificial Sequence
  LRRK2 RNA guide
uguauguccagccgguaacauu

SEQ ID NO: 78258 - RNA, 22 nt, Artificial Sequence
  LRRK2 RNA guide
uguccagccgguaacauuuuau

SEQ ID NO: 78259 - RNA, 22 nt, Artificial Sequence
  LRRK2 RNA guide
uguuaccggcuggacauacaug

SEQ ID NO: 78260 - RNA, 22 nt, Artificial Sequence
  LRRK2 RNA guide
uuaccggcuggacauacaugaa

SEQ ID NO: 78261 - RNA, 22 nt, Artificial Sequence
  LRRK2 RNA guide
uucauguauguccagccgguaa

SEQ ID NO: 78262 - RNA, 22 nt, Artificial Sequence
  LRRK2 RNA guide
uucggguaaauaaaauguuacc

SEQ ID NO: 78263 - RNA, 20 nt, Artificial Sequence
  LRRK2 RNA guide
aaaauguuacuggcuggaca

SEQ ID NO: 78264 - RNA, 20 nt, Artificial Sequence
  LRRK2 RNA guide
aaauaaaauguuacuggcug

SEQ ID NO: 78265 - RNA, 20 nt, Artificial Sequence
  LRRK2 RNA guide
aaauguuacuggcuggacau

SEQ ID NO: 78266 - RNA, 20 nt, Artificial Sequence
  LRRK2 RNA guide
aauaaaauguuacuggcugg

SEQ ID NO: 78267 - RNA, 20 nt, Artificial Sequence
  LRRK2 RNA guide
aauguuacuggcuggacaua

SEQ ID NO: 78268 - RNA, 20 nt, Artificial Sequence
  LRRK2 RNA guide
acuggcuggacauacaugaa

SEQ ID NO: 78269 - RNA, 20 nt, Artificial Sequence
  LRRK2 RNA guide
auaaaauguuacuggcugga

SEQ ID NO: 78270 - RNA, 20 nt, Artificial Sequence
  LRRK2 RNA guide
auguauguccagccaguaac

SEQ ID NO: 78271 - RNA, 20 nt, Artificial Sequence
  LRRK2 RNA guide
auguccagccaguaacauuu

SEQ ID NO: 78272 - RNA, 20 nt, Artificial Sequence
  LRRK2 RNA guide
auguuacuggcuggacauac

SEQ ID NO: 78273 - RNA, 20 nt, Artificial Sequence
  LRRK2 RNA guide
auucauguauguccagccag

SEQ ID NO: 78274 - RNA, 20 nt, Artificial Sequence
  LRRK2 RNA guide
cagccaguaacauuuuauuu

SEQ ID NO: 78275 - RNA, 20 nt, Artificial Sequence
  LRRK2 RNA guide
caguaacauuuuauuuaccc

SEQ ID NO: 78276 - RNA, 20 nt, Artificial Sequence
  LRRK2 RNA guide
cauguauguccagccaguaa

SEQ ID NO: 78277 - RNA, 20 nt, Artificial Sequence
  LRRK2 RNA guide
ccagccaguaacauuuuauu

SEQ ID NO: 78278 - RNA, 20 nt, Artificial Sequence
  LRRK2 RNA guide
ccaguaacauuuuauuuacc

SEQ ID NO: 78279 - RNA, 20 nt, Artificial Sequence
  LRRK2 RNA guide
cggguaaauaaaauguuacu

SEQ ID NO: 78280 - RNA, 20 nt, Artificial Sequence
  LRRK2 RNA guide
cuggcuggacauacaugaau

SEQ ID NO: 78281 - RNA, 20 nt, Artificial Sequence
  LRRK2 RNA guide
gccaguaacauuuuauuuac

SEQ ID NO: 78282 - RNA, 20 nt, Artificial Sequence
  LRRK2 RNA guide
ggguaaauaaaauguuacug

SEQ ID NO: 78283 - RNA, 20 nt, Artificial Sequence
  LRRK2 RNA guide
gguaaauaaaauguuacugg

SEQ ID NO: 78284 - RNA, 20 nt, Artificial Sequence
  LRRK2 RNA guide
guaaauaaaauguuacuggc

SEQ ID NO: 78285 - RNA, 20 nt, Artificial Sequence
  LRRK2 RNA guide
guauguccagccaguaacau

SEQ ID NO: 78286 - RNA, 20 nt, Artificial Sequence
  LRRK2 RNA guide
guccagccaguaacauuuua

SEQ ID NO: 78287 - RNA, 20 nt, Artificial Sequence
  LRRK2 RNA guide
guuacuggcuggacauacau

SEQ ID NO: 78288 - RNA, 20 nt, Artificial Sequence
  LRRK2 RNA guide
uaaaauguuacuggcuggac

SEQ ID NO: 78289 - RNA, 20 nt, Artificial Sequence
  LRRK2 RNA guide
uacuggcuggacauacauga

SEQ ID NO: 78290 - RNA, 20 nt, Artificial Sequence
  LRRK2 RNA guide
uauguccagccaguaacauu

SEQ ID NO: 78291 - RNA, 20 nt, Artificial Sequence
  LRRK2 RNA guide
uauucauguauguccagcca

SEQ ID NO: 78292 - RNA, 20 nt, Artificial Sequence
  LRRK2 RNA guide
ucauguauguccagccagua

SEQ ID NO: 78293 - RNA, 20 nt, Artificial Sequence
  LRRK2 RNA guide
uccagccaguaacauuuuau

SEQ ID NO: 78294 - RNA, 20 nt, Artificial Sequence
  LRRK2 RNA guide
uguauguccagccaguaaca

SEQ ID NO: 78295 - RNA, 20 nt, Artificial Sequence
  LRRK2 RNA guide
uguccagccaguaacauuuu

SEQ ID NO: 78296 - RNA, 20 nt, Artificial Sequence
  LRRK2 RNA guide
uguuacuggcuggacauaca

SEQ ID NO: 78297 - RNA, 20 nt, Artificial Sequence
  LRRK2 RNA guide
uuacuggcuggacauacaug

SEQ ID NO: 78298 - RNA, 20 nt, Artificial Sequence
  LRRK2 RNA guide
uucauguauguccagccagu

SEQ ID NO: 78299 - RNA, 21 nt, Artificial Sequence
  LRRK2 RNA guide
aaaauguuacuggcuggacau

SEQ ID NO: 78300 - RNA, 21 nt, Artificial Sequence
  LRRK2 RNA guide
aaauaaaauguuacuggcugg

SEQ ID NO: 78301 - RNA, 21 nt, Artificial Sequence
  LRRK2 RNA guide
aaauguuacuggcuggacaua

SEQ ID NO: 78302 - RNA, 21 nt, Artificial Sequence
  LRRK2 RNA guide
aauaaaauguuacuggcugga

SEQ ID NO: 78303 - RNA, 21 nt, Artificial Sequence
  LRRK2 RNA guide
aauguuacuggcuggacauac

SEQ ID NO: 78304 - RNA, 21 nt, Artificial Sequence
  LRRK2 RNA guide
acuggcuggacauacaugaau

SEQ ID NO: 78305 - RNA, 21 nt, Artificial Sequence
  LRRK2 RNA guide
auaaaauguuacuggcuggac

SEQ ID NO: 78306 - RNA, 21 nt, Artificial Sequence
  LRRK2 RNA guide
auauucauguauguccagcca

SEQ ID NO: 78307 - RNA, 21 nt, Artificial Sequence
  LRRK2 RNA guide
auguauguccagccaguaaca

SEQ ID NO: 78308 - RNA, 21 nt, Artificial Sequence
  LRRK2 RNA guide
auguccagccaguaacauuuu

SEQ ID NO: 78309 - RNA, 21 nt, Artificial Sequence
  LRRK2 RNA guide
auguuacuggcuggacauaca

SEQ ID NO: 78310 - RNA, 21 nt, Artificial Sequence
  LRRK2 RNA guide
auucauguauguccagccagu

SEQ ID NO: 78311 - RNA, 21 nt, Artificial Sequence
  LRRK2 RNA guide
caguaacauuuuauuuacccg

SEQ ID NO: 78312 - RNA, 21 nt, Artificial Sequence
  LRRK2 RNA guide
cauguauguccagccaguaac

SEQ ID NO: 78313 - RNA, 21 nt, Artificial Sequence
  LRRK2 RNA guide
ccagccaguaacauuuuauuu

SEQ ID NO: 78314 - RNA, 21 nt, Artificial Sequence
  LRRK2 RNA guide
ccaguaacauuuuauuuaccc

SEQ ID NO: 78315 - RNA, 21 nt, Artificial Sequence
  LRRK2 RNA guide
cggguaaauaaaauguuacug

SEQ ID NO: 78316 - RNA, 21 nt, Artificial Sequence
  LRRK2 RNA guide
cuggcuggacauacaugaaua

SEQ ID NO: 78317 - RNA, 21 nt, Artificial Sequence
  LRRK2 RNA guide
gccaguaacauuuuauuuacc

SEQ ID NO: 78318 - RNA, 21 nt, Artificial Sequence
  LRRK2 RNA guide
ggguaaauaaaauguuacugg

SEQ ID NO: 78319 - RNA, 21 nt, Artificial Sequence
  LRRK2 RNA guide
gguaaauaaaauguuacuggc

SEQ ID NO: 78320 - RNA, 21 nt, Artificial Sequence
  LRRK2 RNA guide
guauguccagccaguaacauu

SEQ ID NO: 78321 - RNA, 21 nt, Artificial Sequence
  LRRK2 RNA guide
guccagccaguaacauuuuau

SEQ ID NO: 78322 - RNA, 21 nt, Artificial Sequence
  LRRK2 RNA guide
guuacuggcuggacauacaug

SEQ ID NO: 78323 - RNA, 21 nt, Artificial Sequence
  LRRK2 RNA guide
uaaaauguuacuggcuggaca

SEQ ID NO: 78324 - RNA, 21 nt, Artificial Sequence
  LRRK2 RNA guide
uacuggcuggacauacaugaa

SEQ ID NO: 78325 - RNA, 21 nt, Artificial Sequence
  LRRK2 RNA guide
uauguccagccaguaacauuu

SEQ ID NO: 78326 - RNA, 21 nt, Artificial Sequence
  LRRK2 RNA guide
uauucauguauguccagccag

SEQ ID NO: 78327 - RNA, 21 nt, Artificial Sequence
  LRRK2 RNA guide
ucauguauguccagccaguaa

SEQ ID NO: 78328 - RNA, 21 nt, Artificial Sequence
  LRRK2 RNA guide
uccagccaguaacauuuuauu

SEQ ID NO: 78329 - RNA, 21 nt, Artificial Sequence
  LRRK2 RNA guide
uguauguccagccaguaacau

SEQ ID NO: 78330 - RNA, 21 nt, Artificial Sequence
  LRRK2 RNA guide
uguccagccaguaacauuuua

SEQ ID NO: 78331 - RNA, 21 nt, Artificial Sequence
  LRRK2 RNA guide
uguuacuggcuggacauacau

SEQ ID NO: 78332 - RNA, 21 nt, Artificial Sequence
  LRRK2 RNA guide
uuacuggcuggacauacauga

SEQ ID NO: 78333 - RNA, 21 nt, Artificial Sequence
  LRRK2 RNA guide
uucauguauguccagccagua

SEQ ID NO: 78334 - RNA, 22 nt, Artificial Sequence
  LRRK2 RNA guide
aaaauguuacuggcuggacaua

SEQ ID NO: 78335 - RNA, 22 nt, Artificial Sequence
  LRRK2 RNA guide
aaauaaaauguuacuggcugga

SEQ ID NO: 78336 - RNA, 22 nt, Artificial Sequence
  LRRK2 RNA guide
aaauguuacuggcuggacauac

SEQ ID NO: 78337 - RNA, 22 nt, Artificial Sequence
  LRRK2 RNA guide
aauaaaauguuacuggcuggac

SEQ ID NO: 78338 - RNA, 22 nt, Artificial Sequence
  LRRK2 RNA guide
aauguuacuggcuggacauaca

SEQ ID NO: 78339 - RNA, 22 nt, Artificial Sequence
  LRRK2 RNA guide
acuggcuggacauacaugaaua

SEQ ID NO: 78340 - RNA, 22 nt, Artificial Sequence
  LRRK2 RNA guide
agccaguaacauuuuauuuacc

SEQ ID NO: 78341 - RNA, 22 nt, Artificial Sequence
  LRRK2 RNA guide
auaaaauguuacuggcuggaca

SEQ ID NO: 78342 - RNA, 22 nt, Artificial Sequence
  LRRK2 RNA guide
auauucauguauguccagccag

SEQ ID NO: 78343 - RNA, 22 nt, Artificial Sequence
  LRRK2 RNA guide
auguauguccagccaguaacau

SEQ ID NO: 78344 - RNA, 22 nt, Artificial Sequence
  LRRK2 RNA guide
auguccagccaguaacauuuua

SEQ ID NO: 78345 - RNA, 22 nt, Artificial Sequence
  LRRK2 RNA guide
auguuacuggcuggacauacau

SEQ ID NO: 78346 - RNA, 22 nt, Artificial Sequence
  LRRK2 RNA guide
auucauguauguccagccagua

SEQ ID NO: 78347 - RNA, 22 nt, Artificial Sequence
  LRRK2 RNA guide
cagccaguaacauuuuauuuac

SEQ ID NO: 78348 - RNA, 22 nt, Artificial Sequence
  LRRK2 RNA guide
caguaacauuuuauuuacccga

SEQ ID NO: 78349 - RNA, 22 nt, Artificial Sequence
  LRRK2 RNA guide
cauguauguccagccaguaaca

SEQ ID NO: 78350 - RNA, 22 nt, Artificial Sequence
  LRRK2 RNA guide
ccagccaguaacauuuuauuua

SEQ ID NO: 78351 - RNA, 22 nt, Artificial Sequence
  LRRK2 RNA guide
ccaguaacauuuuauuuacccg

SEQ ID NO: 78352 - RNA, 22 nt, Artificial Sequence
  LRRK2 RNA guide
cggguaaauaaaauguuacugg

SEQ ID NO: 78353 - RNA, 22 nt, Artificial Sequence
  LRRK2 RNA guide
cuggcuggacauacaugaauau

SEQ ID NO: 78354 - RNA, 22 nt, Artificial Sequence
  LRRK2 RNA guide
gauauucauguauguccagcca

SEQ ID NO: 78355 - RNA, 22 nt, Artificial Sequence
  LRRK2 RNA guide
gccaguaacauuuuauuuaccc

SEQ ID NO: 78356 - RNA, 22 nt, Artificial Sequence
  LRRK2 RNA guide
ggguaaauaaaauguuacuggc

SEQ ID NO: 78357 - RNA, 22 nt, Artificial Sequence
  LRRK2 RNA guide
gguaaauaaaauguuacuggcu

SEQ ID NO: 78358 - RNA, 22 nt, Artificial Sequence
  LRRK2 RNA guide
guaaauaaaauguuacuggcug

SEQ ID NO: 78359 - RNA, 22 nt, Artificial Sequence
  LRRK2 RNA guide
guauguccagccaguaacauuu

SEQ ID NO: 78360 - RNA, 22 nt, Artificial Sequence
  LRRK2 RNA guide
guccagccaguaacauuuuauu

SEQ ID NO: 78361 - RNA, 22 nt, Artificial Sequence
  LRRK2 RNA guide
guuacuggcuggacauacauga

SEQ ID NO: 78362 - RNA, 22 nt, Artificial Sequence
  LRRK2 RNA guide
uaaaauguuacuggcuggacau

SEQ ID NO: 78363 - RNA, 22 nt, Artificial Sequence
  LRRK2 RNA guide
uaaauaaaauguuacuggcugg

SEQ ID NO: 78364 - RNA, 22 nt, Artificial Sequence
  LRRK2 RNA guide
uacuggcuggacauacaugaau

SEQ ID NO: 78365 - RNA, 22 nt, Artificial Sequence
  LRRK2 RNA guide
uauguccagccaguaacauuuu

SEQ ID NO: 78366 - RNA, 22 nt, Artificial Sequence
  LRRK2 RNA guide
uauucauguauguccagccagu

SEQ ID NO: 78367 - RNA, 22 nt, Artificial Sequence
  LRRK2 RNA guide
ucauguauguccagccaguaac

SEQ ID NO: 78368 - RNA, 22 nt, Artificial Sequence
  LRRK2 RNA guide
uccagccaguaacauuuuauuu

SEQ ID NO: 78369 - RNA, 22 nt, Artificial Sequence
  LRRK2 RNA guide
ucggguaaauaaaauguuacug

SEQ ID NO: 78370 - RNA, 22 nt, Artificial Sequence
  LRRK2 RNA guide
uguauguccagccaguaacauu

SEQ ID NO: 78371 - RNA, 22 nt, Artificial Sequence
  LRRK2 RNA guide
uguccagccaguaacauuuuau

SEQ ID NO: 78372 - RNA, 22 nt, Artificial Sequence
  LRRK2 RNA guide
uguuacuggcuggacauacaug

SEQ ID NO: 78373 - RNA, 22 nt, Artificial Sequence
  LRRK2 RNA guide
uuacuggcuggacauacaugaa

SEQ ID NO: 78374 - RNA, 22 nt, Artificial Sequence
  LRRK2 RNA guide
uucauguauguccagccaguaa

SEQ ID NO: 78375 - RNA, 20 nt, Artificial Sequence
  LRRK2 RNA guide
aaaaggagaagauuagaagu

SEQ ID NO: 78376 - RNA, 20 nt, Artificial Sequence
  LRRK2 RNA guide
aaacuucuaaucuucuccuu

SEQ ID NO: 78377 - RNA, 20 nt, Artificial Sequence
  LRRK2 RNA guide
aaaggagaagauuagaaguu

SEQ ID NO: 78378 - RNA, 20 nt, Artificial Sequence
  LRRK2 RNA guide
aacuucuaaucuucuccuuu

SEQ ID NO: 78379 - RNA, 20 nt, Artificial Sequence
  LRRK2 RNA guide
aaggagaagauuagaaguuu

SEQ ID NO: 78380 - RNA, 20 nt, Artificial Sequence
  LRRK2 RNA guide
aaucuucuccuuuucaaagu

SEQ ID NO: 78381 - RNA, 20 nt, Artificial Sequence
  LRRK2 RNA guide
acuucuaaucuucuccuuuu

SEQ ID NO: 78382 - RNA, 20 nt, Artificial Sequence
  LRRK2 RNA guide
acuuugaaaaggagaagauu

SEQ ID NO: 78383 - RNA, 20 nt, Artificial Sequence
  LRRK2 RNA guide
aggagaagauuagaaguuua

SEQ ID NO: 78384 - RNA, 20 nt, Artificial Sequence
  LRRK2 RNA guide
aucuucuccuuuucaaagua

SEQ ID NO: 78385 - RNA, 20 nt, Artificial Sequence
  LRRK2 RNA guide
cuaaucuucuccuuuucaaa

SEQ ID NO: 78386 - RNA, 20 nt, Artificial Sequence
  LRRK2 RNA guide
cuucuaaucuucuccuuuuc

SEQ ID NO: 78387 - RNA, 20 nt, Artificial Sequence
  LRRK2 RNA guide
cuucuccuuuucaaaguaaa

SEQ ID NO: 78388 - RNA, 20 nt, Artificial Sequence
  LRRK2 RNA guide
cuuugaaaaggagaagauua

SEQ ID NO: 78389 - RNA, 20 nt, Artificial Sequence
  LRRK2 RNA guide
gaaaaggagaagauuagaag

SEQ ID NO: 78390 - RNA, 20 nt, Artificial Sequence
  LRRK2 RNA guide
ggagaagauuagaaguuuaa

SEQ ID NO: 78391 - RNA, 20 nt, Artificial Sequence
  LRRK2 RNA guide
uaaacuucuaaucuucuccu

SEQ ID NO: 78392 - RNA, 20 nt, Artificial Sequence
  LRRK2 RNA guide
uaaucuucuccuuuucaaag

SEQ ID NO: 78393 - RNA, 20 nt, Artificial Sequence
  LRRK2 RNA guide
uacuuugaaaaggagaagau

SEQ ID NO: 78394 - RNA, 20 nt, Artificial Sequence
  LRRK2 RNA guide
ucuaaucuucuccuuuucaa

SEQ ID NO: 78395 - RNA, 20 nt, Artificial Sequence
  LRRK2 RNA guide
ucuucuccuuuucaaaguaa

SEQ ID NO: 78396 - RNA, 20 nt, Artificial Sequence
  LRRK2 RNA guide
ugaaaaggagaagauuagaa

SEQ ID NO: 78397 - RNA, 20 nt, Artificial Sequence
  LRRK2 RNA guide
uuaaacuucuaaucuucucc

SEQ ID NO: 78398 - RNA, 20 nt, Artificial Sequence
  LRRK2 RNA guide
uuacuuugaaaaggagaaga

SEQ ID NO: 78399 - RNA, 20 nt, Artificial Sequence
  LRRK2 RNA guide
uucuaaucuucuccuuuuca

SEQ ID NO: 78400 - RNA, 20 nt, Artificial Sequence
  LRRK2 RNA guide
uugaaaaggagaagauuaga

SEQ ID NO: 78401 - RNA, 20 nt, Artificial Sequence
  LRRK2 RNA guide
uuuacuuugaaaaggagaag

SEQ ID NO: 78402 - RNA, 20 nt, Artificial Sequence
  LRRK2 RNA guide
uuugaaaaggagaagauuag

SEQ ID NO: 78403 - RNA, 21 nt, Artificial Sequence
  LRRK2 RNA guide
acuucuaaucuucuccuuuuc

SEQ ID NO: 78404 - RNA, 21 nt, Artificial Sequence
  LRRK2 RNA guide
cuaaucuucuccuuuucaaag

SEQ ID NO: 78405 - RNA, 21 nt, Artificial Sequence
  LRRK2 RNA guide
cuucuaaucuucuccuuuuca

SEQ ID NO: 78406 - RNA, 21 nt, Artificial Sequence
  LRRK2 RNA guide
cuuugaaaaggagaagauuag

SEQ ID NO: 78407 - RNA, 21 nt, Artificial Sequence
  LRRK2 RNA guide
gaaaaggagaagauuagaagu

SEQ ID NO: 78408 - RNA, 21 nt, Artificial Sequence
  LRRK2 RNA guide
ugaaaaggagaagauuagaag

SEQ ID NO: 78409 - RNA, 22 nt, Artificial Sequence
  LRRK2 RNA guide
aacuucuaaucuucuccuuuuc

SEQ ID NO: 78410 - RNA, 22 nt, Artificial Sequence
  LRRK2 RNA guide
acuucuaaucuucuccuuuuca

SEQ ID NO: 78411 - RNA, 22 nt, Artificial Sequence
  LRRK2 RNA guide
acuuugaaaaggagaagauuag

SEQ ID NO: 78412 - RNA, 22 nt, Artificial Sequence
  LRRK2 RNA guide
cuaaucuucuccuuuucaaagu

SEQ ID NO: 78413 - RNA, 22 nt, Artificial Sequence
  LRRK2 RNA guide
cuucuaaucuucuccuuuucaa

SEQ ID NO: 78414 - RNA, 22 nt, Artificial Sequence
  LRRK2 RNA guide
cuuugaaaaggagaagauuaga

SEQ ID NO: 78415 - RNA, 22 nt, Artificial Sequence
  LRRK2 RNA guide
gaaaaggagaagauuagaaguu

SEQ ID NO: 78416 - RNA, 22 nt, Artificial Sequence
  LRRK2 RNA guide
ucuaaucuucuccuuuucaaag

SEQ ID NO: 78417 - RNA, 22 nt, Artificial Sequence
  LRRK2 RNA guide
ugaaaaggagaagauuagaagu

SEQ ID NO: 78418 - RNA, 22 nt, Artificial Sequence
  LRRK2 RNA guide
uugaaaaggagaagauuagaag

SEQ ID NO: 78419 - RNA, 20 nt, Artificial Sequence
  LRRK2 RNA guide
aaaaggggaagauuagaagu

SEQ ID NO: 78420 - RNA, 20 nt, Artificial Sequence
  LRRK2 RNA guide
aaacuucuaaucuuccccuu

SEQ ID NO: 78421 - RNA, 20 nt, Artificial Sequence
  LRRK2 RNA guide
aaaggggaagauuagaaguu

SEQ ID NO: 78422 - RNA, 20 nt, Artificial Sequence
  LRRK2 RNA guide
aacuucuaaucuuccccuuu

SEQ ID NO: 78423 - RNA, 20 nt, Artificial Sequence
  LRRK2 RNA guide
aaggggaagauuagaaguuu

SEQ ID NO: 78424 - RNA, 20 nt, Artificial Sequence
  LRRK2 RNA guide
aaucuuccccuuuucaaagu

SEQ ID NO: 78425 - RNA, 20 nt, Artificial Sequence
  LRRK2 RNA guide
acuucuaaucuuccccuuuu

SEQ ID NO: 78426 - RNA, 20 nt, Artificial Sequence
  LRRK2 RNA guide
acuuugaaaaggggaagauu

SEQ ID NO: 78427 - RNA, 20 nt, Artificial Sequence
  LRRK2 RNA guide
aggggaagauuagaaguuua

SEQ ID NO: 78428 - RNA, 20 nt, Artificial Sequence
  LRRK2 RNA guide
auauuuacuuugaaaagggg

SEQ ID NO: 78429 - RNA, 20 nt, Artificial Sequence
  LRRK2 RNA guide
aucuuccccuuuucaaagua

SEQ ID NO: 78430 - RNA, 20 nt, Artificial Sequence
  LRRK2 RNA guide
auuuacuuugaaaaggggaa

SEQ ID NO: 78431 - RNA, 20 nt, Artificial Sequence
  LRRK2 RNA guide
ccccuuuucaaaguaaauau

SEQ ID NO: 78432 - RNA, 20 nt, Artificial Sequence
  LRRK2 RNA guide
cuaaucuuccccuuuucaaa

SEQ ID NO: 78433 - RNA, 20 nt, Artificial Sequence
  LRRK2 RNA guide
cuuccccuuuucaaaguaaa

SEQ ID NO: 78434 - RNA, 20 nt, Artificial Sequence
  LRRK2 RNA guide
cuucuaaucuuccccuuuuc

SEQ ID NO: 78435 - RNA, 20 nt, Artificial Sequence
  LRRK2 RNA guide
cuuugaaaaggggaagauua

SEQ ID NO: 78436 - RNA, 20 nt, Artificial Sequence
  LRRK2 RNA guide
gaaaaggggaagauuagaag

SEQ ID NO: 78437 - RNA, 20 nt, Artificial Sequence
  LRRK2 RNA guide
gauauuuacuuugaaaaggg

SEQ ID NO: 78438 - RNA, 20 nt, Artificial Sequence
  LRRK2 RNA guide
gggaagauuagaaguuuaaa

SEQ ID NO: 78439 - RNA, 20 nt, Artificial Sequence
  LRRK2 RNA guide
ggggaagauuagaaguuuaa

SEQ ID NO: 78440 - RNA, 20 nt, Artificial Sequence
  LRRK2 RNA guide
uaaacuucuaaucuuccccu

SEQ ID NO: 78441 - RNA, 20 nt, Artificial Sequence
  LRRK2 RNA guide
uaaucuuccccuuuucaaag

SEQ ID NO: 78442 - RNA, 20 nt, Artificial Sequence
  LRRK2 RNA guide
uacuuugaaaaggggaagau

SEQ ID NO: 78443 - RNA, 20 nt, Artificial Sequence
  LRRK2 RNA guide
uauuuacuuugaaaagggga

SEQ ID NO: 78444 - RNA, 20 nt, Artificial Sequence
  LRRK2 RNA guide
uccccuuuucaaaguaaaua

SEQ ID NO: 78445 - RNA, 20 nt, Artificial Sequence
  LRRK2 RNA guide
ucuaaucuuccccuuuucaa

SEQ ID NO: 78446 - RNA, 20 nt, Artificial Sequence
  LRRK2 RNA guide
ucuuccccuuuucaaaguaa

SEQ ID NO: 78447 - RNA, 20 nt, Artificial Sequence
  LRRK2 RNA guide
ugaaaaggggaagauuagaa

SEQ ID NO: 78448 - RNA, 20 nt, Artificial Sequence
  LRRK2 RNA guide
uuaaacuucuaaucuucccc

SEQ ID NO: 78449 - RNA, 20 nt, Artificial Sequence
  LRRK2 RNA guide
uuacuuugaaaaggggaaga

SEQ ID NO: 78450 - RNA, 20 nt, Artificial Sequence
  LRRK2 RNA guide
uuccccuuuucaaaguaaau

SEQ ID NO: 78451 - RNA, 20 nt, Artificial Sequence
  LRRK2 RNA guide
uucuaaucuuccccuuuuca

SEQ ID NO: 78452 - RNA, 20 nt, Artificial Sequence
  LRRK2 RNA guide
uugaaaaggggaagauuaga

SEQ ID NO: 78453 - RNA, 20 nt, Artificial Sequence
  LRRK2 RNA guide
uuuaaacuucuaaucuuccc

SEQ ID NO: 78454 - RNA, 20 nt, Artificial Sequence
  LRRK2 RNA guide
uuuacuuugaaaaggggaag

SEQ ID NO: 78455 - RNA, 20 nt, Artificial Sequence
  LRRK2 RNA guide
uuugaaaaggggaagauuag

SEQ ID NO: 78456 - RNA, 21 nt, Artificial Sequence
  LRRK2 RNA guide
aaaaggggaagauuagaaguu

SEQ ID NO: 78457 - RNA, 21 nt, Artificial Sequence
  LRRK2 RNA guide
aaacuucuaaucuuccccuuu

SEQ ID NO: 78458 - RNA, 21 nt, Artificial Sequence
  LRRK2 RNA guide
aaaggggaagauuagaaguuu

SEQ ID NO: 78459 - RNA, 21 nt, Artificial Sequence
  LRRK2 RNA guide
aacuucuaaucuuccccuuuu

SEQ ID NO: 78460 - RNA, 21 nt, Artificial Sequence
  LRRK2 RNA guide
aaggggaagauuagaaguuua

SEQ ID NO: 78461 - RNA, 21 nt, Artificial Sequence
  LRRK2 RNA guide
aaucuuccccuuuucaaagua

SEQ ID NO: 78462 - RNA, 21 nt, Artificial Sequence
  LRRK2 RNA guide
acuucuaaucuuccccuuuuc

SEQ ID NO: 78463 - RNA, 21 nt, Artificial Sequence
  LRRK2 RNA guide
acuuugaaaaggggaagauua

SEQ ID NO: 78464 - RNA, 21 nt, Artificial Sequence
  LRRK2 RNA guide
aggggaagauuagaaguuuaa

SEQ ID NO: 78465 - RNA, 21 nt, Artificial Sequence
  LRRK2 RNA guide
aucuuccccuuuucaaaguaa

SEQ ID NO: 78466 - RNA, 21 nt, Artificial Sequence
  LRRK2 RNA guide
auuuacuuugaaaaggggaag

SEQ ID NO: 78467 - RNA, 21 nt, Artificial Sequence
  LRRK2 RNA guide
ccccuuuucaaaguaaauauc

SEQ ID NO: 78468 - RNA, 21 nt, Artificial Sequence
  LRRK2 RNA guide
cuaaucuuccccuuuucaaag

SEQ ID NO: 78469 - RNA, 21 nt, Artificial Sequence
  LRRK2 RNA guide
cuuccccuuuucaaaguaaau

SEQ ID NO: 78470 - RNA, 21 nt, Artificial Sequence
  LRRK2 RNA guide
cuucuaaucuuccccuuuuca

SEQ ID NO: 78471 - RNA, 21 nt, Artificial Sequence
  LRRK2 RNA guide
cuuugaaaaggggaagauuag

SEQ ID NO: 78472 - RNA, 21 nt, Artificial Sequence
  LRRK2 RNA guide
gaaaaggggaagauuagaagu

SEQ ID NO: 78473 - RNA, 21 nt, Artificial Sequence
  LRRK2 RNA guide
gauauuuacuuugaaaagggg

SEQ ID NO: 78474 - RNA, 21 nt, Artificial Sequence
  LRRK2 RNA guide
ggggaagauuagaaguuuaaa

SEQ ID NO: 78475 - RNA, 21 nt, Artificial Sequence
  LRRK2 RNA guide
uaaacuucuaaucuuccccuu

SEQ ID NO: 78476 - RNA, 21 nt, Artificial Sequence
  LRRK2 RNA guide
uaaucuuccccuuuucaaagu

SEQ ID NO: 78477 - RNA, 21 nt, Artificial Sequence
  LRRK2 RNA guide
uacuuugaaaaggggaagauu

SEQ ID NO: 78478 - RNA, 21 nt, Artificial Sequence
  LRRK2 RNA guide
ucuaaucuuccccuuuucaaa

SEQ ID NO: 78479 - RNA, 21 nt, Artificial Sequence
  LRRK2 RNA guide
ucuuccccuuuucaaaguaaa

SEQ ID NO: 78480 - RNA, 21 nt, Artificial Sequence
  LRRK2 RNA guide
ugaaaaggggaagauuagaag

SEQ ID NO: 78481 - RNA, 21 nt, Artificial Sequence
  LRRK2 RNA guide
uuaaacuucuaaucuuccccu

SEQ ID NO: 78482 - RNA, 21 nt, Artificial Sequence
  LRRK2 RNA guide
uuacuuugaaaaggggaagau

SEQ ID NO: 78483 - RNA, 21 nt, Artificial Sequence
  LRRK2 RNA guide
uucuaaucuuccccuuuucaa

SEQ ID NO: 78484 - RNA, 21 nt, Artificial Sequence
  LRRK2 RNA guide
uugaaaaggggaagauuagaa

SEQ ID NO: 78485 - RNA, 21 nt, Artificial Sequence
  LRRK2 RNA guide
uuuaaacuucuaaucuucccc

SEQ ID NO: 78486 - RNA, 21 nt, Artificial Sequence
  LRRK2 RNA guide
uuuacuuugaaaaggggaaga

SEQ ID NO: 78487 - RNA, 21 nt, Artificial Sequence
  LRRK2 RNA guide
uuugaaaaggggaagauuaga

SEQ ID NO: 78488 - RNA, 22 nt, Artificial Sequence
  LRRK2 RNA guide
aaaaggggaagauuagaaguuu

SEQ ID NO: 78489 - RNA, 22 nt, Artificial Sequence
  LRRK2 RNA guide
aaacuucuaaucuuccccuuuu

SEQ ID NO: 78490 - RNA, 22 nt, Artificial Sequence
  LRRK2 RNA guide
aaaggggaagauuagaaguuua

SEQ ID NO: 78491 - RNA, 22 nt, Artificial Sequence
  LRRK2 RNA guide
aacuucuaaucuuccccuuuuc

SEQ ID NO: 78492 - RNA, 22 nt, Artificial Sequence
  LRRK2 RNA guide
aaggggaagauuagaaguuuaa

SEQ ID NO: 78493 - RNA, 22 nt, Artificial Sequence
  LRRK2 RNA guide
aaucuuccccuuuucaaaguaa

SEQ ID NO: 78494 - RNA, 22 nt, Artificial Sequence
  LRRK2 RNA guide
acuucuaaucuuccccuuuuca

SEQ ID NO: 78495 - RNA, 22 nt, Artificial Sequence
  LRRK2 RNA guide
acuuugaaaaggggaagauuag

SEQ ID NO: 78496 - RNA, 22 nt, Artificial Sequence
  LRRK2 RNA guide
agauauuuacuuugaaaagggg

SEQ ID NO: 78497 - RNA, 22 nt, Artificial Sequence
  LRRK2 RNA guide
aggggaagauuagaaguuuaaa

SEQ ID NO: 78498 - RNA, 22 nt, Artificial Sequence
  LRRK2 RNA guide
aucuuccccuuuucaaaguaaa

SEQ ID NO: 78499 - RNA, 22 nt, Artificial Sequence
  LRRK2 RNA guide
auuuacuuugaaaaggggaaga

SEQ ID NO: 78500 - RNA, 22 nt, Artificial Sequence
  LRRK2 RNA guide
ccccuuuucaaaguaaauaucu

SEQ ID NO: 78501 - RNA, 22 nt, Artificial Sequence
  LRRK2 RNA guide
cuaaucuuccccuuuucaaagu

SEQ ID NO: 78502 - RNA, 22 nt, Artificial Sequence
  LRRK2 RNA guide
cuuccccuuuucaaaguaaaua

SEQ ID NO: 78503 - RNA, 22 nt, Artificial Sequence
  LRRK2 RNA guide
cuucuaaucuuccccuuuucaa

SEQ ID NO: 78504 - RNA, 22 nt, Artificial Sequence
  LRRK2 RNA guide
cuuugaaaaggggaagauuaga

SEQ ID NO: 78505 - RNA, 22 nt, Artificial Sequence
  LRRK2 RNA guide
cuuuuaaacuucuaaucuuccc

SEQ ID NO: 78506 - RNA, 22 nt, Artificial Sequence
  LRRK2 RNA guide
gaaaaggggaagauuagaaguu

SEQ ID NO: 78507 - RNA, 22 nt, Artificial Sequence
  LRRK2 RNA guide
gauauuuacuuugaaaagggga

SEQ ID NO: 78508 - RNA, 22 nt, Artificial Sequence
  LRRK2 RNA guide
gcuuuuaaacuucuaaucuucc

SEQ ID NO: 78509 - RNA, 22 nt, Artificial Sequence
  LRRK2 RNA guide
gggaagauuagaaguuuaaaag

SEQ ID NO: 78510 - RNA, 22 nt, Artificial Sequence
  LRRK2 RNA guide
ggggaagauuagaaguuuaaaa

SEQ ID NO: 78511 - RNA, 22 nt, Artificial Sequence
  LRRK2 RNA guide
uaaacuucuaaucuuccccuuu

SEQ ID NO: 78512 - RNA, 22 nt, Artificial Sequence
  LRRK2 RNA guide
uaaucuuccccuuuucaaagua

SEQ ID NO: 78513 - RNA, 22 nt, Artificial Sequence
  LRRK2 RNA guide
uacuuugaaaaggggaagauua

SEQ ID NO: 78514 - RNA, 22 nt, Artificial Sequence
  LRRK2 RNA guide
uauuuacuuugaaaaggggaag

SEQ ID NO: 78515 - RNA, 22 nt, Artificial Sequence
  LRRK2 RNA guide
uccccuuuucaaaguaaauauc

SEQ ID NO: 78516 - RNA, 22 nt, Artificial Sequence
  LRRK2 RNA guide
ucuaaucuuccccuuuucaaag

SEQ ID NO: 78517 - RNA, 22 nt, Artificial Sequence
  LRRK2 RNA guide
ucuuccccuuuucaaaguaaau

SEQ ID NO: 78518 - RNA, 22 nt, Artificial Sequence
  LRRK2 RNA guide
ugaaaaggggaagauuagaagu

SEQ ID NO: 78519 - RNA, 22 nt, Artificial Sequence
  LRRK2 RNA guide
uuaaacuucuaaucuuccccuu

SEQ ID NO: 78520 - RNA, 22 nt, Artificial Sequence
  LRRK2 RNA guide
uuacuuugaaaaggggaagauu

SEQ ID NO: 78521 - RNA, 22 nt, Artificial Sequence
  LRRK2 RNA guide
uucuaaucuuccccuuuucaaa

SEQ ID NO: 78522 - RNA, 22 nt, Artificial Sequence
  LRRK2 RNA guide
uugaaaaggggaagauuagaag

SEQ ID NO: 78523 - RNA, 22 nt, Artificial Sequence
  LRRK2 RNA guide
uuuaaacuucuaaucuuccccu

SEQ ID NO: 78524 - RNA, 22 nt, Artificial Sequence
  LRRK2 RNA guide
uuuacuuugaaaaggggaagau

SEQ ID NO: 78525 - RNA, 22 nt, Artificial Sequence
  LRRK2 RNA guide
uuugaaaaggggaagauuagaa

SEQ ID NO: 78526 - RNA, 22 nt, Artificial Sequence
  LRRK2 RNA guide
uuuuaaacuucuaaucuucccc

SEQ ID NO: 78527 - RNA, 20 nt, Artificial Sequence
  LRRK2 RNA guide
aaagcauuuccauauugaag

SEQ ID NO: 78528 - RNA, 20 nt, Artificial Sequence
  LRRK2 RNA guide
aagcauuuccauauugaagu

SEQ ID NO: 78529 - RNA, 20 nt, Artificial Sequence
  LRRK2 RNA guide
acuucaauauggaaaugcuu

SEQ ID NO: 78530 - RNA, 20 nt, Artificial Sequence
  LRRK2 RNA guide
agaaguuuaaaagcauuucc

SEQ ID NO: 78531 - RNA, 20 nt, Artificial Sequence
  LRRK2 RNA guide
agcauuuccauauugaagua

SEQ ID NO: 78532 - RNA, 20 nt, Artificial Sequence
  LRRK2 RNA guide
cuucaauauggaaaugcuuu

SEQ ID NO: 78533 - RNA, 20 nt, Artificial Sequence
  LRRK2 RNA guide
gaaguuuaaaagcauuucca

SEQ ID NO: 78534 - RNA, 20 nt, Artificial Sequence
  LRRK2 RNA guide
gcauuuccauauugaaguaa

SEQ ID NO: 78535 - RNA, 20 nt, Artificial Sequence
  LRRK2 RNA guide
uacuucaauauggaaaugcu

SEQ ID NO: 78536 - RNA, 20 nt, Artificial Sequence
  LRRK2 RNA guide
uuacuucaauauggaaaugc

SEQ ID NO: 78537 - RNA, 20 nt, Artificial Sequence
  LRRK2 RNA guide
aaaagcauuuccacauugaa

SEQ ID NO: 78538 - RNA, 20 nt, Artificial Sequence
  LRRK2 RNA guide
aaagcauuuccacauugaag

SEQ ID NO: 78539 - RNA, 20 nt, Artificial Sequence
  LRRK2 RNA guide
aagcauuuccacauugaagu

SEQ ID NO: 78540 - RNA, 20 nt, Artificial Sequence
  LRRK2 RNA guide
aaguuuaaaagcauuuccac

SEQ ID NO: 78541 - RNA, 20 nt, Artificial Sequence
  LRRK2 RNA guide
acuucaauguggaaaugcuu

SEQ ID NO: 78542 - RNA, 20 nt, Artificial Sequence
  LRRK2 RNA guide
agcauuuccacauugaagua

SEQ ID NO: 78543 - RNA, 20 nt, Artificial Sequence
  LRRK2 RNA guide
aguuuaaaagcauuuccaca

SEQ ID NO: 78544 - RNA, 20 nt, Artificial Sequence
  LRRK2 RNA guide
auguggaaaugcuuuuaaac

SEQ ID NO: 78545 - RNA, 20 nt, Artificial Sequence
  LRRK2 RNA guide
caauguggaaaugcuuuuaa

SEQ ID NO: 78546 - RNA, 20 nt, Artificial Sequence
  LRRK2 RNA guide
cauuuccacauugaaguaaa

SEQ ID NO: 78547 - RNA, 20 nt, Artificial Sequence
  LRRK2 RNA guide
ccacauugaaguaaauauuc

SEQ ID NO: 78548 - RNA, 20 nt, Artificial Sequence
  LRRK2 RNA guide
cuucaauguggaaaugcuuu

SEQ ID NO: 78549 - RNA, 20 nt, Artificial Sequence
  LRRK2 RNA guide
gaauauuuacuucaaugugg

SEQ ID NO: 78550 - RNA, 20 nt, Artificial Sequence
  LRRK2 RNA guide
gcauuuccacauugaaguaa

SEQ ID NO: 78551 - RNA, 20 nt, Artificial Sequence
  LRRK2 RNA guide
guuuaaaagcauuuccacau

SEQ ID NO: 78552 - RNA, 20 nt, Artificial Sequence
  LRRK2 RNA guide
uaaaagcauuuccacauuga

SEQ ID NO: 78553 - RNA, 20 nt, Artificial Sequence
  LRRK2 RNA guide
uacuucaauguggaaaugcu

SEQ ID NO: 78554 - RNA, 20 nt, Artificial Sequence
  LRRK2 RNA guide
ucaauguggaaaugcuuuua

SEQ ID NO: 78555 - RNA, 20 nt, Artificial Sequence
  LRRK2 RNA guide
uguggaaaugcuuuuaaacu

SEQ ID NO: 78556 - RNA, 20 nt, Artificial Sequence
  LRRK2 RNA guide
uuaaaagcauuuccacauug

SEQ ID NO: 78557 - RNA, 20 nt, Artificial Sequence
  LRRK2 RNA guide
uuacuucaauguggaaaugc

SEQ ID NO: 78558 - RNA, 20 nt, Artificial Sequence
  LRRK2 RNA guide
uucaauguggaaaugcuuuu

SEQ ID NO: 78559 - RNA, 20 nt, Artificial Sequence
  LRRK2 RNA guide
uuuacuucaauguggaaaug

SEQ ID NO: 78560 - RNA, 21 nt, Artificial Sequence
  LRRK2 RNA guide
aaaagcauuuccacauugaag

SEQ ID NO: 78561 - RNA, 21 nt, Artificial Sequence
  LRRK2 RNA guide
aaagcauuuccacauugaagu

SEQ ID NO: 78562 - RNA, 21 nt, Artificial Sequence
  LRRK2 RNA guide
aagcauuuccacauugaagua

SEQ ID NO: 78563 - RNA, 21 nt, Artificial Sequence
  LRRK2 RNA guide
acuucaauguggaaaugcuuu

SEQ ID NO: 78564 - RNA, 21 nt, Artificial Sequence
  LRRK2 RNA guide
agcauuuccacauugaaguaa

SEQ ID NO: 78565 - RNA, 21 nt, Artificial Sequence
  LRRK2 RNA guide
cuucaauguggaaaugcuuuu

SEQ ID NO: 78566 - RNA, 21 nt, Artificial Sequence
  LRRK2 RNA guide
gaaguuuaaaagcauuuccac

SEQ ID NO: 78567 - RNA, 21 nt, Artificial Sequence
  LRRK2 RNA guide
gcauuuccacauugaaguaaa

SEQ ID NO: 78568 - RNA, 21 nt, Artificial Sequence
  LRRK2 RNA guide
uacuucaauguggaaaugcuu

SEQ ID NO: 78569 - RNA, 21 nt, Artificial Sequence
  LRRK2 RNA guide
uuacuucaauguggaaaugcu

SEQ ID NO: 78570 - RNA, 21 nt, Artificial Sequence
  LRRK2 RNA guide
uuuacuucaauguggaaaugc

SEQ ID NO: 78571 - RNA, 22 nt, Artificial Sequence
  LRRK2 RNA guide
aaaagcauuuccacauugaagu

SEQ ID NO: 78572 - RNA, 22 nt, Artificial Sequence
  LRRK2 RNA guide
aaagcauuuccacauugaagua

SEQ ID NO: 78573 - RNA, 22 nt, Artificial Sequence
  LRRK2 RNA guide
aagcauuuccacauugaaguaa

SEQ ID NO: 78574 - RNA, 22 nt, Artificial Sequence
  LRRK2 RNA guide
acuucaauguggaaaugcuuuu

SEQ ID NO: 78575 - RNA, 22 nt, Artificial Sequence
  LRRK2 RNA guide
agaaguuuaaaagcauuuccac

SEQ ID NO: 78576 - RNA, 22 nt, Artificial Sequence
  LRRK2 RNA guide
agcauuuccacauugaaguaaa

SEQ ID NO: 78577 - RNA, 22 nt, Artificial Sequence
  LRRK2 RNA guide
auuuacuucaauguggaaaugc

SEQ ID NO: 78578 - RNA, 22 nt, Artificial Sequence
  LRRK2 RNA guide
caauguggaaaugcuuuuaaac

SEQ ID NO: 78579 - RNA, 22 nt, Artificial Sequence
  LRRK2 RNA guide
cuucaauguggaaaugcuuuua

SEQ ID NO: 78580 - RNA, 22 nt, Artificial Sequence
  LRRK2 RNA guide
gaaguuuaaaagcauuuccaca

SEQ ID NO: 78581 - RNA, 22 nt, Artificial Sequence
  LRRK2 RNA guide
gcauuuccacauugaaguaaau

SEQ ID NO: 78582 - RNA, 22 nt, Artificial Sequence
  LRRK2 RNA guide
guuuaaaagcauuuccacauug

SEQ ID NO: 78583 - RNA, 22 nt, Artificial Sequence
  LRRK2 RNA guide
uaaaagcauuuccacauugaag

SEQ ID NO: 78584 - RNA, 22 nt, Artificial Sequence
  LRRK2 RNA guide
uacuucaauguggaaaugcuuu

SEQ ID NO: 78585 - RNA, 22 nt, Artificial Sequence
  LRRK2 RNA guide
uguggaaaugcuuuuaaacuuc

SEQ ID NO: 78586 - RNA, 22 nt, Artificial Sequence
  LRRK2 RNA guide
uuacuucaauguggaaaugcuu

SEQ ID NO: 78587 - RNA, 22 nt, Artificial Sequence
  LRRK2 RNA guide
uuuacuucaauguggaaaugcu

SEQ ID NO: 78588 - RNA, 20 nt, Artificial Sequence
  LRRK2 RNA guide
aaaaaaucccaaccuucuuc

SEQ ID NO: 78589 - RNA, 20 nt, Artificial Sequence
  LRRK2 RNA guide
aaaaaucccaaccuucuuca

SEQ ID NO: 78590 - RNA, 20 nt, Artificial Sequence
  LRRK2 RNA guide
aaaaucccaaccuucuucac

SEQ ID NO: 78591 - RNA, 20 nt, Artificial Sequence
  LRRK2 RNA guide
aaaucccaaccuucuucaca

SEQ ID NO: 78592 - RNA, 20 nt, Artificial Sequence
  LRRK2 RNA guide
aaucccaaccuucuucacag

SEQ ID NO: 78593 - RNA, 20 nt, Artificial Sequence
  LRRK2 RNA guide
agagcugugaagaagguugg

SEQ ID NO: 78594 - RNA, 20 nt, Artificial Sequence
  LRRK2 RNA guide
agcugugaagaagguuggga

SEQ ID NO: 78595 - RNA, 20 nt, Artificial Sequence
  LRRK2 RNA guide
aucccaaccuucuucacagc

SEQ ID NO: 78596 - RNA, 20 nt, Artificial Sequence
  LRRK2 RNA guide
cucugacucauugugaaaaa

SEQ ID NO: 78597 - RNA, 20 nt, Artificial Sequence
  LRRK2 RNA guide
cugugaagaagguugggauu

SEQ ID NO: 78598 - RNA, 20 nt, Artificial Sequence
  LRRK2 RNA guide
gaagaagguugggauuuuuu

SEQ ID NO: 78599 - RNA, 20 nt, Artificial Sequence
  LRRK2 RNA guide
gagcugugaagaagguuggg

SEQ ID NO: 78600 - RNA, 20 nt, Artificial Sequence
  LRRK2 RNA guide
gcugugaagaagguugggau

SEQ ID NO: 78601 - RNA, 20 nt, Artificial Sequence
  LRRK2 RNA guide
gguagagcugugaagaaggu

SEQ ID NO: 78602 - RNA, 20 nt, Artificial Sequence
  LRRK2 RNA guide
guagagcugugaagaagguu

SEQ ID NO: 78603 - RNA, 20 nt, Artificial Sequence
  LRRK2 RNA guide
gugaagaagguugggauuuu

SEQ ID NO: 78604 - RNA, 20 nt, Artificial Sequence
  LRRK2 RNA guide
uagagcugugaagaagguug

SEQ ID NO: 78605 - RNA, 20 nt, Artificial Sequence
  LRRK2 RNA guide
ucccaaccuucuucacagcu

SEQ ID NO: 78606 - RNA, 20 nt, Artificial Sequence
  LRRK2 RNA guide
ucugacucauugugaaaaaa

SEQ ID NO: 78607 - RNA, 20 nt, Artificial Sequence
  LRRK2 RNA guide
ugaagaagguugggauuuuu

SEQ ID NO: 78608 - RNA, 20 nt, Artificial Sequence
  LRRK2 RNA guide
ugguagagcugugaagaagg

SEQ ID NO: 78609 - RNA, 20 nt, Artificial Sequence
  LRRK2 RNA guide
ugugaagaagguugggauuu

SEQ ID NO: 78610 - RNA, 21 nt, Artificial Sequence
  LRRK2 RNA guide
aaaaaaucccaaccuucuuca

SEQ ID NO: 78611 - RNA, 21 nt, Artificial Sequence
  LRRK2 RNA guide
aaaaaucccaaccuucuucac

SEQ ID NO: 78612 - RNA, 21 nt, Artificial Sequence
  LRRK2 RNA guide
aaaaucccaaccuucuucaca

SEQ ID NO: 78613 - RNA, 21 nt, Artificial Sequence
  LRRK2 RNA guide
aaaucccaaccuucuucacag

SEQ ID NO: 78614 - RNA, 21 nt, Artificial Sequence
  LRRK2 RNA guide
aaucccaaccuucuucacagc

SEQ ID NO: 78615 - RNA, 21 nt, Artificial Sequence
  LRRK2 RNA guide
agagcugugaagaagguuggg

SEQ ID NO: 78616 - RNA, 21 nt, Artificial Sequence
  LRRK2 RNA guide
agcugugaagaagguugggau

SEQ ID NO: 78617 - RNA, 21 nt, Artificial Sequence
  LRRK2 RNA guide
aucccaaccuucuucacagcu

SEQ ID NO: 78618 - RNA, 21 nt, Artificial Sequence
  LRRK2 RNA guide
augguagagcugugaagaagg

SEQ ID NO: 78619 - RNA, 21 nt, Artificial Sequence
  LRRK2 RNA guide
cucugacucauugugaaaaaa

SEQ ID NO: 78620 - RNA, 21 nt, Artificial Sequence
  LRRK2 RNA guide
cugugaagaagguugggauuu

SEQ ID NO: 78621 - RNA, 21 nt, Artificial Sequence
  LRRK2 RNA guide
gagcugugaagaagguuggga

SEQ ID NO: 78622 - RNA, 21 nt, Artificial Sequence
  LRRK2 RNA guide
gcugugaagaagguugggauu

SEQ ID NO: 78623 - RNA, 21 nt, Artificial Sequence
  LRRK2 RNA guide
gguagagcugugaagaagguu

SEQ ID NO: 78624 - RNA, 21 nt, Artificial Sequence
  LRRK2 RNA guide
guagagcugugaagaagguug

SEQ ID NO: 78625 - RNA, 21 nt, Artificial Sequence
  LRRK2 RNA guide
gugaagaagguugggauuuuu

SEQ ID NO: 78626 - RNA, 21 nt, Artificial Sequence
  LRRK2 RNA guide
uagagcugugaagaagguugg

SEQ ID NO: 78627 - RNA, 21 nt, Artificial Sequence
  LRRK2 RNA guide
ucccaaccuucuucacagcuc

SEQ ID NO: 78628 - RNA, 21 nt, Artificial Sequence
  LRRK2 RNA guide
ucucugacucauugugaaaaa

SEQ ID NO: 78629 - RNA, 21 nt, Artificial Sequence
  LRRK2 RNA guide
ugaagaagguugggauuuuuu

SEQ ID NO: 78630 - RNA, 21 nt, Artificial Sequence
  LRRK2 RNA guide
ugguagagcugugaagaaggu

SEQ ID NO: 78631 - RNA, 21 nt, Artificial Sequence
  LRRK2 RNA guide
ugugaagaagguugggauuuu

SEQ ID NO: 78632 - RNA, 22 nt, Artificial Sequence
  LRRK2 RNA guide
aaaaaaucccaaccuucuucac

SEQ ID NO: 78633 - RNA, 22 nt, Artificial Sequence
  LRRK2 RNA guide
aaaaaucccaaccuucuucaca

SEQ ID NO: 78634 - RNA, 22 nt, Artificial Sequence
  LRRK2 RNA guide
aaaaucccaaccuucuucacag

SEQ ID NO: 78635 - RNA, 22 nt, Artificial Sequence
  LRRK2 RNA guide
aaaucccaaccuucuucacagc

SEQ ID NO: 78636 - RNA, 22 nt, Artificial Sequence
  LRRK2 RNA guide
aaucccaaccuucuucacagcu

SEQ ID NO: 78637 - RNA, 22 nt, Artificial Sequence
  LRRK2 RNA guide
agagcugugaagaagguuggga

SEQ ID NO: 78638 - RNA, 22 nt, Artificial Sequence
  LRRK2 RNA guide
agcugugaagaagguugggauu

SEQ ID NO: 78639 - RNA, 22 nt, Artificial Sequence
  LRRK2 RNA guide
aucccaaccuucuucacagcuc

SEQ ID NO: 78640 - RNA, 22 nt, Artificial Sequence
  LRRK2 RNA guide
augguagagcugugaagaaggu

SEQ ID NO: 78641 - RNA, 22 nt, Artificial Sequence
  LRRK2 RNA guide
cugugaagaagguugggauuuu

SEQ ID NO: 78642 - RNA, 22 nt, Artificial Sequence
  LRRK2 RNA guide
gagcugugaagaagguugggau

SEQ ID NO: 78643 - RNA, 22 nt, Artificial Sequence
  LRRK2 RNA guide
gaugguagagcugugaagaagg

SEQ ID NO: 78644 - RNA, 22 nt, Artificial Sequence
  LRRK2 RNA guide
gcugugaagaagguugggauuu

SEQ ID NO: 78645 - RNA, 22 nt, Artificial Sequence
  LRRK2 RNA guide
gguagagcugugaagaagguug

SEQ ID NO: 78646 - RNA, 22 nt, Artificial Sequence
  LRRK2 RNA guide
guagagcugugaagaagguugg

SEQ ID NO: 78647 - RNA, 22 nt, Artificial Sequence
  LRRK2 RNA guide
gugaagaagguugggauuuuuu

SEQ ID NO: 78648 - RNA, 22 nt, Artificial Sequence
  LRRK2 RNA guide
uagagcugugaagaagguuggg

SEQ ID NO: 78649 - RNA, 22 nt, Artificial Sequence
  LRRK2 RNA guide
ucccaaccuucuucacagcucu

SEQ ID NO: 78650 - RNA, 22 nt, Artificial Sequence
  LRRK2 RNA guide
ucucugacucauugugaaaaaa

SEQ ID NO: 78651 - RNA, 22 nt, Artificial Sequence
  LRRK2 RNA guide
ugguagagcugugaagaagguu

SEQ ID NO: 78652 - RNA, 22 nt, Artificial Sequence
  LRRK2 RNA guide
ugugaagaagguugggauuuuu

SEQ ID NO: 78653 - RNA, 22 nt, Artificial Sequence
  LRRK2 RNA guide
uucucugacucauugugaaaaa

SEQ ID NO: 78654 - RNA, 20 nt, Artificial Sequence
  LRRK2 RNA guide
aaaaaauuccaaccuucuuc

SEQ ID NO: 78655 - RNA, 20 nt, Artificial Sequence
  LRRK2 RNA guide
aaaaauuccaaccuucuuca

SEQ ID NO: 78656 - RNA, 20 nt, Artificial Sequence
  LRRK2 RNA guide
aaaauuccaaccuucuucac

SEQ ID NO: 78657 - RNA, 20 nt, Artificial Sequence
  LRRK2 RNA guide
aaauuccaaccuucuucaca

SEQ ID NO: 78658 - RNA, 20 nt, Artificial Sequence
  LRRK2 RNA guide
aauuccaaccuucuucacag

SEQ ID NO: 78659 - RNA, 20 nt, Artificial Sequence
  LRRK2 RNA guide
agcugugaagaagguuggaa

SEQ ID NO: 78660 - RNA, 20 nt, Artificial Sequence
  LRRK2 RNA guide
auuccaaccuucuucacagc

SEQ ID NO: 78661 - RNA, 20 nt, Artificial Sequence
  LRRK2 RNA guide
cugugaagaagguuggaauu

SEQ ID NO: 78662 - RNA, 20 nt, Artificial Sequence
  LRRK2 RNA guide
gaagaagguuggaauuuuuu

SEQ ID NO: 78663 - RNA, 20 nt, Artificial Sequence
  LRRK2 RNA guide
gagcugugaagaagguugga

SEQ ID NO: 78664 - RNA, 20 nt, Artificial Sequence
  LRRK2 RNA guide
gcugugaagaagguuggaau

SEQ ID NO: 78665 - RNA, 20 nt, Artificial Sequence
  LRRK2 RNA guide
gugaagaagguuggaauuuu

SEQ ID NO: 78666 - RNA, 20 nt, Artificial Sequence
  LRRK2 RNA guide
ugaagaagguuggaauuuuu

SEQ ID NO: 78667 - RNA, 20 nt, Artificial Sequence
  LRRK2 RNA guide
ugugaagaagguuggaauuu

SEQ ID NO: 78668 - RNA, 20 nt, Artificial Sequence
  LRRK2 RNA guide
uuccaaccuucuucacagcu

SEQ ID NO: 78669 - RNA, 21 nt, Artificial Sequence
  LRRK2 RNA guide
aaaaauuccaaccuucuucac

SEQ ID NO: 78670 - RNA, 21 nt, Artificial Sequence
  LRRK2 RNA guide
aaaauuccaaccuucuucaca

SEQ ID NO: 78671 - RNA, 21 nt, Artificial Sequence
  LRRK2 RNA guide
aaauuccaaccuucuucacag

SEQ ID NO: 78672 - RNA, 21 nt, Artificial Sequence
  LRRK2 RNA guide
aauuccaaccuucuucacagc

SEQ ID NO: 78673 - RNA, 21 nt, Artificial Sequence
  LRRK2 RNA guide
agagcugugaagaagguugga

SEQ ID NO: 78674 - RNA, 21 nt, Artificial Sequence
  LRRK2 RNA guide
agcugugaagaagguuggaau

SEQ ID NO: 78675 - RNA, 21 nt, Artificial Sequence
  LRRK2 RNA guide
auuccaaccuucuucacagcu

SEQ ID NO: 78676 - RNA, 21 nt, Artificial Sequence
  LRRK2 RNA guide
cugugaagaagguuggaauuu

SEQ ID NO: 78677 - RNA, 21 nt, Artificial Sequence
  LRRK2 RNA guide
gagcugugaagaagguuggaa

SEQ ID NO: 78678 - RNA, 21 nt, Artificial Sequence
  LRRK2 RNA guide
gcugugaagaagguuggaauu

SEQ ID NO: 78679 - RNA, 21 nt, Artificial Sequence
  LRRK2 RNA guide
gugaagaagguuggaauuuuu

SEQ ID NO: 78680 - RNA, 21 nt, Artificial Sequence
  LRRK2 RNA guide
ugugaagaagguuggaauuuu

SEQ ID NO: 78681 - RNA, 21 nt, Artificial Sequence
  LRRK2 RNA guide
uuccaaccuucuucacagcuc

SEQ ID NO: 78682 - RNA, 22 nt, Artificial Sequence
  LRRK2 RNA guide
aaaaaauuccaaccuucuucac

SEQ ID NO: 78683 - RNA, 22 nt, Artificial Sequence
  LRRK2 RNA guide
aaaaauuccaaccuucuucaca

SEQ ID NO: 78684 - RNA, 22 nt, Artificial Sequence
  LRRK2 RNA guide
aaaauuccaaccuucuucacag

SEQ ID NO: 78685 - RNA, 22 nt, Artificial Sequence
  LRRK2 RNA guide
aaauuccaaccuucuucacagc

SEQ ID NO: 78686 - RNA, 22 nt, Artificial Sequence
  LRRK2 RNA guide
aauuccaaccuucuucacagcu

SEQ ID NO: 78687 - RNA, 22 nt, Artificial Sequence
  LRRK2 RNA guide
agagcugugaagaagguuggaa

SEQ ID NO: 78688 - RNA, 22 nt, Artificial Sequence
  LRRK2 RNA guide
agcugugaagaagguuggaauu

SEQ ID NO: 78689 - RNA, 22 nt, Artificial Sequence
  LRRK2 RNA guide
auuccaaccuucuucacagcuc

SEQ ID NO: 78690 - RNA, 22 nt, Artificial Sequence
  LRRK2 RNA guide
cugugaagaagguuggaauuuu

SEQ ID NO: 78691 - RNA, 22 nt, Artificial Sequence
  LRRK2 RNA guide
gagcugugaagaagguuggaau

SEQ ID NO: 78692 - RNA, 22 nt, Artificial Sequence
  LRRK2 RNA guide
gcugugaagaagguuggaauuu

SEQ ID NO: 78693 - RNA, 22 nt, Artificial Sequence
  LRRK2 RNA guide
gugaagaagguuggaauuuuuu

SEQ ID NO: 78694 - RNA, 22 nt, Artificial Sequence
  LRRK2 RNA guide
uagagcugugaagaagguugga

SEQ ID NO: 78695 - RNA, 22 nt, Artificial Sequence
  LRRK2 RNA guide
ugugaagaagguuggaauuuuu

SEQ ID NO: 78696 - RNA, 22 nt, Artificial Sequence
  LRRK2 RNA guide
uuccaaccuucuucacagcucu

SEQ ID NO: 78697 - RNA, 20 nt, Artificial Sequence
  LRRK2 RNA guide
aaaagacucuaggggucauu

SEQ ID NO: 78698 - RNA, 20 nt, Artificial Sequence
  LRRK2 RNA guide
aaagacucuaggggucauuu

SEQ ID NO: 78699 - RNA, 20 nt, Artificial Sequence
  LRRK2 RNA guide
aagacucuaggggucauuuc

SEQ ID NO: 78700 - RNA, 20 nt, Artificial Sequence
  LRRK2 RNA guide
aauuagacgaaaugaccccu

SEQ ID NO: 78701 - RNA, 20 nt, Artificial Sequence
  LRRK2 RNA guide
acgaaaugaccccuagaguc

SEQ ID NO: 78702 - RNA, 20 nt, Artificial Sequence
  LRRK2 RNA guide
acucuaggggucauuucguc

SEQ ID NO: 78703 - RNA, 20 nt, Artificial Sequence
  LRRK2 RNA guide
acuggaugagaauuuagaau

SEQ ID NO: 78704 - RNA, 20 nt, Artificial Sequence
  LRRK2 RNA guide
agaauuagacgaaaugaccc

SEQ ID NO: 78705 - RNA, 20 nt, Artificial Sequence
  LRRK2 RNA guide
agacgaaaugaccccuagag

SEQ ID NO: 78706 - RNA, 20 nt, Artificial Sequence
  LRRK2 RNA guide
agacucuaggggucauuucg

SEQ ID NO: 78707 - RNA, 20 nt, Artificial Sequence
  LRRK2 RNA guide
aggggucauuucgucuaauu

SEQ ID NO: 78708 - RNA, 20 nt, Artificial Sequence
  LRRK2 RNA guide
auuagacgaaaugaccccua

SEQ ID NO: 78709 - RNA, 20 nt, Artificial Sequence
  LRRK2 RNA guide
cgucuaauucuaaauucuca

SEQ ID NO: 78710 - RNA, 20 nt, Artificial Sequence
  LRRK2 RNA guide
cuaggggucauuucgucuaa

SEQ ID NO: 78711 - RNA, 20 nt, Artificial Sequence
  LRRK2 RNA guide
cucuaggggucauuucgucu

SEQ ID NO: 78712 - RNA, 20 nt, Artificial Sequence
  LRRK2 RNA guide
cuggaugagaauuuagaauu

SEQ ID NO: 78713 - RNA, 20 nt, Artificial Sequence
  LRRK2 RNA guide
gaaaagacucuaggggucau

SEQ ID NO: 78714 - RNA, 20 nt, Artificial Sequence
  LRRK2 RNA guide
gaauuagacgaaaugacccc

SEQ ID NO: 78715 - RNA, 20 nt, Artificial Sequence
  LRRK2 RNA guide
gacgaaaugaccccuagagu

SEQ ID NO: 78716 - RNA, 20 nt, Artificial Sequence
  LRRK2 RNA guide
gacucuaggggucauuucgu

SEQ ID NO: 78717 - RNA, 20 nt, Artificial Sequence
  LRRK2 RNA guide
gagaauuuagaauuagacga

SEQ ID NO: 78718 - RNA, 20 nt, Artificial Sequence
  LRRK2 RNA guide
ggaaaagacucuagggguca

SEQ ID NO: 78719 - RNA, 20 nt, Artificial Sequence
  LRRK2 RNA guide
ggaugagaauuuagaauuag

SEQ ID NO: 78720 - RNA, 20 nt, Artificial Sequence
  LRRK2 RNA guide
ggggucauuucgucuaauuc

SEQ ID NO: 78721 - RNA, 20 nt, Artificial Sequence
  LRRK2 RNA guide
gggucauuucgucuaauucu

SEQ ID NO: 78722 - RNA, 20 nt, Artificial Sequence
  LRRK2 RNA guide
ggucauuucgucuaauucua

SEQ ID NO: 78723 - RNA, 20 nt, Artificial Sequence
  LRRK2 RNA guide
gucauuucgucuaauucuaa

SEQ ID NO: 78724 - RNA, 20 nt, Artificial Sequence
  LRRK2 RNA guide
uagaauuagacgaaaugacc

SEQ ID NO: 78725 - RNA, 20 nt, Artificial Sequence
  LRRK2 RNA guide
uagacgaaaugaccccuaga

SEQ ID NO: 78726 - RNA, 20 nt, Artificial Sequence
  LRRK2 RNA guide
uaggggucauuucgucuaau

SEQ ID NO: 78727 - RNA, 20 nt, Artificial Sequence
  LRRK2 RNA guide
ucgucuaauucuaaauucuc

SEQ ID NO: 78728 - RNA, 20 nt, Artificial Sequence
  LRRK2 RNA guide
ucuaggggucauuucgucua

SEQ ID NO: 78729 - RNA, 20 nt, Artificial Sequence
  LRRK2 RNA guide
ugagaauuuagaauuagacg

SEQ ID NO: 78730 - RNA, 20 nt, Artificial Sequence
  LRRK2 RNA guide
uuagaauuagacgaaaugac

SEQ ID NO: 78731 - RNA, 20 nt, Artificial Sequence
  LRRK2 RNA guide
uuagacgaaaugaccccuag

SEQ ID NO: 78732 - RNA, 21 nt, Artificial Sequence
  LRRK2 RNA guide
aaaagacucuaggggucauuu

SEQ ID NO: 78733 - RNA, 21 nt, Artificial Sequence
  LRRK2 RNA guide
aaagacucuaggggucauuuc

SEQ ID NO: 78734 - RNA, 21 nt, Artificial Sequence
  LRRK2 RNA guide
aagacucuaggggucauuucg

SEQ ID NO: 78735 - RNA, 21 nt, Artificial Sequence
  LRRK2 RNA guide
aauuagacgaaaugaccccua

SEQ ID NO: 78736 - RNA, 21 nt, Artificial Sequence
  LRRK2 RNA guide
acgaaaugaccccuagagucu

SEQ ID NO: 78737 - RNA, 21 nt, Artificial Sequence
  LRRK2 RNA guide
acucuaggggucauuucgucu

SEQ ID NO: 78738 - RNA, 21 nt, Artificial Sequence
  LRRK2 RNA guide
agaauuagacgaaaugacccc

SEQ ID NO: 78739 - RNA, 21 nt, Artificial Sequence
  LRRK2 RNA guide
agacgaaaugaccccuagagu

SEQ ID NO: 78740 - RNA, 21 nt, Artificial Sequence
  LRRK2 RNA guide
agacucuaggggucauuucgu

SEQ ID NO: 78741 - RNA, 21 nt, Artificial Sequence
  LRRK2 RNA guide
aggaaaagacucuagggguca

SEQ ID NO: 78742 - RNA, 21 nt, Artificial Sequence
  LRRK2 RNA guide
aggggucauuucgucuaauuc

SEQ ID NO: 78743 - RNA, 21 nt, Artificial Sequence
  LRRK2 RNA guide
auuagacgaaaugaccccuag

SEQ ID NO: 78744 - RNA, 21 nt, Artificial Sequence
  LRRK2 RNA guide
cacuggaugagaauuuagaau

SEQ ID NO: 78745 - RNA, 21 nt, Artificial Sequence
  LRRK2 RNA guide
cuaggggucauuucgucuaau

SEQ ID NO: 78746 - RNA, 21 nt, Artificial Sequence
  LRRK2 RNA guide
cucuaggggucauuucgucua

SEQ ID NO: 78747 - RNA, 21 nt, Artificial Sequence
  LRRK2 RNA guide
gaaaagacucuaggggucauu

SEQ ID NO: 78748 - RNA, 21 nt, Artificial Sequence
  LRRK2 RNA guide
gaauuagacgaaaugaccccu

SEQ ID NO: 78749 - RNA, 21 nt, Artificial Sequence
  LRRK2 RNA guide
gacgaaaugaccccuagaguc

SEQ ID NO: 78750 - RNA, 21 nt, Artificial Sequence
  LRRK2 RNA guide
gacucuaggggucauuucguc

SEQ ID NO: 78751 - RNA, 21 nt, Artificial Sequence
  LRRK2 RNA guide
ggaaaagacucuaggggucau

SEQ ID NO: 78752 - RNA, 21 nt, Artificial Sequence
  LRRK2 RNA guide
ggggucauuucgucuaauucu

SEQ ID NO: 78753 - RNA, 21 nt, Artificial Sequence
  LRRK2 RNA guide
gggucauuucgucuaauucua

SEQ ID NO: 78754 - RNA, 21 nt, Artificial Sequence
  LRRK2 RNA guide
ggucauuucgucuaauucuaa

SEQ ID NO: 78755 - RNA, 21 nt, Artificial Sequence
  LRRK2 RNA guide
uagaauuagacgaaaugaccc

SEQ ID NO: 78756 - RNA, 21 nt, Artificial Sequence
  LRRK2 RNA guide
uagacgaaaugaccccuagag

SEQ ID NO: 78757 - RNA, 21 nt, Artificial Sequence
  LRRK2 RNA guide
uaggggucauuucgucuaauu

SEQ ID NO: 78758 - RNA, 21 nt, Artificial Sequence
  LRRK2 RNA guide
ucuaggggucauuucgucuaa

SEQ ID NO: 78759 - RNA, 21 nt, Artificial Sequence
  LRRK2 RNA guide
uuagaauuagacgaaaugacc

SEQ ID NO: 78760 - RNA, 21 nt, Artificial Sequence
  LRRK2 RNA guide
uuagacgaaaugaccccuaga

SEQ ID NO: 78761 - RNA, 22 nt, Artificial Sequence
  LRRK2 RNA guide
aaaagacucuaggggucauuuc

SEQ ID NO: 78762 - RNA, 22 nt, Artificial Sequence
  LRRK2 RNA guide
aaagacucuaggggucauuucg

SEQ ID NO: 78763 - RNA, 22 nt, Artificial Sequence
  LRRK2 RNA guide
aagacucuaggggucauuucgu

SEQ ID NO: 78764 - RNA, 22 nt, Artificial Sequence
  LRRK2 RNA guide
aauuagacgaaaugaccccuag

SEQ ID NO: 78765 - RNA, 22 nt, Artificial Sequence
  LRRK2 RNA guide
acgaaaugaccccuagagucuu

SEQ ID NO: 78766 - RNA, 22 nt, Artificial Sequence
  LRRK2 RNA guide
acucuaggggucauuucgucua

SEQ ID NO: 78767 - RNA, 22 nt, Artificial Sequence
  LRRK2 RNA guide
agaauuagacgaaaugaccccu

SEQ ID NO: 78768 - RNA, 22 nt, Artificial Sequence
  LRRK2 RNA guide
agacgaaaugaccccuagaguc

SEQ ID NO: 78769 - RNA, 22 nt, Artificial Sequence
  LRRK2 RNA guide
agacucuaggggucauuucguc

SEQ ID NO: 78770 - RNA, 22 nt, Artificial Sequence
  LRRK2 RNA guide
aggaaaagacucuaggggucau

SEQ ID NO: 78771 - RNA, 22 nt, Artificial Sequence
  LRRK2 RNA guide
aggggucauuucgucuaauucu

SEQ ID NO: 78772 - RNA, 22 nt, Artificial Sequence
  LRRK2 RNA guide
auuagacgaaaugaccccuaga

SEQ ID NO: 78773 - RNA, 22 nt, Artificial Sequence
  LRRK2 RNA guide
cacuggaugagaauuuagaauu

SEQ ID NO: 78774 - RNA, 22 nt, Artificial Sequence
  LRRK2 RNA guide
caggaaaagacucuagggguca

SEQ ID NO: 78775 - RNA, 22 nt, Artificial Sequence
  LRRK2 RNA guide
cgucuaauucuaaauucucauc

SEQ ID NO: 78776 - RNA, 22 nt, Artificial Sequence
  LRRK2 RNA guide
cuaggggucauuucgucuaauu

SEQ ID NO: 78777 - RNA, 22 nt, Artificial Sequence
  LRRK2 RNA guide
cucuaggggucauuucgucuaa

SEQ ID NO: 78778 - RNA, 22 nt, Artificial Sequence
  LRRK2 RNA guide
cuggaugagaauuuagaauuag

SEQ ID NO: 78779 - RNA, 22 nt, Artificial Sequence
  LRRK2 RNA guide
gaaaagacucuaggggucauuu

SEQ ID NO: 78780 - RNA, 22 nt, Artificial Sequence
  LRRK2 RNA guide
gaauuagacgaaaugaccccua

SEQ ID NO: 78781 - RNA, 22 nt, Artificial Sequence
  LRRK2 RNA guide
gacgaaaugaccccuagagucu

SEQ ID NO: 78782 - RNA, 22 nt, Artificial Sequence
  LRRK2 RNA guide
gacucuaggggucauuucgucu

SEQ ID NO: 78783 - RNA, 22 nt, Artificial Sequence
  LRRK2 RNA guide
gaugagaauuuagaauuagacg

SEQ ID NO: 78784 - RNA, 22 nt, Artificial Sequence
  LRRK2 RNA guide
gcacuggaugagaauuuagaau

SEQ ID NO: 78785 - RNA, 22 nt, Artificial Sequence
  LRRK2 RNA guide
ggaaaagacucuaggggucauu

SEQ ID NO: 78786 - RNA, 22 nt, Artificial Sequence
  LRRK2 RNA guide
ggaugagaauuuagaauuagac

SEQ ID NO: 78787 - RNA, 22 nt, Artificial Sequence
  LRRK2 RNA guide
ggggucauuucgucuaauucua

SEQ ID NO: 78788 - RNA, 22 nt, Artificial Sequence
  LRRK2 RNA guide
gggucauuucgucuaauucuaa

SEQ ID NO: 78789 - RNA, 22 nt, Artificial Sequence
  LRRK2 RNA guide
ggucauuucgucuaauucuaaa

SEQ ID NO: 78790 - RNA, 22 nt, Artificial Sequence
  LRRK2 RNA guide
uagaauuagacgaaaugacccc

SEQ ID NO: 78791 - RNA, 22 nt, Artificial Sequence
  LRRK2 RNA guide
uagacgaaaugaccccuagagu

SEQ ID NO: 78792 - RNA, 22 nt, Artificial Sequence
  LRRK2 RNA guide
uaggggucauuucgucuaauuc

SEQ ID NO: 78793 - RNA, 22 nt, Artificial Sequence
  LRRK2 RNA guide
ucuaggggucauuucgucuaau

SEQ ID NO: 78794 - RNA, 22 nt, Artificial Sequence
  LRRK2 RNA guide
uuagaauuagacgaaaugaccc

SEQ ID NO: 78795 - RNA, 22 nt, Artificial Sequence
  LRRK2 RNA guide
uuagacgaaaugaccccuagag

SEQ ID NO: 78796 - RNA, 22 nt, Artificial Sequence
  LRRK2 RNA guide
uuuagaauuagacgaaaugacc

SEQ ID NO: 78797 - RNA, 20 nt, Artificial Sequence
  LRRK2 RNA guide
aauuagaugaaaugaccccu

SEQ ID NO: 78798 - RNA, 20 nt, Artificial Sequence
  LRRK2 RNA guide
acucuaggggucauuucauc

SEQ ID NO: 78799 - RNA, 20 nt, Artificial Sequence
  LRRK2 RNA guide
agaauuagaugaaaugaccc

SEQ ID NO: 78800 - RNA, 20 nt, Artificial Sequence
  LRRK2 RNA guide
agacucuaggggucauuuca

SEQ ID NO: 78801 - RNA, 20 nt, Artificial Sequence
  LRRK2 RNA guide
agaugaaaugaccccuagag

SEQ ID NO: 78802 - RNA, 20 nt, Artificial Sequence
  LRRK2 RNA guide
aggggucauuucaucuaauu

SEQ ID NO: 78803 - RNA, 20 nt, Artificial Sequence
  LRRK2 RNA guide
augaaaugaccccuagaguc

SEQ ID NO: 78804 - RNA, 20 nt, Artificial Sequence
  LRRK2 RNA guide
auuagaugaaaugaccccua

SEQ ID NO: 78805 - RNA, 20 nt, Artificial Sequence
  LRRK2 RNA guide
cuaggggucauuucaucuaa

SEQ ID NO: 78806 - RNA, 20 nt, Artificial Sequence
  LRRK2 RNA guide
cucuaggggucauuucaucu

SEQ ID NO: 78807 - RNA, 20 nt, Artificial Sequence
  LRRK2 RNA guide
gaauuagaugaaaugacccc

SEQ ID NO: 78808 - RNA, 20 nt, Artificial Sequence
  LRRK2 RNA guide
gacucuaggggucauuucau

SEQ ID NO: 78809 - RNA, 20 nt, Artificial Sequence
  LRRK2 RNA guide
gaugaaaugaccccuagagu

SEQ ID NO: 78810 - RNA, 20 nt, Artificial Sequence
  LRRK2 RNA guide
ggggucauuucaucuaauuc

SEQ ID NO: 78811 - RNA, 20 nt, Artificial Sequence
  LRRK2 RNA guide
gggucauuucaucuaauucu

SEQ ID NO: 78812 - RNA, 20 nt, Artificial Sequence
  LRRK2 RNA guide
ggucauuucaucuaauucua

SEQ ID NO: 78813 - RNA, 20 nt, Artificial Sequence
  LRRK2 RNA guide
uagaauuagaugaaaugacc

SEQ ID NO: 78814 - RNA, 20 nt, Artificial Sequence
  LRRK2 RNA guide
uagaugaaaugaccccuaga

SEQ ID NO: 78815 - RNA, 20 nt, Artificial Sequence
  LRRK2 RNA guide
uaggggucauuucaucuaau

SEQ ID NO: 78816 - RNA, 20 nt, Artificial Sequence
  LRRK2 RNA guide
ucuaggggucauuucaucua

SEQ ID NO: 78817 - RNA, 20 nt, Artificial Sequence
  LRRK2 RNA guide
uuagaugaaaugaccccuag

SEQ ID NO: 78818 - RNA, 21 nt, Artificial Sequence
  LRRK2 RNA guide
aagacucuaggggucauuuca

SEQ ID NO: 78819 - RNA, 21 nt, Artificial Sequence
  LRRK2 RNA guide
aauuagaugaaaugaccccua

SEQ ID NO: 78820 - RNA, 21 nt, Artificial Sequence
  LRRK2 RNA guide
acucuaggggucauuucaucu

SEQ ID NO: 78821 - RNA, 21 nt, Artificial Sequence
  LRRK2 RNA guide
agaauuagaugaaaugacccc

SEQ ID NO: 78822 - RNA, 21 nt, Artificial Sequence
  LRRK2 RNA guide
agacucuaggggucauuucau

SEQ ID NO: 78823 - RNA, 21 nt, Artificial Sequence
  LRRK2 RNA guide
agaugaaaugaccccuagagu

SEQ ID NO: 78824 - RNA, 21 nt, Artificial Sequence
  LRRK2 RNA guide
aggggucauuucaucuaauuc

SEQ ID NO: 78825 - RNA, 21 nt, Artificial Sequence
  LRRK2 RNA guide
augaaaugaccccuagagucu

SEQ ID NO: 78826 - RNA, 21 nt, Artificial Sequence
  LRRK2 RNA guide
auuagaugaaaugaccccuag

SEQ ID NO: 78827 - RNA, 21 nt, Artificial Sequence
  LRRK2 RNA guide
cuaggggucauuucaucuaau

SEQ ID NO: 78828 - RNA, 21 nt, Artificial Sequence
  LRRK2 RNA guide
cucuaggggucauuucaucua

SEQ ID NO: 78829 - RNA, 21 nt, Artificial Sequence
  LRRK2 RNA guide
gaauuagaugaaaugaccccu

SEQ ID NO: 78830 - RNA, 21 nt, Artificial Sequence
  LRRK2 RNA guide
gacucuaggggucauuucauc

SEQ ID NO: 78831 - RNA, 21 nt, Artificial Sequence
  LRRK2 RNA guide
gaugaaaugaccccuagaguc

SEQ ID NO: 78832 - RNA, 21 nt, Artificial Sequence
  LRRK2 RNA guide
ggggucauuucaucuaauucu

SEQ ID NO: 78833 - RNA, 21 nt, Artificial Sequence
  LRRK2 RNA guide
gggucauuucaucuaauucua

SEQ ID NO: 78834 - RNA, 21 nt, Artificial Sequence
  LRRK2 RNA guide
uagaauuagaugaaaugaccc

SEQ ID NO: 78835 - RNA, 21 nt, Artificial Sequence
  LRRK2 RNA guide
uagaugaaaugaccccuagag

SEQ ID NO: 78836 - RNA, 21 nt, Artificial Sequence
  LRRK2 RNA guide
uaggggucauuucaucuaauu

SEQ ID NO: 78837 - RNA, 21 nt, Artificial Sequence
  LRRK2 RNA guide
ucuaggggucauuucaucuaa

SEQ ID NO: 78838 - RNA, 21 nt, Artificial Sequence
  LRRK2 RNA guide
uuagaugaaaugaccccuaga

SEQ ID NO: 78839 - RNA, 22 nt, Artificial Sequence
  LRRK2 RNA guide
aaagacucuaggggucauuuca

SEQ ID NO: 78840 - RNA, 22 nt, Artificial Sequence
  LRRK2 RNA guide
aagacucuaggggucauuucau

SEQ ID NO: 78841 - RNA, 22 nt, Artificial Sequence
  LRRK2 RNA guide
aauuagaugaaaugaccccuag

SEQ ID NO: 78842 - RNA, 22 nt, Artificial Sequence
  LRRK2 RNA guide
acucuaggggucauuucaucua

SEQ ID NO: 78843 - RNA, 22 nt, Artificial Sequence
  LRRK2 RNA guide
agaauuagaugaaaugaccccu

SEQ ID NO: 78844 - RNA, 22 nt, Artificial Sequence
  LRRK2 RNA guide
agacucuaggggucauuucauc

SEQ ID NO: 78845 - RNA, 22 nt, Artificial Sequence
  LRRK2 RNA guide
agaugaaaugaccccuagaguc

SEQ ID NO: 78846 - RNA, 22 nt, Artificial Sequence
  LRRK2 RNA guide
aggggucauuucaucuaauucu

SEQ ID NO: 78847 - RNA, 22 nt, Artificial Sequence
  LRRK2 RNA guide
augaaaugaccccuagagucuu

SEQ ID NO: 78848 - RNA, 22 nt, Artificial Sequence
  LRRK2 RNA guide
auuagaugaaaugaccccuaga

SEQ ID NO: 78849 - RNA, 22 nt, Artificial Sequence
  LRRK2 RNA guide
cuaggggucauuucaucuaauu

SEQ ID NO: 78850 - RNA, 22 nt, Artificial Sequence
  LRRK2 RNA guide
cucuaggggucauuucaucuaa

SEQ ID NO: 78851 - RNA, 22 nt, Artificial Sequence
  LRRK2 RNA guide
gaauuagaugaaaugaccccua

SEQ ID NO: 78852 - RNA, 22 nt, Artificial Sequence
  LRRK2 RNA guide
gacucuaggggucauuucaucu

SEQ ID NO: 78853 - RNA, 22 nt, Artificial Sequence
  LRRK2 RNA guide
gaugaaaugaccccuagagucu

SEQ ID NO: 78854 - RNA, 22 nt, Artificial Sequence
  LRRK2 RNA guide
ggggucauuucaucuaauucua

SEQ ID NO: 78855 - RNA, 22 nt, Artificial Sequence
  LRRK2 RNA guide
gggucauuucaucuaauucuaa

SEQ ID NO: 78856 - RNA, 22 nt, Artificial Sequence
  LRRK2 RNA guide
uagaauuagaugaaaugacccc

SEQ ID NO: 78857 - RNA, 22 nt, Artificial Sequence
  LRRK2 RNA guide
uagaugaaaugaccccuagagu

SEQ ID NO: 78858 - RNA, 22 nt, Artificial Sequence
  LRRK2 RNA guide
uaggggucauuucaucuaauuc

SEQ ID NO: 78859 - RNA, 22 nt, Artificial Sequence
  LRRK2 RNA guide
ucuaggggucauuucaucuaau

SEQ ID NO: 78860 - RNA, 22 nt, Artificial Sequence
  LRRK2 RNA guide
uuagaauuagaugaaaugaccc

SEQ ID NO: 78861 - RNA, 22 nt, Artificial Sequence
  LRRK2 RNA guide
uuagaugaaaugaccccuagag

SEQ ID NO: 78862 - RNA, 20 nt, Artificial Sequence
  LRRK2 RNA guide
aaggccacacagauaaugaa

SEQ ID NO: 78863 - RNA, 20 nt, Artificial Sequence
  LRRK2 RNA guide
acacagauaaugaacagcaa

SEQ ID NO: 78864 - RNA, 20 nt, Artificial Sequence
  LRRK2 RNA guide
acagauaaugaacagcaaag

SEQ ID NO: 78865 - RNA, 20 nt, Artificial Sequence
  LRRK2 RNA guide
acuuugcuguucauuaucug

SEQ ID NO: 78866 - RNA, 20 nt, Artificial Sequence
  LRRK2 RNA guide
aggccacacagauaaugaac

SEQ ID NO: 78867 - RNA, 20 nt, Artificial Sequence
  LRRK2 RNA guide
aucuguguggccuuaggaaa

SEQ ID NO: 78868 - RNA, 20 nt, Artificial Sequence
  LRRK2 RNA guide
auuaucuguguggccuuagg

SEQ ID NO: 78869 - RNA, 20 nt, Artificial Sequence
  LRRK2 RNA guide
auuuuccuaaggccacacag

SEQ ID NO: 78870 - RNA, 20 nt, Artificial Sequence
  LRRK2 RNA guide
cacacagauaaugaacagca

SEQ ID NO: 78871 - RNA, 20 nt, Artificial Sequence
  LRRK2 RNA guide
cacagauaaugaacagcaaa

SEQ ID NO: 78872 - RNA, 20 nt, Artificial Sequence
  LRRK2 RNA guide
cauuaucuguguggccuuag

SEQ ID NO: 78873 - RNA, 20 nt, Artificial Sequence
  LRRK2 RNA guide
ccacacagauaaugaacagc

SEQ ID NO: 78874 - RNA, 20 nt, Artificial Sequence
  LRRK2 RNA guide
ccuaaggccacacagauaau

SEQ ID NO: 78875 - RNA, 20 nt, Artificial Sequence
  LRRK2 RNA guide
cuaaggccacacagauaaug

SEQ ID NO: 78876 - RNA, 20 nt, Artificial Sequence
  LRRK2 RNA guide
cuguguggccuuaggaaaau

SEQ ID NO: 78877 - RNA, 20 nt, Artificial Sequence
  LRRK2 RNA guide
cuguucauuaucuguguggc

SEQ ID NO: 78878 - RNA, 20 nt, Artificial Sequence
  LRRK2 RNA guide
cuugacuuugcuguucauua

SEQ ID NO: 78879 - RNA, 20 nt, Artificial Sequence
  LRRK2 RNA guide
cuuugcuguucauuaucugu

SEQ ID NO: 78880 - RNA, 20 nt, Artificial Sequence
  LRRK2 RNA guide
gacuuugcuguucauuaucu

SEQ ID NO: 78881 - RNA, 20 nt, Artificial Sequence
  LRRK2 RNA guide
gccacacagauaaugaacag

SEQ ID NO: 78882 - RNA, 20 nt, Artificial Sequence
  LRRK2 RNA guide
gcuguucauuaucugugugg

SEQ ID NO: 78883 - RNA, 20 nt, Artificial Sequence
  LRRK2 RNA guide
ggccacacagauaaugaaca

SEQ ID NO: 78884 - RNA, 20 nt, Artificial Sequence
  LRRK2 RNA guide
guauuuuccuaaggccacac

SEQ ID NO: 78885 - RNA, 20 nt, Artificial Sequence
  LRRK2 RNA guide
guguauuuuccuaaggccac

SEQ ID NO: 78886 - RNA, 20 nt, Artificial Sequence
  LRRK2 RNA guide
guguguauuuuccuaaggcc

SEQ ID NO: 78887 - RNA, 20 nt, Artificial Sequence
  LRRK2 RNA guide
guucauuaucuguguggccu

SEQ ID NO: 78888 - RNA, 20 nt, Artificial Sequence
  LRRK2 RNA guide
uaaggccacacagauaauga

SEQ ID NO: 78889 - RNA, 20 nt, Artificial Sequence
  LRRK2 RNA guide
uaucuguguggccuuaggaa

SEQ ID NO: 78890 - RNA, 20 nt, Artificial Sequence
  LRRK2 RNA guide
uauuuuccuaaggccacaca

SEQ ID NO: 78891 - RNA, 20 nt, Artificial Sequence
  LRRK2 RNA guide
ucauuaucuguguggccuua

SEQ ID NO: 78892 - RNA, 20 nt, Artificial Sequence
  LRRK2 RNA guide
uccuaaggccacacagauaa

SEQ ID NO: 78893 - RNA, 20 nt, Artificial Sequence
  LRRK2 RNA guide
ucuguguggccuuaggaaaa

SEQ ID NO: 78894 - RNA, 20 nt, Artificial Sequence
  LRRK2 RNA guide
ucuugacuuugcuguucauu

SEQ ID NO: 78895 - RNA, 20 nt, Artificial Sequence
  LRRK2 RNA guide
ugacuuugcuguucauuauc

SEQ ID NO: 78896 - RNA, 20 nt, Artificial Sequence
  LRRK2 RNA guide
ugcuguucauuaucugugug

SEQ ID NO: 78897 - RNA, 20 nt, Artificial Sequence
  LRRK2 RNA guide
uguauuuuccuaaggccaca

SEQ ID NO: 78898 - RNA, 20 nt, Artificial Sequence
  LRRK2 RNA guide
uguguauuuuccuaaggcca

SEQ ID NO: 78899 - RNA, 20 nt, Artificial Sequence
  LRRK2 RNA guide
uguguggccuuaggaaaaua

SEQ ID NO: 78900 - RNA, 20 nt, Artificial Sequence
  LRRK2 RNA guide
uguguguauuuuccuaaggc

SEQ ID NO: 78901 - RNA, 20 nt, Artificial Sequence
  LRRK2 RNA guide
uguucauuaucuguguggcc

SEQ ID NO: 78902 - RNA, 20 nt, Artificial Sequence
  LRRK2 RNA guide
uuaucuguguggccuuagga

SEQ ID NO: 78903 - RNA, 20 nt, Artificial Sequence
  LRRK2 RNA guide
uucauuaucuguguggccuu

SEQ ID NO: 78904 - RNA, 20 nt, Artificial Sequence
  LRRK2 RNA guide
uuccuaaggccacacagaua

SEQ ID NO: 78905 - RNA, 20 nt, Artificial Sequence
  LRRK2 RNA guide
uugacuuugcuguucauuau

SEQ ID NO: 78906 - RNA, 20 nt, Artificial Sequence
  LRRK2 RNA guide
uugcuguucauuaucugugu

SEQ ID NO: 78907 - RNA, 20 nt, Artificial Sequence
  LRRK2 RNA guide
uuuccuaaggccacacagau

SEQ ID NO: 78908 - RNA, 20 nt, Artificial Sequence
  LRRK2 RNA guide
uuugcuguucauuaucugug

SEQ ID NO: 78909 - RNA, 20 nt, Artificial Sequence
  LRRK2 RNA guide
uuuuccuaaggccacacaga

SEQ ID NO: 78910 - RNA, 21 nt, Artificial Sequence
  LRRK2 RNA guide
aaggccacacagauaaugaac

SEQ ID NO: 78911 - RNA, 21 nt, Artificial Sequence
  LRRK2 RNA guide
acacagauaaugaacagcaaa

SEQ ID NO: 78912 - RNA, 21 nt, Artificial Sequence
  LRRK2 RNA guide
acagauaaugaacagcaaagu

SEQ ID NO: 78913 - RNA, 21 nt, Artificial Sequence
  LRRK2 RNA guide
acuuugcuguucauuaucugu

SEQ ID NO: 78914 - RNA, 21 nt, Artificial Sequence
  LRRK2 RNA guide
aggccacacagauaaugaaca

SEQ ID NO: 78915 - RNA, 21 nt, Artificial Sequence
  LRRK2 RNA guide
aucuguguggccuuaggaaaa

SEQ ID NO: 78916 - RNA, 21 nt, Artificial Sequence
  LRRK2 RNA guide
auguguguauuuuccuaaggc

SEQ ID NO: 78917 - RNA, 21 nt, Artificial Sequence
  LRRK2 RNA guide
auuaucuguguggccuuagga

SEQ ID NO: 78918 - RNA, 21 nt, Artificial Sequence
  LRRK2 RNA guide
auuuuccuaaggccacacaga

SEQ ID NO: 78919 - RNA, 21 nt, Artificial Sequence
  LRRK2 RNA guide
cacacagauaaugaacagcaa

SEQ ID NO: 78920 - RNA, 21 nt, Artificial Sequence
  LRRK2 RNA guide
cacagauaaugaacagcaaag

SEQ ID NO: 78921 - RNA, 21 nt, Artificial Sequence
  LRRK2 RNA guide
cauuaucuguguggccuuagg

SEQ ID NO: 78922 - RNA, 21 nt, Artificial Sequence
  LRRK2 RNA guide
ccacacagauaaugaacagca

SEQ ID NO: 78923 - RNA, 21 nt, Artificial Sequence
  LRRK2 RNA guide
ccuaaggccacacagauaaug

SEQ ID NO: 78924 - RNA, 21 nt, Artificial Sequence
  LRRK2 RNA guide
cuaaggccacacagauaauga

SEQ ID NO: 78925 - RNA, 21 nt, Artificial Sequence
  LRRK2 RNA guide
cucuugacuuugcuguucauu

SEQ ID NO: 78926 - RNA, 21 nt, Artificial Sequence
  LRRK2 RNA guide
cuguguggccuuaggaaaaua

SEQ ID NO: 78927 - RNA, 21 nt, Artificial Sequence
  LRRK2 RNA guide
cuguucauuaucuguguggcc

SEQ ID NO: 78928 - RNA, 21 nt, Artificial Sequence
  LRRK2 RNA guide
cuugacuuugcuguucauuau

SEQ ID NO: 78929 - RNA, 21 nt, Artificial Sequence
  LRRK2 RNA guide
cuuugcuguucauuaucugug

SEQ ID NO: 78930 - RNA, 21 nt, Artificial Sequence
  LRRK2 RNA guide
gacuuugcuguucauuaucug

SEQ ID NO: 78931 - RNA, 21 nt, Artificial Sequence
  LRRK2 RNA guide
gccacacagauaaugaacagc

SEQ ID NO: 78932 - RNA, 21 nt, Artificial Sequence
  LRRK2 RNA guide
gcuguucauuaucuguguggc

SEQ ID NO: 78933 - RNA, 21 nt, Artificial Sequence
  LRRK2 RNA guide
ggccacacagauaaugaacag

SEQ ID NO: 78934 - RNA, 21 nt, Artificial Sequence
  LRRK2 RNA guide
guauuuuccuaaggccacaca

SEQ ID NO: 78935 - RNA, 21 nt, Artificial Sequence
  LRRK2 RNA guide
guguauuuuccuaaggccaca

SEQ ID NO: 78936 - RNA, 21 nt, Artificial Sequence
  LRRK2 RNA guide
guguguauuuuccuaaggcca

SEQ ID NO: 78937 - RNA, 21 nt, Artificial Sequence
  LRRK2 RNA guide
guucauuaucuguguggccuu

SEQ ID NO: 78938 - RNA, 21 nt, Artificial Sequence
  LRRK2 RNA guide
uaaggccacacagauaaugaa

SEQ ID NO: 78939 - RNA, 21 nt, Artificial Sequence
  LRRK2 RNA guide
uaucuguguggccuuaggaaa

SEQ ID NO: 78940 - RNA, 21 nt, Artificial Sequence
  LRRK2 RNA guide
uauuuuccuaaggccacacag

SEQ ID NO: 78941 - RNA, 21 nt, Artificial Sequence
  LRRK2 RNA guide
ucauuaucuguguggccuuag

SEQ ID NO: 78942 - RNA, 21 nt, Artificial Sequence
  LRRK2 RNA guide
uccuaaggccacacagauaau

SEQ ID NO: 78943 - RNA, 21 nt, Artificial Sequence
  LRRK2 RNA guide
ucuguguggccuuaggaaaau

SEQ ID NO: 78944 - RNA, 21 nt, Artificial Sequence
  LRRK2 RNA guide
ucuugacuuugcuguucauua

SEQ ID NO: 78945 - RNA, 21 nt, Artificial Sequence
  LRRK2 RNA guide
ugacuuugcuguucauuaucu

SEQ ID NO: 78946 - RNA, 21 nt, Artificial Sequence
  LRRK2 RNA guide
ugcuguucauuaucugugugg

SEQ ID NO: 78947 - RNA, 21 nt, Artificial Sequence
  LRRK2 RNA guide
uguauuuuccuaaggccacac

SEQ ID NO: 78948 - RNA, 21 nt, Artificial Sequence
  LRRK2 RNA guide
uguguauuuuccuaaggccac

SEQ ID NO: 78949 - RNA, 21 nt, Artificial Sequence
  LRRK2 RNA guide
uguguggccuuaggaaaauac

SEQ ID NO: 78950 - RNA, 21 nt, Artificial Sequence
  LRRK2 RNA guide
uguguguauuuuccuaaggcc

SEQ ID NO: 78951 - RNA, 21 nt, Artificial Sequence
  LRRK2 RNA guide
uguucauuaucuguguggccu

SEQ ID NO: 78952 - RNA, 21 nt, Artificial Sequence
  LRRK2 RNA guide
uuaucuguguggccuuaggaa

SEQ ID NO: 78953 - RNA, 21 nt, Artificial Sequence
  LRRK2 RNA guide
uucauuaucuguguggccuua

SEQ ID NO: 78954 - RNA, 21 nt, Artificial Sequence
  LRRK2 RNA guide
uuccuaaggccacacagauaa

SEQ ID NO: 78955 - RNA, 21 nt, Artificial Sequence
  LRRK2 RNA guide
uugacuuugcuguucauuauc

SEQ ID NO: 78956 - RNA, 21 nt, Artificial Sequence
  LRRK2 RNA guide
uugcuguucauuaucugugug

SEQ ID NO: 78957 - RNA, 21 nt, Artificial Sequence
  LRRK2 RNA guide
uuuccuaaggccacacagaua

SEQ ID NO: 78958 - RNA, 21 nt, Artificial Sequence
  LRRK2 RNA guide
uuugcuguucauuaucugugu

SEQ ID NO: 78959 - RNA, 21 nt, Artificial Sequence
  LRRK2 RNA guide
uuuuccuaaggccacacagau

SEQ ID NO: 78960 - RNA, 22 nt, Artificial Sequence
  LRRK2 RNA guide
aaggccacacagauaaugaaca

SEQ ID NO: 78961 - RNA, 22 nt, Artificial Sequence
  LRRK2 RNA guide
aauguguguauuuuccuaaggc

SEQ ID NO: 78962 - RNA, 22 nt, Artificial Sequence
  LRRK2 RNA guide
acacagauaaugaacagcaaag

SEQ ID NO: 78963 - RNA, 22 nt, Artificial Sequence
  LRRK2 RNA guide
acagauaaugaacagcaaaguc

SEQ ID NO: 78964 - RNA, 22 nt, Artificial Sequence
  LRRK2 RNA guide
acucuugacuuugcuguucauu

SEQ ID NO: 78965 - RNA, 22 nt, Artificial Sequence
  LRRK2 RNA guide
acuuugcuguucauuaucugug

SEQ ID NO: 78966 - RNA, 22 nt, Artificial Sequence
  LRRK2 RNA guide
aggccacacagauaaugaacag

SEQ ID NO: 78967 - RNA, 22 nt, Artificial Sequence
  LRRK2 RNA guide
aucuguguggccuuaggaaaau

SEQ ID NO: 78968 - RNA, 22 nt, Artificial Sequence
  LRRK2 RNA guide
auguguguauuuuccuaaggcc

SEQ ID NO: 78969 - RNA, 22 nt, Artificial Sequence
  LRRK2 RNA guide
auuaucuguguggccuuaggaa

SEQ ID NO: 78970 - RNA, 22 nt, Artificial Sequence
  LRRK2 RNA guide
auuuuccuaaggccacacagau

SEQ ID NO: 78971 - RNA, 22 nt, Artificial Sequence
  LRRK2 RNA guide
cacacagauaaugaacagcaaa

SEQ ID NO: 78972 - RNA, 22 nt, Artificial Sequence
  LRRK2 RNA guide
cacagauaaugaacagcaaagu

SEQ ID NO: 78973 - RNA, 22 nt, Artificial Sequence
  LRRK2 RNA guide
cauuaucuguguggccuuagga

SEQ ID NO: 78974 - RNA, 22 nt, Artificial Sequence
  LRRK2 RNA guide
ccacacagauaaugaacagcaa

SEQ ID NO: 78975 - RNA, 22 nt, Artificial Sequence
  LRRK2 RNA guide
ccuaaggccacacagauaauga

SEQ ID NO: 78976 - RNA, 22 nt, Artificial Sequence
  LRRK2 RNA guide
cuaaggccacacagauaaugaa

SEQ ID NO: 78977 - RNA, 22 nt, Artificial Sequence
  LRRK2 RNA guide
cucuugacuuugcuguucauua

SEQ ID NO: 78978 - RNA, 22 nt, Artificial Sequence
  LRRK2 RNA guide
cuguguggccuuaggaaaauac

SEQ ID NO: 78979 - RNA, 22 nt, Artificial Sequence
  LRRK2 RNA guide
cuguucauuaucuguguggccu

SEQ ID NO: 78980 - RNA, 22 nt, Artificial Sequence
  LRRK2 RNA guide
cuugacuuugcuguucauuauc

SEQ ID NO: 78981 - RNA, 22 nt, Artificial Sequence
  LRRK2 RNA guide
cuuugcuguucauuaucugugu

SEQ ID NO: 78982 - RNA, 22 nt, Artificial Sequence
  LRRK2 RNA guide
gacuuugcuguucauuaucugu

SEQ ID NO: 78983 - RNA, 22 nt, Artificial Sequence
  LRRK2 RNA guide
gccacacagauaaugaacagca

SEQ ID NO: 78984 - RNA, 22 nt, Artificial Sequence
  LRRK2 RNA guide
gcuguucauuaucuguguggcc

SEQ ID NO: 78985 - RNA, 22 nt, Artificial Sequence
  LRRK2 RNA guide
ggccacacagauaaugaacagc

SEQ ID NO: 78986 - RNA, 22 nt, Artificial Sequence
  LRRK2 RNA guide
guauuuuccuaaggccacacag

SEQ ID NO: 78987 - RNA, 22 nt, Artificial Sequence
  LRRK2 RNA guide
guguauuuuccuaaggccacac

SEQ ID NO: 78988 - RNA, 22 nt, Artificial Sequence
  LRRK2 RNA guide
guguguauuuuccuaaggccac

SEQ ID NO: 78989 - RNA, 22 nt, Artificial Sequence
  LRRK2 RNA guide
guucauuaucuguguggccuua

SEQ ID NO: 78990 - RNA, 22 nt, Artificial Sequence
  LRRK2 RNA guide
uaaggccacacagauaaugaac

SEQ ID NO: 78991 - RNA, 22 nt, Artificial Sequence
  LRRK2 RNA guide
uaucuguguggccuuaggaaaa

SEQ ID NO: 78992 - RNA, 22 nt, Artificial Sequence
  LRRK2 RNA guide
uauuuuccuaaggccacacaga

SEQ ID NO: 78993 - RNA, 22 nt, Artificial Sequence
  LRRK2 RNA guide
ucauuaucuguguggccuuagg

SEQ ID NO: 78994 - RNA, 22 nt, Artificial Sequence
  LRRK2 RNA guide
uccuaaggccacacagauaaug

SEQ ID NO: 78995 - RNA, 22 nt, Artificial Sequence
  LRRK2 RNA guide
ucuguguggccuuaggaaaaua

SEQ ID NO: 78996 - RNA, 22 nt, Artificial Sequence
  LRRK2 RNA guide
ucuugacuuugcuguucauuau

SEQ ID NO: 78997 - RNA, 22 nt, Artificial Sequence
  LRRK2 RNA guide
ugacuuugcuguucauuaucug

SEQ ID NO: 78998 - RNA, 22 nt, Artificial Sequence
  LRRK2 RNA guide
ugcuguucauuaucuguguggc

SEQ ID NO: 78999 - RNA, 22 nt, Artificial Sequence
  LRRK2 RNA guide
uguauuuuccuaaggccacaca

SEQ ID NO: 79000 - RNA, 22 nt, Artificial Sequence
  LRRK2 RNA guide
uguguauuuuccuaaggccaca

SEQ ID NO: 79001 - RNA, 22 nt, Artificial Sequence
  LRRK2 RNA guide
uguguggccuuaggaaaauaca

SEQ ID NO: 79002 - RNA, 22 nt, Artificial Sequence
  LRRK2 RNA guide
uguguguauuuuccuaaggcca

SEQ ID NO: 79003 - RNA, 22 nt, Artificial Sequence
  LRRK2 RNA guide
uguucauuaucuguguggccuu

SEQ ID NO: 79004 - RNA, 22 nt, Artificial Sequence
  LRRK2 RNA guide
uuaucuguguggccuuaggaaa

SEQ ID NO: 79005 - RNA, 22 nt, Artificial Sequence
  LRRK2 RNA guide
uucauuaucuguguggccuuag

SEQ ID NO: 79006 - RNA, 22 nt, Artificial Sequence
  LRRK2 RNA guide
uuccuaaggccacacagauaau

SEQ ID NO: 79007 - RNA, 22 nt, Artificial Sequence
  LRRK2 RNA guide
uugacuuugcuguucauuaucu

SEQ ID NO: 79008 - RNA, 22 nt, Artificial Sequence
  LRRK2 RNA guide
uugcuguucauuaucugugugg

SEQ ID NO: 79009 - RNA, 22 nt, Artificial Sequence
  LRRK2 RNA guide
uuuccuaaggccacacagauaa

SEQ ID NO: 79010 - RNA, 22 nt, Artificial Sequence
  LRRK2 RNA guide
uuugcuguucauuaucugugug

SEQ ID NO: 79011 - RNA, 22 nt, Artificial Sequence
  LRRK2 RNA guide
uuuuccuaaggccacacagaua

SEQ ID NO: 79012 - RNA, 20 nt, Artificial Sequence
  LRRK2 RNA guide
aaggccacauagauaaugaa

SEQ ID NO: 79013 - RNA, 20 nt, Artificial Sequence
  LRRK2 RNA guide
acauagauaaugaacagcaa

SEQ ID NO: 79014 - RNA, 20 nt, Artificial Sequence
  LRRK2 RNA guide
acuuugcuguucauuaucua

SEQ ID NO: 79015 - RNA, 20 nt, Artificial Sequence
  LRRK2 RNA guide
aggccacauagauaaugaac

SEQ ID NO: 79016 - RNA, 20 nt, Artificial Sequence
  LRRK2 RNA guide
auagauaaugaacagcaaag

SEQ ID NO: 79017 - RNA, 20 nt, Artificial Sequence
  LRRK2 RNA guide
aucuauguggccuuaggaaa

SEQ ID NO: 79018 - RNA, 20 nt, Artificial Sequence
  LRRK2 RNA guide
auuaucuauguggccuuagg

SEQ ID NO: 79019 - RNA, 20 nt, Artificial Sequence
  LRRK2 RNA guide
auuuuccuaaggccacauag

SEQ ID NO: 79020 - RNA, 20 nt, Artificial Sequence
  LRRK2 RNA guide
cacauagauaaugaacagca

SEQ ID NO: 79021 - RNA, 20 nt, Artificial Sequence
  LRRK2 RNA guide
cauagauaaugaacagcaaa

SEQ ID NO: 79022 - RNA, 20 nt, Artificial Sequence
  LRRK2 RNA guide
cauuaucuauguggccuuag

SEQ ID NO: 79023 - RNA, 20 nt, Artificial Sequence
  LRRK2 RNA guide
ccacauagauaaugaacagc

SEQ ID NO: 79024 - RNA, 20 nt, Artificial Sequence
  LRRK2 RNA guide
ccuaaggccacauagauaau

SEQ ID NO: 79025 - RNA, 20 nt, Artificial Sequence
  LRRK2 RNA guide
cuaaggccacauagauaaug

SEQ ID NO: 79026 - RNA, 20 nt, Artificial Sequence
  LRRK2 RNA guide
cuauguggccuuaggaaaau

SEQ ID NO: 79027 - RNA, 20 nt, Artificial Sequence
  LRRK2 RNA guide
cuguucauuaucuauguggc

SEQ ID NO: 79028 - RNA, 20 nt, Artificial Sequence
  LRRK2 RNA guide
cuuugcuguucauuaucuau

SEQ ID NO: 79029 - RNA, 20 nt, Artificial Sequence
  LRRK2 RNA guide
gccacauagauaaugaacag

SEQ ID NO: 79030 - RNA, 20 nt, Artificial Sequence
  LRRK2 RNA guide
gcuguucauuaucuaugugg

SEQ ID NO: 79031 - RNA, 20 nt, Artificial Sequence
  LRRK2 RNA guide
ggccacauagauaaugaaca

SEQ ID NO: 79032 - RNA, 20 nt, Artificial Sequence
  LRRK2 RNA guide
guauuuuccuaaggccacau

SEQ ID NO: 79033 - RNA, 20 nt, Artificial Sequence
  LRRK2 RNA guide
guucauuaucuauguggccu

SEQ ID NO: 79034 - RNA, 20 nt, Artificial Sequence
  LRRK2 RNA guide
uaaggccacauagauaauga

SEQ ID NO: 79035 - RNA, 20 nt, Artificial Sequence
  LRRK2 RNA guide
uaucuauguggccuuaggaa

SEQ ID NO: 79036 - RNA, 20 nt, Artificial Sequence
  LRRK2 RNA guide
uauguggccuuaggaaaaua

SEQ ID NO: 79037 - RNA, 20 nt, Artificial Sequence
  LRRK2 RNA guide
uauuuuccuaaggccacaua

SEQ ID NO: 79038 - RNA, 20 nt, Artificial Sequence
  LRRK2 RNA guide
ucauuaucuauguggccuua

SEQ ID NO: 79039 - RNA, 20 nt, Artificial Sequence
  LRRK2 RNA guide
uccuaaggccacauagauaa

SEQ ID NO: 79040 - RNA, 20 nt, Artificial Sequence
  LRRK2 RNA guide
ucuauguggccuuaggaaaa

SEQ ID NO: 79041 - RNA, 20 nt, Artificial Sequence
  LRRK2 RNA guide
ugcuguucauuaucuaugug

SEQ ID NO: 79042 - RNA, 20 nt, Artificial Sequence
  LRRK2 RNA guide
uguucauuaucuauguggcc

SEQ ID NO: 79043 - RNA, 20 nt, Artificial Sequence
  LRRK2 RNA guide
uuaucuauguggccuuagga

SEQ ID NO: 79044 - RNA, 20 nt, Artificial Sequence
  LRRK2 RNA guide
uucauuaucuauguggccuu

SEQ ID NO: 79045 - RNA, 20 nt, Artificial Sequence
  LRRK2 RNA guide
uuccuaaggccacauagaua

SEQ ID NO: 79046 - RNA, 20 nt, Artificial Sequence
  LRRK2 RNA guide
uugcuguucauuaucuaugu

SEQ ID NO: 79047 - RNA, 20 nt, Artificial Sequence
  LRRK2 RNA guide
uuuccuaaggccacauagau

SEQ ID NO: 79048 - RNA, 20 nt, Artificial Sequence
  LRRK2 RNA guide
uuugcuguucauuaucuaug

SEQ ID NO: 79049 - RNA, 20 nt, Artificial Sequence
  LRRK2 RNA guide
uuuuccuaaggccacauaga

SEQ ID NO: 79050 - RNA, 21 nt, Artificial Sequence
  LRRK2 RNA guide
aaggccacauagauaaugaac

SEQ ID NO: 79051 - RNA, 21 nt, Artificial Sequence
  LRRK2 RNA guide
aggccacauagauaaugaaca

SEQ ID NO: 79052 - RNA, 21 nt, Artificial Sequence
  LRRK2 RNA guide
aucuauguggccuuaggaaaa

SEQ ID NO: 79053 - RNA, 21 nt, Artificial Sequence
  LRRK2 RNA guide
auuaucuauguggccuuagga

SEQ ID NO: 79054 - RNA, 21 nt, Artificial Sequence
  LRRK2 RNA guide
auuuuccuaaggccacauaga

SEQ ID NO: 79055 - RNA, 21 nt, Artificial Sequence
  LRRK2 RNA guide
cacauagauaaugaacagcaa

SEQ ID NO: 79056 - RNA, 21 nt, Artificial Sequence
  LRRK2 RNA guide
cauagauaaugaacagcaaag

SEQ ID NO: 79057 - RNA, 21 nt, Artificial Sequence
  LRRK2 RNA guide
cauuaucuauguggccuuagg

SEQ ID NO: 79058 - RNA, 21 nt, Artificial Sequence
  LRRK2 RNA guide
ccacauagauaaugaacagca

SEQ ID NO: 79059 - RNA, 21 nt, Artificial Sequence
  LRRK2 RNA guide
ccuaaggccacauagauaaug

SEQ ID NO: 79060 - RNA, 21 nt, Artificial Sequence
  LRRK2 RNA guide
cuaaggccacauagauaauga

SEQ ID NO: 79061 - RNA, 21 nt, Artificial Sequence
  LRRK2 RNA guide
cuauguggccuuaggaaaaua

SEQ ID NO: 79062 - RNA, 21 nt, Artificial Sequence
  LRRK2 RNA guide
cuguucauuaucuauguggcc

SEQ ID NO: 79063 - RNA, 21 nt, Artificial Sequence
  LRRK2 RNA guide
cuuugcuguucauuaucuaug

SEQ ID NO: 79064 - RNA, 21 nt, Artificial Sequence
  LRRK2 RNA guide
gacuuugcuguucauuaucua

SEQ ID NO: 79065 - RNA, 21 nt, Artificial Sequence
  LRRK2 RNA guide
gccacauagauaaugaacagc

SEQ ID NO: 79066 - RNA, 21 nt, Artificial Sequence
  LRRK2 RNA guide
gcuguucauuaucuauguggc

SEQ ID NO: 79067 - RNA, 21 nt, Artificial Sequence
  LRRK2 RNA guide
ggccacauagauaaugaacag

SEQ ID NO: 79068 - RNA, 21 nt, Artificial Sequence
  LRRK2 RNA guide
guauuuuccuaaggccacaua

SEQ ID NO: 79069 - RNA, 21 nt, Artificial Sequence
  LRRK2 RNA guide
guucauuaucuauguggccuu

SEQ ID NO: 79070 - RNA, 21 nt, Artificial Sequence
  LRRK2 RNA guide
uaaggccacauagauaaugaa

SEQ ID NO: 79071 - RNA, 21 nt, Artificial Sequence
  LRRK2 RNA guide
uaucuauguggccuuaggaaa

SEQ ID NO: 79072 - RNA, 21 nt, Artificial Sequence
  LRRK2 RNA guide
uauguggccuuaggaaaauac

SEQ ID NO: 79073 - RNA, 21 nt, Artificial Sequence
  LRRK2 RNA guide
uauuuuccuaaggccacauag

SEQ ID NO: 79074 - RNA, 21 nt, Artificial Sequence
  LRRK2 RNA guide
ucauuaucuauguggccuuag

SEQ ID NO: 79075 - RNA, 21 nt, Artificial Sequence
  LRRK2 RNA guide
uccuaaggccacauagauaau

SEQ ID NO: 79076 - RNA, 21 nt, Artificial Sequence
  LRRK2 RNA guide
ucuauguggccuuaggaaaau

SEQ ID NO: 79077 - RNA, 21 nt, Artificial Sequence
  LRRK2 RNA guide
ugcuguucauuaucuaugugg

SEQ ID NO: 79078 - RNA, 21 nt, Artificial Sequence
  LRRK2 RNA guide
uguauuuuccuaaggccacau

SEQ ID NO: 79079 - RNA, 21 nt, Artificial Sequence
  LRRK2 RNA guide
uguucauuaucuauguggccu

SEQ ID NO: 79080 - RNA, 21 nt, Artificial Sequence
  LRRK2 RNA guide
uuaucuauguggccuuaggaa

SEQ ID NO: 79081 - RNA, 21 nt, Artificial Sequence
  LRRK2 RNA guide
uucauuaucuauguggccuua

SEQ ID NO: 79082 - RNA, 21 nt, Artificial Sequence
  LRRK2 RNA guide
uuccuaaggccacauagauaa

SEQ ID NO: 79083 - RNA, 21 nt, Artificial Sequence
  LRRK2 RNA guide
uugcuguucauuaucuaugug

SEQ ID NO: 79084 - RNA, 21 nt, Artificial Sequence
  LRRK2 RNA guide
uuuccuaaggccacauagaua

SEQ ID NO: 79085 - RNA, 21 nt, Artificial Sequence
  LRRK2 RNA guide
uuuuccuaaggccacauagau

SEQ ID NO: 79086 - RNA, 22 nt, Artificial Sequence
  LRRK2 RNA guide
aaggccacauagauaaugaaca

SEQ ID NO: 79087 - RNA, 22 nt, Artificial Sequence
  LRRK2 RNA guide
acauagauaaugaacagcaaag

SEQ ID NO: 79088 - RNA, 22 nt, Artificial Sequence
  LRRK2 RNA guide
acuuugcuguucauuaucuaug

SEQ ID NO: 79089 - RNA, 22 nt, Artificial Sequence
  LRRK2 RNA guide
aggccacauagauaaugaacag

SEQ ID NO: 79090 - RNA, 22 nt, Artificial Sequence
  LRRK2 RNA guide
auagauaaugaacagcaaaguc

SEQ ID NO: 79091 - RNA, 22 nt, Artificial Sequence
  LRRK2 RNA guide
aucuauguggccuuaggaaaau

SEQ ID NO: 79092 - RNA, 22 nt, Artificial Sequence
  LRRK2 RNA guide
auuaucuauguggccuuaggaa

SEQ ID NO: 79093 - RNA, 22 nt, Artificial Sequence
  LRRK2 RNA guide
auuuuccuaaggccacauagau

SEQ ID NO: 79094 - RNA, 22 nt, Artificial Sequence
  LRRK2 RNA guide
cacauagauaaugaacagcaaa

SEQ ID NO: 79095 - RNA, 22 nt, Artificial Sequence
  LRRK2 RNA guide
cauagauaaugaacagcaaagu

SEQ ID NO: 79096 - RNA, 22 nt, Artificial Sequence
  LRRK2 RNA guide
cauuaucuauguggccuuagga

SEQ ID NO: 79097 - RNA, 22 nt, Artificial Sequence
  LRRK2 RNA guide
ccacauagauaaugaacagcaa

SEQ ID NO: 79098 - RNA, 22 nt, Artificial Sequence
  LRRK2 RNA guide
ccuaaggccacauagauaauga

SEQ ID NO: 79099 - RNA, 22 nt, Artificial Sequence
  LRRK2 RNA guide
cuaaggccacauagauaaugaa

SEQ ID NO: 79100 - RNA, 22 nt, Artificial Sequence
  LRRK2 RNA guide
cuauguggccuuaggaaaauac

SEQ ID NO: 79101 - RNA, 22 nt, Artificial Sequence
  LRRK2 RNA guide
cuguucauuaucuauguggccu

SEQ ID NO: 79102 - RNA, 22 nt, Artificial Sequence
  LRRK2 RNA guide
cuuugcuguucauuaucuaugu

SEQ ID NO: 79103 - RNA, 22 nt, Artificial Sequence
  LRRK2 RNA guide
gacuuugcuguucauuaucuau

SEQ ID NO: 79104 - RNA, 22 nt, Artificial Sequence
  LRRK2 RNA guide
gccacauagauaaugaacagca

SEQ ID NO: 79105 - RNA, 22 nt, Artificial Sequence
  LRRK2 RNA guide
gcuguucauuaucuauguggcc

SEQ ID NO: 79106 - RNA, 22 nt, Artificial Sequence
  LRRK2 RNA guide
ggccacauagauaaugaacagc

SEQ ID NO: 79107 - RNA, 22 nt, Artificial Sequence
  LRRK2 RNA guide
guauuuuccuaaggccacauag

SEQ ID NO: 79108 - RNA, 22 nt, Artificial Sequence
  LRRK2 RNA guide
guguauuuuccuaaggccacau

SEQ ID NO: 79109 - RNA, 22 nt, Artificial Sequence
  LRRK2 RNA guide
guucauuaucuauguggccuua

SEQ ID NO: 79110 - RNA, 22 nt, Artificial Sequence
  LRRK2 RNA guide
uaaggccacauagauaaugaac

SEQ ID NO: 79111 - RNA, 22 nt, Artificial Sequence
  LRRK2 RNA guide
uaucuauguggccuuaggaaaa

SEQ ID NO: 79112 - RNA, 22 nt, Artificial Sequence
  LRRK2 RNA guide
uauguggccuuaggaaaauaca

SEQ ID NO: 79113 - RNA, 22 nt, Artificial Sequence
  LRRK2 RNA guide
uauuuuccuaaggccacauaga

SEQ ID NO: 79114 - RNA, 22 nt, Artificial Sequence
  LRRK2 RNA guide
ucauuaucuauguggccuuagg

SEQ ID NO: 79115 - RNA, 22 nt, Artificial Sequence
  LRRK2 RNA guide
uccuaaggccacauagauaaug

SEQ ID NO: 79116 - RNA, 22 nt, Artificial Sequence
  LRRK2 RNA guide
ucuauguggccuuaggaaaaua

SEQ ID NO: 79117 - RNA, 22 nt, Artificial Sequence
  LRRK2 RNA guide
ugacuuugcuguucauuaucua

SEQ ID NO: 79118 - RNA, 22 nt, Artificial Sequence
  LRRK2 RNA guide
ugcuguucauuaucuauguggc

SEQ ID NO: 79119 - RNA, 22 nt, Artificial Sequence
  LRRK2 RNA guide
uguauuuuccuaaggccacaua

SEQ ID NO: 79120 - RNA, 22 nt, Artificial Sequence
  LRRK2 RNA guide
uguucauuaucuauguggccuu

SEQ ID NO: 79121 - RNA, 22 nt, Artificial Sequence
  LRRK2 RNA guide
uuaucuauguggccuuaggaaa

SEQ ID NO: 79122 - RNA, 22 nt, Artificial Sequence
  LRRK2 RNA guide
uucauuaucuauguggccuuag

SEQ ID NO: 79123 - RNA, 22 nt, Artificial Sequence
  LRRK2 RNA guide
uuccuaaggccacauagauaau

SEQ ID NO: 79124 - RNA, 22 nt, Artificial Sequence
  LRRK2 RNA guide
uugcuguucauuaucuaugugg

SEQ ID NO: 79125 - RNA, 22 nt, Artificial Sequence
  LRRK2 RNA guide
uuuccuaaggccacauagauaa

SEQ ID NO: 79126 - RNA, 22 nt, Artificial Sequence
  LRRK2 RNA guide
uuugcuguucauuaucuaugug

SEQ ID NO: 79127 - RNA, 22 nt, Artificial Sequence
  LRRK2 RNA guide
uuuuccuaaggccacauagaua

SEQ ID NO: 79128 - RNA, 20 nt, Artificial Sequence
  LRRK2 RNA guide
aaucaaugaauuuaugcguc

SEQ ID NO: 79129 - RNA, 20 nt, Artificial Sequence
  LRRK2 RNA guide
aaugaauuuaugcgucgggu

SEQ ID NO: 79130 - RNA, 20 nt, Artificial Sequence
  LRRK2 RNA guide
aauuuaugcgucggguauau

SEQ ID NO: 79131 - RNA, 20 nt, Artificial Sequence
  LRRK2 RNA guide
acauucauacucauauaccc

SEQ ID NO: 79132 - RNA, 20 nt, Artificial Sequence
  LRRK2 RNA guide
acccgacgcauaaauucauu

SEQ ID NO: 79133 - RNA, 20 nt, Artificial Sequence
  LRRK2 RNA guide
acucauauacccgacgcaua

SEQ ID NO: 79134 - RNA, 20 nt, Artificial Sequence
  LRRK2 RNA guide
auacccgacgcauaaauuca

SEQ ID NO: 79135 - RNA, 20 nt, Artificial Sequence
  LRRK2 RNA guide
auacucauauacccgacgca

SEQ ID NO: 79136 - RNA, 20 nt, Artificial Sequence
  LRRK2 RNA guide
auauacccgacgcauaaauu

SEQ ID NO: 79137 - RNA, 20 nt, Artificial Sequence
  LRRK2 RNA guide
aucaaugaauuuaugcgucg

SEQ ID NO: 79138 - RNA, 20 nt, Artificial Sequence
  LRRK2 RNA guide
augaauuuaugcgucgggua

SEQ ID NO: 79139 - RNA, 20 nt, Artificial Sequence
  LRRK2 RNA guide
augcgucggguauaugagua

SEQ ID NO: 79140 - RNA, 20 nt, Artificial Sequence
  LRRK2 RNA guide
auucauacucauauacccga

SEQ ID NO: 79141 - RNA, 20 nt, Artificial Sequence
  LRRK2 RNA guide
auuuaugcgucggguauaug

SEQ ID NO: 79142 - RNA, 20 nt, Artificial Sequence
  LRRK2 RNA guide
caaugaauuuaugcgucggg

SEQ ID NO: 79143 - RNA, 20 nt, Artificial Sequence
  LRRK2 RNA guide
cauacucauauacccgacgc

SEQ ID NO: 79144 - RNA, 20 nt, Artificial Sequence
  LRRK2 RNA guide
cauauacccgacgcauaaau

SEQ ID NO: 79145 - RNA, 20 nt, Artificial Sequence
  LRRK2 RNA guide
cauucauacucauauacccg

SEQ ID NO: 79146 - RNA, 20 nt, Artificial Sequence
  LRRK2 RNA guide
cccgacgcauaaauucauug

SEQ ID NO: 79147 - RNA, 20 nt, Artificial Sequence
  LRRK2 RNA guide
ccgacgcauaaauucauuga

SEQ ID NO: 79148 - RNA, 20 nt, Artificial Sequence
  LRRK2 RNA guide
cgacgcauaaauucauugau

SEQ ID NO: 79149 - RNA, 20 nt, Artificial Sequence
  LRRK2 RNA guide
cucauauacccgacgcauaa

SEQ ID NO: 79150 - RNA, 20 nt, Artificial Sequence
  LRRK2 RNA guide
gaauuuaugcgucggguaua

SEQ ID NO: 79151 - RNA, 20 nt, Artificial Sequence
  LRRK2 RNA guide
gacgcauaaauucauugauu

SEQ ID NO: 79152 - RNA, 20 nt, Artificial Sequence
  LRRK2 RNA guide
gcgucggguauaugaguaug

SEQ ID NO: 79153 - RNA, 20 nt, Artificial Sequence
  LRRK2 RNA guide
uacauucauacucauauacc

SEQ ID NO: 79154 - RNA, 20 nt, Artificial Sequence
  LRRK2 RNA guide
uacccgacgcauaaauucau

SEQ ID NO: 79155 - RNA, 20 nt, Artificial Sequence
  LRRK2 RNA guide
uacucauauacccgacgcau

SEQ ID NO: 79156 - RNA, 20 nt, Artificial Sequence
  LRRK2 RNA guide
uauacccgacgcauaaauuc

SEQ ID NO: 79157 - RNA, 20 nt, Artificial Sequence
  LRRK2 RNA guide
uaugcgucggguauaugagu

SEQ ID NO: 79158 - RNA, 20 nt, Artificial Sequence
  LRRK2 RNA guide
ucaaugaauuuaugcgucgg

SEQ ID NO: 79159 - RNA, 20 nt, Artificial Sequence
  LRRK2 RNA guide
ucauacucauauacccgacg

SEQ ID NO: 79160 - RNA, 20 nt, Artificial Sequence
  LRRK2 RNA guide
ucauauacccgacgcauaaa

SEQ ID NO: 79161 - RNA, 20 nt, Artificial Sequence
  LRRK2 RNA guide
ugaauuuaugcgucggguau

SEQ ID NO: 79162 - RNA, 20 nt, Artificial Sequence
  LRRK2 RNA guide
ugcgucggguauaugaguau

SEQ ID NO: 79163 - RNA, 20 nt, Artificial Sequence
  LRRK2 RNA guide
uuaugcgucggguauaugag

SEQ ID NO: 79164 - RNA, 20 nt, Artificial Sequence
  LRRK2 RNA guide
uucauacucauauacccgac

SEQ ID NO: 79165 - RNA, 20 nt, Artificial Sequence
  LRRK2 RNA guide
uuuaugcgucggguauauga

SEQ ID NO: 79166 - RNA, 21 nt, Artificial Sequence
  LRRK2 RNA guide
aaucaaugaauuuaugcgucg

SEQ ID NO: 79167 - RNA, 21 nt, Artificial Sequence
  LRRK2 RNA guide
aaugaauuuaugcgucgggua

SEQ ID NO: 79168 - RNA, 21 nt, Artificial Sequence
  LRRK2 RNA guide
aauuuaugcgucggguauaug

SEQ ID NO: 79169 - RNA, 21 nt, Artificial Sequence
  LRRK2 RNA guide
acauucauacucauauacccg

SEQ ID NO: 79170 - RNA, 21 nt, Artificial Sequence
  LRRK2 RNA guide
acccgacgcauaaauucauug

SEQ ID NO: 79171 - RNA, 21 nt, Artificial Sequence
  LRRK2 RNA guide
acucauauacccgacgcauaa

SEQ ID NO: 79172 - RNA, 21 nt, Artificial Sequence
  LRRK2 RNA guide
auacccgacgcauaaauucau

SEQ ID NO: 79173 - RNA, 21 nt, Artificial Sequence
  LRRK2 RNA guide
auacucauauacccgacgcau

SEQ ID NO: 79174 - RNA, 21 nt, Artificial Sequence
  LRRK2 RNA guide
auauacccgacgcauaaauuc

SEQ ID NO: 79175 - RNA, 21 nt, Artificial Sequence
  LRRK2 RNA guide
aucaaugaauuuaugcgucgg

SEQ ID NO: 79176 - RNA, 21 nt, Artificial Sequence
  LRRK2 RNA guide
augaauuuaugcgucggguau

SEQ ID NO: 79177 - RNA, 21 nt, Artificial Sequence
  LRRK2 RNA guide
augcgucggguauaugaguau

SEQ ID NO: 79178 - RNA, 21 nt, Artificial Sequence
  LRRK2 RNA guide
auucauacucauauacccgac

SEQ ID NO: 79179 - RNA, 21 nt, Artificial Sequence
  LRRK2 RNA guide
auuuaugcgucggguauauga

SEQ ID NO: 79180 - RNA, 21 nt, Artificial Sequence
  LRRK2 RNA guide
caaugaauuuaugcgucgggu

SEQ ID NO: 79181 - RNA, 21 nt, Artificial Sequence
  LRRK2 RNA guide
cauacucauauacccgacgca

SEQ ID NO: 79182 - RNA, 21 nt, Artificial Sequence
  LRRK2 RNA guide
cauauacccgacgcauaaauu

SEQ ID NO: 79183 - RNA, 21 nt, Artificial Sequence
  LRRK2 RNA guide
cauucauacucauauacccga

SEQ ID NO: 79184 - RNA, 21 nt, Artificial Sequence
  LRRK2 RNA guide
cccgacgcauaaauucauuga

SEQ ID NO: 79185 - RNA, 21 nt, Artificial Sequence
  LRRK2 RNA guide
ccgacgcauaaauucauugau

SEQ ID NO: 79186 - RNA, 21 nt, Artificial Sequence
  LRRK2 RNA guide
cgacgcauaaauucauugauu

SEQ ID NO: 79187 - RNA, 21 nt, Artificial Sequence
  LRRK2 RNA guide
cucauauacccgacgcauaaa

SEQ ID NO: 79188 - RNA, 21 nt, Artificial Sequence
  LRRK2 RNA guide
gaauuuaugcgucggguauau

SEQ ID NO: 79189 - RNA, 21 nt, Artificial Sequence
  LRRK2 RNA guide
gcgucggguauaugaguauga

SEQ ID NO: 79190 - RNA, 21 nt, Artificial Sequence
  LRRK2 RNA guide
uacauucauacucauauaccc

SEQ ID NO: 79191 - RNA, 21 nt, Artificial Sequence
  LRRK2 RNA guide
uacccgacgcauaaauucauu

SEQ ID NO: 79192 - RNA, 21 nt, Artificial Sequence
  LRRK2 RNA guide
uacucauauacccgacgcaua

SEQ ID NO: 79193 - RNA, 21 nt, Artificial Sequence
  LRRK2 RNA guide
uauacccgacgcauaaauuca

SEQ ID NO: 79194 - RNA, 21 nt, Artificial Sequence
  LRRK2 RNA guide
uaugcgucggguauaugagua

SEQ ID NO: 79195 - RNA, 21 nt, Artificial Sequence
  LRRK2 RNA guide
ucaaugaauuuaugcgucggg

SEQ ID NO: 79196 - RNA, 21 nt, Artificial Sequence
  LRRK2 RNA guide
ucauacucauauacccgacgc

SEQ ID NO: 79197 - RNA, 21 nt, Artificial Sequence
  LRRK2 RNA guide
ucauauacccgacgcauaaau

SEQ ID NO: 79198 - RNA, 21 nt, Artificial Sequence
  LRRK2 RNA guide
ugaauuuaugcgucggguaua

SEQ ID NO: 79199 - RNA, 21 nt, Artificial Sequence
  LRRK2 RNA guide
ugcgucggguauaugaguaug

SEQ ID NO: 79200 - RNA, 21 nt, Artificial Sequence
  LRRK2 RNA guide
uuaugcgucggguauaugagu

SEQ ID NO: 79201 - RNA, 21 nt, Artificial Sequence
  LRRK2 RNA guide
uucauacucauauacccgacg

SEQ ID NO: 79202 - RNA, 21 nt, Artificial Sequence
  LRRK2 RNA guide
uuuaugcgucggguauaugag

SEQ ID NO: 79203 - RNA, 22 nt, Artificial Sequence
  LRRK2 RNA guide
aaucaaugaauuuaugcgucgg

SEQ ID NO: 79204 - RNA, 22 nt, Artificial Sequence
  LRRK2 RNA guide
aaugaauuuaugcgucggguau

SEQ ID NO: 79205 - RNA, 22 nt, Artificial Sequence
  LRRK2 RNA guide
aauuuaugcgucggguauauga

SEQ ID NO: 79206 - RNA, 22 nt, Artificial Sequence
  LRRK2 RNA guide
acauucauacucauauacccga

SEQ ID NO: 79207 - RNA, 22 nt, Artificial Sequence
  LRRK2 RNA guide
acccgacgcauaaauucauuga

SEQ ID NO: 79208 - RNA, 22 nt, Artificial Sequence
  LRRK2 RNA guide
acucauauacccgacgcauaaa

SEQ ID NO: 79209 - RNA, 22 nt, Artificial Sequence
  LRRK2 RNA guide
auacauucauacucauauaccc

SEQ ID NO: 79210 - RNA, 22 nt, Artificial Sequence
  LRRK2 RNA guide
auacccgacgcauaaauucauu

SEQ ID NO: 79211 - RNA, 22 nt, Artificial Sequence
  LRRK2 RNA guide
auacucauauacccgacgcaua

SEQ ID NO: 79212 - RNA, 22 nt, Artificial Sequence
  LRRK2 RNA guide
auauacccgacgcauaaauuca

SEQ ID NO: 79213 - RNA, 22 nt, Artificial Sequence
  LRRK2 RNA guide
aucaaugaauuuaugcgucggg

SEQ ID NO: 79214 - RNA, 22 nt, Artificial Sequence
  LRRK2 RNA guide
augaauuuaugcgucggguaua

SEQ ID NO: 79215 - RNA, 22 nt, Artificial Sequence
  LRRK2 RNA guide
augcgucggguauaugaguaug

SEQ ID NO: 79216 - RNA, 22 nt, Artificial Sequence
  LRRK2 RNA guide
auucauacucauauacccgacg

SEQ ID NO: 79217 - RNA, 22 nt, Artificial Sequence
  LRRK2 RNA guide
auuuaugcgucggguauaugag

SEQ ID NO: 79218 - RNA, 22 nt, Artificial Sequence
  LRRK2 RNA guide
caaugaauuuaugcgucgggua

SEQ ID NO: 79219 - RNA, 22 nt, Artificial Sequence
  LRRK2 RNA guide
cauacucauauacccgacgcau

SEQ ID NO: 79220 - RNA, 22 nt, Artificial Sequence
  LRRK2 RNA guide
cauauacccgacgcauaaauuc

SEQ ID NO: 79221 - RNA, 22 nt, Artificial Sequence
  LRRK2 RNA guide
cauucauacucauauacccgac

SEQ ID NO: 79222 - RNA, 22 nt, Artificial Sequence
  LRRK2 RNA guide
cccgacgcauaaauucauugau

SEQ ID NO: 79223 - RNA, 22 nt, Artificial Sequence
  LRRK2 RNA guide
ccgacgcauaaauucauugauu

SEQ ID NO: 79224 - RNA, 22 nt, Artificial Sequence
  LRRK2 RNA guide
cgacgcauaaauucauugauua

SEQ ID NO: 79225 - RNA, 22 nt, Artificial Sequence
  LRRK2 RNA guide
cucauauacccgacgcauaaau

SEQ ID NO: 79226 - RNA, 22 nt, Artificial Sequence
  LRRK2 RNA guide
gaauuuaugcgucggguauaug

SEQ ID NO: 79227 - RNA, 22 nt, Artificial Sequence
  LRRK2 RNA guide
gcgucggguauaugaguaugaa

SEQ ID NO: 79228 - RNA, 22 nt, Artificial Sequence
  LRRK2 RNA guide
uaaucaaugaauuuaugcgucg

SEQ ID NO: 79229 - RNA, 22 nt, Artificial Sequence
  LRRK2 RNA guide
uacauucauacucauauacccg

SEQ ID NO: 79230 - RNA, 22 nt, Artificial Sequence
  LRRK2 RNA guide
uacccgacgcauaaauucauug

SEQ ID NO: 79231 - RNA, 22 nt, Artificial Sequence
  LRRK2 RNA guide
uacucauauacccgacgcauaa

SEQ ID NO: 79232 - RNA, 22 nt, Artificial Sequence
  LRRK2 RNA guide
uauacccgacgcauaaauucau

SEQ ID NO: 79233 - RNA, 22 nt, Artificial Sequence
  LRRK2 RNA guide
uaugcgucggguauaugaguau

SEQ ID NO: 79234 - RNA, 22 nt, Artificial Sequence
  LRRK2 RNA guide
ucaaugaauuuaugcgucgggu

SEQ ID NO: 79235 - RNA, 22 nt, Artificial Sequence
  LRRK2 RNA guide
ucauacucauauacccgacgca

SEQ ID NO: 79236 - RNA, 22 nt, Artificial Sequence
  LRRK2 RNA guide
ucauauacccgacgcauaaauu

SEQ ID NO: 79237 - RNA, 22 nt, Artificial Sequence
  LRRK2 RNA guide
ugaauuuaugcgucggguauau

SEQ ID NO: 79238 - RNA, 22 nt, Artificial Sequence
  LRRK2 RNA guide
ugcgucggguauaugaguauga

SEQ ID NO: 79239 - RNA, 22 nt, Artificial Sequence
  LRRK2 RNA guide
uuaugcgucggguauaugagua

SEQ ID NO: 79240 - RNA, 22 nt, Artificial Sequence
  LRRK2 RNA guide
uucauacucauauacccgacgc

SEQ ID NO: 79241 - RNA, 22 nt, Artificial Sequence
  LRRK2 RNA guide
uuuaugcgucggguauaugagu

SEQ ID NO: 79242 - RNA, 20 nt, Artificial Sequence
  LRRK2 RNA guide
aaugaauuuaugugucgggu

SEQ ID NO: 79243 - RNA, 20 nt, Artificial Sequence
  LRRK2 RNA guide
aauuuaugugucggguauau

SEQ ID NO: 79244 - RNA, 20 nt, Artificial Sequence
  LRRK2 RNA guide
acccgacacauaaauucauu

SEQ ID NO: 79245 - RNA, 20 nt, Artificial Sequence
  LRRK2 RNA guide
acucauauacccgacacaua

SEQ ID NO: 79246 - RNA, 20 nt, Artificial Sequence
  LRRK2 RNA guide
auacccgacacauaaauuca

SEQ ID NO: 79247 - RNA, 20 nt, Artificial Sequence
  LRRK2 RNA guide
auacucauauacccgacaca

SEQ ID NO: 79248 - RNA, 20 nt, Artificial Sequence
  LRRK2 RNA guide
auauacccgacacauaaauu

SEQ ID NO: 79249 - RNA, 20 nt, Artificial Sequence
  LRRK2 RNA guide
aucaaugaauuuaugugucg

SEQ ID NO: 79250 - RNA, 20 nt, Artificial Sequence
  LRRK2 RNA guide
augaauuuaugugucgggua

SEQ ID NO: 79251 - RNA, 20 nt, Artificial Sequence
  LRRK2 RNA guide
augugucggguauaugagua

SEQ ID NO: 79252 - RNA, 20 nt, Artificial Sequence
  LRRK2 RNA guide
auuuaugugucggguauaug

SEQ ID NO: 79253 - RNA, 20 nt, Artificial Sequence
  LRRK2 RNA guide
caaugaauuuaugugucggg

SEQ ID NO: 79254 - RNA, 20 nt, Artificial Sequence
  LRRK2 RNA guide
cauacucauauacccgacac

SEQ ID NO: 79255 - RNA, 20 nt, Artificial Sequence
  LRRK2 RNA guide
cauauacccgacacauaaau

SEQ ID NO: 79256 - RNA, 20 nt, Artificial Sequence
  LRRK2 RNA guide
cccgacacauaaauucauug

SEQ ID NO: 79257 - RNA, 20 nt, Artificial Sequence
  LRRK2 RNA guide
ccgacacauaaauucauuga

SEQ ID NO: 79258 - RNA, 20 nt, Artificial Sequence
  LRRK2 RNA guide
cgacacauaaauucauugau

SEQ ID NO: 79259 - RNA, 20 nt, Artificial Sequence
  LRRK2 RNA guide
cucauauacccgacacauaa

SEQ ID NO: 79260 - RNA, 20 nt, Artificial Sequence
  LRRK2 RNA guide
gaauuuaugugucggguaua

SEQ ID NO: 79261 - RNA, 20 nt, Artificial Sequence
  LRRK2 RNA guide
gugucggguauaugaguaug

SEQ ID NO: 79262 - RNA, 20 nt, Artificial Sequence
  LRRK2 RNA guide
uacccgacacauaaauucau

SEQ ID NO: 79263 - RNA, 20 nt, Artificial Sequence
  LRRK2 RNA guide
uacucauauacccgacacau

SEQ ID NO: 79264 - RNA, 20 nt, Artificial Sequence
  LRRK2 RNA guide
uauacccgacacauaaauuc

SEQ ID NO: 79265 - RNA, 20 nt, Artificial Sequence
  LRRK2 RNA guide
uaugugucggguauaugagu

SEQ ID NO: 79266 - RNA, 20 nt, Artificial Sequence
  LRRK2 RNA guide
ucaaugaauuuaugugucgg

SEQ ID NO: 79267 - RNA, 20 nt, Artificial Sequence
  LRRK2 RNA guide
ucauacucauauacccgaca

SEQ ID NO: 79268 - RNA, 20 nt, Artificial Sequence
  LRRK2 RNA guide
ucauauacccgacacauaaa

SEQ ID NO: 79269 - RNA, 20 nt, Artificial Sequence
  LRRK2 RNA guide
ugaauuuaugugucggguau

SEQ ID NO: 79270 - RNA, 20 nt, Artificial Sequence
  LRRK2 RNA guide
ugugucggguauaugaguau

SEQ ID NO: 79271 - RNA, 20 nt, Artificial Sequence
  LRRK2 RNA guide
uuaugugucggguauaugag

SEQ ID NO: 79272 - RNA, 20 nt, Artificial Sequence
  LRRK2 RNA guide
uuuaugugucggguauauga

SEQ ID NO: 79273 - RNA, 21 nt, Artificial Sequence
  LRRK2 RNA guide
aaugaauuuaugugucgggua

SEQ ID NO: 79274 - RNA, 21 nt, Artificial Sequence
  LRRK2 RNA guide
aauuuaugugucggguauaug

SEQ ID NO: 79275 - RNA, 21 nt, Artificial Sequence
  LRRK2 RNA guide
acccgacacauaaauucauug

SEQ ID NO: 79276 - RNA, 21 nt, Artificial Sequence
  LRRK2 RNA guide
acucauauacccgacacauaa

SEQ ID NO: 79277 - RNA, 21 nt, Artificial Sequence
  LRRK2 RNA guide
auacccgacacauaaauucau

SEQ ID NO: 79278 - RNA, 21 nt, Artificial Sequence
  LRRK2 RNA guide
auacucauauacccgacacau

SEQ ID NO: 79279 - RNA, 21 nt, Artificial Sequence
  LRRK2 RNA guide
auauacccgacacauaaauuc

SEQ ID NO: 79280 - RNA, 21 nt, Artificial Sequence
  LRRK2 RNA guide
aucaaugaauuuaugugucgg

SEQ ID NO: 79281 - RNA, 21 nt, Artificial Sequence
  LRRK2 RNA guide
augaauuuaugugucggguau

SEQ ID NO: 79282 - RNA, 21 nt, Artificial Sequence
  LRRK2 RNA guide
augugucggguauaugaguau

SEQ ID NO: 79283 - RNA, 21 nt, Artificial Sequence
  LRRK2 RNA guide
auuuaugugucggguauauga

SEQ ID NO: 79284 - RNA, 21 nt, Artificial Sequence
  LRRK2 RNA guide
caaugaauuuaugugucgggu

SEQ ID NO: 79285 - RNA, 21 nt, Artificial Sequence
  LRRK2 RNA guide
cauacucauauacccgacaca

SEQ ID NO: 79286 - RNA, 21 nt, Artificial Sequence
  LRRK2 RNA guide
cauauacccgacacauaaauu

SEQ ID NO: 79287 - RNA, 21 nt, Artificial Sequence
  LRRK2 RNA guide
cccgacacauaaauucauuga

SEQ ID NO: 79288 - RNA, 21 nt, Artificial Sequence
  LRRK2 RNA guide
ccgacacauaaauucauugau

SEQ ID NO: 79289 - RNA, 21 nt, Artificial Sequence
  LRRK2 RNA guide
cucauauacccgacacauaaa

SEQ ID NO: 79290 - RNA, 21 nt, Artificial Sequence
  LRRK2 RNA guide
gaauuuaugugucggguauau

SEQ ID NO: 79291 - RNA, 21 nt, Artificial Sequence
  LRRK2 RNA guide
gugucggguauaugaguauga

SEQ ID NO: 79292 - RNA, 21 nt, Artificial Sequence
  LRRK2 RNA guide
uacccgacacauaaauucauu

SEQ ID NO: 79293 - RNA, 21 nt, Artificial Sequence
  LRRK2 RNA guide
uacucauauacccgacacaua

SEQ ID NO: 79294 - RNA, 21 nt, Artificial Sequence
  LRRK2 RNA guide
uauacccgacacauaaauuca

SEQ ID NO: 79295 - RNA, 21 nt, Artificial Sequence
  LRRK2 RNA guide
uaugugucggguauaugagua

SEQ ID NO: 79296 - RNA, 21 nt, Artificial Sequence
  LRRK2 RNA guide
ucaaugaauuuaugugucggg

SEQ ID NO: 79297 - RNA, 21 nt, Artificial Sequence
  LRRK2 RNA guide
ucauacucauauacccgacac

SEQ ID NO: 79298 - RNA, 21 nt, Artificial Sequence
  LRRK2 RNA guide
ucauauacccgacacauaaau

SEQ ID NO: 79299 - RNA, 21 nt, Artificial Sequence
  LRRK2 RNA guide
ugaauuuaugugucggguaua

SEQ ID NO: 79300 - RNA, 21 nt, Artificial Sequence
  LRRK2 RNA guide
ugugucggguauaugaguaug

SEQ ID NO: 79301 - RNA, 21 nt, Artificial Sequence
  LRRK2 RNA guide
uuaugugucggguauaugagu

SEQ ID NO: 79302 - RNA, 21 nt, Artificial Sequence
  LRRK2 RNA guide
uucauacucauauacccgaca

SEQ ID NO: 79303 - RNA, 21 nt, Artificial Sequence
  LRRK2 RNA guide
uuuaugugucggguauaugag

SEQ ID NO: 79304 - RNA, 22 nt, Artificial Sequence
  LRRK2 RNA guide
aaucaaugaauuuaugugucgg

SEQ ID NO: 79305 - RNA, 22 nt, Artificial Sequence
  LRRK2 RNA guide
aaugaauuuaugugucggguau

SEQ ID NO: 79306 - RNA, 22 nt, Artificial Sequence
  LRRK2 RNA guide
aauuuaugugucggguauauga

SEQ ID NO: 79307 - RNA, 22 nt, Artificial Sequence
  LRRK2 RNA guide
acccgacacauaaauucauuga

SEQ ID NO: 79308 - RNA, 22 nt, Artificial Sequence
  LRRK2 RNA guide
acucauauacccgacacauaaa

SEQ ID NO: 79309 - RNA, 22 nt, Artificial Sequence
  LRRK2 RNA guide
auacccgacacauaaauucauu

SEQ ID NO: 79310 - RNA, 22 nt, Artificial Sequence
  LRRK2 RNA guide
auacucauauacccgacacaua

SEQ ID NO: 79311 - RNA, 22 nt, Artificial Sequence
  LRRK2 RNA guide
auauacccgacacauaaauuca

SEQ ID NO: 79312 - RNA, 22 nt, Artificial Sequence
  LRRK2 RNA guide
aucaaugaauuuaugugucggg

SEQ ID NO: 79313 - RNA, 22 nt, Artificial Sequence
  LRRK2 RNA guide
augaauuuaugugucggguaua

SEQ ID NO: 79314 - RNA, 22 nt, Artificial Sequence
  LRRK2 RNA guide
augugucggguauaugaguaug

SEQ ID NO: 79315 - RNA, 22 nt, Artificial Sequence
  LRRK2 RNA guide
auucauacucauauacccgaca

SEQ ID NO: 79316 - RNA, 22 nt, Artificial Sequence
  LRRK2 RNA guide
auuuaugugucggguauaugag

SEQ ID NO: 79317 - RNA, 22 nt, Artificial Sequence
  LRRK2 RNA guide
caaugaauuuaugugucgggua

SEQ ID NO: 79318 - RNA, 22 nt, Artificial Sequence
  LRRK2 RNA guide
cauacucauauacccgacacau

SEQ ID NO: 79319 - RNA, 22 nt, Artificial Sequence
  LRRK2 RNA guide
cauauacccgacacauaaauuc

SEQ ID NO: 79320 - RNA, 22 nt, Artificial Sequence
  LRRK2 RNA guide
cccgacacauaaauucauugau

SEQ ID NO: 79321 - RNA, 22 nt, Artificial Sequence
  LRRK2 RNA guide
ccgacacauaaauucauugauu

SEQ ID NO: 79322 - RNA, 22 nt, Artificial Sequence
  LRRK2 RNA guide
cucauauacccgacacauaaau

SEQ ID NO: 79323 - RNA, 22 nt, Artificial Sequence
  LRRK2 RNA guide
gaauuuaugugucggguauaug

SEQ ID NO: 79324 - RNA, 22 nt, Artificial Sequence
  LRRK2 RNA guide
gugucggguauaugaguaugaa

SEQ ID NO: 79325 - RNA, 22 nt, Artificial Sequence
  LRRK2 RNA guide
uacccgacacauaaauucauug

SEQ ID NO: 79326 - RNA, 22 nt, Artificial Sequence
  LRRK2 RNA guide
uacucauauacccgacacauaa

SEQ ID NO: 79327 - RNA, 22 nt, Artificial Sequence
  LRRK2 RNA guide
uauacccgacacauaaauucau

SEQ ID NO: 79328 - RNA, 22 nt, Artificial Sequence
  LRRK2 RNA guide
uaugugucggguauaugaguau

SEQ ID NO: 79329 - RNA, 22 nt, Artificial Sequence
  LRRK2 RNA guide
ucaaugaauuuaugugucgggu

SEQ ID NO: 79330 - RNA, 22 nt, Artificial Sequence
  LRRK2 RNA guide
ucauacucauauacccgacaca

SEQ ID NO: 79331 - RNA, 22 nt, Artificial Sequence
  LRRK2 RNA guide
ucauauacccgacacauaaauu

SEQ ID NO: 79332 - RNA, 22 nt, Artificial Sequence
  LRRK2 RNA guide
ugaauuuaugugucggguauau

SEQ ID NO: 79333 - RNA, 22 nt, Artificial Sequence
  LRRK2 RNA guide
ugugucggguauaugaguauga

SEQ ID NO: 79334 - RNA, 22 nt, Artificial Sequence
  LRRK2 RNA guide
uuaugugucggguauaugagua

SEQ ID NO: 79335 - RNA, 22 nt, Artificial Sequence
  LRRK2 RNA guide
uucauacucauauacccgacac

SEQ ID NO: 79336 - RNA, 22 nt, Artificial Sequence
  LRRK2 RNA guide
uuuaugugucggguauaugagu

SEQ ID NO: 79337 - RNA, 20 nt, Artificial Sequence
  LRRK2 RNA guide
caguguguauauuucuuuag

SEQ ID NO: 79338 - RNA, 20 nt, Artificial Sequence
  LRRK2 RNA guide
gaauaaggauguuuacuuac

SEQ ID NO: 79339 - RNA, 20 nt, Artificial Sequence
  LRRK2 RNA guide
gauuauguaaguaaacaucc

SEQ ID NO: 79340 - RNA, 20 nt, Artificial Sequence
  LRRK2 RNA guide
guaaguaaacauccuuauuc

SEQ ID NO: 79341 - RNA, 20 nt, Artificial Sequence
  LRRK2 RNA guide
agaauaggauguuuacuuac

SEQ ID NO: 79342 - RNA, 20 nt, Artificial Sequence
  LRRK2 RNA guide
cuuuagaauaggauguuuac

SEQ ID NO: 79343 - RNA, 20 nt, Artificial Sequence
  LRRK2 RNA guide
gaauaggauguuuacuuaca

SEQ ID NO: 79344 - RNA, 20 nt, Artificial Sequence
  LRRK2 RNA guide
guaaacauccuauucuaaag

SEQ ID NO: 79345 - RNA, 20 nt, Artificial Sequence
  LRRK2 RNA guide
guaaguaaacauccuauucu

SEQ ID NO: 79346 - RNA, 20 nt, Artificial Sequence
  LRRK2 RNA guide
uguaaguaaacauccuauuc

SEQ ID NO: 79347 - RNA, 20 nt, Artificial Sequence
  LRRK2 RNA guide
aacuuucugucuauccacga

SEQ ID NO: 79348 - RNA, 20 nt, Artificial Sequence
  LRRK2 RNA guide
aagacauaaucguggauaga

SEQ ID NO: 79349 - RNA, 20 nt, Artificial Sequence
  LRRK2 RNA guide
aaucguggauagacagaaag

SEQ ID NO: 79350 - RNA, 20 nt, Artificial Sequence
  LRRK2 RNA guide
acauaaucguggauagacag

SEQ ID NO: 79351 - RNA, 20 nt, Artificial Sequence
  LRRK2 RNA guide
acuuucugucuauccacgau

SEQ ID NO: 79352 - RNA, 20 nt, Artificial Sequence
  LRRK2 RNA guide
agacauaaucguggauagac

SEQ ID NO: 79353 - RNA, 20 nt, Artificial Sequence
  LRRK2 RNA guide
auaacuuucugucuauccac

SEQ ID NO: 79354 - RNA, 20 nt, Artificial Sequence
  LRRK2 RNA guide
auaaucguggauagacagaa

SEQ ID NO: 79355 - RNA, 20 nt, Artificial Sequence
  LRRK2 RNA guide
auauguaagacauaaucgug

SEQ ID NO: 79356 - RNA, 20 nt, Artificial Sequence
  LRRK2 RNA guide
auccacgauuaugucuuaca

SEQ ID NO: 79357 - RNA, 20 nt, Artificial Sequence
  LRRK2 RNA guide
aucguggauagacagaaagu

SEQ ID NO: 79358 - RNA, 20 nt, Artificial Sequence
  LRRK2 RNA guide
auguaagacauaaucgugga

SEQ ID NO: 79359 - RNA, 20 nt, Artificial Sequence
  LRRK2 RNA guide
cacgauuaugucuuacauau

SEQ ID NO: 79360 - RNA, 20 nt, Artificial Sequence
  LRRK2 RNA guide
cauaaucguggauagacaga

SEQ ID NO: 79361 - RNA, 20 nt, Artificial Sequence
  LRRK2 RNA guide
ccacgauuaugucuuacaua

SEQ ID NO: 79362 - RNA, 20 nt, Artificial Sequence
  LRRK2 RNA guide
cguggauagacagaaaguua

SEQ ID NO: 79363 - RNA, 20 nt, Artificial Sequence
  LRRK2 RNA guide
cuauccacgauuaugucuua

SEQ ID NO: 79364 - RNA, 20 nt, Artificial Sequence
  LRRK2 RNA guide
cugucuauccacgauuaugu

SEQ ID NO: 79365 - RNA, 20 nt, Artificial Sequence
  LRRK2 RNA guide
cuuucugucuauccacgauu

SEQ ID NO: 79366 - RNA, 20 nt, Artificial Sequence
  LRRK2 RNA guide
gaauauguaagacauaaucg

SEQ ID NO: 79367 - RNA, 20 nt, Artificial Sequence
  LRRK2 RNA guide
gacauaaucguggauagaca

SEQ ID NO: 79368 - RNA, 20 nt, Artificial Sequence
  LRRK2 RNA guide
gauaacuuucugucuaucca

SEQ ID NO: 79369 - RNA, 20 nt, Artificial Sequence
  LRRK2 RNA guide
guaagacauaaucguggaua

SEQ ID NO: 79370 - RNA, 20 nt, Artificial Sequence
  LRRK2 RNA guide
gucuauccacgauuaugucu

SEQ ID NO: 79371 - RNA, 20 nt, Artificial Sequence
  LRRK2 RNA guide
uaacuuucugucuauccacg

SEQ ID NO: 79372 - RNA, 20 nt, Artificial Sequence
  LRRK2 RNA guide
uaagacauaaucguggauag

SEQ ID NO: 79373 - RNA, 20 nt, Artificial Sequence
  LRRK2 RNA guide
uaaucguggauagacagaaa

SEQ ID NO: 79374 - RNA, 20 nt, Artificial Sequence
  LRRK2 RNA guide
uauccacgauuaugucuuac

SEQ ID NO: 79375 - RNA, 20 nt, Artificial Sequence
  LRRK2 RNA guide
uauguaagacauaaucgugg

SEQ ID NO: 79376 - RNA, 20 nt, Artificial Sequence
  LRRK2 RNA guide
uccacgauuaugucuuacau

SEQ ID NO: 79377 - RNA, 20 nt, Artificial Sequence
  LRRK2 RNA guide
ucguggauagacagaaaguu

SEQ ID NO: 79378 - RNA, 20 nt, Artificial Sequence
  LRRK2 RNA guide
ucuauccacgauuaugucuu

SEQ ID NO: 79379 - RNA, 20 nt, Artificial Sequence
  LRRK2 RNA guide
ucugucuauccacgauuaug

SEQ ID NO: 79380 - RNA, 20 nt, Artificial Sequence
  LRRK2 RNA guide
ugauaacuuucugucuaucc

SEQ ID NO: 79381 - RNA, 20 nt, Artificial Sequence
  LRRK2 RNA guide
uguaagacauaaucguggau

SEQ ID NO: 79382 - RNA, 20 nt, Artificial Sequence
  LRRK2 RNA guide
ugucuauccacgauuauguc

SEQ ID NO: 79383 - RNA, 20 nt, Artificial Sequence
  LRRK2 RNA guide
uucugucuauccacgauuau

SEQ ID NO: 79384 - RNA, 20 nt, Artificial Sequence
  LRRK2 RNA guide
uugauaacuuucugucuauc

SEQ ID NO: 79385 - RNA, 20 nt, Artificial Sequence
  LRRK2 RNA guide
uuucugucuauccacgauua

SEQ ID NO: 79386 - RNA, 21 nt, Artificial Sequence
  LRRK2 RNA guide
aacuuucugucuauccacgau

SEQ ID NO: 79387 - RNA, 21 nt, Artificial Sequence
  LRRK2 RNA guide
aagacauaaucguggauagac

SEQ ID NO: 79388 - RNA, 21 nt, Artificial Sequence
  LRRK2 RNA guide
aaucguggauagacagaaagu

SEQ ID NO: 79389 - RNA, 21 nt, Artificial Sequence
  LRRK2 RNA guide
acauaaucguggauagacaga

SEQ ID NO: 79390 - RNA, 21 nt, Artificial Sequence
  LRRK2 RNA guide
acuuucugucuauccacgauu

SEQ ID NO: 79391 - RNA, 21 nt, Artificial Sequence
  LRRK2 RNA guide
agacauaaucguggauagaca

SEQ ID NO: 79392 - RNA, 21 nt, Artificial Sequence
  LRRK2 RNA guide
auaacuuucugucuauccacg

SEQ ID NO: 79393 - RNA, 21 nt, Artificial Sequence
  LRRK2 RNA guide
auaaucguggauagacagaaa

SEQ ID NO: 79394 - RNA, 21 nt, Artificial Sequence
  LRRK2 RNA guide
auauguaagacauaaucgugg

SEQ ID NO: 79395 - RNA, 21 nt, Artificial Sequence
  LRRK2 RNA guide
auccacgauuaugucuuacau

SEQ ID NO: 79396 - RNA, 21 nt, Artificial Sequence
  LRRK2 RNA guide
aucguggauagacagaaaguu

SEQ ID NO: 79397 - RNA, 21 nt, Artificial Sequence
  LRRK2 RNA guide
auguaagacauaaucguggau

SEQ ID NO: 79398 - RNA, 21 nt, Artificial Sequence
  LRRK2 RNA guide
cauaaucguggauagacagaa

SEQ ID NO: 79399 - RNA, 21 nt, Artificial Sequence
  LRRK2 RNA guide
ccacgauuaugucuuacauau

SEQ ID NO: 79400 - RNA, 21 nt, Artificial Sequence
  LRRK2 RNA guide
cguggauagacagaaaguuau

SEQ ID NO: 79401 - RNA, 21 nt, Artificial Sequence
  LRRK2 RNA guide
cuauccacgauuaugucuuac

SEQ ID NO: 79402 - RNA, 21 nt, Artificial Sequence
  LRRK2 RNA guide
cugucuauccacgauuauguc

SEQ ID NO: 79403 - RNA, 21 nt, Artificial Sequence
  LRRK2 RNA guide
cuuucugucuauccacgauua

SEQ ID NO: 79404 - RNA, 21 nt, Artificial Sequence
  LRRK2 RNA guide
gacauaaucguggauagacag

SEQ ID NO: 79405 - RNA, 21 nt, Artificial Sequence
  LRRK2 RNA guide
gauaacuuucugucuauccac

SEQ ID NO: 79406 - RNA, 21 nt, Artificial Sequence
  LRRK2 RNA guide
guaagacauaaucguggauag

SEQ ID NO: 79407 - RNA, 21 nt, Artificial Sequence
  LRRK2 RNA guide
gucuauccacgauuaugucuu

SEQ ID NO: 79408 - RNA, 21 nt, Artificial Sequence
  LRRK2 RNA guide
uaacuuucugucuauccacga

SEQ ID NO: 79409 - RNA, 21 nt, Artificial Sequence
  LRRK2 RNA guide
uaagacauaaucguggauaga

SEQ ID NO: 79410 - RNA, 21 nt, Artificial Sequence
  LRRK2 RNA guide
uaaucguggauagacagaaag

SEQ ID NO: 79411 - RNA, 21 nt, Artificial Sequence
  LRRK2 RNA guide
uauccacgauuaugucuuaca

SEQ ID NO: 79412 - RNA, 21 nt, Artificial Sequence
  LRRK2 RNA guide
uauguaagacauaaucgugga

SEQ ID NO: 79413 - RNA, 21 nt, Artificial Sequence
  LRRK2 RNA guide
uccacgauuaugucuuacaua

SEQ ID NO: 79414 - RNA, 21 nt, Artificial Sequence
  LRRK2 RNA guide
ucguggauagacagaaaguua

SEQ ID NO: 79415 - RNA, 21 nt, Artificial Sequence
  LRRK2 RNA guide
ucuauccacgauuaugucuua

SEQ ID NO: 79416 - RNA, 21 nt, Artificial Sequence
  LRRK2 RNA guide
ucugucuauccacgauuaugu

SEQ ID NO: 79417 - RNA, 21 nt, Artificial Sequence
  LRRK2 RNA guide
ugauaacuuucugucuaucca

SEQ ID NO: 79418 - RNA, 21 nt, Artificial Sequence
  LRRK2 RNA guide
uguaagacauaaucguggaua

SEQ ID NO: 79419 - RNA, 21 nt, Artificial Sequence
  LRRK2 RNA guide
ugucuauccacgauuaugucu

SEQ ID NO: 79420 - RNA, 21 nt, Artificial Sequence
  LRRK2 RNA guide
uucugucuauccacgauuaug

SEQ ID NO: 79421 - RNA, 21 nt, Artificial Sequence
  LRRK2 RNA guide
uugauaacuuucugucuaucc

SEQ ID NO: 79422 - RNA, 21 nt, Artificial Sequence
  LRRK2 RNA guide
uuucugucuauccacgauuau

SEQ ID NO: 79423 - RNA, 22 nt, Artificial Sequence
  LRRK2 RNA guide
aacuuucugucuauccacgauu

SEQ ID NO: 79424 - RNA, 22 nt, Artificial Sequence
  LRRK2 RNA guide
aagacauaaucguggauagaca

SEQ ID NO: 79425 - RNA, 22 nt, Artificial Sequence
  LRRK2 RNA guide
aauauguaagacauaaucgugg

SEQ ID NO: 79426 - RNA, 22 nt, Artificial Sequence
  LRRK2 RNA guide
aaucguggauagacagaaaguu

SEQ ID NO: 79427 - RNA, 22 nt, Artificial Sequence
  LRRK2 RNA guide
acauaaucguggauagacagaa

SEQ ID NO: 79428 - RNA, 22 nt, Artificial Sequence
  LRRK2 RNA guide
acuuucugucuauccacgauua

SEQ ID NO: 79429 - RNA, 22 nt, Artificial Sequence
  LRRK2 RNA guide
agacauaaucguggauagacag

SEQ ID NO: 79430 - RNA, 22 nt, Artificial Sequence
  LRRK2 RNA guide
auaacuuucugucuauccacga

SEQ ID NO: 79431 - RNA, 22 nt, Artificial Sequence
  LRRK2 RNA guide
auaaucguggauagacagaaag

SEQ ID NO: 79432 - RNA, 22 nt, Artificial Sequence
  LRRK2 RNA guide
auauguaagacauaaucgugga

SEQ ID NO: 79433 - RNA, 22 nt, Artificial Sequence
  LRRK2 RNA guide
auccacgauuaugucuuacaua

SEQ ID NO: 79434 - RNA, 22 nt, Artificial Sequence
  LRRK2 RNA guide
aucguggauagacagaaaguua

SEQ ID NO: 79435 - RNA, 22 nt, Artificial Sequence
  LRRK2 RNA guide
auguaagacauaaucguggaua

SEQ ID NO: 79436 - RNA, 22 nt, Artificial Sequence
  LRRK2 RNA guide
cacgauuaugucuuacauauuc

SEQ ID NO: 79437 - RNA, 22 nt, Artificial Sequence
  LRRK2 RNA guide
cauaaucguggauagacagaaa

SEQ ID NO: 79438 - RNA, 22 nt, Artificial Sequence
  LRRK2 RNA guide
ccacgauuaugucuuacauauu

SEQ ID NO: 79439 - RNA, 22 nt, Artificial Sequence
  LRRK2 RNA guide
cguggauagacagaaaguuauc

SEQ ID NO: 79440 - RNA, 22 nt, Artificial Sequence
  LRRK2 RNA guide
cuauccacgauuaugucuuaca

SEQ ID NO: 79441 - RNA, 22 nt, Artificial Sequence
  LRRK2 RNA guide
cugucuauccacgauuaugucu

SEQ ID NO: 79442 - RNA, 22 nt, Artificial Sequence
  LRRK2 RNA guide
cuuucugucuauccacgauuau

SEQ ID NO: 79443 - RNA, 22 nt, Artificial Sequence
  LRRK2 RNA guide
gaauauguaagacauaaucgug

SEQ ID NO: 79444 - RNA, 22 nt, Artificial Sequence
  LRRK2 RNA guide
gacauaaucguggauagacaga

SEQ ID NO: 79445 - RNA, 22 nt, Artificial Sequence
  LRRK2 RNA guide
gauaacuuucugucuauccacg

SEQ ID NO: 79446 - RNA, 22 nt, Artificial Sequence
  LRRK2 RNA guide
guaagacauaaucguggauaga

SEQ ID NO: 79447 - RNA, 22 nt, Artificial Sequence
  LRRK2 RNA guide
gucuauccacgauuaugucuua

SEQ ID NO: 79448 - RNA, 22 nt, Artificial Sequence
  LRRK2 RNA guide
uaacuuucugucuauccacgau

SEQ ID NO: 79449 - RNA, 22 nt, Artificial Sequence
  LRRK2 RNA guide
uaagacauaaucguggauagac

SEQ ID NO: 79450 - RNA, 22 nt, Artificial Sequence
  LRRK2 RNA guide
uaaucguggauagacagaaagu

SEQ ID NO: 79451 - RNA, 22 nt, Artificial Sequence
  LRRK2 RNA guide
uauccacgauuaugucuuacau

SEQ ID NO: 79452 - RNA, 22 nt, Artificial Sequence
  LRRK2 RNA guide
uauguaagacauaaucguggau

SEQ ID NO: 79453 - RNA, 22 nt, Artificial Sequence
  LRRK2 RNA guide
uccacgauuaugucuuacauau

SEQ ID NO: 79454 - RNA, 22 nt, Artificial Sequence
  LRRK2 RNA guide
ucguggauagacagaaaguuau

SEQ ID NO: 79455 - RNA, 22 nt, Artificial Sequence
  LRRK2 RNA guide
ucuauccacgauuaugucuuac

SEQ ID NO: 79456 - RNA, 22 nt, Artificial Sequence
  LRRK2 RNA guide
ucugucuauccacgauuauguc

SEQ ID NO: 79457 - RNA, 22 nt, Artificial Sequence
  LRRK2 RNA guide
ugauaacuuucugucuauccac

SEQ ID NO: 79458 - RNA, 22 nt, Artificial Sequence
  LRRK2 RNA guide
uguaagacauaaucguggauag

SEQ ID NO: 79459 - RNA, 22 nt, Artificial Sequence
  LRRK2 RNA guide
ugucuauccacgauuaugucuu

SEQ ID NO: 79460 - RNA, 22 nt, Artificial Sequence
  LRRK2 RNA guide
uucugucuauccacgauuaugu

SEQ ID NO: 79461 - RNA, 22 nt, Artificial Sequence
  LRRK2 RNA guide
uugauaacuuucugucuaucca

SEQ ID NO: 79462 - RNA, 22 nt, Artificial Sequence
  LRRK2 RNA guide
uuucugucuauccacgauuaug

SEQ ID NO: 79463 - RNA, 22 nt, Artificial Sequence
  LRRK2 RNA guide
uuugauaacuuucugucuaucc

SEQ ID NO: 79464 - RNA, 20 nt, Artificial Sequence
  LRRK2 RNA guide
aacuuucugucuauccauga

SEQ ID NO: 79465 - RNA, 20 nt, Artificial Sequence
  LRRK2 RNA guide
aagacauaaucauggauaga

SEQ ID NO: 79466 - RNA, 20 nt, Artificial Sequence
  LRRK2 RNA guide
aaucauggauagacagaaag

SEQ ID NO: 79467 - RNA, 20 nt, Artificial Sequence
  LRRK2 RNA guide
acauaaucauggauagacag

SEQ ID NO: 79468 - RNA, 20 nt, Artificial Sequence
  LRRK2 RNA guide
acuuucugucuauccaugau

SEQ ID NO: 79469 - RNA, 20 nt, Artificial Sequence
  LRRK2 RNA guide
agacauaaucauggauagac

SEQ ID NO: 79470 - RNA, 20 nt, Artificial Sequence
  LRRK2 RNA guide
auaacuuucugucuauccau

SEQ ID NO: 79471 - RNA, 20 nt, Artificial Sequence
  LRRK2 RNA guide
auaaucauggauagacagaa

SEQ ID NO: 79472 - RNA, 20 nt, Artificial Sequence
  LRRK2 RNA guide
aucauggauagacagaaagu

SEQ ID NO: 79473 - RNA, 20 nt, Artificial Sequence
  LRRK2 RNA guide
auccaugauuaugucuuaca

SEQ ID NO: 79474 - RNA, 20 nt, Artificial Sequence
  LRRK2 RNA guide
auguaagacauaaucaugga

SEQ ID NO: 79475 - RNA, 20 nt, Artificial Sequence
  LRRK2 RNA guide
cauaaucauggauagacaga

SEQ ID NO: 79476 - RNA, 20 nt, Artificial Sequence
  LRRK2 RNA guide
cauggauagacagaaaguua

SEQ ID NO: 79477 - RNA, 20 nt, Artificial Sequence
  LRRK2 RNA guide
ccaugauuaugucuuacaua

SEQ ID NO: 79478 - RNA, 20 nt, Artificial Sequence
  LRRK2 RNA guide
cuauccaugauuaugucuua

SEQ ID NO: 79479 - RNA, 20 nt, Artificial Sequence
  LRRK2 RNA guide
cugucuauccaugauuaugu

SEQ ID NO: 79480 - RNA, 20 nt, Artificial Sequence
  LRRK2 RNA guide
cuuucugucuauccaugauu

SEQ ID NO: 79481 - RNA, 20 nt, Artificial Sequence
  LRRK2 RNA guide
gacauaaucauggauagaca

SEQ ID NO: 79482 - RNA, 20 nt, Artificial Sequence
  LRRK2 RNA guide
guaagacauaaucauggaua

SEQ ID NO: 79483 - RNA, 20 nt, Artificial Sequence
  LRRK2 RNA guide
gucuauccaugauuaugucu

SEQ ID NO: 79484 - RNA, 20 nt, Artificial Sequence
  LRRK2 RNA guide
uaacuuucugucuauccaug

SEQ ID NO: 79485 - RNA, 20 nt, Artificial Sequence
  LRRK2 RNA guide
uaagacauaaucauggauag

SEQ ID NO: 79486 - RNA, 20 nt, Artificial Sequence
  LRRK2 RNA guide
uaaucauggauagacagaaa

SEQ ID NO: 79487 - RNA, 20 nt, Artificial Sequence
  LRRK2 RNA guide
uauccaugauuaugucuuac

SEQ ID NO: 79488 - RNA, 20 nt, Artificial Sequence
  LRRK2 RNA guide
uauguaagacauaaucaugg

SEQ ID NO: 79489 - RNA, 20 nt, Artificial Sequence
  LRRK2 RNA guide
ucauggauagacagaaaguu

SEQ ID NO: 79490 - RNA, 20 nt, Artificial Sequence
  LRRK2 RNA guide
uccaugauuaugucuuacau

SEQ ID NO: 79491 - RNA, 20 nt, Artificial Sequence
  LRRK2 RNA guide
ucuauccaugauuaugucuu

SEQ ID NO: 79492 - RNA, 20 nt, Artificial Sequence
  LRRK2 RNA guide
ucugucuauccaugauuaug

SEQ ID NO: 79493 - RNA, 20 nt, Artificial Sequence
  LRRK2 RNA guide
uguaagacauaaucauggau

SEQ ID NO: 79494 - RNA, 20 nt, Artificial Sequence
  LRRK2 RNA guide
ugucuauccaugauuauguc

SEQ ID NO: 79495 - RNA, 20 nt, Artificial Sequence
  LRRK2 RNA guide
uucugucuauccaugauuau

SEQ ID NO: 79496 - RNA, 20 nt, Artificial Sequence
  LRRK2 RNA guide
uuucugucuauccaugauua

SEQ ID NO: 79497 - RNA, 21 nt, Artificial Sequence
  LRRK2 RNA guide
aacuuucugucuauccaugau

SEQ ID NO: 79498 - RNA, 21 nt, Artificial Sequence
  LRRK2 RNA guide
aagacauaaucauggauagac

SEQ ID NO: 79499 - RNA, 21 nt, Artificial Sequence
  LRRK2 RNA guide
aaucauggauagacagaaagu

SEQ ID NO: 79500 - RNA, 21 nt, Artificial Sequence
  LRRK2 RNA guide
acauaaucauggauagacaga

SEQ ID NO: 79501 - RNA, 21 nt, Artificial Sequence
  LRRK2 RNA guide
acuuucugucuauccaugauu

SEQ ID NO: 79502 - RNA, 21 nt, Artificial Sequence
  LRRK2 RNA guide
agacauaaucauggauagaca

SEQ ID NO: 79503 - RNA, 21 nt, Artificial Sequence
  LRRK2 RNA guide
auaacuuucugucuauccaug

SEQ ID NO: 79504 - RNA, 21 nt, Artificial Sequence
  LRRK2 RNA guide
aucauggauagacagaaaguu

SEQ ID NO: 79505 - RNA, 21 nt, Artificial Sequence
  LRRK2 RNA guide
cauaaucauggauagacagaa

SEQ ID NO: 79506 - RNA, 21 nt, Artificial Sequence
  LRRK2 RNA guide
cauggauagacagaaaguuau

SEQ ID NO: 79507 - RNA, 21 nt, Artificial Sequence
  LRRK2 RNA guide
cuauccaugauuaugucuuac

SEQ ID NO: 79508 - RNA, 21 nt, Artificial Sequence
  LRRK2 RNA guide
cugucuauccaugauuauguc

SEQ ID NO: 79509 - RNA, 21 nt, Artificial Sequence
  LRRK2 RNA guide
cuuucugucuauccaugauua

SEQ ID NO: 79510 - RNA, 21 nt, Artificial Sequence
  LRRK2 RNA guide
gacauaaucauggauagacag

SEQ ID NO: 79511 - RNA, 21 nt, Artificial Sequence
  LRRK2 RNA guide
gauaacuuucugucuauccau

SEQ ID NO: 79512 - RNA, 21 nt, Artificial Sequence
  LRRK2 RNA guide
guaagacauaaucauggauag

SEQ ID NO: 79513 - RNA, 21 nt, Artificial Sequence
  LRRK2 RNA guide
gucuauccaugauuaugucuu

SEQ ID NO: 79514 - RNA, 21 nt, Artificial Sequence
  LRRK2 RNA guide
uaacuuucugucuauccauga

SEQ ID NO: 79515 - RNA, 21 nt, Artificial Sequence
  LRRK2 RNA guide
uaaucauggauagacagaaag

SEQ ID NO: 79516 - RNA, 21 nt, Artificial Sequence
  LRRK2 RNA guide
ucauggauagacagaaaguua

SEQ ID NO: 79517 - RNA, 21 nt, Artificial Sequence
  LRRK2 RNA guide
ucugucuauccaugauuaugu

SEQ ID NO: 79518 - RNA, 21 nt, Artificial Sequence
  LRRK2 RNA guide
ugucuauccaugauuaugucu

SEQ ID NO: 79519 - RNA, 21 nt, Artificial Sequence
  LRRK2 RNA guide
uucugucuauccaugauuaug

SEQ ID NO: 79520 - RNA, 22 nt, Artificial Sequence
  LRRK2 RNA guide
aacuuucugucuauccaugauu

SEQ ID NO: 79521 - RNA, 22 nt, Artificial Sequence
  LRRK2 RNA guide
aagacauaaucauggauagaca

SEQ ID NO: 79522 - RNA, 22 nt, Artificial Sequence
  LRRK2 RNA guide
aaucauggauagacagaaaguu

SEQ ID NO: 79523 - RNA, 22 nt, Artificial Sequence
  LRRK2 RNA guide
acauaaucauggauagacagaa

SEQ ID NO: 79524 - RNA, 22 nt, Artificial Sequence
  LRRK2 RNA guide
acuuucugucuauccaugauua

SEQ ID NO: 79525 - RNA, 22 nt, Artificial Sequence
  LRRK2 RNA guide
agacauaaucauggauagacag

SEQ ID NO: 79526 - RNA, 22 nt, Artificial Sequence
  LRRK2 RNA guide
auaacuuucugucuauccauga

SEQ ID NO: 79527 - RNA, 22 nt, Artificial Sequence
  LRRK2 RNA guide
auaaucauggauagacagaaag

SEQ ID NO: 79528 - RNA, 22 nt, Artificial Sequence
  LRRK2 RNA guide
aucauggauagacagaaaguua

SEQ ID NO: 79529 - RNA, 22 nt, Artificial Sequence
  LRRK2 RNA guide
cauaaucauggauagacagaaa

SEQ ID NO: 79530 - RNA, 22 nt, Artificial Sequence
  LRRK2 RNA guide
cauggauagacagaaaguuauc

SEQ ID NO: 79531 - RNA, 22 nt, Artificial Sequence
  LRRK2 RNA guide
cuauccaugauuaugucuuaca

SEQ ID NO: 79532 - RNA, 22 nt, Artificial Sequence
  LRRK2 RNA guide
cugucuauccaugauuaugucu

SEQ ID NO: 79533 - RNA, 22 nt, Artificial Sequence
  LRRK2 RNA guide
cuuucugucuauccaugauuau

SEQ ID NO: 79534 - RNA, 22 nt, Artificial Sequence
  LRRK2 RNA guide
gacauaaucauggauagacaga

SEQ ID NO: 79535 - RNA, 22 nt, Artificial Sequence
  LRRK2 RNA guide
gauaacuuucugucuauccaug

SEQ ID NO: 79536 - RNA, 22 nt, Artificial Sequence
  LRRK2 RNA guide
guaagacauaaucauggauaga

SEQ ID NO: 79537 - RNA, 22 nt, Artificial Sequence
  LRRK2 RNA guide
gucuauccaugauuaugucuua

SEQ ID NO: 79538 - RNA, 22 nt, Artificial Sequence
  LRRK2 RNA guide
uaacuuucugucuauccaugau

SEQ ID NO: 79539 - RNA, 22 nt, Artificial Sequence
  LRRK2 RNA guide
uaagacauaaucauggauagac

SEQ ID NO: 79540 - RNA, 22 nt, Artificial Sequence
  LRRK2 RNA guide
uaaucauggauagacagaaagu

SEQ ID NO: 79541 - RNA, 22 nt, Artificial Sequence
  LRRK2 RNA guide
ucauggauagacagaaaguuau

SEQ ID NO: 79542 - RNA, 22 nt, Artificial Sequence
  LRRK2 RNA guide
ucuauccaugauuaugucuuac

SEQ ID NO: 79543 - RNA, 22 nt, Artificial Sequence
  LRRK2 RNA guide
ucugucuauccaugauuauguc

SEQ ID NO: 79544 - RNA, 22 nt, Artificial Sequence
  LRRK2 RNA guide
ugauaacuuucugucuauccau

SEQ ID NO: 79545 - RNA, 22 nt, Artificial Sequence
  LRRK2 RNA guide
uguaagacauaaucauggauag

SEQ ID NO: 79546 - RNA, 22 nt, Artificial Sequence
  LRRK2 RNA guide
ugucuauccaugauuaugucuu

SEQ ID NO: 79547 - RNA, 22 nt, Artificial Sequence
  LRRK2 RNA guide
uucugucuauccaugauuaugu

SEQ ID NO: 79548 - RNA, 22 nt, Artificial Sequence
  LRRK2 RNA guide
uuucugucuauccaugauuaug

SEQ ID NO: 79549 - RNA, 20 nt, Artificial Sequence
  LRRK2 RNA guide
aaucaaccuaaagacaucca

SEQ ID NO: 79550 - RNA, 20 nt, Artificial Sequence
  LRRK2 RNA guide
auaaucaaccuaaagacauc

SEQ ID NO: 79551 - RNA, 20 nt, Artificial Sequence
  LRRK2 RNA guide
aucaaccuaaagacauccaa

SEQ ID NO: 79552 - RNA, 20 nt, Artificial Sequence
  LRRK2 RNA guide
auuggaugucuuuagguuga

SEQ ID NO: 79553 - RNA, 20 nt, Artificial Sequence
  LRRK2 RNA guide
gaugucuuuagguugauuau

SEQ ID NO: 79554 - RNA, 20 nt, Artificial Sequence
  LRRK2 RNA guide
gauuggaugucuuuagguug

SEQ ID NO: 79555 - RNA, 20 nt, Artificial Sequence
  LRRK2 RNA guide
ggaugucuuuagguugauua

SEQ ID NO: 79556 - RNA, 20 nt, Artificial Sequence
  LRRK2 RNA guide
gugauuggaugucuuuaggu

SEQ ID NO: 79557 - RNA, 20 nt, Artificial Sequence
  LRRK2 RNA guide
uaaucaaccuaaagacaucc

SEQ ID NO: 79558 - RNA, 20 nt, Artificial Sequence
  LRRK2 RNA guide
ugauuggaugucuuuagguu

SEQ ID NO: 79559 - RNA, 20 nt, Artificial Sequence
  LRRK2 RNA guide
uggaugucuuuagguugauu

SEQ ID NO: 79560 - RNA, 20 nt, Artificial Sequence
  LRRK2 RNA guide
ugugauuggaugucuuuagg

SEQ ID NO: 79561 - RNA, 20 nt, Artificial Sequence
  LRRK2 RNA guide
uuggaugucuuuagguugau

SEQ ID NO: 79562 - RNA, 20 nt, Artificial Sequence
  LRRK2 RNA guide
uugugauuggaugucuuuag

SEQ ID NO: 79563 - RNA, 21 nt, Artificial Sequence
  LRRK2 RNA guide
aaucaaccuaaagacauccaa

SEQ ID NO: 79564 - RNA, 21 nt, Artificial Sequence
  LRRK2 RNA guide
auaaucaaccuaaagacaucc

SEQ ID NO: 79565 - RNA, 21 nt, Artificial Sequence
  LRRK2 RNA guide
aucaaccuaaagacauccaau

SEQ ID NO: 79566 - RNA, 21 nt, Artificial Sequence
  LRRK2 RNA guide
auuggaugucuuuagguugau

SEQ ID NO: 79567 - RNA, 21 nt, Artificial Sequence
  LRRK2 RNA guide
gauuggaugucuuuagguuga

SEQ ID NO: 79568 - RNA, 21 nt, Artificial Sequence
  LRRK2 RNA guide
ggaugucuuuagguugauuau

SEQ ID NO: 79569 - RNA, 21 nt, Artificial Sequence
  LRRK2 RNA guide
gugauuggaugucuuuagguu

SEQ ID NO: 79570 - RNA, 21 nt, Artificial Sequence
  LRRK2 RNA guide
uaaucaaccuaaagacaucca

SEQ ID NO: 79571 - RNA, 21 nt, Artificial Sequence
  LRRK2 RNA guide
ugauuggaugucuuuagguug

SEQ ID NO: 79572 - RNA, 21 nt, Artificial Sequence
  LRRK2 RNA guide
uggaugucuuuagguugauua

SEQ ID NO: 79573 - RNA, 21 nt, Artificial Sequence
  LRRK2 RNA guide
ugugauuggaugucuuuaggu

SEQ ID NO: 79574 - RNA, 21 nt, Artificial Sequence
  LRRK2 RNA guide
uuggaugucuuuagguugauu

SEQ ID NO: 79575 - RNA, 21 nt, Artificial Sequence
  LRRK2 RNA guide
uugugauuggaugucuuuagg

SEQ ID NO: 79576 - RNA, 21 nt, Artificial Sequence
  LRRK2 RNA guide
uuugugauuggaugucuuuag

SEQ ID NO: 79577 - RNA, 22 nt, Artificial Sequence
  LRRK2 RNA guide
aaucaaccuaaagacauccaau

SEQ ID NO: 79578 - RNA, 22 nt, Artificial Sequence
  LRRK2 RNA guide
auaaucaaccuaaagacaucca

SEQ ID NO: 79579 - RNA, 22 nt, Artificial Sequence
  LRRK2 RNA guide
aucaaccuaaagacauccaauc

SEQ ID NO: 79580 - RNA, 22 nt, Artificial Sequence
  LRRK2 RNA guide
auuggaugucuuuagguugauu

SEQ ID NO: 79581 - RNA, 22 nt, Artificial Sequence
  LRRK2 RNA guide
cuuugugauuggaugucuuuag

SEQ ID NO: 79582 - RNA, 22 nt, Artificial Sequence
  LRRK2 RNA guide
gauuggaugucuuuagguugau

SEQ ID NO: 79583 - RNA, 22 nt, Artificial Sequence
  LRRK2 RNA guide
ggaugucuuuagguugauuaua

SEQ ID NO: 79584 - RNA, 22 nt, Artificial Sequence
  LRRK2 RNA guide
gugauuggaugucuuuagguug

SEQ ID NO: 79585 - RNA, 22 nt, Artificial Sequence
  LRRK2 RNA guide
uaaucaaccuaaagacauccaa

SEQ ID NO: 79586 - RNA, 22 nt, Artificial Sequence
  LRRK2 RNA guide
uauaaucaaccuaaagacaucc

SEQ ID NO: 79587 - RNA, 22 nt, Artificial Sequence
  LRRK2 RNA guide
ugauuggaugucuuuagguuga

SEQ ID NO: 79588 - RNA, 22 nt, Artificial Sequence
  LRRK2 RNA guide
uggaugucuuuagguugauuau

SEQ ID NO: 79589 - RNA, 22 nt, Artificial Sequence
  LRRK2 RNA guide
ugugauuggaugucuuuagguu

SEQ ID NO: 79590 - RNA, 22 nt, Artificial Sequence
  LRRK2 RNA guide
uuggaugucuuuagguugauua

SEQ ID NO: 79591 - RNA, 22 nt, Artificial Sequence
  LRRK2 RNA guide
uugugauuggaugucuuuaggu

SEQ ID NO: 79592 - RNA, 22 nt, Artificial Sequence
  LRRK2 RNA guide
uuugugauuggaugucuuuagg

SEQ ID NO: 79593 - RNA, 20 nt, Artificial Sequence
  LRRK2 RNA guide
aaacaaccuaaagacaucca

SEQ ID NO: 79594 - RNA, 20 nt, Artificial Sequence
  LRRK2 RNA guide
aacaaccuaaagacauccaa

SEQ ID NO: 79595 - RNA, 20 nt, Artificial Sequence
  LRRK2 RNA guide
auaaacaaccuaaagacauc

SEQ ID NO: 79596 - RNA, 20 nt, Artificial Sequence
  LRRK2 RNA guide
auuggaugucuuuagguugu

SEQ ID NO: 79597 - RNA, 20 nt, Artificial Sequence
  LRRK2 RNA guide
gaugucuuuagguuguuuau

SEQ ID NO: 79598 - RNA, 20 nt, Artificial Sequence
  LRRK2 RNA guide
ggaugucuuuagguuguuua

SEQ ID NO: 79599 - RNA, 20 nt, Artificial Sequence
  LRRK2 RNA guide
uaaacaaccuaaagacaucc

SEQ ID NO: 79600 - RNA, 20 nt, Artificial Sequence
  LRRK2 RNA guide
uggaugucuuuagguuguuu

SEQ ID NO: 79601 - RNA, 20 nt, Artificial Sequence
  LRRK2 RNA guide
uuggaugucuuuagguuguu

SEQ ID NO: 79602 - RNA, 21 nt, Artificial Sequence
  LRRK2 RNA guide
aaacaaccuaaagacauccaa

SEQ ID NO: 79603 - RNA, 21 nt, Artificial Sequence
  LRRK2 RNA guide
aacaaccuaaagacauccaau

SEQ ID NO: 79604 - RNA, 21 nt, Artificial Sequence
  LRRK2 RNA guide
auaaacaaccuaaagacaucc

SEQ ID NO: 79605 - RNA, 21 nt, Artificial Sequence
  LRRK2 RNA guide
auuggaugucuuuagguuguu

SEQ ID NO: 79606 - RNA, 21 nt, Artificial Sequence
  LRRK2 RNA guide
gauuggaugucuuuagguugu

SEQ ID NO: 79607 - RNA, 21 nt, Artificial Sequence
  LRRK2 RNA guide
ggaugucuuuagguuguuuau

SEQ ID NO: 79608 - RNA, 21 nt, Artificial Sequence
  LRRK2 RNA guide
uaaacaaccuaaagacaucca

SEQ ID NO: 79609 - RNA, 21 nt, Artificial Sequence
  LRRK2 RNA guide
uggaugucuuuagguuguuua

SEQ ID NO: 79610 - RNA, 21 nt, Artificial Sequence
  LRRK2 RNA guide
uuggaugucuuuagguuguuu

SEQ ID NO: 79611 - RNA, 22 nt, Artificial Sequence
  LRRK2 RNA guide
aaacaaccuaaagacauccaau

SEQ ID NO: 79612 - RNA, 22 nt, Artificial Sequence
  LRRK2 RNA guide
aacaaccuaaagacauccaauc

SEQ ID NO: 79613 - RNA, 22 nt, Artificial Sequence
  LRRK2 RNA guide
auaaacaaccuaaagacaucca

SEQ ID NO: 79614 - RNA, 22 nt, Artificial Sequence
  LRRK2 RNA guide
auuggaugucuuuagguuguuu

SEQ ID NO: 79615 - RNA, 22 nt, Artificial Sequence
  LRRK2 RNA guide
gauuggaugucuuuagguuguu

SEQ ID NO: 79616 - RNA, 22 nt, Artificial Sequence
  LRRK2 RNA guide
ggaugucuuuagguuguuuaua

SEQ ID NO: 79617 - RNA, 22 nt, Artificial Sequence
  LRRK2 RNA guide
uaaacaaccuaaagacauccaa

SEQ ID NO: 79618 - RNA, 22 nt, Artificial Sequence
  LRRK2 RNA guide
uauaaacaaccuaaagacaucc

SEQ ID NO: 79619 - RNA, 22 nt, Artificial Sequence
  LRRK2 RNA guide
ugauuggaugucuuuagguugu

SEQ ID NO: 79620 - RNA, 22 nt, Artificial Sequence
  LRRK2 RNA guide
uggaugucuuuagguuguuuau

SEQ ID NO: 79621 - RNA, 22 nt, Artificial Sequence
  LRRK2 RNA guide
uuggaugucuuuagguuguuua

SEQ ID NO: 79622 - RNA, 20 nt, Artificial Sequence
  LRRK2 RNA guide
aaaaaagccuucucucuugg

SEQ ID NO: 79623 - RNA, 20 nt, Artificial Sequence
  LRRK2 RNA guide
aaaaagccuucucucuuggg

SEQ ID NO: 79624 - RNA, 20 nt, Artificial Sequence
  LRRK2 RNA guide
aaaagccuucucucuugggu

SEQ ID NO: 79625 - RNA, 20 nt, Artificial Sequence
  LRRK2 RNA guide
aaagccuucucucuuggguu

SEQ ID NO: 79626 - RNA, 20 nt, Artificial Sequence
  LRRK2 RNA guide
aacccaagagagaaggcuuu

SEQ ID NO: 79627 - RNA, 20 nt, Artificial Sequence
  LRRK2 RNA guide
aagccuucucucuuggguuc

SEQ ID NO: 79628 - RNA, 20 nt, Artificial Sequence
  LRRK2 RNA guide
acccaagagagaaggcuuuu

SEQ ID NO: 79629 - RNA, 20 nt, Artificial Sequence
  LRRK2 RNA guide
agccuucucucuuggguuca

SEQ ID NO: 79630 - RNA, 20 nt, Artificial Sequence
  LRRK2 RNA guide
aggcaugaacccaagagaga

SEQ ID NO: 79631 - RNA, 20 nt, Artificial Sequence
  LRRK2 RNA guide
augaacccaagagagaaggc

SEQ ID NO: 79632 - RNA, 20 nt, Artificial Sequence
  LRRK2 RNA guide
caggcaugaacccaagagag

SEQ ID NO: 79633 - RNA, 20 nt, Artificial Sequence
  LRRK2 RNA guide
caugaacccaagagagaagg

SEQ ID NO: 79634 - RNA, 20 nt, Artificial Sequence
  LRRK2 RNA guide
ccaagagagaaggcuuuuuu

SEQ ID NO: 79635 - RNA, 20 nt, Artificial Sequence
  LRRK2 RNA guide
cccaagagagaaggcuuuuu

SEQ ID NO: 79636 - RNA, 20 nt, Artificial Sequence
  LRRK2 RNA guide
gaacccaagagagaaggcuu

SEQ ID NO: 79637 - RNA, 20 nt, Artificial Sequence
  LRRK2 RNA guide
gcaugaacccaagagagaag

SEQ ID NO: 79638 - RNA, 20 nt, Artificial Sequence
  LRRK2 RNA guide
ggcaugaacccaagagagaa

SEQ ID NO: 79639 - RNA, 20 nt, Artificial Sequence
  LRRK2 RNA guide
ugaacccaagagagaaggcu

SEQ ID NO: 79640 - RNA, 21 nt, Artificial Sequence
  LRRK2 RNA guide
aaaaaagccuucucucuuggg

SEQ ID NO: 79641 - RNA, 21 nt, Artificial Sequence
  LRRK2 RNA guide
aaaaagccuucucucuugggu

SEQ ID NO: 79642 - RNA, 21 nt, Artificial Sequence
  LRRK2 RNA guide
aaaagccuucucucuuggguu

SEQ ID NO: 79643 - RNA, 21 nt, Artificial Sequence
  LRRK2 RNA guide
aaagccuucucucuuggguuc

SEQ ID NO: 79644 - RNA, 21 nt, Artificial Sequence
  LRRK2 RNA guide
aacccaagagagaaggcuuuu

SEQ ID NO: 79645 - RNA, 21 nt, Artificial Sequence
  LRRK2 RNA guide
aagccuucucucuuggguuca

SEQ ID NO: 79646 - RNA, 21 nt, Artificial Sequence
  LRRK2 RNA guide
acccaagagagaaggcuuuuu

SEQ ID NO: 79647 - RNA, 21 nt, Artificial Sequence
  LRRK2 RNA guide
agccuucucucuuggguucau

SEQ ID NO: 79648 - RNA, 21 nt, Artificial Sequence
  LRRK2 RNA guide
aggcaugaacccaagagagaa

SEQ ID NO: 79649 - RNA, 21 nt, Artificial Sequence
  LRRK2 RNA guide
augaacccaagagagaaggcu

SEQ ID NO: 79650 - RNA, 21 nt, Artificial Sequence
  LRRK2 RNA guide
caggcaugaacccaagagaga

SEQ ID NO: 79651 - RNA, 21 nt, Artificial Sequence
  LRRK2 RNA guide
caugaacccaagagagaaggc

SEQ ID NO: 79652 - RNA, 21 nt, Artificial Sequence
  LRRK2 RNA guide
cccaagagagaaggcuuuuuu

SEQ ID NO: 79653 - RNA, 21 nt, Artificial Sequence
  LRRK2 RNA guide
gaacccaagagagaaggcuuu

SEQ ID NO: 79654 - RNA, 21 nt, Artificial Sequence
  LRRK2 RNA guide
gcaugaacccaagagagaagg

SEQ ID NO: 79655 - RNA, 21 nt, Artificial Sequence
  LRRK2 RNA guide
ggcaugaacccaagagagaag

SEQ ID NO: 79656 - RNA, 21 nt, Artificial Sequence
  LRRK2 RNA guide
ucaggcaugaacccaagagag

SEQ ID NO: 79657 - RNA, 21 nt, Artificial Sequence
  LRRK2 RNA guide
ugaacccaagagagaaggcuu

SEQ ID NO: 79658 - RNA, 22 nt, Artificial Sequence
  LRRK2 RNA guide
aaaaaagccuucucucuugggu

SEQ ID NO: 79659 - RNA, 22 nt, Artificial Sequence
  LRRK2 RNA guide
aaaaagccuucucucuuggguu

SEQ ID NO: 79660 - RNA, 22 nt, Artificial Sequence
  LRRK2 RNA guide
aaaagccuucucucuuggguuc

SEQ ID NO: 79661 - RNA, 22 nt, Artificial Sequence
  LRRK2 RNA guide
aaagccuucucucuuggguuca

SEQ ID NO: 79662 - RNA, 22 nt, Artificial Sequence
  LRRK2 RNA guide
aacccaagagagaaggcuuuuu

SEQ ID NO: 79663 - RNA, 22 nt, Artificial Sequence
  LRRK2 RNA guide
aagccuucucucuuggguucau

SEQ ID NO: 79664 - RNA, 22 nt, Artificial Sequence
  LRRK2 RNA guide
acccaagagagaaggcuuuuuu

SEQ ID NO: 79665 - RNA, 22 nt, Artificial Sequence
  LRRK2 RNA guide
agccuucucucuuggguucaug

SEQ ID NO: 79666 - RNA, 22 nt, Artificial Sequence
  LRRK2 RNA guide
aggcaugaacccaagagagaag

SEQ ID NO: 79667 - RNA, 22 nt, Artificial Sequence
  LRRK2 RNA guide
augaacccaagagagaaggcuu

SEQ ID NO: 79668 - RNA, 22 nt, Artificial Sequence
  LRRK2 RNA guide
caggcaugaacccaagagagaa

SEQ ID NO: 79669 - RNA, 22 nt, Artificial Sequence
  LRRK2 RNA guide
caugaacccaagagagaaggcu

SEQ ID NO: 79670 - RNA, 22 nt, Artificial Sequence
  LRRK2 RNA guide
gaacccaagagagaaggcuuuu

SEQ ID NO: 79671 - RNA, 22 nt, Artificial Sequence
  LRRK2 RNA guide
gcaugaacccaagagagaaggc

SEQ ID NO: 79672 - RNA, 22 nt, Artificial Sequence
  LRRK2 RNA guide
ggcaugaacccaagagagaagg

SEQ ID NO: 79673 - RNA, 22 nt, Artificial Sequence
  LRRK2 RNA guide
ucaggcaugaacccaagagaga

SEQ ID NO: 79674 - RNA, 22 nt, Artificial Sequence
  LRRK2 RNA guide
ugaacccaagagagaaggcuuu

SEQ ID NO: 79675 - RNA, 22 nt, Artificial Sequence
  LRRK2 RNA guide
uucaggcaugaacccaagagag

SEQ ID NO: 79676 - RNA, 20 nt, Artificial Sequence
  LRRK2 RNA guide
aacaucucaccccccaaggu

SEQ ID NO: 79677 - RNA, 20 nt, Artificial Sequence
  LRRK2 RNA guide
aaccuuggggggugagaugu

SEQ ID NO: 79678 - RNA, 20 nt, Artificial Sequence
  LRRK2 RNA guide
acaucucaccccccaagguu

SEQ ID NO: 79679 - RNA, 20 nt, Artificial Sequence
  LRRK2 RNA guide
accccccaagguugaccaca

SEQ ID NO: 79680 - RNA, 20 nt, Artificial Sequence
  LRRK2 RNA guide
accuuggggggugagauguu

SEQ ID NO: 79681 - RNA, 20 nt, Artificial Sequence
  LRRK2 RNA guide
auaacaucucaccccccaag

SEQ ID NO: 79682 - RNA, 20 nt, Artificial Sequence
  LRRK2 RNA guide
aucucaccccccaagguuga

SEQ ID NO: 79683 - RNA, 20 nt, Artificial Sequence
  LRRK2 RNA guide
auuguccuguguggucaacc

SEQ ID NO: 79684 - RNA, 20 nt, Artificial Sequence
  LRRK2 RNA guide
caaccuuggggggugagaug

SEQ ID NO: 79685 - RNA, 20 nt, Artificial Sequence
  LRRK2 RNA guide
caccccccaagguugaccac

SEQ ID NO: 79686 - RNA, 20 nt, Artificial Sequence
  LRRK2 RNA guide
cauaacaucucaccccccaa

SEQ ID NO: 79687 - RNA, 20 nt, Artificial Sequence
  LRRK2 RNA guide
caucucaccccccaagguug

SEQ ID NO: 79688 - RNA, 20 nt, Artificial Sequence
  LRRK2 RNA guide
cccaagguugaccacacagg

SEQ ID NO: 79689 - RNA, 20 nt, Artificial Sequence
  LRRK2 RNA guide
ccccaagguugaccacacag

SEQ ID NO: 79690 - RNA, 20 nt, Artificial Sequence
  LRRK2 RNA guide
cccccaagguugaccacaca

SEQ ID NO: 79691 - RNA, 20 nt, Artificial Sequence
  LRRK2 RNA guide
ccccccaagguugaccacac

SEQ ID NO: 79692 - RNA, 20 nt, Artificial Sequence
  LRRK2 RNA guide
ccugucucauaacaucucac

SEQ ID NO: 79693 - RNA, 20 nt, Artificial Sequence
  LRRK2 RNA guide
ccuguguggucaaccuuggg

SEQ ID NO: 79694 - RNA, 20 nt, Artificial Sequence
  LRRK2 RNA guide
ccuuggggggugagauguua

SEQ ID NO: 79695 - RNA, 20 nt, Artificial Sequence
  LRRK2 RNA guide
cucaccccccaagguugacc

SEQ ID NO: 79696 - RNA, 20 nt, Artificial Sequence
  LRRK2 RNA guide
cucauaacaucucacccccc

SEQ ID NO: 79697 - RNA, 20 nt, Artificial Sequence
  LRRK2 RNA guide
cugucucauaacaucucacc

SEQ ID NO: 79698 - RNA, 20 nt, Artificial Sequence
  LRRK2 RNA guide
cuguguggucaaccuugggg

SEQ ID NO: 79699 - RNA, 20 nt, Artificial Sequence
  LRRK2 RNA guide
cuuggggggugagauguuau

SEQ ID NO: 79700 - RNA, 20 nt, Artificial Sequence
  LRRK2 RNA guide
ggggggugagauguuaugag

SEQ ID NO: 79701 - RNA, 20 nt, Artificial Sequence
  LRRK2 RNA guide
ggucaaccuuggggggugag

SEQ ID NO: 79702 - RNA, 20 nt, Artificial Sequence
  LRRK2 RNA guide
gucaaccuuggggggugaga

SEQ ID NO: 79703 - RNA, 20 nt, Artificial Sequence
  LRRK2 RNA guide
guccuguguggucaaccuug

SEQ ID NO: 79704 - RNA, 20 nt, Artificial Sequence
  LRRK2 RNA guide
gucucauaacaucucacccc

SEQ ID NO: 79705 - RNA, 20 nt, Artificial Sequence
  LRRK2 RNA guide
guggucaaccuuggggggug

SEQ ID NO: 79706 - RNA, 20 nt, Artificial Sequence
  LRRK2 RNA guide
guguggucaaccuugggggg

SEQ ID NO: 79707 - RNA, 20 nt, Artificial Sequence
  LRRK2 RNA guide
uaacaucucaccccccaagg

SEQ ID NO: 79708 - RNA, 20 nt, Artificial Sequence
  LRRK2 RNA guide
uauuguccuguguggucaac

SEQ ID NO: 79709 - RNA, 20 nt, Artificial Sequence
  LRRK2 RNA guide
ucaaccuuggggggugagau

SEQ ID NO: 79710 - RNA, 20 nt, Artificial Sequence
  LRRK2 RNA guide
ucaccccccaagguugacca

SEQ ID NO: 79711 - RNA, 20 nt, Artificial Sequence
  LRRK2 RNA guide
ucauaacaucucacccccca

SEQ ID NO: 79712 - RNA, 20 nt, Artificial Sequence
  LRRK2 RNA guide
uccugucucauaacaucuca

SEQ ID NO: 79713 - RNA, 20 nt, Artificial Sequence
  LRRK2 RNA guide
uccuguguggucaaccuugg

SEQ ID NO: 79714 - RNA, 20 nt, Artificial Sequence
  LRRK2 RNA guide
ucucaccccccaagguugac

SEQ ID NO: 79715 - RNA, 20 nt, Artificial Sequence
  LRRK2 RNA guide
ucucauaacaucucaccccc

SEQ ID NO: 79716 - RNA, 20 nt, Artificial Sequence
  LRRK2 RNA guide
uggggggugagauguuauga

SEQ ID NO: 79717 - RNA, 20 nt, Artificial Sequence
  LRRK2 RNA guide
uggucaaccuugggggguga

SEQ ID NO: 79718 - RNA, 20 nt, Artificial Sequence
  LRRK2 RNA guide
uguccuguguggucaaccuu

SEQ ID NO: 79719 - RNA, 20 nt, Artificial Sequence
  LRRK2 RNA guide
ugucucauaacaucucaccc

SEQ ID NO: 79720 - RNA, 20 nt, Artificial Sequence
  LRRK2 RNA guide
uguggucaaccuuggggggu

SEQ ID NO: 79721 - RNA, 20 nt, Artificial Sequence
  LRRK2 RNA guide
uguguggucaaccuuggggg

SEQ ID NO: 79722 - RNA, 20 nt, Artificial Sequence
  LRRK2 RNA guide
uuggggggugagauguuaug

SEQ ID NO: 79723 - RNA, 20 nt, Artificial Sequence
  LRRK2 RNA guide
uuguccuguguggucaaccu

SEQ ID NO: 79724 - RNA, 21 nt, Artificial Sequence
  LRRK2 RNA guide
aacaucucaccccccaagguu

SEQ ID NO: 79725 - RNA, 21 nt, Artificial Sequence
  LRRK2 RNA guide
aaccuuggggggugagauguu

SEQ ID NO: 79726 - RNA, 21 nt, Artificial Sequence
  LRRK2 RNA guide
acaucucaccccccaagguug

SEQ ID NO: 79727 - RNA, 21 nt, Artificial Sequence
  LRRK2 RNA guide
accccccaagguugaccacac

SEQ ID NO: 79728 - RNA, 21 nt, Artificial Sequence
  LRRK2 RNA guide
accuuggggggugagauguua

SEQ ID NO: 79729 - RNA, 21 nt, Artificial Sequence
  LRRK2 RNA guide
auaacaucucaccccccaagg

SEQ ID NO: 79730 - RNA, 21 nt, Artificial Sequence
  LRRK2 RNA guide
aucucaccccccaagguugac

SEQ ID NO: 79731 - RNA, 21 nt, Artificial Sequence
  LRRK2 RNA guide
auuguccuguguggucaaccu

SEQ ID NO: 79732 - RNA, 21 nt, Artificial Sequence
  LRRK2 RNA guide
caaccuuggggggugagaugu

SEQ ID NO: 79733 - RNA, 21 nt, Artificial Sequence
  LRRK2 RNA guide
caccccccaagguugaccaca

SEQ ID NO: 79734 - RNA, 21 nt, Artificial Sequence
  LRRK2 RNA guide
cauaacaucucaccccccaag

SEQ ID NO: 79735 - RNA, 21 nt, Artificial Sequence
  LRRK2 RNA guide
caucucaccccccaagguuga

SEQ ID NO: 79736 - RNA, 21 nt, Artificial Sequence
  LRRK2 RNA guide
cccaagguugaccacacagga

SEQ ID NO: 79737 - RNA, 21 nt, Artificial Sequence
  LRRK2 RNA guide
ccccaagguugaccacacagg

SEQ ID NO: 79738 - RNA, 21 nt, Artificial Sequence
  LRRK2 RNA guide
cccccaagguugaccacacag

SEQ ID NO: 79739 - RNA, 21 nt, Artificial Sequence
  LRRK2 RNA guide
ccccccaagguugaccacaca

SEQ ID NO: 79740 - RNA, 21 nt, Artificial Sequence
  LRRK2 RNA guide
ccugucucauaacaucucacc

SEQ ID NO: 79741 - RNA, 21 nt, Artificial Sequence
  LRRK2 RNA guide
ccuguguggucaaccuugggg

SEQ ID NO: 79742 - RNA, 21 nt, Artificial Sequence
  LRRK2 RNA guide
ccuuggggggugagauguuau

SEQ ID NO: 79743 - RNA, 21 nt, Artificial Sequence
  LRRK2 RNA guide
cucaccccccaagguugacca

SEQ ID NO: 79744 - RNA, 21 nt, Artificial Sequence
  LRRK2 RNA guide
cucauaacaucucacccccca

SEQ ID NO: 79745 - RNA, 21 nt, Artificial Sequence
  LRRK2 RNA guide
cugucucauaacaucucaccc

SEQ ID NO: 79746 - RNA, 21 nt, Artificial Sequence
  LRRK2 RNA guide
cuguguggucaaccuuggggg

SEQ ID NO: 79747 - RNA, 21 nt, Artificial Sequence
  LRRK2 RNA guide
cuuggggggugagauguuaug

SEQ ID NO: 79748 - RNA, 21 nt, Artificial Sequence
  LRRK2 RNA guide
ggggggugagauguuaugaga

SEQ ID NO: 79749 - RNA, 21 nt, Artificial Sequence
  LRRK2 RNA guide
ggucaaccuuggggggugaga

SEQ ID NO: 79750 - RNA, 21 nt, Artificial Sequence
  LRRK2 RNA guide
gucaaccuuggggggugagau

SEQ ID NO: 79751 - RNA, 21 nt, Artificial Sequence
  LRRK2 RNA guide
guccugucucauaacaucuca

SEQ ID NO: 79752 - RNA, 21 nt, Artificial Sequence
  LRRK2 RNA guide
guccuguguggucaaccuugg

SEQ ID NO: 79753 - RNA, 21 nt, Artificial Sequence
  LRRK2 RNA guide
gucucauaacaucucaccccc

SEQ ID NO: 79754 - RNA, 21 nt, Artificial Sequence
  LRRK2 RNA guide
guggucaaccuugggggguga

SEQ ID NO: 79755 - RNA, 21 nt, Artificial Sequence
  LRRK2 RNA guide
guguggucaaccuuggggggu

SEQ ID NO: 79756 - RNA, 21 nt, Artificial Sequence
  LRRK2 RNA guide
uaacaucucaccccccaaggu

SEQ ID NO: 79757 - RNA, 21 nt, Artificial Sequence
  LRRK2 RNA guide
uauuguccuguguggucaacc

SEQ ID NO: 79758 - RNA, 21 nt, Artificial Sequence
  LRRK2 RNA guide
ucaaccuuggggggugagaug

SEQ ID NO: 79759 - RNA, 21 nt, Artificial Sequence
  LRRK2 RNA guide
ucaccccccaagguugaccac

SEQ ID NO: 79760 - RNA, 21 nt, Artificial Sequence
  LRRK2 RNA guide
ucauaacaucucaccccccaa

SEQ ID NO: 79761 - RNA, 21 nt, Artificial Sequence
  LRRK2 RNA guide
uccugucucauaacaucucac

SEQ ID NO: 79762 - RNA, 21 nt, Artificial Sequence
  LRRK2 RNA guide
uccuguguggucaaccuuggg

SEQ ID NO: 79763 - RNA, 21 nt, Artificial Sequence
  LRRK2 RNA guide
ucucaccccccaagguugacc

SEQ ID NO: 79764 - RNA, 21 nt, Artificial Sequence
  LRRK2 RNA guide
ucucauaacaucucacccccc

SEQ ID NO: 79765 - RNA, 21 nt, Artificial Sequence
  LRRK2 RNA guide
uggggggugagauguuaugag

SEQ ID NO: 79766 - RNA, 21 nt, Artificial Sequence
  LRRK2 RNA guide
uggucaaccuuggggggugag

SEQ ID NO: 79767 - RNA, 21 nt, Artificial Sequence
  LRRK2 RNA guide
uguccuguguggucaaccuug

SEQ ID NO: 79768 - RNA, 21 nt, Artificial Sequence
  LRRK2 RNA guide
ugucucauaacaucucacccc

SEQ ID NO: 79769 - RNA, 21 nt, Artificial Sequence
  LRRK2 RNA guide
uguggucaaccuuggggggug

SEQ ID NO: 79770 - RNA, 21 nt, Artificial Sequence
  LRRK2 RNA guide
uguguggucaaccuugggggg

SEQ ID NO: 79771 - RNA, 21 nt, Artificial Sequence
  LRRK2 RNA guide
uuauuguccuguguggucaac

SEQ ID NO: 79772 - RNA, 21 nt, Artificial Sequence
  LRRK2 RNA guide
uuggggggugagauguuauga

SEQ ID NO: 79773 - RNA, 21 nt, Artificial Sequence
  LRRK2 RNA guide
uuguccuguguggucaaccuu

SEQ ID NO: 79774 - RNA, 22 nt, Artificial Sequence
  LRRK2 RNA guide
aacaucucaccccccaagguug

SEQ ID NO: 79775 - RNA, 22 nt, Artificial Sequence
  LRRK2 RNA guide
aaccuuggggggugagauguua

SEQ ID NO: 79776 - RNA, 22 nt, Artificial Sequence
  LRRK2 RNA guide
acaucucaccccccaagguuga

SEQ ID NO: 79777 - RNA, 22 nt, Artificial Sequence
  LRRK2 RNA guide
accccccaagguugaccacaca

SEQ ID NO: 79778 - RNA, 22 nt, Artificial Sequence
  LRRK2 RNA guide
accuuggggggugagauguuau

SEQ ID NO: 79779 - RNA, 22 nt, Artificial Sequence
  LRRK2 RNA guide
auaacaucucaccccccaaggu

SEQ ID NO: 79780 - RNA, 22 nt, Artificial Sequence
  LRRK2 RNA guide
aucucaccccccaagguugacc

SEQ ID NO: 79781 - RNA, 22 nt, Artificial Sequence
  LRRK2 RNA guide
auuguccuguguggucaaccuu

SEQ ID NO: 79782 - RNA, 22 nt, Artificial Sequence
  LRRK2 RNA guide
caaccuuggggggugagauguu

SEQ ID NO: 79783 - RNA, 22 nt, Artificial Sequence
  LRRK2 RNA guide
caccccccaagguugaccacac

SEQ ID NO: 79784 - RNA, 22 nt, Artificial Sequence
  LRRK2 RNA guide
cauaacaucucaccccccaagg

SEQ ID NO: 79785 - RNA, 22 nt, Artificial Sequence
  LRRK2 RNA guide
caucucaccccccaagguugac

SEQ ID NO: 79786 - RNA, 22 nt, Artificial Sequence
  LRRK2 RNA guide
cccaagguugaccacacaggac

SEQ ID NO: 79787 - RNA, 22 nt, Artificial Sequence
  LRRK2 RNA guide
ccccaagguugaccacacagga

SEQ ID NO: 79788 - RNA, 22 nt, Artificial Sequence
  LRRK2 RNA guide
cccccaagguugaccacacagg

SEQ ID NO: 79789 - RNA, 22 nt, Artificial Sequence
  LRRK2 RNA guide
ccccccaagguugaccacacag

SEQ ID NO: 79790 - RNA, 22 nt, Artificial Sequence
  LRRK2 RNA guide
ccugucucauaacaucucaccc

SEQ ID NO: 79791 - RNA, 22 nt, Artificial Sequence
  LRRK2 RNA guide
ccuguguggucaaccuuggggg

SEQ ID NO: 79792 - RNA, 22 nt, Artificial Sequence
  LRRK2 RNA guide
ccuuggggggugagauguuaug

SEQ ID NO: 79793 - RNA, 22 nt, Artificial Sequence
  LRRK2 RNA guide
cucaccccccaagguugaccac

SEQ ID NO: 79794 - RNA, 22 nt, Artificial Sequence
  LRRK2 RNA guide
cucauaacaucucaccccccaa

SEQ ID NO: 79795 - RNA, 22 nt, Artificial Sequence
  LRRK2 RNA guide
cugucucauaacaucucacccc

SEQ ID NO: 79796 - RNA, 22 nt, Artificial Sequence
  LRRK2 RNA guide
cuguguggucaaccuugggggg

SEQ ID NO: 79797 - RNA, 22 nt, Artificial Sequence
  LRRK2 RNA guide
cuuggggggugagauguuauga

SEQ ID NO: 79798 - RNA, 22 nt, Artificial Sequence
  LRRK2 RNA guide
ggggggugagauguuaugagac

SEQ ID NO: 79799 - RNA, 22 nt, Artificial Sequence
  LRRK2 RNA guide
ggucaaccuuggggggugagau

SEQ ID NO: 79800 - RNA, 22 nt, Artificial Sequence
  LRRK2 RNA guide
gucaaccuuggggggugagaug

SEQ ID NO: 79801 - RNA, 22 nt, Artificial Sequence
  LRRK2 RNA guide
guccugucucauaacaucucac

SEQ ID NO: 79802 - RNA, 22 nt, Artificial Sequence
  LRRK2 RNA guide
guccuguguggucaaccuuggg

SEQ ID NO: 79803 - RNA, 22 nt, Artificial Sequence
  LRRK2 RNA guide
gucucauaacaucucacccccc

SEQ ID NO: 79804 - RNA, 22 nt, Artificial Sequence
  LRRK2 RNA guide
guggucaaccuuggggggugag

SEQ ID NO: 79805 - RNA, 22 nt, Artificial Sequence
  LRRK2 RNA guide
guguggucaaccuuggggggug

SEQ ID NO: 79806 - RNA, 22 nt, Artificial Sequence
  LRRK2 RNA guide
uaacaucucaccccccaagguu

SEQ ID NO: 79807 - RNA, 22 nt, Artificial Sequence
  LRRK2 RNA guide
uauuguccuguguggucaaccu

SEQ ID NO: 79808 - RNA, 22 nt, Artificial Sequence
  LRRK2 RNA guide
ucaaccuuggggggugagaugu

SEQ ID NO: 79809 - RNA, 22 nt, Artificial Sequence
  LRRK2 RNA guide
ucaccccccaagguugaccaca

SEQ ID NO: 79810 - RNA, 22 nt, Artificial Sequence
  LRRK2 RNA guide
ucauaacaucucaccccccaag

SEQ ID NO: 79811 - RNA, 22 nt, Artificial Sequence
  LRRK2 RNA guide
uccugucucauaacaucucacc

SEQ ID NO: 79812 - RNA, 22 nt, Artificial Sequence
  LRRK2 RNA guide
uccuguguggucaaccuugggg

SEQ ID NO: 79813 - RNA, 22 nt, Artificial Sequence
  LRRK2 RNA guide
ucucaccccccaagguugacca

SEQ ID NO: 79814 - RNA, 22 nt, Artificial Sequence
  LRRK2 RNA guide
ucucauaacaucucacccccca

SEQ ID NO: 79815 - RNA, 22 nt, Artificial Sequence
  LRRK2 RNA guide
uggggggugagauguuaugaga

SEQ ID NO: 79816 - RNA, 22 nt, Artificial Sequence
  LRRK2 RNA guide
uggucaaccuuggggggugaga

SEQ ID NO: 79817 - RNA, 22 nt, Artificial Sequence
  LRRK2 RNA guide
uguccugucucauaacaucuca

SEQ ID NO: 79818 - RNA, 22 nt, Artificial Sequence
  LRRK2 RNA guide
uguccuguguggucaaccuugg

SEQ ID NO: 79819 - RNA, 22 nt, Artificial Sequence
  LRRK2 RNA guide
ugucucauaacaucucaccccc

SEQ ID NO: 79820 - RNA, 22 nt, Artificial Sequence
  LRRK2 RNA guide
uguggucaaccuugggggguga

SEQ ID NO: 79821 - RNA, 22 nt, Artificial Sequence
  LRRK2 RNA guide
uguguggucaaccuuggggggu

SEQ ID NO: 79822 - RNA, 22 nt, Artificial Sequence
  LRRK2 RNA guide
uuauuguccuguguggucaacc

SEQ ID NO: 79823 - RNA, 22 nt, Artificial Sequence
  LRRK2 RNA guide
uuggggggugagauguuaugag

SEQ ID NO: 79824 - RNA, 22 nt, Artificial Sequence
  LRRK2 RNA guide
uuguccuguguggucaaccuug

SEQ ID NO: 79825 - RNA, 22 nt, Artificial Sequence
  LRRK2 RNA guide
uuuauuguccuguguggucaac

SEQ ID NO: 79826 - RNA, 20 nt, Artificial Sequence
  LRRK2 RNA guide
aacaucucaccccacaaggu

SEQ ID NO: 79827 - RNA, 20 nt, Artificial Sequence
  LRRK2 RNA guide
aaccuuguggggugagaugu

SEQ ID NO: 79828 - RNA, 20 nt, Artificial Sequence
  LRRK2 RNA guide
acaucucaccccacaagguu

SEQ ID NO: 79829 - RNA, 20 nt, Artificial Sequence
  LRRK2 RNA guide
accccacaagguugaccaca

SEQ ID NO: 79830 - RNA, 20 nt, Artificial Sequence
  LRRK2 RNA guide
accuuguggggugagauguu

SEQ ID NO: 79831 - RNA, 20 nt, Artificial Sequence
  LRRK2 RNA guide
auaacaucucaccccacaag

SEQ ID NO: 79832 - RNA, 20 nt, Artificial Sequence
  LRRK2 RNA guide
aucucaccccacaagguuga

SEQ ID NO: 79833 - RNA, 20 nt, Artificial Sequence
  LRRK2 RNA guide
caaccuuguggggugagaug

SEQ ID NO: 79834 - RNA, 20 nt, Artificial Sequence
  LRRK2 RNA guide
cacaagguugaccacacagg

SEQ ID NO: 79835 - RNA, 20 nt, Artificial Sequence
  LRRK2 RNA guide
caccccacaagguugaccac

SEQ ID NO: 79836 - RNA, 20 nt, Artificial Sequence
  LRRK2 RNA guide
cauaacaucucaccccacaa

SEQ ID NO: 79837 - RNA, 20 nt, Artificial Sequence
  LRRK2 RNA guide
caucucaccccacaagguug

SEQ ID NO: 79838 - RNA, 20 nt, Artificial Sequence
  LRRK2 RNA guide
ccacaagguugaccacacag

SEQ ID NO: 79839 - RNA, 20 nt, Artificial Sequence
  LRRK2 RNA guide
cccacaagguugaccacaca

SEQ ID NO: 79840 - RNA, 20 nt, Artificial Sequence
  LRRK2 RNA guide
ccccacaagguugaccacac

SEQ ID NO: 79841 - RNA, 20 nt, Artificial Sequence
  LRRK2 RNA guide
ccuguguggucaaccuugug

SEQ ID NO: 79842 - RNA, 20 nt, Artificial Sequence
  LRRK2 RNA guide
ccuuguggggugagauguua

SEQ ID NO: 79843 - RNA, 20 nt, Artificial Sequence
  LRRK2 RNA guide
cucaccccacaagguugacc

SEQ ID NO: 79844 - RNA, 20 nt, Artificial Sequence
  LRRK2 RNA guide
cucauaacaucucaccccac

SEQ ID NO: 79845 - RNA, 20 nt, Artificial Sequence
  LRRK2 RNA guide
cuguguggucaaccuugugg

SEQ ID NO: 79846 - RNA, 20 nt, Artificial Sequence
  LRRK2 RNA guide
cuuguggggugagauguuau

SEQ ID NO: 79847 - RNA, 20 nt, Artificial Sequence
  LRRK2 RNA guide
ggucaaccuuguggggugag

SEQ ID NO: 79848 - RNA, 20 nt, Artificial Sequence
  LRRK2 RNA guide
gucaaccuuguggggugaga

SEQ ID NO: 79849 - RNA, 20 nt, Artificial Sequence
  LRRK2 RNA guide
guggggugagauguuaugag

SEQ ID NO: 79850 - RNA, 20 nt, Artificial Sequence
  LRRK2 RNA guide
guggucaaccuuguggggug

SEQ ID NO: 79851 - RNA, 20 nt, Artificial Sequence
  LRRK2 RNA guide
guguggucaaccuugugggg

SEQ ID NO: 79852 - RNA, 20 nt, Artificial Sequence
  LRRK2 RNA guide
uaacaucucaccccacaagg

SEQ ID NO: 79853 - RNA, 20 nt, Artificial Sequence
  LRRK2 RNA guide
ucaaccuuguggggugagau

SEQ ID NO: 79854 - RNA, 20 nt, Artificial Sequence
  LRRK2 RNA guide
ucaccccacaagguugacca

SEQ ID NO: 79855 - RNA, 20 nt, Artificial Sequence
  LRRK2 RNA guide
ucauaacaucucaccccaca

SEQ ID NO: 79856 - RNA, 20 nt, Artificial Sequence
  LRRK2 RNA guide
uccuguguggucaaccuugu

SEQ ID NO: 79857 - RNA, 20 nt, Artificial Sequence
  LRRK2 RNA guide
ucucaccccacaagguugac

SEQ ID NO: 79858 - RNA, 20 nt, Artificial Sequence
  LRRK2 RNA guide
ucucauaacaucucacccca

SEQ ID NO: 79859 - RNA, 20 nt, Artificial Sequence
  LRRK2 RNA guide
uggucaaccuugugggguga

SEQ ID NO: 79860 - RNA, 20 nt, Artificial Sequence
  LRRK2 RNA guide
uguggggugagauguuauga

SEQ ID NO: 79861 - RNA, 20 nt, Artificial Sequence
  LRRK2 RNA guide
uguggucaaccuuguggggu

SEQ ID NO: 79862 - RNA, 20 nt, Artificial Sequence
  LRRK2 RNA guide
uguguggucaaccuuguggg

SEQ ID NO: 79863 - RNA, 20 nt, Artificial Sequence
  LRRK2 RNA guide
uuguggggugagauguuaug

SEQ ID NO: 79864 - RNA, 21 nt, Artificial Sequence
  LRRK2 RNA guide
aacaucucaccccacaagguu

SEQ ID NO: 79865 - RNA, 21 nt, Artificial Sequence
  LRRK2 RNA guide
aaccuuguggggugagauguu

SEQ ID NO: 79866 - RNA, 21 nt, Artificial Sequence
  LRRK2 RNA guide
acaucucaccccacaagguug

SEQ ID NO: 79867 - RNA, 21 nt, Artificial Sequence
  LRRK2 RNA guide
accccacaagguugaccacac

SEQ ID NO: 79868 - RNA, 21 nt, Artificial Sequence
  LRRK2 RNA guide
accuuguggggugagauguua

SEQ ID NO: 79869 - RNA, 21 nt, Artificial Sequence
  LRRK2 RNA guide
auaacaucucaccccacaagg

SEQ ID NO: 79870 - RNA, 21 nt, Artificial Sequence
  LRRK2 RNA guide
aucucaccccacaagguugac

SEQ ID NO: 79871 - RNA, 21 nt, Artificial Sequence
  LRRK2 RNA guide
caaccuuguggggugagaugu

SEQ ID NO: 79872 - RNA, 21 nt, Artificial Sequence
  LRRK2 RNA guide
cacaagguugaccacacagga

SEQ ID NO: 79873 - RNA, 21 nt, Artificial Sequence
  LRRK2 RNA guide
caccccacaagguugaccaca

SEQ ID NO: 79874 - RNA, 21 nt, Artificial Sequence
  LRRK2 RNA guide
cauaacaucucaccccacaag

SEQ ID NO: 79875 - RNA, 21 nt, Artificial Sequence
  LRRK2 RNA guide
caucucaccccacaagguuga

SEQ ID NO: 79876 - RNA, 21 nt, Artificial Sequence
  LRRK2 RNA guide
ccacaagguugaccacacagg

SEQ ID NO: 79877 - RNA, 21 nt, Artificial Sequence
  LRRK2 RNA guide
cccacaagguugaccacacag

SEQ ID NO: 79878 - RNA, 21 nt, Artificial Sequence
  LRRK2 RNA guide
ccccacaagguugaccacaca

SEQ ID NO: 79879 - RNA, 21 nt, Artificial Sequence
  LRRK2 RNA guide
ccuguguggucaaccuugugg

SEQ ID NO: 79880 - RNA, 21 nt, Artificial Sequence
  LRRK2 RNA guide
ccuuguggggugagauguuau

SEQ ID NO: 79881 - RNA, 21 nt, Artificial Sequence
  LRRK2 RNA guide
cucaccccacaagguugacca

SEQ ID NO: 79882 - RNA, 21 nt, Artificial Sequence
  LRRK2 RNA guide
cucauaacaucucaccccaca

SEQ ID NO: 79883 - RNA, 21 nt, Artificial Sequence
  LRRK2 RNA guide
cuguguggucaaccuuguggg

SEQ ID NO: 79884 - RNA, 21 nt, Artificial Sequence
  LRRK2 RNA guide
cuuguggggugagauguuaug

SEQ ID NO: 79885 - RNA, 21 nt, Artificial Sequence
  LRRK2 RNA guide
ggucaaccuuguggggugaga

SEQ ID NO: 79886 - RNA, 21 nt, Artificial Sequence
  LRRK2 RNA guide
gucaaccuuguggggugagau

SEQ ID NO: 79887 - RNA, 21 nt, Artificial Sequence
  LRRK2 RNA guide
guccuguguggucaaccuugu

SEQ ID NO: 79888 - RNA, 21 nt, Artificial Sequence
  LRRK2 RNA guide
gucucauaacaucucacccca

SEQ ID NO: 79889 - RNA, 21 nt, Artificial Sequence
  LRRK2 RNA guide
guggggugagauguuaugaga

SEQ ID NO: 79890 - RNA, 21 nt, Artificial Sequence
  LRRK2 RNA guide
guggucaaccuugugggguga

SEQ ID NO: 79891 - RNA, 21 nt, Artificial Sequence
  LRRK2 RNA guide
guguggucaaccuuguggggu

SEQ ID NO: 79892 - RNA, 21 nt, Artificial Sequence
  LRRK2 RNA guide
uaacaucucaccccacaaggu

SEQ ID NO: 79893 - RNA, 21 nt, Artificial Sequence
  LRRK2 RNA guide
ucaaccuuguggggugagaug

SEQ ID NO: 79894 - RNA, 21 nt, Artificial Sequence
  LRRK2 RNA guide
ucaccccacaagguugaccac

SEQ ID NO: 79895 - RNA, 21 nt, Artificial Sequence
  LRRK2 RNA guide
ucauaacaucucaccccacaa

SEQ ID NO: 79896 - RNA, 21 nt, Artificial Sequence
  LRRK2 RNA guide
uccuguguggucaaccuugug

SEQ ID NO: 79897 - RNA, 21 nt, Artificial Sequence
  LRRK2 RNA guide
ucucaccccacaagguugacc

SEQ ID NO: 79898 - RNA, 21 nt, Artificial Sequence
  LRRK2 RNA guide
ucucauaacaucucaccccac

SEQ ID NO: 79899 - RNA, 21 nt, Artificial Sequence
  LRRK2 RNA guide
uggucaaccuuguggggugag

SEQ ID NO: 79900 - RNA, 21 nt, Artificial Sequence
  LRRK2 RNA guide
uguggggugagauguuaugag

SEQ ID NO: 79901 - RNA, 21 nt, Artificial Sequence
  LRRK2 RNA guide
uguggucaaccuuguggggug

SEQ ID NO: 79902 - RNA, 21 nt, Artificial Sequence
  LRRK2 RNA guide
uguguggucaaccuugugggg

SEQ ID NO: 79903 - RNA, 21 nt, Artificial Sequence
  LRRK2 RNA guide
uuguggggugagauguuauga

SEQ ID NO: 79904 - RNA, 22 nt, Artificial Sequence
  LRRK2 RNA guide
aacaucucaccccacaagguug

SEQ ID NO: 79905 - RNA, 22 nt, Artificial Sequence
  LRRK2 RNA guide
aaccuuguggggugagauguua

SEQ ID NO: 79906 - RNA, 22 nt, Artificial Sequence
  LRRK2 RNA guide
acaucucaccccacaagguuga

SEQ ID NO: 79907 - RNA, 22 nt, Artificial Sequence
  LRRK2 RNA guide
accccacaagguugaccacaca

SEQ ID NO: 79908 - RNA, 22 nt, Artificial Sequence
  LRRK2 RNA guide
accuuguggggugagauguuau

SEQ ID NO: 79909 - RNA, 22 nt, Artificial Sequence
  LRRK2 RNA guide
auaacaucucaccccacaaggu

SEQ ID NO: 79910 - RNA, 22 nt, Artificial Sequence
  LRRK2 RNA guide
aucucaccccacaagguugacc

SEQ ID NO: 79911 - RNA, 22 nt, Artificial Sequence
  LRRK2 RNA guide
caaccuuguggggugagauguu

SEQ ID NO: 79912 - RNA, 22 nt, Artificial Sequence
  LRRK2 RNA guide
cacaagguugaccacacaggac

SEQ ID NO: 79913 - RNA, 22 nt, Artificial Sequence
  LRRK2 RNA guide
caccccacaagguugaccacac

SEQ ID NO: 79914 - RNA, 22 nt, Artificial Sequence
  LRRK2 RNA guide
cauaacaucucaccccacaagg

SEQ ID NO: 79915 - RNA, 22 nt, Artificial Sequence
  LRRK2 RNA guide
caucucaccccacaagguugac

SEQ ID NO: 79916 - RNA, 22 nt, Artificial Sequence
  LRRK2 RNA guide
ccacaagguugaccacacagga

SEQ ID NO: 79917 - RNA, 22 nt, Artificial Sequence
  LRRK2 RNA guide
cccacaagguugaccacacagg

SEQ ID NO: 79918 - RNA, 22 nt, Artificial Sequence
  LRRK2 RNA guide
ccccacaagguugaccacacag

SEQ ID NO: 79919 - RNA, 22 nt, Artificial Sequence
  LRRK2 RNA guide
ccuguguggucaaccuuguggg

SEQ ID NO: 79920 - RNA, 22 nt, Artificial Sequence
  LRRK2 RNA guide
ccuuguggggugagauguuaug

SEQ ID NO: 79921 - RNA, 22 nt, Artificial Sequence
  LRRK2 RNA guide
cucaccccacaagguugaccac

SEQ ID NO: 79922 - RNA, 22 nt, Artificial Sequence
  LRRK2 RNA guide
cucauaacaucucaccccacaa

SEQ ID NO: 79923 - RNA, 22 nt, Artificial Sequence
  LRRK2 RNA guide
cuguguggucaaccuugugggg

SEQ ID NO: 79924 - RNA, 22 nt, Artificial Sequence
  LRRK2 RNA guide
cuuguggggugagauguuauga

SEQ ID NO: 79925 - RNA, 22 nt, Artificial Sequence
  LRRK2 RNA guide
ggucaaccuuguggggugagau

SEQ ID NO: 79926 - RNA, 22 nt, Artificial Sequence
  LRRK2 RNA guide
gucaaccuuguggggugagaug

SEQ ID NO: 79927 - RNA, 22 nt, Artificial Sequence
  LRRK2 RNA guide
guccuguguggucaaccuugug

SEQ ID NO: 79928 - RNA, 22 nt, Artificial Sequence
  LRRK2 RNA guide
gucucauaacaucucaccccac

SEQ ID NO: 79929 - RNA, 22 nt, Artificial Sequence
  LRRK2 RNA guide
guggggugagauguuaugagac

SEQ ID NO: 79930 - RNA, 22 nt, Artificial Sequence
  LRRK2 RNA guide
guggucaaccuuguggggugag

SEQ ID NO: 79931 - RNA, 22 nt, Artificial Sequence
  LRRK2 RNA guide
guguggucaaccuuguggggug

SEQ ID NO: 79932 - RNA, 22 nt, Artificial Sequence
  LRRK2 RNA guide
uaacaucucaccccacaagguu

SEQ ID NO: 79933 - RNA, 22 nt, Artificial Sequence
  LRRK2 RNA guide
ucaaccuuguggggugagaugu

SEQ ID NO: 79934 - RNA, 22 nt, Artificial Sequence
  LRRK2 RNA guide
ucaccccacaagguugaccaca

SEQ ID NO: 79935 - RNA, 22 nt, Artificial Sequence
  LRRK2 RNA guide
ucauaacaucucaccccacaag

SEQ ID NO: 79936 - RNA, 22 nt, Artificial Sequence
  LRRK2 RNA guide
uccuguguggucaaccuugugg

SEQ ID NO: 79937 - RNA, 22 nt, Artificial Sequence
  LRRK2 RNA guide
ucucaccccacaagguugacca

SEQ ID NO: 79938 - RNA, 22 nt, Artificial Sequence
  LRRK2 RNA guide
ucucauaacaucucaccccaca

SEQ ID NO: 79939 - RNA, 22 nt, Artificial Sequence
  LRRK2 RNA guide
uggucaaccuuguggggugaga

SEQ ID NO: 79940 - RNA, 22 nt, Artificial Sequence
  LRRK2 RNA guide
uguccuguguggucaaccuugu

SEQ ID NO: 79941 - RNA, 22 nt, Artificial Sequence
  LRRK2 RNA guide
ugucucauaacaucucacccca

SEQ ID NO: 79942 - RNA, 22 nt, Artificial Sequence
  LRRK2 RNA guide
uguggggugagauguuaugaga

SEQ ID NO: 79943 - RNA, 22 nt, Artificial Sequence
  LRRK2 RNA guide
uguggucaaccuugugggguga

SEQ ID NO: 79944 - RNA, 22 nt, Artificial Sequence
  LRRK2 RNA guide
uguguggucaaccuuguggggu

SEQ ID NO: 79945 - RNA, 22 nt, Artificial Sequence
  LRRK2 RNA guide
uuguggggugagauguuaugag

SEQ ID NO: 79946 - RNA, 20 nt, Artificial Sequence
  LRRK2 RNA guide
aaaugaucaucuguuuaagg

SEQ ID NO: 79947 - RNA, 20 nt, Artificial Sequence
  LRRK2 RNA guide
aaugaucaucuguuuaagga

SEQ ID NO: 79948 - RNA, 20 nt, Artificial Sequence
  LRRK2 RNA guide
aauuccuuaaacagaugauc

SEQ ID NO: 79949 - RNA, 20 nt, Artificial Sequence
  LRRK2 RNA guide
auuccuuaaacagaugauca

SEQ ID NO: 79950 - RNA, 20 nt, Artificial Sequence
  LRRK2 RNA guide
ccuuaaacagaugaucauuu

SEQ ID NO: 79951 - RNA, 20 nt, Artificial Sequence
  LRRK2 RNA guide
cuuaauuccuuaaacagaug

SEQ ID NO: 79952 - RNA, 20 nt, Artificial Sequence
  LRRK2 RNA guide
gcuuaauuccuuaaacagau

SEQ ID NO: 79953 - RNA, 20 nt, Artificial Sequence
  LRRK2 RNA guide
uccuuaaacagaugaucauu

SEQ ID NO: 79954 - RNA, 20 nt, Artificial Sequence
  LRRK2 RNA guide
uuccuuaaacagaugaucau

SEQ ID NO: 79955 - RNA, 21 nt, Artificial Sequence
  LRRK2 RNA guide
gcuuaauuccuuaaacagaug

SEQ ID NO: 79956 - RNA, 22 nt, Artificial Sequence
  LRRK2 RNA guide
gcuuaauuccuuaaacagauga

SEQ ID NO: 79957 - RNA, 22 nt, Artificial Sequence
  LRRK2 RNA guide
ugcuuaauuccuuaaacagaug

SEQ ID NO: 79958 - RNA, 20 nt, Artificial Sequence
  LRRK2 RNA guide
acacaaaaaaugaucaucug

SEQ ID NO: 79959 - RNA, 20 nt, Artificial Sequence
  LRRK2 RNA guide
acagaugaucauuuuuugug

SEQ ID NO: 79960 - RNA, 20 nt, Artificial Sequence
  LRRK2 RNA guide
cacaaaaaaugaucaucugu

SEQ ID NO: 79961 - RNA, 20 nt, Artificial Sequence
  LRRK2 RNA guide
cagaugaucauuuuuugugu

SEQ ID NO: 79962 - RNA, 20 nt, Artificial Sequence
  LRRK2 RNA guide
cauuuuuuguguuuagugca

SEQ ID NO: 79963 - RNA, 20 nt, Artificial Sequence
  LRRK2 RNA guide
gcacuaaacacaaaaaauga

SEQ ID NO: 79964 - RNA, 20 nt, Artificial Sequence
  LRRK2 RNA guide
ucauuuuuuguguuuagugc

SEQ ID NO: 79965 - RNA, 20 nt, Artificial Sequence
  LRRK2 RNA guide
ugcacuaaacacaaaaaaug

SEQ ID NO: 79966 - RNA, 22 nt, Artificial Sequence
  LRRK2 RNA guide
gaucauuuuuuguguuuagugc

SEQ ID NO: 79967 - RNA, 22 nt, Artificial Sequence
  LRRK2 RNA guide
gcacuaaacacaaaaaaugauc

SEQ ID NO: 79968 - RNA, 20 nt, Artificial Sequence
  LRRK2 RNA guide
ccgcaauuaauauuggugua

SEQ ID NO: 79969 - RNA, 20 nt, Artificial Sequence
  LRRK2 RNA guide
cgcaauuaauauugguguag

SEQ ID NO: 79970 - RNA, 20 nt, Artificial Sequence
  LRRK2 RNA guide
gcaauuaauauugguguagu

SEQ ID NO: 79971 - RNA, 21 nt, Artificial Sequence
  LRRK2 RNA guide
ccgcaauuaauauugguguag

SEQ ID NO: 79972 - RNA, 21 nt, Artificial Sequence
  LRRK2 RNA guide
cgcaauuaauauugguguagu

SEQ ID NO: 79973 - RNA, 21 nt, Artificial Sequence
  LRRK2 RNA guide
uccgcaauuaauauuggugua

SEQ ID NO: 79974 - RNA, 22 nt, Artificial Sequence
  LRRK2 RNA guide
auccgcaauuaauauuggugua

SEQ ID NO: 79975 - RNA, 22 nt, Artificial Sequence
  LRRK2 RNA guide
ccgcaauuaauauugguguagu

SEQ ID NO: 79976 - RNA, 22 nt, Artificial Sequence
  LRRK2 RNA guide
cgcaauuaauauugguguaguu

SEQ ID NO: 79977 - RNA, 22 nt, Artificial Sequence
  LRRK2 RNA guide
uccgcaauuaauauugguguag

SEQ ID NO: 79978 - RNA, 20 nt, Artificial Sequence
  LRRK2 RNA guide
cgcacaugccaccaugccca

SEQ ID NO: 79979 - RNA, 20 nt, Artificial Sequence
  LRRK2 RNA guide
guagcugggcaugguggcau

SEQ ID NO: 79980 - RNA, 21 nt, Artificial Sequence
  LRRK2 RNA guide
acgcacaugccaccaugccca

SEQ ID NO: 79981 - RNA, 21 nt, Artificial Sequence
  LRRK2 RNA guide
aguagcugggcaugguggcau

SEQ ID NO: 79982 - RNA, 21 nt, Artificial Sequence
  LRRK2 RNA guide
cgcacaugccaccaugcccag

SEQ ID NO: 79983 - RNA, 21 nt, Artificial Sequence
  LRRK2 RNA guide
guagcugggcaugguggcaug

SEQ ID NO: 79984 - RNA, 22 nt, Artificial Sequence
  LRRK2 RNA guide
aaguagcugggcaugguggcau

SEQ ID NO: 79985 - RNA, 22 nt, Artificial Sequence
  LRRK2 RNA guide
acgcacaugccaccaugcccag

SEQ ID NO: 79986 - RNA, 22 nt, Artificial Sequence
  LRRK2 RNA guide
aguagcugggcaugguggcaug

SEQ ID NO: 79987 - RNA, 22 nt, Artificial Sequence
  LRRK2 RNA guide
cacgcacaugccaccaugccca

SEQ ID NO: 79988 - RNA, 22 nt, Artificial Sequence
  LRRK2 RNA guide
cgcacaugccaccaugcccagc

SEQ ID NO: 79989 - RNA, 22 nt, Artificial Sequence
  LRRK2 RNA guide
guagcugggcaugguggcaugu

SEQ ID NO: 79990 - RNA, 20 nt, Artificial Sequence
  LRRK2 RNA guide
acgcacaugccaccaugccc

SEQ ID NO: 79991 - RNA, 20 nt, Artificial Sequence
  LRRK2 RNA guide
gcagcugggcaugguggcau

SEQ ID NO: 79992 - RNA, 21 nt, Artificial Sequence
  LRRK2 RNA guide
agcagcugggcaugguggcau

SEQ ID NO: 79993 - RNA, 21 nt, Artificial Sequence
  LRRK2 RNA guide
cacgcacaugccaccaugccc

SEQ ID NO: 79994 - RNA, 21 nt, Artificial Sequence
  LRRK2 RNA guide
gcagcugggcaugguggcaug

SEQ ID NO: 79995 - RNA, 22 nt, Artificial Sequence
  LRRK2 RNA guide
aagcagcugggcaugguggcau

SEQ ID NO: 79996 - RNA, 22 nt, Artificial Sequence
  LRRK2 RNA guide
acaaaaagcagcugggcauggu

SEQ ID NO: 79997 - RNA, 22 nt, Artificial Sequence
  LRRK2 RNA guide
acacgcacaugccaccaugccc

SEQ ID NO: 79998 - RNA, 22 nt, Artificial Sequence
  LRRK2 RNA guide
agcagcugggcaugguggcaug

SEQ ID NO: 79999 - RNA, 22 nt, Artificial Sequence
  LRRK2 RNA guide
augccaccaugcccagcugcuu

SEQ ID NO: 80000 - RNA, 22 nt, Artificial Sequence
  LRRK2 RNA guide
gcagcugggcaugguggcaugu

SEQ ID NO: 80001 - RNA, 20 nt, Artificial Sequence
  LRRK2 RNA guide
accaaggaggcugaggcacg

SEQ ID NO: 80002 - RNA, 20 nt, Artificial Sequence
  LRRK2 RNA guide
caaggaggcugaggcacgag

SEQ ID NO: 80003 - RNA, 20 nt, Artificial Sequence
  LRRK2 RNA guide
ccaaggaggcugaggcacga

SEQ ID NO: 80004 - RNA, 20 nt, Artificial Sequence
  LRRK2 RNA guide
cuauucucgugccucagccu

SEQ ID NO: 80005 - RNA, 20 nt, Artificial Sequence
  LRRK2 RNA guide
uauucucgugccucagccuc

SEQ ID NO: 80006 - RNA, 21 nt, Artificial Sequence
  LRRK2 RNA guide
aaccucccagguucaagcuau

SEQ ID NO: 80007 - RNA, 21 nt, Artificial Sequence
  LRRK2 RNA guide
accaaggaggcugaggcacga

SEQ ID NO: 80008 - RNA, 21 nt, Artificial Sequence
  LRRK2 RNA guide
caaggaggcugaggcacgaga

SEQ ID NO: 80009 - RNA, 21 nt, Artificial Sequence
  LRRK2 RNA guide
ccaaggaggcugaggcacgag

SEQ ID NO: 80010 - RNA, 21 nt, Artificial Sequence
  LRRK2 RNA guide
cgagaauagcuugaaccuggg

SEQ ID NO: 80011 - RNA, 21 nt, Artificial Sequence
  LRRK2 RNA guide
cuauucucgugccucagccuc

SEQ ID NO: 80012 - RNA, 21 nt, Artificial Sequence
  LRRK2 RNA guide
gcuauucucgugccucagccu

SEQ ID NO: 80013 - RNA, 21 nt, Artificial Sequence
  LRRK2 RNA guide
uaccaaggaggcugaggcacg

SEQ ID NO: 80014 - RNA, 21 nt, Artificial Sequence
  LRRK2 RNA guide
uauucucgugccucagccucc

SEQ ID NO: 80015 - RNA, 22 nt, Artificial Sequence
  LRRK2 RNA guide
aaccucccagguucaagcuauu

SEQ ID NO: 80016 - RNA, 22 nt, Artificial Sequence
  LRRK2 RNA guide
accaaggaggcugaggcacgag

SEQ ID NO: 80017 - RNA, 22 nt, Artificial Sequence
  LRRK2 RNA guide
acgagaauagcuugaaccuggg

SEQ ID NO: 80018 - RNA, 22 nt, Artificial Sequence
  LRRK2 RNA guide
agcuauucucgugccucagccu

SEQ ID NO: 80019 - RNA, 22 nt, Artificial Sequence
  LRRK2 RNA guide
caaccucccagguucaagcuau

SEQ ID NO: 80020 - RNA, 22 nt, Artificial Sequence
  LRRK2 RNA guide
caaggaggcugaggcacgagaa

SEQ ID NO: 80021 - RNA, 22 nt, Artificial Sequence
  LRRK2 RNA guide
ccaaggaggcugaggcacgaga

SEQ ID NO: 80022 - RNA, 22 nt, Artificial Sequence
  LRRK2 RNA guide
cgagaauagcuugaaccuggga

SEQ ID NO: 80023 - RNA, 22 nt, Artificial Sequence
  LRRK2 RNA guide
cuaccaaggaggcugaggcacg

SEQ ID NO: 80024 - RNA, 22 nt, Artificial Sequence
  LRRK2 RNA guide
cuauucucgugccucagccucc

SEQ ID NO: 80025 - RNA, 22 nt, Artificial Sequence
  LRRK2 RNA guide
gcuauucucgugccucagccuc

SEQ ID NO: 80026 - RNA, 22 nt, Artificial Sequence
  LRRK2 RNA guide
uaccaaggaggcugaggcacga

SEQ ID NO: 80027 - RNA, 22 nt, Artificial Sequence
  LRRK2 RNA guide
uauucucgugccucagccuccu

SEQ ID NO: 80028 - RNA, 20 nt, Artificial Sequence
  LRRK2 RNA guide
aacagcuugaaccugggagg

SEQ ID NO: 80029 - RNA, 20 nt, Artificial Sequence
  LRRK2 RNA guide
aaccucccagguucaagcug

SEQ ID NO: 80030 - RNA, 20 nt, Artificial Sequence
  LRRK2 RNA guide
aaggaggcugaggcacgaga

SEQ ID NO: 80031 - RNA, 20 nt, Artificial Sequence
  LRRK2 RNA guide
acagcuugaaccugggaggu

SEQ ID NO: 80032 - RNA, 20 nt, Artificial Sequence
  LRRK2 RNA guide
acugcaaccucccagguuca

SEQ ID NO: 80033 - RNA, 20 nt, Artificial Sequence
  LRRK2 RNA guide
agaacagcuugaaccuggga

SEQ ID NO: 80034 - RNA, 20 nt, Artificial Sequence
  LRRK2 RNA guide
caaccucccagguucaagcu

SEQ ID NO: 80035 - RNA, 20 nt, Artificial Sequence
  LRRK2 RNA guide
cugcaaccucccagguucaa

SEQ ID NO: 80036 - RNA, 20 nt, Artificial Sequence
  LRRK2 RNA guide
cuguucucgugccucagccu

SEQ ID NO: 80037 - RNA, 20 nt, Artificial Sequence
  LRRK2 RNA guide
gaacagcuugaaccugggag

SEQ ID NO: 80038 - RNA, 20 nt, Artificial Sequence
  LRRK2 RNA guide
gagaacagcuugaaccuggg

SEQ ID NO: 80039 - RNA, 20 nt, Artificial Sequence
  LRRK2 RNA guide
gcaaccucccagguucaagc

SEQ ID NO: 80040 - RNA, 20 nt, Artificial Sequence
  LRRK2 RNA guide
gcuguucucgugccucagcc

SEQ ID NO: 80041 - RNA, 20 nt, Artificial Sequence
  LRRK2 RNA guide
ugcaaccucccagguucaag

SEQ ID NO: 80042 - RNA, 20 nt, Artificial Sequence
  LRRK2 RNA guide
uguucucgugccucagccuc

SEQ ID NO: 80043 - RNA, 21 nt, Artificial Sequence
  LRRK2 RNA guide
aacagcuugaaccugggaggu

SEQ ID NO: 80044 - RNA, 21 nt, Artificial Sequence
  LRRK2 RNA guide
aaccucccagguucaagcugu

SEQ ID NO: 80045 - RNA, 21 nt, Artificial Sequence
  LRRK2 RNA guide
aaggaggcugaggcacgagaa

SEQ ID NO: 80046 - RNA, 21 nt, Artificial Sequence
  LRRK2 RNA guide
acagcuugaaccugggagguu

SEQ ID NO: 80047 - RNA, 21 nt, Artificial Sequence
  LRRK2 RNA guide
acugcaaccucccagguucaa

SEQ ID NO: 80048 - RNA, 21 nt, Artificial Sequence
  LRRK2 RNA guide
agaacagcuugaaccugggag

SEQ ID NO: 80049 - RNA, 21 nt, Artificial Sequence
  LRRK2 RNA guide
agcuguucucgugccucagcc

SEQ ID NO: 80050 - RNA, 21 nt, Artificial Sequence
  LRRK2 RNA guide
caaccucccagguucaagcug

SEQ ID NO: 80051 - RNA, 21 nt, Artificial Sequence
  LRRK2 RNA guide
cacugcaaccucccagguuca

SEQ ID NO: 80052 - RNA, 21 nt, Artificial Sequence
  LRRK2 RNA guide
cgagaacagcuugaaccuggg

SEQ ID NO: 80053 - RNA, 21 nt, Artificial Sequence
  LRRK2 RNA guide
cugcaaccucccagguucaag

SEQ ID NO: 80054 - RNA, 21 nt, Artificial Sequence
  LRRK2 RNA guide
cuguucucgugccucagccuc

SEQ ID NO: 80055 - RNA, 21 nt, Artificial Sequence
  LRRK2 RNA guide
gaacagcuugaaccugggagg

SEQ ID NO: 80056 - RNA, 21 nt, Artificial Sequence
  LRRK2 RNA guide
gagaacagcuugaaccuggga

SEQ ID NO: 80057 - RNA, 21 nt, Artificial Sequence
  LRRK2 RNA guide
gcaaccucccagguucaagcu

SEQ ID NO: 80058 - RNA, 21 nt, Artificial Sequence
  LRRK2 RNA guide
gcuguucucgugccucagccu

SEQ ID NO: 80059 - RNA, 21 nt, Artificial Sequence
  LRRK2 RNA guide
ugcaaccucccagguucaagc

SEQ ID NO: 80060 - RNA, 21 nt, Artificial Sequence
  LRRK2 RNA guide
uguucucgugccucagccucc

SEQ ID NO: 80061 - RNA, 22 nt, Artificial Sequence
  LRRK2 RNA guide
aacagcuugaaccugggagguu

SEQ ID NO: 80062 - RNA, 22 nt, Artificial Sequence
  LRRK2 RNA guide
aaccucccagguucaagcuguu

SEQ ID NO: 80063 - RNA, 22 nt, Artificial Sequence
  LRRK2 RNA guide
aagcuguucucgugccucagcc

SEQ ID NO: 80064 - RNA, 22 nt, Artificial Sequence
  LRRK2 RNA guide
aaggaggcugaggcacgagaac

SEQ ID NO: 80065 - RNA, 22 nt, Artificial Sequence
  LRRK2 RNA guide
acagcuugaaccugggagguug

SEQ ID NO: 80066 - RNA, 22 nt, Artificial Sequence
  LRRK2 RNA guide
acgagaacagcuugaaccuggg

SEQ ID NO: 80067 - RNA, 22 nt, Artificial Sequence
  LRRK2 RNA guide
acugcaaccucccagguucaag

SEQ ID NO: 80068 - RNA, 22 nt, Artificial Sequence
  LRRK2 RNA guide
agaacagcuugaaccugggagg

SEQ ID NO: 80069 - RNA, 22 nt, Artificial Sequence
  LRRK2 RNA guide
agcuguucucgugccucagccu

SEQ ID NO: 80070 - RNA, 22 nt, Artificial Sequence
  LRRK2 RNA guide
caaccucccagguucaagcugu

SEQ ID NO: 80071 - RNA, 22 nt, Artificial Sequence
  LRRK2 RNA guide
cacugcaaccucccagguucaa

SEQ ID NO: 80072 - RNA, 22 nt, Artificial Sequence
  LRRK2 RNA guide
cgagaacagcuugaaccuggga

SEQ ID NO: 80073 - RNA, 22 nt, Artificial Sequence
  LRRK2 RNA guide
cugcaaccucccagguucaagc

SEQ ID NO: 80074 - RNA, 22 nt, Artificial Sequence
  LRRK2 RNA guide
cuguucucgugccucagccucc

SEQ ID NO: 80075 - RNA, 22 nt, Artificial Sequence
  LRRK2 RNA guide
gaacagcuugaaccugggaggu

SEQ ID NO: 80076 - RNA, 22 nt, Artificial Sequence
  LRRK2 RNA guide
gagaacagcuugaaccugggag

SEQ ID NO: 80077 - RNA, 22 nt, Artificial Sequence
  LRRK2 RNA guide
gcaaccucccagguucaagcug

SEQ ID NO: 80078 - RNA, 22 nt, Artificial Sequence
  LRRK2 RNA guide
gcuguucucgugccucagccuc

SEQ ID NO: 80079 - RNA, 22 nt, Artificial Sequence
  LRRK2 RNA guide
ucacugcaaccucccagguuca

SEQ ID NO: 80080 - RNA, 22 nt, Artificial Sequence
  LRRK2 RNA guide
ugcaaccucccagguucaagcu

SEQ ID NO: 80081 - RNA, 22 nt, Artificial Sequence
  LRRK2 RNA guide
uguucucgugccucagccuccu

SEQ ID NO: 80082 - RNA, 20 nt, Artificial Sequence
  LRRK2 RNA guide
aagcaacaaagugagacucc

SEQ ID NO: 80083 - RNA, 20 nt, Artificial Sequence
  LRRK2 RNA guide
agcaacaaagugagacucca

SEQ ID NO: 80084 - RNA, 20 nt, Artificial Sequence
  LRRK2 RNA guide
uaagauggagucucacuuug

SEQ ID NO: 80085 - RNA, 21 nt, Artificial Sequence
  LRRK2 RNA guide
aagcaacaaagugagacucca

SEQ ID NO: 80086 - RNA, 21 nt, Artificial Sequence
  LRRK2 RNA guide
agcaacaaagugagacuccau

SEQ ID NO: 80087 - RNA, 21 nt, Artificial Sequence
  LRRK2 RNA guide
uaagauggagucucacuuugu

SEQ ID NO: 80088 - RNA, 21 nt, Artificial Sequence
  LRRK2 RNA guide
uaagcaacaaagugagacucc

SEQ ID NO: 80089 - RNA, 21 nt, Artificial Sequence
  LRRK2 RNA guide
uuaagauggagucucacuuug

SEQ ID NO: 80090 - RNA, 22 nt, Artificial Sequence
  LRRK2 RNA guide
aagcaacaaagugagacuccau

SEQ ID NO: 80091 - RNA, 22 nt, Artificial Sequence
  LRRK2 RNA guide
agcaacaaagugagacuccauc

SEQ ID NO: 80092 - RNA, 22 nt, Artificial Sequence
  LRRK2 RNA guide
cuaagcaacaaagugagacucc

SEQ ID NO: 80093 - RNA, 22 nt, Artificial Sequence
  LRRK2 RNA guide
uaagauggagucucacuuuguu

SEQ ID NO: 80094 - RNA, 22 nt, Artificial Sequence
  LRRK2 RNA guide
uaagcaacaaagugagacucca

SEQ ID NO: 80095 - RNA, 22 nt, Artificial Sequence
  LRRK2 RNA guide
uuaagauggagucucacuuugu

SEQ ID NO: 80096 - RNA, 22 nt, Artificial Sequence
  LRRK2 RNA guide
uuuaagauggagucucacuuug

SEQ ID NO: 80097 - RNA, 20 nt, Artificial Sequence
  LRRK2 RNA guide
aaaaacaaaugugcacaaac

SEQ ID NO: 80098 - RNA, 20 nt, Artificial Sequence
  LRRK2 RNA guide
aaaacaaaugugcacaaacc

SEQ ID NO: 80099 - RNA, 20 nt, Artificial Sequence
  LRRK2 RNA guide
aaacaaaugugcacaaacca

SEQ ID NO: 80100 - RNA, 20 nt, Artificial Sequence
  LRRK2 RNA guide
aacaaaugugcacaaaccau

SEQ ID NO: 80101 - RNA, 20 nt, Artificial Sequence
  LRRK2 RNA guide
aagcuacgccucuuauaaaa

SEQ ID NO: 80102 - RNA, 20 nt, Artificial Sequence
  LRRK2 RNA guide
aauaagcuacgccucuuaua

SEQ ID NO: 80103 - RNA, 20 nt, Artificial Sequence
  LRRK2 RNA guide
acagaugguuugugcacauu

SEQ ID NO: 80104 - RNA, 20 nt, Artificial Sequence
  LRRK2 RNA guide
acgccucuuauaaaaaacaa

SEQ ID NO: 80105 - RNA, 20 nt, Artificial Sequence
  LRRK2 RNA guide
agaugguuugugcacauuug

SEQ ID NO: 80106 - RNA, 20 nt, Artificial Sequence
  LRRK2 RNA guide
agcuacgccucuuauaaaaa

SEQ ID NO: 80107 - RNA, 20 nt, Artificial Sequence
  LRRK2 RNA guide
auaagcuacgccucuuauaa

SEQ ID NO: 80108 - RNA, 20 nt, Artificial Sequence
  LRRK2 RNA guide
augguuugugcacauuuguu

SEQ ID NO: 80109 - RNA, 20 nt, Artificial Sequence
  LRRK2 RNA guide
cacagaugguuugugcacau

SEQ ID NO: 80110 - RNA, 20 nt, Artificial Sequence
  LRRK2 RNA guide
cagaugguuugugcacauuu

SEQ ID NO: 80111 - RNA, 20 nt, Artificial Sequence
  LRRK2 RNA guide
cgccucuuauaaaaaacaaa

SEQ ID NO: 80112 - RNA, 20 nt, Artificial Sequence
  LRRK2 RNA guide
cuacgccucuuauaaaaaac

SEQ ID NO: 80113 - RNA, 20 nt, Artificial Sequence
  LRRK2 RNA guide
gaugguuugugcacauuugu

SEQ ID NO: 80114 - RNA, 20 nt, Artificial Sequence
  LRRK2 RNA guide
gcuacgccucuuauaaaaaa

SEQ ID NO: 80115 - RNA, 20 nt, Artificial Sequence
  LRRK2 RNA guide
gguuugugcacauuuguuuu

SEQ ID NO: 80116 - RNA, 20 nt, Artificial Sequence
  LRRK2 RNA guide
guuugugcacauuuguuuuu

SEQ ID NO: 80117 - RNA, 20 nt, Artificial Sequence
  LRRK2 RNA guide
guuuuuuauaagaggcguag

SEQ ID NO: 80118 - RNA, 20 nt, Artificial Sequence
  LRRK2 RNA guide
uaagcuacgccucuuauaaa

SEQ ID NO: 80119 - RNA, 20 nt, Artificial Sequence
  LRRK2 RNA guide
uacgccucuuauaaaaaaca

SEQ ID NO: 80120 - RNA, 20 nt, Artificial Sequence
  LRRK2 RNA guide
ucacagaugguuugugcaca

SEQ ID NO: 80121 - RNA, 20 nt, Artificial Sequence
  LRRK2 RNA guide
ugguuugugcacauuuguuu

SEQ ID NO: 80122 - RNA, 20 nt, Artificial Sequence
  LRRK2 RNA guide
uguuuuuuauaagaggcgua

SEQ ID NO: 80123 - RNA, 20 nt, Artificial Sequence
  LRRK2 RNA guide
uuguuuuuuauaagaggcgu

SEQ ID NO: 80124 - RNA, 20 nt, Artificial Sequence
  LRRK2 RNA guide
uuuguuuuuuauaagaggcg

SEQ ID NO: 80125 - RNA, 21 nt, Artificial Sequence
  LRRK2 RNA guide
aaaaacaaaugugcacaaacc

SEQ ID NO: 80126 - RNA, 21 nt, Artificial Sequence
  LRRK2 RNA guide
aaaacaaaugugcacaaacca

SEQ ID NO: 80127 - RNA, 21 nt, Artificial Sequence
  LRRK2 RNA guide
aaacaaaugugcacaaaccau

SEQ ID NO: 80128 - RNA, 21 nt, Artificial Sequence
  LRRK2 RNA guide
aacaaaugugcacaaaccauc

SEQ ID NO: 80129 - RNA, 21 nt, Artificial Sequence
  LRRK2 RNA guide
aagcuacgccucuuauaaaaa

SEQ ID NO: 80130 - RNA, 21 nt, Artificial Sequence
  LRRK2 RNA guide
aauaagcuacgccucuuauaa

SEQ ID NO: 80131 - RNA, 21 nt, Artificial Sequence
  LRRK2 RNA guide
acagaugguuugugcacauuu

SEQ ID NO: 80132 - RNA, 21 nt, Artificial Sequence
  LRRK2 RNA guide
agaugguuugugcacauuugu

SEQ ID NO: 80133 - RNA, 21 nt, Artificial Sequence
  LRRK2 RNA guide
agcuacgccucuuauaaaaaa

SEQ ID NO: 80134 - RNA, 21 nt, Artificial Sequence
  LRRK2 RNA guide
auaagcuacgccucuuauaaa

SEQ ID NO: 80135 - RNA, 21 nt, Artificial Sequence
  LRRK2 RNA guide
augguuugugcacauuuguuu

SEQ ID NO: 80136 - RNA, 21 nt, Artificial Sequence
  LRRK2 RNA guide
cacagaugguuugugcacauu

SEQ ID NO: 80137 - RNA, 21 nt, Artificial Sequence
  LRRK2 RNA guide
cagaugguuugugcacauuug

SEQ ID NO: 80138 - RNA, 21 nt, Artificial Sequence
  LRRK2 RNA guide
cuacgccucuuauaaaaaaca

SEQ ID NO: 80139 - RNA, 21 nt, Artificial Sequence
  LRRK2 RNA guide
cucacagaugguuugugcaca

SEQ ID NO: 80140 - RNA, 21 nt, Artificial Sequence
  LRRK2 RNA guide
gaauaagcuacgccucuuaua

SEQ ID NO: 80141 - RNA, 21 nt, Artificial Sequence
  LRRK2 RNA guide
gaugguuugugcacauuuguu

SEQ ID NO: 80142 - RNA, 21 nt, Artificial Sequence
  LRRK2 RNA guide
gcuacgccucuuauaaaaaac

SEQ ID NO: 80143 - RNA, 21 nt, Artificial Sequence
  LRRK2 RNA guide
gguuugugcacauuuguuuuu

SEQ ID NO: 80144 - RNA, 21 nt, Artificial Sequence
  LRRK2 RNA guide
guuuuuuauaagaggcguagc

SEQ ID NO: 80145 - RNA, 21 nt, Artificial Sequence
  LRRK2 RNA guide
uaagcuacgccucuuauaaaa

SEQ ID NO: 80146 - RNA, 21 nt, Artificial Sequence
  LRRK2 RNA guide
ucacagaugguuugugcacau

SEQ ID NO: 80147 - RNA, 21 nt, Artificial Sequence
  LRRK2 RNA guide
ugguuugugcacauuuguuuu

SEQ ID NO: 80148 - RNA, 21 nt, Artificial Sequence
  LRRK2 RNA guide
uguuuuuuauaagaggcguag

SEQ ID NO: 80149 - RNA, 22 nt, Artificial Sequence
  LRRK2 RNA guide
aaaaaacaaaugugcacaaacc

SEQ ID NO: 80150 - RNA, 22 nt, Artificial Sequence
  LRRK2 RNA guide
aaaaacaaaugugcacaaacca

SEQ ID NO: 80151 - RNA, 22 nt, Artificial Sequence
  LRRK2 RNA guide
aaaacaaaugugcacaaaccau

SEQ ID NO: 80152 - RNA, 22 nt, Artificial Sequence
  LRRK2 RNA guide
aaacaaaugugcacaaaccauc

SEQ ID NO: 80153 - RNA, 22 nt, Artificial Sequence
  LRRK2 RNA guide
aacaaaugugcacaaaccaucu

SEQ ID NO: 80154 - RNA, 22 nt, Artificial Sequence
  LRRK2 RNA guide
aagcuacgccucuuauaaaaaa

SEQ ID NO: 80155 - RNA, 22 nt, Artificial Sequence
  LRRK2 RNA guide
aauaagcuacgccucuuauaaa

SEQ ID NO: 80156 - RNA, 22 nt, Artificial Sequence
  LRRK2 RNA guide
acagaugguuugugcacauuug

SEQ ID NO: 80157 - RNA, 22 nt, Artificial Sequence
  LRRK2 RNA guide
agaauaagcuacgccucuuaua

SEQ ID NO: 80158 - RNA, 22 nt, Artificial Sequence
  LRRK2 RNA guide
agaugguuugugcacauuuguu

SEQ ID NO: 80159 - RNA, 22 nt, Artificial Sequence
  LRRK2 RNA guide
agcuacgccucuuauaaaaaac

SEQ ID NO: 80160 - RNA, 22 nt, Artificial Sequence
  LRRK2 RNA guide
auaagcuacgccucuuauaaaa

SEQ ID NO: 80161 - RNA, 22 nt, Artificial Sequence
  LRRK2 RNA guide
augguuugugcacauuuguuuu

SEQ ID NO: 80162 - RNA, 22 nt, Artificial Sequence
  LRRK2 RNA guide
cacagaugguuugugcacauuu

SEQ ID NO: 80163 - RNA, 22 nt, Artificial Sequence
  LRRK2 RNA guide
cagaugguuugugcacauuugu

SEQ ID NO: 80164 - RNA, 22 nt, Artificial Sequence
  LRRK2 RNA guide
cauuuguuuuuuauaagaggcg

SEQ ID NO: 80165 - RNA, 22 nt, Artificial Sequence
  LRRK2 RNA guide
ccucacagaugguuugugcaca

SEQ ID NO: 80166 - RNA, 22 nt, Artificial Sequence
  LRRK2 RNA guide
cgccucuuauaaaaaacaaaug

SEQ ID NO: 80167 - RNA, 22 nt, Artificial Sequence
  LRRK2 RNA guide
cuacgccucuuauaaaaaacaa

SEQ ID NO: 80168 - RNA, 22 nt, Artificial Sequence
  LRRK2 RNA guide
cucacagaugguuugugcacau

SEQ ID NO: 80169 - RNA, 22 nt, Artificial Sequence
  LRRK2 RNA guide
gaauaagcuacgccucuuauaa

SEQ ID NO: 80170 - RNA, 22 nt, Artificial Sequence
  LRRK2 RNA guide
gaugguuugugcacauuuguuu

SEQ ID NO: 80171 - RNA, 22 nt, Artificial Sequence
  LRRK2 RNA guide
gcuacgccucuuauaaaaaaca

SEQ ID NO: 80172 - RNA, 22 nt, Artificial Sequence
  LRRK2 RNA guide
gguuugugcacauuuguuuuuu

SEQ ID NO: 80173 - RNA, 22 nt, Artificial Sequence
  LRRK2 RNA guide
guuuuuuauaagaggcguagcu

SEQ ID NO: 80174 - RNA, 22 nt, Artificial Sequence
  LRRK2 RNA guide
uaagcuacgccucuuauaaaaa

SEQ ID NO: 80175 - RNA, 22 nt, Artificial Sequence
  LRRK2 RNA guide
ucacagaugguuugugcacauu

SEQ ID NO: 80176 - RNA, 22 nt, Artificial Sequence
  LRRK2 RNA guide
ugguuugugcacauuuguuuuu

SEQ ID NO: 80177 - RNA, 22 nt, Artificial Sequence
  LRRK2 RNA guide
uguuuuuuauaagaggcguagc

SEQ ID NO: 80178 - RNA, 22 nt, Artificial Sequence
  LRRK2 RNA guide
uuguuuuuuauaagaggcguag

SEQ ID NO: 80179 - RNA, 20 nt, Artificial Sequence
  LRRK2 RNA guide
aaaaagcaaaugugcacaaa

SEQ ID NO: 80180 - RNA, 20 nt, Artificial Sequence
  LRRK2 RNA guide
aaaagcaaaugugcacaaac

SEQ ID NO: 80181 - RNA, 20 nt, Artificial Sequence
  LRRK2 RNA guide
aaagcaaaugugcacaaacc

SEQ ID NO: 80182 - RNA, 20 nt, Artificial Sequence
  LRRK2 RNA guide
aagcaaaugugcacaaacca

SEQ ID NO: 80183 - RNA, 20 nt, Artificial Sequence
  LRRK2 RNA guide
acgccucuuauaaaaagcaa

SEQ ID NO: 80184 - RNA, 20 nt, Artificial Sequence
  LRRK2 RNA guide
agcaaaugugcacaaaccau

SEQ ID NO: 80185 - RNA, 20 nt, Artificial Sequence
  LRRK2 RNA guide
auaaaaagcaaaugugcaca

SEQ ID NO: 80186 - RNA, 20 nt, Artificial Sequence
  LRRK2 RNA guide
augguuugugcacauuugcu

SEQ ID NO: 80187 - RNA, 20 nt, Artificial Sequence
  LRRK2 RNA guide
auuugcuuuuuauaagaggc

SEQ ID NO: 80188 - RNA, 20 nt, Artificial Sequence
  LRRK2 RNA guide
cauuugcuuuuuauaagagg

SEQ ID NO: 80189 - RNA, 20 nt, Artificial Sequence
  LRRK2 RNA guide
ccucuuauaaaaagcaaaug

SEQ ID NO: 80190 - RNA, 20 nt, Artificial Sequence
  LRRK2 RNA guide
cgccucuuauaaaaagcaaa

SEQ ID NO: 80191 - RNA, 20 nt, Artificial Sequence
  LRRK2 RNA guide
cuacgccucuuauaaaaagc

SEQ ID NO: 80192 - RNA, 20 nt, Artificial Sequence
  LRRK2 RNA guide
cuuauaaaaagcaaaugugc

SEQ ID NO: 80193 - RNA, 20 nt, Artificial Sequence
  LRRK2 RNA guide
gaugguuugugcacauuugc

SEQ ID NO: 80194 - RNA, 20 nt, Artificial Sequence
  LRRK2 RNA guide
gcacauuugcuuuuuauaag

SEQ ID NO: 80195 - RNA, 20 nt, Artificial Sequence
  LRRK2 RNA guide
gccucuuauaaaaagcaaau

SEQ ID NO: 80196 - RNA, 20 nt, Artificial Sequence
  LRRK2 RNA guide
gcuacgccucuuauaaaaag

SEQ ID NO: 80197 - RNA, 20 nt, Artificial Sequence
  LRRK2 RNA guide
gcuuuuuauaagaggcguag

SEQ ID NO: 80198 - RNA, 20 nt, Artificial Sequence
  LRRK2 RNA guide
gguuugugcacauuugcuuu

SEQ ID NO: 80199 - RNA, 20 nt, Artificial Sequence
  LRRK2 RNA guide
gugcacauuugcuuuuuaua

SEQ ID NO: 80200 - RNA, 20 nt, Artificial Sequence
  LRRK2 RNA guide
guuugugcacauuugcuuuu

SEQ ID NO: 80201 - RNA, 20 nt, Artificial Sequence
  LRRK2 RNA guide
uaaaaagcaaaugugcacaa

SEQ ID NO: 80202 - RNA, 20 nt, Artificial Sequence
  LRRK2 RNA guide
uacgccucuuauaaaaagca

SEQ ID NO: 80203 - RNA, 20 nt, Artificial Sequence
  LRRK2 RNA guide
uauaaaaagcaaaugugcac

SEQ ID NO: 80204 - RNA, 20 nt, Artificial Sequence
  LRRK2 RNA guide
ugcuuuuuauaagaggcgua

SEQ ID NO: 80205 - RNA, 20 nt, Artificial Sequence
  LRRK2 RNA guide
ugguuugugcacauuugcuu

SEQ ID NO: 80206 - RNA, 20 nt, Artificial Sequence
  LRRK2 RNA guide
ugugcacauuugcuuuuuau

SEQ ID NO: 80207 - RNA, 20 nt, Artificial Sequence
  LRRK2 RNA guide
uugcuuuuuauaagaggcgu

SEQ ID NO: 80208 - RNA, 20 nt, Artificial Sequence
  LRRK2 RNA guide
uugugcacauuugcuuuuua

SEQ ID NO: 80209 - RNA, 20 nt, Artificial Sequence
  LRRK2 RNA guide
uuugcuuuuuauaagaggcg

SEQ ID NO: 80210 - RNA, 20 nt, Artificial Sequence
  LRRK2 RNA guide
uuugugcacauuugcuuuuu

SEQ ID NO: 80211 - RNA, 21 nt, Artificial Sequence
  LRRK2 RNA guide
aaaaagcaaaugugcacaaac

SEQ ID NO: 80212 - RNA, 21 nt, Artificial Sequence
  LRRK2 RNA guide
aaaagcaaaugugcacaaacc

SEQ ID NO: 80213 - RNA, 21 nt, Artificial Sequence
  LRRK2 RNA guide
aaagcaaaugugcacaaacca

SEQ ID NO: 80214 - RNA, 21 nt, Artificial Sequence
  LRRK2 RNA guide
aagcaaaugugcacaaaccau

SEQ ID NO: 80215 - RNA, 21 nt, Artificial Sequence
  LRRK2 RNA guide
acgccucuuauaaaaagcaaa

SEQ ID NO: 80216 - RNA, 21 nt, Artificial Sequence
  LRRK2 RNA guide
agaugguuugugcacauuugc

SEQ ID NO: 80217 - RNA, 21 nt, Artificial Sequence
  LRRK2 RNA guide
agcaaaugugcacaaaccauc

SEQ ID NO: 80218 - RNA, 21 nt, Artificial Sequence
  LRRK2 RNA guide
agcuacgccucuuauaaaaag

SEQ ID NO: 80219 - RNA, 21 nt, Artificial Sequence
  LRRK2 RNA guide
augguuugugcacauuugcuu

SEQ ID NO: 80220 - RNA, 21 nt, Artificial Sequence
  LRRK2 RNA guide
auuugcuuuuuauaagaggcg

SEQ ID NO: 80221 - RNA, 21 nt, Artificial Sequence
  LRRK2 RNA guide
cauuugcuuuuuauaagaggc

SEQ ID NO: 80222 - RNA, 21 nt, Artificial Sequence
  LRRK2 RNA guide
cgccucuuauaaaaagcaaau

SEQ ID NO: 80223 - RNA, 21 nt, Artificial Sequence
  LRRK2 RNA guide
cuacgccucuuauaaaaagca

SEQ ID NO: 80224 - RNA, 21 nt, Artificial Sequence
  LRRK2 RNA guide
gaugguuugugcacauuugcu

SEQ ID NO: 80225 - RNA, 21 nt, Artificial Sequence
  LRRK2 RNA guide
gccucuuauaaaaagcaaaug

SEQ ID NO: 80226 - RNA, 21 nt, Artificial Sequence
  LRRK2 RNA guide
gcuacgccucuuauaaaaagc

SEQ ID NO: 80227 - RNA, 21 nt, Artificial Sequence
  LRRK2 RNA guide
gcuuuuuauaagaggcguagc

SEQ ID NO: 80228 - RNA, 21 nt, Artificial Sequence
  LRRK2 RNA guide
gguuugugcacauuugcuuuu

SEQ ID NO: 80229 - RNA, 21 nt, Artificial Sequence
  LRRK2 RNA guide
guuugugcacauuugcuuuuu

SEQ ID NO: 80230 - RNA, 21 nt, Artificial Sequence
  LRRK2 RNA guide
uacgccucuuauaaaaagcaa

SEQ ID NO: 80231 - RNA, 21 nt, Artificial Sequence
  LRRK2 RNA guide
ugcuuuuuauaagaggcguag

SEQ ID NO: 80232 - RNA, 21 nt, Artificial Sequence
  LRRK2 RNA guide
ugguuugugcacauuugcuuu

SEQ ID NO: 80233 - RNA, 21 nt, Artificial Sequence
  LRRK2 RNA guide
uugcuuuuuauaagaggcgua

SEQ ID NO: 80234 - RNA, 21 nt, Artificial Sequence
  LRRK2 RNA guide
uuugcuuuuuauaagaggcgu

SEQ ID NO: 80235 - RNA, 22 nt, Artificial Sequence
  LRRK2 RNA guide
aaaaagcaaaugugcacaaacc

SEQ ID NO: 80236 - RNA, 22 nt, Artificial Sequence
  LRRK2 RNA guide
aaaagcaaaugugcacaaacca

SEQ ID NO: 80237 - RNA, 22 nt, Artificial Sequence
  LRRK2 RNA guide
aaagcaaaugugcacaaaccau

SEQ ID NO: 80238 - RNA, 22 nt, Artificial Sequence
  LRRK2 RNA guide
aagcaaaugugcacaaaccauc

SEQ ID NO: 80239 - RNA, 22 nt, Artificial Sequence
  LRRK2 RNA guide
aagcuacgccucuuauaaaaag

SEQ ID NO: 80240 - RNA, 22 nt, Artificial Sequence
  LRRK2 RNA guide
acauuugcuuuuuauaagaggc

SEQ ID NO: 80241 - RNA, 22 nt, Artificial Sequence
  LRRK2 RNA guide
acgccucuuauaaaaagcaaau

SEQ ID NO: 80242 - RNA, 22 nt, Artificial Sequence
  LRRK2 RNA guide
agaugguuugugcacauuugcu

SEQ ID NO: 80243 - RNA, 22 nt, Artificial Sequence
  LRRK2 RNA guide
agcaaaugugcacaaaccaucu

SEQ ID NO: 80244 - RNA, 22 nt, Artificial Sequence
  LRRK2 RNA guide
agcuacgccucuuauaaaaagc

SEQ ID NO: 80245 - RNA, 22 nt, Artificial Sequence
  LRRK2 RNA guide
augguuugugcacauuugcuuu

SEQ ID NO: 80246 - RNA, 22 nt, Artificial Sequence
  LRRK2 RNA guide
auuugcuuuuuauaagaggcgu

SEQ ID NO: 80247 - RNA, 22 nt, Artificial Sequence
  LRRK2 RNA guide
cacauuugcuuuuuauaagagg

SEQ ID NO: 80248 - RNA, 22 nt, Artificial Sequence
  LRRK2 RNA guide
cagaugguuugugcacauuugc

SEQ ID NO: 80249 - RNA, 22 nt, Artificial Sequence
  LRRK2 RNA guide
cauuugcuuuuuauaagaggcg

SEQ ID NO: 80250 - RNA, 22 nt, Artificial Sequence
  LRRK2 RNA guide
ccucuuauaaaaagcaaaugug

SEQ ID NO: 80251 - RNA, 22 nt, Artificial Sequence
  LRRK2 RNA guide
cgccucuuauaaaaagcaaaug

SEQ ID NO: 80252 - RNA, 22 nt, Artificial Sequence
  LRRK2 RNA guide
cuacgccucuuauaaaaagcaa

SEQ ID NO: 80253 - RNA, 22 nt, Artificial Sequence
  LRRK2 RNA guide
cucuuauaaaaagcaaaugugc

SEQ ID NO: 80254 - RNA, 22 nt, Artificial Sequence
  LRRK2 RNA guide
cuuauaaaaagcaaaugugcac

SEQ ID NO: 80255 - RNA, 22 nt, Artificial Sequence
  LRRK2 RNA guide
gaugguuugugcacauuugcuu

SEQ ID NO: 80256 - RNA, 22 nt, Artificial Sequence
  LRRK2 RNA guide
gcacauuugcuuuuuauaagag

SEQ ID NO: 80257 - RNA, 22 nt, Artificial Sequence
  LRRK2 RNA guide
gccucuuauaaaaagcaaaugu

SEQ ID NO: 80258 - RNA, 22 nt, Artificial Sequence
  LRRK2 RNA guide
gcuacgccucuuauaaaaagca

SEQ ID NO: 80259 - RNA, 22 nt, Artificial Sequence
  LRRK2 RNA guide
gcuuuuuauaagaggcguagcu

SEQ ID NO: 80260 - RNA, 22 nt, Artificial Sequence
  LRRK2 RNA guide
gguuugugcacauuugcuuuuu

SEQ ID NO: 80261 - RNA, 22 nt, Artificial Sequence
  LRRK2 RNA guide
gugcacauuugcuuuuuauaag

SEQ ID NO: 80262 - RNA, 22 nt, Artificial Sequence
  LRRK2 RNA guide
guuugugcacauuugcuuuuua

SEQ ID NO: 80263 - RNA, 22 nt, Artificial Sequence
  LRRK2 RNA guide
uaaaaagcaaaugugcacaaac

SEQ ID NO: 80264 - RNA, 22 nt, Artificial Sequence
  LRRK2 RNA guide
uacgccucuuauaaaaagcaaa

SEQ ID NO: 80265 - RNA, 22 nt, Artificial Sequence
  LRRK2 RNA guide
ugcuuuuuauaagaggcguagc

SEQ ID NO: 80266 - RNA, 22 nt, Artificial Sequence
  LRRK2 RNA guide
ugguuugugcacauuugcuuuu

SEQ ID NO: 80267 - RNA, 22 nt, Artificial Sequence
  LRRK2 RNA guide
uugcuuuuuauaagaggcguag

SEQ ID NO: 80268 - RNA, 22 nt, Artificial Sequence
  LRRK2 RNA guide
uuugcuuuuuauaagaggcgua

SEQ ID NO: 80269 - RNA, 20 nt, Artificial Sequence
  LRRK2 RNA guide
auggaauaaaaagagaccca

SEQ ID NO: 80270 - RNA, 20 nt, Artificial Sequence
  LRRK2 RNA guide
auuugggucucuuuuuauuc

SEQ ID NO: 80271 - RNA, 20 nt, Artificial Sequence
  LRRK2 RNA guide
gggucucuuuuuauuccaua

SEQ ID NO: 80272 - RNA, 20 nt, Artificial Sequence
  LRRK2 RNA guide
ggucucuuuuuauuccauaa

SEQ ID NO: 80273 - RNA, 20 nt, Artificial Sequence
  LRRK2 RNA guide
guuauuugggucucuuuuua

SEQ ID NO: 80274 - RNA, 20 nt, Artificial Sequence
  LRRK2 RNA guide
uauggaauaaaaagagaccc

SEQ ID NO: 80275 - RNA, 20 nt, Artificial Sequence
  LRRK2 RNA guide
ugggucucuuuuuauuccau

SEQ ID NO: 80276 - RNA, 20 nt, Artificial Sequence
  LRRK2 RNA guide
uuauggaauaaaaagagacc

SEQ ID NO: 80277 - RNA, 20 nt, Artificial Sequence
  LRRK2 RNA guide
uugggucucuuuuuauucca

SEQ ID NO: 80278 - RNA, 20 nt, Artificial Sequence
  LRRK2 RNA guide
uuugggucucuuuuuauucc

SEQ ID NO: 80279 - RNA, 21 nt, Artificial Sequence
  LRRK2 RNA guide
auggaauaaaaagagacccaa

SEQ ID NO: 80280 - RNA, 21 nt, Artificial Sequence
  LRRK2 RNA guide
auuugggucucuuuuuauucc

SEQ ID NO: 80281 - RNA, 21 nt, Artificial Sequence
  LRRK2 RNA guide
cguuauuugggucucuuuuua

SEQ ID NO: 80282 - RNA, 21 nt, Artificial Sequence
  LRRK2 RNA guide
gggucucuuuuuauuccauaa

SEQ ID NO: 80283 - RNA, 21 nt, Artificial Sequence
  LRRK2 RNA guide
uauggaauaaaaagagaccca

SEQ ID NO: 80284 - RNA, 21 nt, Artificial Sequence
  LRRK2 RNA guide
ugggucucuuuuuauuccaua

SEQ ID NO: 80285 - RNA, 21 nt, Artificial Sequence
  LRRK2 RNA guide
uuauggaauaaaaagagaccc

SEQ ID NO: 80286 - RNA, 21 nt, Artificial Sequence
  LRRK2 RNA guide
uugggucucuuuuuauuccau

SEQ ID NO: 80287 - RNA, 21 nt, Artificial Sequence
  LRRK2 RNA guide
uuugggucucuuuuuauucca

SEQ ID NO: 80288 - RNA, 22 nt, Artificial Sequence
  LRRK2 RNA guide
auggaauaaaaagagacccaaa

SEQ ID NO: 80289 - RNA, 22 nt, Artificial Sequence
  LRRK2 RNA guide
auuugggucucuuuuuauucca

SEQ ID NO: 80290 - RNA, 22 nt, Artificial Sequence
  LRRK2 RNA guide
cguuauuugggucucuuuuuau

SEQ ID NO: 80291 - RNA, 22 nt, Artificial Sequence
  LRRK2 RNA guide
gggucucuuuuuauuccauaaa

SEQ ID NO: 80292 - RNA, 22 nt, Artificial Sequence
  LRRK2 RNA guide
uauggaauaaaaagagacccaa

SEQ ID NO: 80293 - RNA, 22 nt, Artificial Sequence
  LRRK2 RNA guide
uauuugggucucuuuuuauucc

SEQ ID NO: 80294 - RNA, 22 nt, Artificial Sequence
  LRRK2 RNA guide
ucguuauuugggucucuuuuua

SEQ ID NO: 80295 - RNA, 22 nt, Artificial Sequence
  LRRK2 RNA guide
ugggucucuuuuuauuccauaa

SEQ ID NO: 80296 - RNA, 22 nt, Artificial Sequence
  LRRK2 RNA guide
uuauggaauaaaaagagaccca

SEQ ID NO: 80297 - RNA, 22 nt, Artificial Sequence
  LRRK2 RNA guide
uugggucucuuuuuauuccaua

SEQ ID NO: 80298 - RNA, 22 nt, Artificial Sequence
  LRRK2 RNA guide
uuuauggaauaaaaagagaccc

SEQ ID NO: 80299 - RNA, 22 nt, Artificial Sequence
  LRRK2 RNA guide
uuugggucucuuuuuauuccau

SEQ ID NO: 80300 - RNA, 20 nt, Artificial Sequence
  LRRK2 RNA guide
gggucucuuuuuauuccaaa

SEQ ID NO: 80301 - RNA, 20 nt, Artificial Sequence
  LRRK2 RNA guide
ggucucuuuuuauuccaaaa

SEQ ID NO: 80302 - RNA, 20 nt, Artificial Sequence
  LRRK2 RNA guide
ugggucucuuuuuauuccaa

SEQ ID NO: 80303 - RNA, 20 nt, Artificial Sequence
  LRRK2 RNA guide
uuggaauaaaaagagaccca

SEQ ID NO: 80304 - RNA, 20 nt, Artificial Sequence
  LRRK2 RNA guide
uuuggaauaaaaagagaccc

SEQ ID NO: 80305 - RNA, 20 nt, Artificial Sequence
  LRRK2 RNA guide
uuuuggaauaaaaagagacc

SEQ ID NO: 80306 - RNA, 21 nt, Artificial Sequence
  LRRK2 RNA guide
gggucucuuuuuauuccaaaa

SEQ ID NO: 80307 - RNA, 21 nt, Artificial Sequence
  LRRK2 RNA guide
ugggucucuuuuuauuccaaa

SEQ ID NO: 80308 - RNA, 21 nt, Artificial Sequence
  LRRK2 RNA guide
uuggaauaaaaagagacccaa

SEQ ID NO: 80309 - RNA, 21 nt, Artificial Sequence
  LRRK2 RNA guide
uugggucucuuuuuauuccaa

SEQ ID NO: 80310 - RNA, 21 nt, Artificial Sequence
  LRRK2 RNA guide
uuuggaauaaaaagagaccca

SEQ ID NO: 80311 - RNA, 21 nt, Artificial Sequence
  LRRK2 RNA guide
uuuuggaauaaaaagagaccc

SEQ ID NO: 80312 - RNA, 22 nt, Artificial Sequence
  LRRK2 RNA guide
gggucucuuuuuauuccaaaaa

SEQ ID NO: 80313 - RNA, 22 nt, Artificial Sequence
  LRRK2 RNA guide
ugggucucuuuuuauuccaaaa

SEQ ID NO: 80314 - RNA, 22 nt, Artificial Sequence
  LRRK2 RNA guide
uuggaauaaaaagagacccaaa

SEQ ID NO: 80315 - RNA, 22 nt, Artificial Sequence
  LRRK2 RNA guide
uugggucucuuuuuauuccaaa

SEQ ID NO: 80316 - RNA, 22 nt, Artificial Sequence
  LRRK2 RNA guide
uuuggaauaaaaagagacccaa

SEQ ID NO: 80317 - RNA, 22 nt, Artificial Sequence
  LRRK2 RNA guide
uuugggucucuuuuuauuccaa

SEQ ID NO: 80318 - RNA, 22 nt, Artificial Sequence
  LRRK2 RNA guide
uuuuggaauaaaaagagaccca

SEQ ID NO: 80319 - RNA, 22 nt, Artificial Sequence
  LRRK2 RNA guide
uuuuuggaauaaaaagagaccc

SEQ ID NO: 80320 - RNA, 20 nt, Artificial Sequence
  LRRK2 RNA guide
gggucucuuuuuauuccaca

SEQ ID NO: 80321 - RNA, 20 nt, Artificial Sequence
  LRRK2 RNA guide
ggucucuuuuuauuccacaa

SEQ ID NO: 80322 - RNA, 20 nt, Artificial Sequence
  LRRK2 RNA guide
gucucuuuuuauuccacaaa

SEQ ID NO: 80323 - RNA, 20 nt, Artificial Sequence
  LRRK2 RNA guide
ugggucucuuuuuauuccac

SEQ ID NO: 80324 - RNA, 20 nt, Artificial Sequence
  LRRK2 RNA guide
uguggaauaaaaagagaccc

SEQ ID NO: 80325 - RNA, 20 nt, Artificial Sequence
  LRRK2 RNA guide
uuguggaauaaaaagagacc

SEQ ID NO: 80326 - RNA, 20 nt, Artificial Sequence
  LRRK2 RNA guide
uuuguggaauaaaaagagac

SEQ ID NO: 80327 - RNA, 21 nt, Artificial Sequence
  LRRK2 RNA guide
gggucucuuuuuauuccacaa

SEQ ID NO: 80328 - RNA, 21 nt, Artificial Sequence
  LRRK2 RNA guide
ggucucuuuuuauuccacaaa

SEQ ID NO: 80329 - RNA, 21 nt, Artificial Sequence
  LRRK2 RNA guide
ugggucucuuuuuauuccaca

SEQ ID NO: 80330 - RNA, 21 nt, Artificial Sequence
  LRRK2 RNA guide
uguggaauaaaaagagaccca

SEQ ID NO: 80331 - RNA, 21 nt, Artificial Sequence
  LRRK2 RNA guide
uugggucucuuuuuauuccac

SEQ ID NO: 80332 - RNA, 21 nt, Artificial Sequence
  LRRK2 RNA guide
uuguggaauaaaaagagaccc

SEQ ID NO: 80333 - RNA, 21 nt, Artificial Sequence
  LRRK2 RNA guide
uuuguggaauaaaaagagacc

SEQ ID NO: 80334 - RNA, 22 nt, Artificial Sequence
  LRRK2 RNA guide
gggucucuuuuuauuccacaaa

SEQ ID NO: 80335 - RNA, 22 nt, Artificial Sequence
  LRRK2 RNA guide
ggucucuuuuuauuccacaaaa

SEQ ID NO: 80336 - RNA, 22 nt, Artificial Sequence
  LRRK2 RNA guide
ugggucucuuuuuauuccacaa

SEQ ID NO: 80337 - RNA, 22 nt, Artificial Sequence
  LRRK2 RNA guide
uguggaauaaaaagagacccaa

SEQ ID NO: 80338 - RNA, 22 nt, Artificial Sequence
  LRRK2 RNA guide
uugggucucuuuuuauuccaca

SEQ ID NO: 80339 - RNA, 22 nt, Artificial Sequence
  LRRK2 RNA guide
uuguggaauaaaaagagaccca

SEQ ID NO: 80340 - RNA, 22 nt, Artificial Sequence
  LRRK2 RNA guide
uuugggucucuuuuuauuccac

SEQ ID NO: 80341 - RNA, 22 nt, Artificial Sequence
  LRRK2 RNA guide
uuuguggaauaaaaagagaccc

SEQ ID NO: 80342 - RNA, 22 nt, Artificial Sequence
  LRRK2 RNA guide
uuuuguggaauaaaaagagacc

SEQ ID NO: 80343 - RNA, 20 nt, Artificial Sequence
  LRRK2 RNA guide
gagauguggaaaagauuuuu

SEQ ID NO: 80344 - RNA, 20 nt, Artificial Sequence
  LRRK2 RNA guide
gggucucuuuuuauuccauc

SEQ ID NO: 80345 - RNA, 20 nt, Artificial Sequence
  LRRK2 RNA guide
ggucucuuuuuauuccauca

SEQ ID NO: 80346 - RNA, 20 nt, Artificial Sequence
  LRRK2 RNA guide
gucucuuuuuauuccaucaa

SEQ ID NO: 80347 - RNA, 20 nt, Artificial Sequence
  LRRK2 RNA guide
ugauggaauaaaaagagacc

SEQ ID NO: 80348 - RNA, 20 nt, Artificial Sequence
  LRRK2 RNA guide
uugauggaauaaaaagagac

SEQ ID NO: 80349 - RNA, 21 nt, Artificial Sequence
  LRRK2 RNA guide
gggucucuuuuuauuccauca

SEQ ID NO: 80350 - RNA, 21 nt, Artificial Sequence
  LRRK2 RNA guide
ggucucuuuuuauuccaucaa

SEQ ID NO: 80351 - RNA, 21 nt, Artificial Sequence
  LRRK2 RNA guide
ugauggaauaaaaagagaccc

SEQ ID NO: 80352 - RNA, 21 nt, Artificial Sequence
  LRRK2 RNA guide
ugggucucuuuuuauuccauc

SEQ ID NO: 80353 - RNA, 21 nt, Artificial Sequence
  LRRK2 RNA guide
uugauggaauaaaaagagacc

SEQ ID NO: 80354 - RNA, 22 nt, Artificial Sequence
  LRRK2 RNA guide
gggucucuuuuuauuccaucaa

SEQ ID NO: 80355 - RNA, 22 nt, Artificial Sequence
  LRRK2 RNA guide
ggucucuuuuuauuccaucaaa

SEQ ID NO: 80356 - RNA, 22 nt, Artificial Sequence
  LRRK2 RNA guide
ugauggaauaaaaagagaccca

SEQ ID NO: 80357 - RNA, 22 nt, Artificial Sequence
  LRRK2 RNA guide
ugggucucuuuuuauuccauca

SEQ ID NO: 80358 - RNA, 22 nt, Artificial Sequence
  LRRK2 RNA guide
uugauggaauaaaaagagaccc

SEQ ID NO: 80359 - RNA, 22 nt, Artificial Sequence
  LRRK2 RNA guide
uugggucucuuuuuauuccauc

SEQ ID NO: 80360 - RNA, 22 nt, Artificial Sequence
  LRRK2 RNA guide
uuugauggaauaaaaagagacc

SEQ ID NO: 80361 - RNA, 20 nt, Artificial Sequence
  LRRK2 RNA guide
acuugucacaaaauuaaagc

SEQ ID NO: 80362 - RNA, 20 nt, Artificial Sequence
  LRRK2 RNA guide
agcuuuaauuuugugacaag

SEQ ID NO: 80363 - RNA, 20 nt, Artificial Sequence
  LRRK2 RNA guide
cuugucacaaaauuaaagcu

SEQ ID NO: 80364 - RNA, 20 nt, Artificial Sequence
  LRRK2 RNA guide
gcuuuaauuuugugacaagu

SEQ ID NO: 80365 - RNA, 20 nt, Artificial Sequence
  LRRK2 RNA guide
aauuucucaaccauaggcca

SEQ ID NO: 80366 - RNA, 20 nt, Artificial Sequence
  LRRK2 RNA guide
auggccuaugguugagaaau

SEQ ID NO: 80367 - RNA, 20 nt, Artificial Sequence
  LRRK2 RNA guide
auuaauuucucaaccauagg

SEQ ID NO: 80368 - RNA, 20 nt, Artificial Sequence
  LRRK2 RNA guide
auuucucaaccauaggccau

SEQ ID NO: 80369 - RNA, 20 nt, Artificial Sequence
  LRRK2 RNA guide
cauggccuaugguugagaaa

SEQ ID NO: 80370 - RNA, 20 nt, Artificial Sequence
  LRRK2 RNA guide
ccauggccuaugguugagaa

SEQ ID NO: 80371 - RNA, 20 nt, Artificial Sequence
  LRRK2 RNA guide
cccauggccuaugguugaga

SEQ ID NO: 80372 - RNA, 20 nt, Artificial Sequence
  LRRK2 RNA guide
ccccauggccuaugguugag

SEQ ID NO: 80373 - RNA, 20 nt, Artificial Sequence
  LRRK2 RNA guide
ccuaugguugagaaauuaau

SEQ ID NO: 80374 - RNA, 20 nt, Artificial Sequence
  LRRK2 RNA guide
gccccauggccuaugguuga

SEQ ID NO: 80375 - RNA, 20 nt, Artificial Sequence
  LRRK2 RNA guide
gccuaugguugagaaauuaa

SEQ ID NO: 80376 - RNA, 20 nt, Artificial Sequence
  LRRK2 RNA guide
ggccuaugguugagaaauua

SEQ ID NO: 80377 - RNA, 20 nt, Artificial Sequence
  LRRK2 RNA guide
gugccccauggccuaugguu

SEQ ID NO: 80378 - RNA, 20 nt, Artificial Sequence
  LRRK2 RNA guide
uaauuucucaaccauaggcc

SEQ ID NO: 80379 - RNA, 20 nt, Artificial Sequence
  LRRK2 RNA guide
ugccccauggccuaugguug

SEQ ID NO: 80380 - RNA, 20 nt, Artificial Sequence
  LRRK2 RNA guide
uggccuaugguugagaaauu

SEQ ID NO: 80381 - RNA, 20 nt, Artificial Sequence
  LRRK2 RNA guide
ugugccccauggccuauggu

SEQ ID NO: 80382 - RNA, 20 nt, Artificial Sequence
  LRRK2 RNA guide
uucucaaccauaggccaugg

SEQ ID NO: 80383 - RNA, 20 nt, Artificial Sequence
  LRRK2 RNA guide
uugugccccauggccuaugg

SEQ ID NO: 80384 - RNA, 20 nt, Artificial Sequence
  LRRK2 RNA guide
uuucucaaccauaggccaug

SEQ ID NO: 80385 - RNA, 21 nt, Artificial Sequence
  LRRK2 RNA guide
aauuucucaaccauaggccau

SEQ ID NO: 80386 - RNA, 21 nt, Artificial Sequence
  LRRK2 RNA guide
auggccuaugguugagaaauu

SEQ ID NO: 80387 - RNA, 21 nt, Artificial Sequence
  LRRK2 RNA guide
auuaauuucucaaccauaggc

SEQ ID NO: 80388 - RNA, 21 nt, Artificial Sequence
  LRRK2 RNA guide
auuucucaaccauaggccaug

SEQ ID NO: 80389 - RNA, 21 nt, Artificial Sequence
  LRRK2 RNA guide
cauggccuaugguugagaaau

SEQ ID NO: 80390 - RNA, 21 nt, Artificial Sequence
  LRRK2 RNA guide
ccauggccuaugguugagaaa

SEQ ID NO: 80391 - RNA, 21 nt, Artificial Sequence
  LRRK2 RNA guide
cccauggccuaugguugagaa

SEQ ID NO: 80392 - RNA, 21 nt, Artificial Sequence
  LRRK2 RNA guide
ccccauggccuaugguugaga

SEQ ID NO: 80393 - RNA, 21 nt, Artificial Sequence
  LRRK2 RNA guide
gccccauggccuaugguugag

SEQ ID NO: 80394 - RNA, 21 nt, Artificial Sequence
  LRRK2 RNA guide
gccuaugguugagaaauuaau

SEQ ID NO: 80395 - RNA, 21 nt, Artificial Sequence
  LRRK2 RNA guide
ggccuaugguugagaaauuaa

SEQ ID NO: 80396 - RNA, 21 nt, Artificial Sequence
  LRRK2 RNA guide
gugccccauggccuaugguug

SEQ ID NO: 80397 - RNA, 21 nt, Artificial Sequence
  LRRK2 RNA guide
guugugccccauggccuaugg

SEQ ID NO: 80398 - RNA, 21 nt, Artificial Sequence
  LRRK2 RNA guide
uaauuucucaaccauaggcca

SEQ ID NO: 80399 - RNA, 21 nt, Artificial Sequence
  LRRK2 RNA guide
ucucaaccauaggccaugggg

SEQ ID NO: 80400 - RNA, 21 nt, Artificial Sequence
  LRRK2 RNA guide
ugccccauggccuaugguuga

SEQ ID NO: 80401 - RNA, 21 nt, Artificial Sequence
  LRRK2 RNA guide
uggccuaugguugagaaauua

SEQ ID NO: 80402 - RNA, 21 nt, Artificial Sequence
  LRRK2 RNA guide
ugugccccauggccuaugguu

SEQ ID NO: 80403 - RNA, 21 nt, Artificial Sequence
  LRRK2 RNA guide
uuaauuucucaaccauaggcc

SEQ ID NO: 80404 - RNA, 21 nt, Artificial Sequence
  LRRK2 RNA guide
uucucaaccauaggccauggg

SEQ ID NO: 80405 - RNA, 21 nt, Artificial Sequence
  LRRK2 RNA guide
uugugccccauggccuauggu

SEQ ID NO: 80406 - RNA, 21 nt, Artificial Sequence
  LRRK2 RNA guide
uuucucaaccauaggccaugg

SEQ ID NO: 80407 - RNA, 22 nt, Artificial Sequence
  LRRK2 RNA guide
aauuaauuucucaaccauaggc

SEQ ID NO: 80408 - RNA, 22 nt, Artificial Sequence
  LRRK2 RNA guide
aauuucucaaccauaggccaug

SEQ ID NO: 80409 - RNA, 22 nt, Artificial Sequence
  LRRK2 RNA guide
auggccuaugguugagaaauua

SEQ ID NO: 80410 - RNA, 22 nt, Artificial Sequence
  LRRK2 RNA guide
auuaauuucucaaccauaggcc

SEQ ID NO: 80411 - RNA, 22 nt, Artificial Sequence
  LRRK2 RNA guide
auuucucaaccauaggccaugg

SEQ ID NO: 80412 - RNA, 22 nt, Artificial Sequence
  LRRK2 RNA guide
cauggccuaugguugagaaauu

SEQ ID NO: 80413 - RNA, 22 nt, Artificial Sequence
  LRRK2 RNA guide
ccauggccuaugguugagaaau

SEQ ID NO: 80414 - RNA, 22 nt, Artificial Sequence
  LRRK2 RNA guide
cccauggccuaugguugagaaa

SEQ ID NO: 80415 - RNA, 22 nt, Artificial Sequence
  LRRK2 RNA guide
ccccauggccuaugguugagaa

SEQ ID NO: 80416 - RNA, 22 nt, Artificial Sequence
  LRRK2 RNA guide
gccccauggccuaugguugaga

SEQ ID NO: 80417 - RNA, 22 nt, Artificial Sequence
  LRRK2 RNA guide
gccuaugguugagaaauuaauu

SEQ ID NO: 80418 - RNA, 22 nt, Artificial Sequence
  LRRK2 RNA guide
ggccuaugguugagaaauuaau

SEQ ID NO: 80419 - RNA, 22 nt, Artificial Sequence
  LRRK2 RNA guide
gguugugccccauggccuaugg

SEQ ID NO: 80420 - RNA, 22 nt, Artificial Sequence
  LRRK2 RNA guide
gugccccauggccuaugguuga

SEQ ID NO: 80421 - RNA, 22 nt, Artificial Sequence
  LRRK2 RNA guide
guugugccccauggccuauggu

SEQ ID NO: 80422 - RNA, 22 nt, Artificial Sequence
  LRRK2 RNA guide
uaauuucucaaccauaggccau

SEQ ID NO: 80423 - RNA, 22 nt, Artificial Sequence
  LRRK2 RNA guide
ucucaaccauaggccauggggc

SEQ ID NO: 80424 - RNA, 22 nt, Artificial Sequence
  LRRK2 RNA guide
ugccccauggccuaugguugag

SEQ ID NO: 80425 - RNA, 22 nt, Artificial Sequence
  LRRK2 RNA guide
uggccuaugguugagaaauuaa

SEQ ID NO: 80426 - RNA, 22 nt, Artificial Sequence
  LRRK2 RNA guide
ugugccccauggccuaugguug

SEQ ID NO: 80427 - RNA, 22 nt, Artificial Sequence
  LRRK2 RNA guide
uuaauuucucaaccauaggcca

SEQ ID NO: 80428 - RNA, 22 nt, Artificial Sequence
  LRRK2 RNA guide
uucucaaccauaggccaugggg

SEQ ID NO: 80429 - RNA, 22 nt, Artificial Sequence
  LRRK2 RNA guide
uugugccccauggccuaugguu

SEQ ID NO: 80430 - RNA, 22 nt, Artificial Sequence
  LRRK2 RNA guide
uuucucaaccauaggccauggg

SEQ ID NO: 80431 - RNA, 20 nt, Artificial Sequence
  LRRK2 RNA guide
aauuuuucaaccauaggcca

SEQ ID NO: 80432 - RNA, 20 nt, Artificial Sequence
  LRRK2 RNA guide
auggccuaugguugaaaaau

SEQ ID NO: 80433 - RNA, 20 nt, Artificial Sequence
  LRRK2 RNA guide
auuuuucaaccauaggccau

SEQ ID NO: 80434 - RNA, 20 nt, Artificial Sequence
  LRRK2 RNA guide
cauggccuaugguugaaaaa

SEQ ID NO: 80435 - RNA, 20 nt, Artificial Sequence
  LRRK2 RNA guide
ccauggccuaugguugaaaa

SEQ ID NO: 80436 - RNA, 20 nt, Artificial Sequence
  LRRK2 RNA guide
cccauggccuaugguugaaa

SEQ ID NO: 80437 - RNA, 20 nt, Artificial Sequence
  LRRK2 RNA guide
ccccauggccuaugguugaa

SEQ ID NO: 80438 - RNA, 20 nt, Artificial Sequence
  LRRK2 RNA guide
gccuaugguugaaaaauuaa

SEQ ID NO: 80439 - RNA, 20 nt, Artificial Sequence
  LRRK2 RNA guide
ggccuaugguugaaaaauua

SEQ ID NO: 80440 - RNA, 20 nt, Artificial Sequence
  LRRK2 RNA guide
uaauuuuucaaccauaggcc

SEQ ID NO: 80441 - RNA, 20 nt, Artificial Sequence
  LRRK2 RNA guide
uggccuaugguugaaaaauu

SEQ ID NO: 80442 - RNA, 20 nt, Artificial Sequence
  LRRK2 RNA guide
uuaauuuuucaaccauaggc

SEQ ID NO: 80443 - RNA, 20 nt, Artificial Sequence
  LRRK2 RNA guide
uuucaaccauaggccauggg

SEQ ID NO: 80444 - RNA, 20 nt, Artificial Sequence
  LRRK2 RNA guide
uuuucaaccauaggccaugg

SEQ ID NO: 80445 - RNA, 20 nt, Artificial Sequence
  LRRK2 RNA guide
uuuuucaaccauaggccaug

SEQ ID NO: 80446 - RNA, 21 nt, Artificial Sequence
  LRRK2 RNA guide
aauuuuucaaccauaggccau

SEQ ID NO: 80447 - RNA, 21 nt, Artificial Sequence
  LRRK2 RNA guide
auggccuaugguugaaaaauu

SEQ ID NO: 80448 - RNA, 21 nt, Artificial Sequence
  LRRK2 RNA guide
auuuuucaaccauaggccaug

SEQ ID NO: 80449 - RNA, 21 nt, Artificial Sequence
  LRRK2 RNA guide
cauggccuaugguugaaaaau

SEQ ID NO: 80450 - RNA, 21 nt, Artificial Sequence
  LRRK2 RNA guide
ccauggccuaugguugaaaaa

SEQ ID NO: 80451 - RNA, 21 nt, Artificial Sequence
  LRRK2 RNA guide
cccauggccuaugguugaaaa

SEQ ID NO: 80452 - RNA, 21 nt, Artificial Sequence
  LRRK2 RNA guide
ccccauggccuaugguugaaa

SEQ ID NO: 80453 - RNA, 21 nt, Artificial Sequence
  LRRK2 RNA guide
gccccauggccuaugguugaa

SEQ ID NO: 80454 - RNA, 21 nt, Artificial Sequence
  LRRK2 RNA guide
ggccuaugguugaaaaauuaa

SEQ ID NO: 80455 - RNA, 21 nt, Artificial Sequence
  LRRK2 RNA guide
uaauuuuucaaccauaggcca

SEQ ID NO: 80456 - RNA, 21 nt, Artificial Sequence
  LRRK2 RNA guide
uggccuaugguugaaaaauua

SEQ ID NO: 80457 - RNA, 21 nt, Artificial Sequence
  LRRK2 RNA guide
uuaauuuuucaaccauaggcc

SEQ ID NO: 80458 - RNA, 21 nt, Artificial Sequence
  LRRK2 RNA guide
uuucaaccauaggccaugggg

SEQ ID NO: 80459 - RNA, 21 nt, Artificial Sequence
  LRRK2 RNA guide
uuuucaaccauaggccauggg

SEQ ID NO: 80460 - RNA, 21 nt, Artificial Sequence
  LRRK2 RNA guide
uuuuucaaccauaggccaugg

SEQ ID NO: 80461 - RNA, 22 nt, Artificial Sequence
  LRRK2 RNA guide
aauuuuucaaccauaggccaug

SEQ ID NO: 80462 - RNA, 22 nt, Artificial Sequence
  LRRK2 RNA guide
auggccuaugguugaaaaauua

SEQ ID NO: 80463 - RNA, 22 nt, Artificial Sequence
  LRRK2 RNA guide
auuaauuuuucaaccauaggcc

SEQ ID NO: 80464 - RNA, 22 nt, Artificial Sequence
  LRRK2 RNA guide
auuuuucaaccauaggccaugg

SEQ ID NO: 80465 - RNA, 22 nt, Artificial Sequence
  LRRK2 RNA guide
cauggccuaugguugaaaaauu

SEQ ID NO: 80466 - RNA, 22 nt, Artificial Sequence
  LRRK2 RNA guide
ccauggccuaugguugaaaaau

SEQ ID NO: 80467 - RNA, 22 nt, Artificial Sequence
  LRRK2 RNA guide
cccauggccuaugguugaaaaa

SEQ ID NO: 80468 - RNA, 22 nt, Artificial Sequence
  LRRK2 RNA guide
ccccauggccuaugguugaaaa

SEQ ID NO: 80469 - RNA, 22 nt, Artificial Sequence
  LRRK2 RNA guide
gccccauggccuaugguugaaa

SEQ ID NO: 80470 - RNA, 22 nt, Artificial Sequence
  LRRK2 RNA guide
ggccuaugguugaaaaauuaau

SEQ ID NO: 80471 - RNA, 22 nt, Artificial Sequence
  LRRK2 RNA guide
uaauuuuucaaccauaggccau

SEQ ID NO: 80472 - RNA, 22 nt, Artificial Sequence
  LRRK2 RNA guide
ugccccauggccuaugguugaa

SEQ ID NO: 80473 - RNA, 22 nt, Artificial Sequence
  LRRK2 RNA guide
uggccuaugguugaaaaauuaa

SEQ ID NO: 80474 - RNA, 22 nt, Artificial Sequence
  LRRK2 RNA guide
uuaauuuuucaaccauaggcca

SEQ ID NO: 80475 - RNA, 22 nt, Artificial Sequence
  LRRK2 RNA guide
uuucaaccauaggccauggggc

SEQ ID NO: 80476 - RNA, 22 nt, Artificial Sequence
  LRRK2 RNA guide
uuuucaaccauaggccaugggg

SEQ ID NO: 80477 - RNA, 22 nt, Artificial Sequence
  LRRK2 RNA guide
uuuuucaaccauaggccauggg

SEQ ID NO: 80478 - RNA, 20 nt, Artificial Sequence
  LRRK2 RNA guide
aacaucauuugcauauaugc

SEQ ID NO: 80479 - RNA, 20 nt, Artificial Sequence
  LRRK2 RNA guide
acagaacaucauuugcauau

SEQ ID NO: 80480 - RNA, 20 nt, Artificial Sequence
  LRRK2 RNA guide
acaucauuugcauauaugca

SEQ ID NO: 80481 - RNA, 20 nt, Artificial Sequence
  LRRK2 RNA guide
augcauauaugcaaaugaug

SEQ ID NO: 80482 - RNA, 20 nt, Artificial Sequence
  LRRK2 RNA guide
cagaacaucauuugcauaua

SEQ ID NO: 80483 - RNA, 20 nt, Artificial Sequence
  LRRK2 RNA guide
caucauuugcauauaugcau

SEQ ID NO: 80484 - RNA, 20 nt, Artificial Sequence
  LRRK2 RNA guide
gaacaucauuugcauauaug

SEQ ID NO: 80485 - RNA, 20 nt, Artificial Sequence
  LRRK2 RNA guide
gcauauaugcaaaugauguu

SEQ ID NO: 80486 - RNA, 20 nt, Artificial Sequence
  LRRK2 RNA guide
guacagaacaucauuugcau

SEQ ID NO: 80487 - RNA, 20 nt, Artificial Sequence
  LRRK2 RNA guide
uacagaacaucauuugcaua

SEQ ID NO: 80488 - RNA, 20 nt, Artificial Sequence
  LRRK2 RNA guide
ugcauauaugcaaaugaugu

SEQ ID NO: 80489 - RNA, 21 nt, Artificial Sequence
  LRRK2 RNA guide
gaacaucauuugcauauaugc

SEQ ID NO: 80490 - RNA, 21 nt, Artificial Sequence
  LRRK2 RNA guide
gcauauaugcaaaugauguuc

SEQ ID NO: 80491 - RNA, 21 nt, Artificial Sequence
  LRRK2 RNA guide
guacagaacaucauuugcaua

SEQ ID NO: 80492 - RNA, 21 nt, Artificial Sequence
  LRRK2 RNA guide
uguacagaacaucauuugcau

SEQ ID NO: 80493 - RNA, 22 nt, Artificial Sequence
  LRRK2 RNA guide
agaacaucauuugcauauaugc

SEQ ID NO: 80494 - RNA, 22 nt, Artificial Sequence
  LRRK2 RNA guide
cagaacaucauuugcauauaug

SEQ ID NO: 80495 - RNA, 22 nt, Artificial Sequence
  LRRK2 RNA guide
gaacaucauuugcauauaugca

SEQ ID NO: 80496 - RNA, 22 nt, Artificial Sequence
  LRRK2 RNA guide
gcauauaugcaaaugauguucu

SEQ ID NO: 80497 - RNA, 22 nt, Artificial Sequence
  LRRK2 RNA guide
guacagaacaucauuugcauau

SEQ ID NO: 80498 - RNA, 22 nt, Artificial Sequence
  LRRK2 RNA guide
ugcauauaugcaaaugauguuc

SEQ ID NO: 80499 - RNA, 22 nt, Artificial Sequence
  LRRK2 RNA guide
uguacagaacaucauuugcaua

SEQ ID NO: 80500 - RNA, 22 nt, Artificial Sequence
  LRRK2 RNA guide
uuguacagaacaucauuugcau

SEQ ID NO: 80501 - RNA, 20 nt, Artificial Sequence
  LRRK2 RNA guide
aaauuucuuguagggugccc

SEQ ID NO: 80502 - RNA, 20 nt, Artificial Sequence
  LRRK2 RNA guide
aacgggcacccuacaagaaa

SEQ ID NO: 80503 - RNA, 20 nt, Artificial Sequence
  LRRK2 RNA guide
aauuucuuguagggugcccg

SEQ ID NO: 80504 - RNA, 20 nt, Artificial Sequence
  LRRK2 RNA guide
auuaacgggcacccuacaag

SEQ ID NO: 80505 - RNA, 20 nt, Artificial Sequence
  LRRK2 RNA guide
auucauuaacgggcacccua

SEQ ID NO: 80506 - RNA, 20 nt, Artificial Sequence
  LRRK2 RNA guide
auuucuuguagggugcccgu

SEQ ID NO: 80507 - RNA, 20 nt, Artificial Sequence
  LRRK2 RNA guide
cacccuacaagaaauuuaaa

SEQ ID NO: 80508 - RNA, 20 nt, Artificial Sequence
  LRRK2 RNA guide
cauuaacgggcacccuacaa

SEQ ID NO: 80509 - RNA, 20 nt, Artificial Sequence
  LRRK2 RNA guide
cauucauuaacgggcacccu

SEQ ID NO: 80510 - RNA, 20 nt, Artificial Sequence
  LRRK2 RNA guide
ccauucauuaacgggcaccc

SEQ ID NO: 80511 - RNA, 20 nt, Artificial Sequence
  LRRK2 RNA guide
cgggcacccuacaagaaauu

SEQ ID NO: 80512 - RNA, 20 nt, Artificial Sequence
  LRRK2 RNA guide
cugguggcuugcuuuuuaaa

SEQ ID NO: 80513 - RNA, 20 nt, Artificial Sequence
  LRRK2 RNA guide
cuuguagggugcccguuaau

SEQ ID NO: 80514 - RNA, 20 nt, Artificial Sequence
  LRRK2 RNA guide
gcacccuacaagaaauuuaa

SEQ ID NO: 80515 - RNA, 20 nt, Artificial Sequence
  LRRK2 RNA guide
ggcacccuacaagaaauuua

SEQ ID NO: 80516 - RNA, 20 nt, Artificial Sequence
  LRRK2 RNA guide
ggcuugcuuuuuaaauuucu

SEQ ID NO: 80517 - RNA, 20 nt, Artificial Sequence
  LRRK2 RNA guide
gggcacccuacaagaaauuu

SEQ ID NO: 80518 - RNA, 20 nt, Artificial Sequence
  LRRK2 RNA guide
gguggcuugcuuuuuaaauu

SEQ ID NO: 80519 - RNA, 20 nt, Artificial Sequence
  LRRK2 RNA guide
guggcuugcuuuuuaaauuu

SEQ ID NO: 80520 - RNA, 20 nt, Artificial Sequence
  LRRK2 RNA guide
uaaauuucuuguagggugcc

SEQ ID NO: 80521 - RNA, 20 nt, Artificial Sequence
  LRRK2 RNA guide
uaacgggcacccuacaagaa

SEQ ID NO: 80522 - RNA, 20 nt, Artificial Sequence
  LRRK2 RNA guide
ucauuaacgggcacccuaca

SEQ ID NO: 80523 - RNA, 20 nt, Artificial Sequence
  LRRK2 RNA guide
ucuuguagggugcccguuaa

SEQ ID NO: 80524 - RNA, 20 nt, Artificial Sequence
  LRRK2 RNA guide
uggcuugcuuuuuaaauuuc

SEQ ID NO: 80525 - RNA, 20 nt, Artificial Sequence
  LRRK2 RNA guide
ugguggcuugcuuuuuaaau

SEQ ID NO: 80526 - RNA, 20 nt, Artificial Sequence
  LRRK2 RNA guide
uuaaauuucuuguagggugc

SEQ ID NO: 80527 - RNA, 20 nt, Artificial Sequence
  LRRK2 RNA guide
uuaacgggcacccuacaaga

SEQ ID NO: 80528 - RNA, 20 nt, Artificial Sequence
  LRRK2 RNA guide
uucauuaacgggcacccuac

SEQ ID NO: 80529 - RNA, 20 nt, Artificial Sequence
  LRRK2 RNA guide
uucuuguagggugcccguua

SEQ ID NO: 80530 - RNA, 20 nt, Artificial Sequence
  LRRK2 RNA guide
uuuaaauuucuuguagggug

SEQ ID NO: 80531 - RNA, 20 nt, Artificial Sequence
  LRRK2 RNA guide
uuucuuguagggugcccguu

SEQ ID NO: 80532 - RNA, 21 nt, Artificial Sequence
  LRRK2 RNA guide
aaauuucuuguagggugcccg

SEQ ID NO: 80533 - RNA, 21 nt, Artificial Sequence
  LRRK2 RNA guide
aacgggcacccuacaagaaau

SEQ ID NO: 80534 - RNA, 21 nt, Artificial Sequence
  LRRK2 RNA guide
aauuucuuguagggugcccgu

SEQ ID NO: 80535 - RNA, 21 nt, Artificial Sequence
  LRRK2 RNA guide
acgggcacccuacaagaaauu

SEQ ID NO: 80536 - RNA, 21 nt, Artificial Sequence
  LRRK2 RNA guide
auuaacgggcacccuacaaga

SEQ ID NO: 80537 - RNA, 21 nt, Artificial Sequence
  LRRK2 RNA guide
auucauuaacgggcacccuac

SEQ ID NO: 80538 - RNA, 21 nt, Artificial Sequence
  LRRK2 RNA guide
auuucuuguagggugcccguu

SEQ ID NO: 80539 - RNA, 21 nt, Artificial Sequence
  LRRK2 RNA guide
cauuaacgggcacccuacaag

SEQ ID NO: 80540 - RNA, 21 nt, Artificial Sequence
  LRRK2 RNA guide
cauucauuaacgggcacccua

SEQ ID NO: 80541 - RNA, 21 nt, Artificial Sequence
  LRRK2 RNA guide
ccauucauuaacgggcacccu

SEQ ID NO: 80542 - RNA, 21 nt, Artificial Sequence
  LRRK2 RNA guide
cgggcacccuacaagaaauuu

SEQ ID NO: 80543 - RNA, 21 nt, Artificial Sequence
  LRRK2 RNA guide
cugguggcuugcuuuuuaaau

SEQ ID NO: 80544 - RNA, 21 nt, Artificial Sequence
  LRRK2 RNA guide
cuuguagggugcccguuaaug

SEQ ID NO: 80545 - RNA, 21 nt, Artificial Sequence
  LRRK2 RNA guide
gcacccuacaagaaauuuaaa

SEQ ID NO: 80546 - RNA, 21 nt, Artificial Sequence
  LRRK2 RNA guide
gcugguggcuugcuuuuuaaa

SEQ ID NO: 80547 - RNA, 21 nt, Artificial Sequence
  LRRK2 RNA guide
ggcacccuacaagaaauuuaa

SEQ ID NO: 80548 - RNA, 21 nt, Artificial Sequence
  LRRK2 RNA guide
gggcacccuacaagaaauuua

SEQ ID NO: 80549 - RNA, 21 nt, Artificial Sequence
  LRRK2 RNA guide
gguggcuugcuuuuuaaauuu

SEQ ID NO: 80550 - RNA, 21 nt, Artificial Sequence
  LRRK2 RNA guide
guggcuugcuuuuuaaauuuc

SEQ ID NO: 80551 - RNA, 21 nt, Artificial Sequence
  LRRK2 RNA guide
uaaauuucuuguagggugccc

SEQ ID NO: 80552 - RNA, 21 nt, Artificial Sequence
  LRRK2 RNA guide
uaacgggcacccuacaagaaa

SEQ ID NO: 80553 - RNA, 21 nt, Artificial Sequence
  LRRK2 RNA guide
ucauuaacgggcacccuacaa

SEQ ID NO: 80554 - RNA, 21 nt, Artificial Sequence
  LRRK2 RNA guide
uccauucauuaacgggcaccc

SEQ ID NO: 80555 - RNA, 21 nt, Artificial Sequence
  LRRK2 RNA guide
ucuuguagggugcccguuaau

SEQ ID NO: 80556 - RNA, 21 nt, Artificial Sequence
  LRRK2 RNA guide
ugguggcuugcuuuuuaaauu

SEQ ID NO: 80557 - RNA, 21 nt, Artificial Sequence
  LRRK2 RNA guide
uuaaauuucuuguagggugcc

SEQ ID NO: 80558 - RNA, 21 nt, Artificial Sequence
  LRRK2 RNA guide
uuaacgggcacccuacaagaa

SEQ ID NO: 80559 - RNA, 21 nt, Artificial Sequence
  LRRK2 RNA guide
uucauuaacgggcacccuaca

SEQ ID NO: 80560 - RNA, 21 nt, Artificial Sequence
  LRRK2 RNA guide
uucuuguagggugcccguuaa

SEQ ID NO: 80561 - RNA, 21 nt, Artificial Sequence
  LRRK2 RNA guide
uuuaaauuucuuguagggugc

SEQ ID NO: 80562 - RNA, 21 nt, Artificial Sequence
  LRRK2 RNA guide
uuucuuguagggugcccguua

SEQ ID NO: 80563 - RNA, 22 nt, Artificial Sequence
  LRRK2 RNA guide
aaauuucuuguagggugcccgu

SEQ ID NO: 80564 - RNA, 22 nt, Artificial Sequence
  LRRK2 RNA guide
aacgggcacccuacaagaaauu

SEQ ID NO: 80565 - RNA, 22 nt, Artificial Sequence
  LRRK2 RNA guide
aauuucuuguagggugcccguu

SEQ ID NO: 80566 - RNA, 22 nt, Artificial Sequence
  LRRK2 RNA guide
acgggcacccuacaagaaauuu

SEQ ID NO: 80567 - RNA, 22 nt, Artificial Sequence
  LRRK2 RNA guide
agcugguggcuugcuuuuuaaa

SEQ ID NO: 80568 - RNA, 22 nt, Artificial Sequence
  LRRK2 RNA guide
auuaacgggcacccuacaagaa

SEQ ID NO: 80569 - RNA, 22 nt, Artificial Sequence
  LRRK2 RNA guide
auucauuaacgggcacccuaca

SEQ ID NO: 80570 - RNA, 22 nt, Artificial Sequence
  LRRK2 RNA guide
auuucuuguagggugcccguua

SEQ ID NO: 80571 - RNA, 22 nt, Artificial Sequence
  LRRK2 RNA guide
caagaaauuuaaaaagcaagcc

SEQ ID NO: 80572 - RNA, 22 nt, Artificial Sequence
  LRRK2 RNA guide
cauuaacgggcacccuacaaga

SEQ ID NO: 80573 - RNA, 22 nt, Artificial Sequence
  LRRK2 RNA guide
cauucauuaacgggcacccuac

SEQ ID NO: 80574 - RNA, 22 nt, Artificial Sequence
  LRRK2 RNA guide
ccauucauuaacgggcacccua

SEQ ID NO: 80575 - RNA, 22 nt, Artificial Sequence
  LRRK2 RNA guide
cccuacaagaaauuuaaaaagc

SEQ ID NO: 80576 - RNA, 22 nt, Artificial Sequence
  LRRK2 RNA guide
cgggcacccuacaagaaauuua

SEQ ID NO: 80577 - RNA, 22 nt, Artificial Sequence
  LRRK2 RNA guide
cugguggcuugcuuuuuaaauu

SEQ ID NO: 80578 - RNA, 22 nt, Artificial Sequence
  LRRK2 RNA guide
cuuguagggugcccguuaauga

SEQ ID NO: 80579 - RNA, 22 nt, Artificial Sequence
  LRRK2 RNA guide
gcacccuacaagaaauuuaaaa

SEQ ID NO: 80580 - RNA, 22 nt, Artificial Sequence
  LRRK2 RNA guide
gcugguggcuugcuuuuuaaau

SEQ ID NO: 80581 - RNA, 22 nt, Artificial Sequence
  LRRK2 RNA guide
gcuuuuuaaauuucuuguaggg

SEQ ID NO: 80582 - RNA, 22 nt, Artificial Sequence
  LRRK2 RNA guide
ggcacccuacaagaaauuuaaa

SEQ ID NO: 80583 - RNA, 22 nt, Artificial Sequence
  LRRK2 RNA guide
ggcuugcuuuuuaaauuucuug

SEQ ID NO: 80584 - RNA, 22 nt, Artificial Sequence
  LRRK2 RNA guide
gggcacccuacaagaaauuuaa

SEQ ID NO: 80585 - RNA, 22 nt, Artificial Sequence
  LRRK2 RNA guide
gguggcuugcuuuuuaaauuuc

SEQ ID NO: 80586 - RNA, 22 nt, Artificial Sequence
  LRRK2 RNA guide
guggcuugcuuuuuaaauuucu

SEQ ID NO: 80587 - RNA, 22 nt, Artificial Sequence
  LRRK2 RNA guide
uaaauuucuuguagggugcccg

SEQ ID NO: 80588 - RNA, 22 nt, Artificial Sequence
  LRRK2 RNA guide
uaacgggcacccuacaagaaau

SEQ ID NO: 80589 - RNA, 22 nt, Artificial Sequence
  LRRK2 RNA guide
ucauuaacgggcacccuacaag

SEQ ID NO: 80590 - RNA, 22 nt, Artificial Sequence
  LRRK2 RNA guide
uccauucauuaacgggcacccu

SEQ ID NO: 80591 - RNA, 22 nt, Artificial Sequence
  LRRK2 RNA guide
ucuuguagggugcccguuaaug

SEQ ID NO: 80592 - RNA, 22 nt, Artificial Sequence
  LRRK2 RNA guide
ugguggcuugcuuuuuaaauuu

SEQ ID NO: 80593 - RNA, 22 nt, Artificial Sequence
  LRRK2 RNA guide
uuaaauuucuuguagggugccc

SEQ ID NO: 80594 - RNA, 22 nt, Artificial Sequence
  LRRK2 RNA guide
uuaacgggcacccuacaagaaa

SEQ ID NO: 80595 - RNA, 22 nt, Artificial Sequence
  LRRK2 RNA guide
uucauuaacgggcacccuacaa

SEQ ID NO: 80596 - RNA, 22 nt, Artificial Sequence
  LRRK2 RNA guide
uuccauucauuaacgggcaccc

SEQ ID NO: 80597 - RNA, 22 nt, Artificial Sequence
  LRRK2 RNA guide
uucuuguagggugcccguuaau

SEQ ID NO: 80598 - RNA, 22 nt, Artificial Sequence
  LRRK2 RNA guide
uuuaaauuucuuguagggugcc

SEQ ID NO: 80599 - RNA, 22 nt, Artificial Sequence
  LRRK2 RNA guide
uuucuuguagggugcccguuaa

SEQ ID NO: 80600 - RNA, 22 nt, Artificial Sequence
  LRRK2 RNA guide
uuuuaaauuucuuguagggugc

SEQ ID NO: 80601 - RNA, 20 nt, Artificial Sequence
  LRRK2 RNA guide
aaauuuccuguagggugccc

SEQ ID NO: 80602 - RNA, 20 nt, Artificial Sequence
  LRRK2 RNA guide
aacgggcacccuacaggaaa

SEQ ID NO: 80603 - RNA, 20 nt, Artificial Sequence
  LRRK2 RNA guide
aauuuccuguagggugcccg

SEQ ID NO: 80604 - RNA, 20 nt, Artificial Sequence
  LRRK2 RNA guide
acccuacaggaaauuuaaaa

SEQ ID NO: 80605 - RNA, 20 nt, Artificial Sequence
  LRRK2 RNA guide
acgggcacccuacaggaaau

SEQ ID NO: 80606 - RNA, 20 nt, Artificial Sequence
  LRRK2 RNA guide
aggaaauuuaaaaagcaagc

SEQ ID NO: 80607 - RNA, 20 nt, Artificial Sequence
  LRRK2 RNA guide
auuaacgggcacccuacagg

SEQ ID NO: 80608 - RNA, 20 nt, Artificial Sequence
  LRRK2 RNA guide
auuuccuguagggugcccgu

SEQ ID NO: 80609 - RNA, 20 nt, Artificial Sequence
  LRRK2 RNA guide
cacccuacaggaaauuuaaa

SEQ ID NO: 80610 - RNA, 20 nt, Artificial Sequence
  LRRK2 RNA guide
caggaaauuuaaaaagcaag

SEQ ID NO: 80611 - RNA, 20 nt, Artificial Sequence
  LRRK2 RNA guide
cauuaacgggcacccuacag

SEQ ID NO: 80612 - RNA, 20 nt, Artificial Sequence
  LRRK2 RNA guide
cccuacaggaaauuuaaaaa

SEQ ID NO: 80613 - RNA, 20 nt, Artificial Sequence
  LRRK2 RNA guide
ccuacaggaaauuuaaaaag

SEQ ID NO: 80614 - RNA, 20 nt, Artificial Sequence
  LRRK2 RNA guide
ccuguagggugcccguuaau

SEQ ID NO: 80615 - RNA, 20 nt, Artificial Sequence
  LRRK2 RNA guide
cgggcacccuacaggaaauu

SEQ ID NO: 80616 - RNA, 20 nt, Artificial Sequence
  LRRK2 RNA guide
cuacaggaaauuuaaaaagc

SEQ ID NO: 80617 - RNA, 20 nt, Artificial Sequence
  LRRK2 RNA guide
cuugcuuuuuaaauuuccug

SEQ ID NO: 80618 - RNA, 20 nt, Artificial Sequence
  LRRK2 RNA guide
cuuuuuaaauuuccuguagg

SEQ ID NO: 80619 - RNA, 20 nt, Artificial Sequence
  LRRK2 RNA guide
gcacccuacaggaaauuuaa

SEQ ID NO: 80620 - RNA, 20 nt, Artificial Sequence
  LRRK2 RNA guide
gcuugcuuuuuaaauuuccu

SEQ ID NO: 80621 - RNA, 20 nt, Artificial Sequence
  LRRK2 RNA guide
gcuuuuuaaauuuccuguag

SEQ ID NO: 80622 - RNA, 20 nt, Artificial Sequence
  LRRK2 RNA guide
ggcacccuacaggaaauuua

SEQ ID NO: 80623 - RNA, 20 nt, Artificial Sequence
  LRRK2 RNA guide
ggcuugcuuuuuaaauuucc

SEQ ID NO: 80624 - RNA, 20 nt, Artificial Sequence
  LRRK2 RNA guide
gggcacccuacaggaaauuu

SEQ ID NO: 80625 - RNA, 20 nt, Artificial Sequence
  LRRK2 RNA guide
uaaauuuccuguagggugcc

SEQ ID NO: 80626 - RNA, 20 nt, Artificial Sequence
  LRRK2 RNA guide
uaacgggcacccuacaggaa

SEQ ID NO: 80627 - RNA, 20 nt, Artificial Sequence
  LRRK2 RNA guide
uccuguagggugcccguuaa

SEQ ID NO: 80628 - RNA, 20 nt, Artificial Sequence
  LRRK2 RNA guide
uuaaauuuccuguagggugc

SEQ ID NO: 80629 - RNA, 20 nt, Artificial Sequence
  LRRK2 RNA guide
uuaacgggcacccuacagga

SEQ ID NO: 80630 - RNA, 20 nt, Artificial Sequence
  LRRK2 RNA guide
uuccuguagggugcccguua

SEQ ID NO: 80631 - RNA, 20 nt, Artificial Sequence
  LRRK2 RNA guide
uuuaaauuuccuguagggug

SEQ ID NO: 80632 - RNA, 20 nt, Artificial Sequence
  LRRK2 RNA guide
uuuccuguagggugcccguu

SEQ ID NO: 80633 - RNA, 20 nt, Artificial Sequence
  LRRK2 RNA guide
uuuuaaauuuccuguagggu

SEQ ID NO: 80634 - RNA, 20 nt, Artificial Sequence
  LRRK2 RNA guide
uuuuuaaauuuccuguaggg

SEQ ID NO: 80635 - RNA, 21 nt, Artificial Sequence
  LRRK2 RNA guide
aaauuuccuguagggugcccg

SEQ ID NO: 80636 - RNA, 21 nt, Artificial Sequence
  LRRK2 RNA guide
aacgggcacccuacaggaaau

SEQ ID NO: 80637 - RNA, 21 nt, Artificial Sequence
  LRRK2 RNA guide
aauuuccuguagggugcccgu

SEQ ID NO: 80638 - RNA, 21 nt, Artificial Sequence
  LRRK2 RNA guide
acgggcacccuacaggaaauu

SEQ ID NO: 80639 - RNA, 21 nt, Artificial Sequence
  LRRK2 RNA guide
aggaaauuuaaaaagcaagcc

SEQ ID NO: 80640 - RNA, 21 nt, Artificial Sequence
  LRRK2 RNA guide
auuaacgggcacccuacagga

SEQ ID NO: 80641 - RNA, 21 nt, Artificial Sequence
  LRRK2 RNA guide
auuuccuguagggugcccguu

SEQ ID NO: 80642 - RNA, 21 nt, Artificial Sequence
  LRRK2 RNA guide
cacccuacaggaaauuuaaaa

SEQ ID NO: 80643 - RNA, 21 nt, Artificial Sequence
  LRRK2 RNA guide
caggaaauuuaaaaagcaagc

SEQ ID NO: 80644 - RNA, 21 nt, Artificial Sequence
  LRRK2 RNA guide
cauuaacgggcacccuacagg

SEQ ID NO: 80645 - RNA, 21 nt, Artificial Sequence
  LRRK2 RNA guide
cccuacaggaaauuuaaaaag

SEQ ID NO: 80646 - RNA, 21 nt, Artificial Sequence
  LRRK2 RNA guide
ccuacaggaaauuuaaaaagc

SEQ ID NO: 80647 - RNA, 21 nt, Artificial Sequence
  LRRK2 RNA guide
ccuguagggugcccguuaaug

SEQ ID NO: 80648 - RNA, 21 nt, Artificial Sequence
  LRRK2 RNA guide
cgggcacccuacaggaaauuu

SEQ ID NO: 80649 - RNA, 21 nt, Artificial Sequence
  LRRK2 RNA guide
cuuuuuaaauuuccuguaggg

SEQ ID NO: 80650 - RNA, 21 nt, Artificial Sequence
  LRRK2 RNA guide
gcacccuacaggaaauuuaaa

SEQ ID NO: 80651 - RNA, 21 nt, Artificial Sequence
  LRRK2 RNA guide
gcuugcuuuuuaaauuuccug

SEQ ID NO: 80652 - RNA, 21 nt, Artificial Sequence
  LRRK2 RNA guide
gcuuuuuaaauuuccuguagg

SEQ ID NO: 80653 - RNA, 21 nt, Artificial Sequence
  LRRK2 RNA guide
ggcacccuacaggaaauuuaa

SEQ ID NO: 80654 - RNA, 21 nt, Artificial Sequence
  LRRK2 RNA guide
ggcuugcuuuuuaaauuuccu

SEQ ID NO: 80655 - RNA, 21 nt, Artificial Sequence
  LRRK2 RNA guide
gggcacccuacaggaaauuua

SEQ ID NO: 80656 - RNA, 21 nt, Artificial Sequence
  LRRK2 RNA guide
uaaauuuccuguagggugccc

SEQ ID NO: 80657 - RNA, 21 nt, Artificial Sequence
  LRRK2 RNA guide
uaacgggcacccuacaggaaa

SEQ ID NO: 80658 - RNA, 21 nt, Artificial Sequence
  LRRK2 RNA guide
ucauuaacgggcacccuacag

SEQ ID NO: 80659 - RNA, 21 nt, Artificial Sequence
  LRRK2 RNA guide
uccuguagggugcccguuaau

SEQ ID NO: 80660 - RNA, 21 nt, Artificial Sequence
  LRRK2 RNA guide
uggcuugcuuuuuaaauuucc

SEQ ID NO: 80661 - RNA, 21 nt, Artificial Sequence
  LRRK2 RNA guide
uuaaauuuccuguagggugcc

SEQ ID NO: 80662 - RNA, 21 nt, Artificial Sequence
  LRRK2 RNA guide
uuaacgggcacccuacaggaa

SEQ ID NO: 80663 - RNA, 21 nt, Artificial Sequence
  LRRK2 RNA guide
uuccuguagggugcccguuaa

SEQ ID NO: 80664 - RNA, 21 nt, Artificial Sequence
  LRRK2 RNA guide
uuuaaauuuccuguagggugc

SEQ ID NO: 80665 - RNA, 21 nt, Artificial Sequence
  LRRK2 RNA guide
uuuccuguagggugcccguua

SEQ ID NO: 80666 - RNA, 21 nt, Artificial Sequence
  LRRK2 RNA guide
uuuuaaauuuccuguagggug

SEQ ID NO: 80667 - RNA, 22 nt, Artificial Sequence
  LRRK2 RNA guide
aaauuuccuguagggugcccgu

SEQ ID NO: 80668 - RNA, 22 nt, Artificial Sequence
  LRRK2 RNA guide
aacgggcacccuacaggaaauu

SEQ ID NO: 80669 - RNA, 22 nt, Artificial Sequence
  LRRK2 RNA guide
aauuuccuguagggugcccguu

SEQ ID NO: 80670 - RNA, 22 nt, Artificial Sequence
  LRRK2 RNA guide
acaggaaauuuaaaaagcaagc

SEQ ID NO: 80671 - RNA, 22 nt, Artificial Sequence
  LRRK2 RNA guide
acccuacaggaaauuuaaaaag

SEQ ID NO: 80672 - RNA, 22 nt, Artificial Sequence
  LRRK2 RNA guide
acgggcacccuacaggaaauuu

SEQ ID NO: 80673 - RNA, 22 nt, Artificial Sequence
  LRRK2 RNA guide
aggaaauuuaaaaagcaagcca

SEQ ID NO: 80674 - RNA, 22 nt, Artificial Sequence
  LRRK2 RNA guide
auuaacgggcacccuacaggaa

SEQ ID NO: 80675 - RNA, 22 nt, Artificial Sequence
  LRRK2 RNA guide
auuuccuguagggugcccguua

SEQ ID NO: 80676 - RNA, 22 nt, Artificial Sequence
  LRRK2 RNA guide
cacccuacaggaaauuuaaaaa

SEQ ID NO: 80677 - RNA, 22 nt, Artificial Sequence
  LRRK2 RNA guide
caggaaauuuaaaaagcaagcc

SEQ ID NO: 80678 - RNA, 22 nt, Artificial Sequence
  LRRK2 RNA guide
cauuaacgggcacccuacagga

SEQ ID NO: 80679 - RNA, 22 nt, Artificial Sequence
  LRRK2 RNA guide
cccuacaggaaauuuaaaaagc

SEQ ID NO: 80680 - RNA, 22 nt, Artificial Sequence
  LRRK2 RNA guide
ccuacaggaaauuuaaaaagca

SEQ ID NO: 80681 - RNA, 22 nt, Artificial Sequence
  LRRK2 RNA guide
ccuguagggugcccguuaauga

SEQ ID NO: 80682 - RNA, 22 nt, Artificial Sequence
  LRRK2 RNA guide
cgggcacccuacaggaaauuua

SEQ ID NO: 80683 - RNA, 22 nt, Artificial Sequence
  LRRK2 RNA guide
cuuuuuaaauuuccuguagggu

SEQ ID NO: 80684 - RNA, 22 nt, Artificial Sequence
  LRRK2 RNA guide
gcacccuacaggaaauuuaaaa

SEQ ID NO: 80685 - RNA, 22 nt, Artificial Sequence
  LRRK2 RNA guide
gcuugcuuuuuaaauuuccugu

SEQ ID NO: 80686 - RNA, 22 nt, Artificial Sequence
  LRRK2 RNA guide
gcuuuuuaaauuuccuguaggg

SEQ ID NO: 80687 - RNA, 22 nt, Artificial Sequence
  LRRK2 RNA guide
ggcacccuacaggaaauuuaaa

SEQ ID NO: 80688 - RNA, 22 nt, Artificial Sequence
  LRRK2 RNA guide
ggcuugcuuuuuaaauuuccug

SEQ ID NO: 80689 - RNA, 22 nt, Artificial Sequence
  LRRK2 RNA guide
gggcacccuacaggaaauuuaa

SEQ ID NO: 80690 - RNA, 22 nt, Artificial Sequence
  LRRK2 RNA guide
guggcuugcuuuuuaaauuucc

SEQ ID NO: 80691 - RNA, 22 nt, Artificial Sequence
  LRRK2 RNA guide
uaaauuuccuguagggugcccg

SEQ ID NO: 80692 - RNA, 22 nt, Artificial Sequence
  LRRK2 RNA guide
uaacgggcacccuacaggaaau

SEQ ID NO: 80693 - RNA, 22 nt, Artificial Sequence
  LRRK2 RNA guide
ucauuaacgggcacccuacagg

SEQ ID NO: 80694 - RNA, 22 nt, Artificial Sequence
  LRRK2 RNA guide
uccuguagggugcccguuaaug

SEQ ID NO: 80695 - RNA, 22 nt, Artificial Sequence
  LRRK2 RNA guide
ugcuuuuuaaauuuccuguagg

SEQ ID NO: 80696 - RNA, 22 nt, Artificial Sequence
  LRRK2 RNA guide
uggcuugcuuuuuaaauuuccu

SEQ ID NO: 80697 - RNA, 22 nt, Artificial Sequence
  LRRK2 RNA guide
uuaaauuuccuguagggugccc

SEQ ID NO: 80698 - RNA, 22 nt, Artificial Sequence
  LRRK2 RNA guide
uuaacgggcacccuacaggaaa

SEQ ID NO: 80699 - RNA, 22 nt, Artificial Sequence
  LRRK2 RNA guide
uucauuaacgggcacccuacag

SEQ ID NO: 80700 - RNA, 22 nt, Artificial Sequence
  LRRK2 RNA guide
uuccuguagggugcccguuaau

SEQ ID NO: 80701 - RNA, 22 nt, Artificial Sequence
  LRRK2 RNA guide
uuuaaauuuccuguagggugcc

SEQ ID NO: 80702 - RNA, 22 nt, Artificial Sequence
  LRRK2 RNA guide
uuuccuguagggugcccguuaa

SEQ ID NO: 80703 - RNA, 22 nt, Artificial Sequence
  LRRK2 RNA guide
uuuuaaauuuccuguagggugc

SEQ ID NO: 80704 - RNA, 22 nt, Artificial Sequence
  LRRK2 RNA guide
uuuuuaaauuuccuguagggug

SEQ ID NO: 80705 - RNA, 20 nt, Artificial Sequence
  LRRK2 RNA guide
aaauuccauucauuaacggg

SEQ ID NO: 80706 - RNA, 20 nt, Artificial Sequence
  LRRK2 RNA guide
aauuccauucauuaacgggc

SEQ ID NO: 80707 - RNA, 20 nt, Artificial Sequence
  LRRK2 RNA guide
agaaauuccauucauuaacg

SEQ ID NO: 80708 - RNA, 20 nt, Artificial Sequence
  LRRK2 RNA guide
agggugcccguuaaugaaug

SEQ ID NO: 80709 - RNA, 20 nt, Artificial Sequence
  LRRK2 RNA guide
auuccauucauuaacgggca

SEQ ID NO: 80710 - RNA, 20 nt, Artificial Sequence
  LRRK2 RNA guide
cccguuaaugaauggaauuu

SEQ ID NO: 80711 - RNA, 20 nt, Artificial Sequence
  LRRK2 RNA guide
ccguuaaugaauggaauuuc

SEQ ID NO: 80712 - RNA, 20 nt, Artificial Sequence
  LRRK2 RNA guide
gaaauuccauucauuaacgg

SEQ ID NO: 80713 - RNA, 20 nt, Artificial Sequence
  LRRK2 RNA guide
gcccguuaaugaauggaauu

SEQ ID NO: 80714 - RNA, 20 nt, Artificial Sequence
  LRRK2 RNA guide
gggugcccguuaaugaaugg

SEQ ID NO: 80715 - RNA, 20 nt, Artificial Sequence
  LRRK2 RNA guide
ggugcccguuaaugaaugga

SEQ ID NO: 80716 - RNA, 20 nt, Artificial Sequence
  LRRK2 RNA guide
guagggugcccguuaaugaa

SEQ ID NO: 80717 - RNA, 20 nt, Artificial Sequence
  LRRK2 RNA guide
gugcccguuaaugaauggaa

SEQ ID NO: 80718 - RNA, 20 nt, Artificial Sequence
  LRRK2 RNA guide
uagggugcccguuaaugaau

SEQ ID NO: 80719 - RNA, 20 nt, Artificial Sequence
  LRRK2 RNA guide
uccauucauuaacgggcacc

SEQ ID NO: 80720 - RNA, 20 nt, Artificial Sequence
  LRRK2 RNA guide
ugcccguuaaugaauggaau

SEQ ID NO: 80721 - RNA, 20 nt, Artificial Sequence
  LRRK2 RNA guide
uguagggugcccguuaauga

SEQ ID NO: 80722 - RNA, 20 nt, Artificial Sequence
  LRRK2 RNA guide
uuccauucauuaacgggcac

SEQ ID NO: 80723 - RNA, 20 nt, Artificial Sequence
  LRRK2 RNA guide
uuguagggugcccguuaaug

SEQ ID NO: 80724 - RNA, 21 nt, Artificial Sequence
  LRRK2 RNA guide
aaauuccauucauuaacgggc

SEQ ID NO: 80725 - RNA, 21 nt, Artificial Sequence
  LRRK2 RNA guide
aauuccauucauuaacgggca

SEQ ID NO: 80726 - RNA, 21 nt, Artificial Sequence
  LRRK2 RNA guide
agaaauuccauucauuaacgg

SEQ ID NO: 80727 - RNA, 21 nt, Artificial Sequence
  LRRK2 RNA guide
agggugcccguuaaugaaugg

SEQ ID NO: 80728 - RNA, 21 nt, Artificial Sequence
  LRRK2 RNA guide
auuccauucauuaacgggcac

SEQ ID NO: 80729 - RNA, 21 nt, Artificial Sequence
  LRRK2 RNA guide
cccguuaaugaauggaauuuc

SEQ ID NO: 80730 - RNA, 21 nt, Artificial Sequence
  LRRK2 RNA guide
ccguuaaugaauggaauuucu

SEQ ID NO: 80731 - RNA, 21 nt, Artificial Sequence
  LRRK2 RNA guide
gaaauuccauucauuaacggg

SEQ ID NO: 80732 - RNA, 21 nt, Artificial Sequence
  LRRK2 RNA guide
gcccguuaaugaauggaauuu

SEQ ID NO: 80733 - RNA, 21 nt, Artificial Sequence
  LRRK2 RNA guide
gggugcccguuaaugaaugga

SEQ ID NO: 80734 - RNA, 21 nt, Artificial Sequence
  LRRK2 RNA guide
ggugcccguuaaugaauggaa

SEQ ID NO: 80735 - RNA, 21 nt, Artificial Sequence
  LRRK2 RNA guide
guagggugcccguuaaugaau

SEQ ID NO: 80736 - RNA, 21 nt, Artificial Sequence
  LRRK2 RNA guide
gugcccguuaaugaauggaau

SEQ ID NO: 80737 - RNA, 21 nt, Artificial Sequence
  LRRK2 RNA guide
uagggugcccguuaaugaaug

SEQ ID NO: 80738 - RNA, 21 nt, Artificial Sequence
  LRRK2 RNA guide
ugcccguuaaugaauggaauu

SEQ ID NO: 80739 - RNA, 21 nt, Artificial Sequence
  LRRK2 RNA guide
uguagggugcccguuaaugaa

SEQ ID NO: 80740 - RNA, 21 nt, Artificial Sequence
  LRRK2 RNA guide
uuccauucauuaacgggcacc

SEQ ID NO: 80741 - RNA, 21 nt, Artificial Sequence
  LRRK2 RNA guide
uuguagggugcccguuaauga

SEQ ID NO: 80742 - RNA, 22 nt, Artificial Sequence
  LRRK2 RNA guide
aaauuccauucauuaacgggca

SEQ ID NO: 80743 - RNA, 22 nt, Artificial Sequence
  LRRK2 RNA guide
aagaaauuccauucauuaacgg

SEQ ID NO: 80744 - RNA, 22 nt, Artificial Sequence
  LRRK2 RNA guide
aauuccauucauuaacgggcac

SEQ ID NO: 80745 - RNA, 22 nt, Artificial Sequence
  LRRK2 RNA guide
agaaauuccauucauuaacggg

SEQ ID NO: 80746 - RNA, 22 nt, Artificial Sequence
  LRRK2 RNA guide
agggugcccguuaaugaaugga

SEQ ID NO: 80747 - RNA, 22 nt, Artificial Sequence
  LRRK2 RNA guide
auuccauucauuaacgggcacc

SEQ ID NO: 80748 - RNA, 22 nt, Artificial Sequence
  LRRK2 RNA guide
cccguuaaugaauggaauuucu

SEQ ID NO: 80749 - RNA, 22 nt, Artificial Sequence
  LRRK2 RNA guide
ccguuaaugaauggaauuucuu

SEQ ID NO: 80750 - RNA, 22 nt, Artificial Sequence
  LRRK2 RNA guide
gaaauuccauucauuaacgggc

SEQ ID NO: 80751 - RNA, 22 nt, Artificial Sequence
  LRRK2 RNA guide
gcccguuaaugaauggaauuuc

SEQ ID NO: 80752 - RNA, 22 nt, Artificial Sequence
  LRRK2 RNA guide
gggugcccguuaaugaauggaa

SEQ ID NO: 80753 - RNA, 22 nt, Artificial Sequence
  LRRK2 RNA guide
ggugcccguuaaugaauggaau

SEQ ID NO: 80754 - RNA, 22 nt, Artificial Sequence
  LRRK2 RNA guide
guagggugcccguuaaugaaug

SEQ ID NO: 80755 - RNA, 22 nt, Artificial Sequence
  LRRK2 RNA guide
gugcccguuaaugaauggaauu

SEQ ID NO: 80756 - RNA, 22 nt, Artificial Sequence
  LRRK2 RNA guide
uagggugcccguuaaugaaugg

SEQ ID NO: 80757 - RNA, 22 nt, Artificial Sequence
  LRRK2 RNA guide
ugcccguuaaugaauggaauuu

SEQ ID NO: 80758 - RNA, 22 nt, Artificial Sequence
  LRRK2 RNA guide
uguagggugcccguuaaugaau

SEQ ID NO: 80759 - RNA, 22 nt, Artificial Sequence
  LRRK2 RNA guide
uuguagggugcccguuaaugaa

SEQ ID NO: 80760 - RNA, 20 nt, Artificial Sequence
  LRRK2 RNA guide
aaauuccauucauuaacagg

SEQ ID NO: 80761 - RNA, 20 nt, Artificial Sequence
  LRRK2 RNA guide
aaauuucuuguagggugccu

SEQ ID NO: 80762 - RNA, 20 nt, Artificial Sequence
  LRRK2 RNA guide
aacaggcacccuacaagaaa

SEQ ID NO: 80763 - RNA, 20 nt, Artificial Sequence
  LRRK2 RNA guide
aauuccauucauuaacaggc

SEQ ID NO: 80764 - RNA, 20 nt, Artificial Sequence
  LRRK2 RNA guide
aauuucuuguagggugccug

SEQ ID NO: 80765 - RNA, 20 nt, Artificial Sequence
  LRRK2 RNA guide
acaggcacccuacaagaaau

SEQ ID NO: 80766 - RNA, 20 nt, Artificial Sequence
  LRRK2 RNA guide
agggugccuguuaaugaaug

SEQ ID NO: 80767 - RNA, 20 nt, Artificial Sequence
  LRRK2 RNA guide
auuaacaggcacccuacaag

SEQ ID NO: 80768 - RNA, 20 nt, Artificial Sequence
  LRRK2 RNA guide
auucauuaacaggcacccua

SEQ ID NO: 80769 - RNA, 20 nt, Artificial Sequence
  LRRK2 RNA guide
auuccauucauuaacaggca

SEQ ID NO: 80770 - RNA, 20 nt, Artificial Sequence
  LRRK2 RNA guide
auuucuuguagggugccugu

SEQ ID NO: 80771 - RNA, 20 nt, Artificial Sequence
  LRRK2 RNA guide
caggcacccuacaagaaauu

SEQ ID NO: 80772 - RNA, 20 nt, Artificial Sequence
  LRRK2 RNA guide
cauuaacaggcacccuacaa

SEQ ID NO: 80773 - RNA, 20 nt, Artificial Sequence
  LRRK2 RNA guide
cauucauuaacaggcacccu

SEQ ID NO: 80774 - RNA, 20 nt, Artificial Sequence
  LRRK2 RNA guide
ccauucauuaacaggcaccc

SEQ ID NO: 80775 - RNA, 20 nt, Artificial Sequence
  LRRK2 RNA guide
ccuguuaaugaauggaauuu

SEQ ID NO: 80776 - RNA, 20 nt, Artificial Sequence
  LRRK2 RNA guide
cuguuaaugaauggaauuuc

SEQ ID NO: 80777 - RNA, 20 nt, Artificial Sequence
  LRRK2 RNA guide
cuuguagggugccuguuaau

SEQ ID NO: 80778 - RNA, 20 nt, Artificial Sequence
  LRRK2 RNA guide
gaaauuccauucauuaacag

SEQ ID NO: 80779 - RNA, 20 nt, Artificial Sequence
  LRRK2 RNA guide
gccuguuaaugaauggaauu

SEQ ID NO: 80780 - RNA, 20 nt, Artificial Sequence
  LRRK2 RNA guide
gggugccuguuaaugaaugg

SEQ ID NO: 80781 - RNA, 20 nt, Artificial Sequence
  LRRK2 RNA guide
ggugccuguuaaugaaugga

SEQ ID NO: 80782 - RNA, 20 nt, Artificial Sequence
  LRRK2 RNA guide
guagggugccuguuaaugaa

SEQ ID NO: 80783 - RNA, 20 nt, Artificial Sequence
  LRRK2 RNA guide
gugccuguuaaugaauggaa

SEQ ID NO: 80784 - RNA, 20 nt, Artificial Sequence
  LRRK2 RNA guide
uaacaggcacccuacaagaa

SEQ ID NO: 80785 - RNA, 20 nt, Artificial Sequence
  LRRK2 RNA guide
uagggugccuguuaaugaau

SEQ ID NO: 80786 - RNA, 20 nt, Artificial Sequence
  LRRK2 RNA guide
ucauuaacaggcacccuaca

SEQ ID NO: 80787 - RNA, 20 nt, Artificial Sequence
  LRRK2 RNA guide
uccauucauuaacaggcacc

SEQ ID NO: 80788 - RNA, 20 nt, Artificial Sequence
  LRRK2 RNA guide
ucuuguagggugccuguuaa

SEQ ID NO: 80789 - RNA, 20 nt, Artificial Sequence
  LRRK2 RNA guide
ugccuguuaaugaauggaau

SEQ ID NO: 80790 - RNA, 20 nt, Artificial Sequence
  LRRK2 RNA guide
uguagggugccuguuaauga

SEQ ID NO: 80791 - RNA, 20 nt, Artificial Sequence
  LRRK2 RNA guide
uuaacaggcacccuacaaga

SEQ ID NO: 80792 - RNA, 20 nt, Artificial Sequence
  LRRK2 RNA guide
uucauuaacaggcacccuac

SEQ ID NO: 80793 - RNA, 20 nt, Artificial Sequence
  LRRK2 RNA guide
uuccauucauuaacaggcac

SEQ ID NO: 80794 - RNA, 20 nt, Artificial Sequence
  LRRK2 RNA guide
uucuuguagggugccuguua

SEQ ID NO: 80795 - RNA, 20 nt, Artificial Sequence
  LRRK2 RNA guide
uuguagggugccuguuaaug

SEQ ID NO: 80796 - RNA, 20 nt, Artificial Sequence
  LRRK2 RNA guide
uuucuuguagggugccuguu

SEQ ID NO: 80797 - RNA, 21 nt, Artificial Sequence
  LRRK2 RNA guide
aaauuccauucauuaacaggc

SEQ ID NO: 80798 - RNA, 21 nt, Artificial Sequence
  LRRK2 RNA guide
aaauuucuuguagggugccug

SEQ ID NO: 80799 - RNA, 21 nt, Artificial Sequence
  LRRK2 RNA guide
aacaggcacccuacaagaaau

SEQ ID NO: 80800 - RNA, 21 nt, Artificial Sequence
  LRRK2 RNA guide
aauuccauucauuaacaggca

SEQ ID NO: 80801 - RNA, 21 nt, Artificial Sequence
  LRRK2 RNA guide
aauuucuuguagggugccugu

SEQ ID NO: 80802 - RNA, 21 nt, Artificial Sequence
  LRRK2 RNA guide
acaggcacccuacaagaaauu

SEQ ID NO: 80803 - RNA, 21 nt, Artificial Sequence
  LRRK2 RNA guide
agggugccuguuaaugaaugg

SEQ ID NO: 80804 - RNA, 21 nt, Artificial Sequence
  LRRK2 RNA guide
auuaacaggcacccuacaaga

SEQ ID NO: 80805 - RNA, 21 nt, Artificial Sequence
  LRRK2 RNA guide
auucauuaacaggcacccuac

SEQ ID NO: 80806 - RNA, 21 nt, Artificial Sequence
  LRRK2 RNA guide
auuccauucauuaacaggcac

SEQ ID NO: 80807 - RNA, 21 nt, Artificial Sequence
  LRRK2 RNA guide
auuucuuguagggugccuguu

SEQ ID NO: 80808 - RNA, 21 nt, Artificial Sequence
  LRRK2 RNA guide
caggcacccuacaagaaauuu

SEQ ID NO: 80809 - RNA, 21 nt, Artificial Sequence
  LRRK2 RNA guide
cauuaacaggcacccuacaag

SEQ ID NO: 80810 - RNA, 21 nt, Artificial Sequence
  LRRK2 RNA guide
cauucauuaacaggcacccua

SEQ ID NO: 80811 - RNA, 21 nt, Artificial Sequence
  LRRK2 RNA guide
ccauucauuaacaggcacccu

SEQ ID NO: 80812 - RNA, 21 nt, Artificial Sequence
  LRRK2 RNA guide
ccuguuaaugaauggaauuuc

SEQ ID NO: 80813 - RNA, 21 nt, Artificial Sequence
  LRRK2 RNA guide
cuuguagggugccuguuaaug

SEQ ID NO: 80814 - RNA, 21 nt, Artificial Sequence
  LRRK2 RNA guide
gaaauuccauucauuaacagg

SEQ ID NO: 80815 - RNA, 21 nt, Artificial Sequence
  LRRK2 RNA guide
gccuguuaaugaauggaauuu

SEQ ID NO: 80816 - RNA, 21 nt, Artificial Sequence
  LRRK2 RNA guide
gggugccuguuaaugaaugga

SEQ ID NO: 80817 - RNA, 21 nt, Artificial Sequence
  LRRK2 RNA guide
ggugccuguuaaugaauggaa

SEQ ID NO: 80818 - RNA, 21 nt, Artificial Sequence
  LRRK2 RNA guide
guagggugccuguuaaugaau

SEQ ID NO: 80819 - RNA, 21 nt, Artificial Sequence
  LRRK2 RNA guide
gugccuguuaaugaauggaau

SEQ ID NO: 80820 - RNA, 21 nt, Artificial Sequence
  LRRK2 RNA guide
uaaauuucuuguagggugccu

SEQ ID NO: 80821 - RNA, 21 nt, Artificial Sequence
  LRRK2 RNA guide
uaacaggcacccuacaagaaa

SEQ ID NO: 80822 - RNA, 21 nt, Artificial Sequence
  LRRK2 RNA guide
uagggugccuguuaaugaaug

SEQ ID NO: 80823 - RNA, 21 nt, Artificial Sequence
  LRRK2 RNA guide
ucauuaacaggcacccuacaa

SEQ ID NO: 80824 - RNA, 21 nt, Artificial Sequence
  LRRK2 RNA guide
uccauucauuaacaggcaccc

SEQ ID NO: 80825 - RNA, 21 nt, Artificial Sequence
  LRRK2 RNA guide
ucuuguagggugccuguuaau

SEQ ID NO: 80826 - RNA, 21 nt, Artificial Sequence
  LRRK2 RNA guide
ugccuguuaaugaauggaauu

SEQ ID NO: 80827 - RNA, 21 nt, Artificial Sequence
  LRRK2 RNA guide
uguagggugccuguuaaugaa

SEQ ID NO: 80828 - RNA, 21 nt, Artificial Sequence
  LRRK2 RNA guide
uuaacaggcacccuacaagaa

SEQ ID NO: 80829 - RNA, 21 nt, Artificial Sequence
  LRRK2 RNA guide
uucauuaacaggcacccuaca

SEQ ID NO: 80830 - RNA, 21 nt, Artificial Sequence
  LRRK2 RNA guide
uuccauucauuaacaggcacc

SEQ ID NO: 80831 - RNA, 21 nt, Artificial Sequence
  LRRK2 RNA guide
uucuuguagggugccuguuaa

SEQ ID NO: 80832 - RNA, 21 nt, Artificial Sequence
  LRRK2 RNA guide
uuguagggugccuguuaauga

SEQ ID NO: 80833 - RNA, 21 nt, Artificial Sequence
  LRRK2 RNA guide
uuucuuguagggugccuguua

SEQ ID NO: 80834 - RNA, 22 nt, Artificial Sequence
  LRRK2 RNA guide
aaauuccauucauuaacaggca

SEQ ID NO: 80835 - RNA, 22 nt, Artificial Sequence
  LRRK2 RNA guide
aaauuucuuguagggugccugu

SEQ ID NO: 80836 - RNA, 22 nt, Artificial Sequence
  LRRK2 RNA guide
aacaggcacccuacaagaaauu

SEQ ID NO: 80837 - RNA, 22 nt, Artificial Sequence
  LRRK2 RNA guide
aauuccauucauuaacaggcac

SEQ ID NO: 80838 - RNA, 22 nt, Artificial Sequence
  LRRK2 RNA guide
aauuucuuguagggugccuguu

SEQ ID NO: 80839 - RNA, 22 nt, Artificial Sequence
  LRRK2 RNA guide
acaggcacccuacaagaaauuu

SEQ ID NO: 80840 - RNA, 22 nt, Artificial Sequence
  LRRK2 RNA guide
agaaauuccauucauuaacagg

SEQ ID NO: 80841 - RNA, 22 nt, Artificial Sequence
  LRRK2 RNA guide
agggugccuguuaaugaaugga

SEQ ID NO: 80842 - RNA, 22 nt, Artificial Sequence
  LRRK2 RNA guide
auuaacaggcacccuacaagaa

SEQ ID NO: 80843 - RNA, 22 nt, Artificial Sequence
  LRRK2 RNA guide
auucauuaacaggcacccuaca

SEQ ID NO: 80844 - RNA, 22 nt, Artificial Sequence
  LRRK2 RNA guide
auuccauucauuaacaggcacc

SEQ ID NO: 80845 - RNA, 22 nt, Artificial Sequence
  LRRK2 RNA guide
auuucuuguagggugccuguua

SEQ ID NO: 80846 - RNA, 22 nt, Artificial Sequence
  LRRK2 RNA guide
caggcacccuacaagaaauuua

SEQ ID NO: 80847 - RNA, 22 nt, Artificial Sequence
  LRRK2 RNA guide
cauuaacaggcacccuacaaga

SEQ ID NO: 80848 - RNA, 22 nt, Artificial Sequence
  LRRK2 RNA guide
cauucauuaacaggcacccuac

SEQ ID NO: 80849 - RNA, 22 nt, Artificial Sequence
  LRRK2 RNA guide
ccauucauuaacaggcacccua

SEQ ID NO: 80850 - RNA, 22 nt, Artificial Sequence
  LRRK2 RNA guide
ccuguuaaugaauggaauuucu

SEQ ID NO: 80851 - RNA, 22 nt, Artificial Sequence
  LRRK2 RNA guide
cuuguagggugccuguuaauga

SEQ ID NO: 80852 - RNA, 22 nt, Artificial Sequence
  LRRK2 RNA guide
gaaauuccauucauuaacaggc

SEQ ID NO: 80853 - RNA, 22 nt, Artificial Sequence
  LRRK2 RNA guide
gccuguuaaugaauggaauuuc

SEQ ID NO: 80854 - RNA, 22 nt, Artificial Sequence
  LRRK2 RNA guide
gggugccuguuaaugaauggaa

SEQ ID NO: 80855 - RNA, 22 nt, Artificial Sequence
  LRRK2 RNA guide
ggugccuguuaaugaauggaau

SEQ ID NO: 80856 - RNA, 22 nt, Artificial Sequence
  LRRK2 RNA guide
guagggugccuguuaaugaaug

SEQ ID NO: 80857 - RNA, 22 nt, Artificial Sequence
  LRRK2 RNA guide
gugccuguuaaugaauggaauu

SEQ ID NO: 80858 - RNA, 22 nt, Artificial Sequence
  LRRK2 RNA guide
uaaauuucuuguagggugccug

SEQ ID NO: 80859 - RNA, 22 nt, Artificial Sequence
  LRRK2 RNA guide
uaacaggcacccuacaagaaau

SEQ ID NO: 80860 - RNA, 22 nt, Artificial Sequence
  LRRK2 RNA guide
uagggugccuguuaaugaaugg

SEQ ID NO: 80861 - RNA, 22 nt, Artificial Sequence
  LRRK2 RNA guide
ucauuaacaggcacccuacaag

SEQ ID NO: 80862 - RNA, 22 nt, Artificial Sequence
  LRRK2 RNA guide
uccauucauuaacaggcacccu

SEQ ID NO: 80863 - RNA, 22 nt, Artificial Sequence
  LRRK2 RNA guide
ucuuguagggugccuguuaaug

SEQ ID NO: 80864 - RNA, 22 nt, Artificial Sequence
  LRRK2 RNA guide
ugccuguuaaugaauggaauuu

SEQ ID NO: 80865 - RNA, 22 nt, Artificial Sequence
  LRRK2 RNA guide
uguagggugccuguuaaugaau

SEQ ID NO: 80866 - RNA, 22 nt, Artificial Sequence
  LRRK2 RNA guide
uuaaauuucuuguagggugccu

SEQ ID NO: 80867 - RNA, 22 nt, Artificial Sequence
  LRRK2 RNA guide
uuaacaggcacccuacaagaaa

SEQ ID NO: 80868 - RNA, 22 nt, Artificial Sequence
  LRRK2 RNA guide
uucauuaacaggcacccuacaa

SEQ ID NO: 80869 - RNA, 22 nt, Artificial Sequence
  LRRK2 RNA guide
uuccauucauuaacaggcaccc

SEQ ID NO: 80870 - RNA, 22 nt, Artificial Sequence
  LRRK2 RNA guide
uucuuguagggugccuguuaau

SEQ ID NO: 80871 - RNA, 22 nt, Artificial Sequence
  LRRK2 RNA guide
uuguagggugccuguuaaugaa

SEQ ID NO: 80872 - RNA, 22 nt, Artificial Sequence
  LRRK2 RNA guide
uuucuuguagggugccuguuaa

SEQ ID NO: 80873 - RNA, 20 nt, Artificial Sequence
  LRRK2 RNA guide
aaaaguuugcuuuugacaag

SEQ ID NO: 80874 - RNA, 20 nt, Artificial Sequence
  LRRK2 RNA guide
aaaguuugcuuuugacaaga

SEQ ID NO: 80875 - RNA, 20 nt, Artificial Sequence
  LRRK2 RNA guide
aaaucuugucaaaagcaaac

SEQ ID NO: 80876 - RNA, 20 nt, Artificial Sequence
  LRRK2 RNA guide
aaguuugcuuuugacaagau

SEQ ID NO: 80877 - RNA, 20 nt, Artificial Sequence
  LRRK2 RNA guide
aaucuugucaaaagcaaacu

SEQ ID NO: 80878 - RNA, 20 nt, Artificial Sequence
  LRRK2 RNA guide
aaugucaauuccaauggauu

SEQ ID NO: 80879 - RNA, 20 nt, Artificial Sequence
  LRRK2 RNA guide
acaagauuuuaauccauugg

SEQ ID NO: 80880 - RNA, 20 nt, Artificial Sequence
  LRRK2 RNA guide
aguuugcuuuugacaagauu

SEQ ID NO: 80881 - RNA, 20 nt, Artificial Sequence
  LRRK2 RNA guide
aucuugucaaaagcaaacuu

SEQ ID NO: 80882 - RNA, 20 nt, Artificial Sequence
  LRRK2 RNA guide
augucaauuccaauggauua

SEQ ID NO: 80883 - RNA, 20 nt, Artificial Sequence
  LRRK2 RNA guide
caagauuuuaauccauugga

SEQ ID NO: 80884 - RNA, 20 nt, Artificial Sequence
  LRRK2 RNA guide
caauggauuaaaaucuuguc

SEQ ID NO: 80885 - RNA, 20 nt, Artificial Sequence
  LRRK2 RNA guide
ccaauggauuaaaaucuugu

SEQ ID NO: 80886 - RNA, 20 nt, Artificial Sequence
  LRRK2 RNA guide
gacaagauuuuaauccauug

SEQ ID NO: 80887 - RNA, 20 nt, Artificial Sequence
  LRRK2 RNA guide
gucaauuccaauggauuaaa

SEQ ID NO: 80888 - RNA, 20 nt, Artificial Sequence
  LRRK2 RNA guide
guuugcuuuugacaagauuu

SEQ ID NO: 80889 - RNA, 20 nt, Artificial Sequence
  LRRK2 RNA guide
uccaauggauuaaaaucuug

SEQ ID NO: 80890 - RNA, 20 nt, Artificial Sequence
  LRRK2 RNA guide
ugucaauuccaauggauuaa

SEQ ID NO: 80891 - RNA, 21 nt, Artificial Sequence
  LRRK2 RNA guide
ccaauggauuaaaaucuuguc

SEQ ID NO: 80892 - RNA, 21 nt, Artificial Sequence
  LRRK2 RNA guide
gacaagauuuuaauccauugg

SEQ ID NO: 80893 - RNA, 22 nt, Artificial Sequence
  LRRK2 RNA guide
ccaauggauuaaaaucuuguca

SEQ ID NO: 80894 - RNA, 22 nt, Artificial Sequence
  LRRK2 RNA guide
gacaagauuuuaauccauugga

SEQ ID NO: 80895 - RNA, 22 nt, Artificial Sequence
  LRRK2 RNA guide
gcuuuugacaagauuuuaaucc

SEQ ID NO: 80896 - RNA, 22 nt, Artificial Sequence
  LRRK2 RNA guide
ggauuaaaaucuugucaaaagc

SEQ ID NO: 80897 - RNA, 22 nt, Artificial Sequence
  LRRK2 RNA guide
uccaauggauuaaaaucuuguc

SEQ ID NO: 80898 - RNA, 22 nt, Artificial Sequence
  LRRK2 RNA guide
ugacaagauuuuaauccauugg

SEQ ID NO: 80899 - RNA, 20 nt, Artificial Sequence
  LRRK2 RNA guide
aaaacuugucaaaagcaaac

SEQ ID NO: 80900 - RNA, 20 nt, Artificial Sequence
  LRRK2 RNA guide
aaacuugucaaaagcaaacu

SEQ ID NO: 80901 - RNA, 20 nt, Artificial Sequence
  LRRK2 RNA guide
aaaguuugcuuuugacaagu

SEQ ID NO: 80902 - RNA, 20 nt, Artificial Sequence
  LRRK2 RNA guide
aacuugucaaaagcaaacuu

SEQ ID NO: 80903 - RNA, 20 nt, Artificial Sequence
  LRRK2 RNA guide
aaguuugcuuuugacaaguu

SEQ ID NO: 80904 - RNA, 20 nt, Artificial Sequence
  LRRK2 RNA guide
acaaguuuuuaauccauugg

SEQ ID NO: 80905 - RNA, 20 nt, Artificial Sequence
  LRRK2 RNA guide
aguuugcuuuugacaaguuu

SEQ ID NO: 80906 - RNA, 20 nt, Artificial Sequence
  LRRK2 RNA guide
caaguuuuuaauccauugga

SEQ ID NO: 80907 - RNA, 20 nt, Artificial Sequence
  LRRK2 RNA guide
caauggauuaaaaacuuguc

SEQ ID NO: 80908 - RNA, 20 nt, Artificial Sequence
  LRRK2 RNA guide
ccaauggauuaaaaacuugu

SEQ ID NO: 80909 - RNA, 20 nt, Artificial Sequence
  LRRK2 RNA guide
gacaaguuuuuaauccauug

SEQ ID NO: 80910 - RNA, 20 nt, Artificial Sequence
  LRRK2 RNA guide
guuugcuuuugacaaguuuu

SEQ ID NO: 80911 - RNA, 20 nt, Artificial Sequence
  LRRK2 RNA guide
uccaauggauuaaaaacuug

SEQ ID NO: 80912 - RNA, 21 nt, Artificial Sequence
  LRRK2 RNA guide
ccaauggauuaaaaacuuguc

SEQ ID NO: 80913 - RNA, 21 nt, Artificial Sequence
  LRRK2 RNA guide
gacaaguuuuuaauccauugg

SEQ ID NO: 80914 - RNA, 22 nt, Artificial Sequence
  LRRK2 RNA guide
ccaauggauuaaaaacuuguca

SEQ ID NO: 80915 - RNA, 22 nt, Artificial Sequence
  LRRK2 RNA guide
gacaaguuuuuaauccauugga

SEQ ID NO: 80916 - RNA, 22 nt, Artificial Sequence
  LRRK2 RNA guide
gcuuuugacaaguuuuuaaucc

SEQ ID NO: 80917 - RNA, 22 nt, Artificial Sequence
  LRRK2 RNA guide
ggauuaaaaacuugucaaaagc

SEQ ID NO: 80918 - RNA, 22 nt, Artificial Sequence
  LRRK2 RNA guide
uccaauggauuaaaaacuuguc

SEQ ID NO: 80919 - RNA, 22 nt, Artificial Sequence
  LRRK2 RNA guide
ugacaaguuuuuaauccauugg

SEQ ID NO: 80920 - RNA, 22 nt, Artificial Sequence
  LRRK2 RNA guide
cugccacugcacuccagcacuc

SEQ ID NO: 80921 - RNA, 20 nt, Artificial Sequence
  LRRK2 RNA guide
accugguuaacuuuuccuuu

SEQ ID NO: 80922 - RNA, 20 nt, Artificial Sequence
  LRRK2 RNA guide
agaccugguuaacuuuuccu

SEQ ID NO: 80923 - RNA, 20 nt, Artificial Sequence
  LRRK2 RNA guide
cagaccugguuaacuuuucc

SEQ ID NO: 80924 - RNA, 20 nt, Artificial Sequence
  LRRK2 RNA guide
ccugguuaacuuuuccuuua

SEQ ID NO: 80925 - RNA, 20 nt, Artificial Sequence
  LRRK2 RNA guide
cugguuaacuuuuccuuuaa

SEQ ID NO: 80926 - RNA, 20 nt, Artificial Sequence
  LRRK2 RNA guide
gaccugguuaacuuuuccuu

SEQ ID NO: 80927 - RNA, 21 nt, Artificial Sequence
  LRRK2 RNA guide
accugguuaacuuuuccuuua

SEQ ID NO: 80928 - RNA, 21 nt, Artificial Sequence
  LRRK2 RNA guide
agaccugguuaacuuuuccuu

SEQ ID NO: 80929 - RNA, 21 nt, Artificial Sequence
  LRRK2 RNA guide
cagaccugguuaacuuuuccu

SEQ ID NO: 80930 - RNA, 21 nt, Artificial Sequence
  LRRK2 RNA guide
ccagaccugguuaacuuuucc

SEQ ID NO: 80931 - RNA, 21 nt, Artificial Sequence
  LRRK2 RNA guide
ccugguuaacuuuuccuuuaa

SEQ ID NO: 80932 - RNA, 21 nt, Artificial Sequence
  LRRK2 RNA guide
gaccugguuaacuuuuccuuu

SEQ ID NO: 80933 - RNA, 21 nt, Artificial Sequence
  LRRK2 RNA guide
gagacccuuucucuacaaaaa

SEQ ID NO: 80934 - RNA, 22 nt, Artificial Sequence
  LRRK2 RNA guide
accagaccugguuaacuuuucc

SEQ ID NO: 80935 - RNA, 22 nt, Artificial Sequence
  LRRK2 RNA guide
accugguuaacuuuuccuuuaa

SEQ ID NO: 80936 - RNA, 22 nt, Artificial Sequence
  LRRK2 RNA guide
agaccugguuaacuuuuccuuu

SEQ ID NO: 80937 - RNA, 22 nt, Artificial Sequence
  LRRK2 RNA guide
auuaaaggaaaaguuaaccagg

SEQ ID NO: 80938 - RNA, 22 nt, Artificial Sequence
  LRRK2 RNA guide
cagaccugguuaacuuuuccuu

SEQ ID NO: 80939 - RNA, 22 nt, Artificial Sequence
  LRRK2 RNA guide
ccagaccugguuaacuuuuccu

SEQ ID NO: 80940 - RNA, 22 nt, Artificial Sequence
  LRRK2 RNA guide
ccugguuaacuuuuccuuuaau

SEQ ID NO: 80941 - RNA, 22 nt, Artificial Sequence
  LRRK2 RNA guide
gaccugguuaacuuuuccuuua

SEQ ID NO: 80942 - RNA, 22 nt, Artificial Sequence
  LRRK2 RNA guide
gagacccuuucucuacaaaaaa

SEQ ID NO: 80943 - RNA, 22 nt, Artificial Sequence
  LRRK2 RNA guide
ugagacccuuucucuacaaaaa

SEQ ID NO: 80944 - RNA, 20 nt, Artificial Sequence
  LRRK2 RNA guide
aacguaaaucuggucuauga

SEQ ID NO: 80945 - RNA, 20 nt, Artificial Sequence
  LRRK2 RNA guide
aacugcccaguuaacguaaa

SEQ ID NO: 80946 - RNA, 20 nt, Artificial Sequence
  LRRK2 RNA guide
aauucauagaccagauuuac

SEQ ID NO: 80947 - RNA, 20 nt, Artificial Sequence
  LRRK2 RNA guide
acaauucauagaccagauuu

SEQ ID NO: 80948 - RNA, 20 nt, Artificial Sequence
  LRRK2 RNA guide
accagauuuacguuaacugg

SEQ ID NO: 80949 - RNA, 20 nt, Artificial Sequence
  LRRK2 RNA guide
acguaaaucuggucuaugaa

SEQ ID NO: 80950 - RNA, 20 nt, Artificial Sequence
  LRRK2 RNA guide
acguuaacugggcaguuaaa

SEQ ID NO: 80951 - RNA, 20 nt, Artificial Sequence
  LRRK2 RNA guide
acugcccaguuaacguaaau

SEQ ID NO: 80952 - RNA, 20 nt, Artificial Sequence
  LRRK2 RNA guide
agaccagauuuacguuaacu

SEQ ID NO: 80953 - RNA, 20 nt, Artificial Sequence
  LRRK2 RNA guide
agauuuacguuaacugggca

SEQ ID NO: 80954 - RNA, 20 nt, Artificial Sequence
  LRRK2 RNA guide
aguuaacguaaaucuggucu

SEQ ID NO: 80955 - RNA, 20 nt, Artificial Sequence
  LRRK2 RNA guide
auacaauucauagaccagau

SEQ ID NO: 80956 - RNA, 20 nt, Artificial Sequence
  LRRK2 RNA guide
auagaccagauuuacguuaa

SEQ ID NO: 80957 - RNA, 20 nt, Artificial Sequence
  LRRK2 RNA guide
auucauagaccagauuuacg

SEQ ID NO: 80958 - RNA, 20 nt, Artificial Sequence
  LRRK2 RNA guide
auuuacguuaacugggcagu

SEQ ID NO: 80959 - RNA, 20 nt, Artificial Sequence
  LRRK2 RNA guide
caauucauagaccagauuua

SEQ ID NO: 80960 - RNA, 20 nt, Artificial Sequence
  LRRK2 RNA guide
cagauuuacguuaacugggc

SEQ ID NO: 80961 - RNA, 20 nt, Artificial Sequence
  LRRK2 RNA guide
caguuaacguaaaucugguc

SEQ ID NO: 80962 - RNA, 20 nt, Artificial Sequence
  LRRK2 RNA guide
cauagaccagauuuacguua

SEQ ID NO: 80963 - RNA, 20 nt, Artificial Sequence
  LRRK2 RNA guide
ccagauuuacguuaacuggg

SEQ ID NO: 80964 - RNA, 20 nt, Artificial Sequence
  LRRK2 RNA guide
ccaguuaacguaaaucuggu

SEQ ID NO: 80965 - RNA, 20 nt, Artificial Sequence
  LRRK2 RNA guide
cccaguuaacguaaaucugg

SEQ ID NO: 80966 - RNA, 20 nt, Artificial Sequence
  LRRK2 RNA guide
cguuaacugggcaguuaaaa

SEQ ID NO: 80967 - RNA, 20 nt, Artificial Sequence
  LRRK2 RNA guide
cugcccaguuaacguaaauc

SEQ ID NO: 80968 - RNA, 20 nt, Artificial Sequence
  LRRK2 RNA guide
gaccagauuuacguuaacug

SEQ ID NO: 80969 - RNA, 20 nt, Artificial Sequence
  LRRK2 RNA guide
gauuuacguuaacugggcag

SEQ ID NO: 80970 - RNA, 20 nt, Artificial Sequence
  LRRK2 RNA guide
gcccaguuaacguaaaucug

SEQ ID NO: 80971 - RNA, 20 nt, Artificial Sequence
  LRRK2 RNA guide
guuaacguaaaucuggucua

SEQ ID NO: 80972 - RNA, 20 nt, Artificial Sequence
  LRRK2 RNA guide
guuuuuuaacugcccaguua

SEQ ID NO: 80973 - RNA, 20 nt, Artificial Sequence
  LRRK2 RNA guide
uaacguaaaucuggucuaug

SEQ ID NO: 80974 - RNA, 20 nt, Artificial Sequence
  LRRK2 RNA guide
uaacugcccaguuaacguaa

SEQ ID NO: 80975 - RNA, 20 nt, Artificial Sequence
  LRRK2 RNA guide
uacaauucauagaccagauu

SEQ ID NO: 80976 - RNA, 20 nt, Artificial Sequence
  LRRK2 RNA guide
uacguuaacugggcaguuaa

SEQ ID NO: 80977 - RNA, 20 nt, Artificial Sequence
  LRRK2 RNA guide
uagaccagauuuacguuaac

SEQ ID NO: 80978 - RNA, 20 nt, Artificial Sequence
  LRRK2 RNA guide
ucauagaccagauuuacguu

SEQ ID NO: 80979 - RNA, 20 nt, Artificial Sequence
  LRRK2 RNA guide
ugcccaguuaacguaaaucu

SEQ ID NO: 80980 - RNA, 20 nt, Artificial Sequence
  LRRK2 RNA guide
uguuuuuuaacugcccaguu

SEQ ID NO: 80981 - RNA, 20 nt, Artificial Sequence
  LRRK2 RNA guide
uuaacguaaaucuggucuau

SEQ ID NO: 80982 - RNA, 20 nt, Artificial Sequence
  LRRK2 RNA guide
uuaacugcccaguuaacgua

SEQ ID NO: 80983 - RNA, 20 nt, Artificial Sequence
  LRRK2 RNA guide
uuacguuaacugggcaguua

SEQ ID NO: 80984 - RNA, 20 nt, Artificial Sequence
  LRRK2 RNA guide
uucauagaccagauuuacgu

SEQ ID NO: 80985 - RNA, 20 nt, Artificial Sequence
  LRRK2 RNA guide
uuguuuuuuaacugcccagu

SEQ ID NO: 80986 - RNA, 20 nt, Artificial Sequence
  LRRK2 RNA guide
uuuaacugcccaguuaacgu

SEQ ID NO: 80987 - RNA, 20 nt, Artificial Sequence
  LRRK2 RNA guide
uuuacguuaacugggcaguu

SEQ ID NO: 80988 - RNA, 20 nt, Artificial Sequence
  LRRK2 RNA guide
uuuguuuuuuaacugcccag

SEQ ID NO: 80989 - RNA, 20 nt, Artificial Sequence
  LRRK2 RNA guide
uuuuaacugcccaguuaacg

SEQ ID NO: 80990 - RNA, 20 nt, Artificial Sequence
  LRRK2 RNA guide
uuuuuaacugcccaguuaac

SEQ ID NO: 80991 - RNA, 20 nt, Artificial Sequence
  LRRK2 RNA guide
uuuuuuaacugcccaguuaa

SEQ ID NO: 80992 - RNA, 21 nt, Artificial Sequence
  LRRK2 RNA guide
aacguaaaucuggucuaugaa

SEQ ID NO: 80993 - RNA, 21 nt, Artificial Sequence
  LRRK2 RNA guide
aacugcccaguuaacguaaau

SEQ ID NO: 80994 - RNA, 21 nt, Artificial Sequence
  LRRK2 RNA guide
aauucauagaccagauuuacg

SEQ ID NO: 80995 - RNA, 21 nt, Artificial Sequence
  LRRK2 RNA guide
accagauuuacguuaacuggg

SEQ ID NO: 80996 - RNA, 21 nt, Artificial Sequence
  LRRK2 RNA guide
acguaaaucuggucuaugaau

SEQ ID NO: 80997 - RNA, 21 nt, Artificial Sequence
  LRRK2 RNA guide
acguuaacugggcaguuaaaa

SEQ ID NO: 80998 - RNA, 21 nt, Artificial Sequence
  LRRK2 RNA guide
acugcccaguuaacguaaauc

SEQ ID NO: 80999 - RNA, 21 nt, Artificial Sequence
  LRRK2 RNA guide
agaccagauuuacguuaacug

SEQ ID NO: 81000 - RNA, 21 nt, Artificial Sequence
  LRRK2 RNA guide
agauuuacguuaacugggcag

SEQ ID NO: 81001 - RNA, 21 nt, Artificial Sequence
  LRRK2 RNA guide
aguuaacguaaaucuggucua

SEQ ID NO: 81002 - RNA, 21 nt, Artificial Sequence
  LRRK2 RNA guide
auagaccagauuuacguuaac

SEQ ID NO: 81003 - RNA, 21 nt, Artificial Sequence
  LRRK2 RNA guide
auucauagaccagauuuacgu

SEQ ID NO: 81004 - RNA, 21 nt, Artificial Sequence
  LRRK2 RNA guide
auuuacguuaacugggcaguu

SEQ ID NO: 81005 - RNA, 21 nt, Artificial Sequence
  LRRK2 RNA guide
auuuguuuuuuaacugcccag

SEQ ID NO: 81006 - RNA, 21 nt, Artificial Sequence
  LRRK2 RNA guide
caauucauagaccagauuuac

SEQ ID NO: 81007 - RNA, 21 nt, Artificial Sequence
  LRRK2 RNA guide
cagauuuacguuaacugggca

SEQ ID NO: 81008 - RNA, 21 nt, Artificial Sequence
  LRRK2 RNA guide
caguuaacguaaaucuggucu

SEQ ID NO: 81009 - RNA, 21 nt, Artificial Sequence
  LRRK2 RNA guide
cauagaccagauuuacguuaa

SEQ ID NO: 81010 - RNA, 21 nt, Artificial Sequence
  LRRK2 RNA guide
ccagauuuacguuaacugggc

SEQ ID NO: 81011 - RNA, 21 nt, Artificial Sequence
  LRRK2 RNA guide
ccaguuaacguaaaucugguc

SEQ ID NO: 81012 - RNA, 21 nt, Artificial Sequence
  LRRK2 RNA guide
cccaguuaacguaaaucuggu

SEQ ID NO: 81013 - RNA, 21 nt, Artificial Sequence
  LRRK2 RNA guide
cguuaacugggcaguuaaaaa

SEQ ID NO: 81014 - RNA, 21 nt, Artificial Sequence
  LRRK2 RNA guide
cugcccaguuaacguaaaucu

SEQ ID NO: 81015 - RNA, 21 nt, Artificial Sequence
  LRRK2 RNA guide
gaccagauuuacguuaacugg

SEQ ID NO: 81016 - RNA, 21 nt, Artificial Sequence
  LRRK2 RNA guide
gauuuacguuaacugggcagu

SEQ ID NO: 81017 - RNA, 21 nt, Artificial Sequence
  LRRK2 RNA guide
gcccaguuaacguaaaucugg

SEQ ID NO: 81018 - RNA, 21 nt, Artificial Sequence
  LRRK2 RNA guide
guuaacguaaaucuggucuau

SEQ ID NO: 81019 - RNA, 21 nt, Artificial Sequence
  LRRK2 RNA guide
guuuuuuaacugcccaguuaa

SEQ ID NO: 81020 - RNA, 21 nt, Artificial Sequence
  LRRK2 RNA guide
uaacguaaaucuggucuauga

SEQ ID NO: 81021 - RNA, 21 nt, Artificial Sequence
  LRRK2 RNA guide
uaacugcccaguuaacguaaa

SEQ ID NO: 81022 - RNA, 21 nt, Artificial Sequence
  LRRK2 RNA guide
uacguuaacugggcaguuaaa

SEQ ID NO: 81023 - RNA, 21 nt, Artificial Sequence
  LRRK2 RNA guide
uagaccagauuuacguuaacu

SEQ ID NO: 81024 - RNA, 21 nt, Artificial Sequence
  LRRK2 RNA guide
ucauagaccagauuuacguua

SEQ ID NO: 81025 - RNA, 21 nt, Artificial Sequence
  LRRK2 RNA guide
ugcccaguuaacguaaaucug

SEQ ID NO: 81026 - RNA, 21 nt, Artificial Sequence
  LRRK2 RNA guide
uguuuuuuaacugcccaguua

SEQ ID NO: 81027 - RNA, 21 nt, Artificial Sequence
  LRRK2 RNA guide
uuaacguaaaucuggucuaug

SEQ ID NO: 81028 - RNA, 21 nt, Artificial Sequence
  LRRK2 RNA guide
uuaacugcccaguuaacguaa

SEQ ID NO: 81029 - RNA, 21 nt, Artificial Sequence
  LRRK2 RNA guide
uuacguuaacugggcaguuaa

SEQ ID NO: 81030 - RNA, 21 nt, Artificial Sequence
  LRRK2 RNA guide
uucauagaccagauuuacguu

SEQ ID NO: 81031 - RNA, 21 nt, Artificial Sequence
  LRRK2 RNA guide
uuguuuuuuaacugcccaguu

SEQ ID NO: 81032 - RNA, 21 nt, Artificial Sequence
  LRRK2 RNA guide
uuuaacugcccaguuaacgua

SEQ ID NO: 81033 - RNA, 21 nt, Artificial Sequence
  LRRK2 RNA guide
uuuacguuaacugggcaguua

SEQ ID NO: 81034 - RNA, 21 nt, Artificial Sequence
  LRRK2 RNA guide
uuuguuuuuuaacugcccagu

SEQ ID NO: 81035 - RNA, 21 nt, Artificial Sequence
  LRRK2 RNA guide
uuuuaacugcccaguuaacgu

SEQ ID NO: 81036 - RNA, 21 nt, Artificial Sequence
  LRRK2 RNA guide
uuuuuaacugcccaguuaacg

SEQ ID NO: 81037 - RNA, 21 nt, Artificial Sequence
  LRRK2 RNA guide
uuuuuuaacugcccaguuaac

SEQ ID NO: 81038 - RNA, 22 nt, Artificial Sequence
  LRRK2 RNA guide
aacguaaaucuggucuaugaau

SEQ ID NO: 81039 - RNA, 22 nt, Artificial Sequence
  LRRK2 RNA guide
aacugcccaguuaacguaaauc

SEQ ID NO: 81040 - RNA, 22 nt, Artificial Sequence
  LRRK2 RNA guide
aauucauagaccagauuuacgu

SEQ ID NO: 81041 - RNA, 22 nt, Artificial Sequence
  LRRK2 RNA guide
acaauucauagaccagauuuac

SEQ ID NO: 81042 - RNA, 22 nt, Artificial Sequence
  LRRK2 RNA guide
accagauuuacguuaacugggc

SEQ ID NO: 81043 - RNA, 22 nt, Artificial Sequence
  LRRK2 RNA guide
acguaaaucuggucuaugaauu

SEQ ID NO: 81044 - RNA, 22 nt, Artificial Sequence
  LRRK2 RNA guide
acguuaacugggcaguuaaaaa

SEQ ID NO: 81045 - RNA, 22 nt, Artificial Sequence
  LRRK2 RNA guide
acugcccaguuaacguaaaucu

SEQ ID NO: 81046 - RNA, 22 nt, Artificial Sequence
  LRRK2 RNA guide
agaccagauuuacguuaacugg

SEQ ID NO: 81047 - RNA, 22 nt, Artificial Sequence
  LRRK2 RNA guide
agauuuacguuaacugggcagu

SEQ ID NO: 81048 - RNA, 22 nt, Artificial Sequence
  LRRK2 RNA guide
aguuaacguaaaucuggucuau

SEQ ID NO: 81049 - RNA, 22 nt, Artificial Sequence
  LRRK2 RNA guide
auagaccagauuuacguuaacu

SEQ ID NO: 81050 - RNA, 22 nt, Artificial Sequence
  LRRK2 RNA guide
auucauagaccagauuuacguu

SEQ ID NO: 81051 - RNA, 22 nt, Artificial Sequence
  LRRK2 RNA guide
auuuacguuaacugggcaguua

SEQ ID NO: 81052 - RNA, 22 nt, Artificial Sequence
  LRRK2 RNA guide
auuuguuuuuuaacugcccagu

SEQ ID NO: 81053 - RNA, 22 nt, Artificial Sequence
  LRRK2 RNA guide
caauacaauucauagaccagau

SEQ ID NO: 81054 - RNA, 22 nt, Artificial Sequence
  LRRK2 RNA guide
caauucauagaccagauuuacg

SEQ ID NO: 81055 - RNA, 22 nt, Artificial Sequence
  LRRK2 RNA guide
cagauuuacguuaacugggcag

SEQ ID NO: 81056 - RNA, 22 nt, Artificial Sequence
  LRRK2 RNA guide
caguuaacguaaaucuggucua

SEQ ID NO: 81057 - RNA, 22 nt, Artificial Sequence
  LRRK2 RNA guide
cauagaccagauuuacguuaac

SEQ ID NO: 81058 - RNA, 22 nt, Artificial Sequence
  LRRK2 RNA guide
ccagauuuacguuaacugggca

SEQ ID NO: 81059 - RNA, 22 nt, Artificial Sequence
  LRRK2 RNA guide
ccaguuaacguaaaucuggucu

SEQ ID NO: 81060 - RNA, 22 nt, Artificial Sequence
  LRRK2 RNA guide
cccaguuaacguaaaucugguc

SEQ ID NO: 81061 - RNA, 22 nt, Artificial Sequence
  LRRK2 RNA guide
cguuaacugggcaguuaaaaaa

SEQ ID NO: 81062 - RNA, 22 nt, Artificial Sequence
  LRRK2 RNA guide
cugcccaguuaacguaaaucug

SEQ ID NO: 81063 - RNA, 22 nt, Artificial Sequence
  LRRK2 RNA guide
gaccagauuuacguuaacuggg

SEQ ID NO: 81064 - RNA, 22 nt, Artificial Sequence
  LRRK2 RNA guide
gauuuacguuaacugggcaguu

SEQ ID NO: 81065 - RNA, 22 nt, Artificial Sequence
  LRRK2 RNA guide
gauuuguuuuuuaacugcccag

SEQ ID NO: 81066 - RNA, 22 nt, Artificial Sequence
  LRRK2 RNA guide
gcccaguuaacguaaaucuggu

SEQ ID NO: 81067 - RNA, 22 nt, Artificial Sequence
  LRRK2 RNA guide
guuaacguaaaucuggucuaug

SEQ ID NO: 81068 - RNA, 22 nt, Artificial Sequence
  LRRK2 RNA guide
guuuuuuaacugcccaguuaac

SEQ ID NO: 81069 - RNA, 22 nt, Artificial Sequence
  LRRK2 RNA guide
uaacguaaaucuggucuaugaa

SEQ ID NO: 81070 - RNA, 22 nt, Artificial Sequence
  LRRK2 RNA guide
uaacugcccaguuaacguaaau

SEQ ID NO: 81071 - RNA, 22 nt, Artificial Sequence
  LRRK2 RNA guide
uacguuaacugggcaguuaaaa

SEQ ID NO: 81072 - RNA, 22 nt, Artificial Sequence
  LRRK2 RNA guide
uagaccagauuuacguuaacug

SEQ ID NO: 81073 - RNA, 22 nt, Artificial Sequence
  LRRK2 RNA guide
ucauagaccagauuuacguuaa

SEQ ID NO: 81074 - RNA, 22 nt, Artificial Sequence
  LRRK2 RNA guide
ugcccaguuaacguaaaucugg

SEQ ID NO: 81075 - RNA, 22 nt, Artificial Sequence
  LRRK2 RNA guide
uguuuuuuaacugcccaguuaa

SEQ ID NO: 81076 - RNA, 22 nt, Artificial Sequence
  LRRK2 RNA guide
uuaacguaaaucuggucuauga

SEQ ID NO: 81077 - RNA, 22 nt, Artificial Sequence
  LRRK2 RNA guide
uuaacugcccaguuaacguaaa

SEQ ID NO: 81078 - RNA, 22 nt, Artificial Sequence
  LRRK2 RNA guide
uuacguuaacugggcaguuaaa

SEQ ID NO: 81079 - RNA, 22 nt, Artificial Sequence
  LRRK2 RNA guide
uucauagaccagauuuacguua

SEQ ID NO: 81080 - RNA, 22 nt, Artificial Sequence
  LRRK2 RNA guide
uuguuuuuuaacugcccaguua

SEQ ID NO: 81081 - RNA, 22 nt, Artificial Sequence
  LRRK2 RNA guide
uuuaacugcccaguuaacguaa

SEQ ID NO: 81082 - RNA, 22 nt, Artificial Sequence
  LRRK2 RNA guide
uuuacguuaacugggcaguuaa

SEQ ID NO: 81083 - RNA, 22 nt, Artificial Sequence
  LRRK2 RNA guide
uuuguuuuuuaacugcccaguu

SEQ ID NO: 81084 - RNA, 22 nt, Artificial Sequence
  LRRK2 RNA guide
uuuuaacugcccaguuaacgua

SEQ ID NO: 81085 - RNA, 22 nt, Artificial Sequence
  LRRK2 RNA guide
uuuuuaacugcccaguuaacgu

SEQ ID NO: 81086 - RNA, 22 nt, Artificial Sequence
  LRRK2 RNA guide
uuuuuuaacugcccaguuaacg

SEQ ID NO: 81087 - RNA, 20 nt, Artificial Sequence
  LRRK2 RNA guide
aacugcccaguuaauguaaa

SEQ ID NO: 81088 - RNA, 20 nt, Artificial Sequence
  LRRK2 RNA guide
aauguaaaucuggucuauga

SEQ ID NO: 81089 - RNA, 20 nt, Artificial Sequence
  LRRK2 RNA guide
acauuaacugggcaguuaaa

SEQ ID NO: 81090 - RNA, 20 nt, Artificial Sequence
  LRRK2 RNA guide
accagauuuacauuaacugg

SEQ ID NO: 81091 - RNA, 20 nt, Artificial Sequence
  LRRK2 RNA guide
acugcccaguuaauguaaau

SEQ ID NO: 81092 - RNA, 20 nt, Artificial Sequence
  LRRK2 RNA guide
agaccagauuuacauuaacu

SEQ ID NO: 81093 - RNA, 20 nt, Artificial Sequence
  LRRK2 RNA guide
agauuuacauuaacugggca

SEQ ID NO: 81094 - RNA, 20 nt, Artificial Sequence
  LRRK2 RNA guide
aguuaauguaaaucuggucu

SEQ ID NO: 81095 - RNA, 20 nt, Artificial Sequence
  LRRK2 RNA guide
auguaaaucuggucuaugaa

SEQ ID NO: 81096 - RNA, 20 nt, Artificial Sequence
  LRRK2 RNA guide
auucauagaccagauuuaca

SEQ ID NO: 81097 - RNA, 20 nt, Artificial Sequence
  LRRK2 RNA guide
auuuacauuaacugggcagu

SEQ ID NO: 81098 - RNA, 20 nt, Artificial Sequence
  LRRK2 RNA guide
cagauuuacauuaacugggc

SEQ ID NO: 81099 - RNA, 20 nt, Artificial Sequence
  LRRK2 RNA guide
caguuaauguaaaucugguc

SEQ ID NO: 81100 - RNA, 20 nt, Artificial Sequence
  LRRK2 RNA guide
cauagaccagauuuacauua

SEQ ID NO: 81101 - RNA, 20 nt, Artificial Sequence
  LRRK2 RNA guide
cauuaacugggcaguuaaaa

SEQ ID NO: 81102 - RNA, 20 nt, Artificial Sequence
  LRRK2 RNA guide
ccagauuuacauuaacuggg

SEQ ID NO: 81103 - RNA, 20 nt, Artificial Sequence
  LRRK2 RNA guide
ccaguuaauguaaaucuggu

SEQ ID NO: 81104 - RNA, 20 nt, Artificial Sequence
  LRRK2 RNA guide
cccaguuaauguaaaucugg

SEQ ID NO: 81105 - RNA, 20 nt, Artificial Sequence
  LRRK2 RNA guide
cugcccaguuaauguaaauc

SEQ ID NO: 81106 - RNA, 20 nt, Artificial Sequence
  LRRK2 RNA guide
gaccagauuuacauuaacug

SEQ ID NO: 81107 - RNA, 20 nt, Artificial Sequence
  LRRK2 RNA guide
gauuuacauuaacugggcag

SEQ ID NO: 81108 - RNA, 20 nt, Artificial Sequence
  LRRK2 RNA guide
gcccaguuaauguaaaucug

SEQ ID NO: 81109 - RNA, 20 nt, Artificial Sequence
  LRRK2 RNA guide
guuaauguaaaucuggucua

SEQ ID NO: 81110 - RNA, 20 nt, Artificial Sequence
  LRRK2 RNA guide
uaacugcccaguuaauguaa

SEQ ID NO: 81111 - RNA, 20 nt, Artificial Sequence
  LRRK2 RNA guide
uaauguaaaucuggucuaug

SEQ ID NO: 81112 - RNA, 20 nt, Artificial Sequence
  LRRK2 RNA guide
uacauuaacugggcaguuaa

SEQ ID NO: 81113 - RNA, 20 nt, Artificial Sequence
  LRRK2 RNA guide
uagaccagauuuacauuaac

SEQ ID NO: 81114 - RNA, 20 nt, Artificial Sequence
  LRRK2 RNA guide
ucauagaccagauuuacauu

SEQ ID NO: 81115 - RNA, 20 nt, Artificial Sequence
  LRRK2 RNA guide
ugcccaguuaauguaaaucu

SEQ ID NO: 81116 - RNA, 20 nt, Artificial Sequence
  LRRK2 RNA guide
uuaacugcccaguuaaugua

SEQ ID NO: 81117 - RNA, 20 nt, Artificial Sequence
  LRRK2 RNA guide
uuacauuaacugggcaguua

SEQ ID NO: 81118 - RNA, 20 nt, Artificial Sequence
  LRRK2 RNA guide
uucauagaccagauuuacau

SEQ ID NO: 81119 - RNA, 20 nt, Artificial Sequence
  LRRK2 RNA guide
uuuaacugcccaguuaaugu

SEQ ID NO: 81120 - RNA, 20 nt, Artificial Sequence
  LRRK2 RNA guide
uuuacauuaacugggcaguu

SEQ ID NO: 81121 - RNA, 20 nt, Artificial Sequence
  LRRK2 RNA guide
uuuuaacugcccaguuaaug

SEQ ID NO: 81122 - RNA, 20 nt, Artificial Sequence
  LRRK2 RNA guide
uuuuuaacugcccaguuaau

SEQ ID NO: 81123 - RNA, 21 nt, Artificial Sequence
  LRRK2 RNA guide
aacugcccaguuaauguaaau

SEQ ID NO: 81124 - RNA, 21 nt, Artificial Sequence
  LRRK2 RNA guide
acauuaacugggcaguuaaaa

SEQ ID NO: 81125 - RNA, 21 nt, Artificial Sequence
  LRRK2 RNA guide
accagauuuacauuaacuggg

SEQ ID NO: 81126 - RNA, 21 nt, Artificial Sequence
  LRRK2 RNA guide
acugcccaguuaauguaaauc

SEQ ID NO: 81127 - RNA, 21 nt, Artificial Sequence
  LRRK2 RNA guide
agaccagauuuacauuaacug

SEQ ID NO: 81128 - RNA, 21 nt, Artificial Sequence
  LRRK2 RNA guide
agauuuacauuaacugggcag

SEQ ID NO: 81129 - RNA, 21 nt, Artificial Sequence
  LRRK2 RNA guide
auuuacauuaacugggcaguu

SEQ ID NO: 81130 - RNA, 21 nt, Artificial Sequence
  LRRK2 RNA guide
cagauuuacauuaacugggca

SEQ ID NO: 81131 - RNA, 21 nt, Artificial Sequence
  LRRK2 RNA guide
caguuaauguaaaucuggucu

SEQ ID NO: 81132 - RNA, 21 nt, Artificial Sequence
  LRRK2 RNA guide
cauuaacugggcaguuaaaaa

SEQ ID NO: 81133 - RNA, 21 nt, Artificial Sequence
  LRRK2 RNA guide
ccagauuuacauuaacugggc

SEQ ID NO: 81134 - RNA, 21 nt, Artificial Sequence
  LRRK2 RNA guide
ccaguuaauguaaaucugguc

SEQ ID NO: 81135 - RNA, 21 nt, Artificial Sequence
  LRRK2 RNA guide
cccaguuaauguaaaucuggu

SEQ ID NO: 81136 - RNA, 21 nt, Artificial Sequence
  LRRK2 RNA guide
cugcccaguuaauguaaaucu

SEQ ID NO: 81137 - RNA, 21 nt, Artificial Sequence
  LRRK2 RNA guide
gaccagauuuacauuaacugg

SEQ ID NO: 81138 - RNA, 21 nt, Artificial Sequence
  LRRK2 RNA guide
gauuuacauuaacugggcagu

SEQ ID NO: 81139 - RNA, 21 nt, Artificial Sequence
  LRRK2 RNA guide
gcccaguuaauguaaaucugg

SEQ ID NO: 81140 - RNA, 21 nt, Artificial Sequence
  LRRK2 RNA guide
uaacugcccaguuaauguaaa

SEQ ID NO: 81141 - RNA, 21 nt, Artificial Sequence
  LRRK2 RNA guide
uacauuaacugggcaguuaaa

SEQ ID NO: 81142 - RNA, 21 nt, Artificial Sequence
  LRRK2 RNA guide
ugcccaguuaauguaaaucug

SEQ ID NO: 81143 - RNA, 21 nt, Artificial Sequence
  LRRK2 RNA guide
uuaacugcccaguuaauguaa

SEQ ID NO: 81144 - RNA, 21 nt, Artificial Sequence
  LRRK2 RNA guide
uuacauuaacugggcaguuaa

SEQ ID NO: 81145 - RNA, 21 nt, Artificial Sequence
  LRRK2 RNA guide
uuuaacugcccaguuaaugua

SEQ ID NO: 81146 - RNA, 21 nt, Artificial Sequence
  LRRK2 RNA guide
uuuacauuaacugggcaguua

SEQ ID NO: 81147 - RNA, 21 nt, Artificial Sequence
  LRRK2 RNA guide
uuuuaacugcccaguuaaugu

SEQ ID NO: 81148 - RNA, 21 nt, Artificial Sequence
  LRRK2 RNA guide
uuuuuaacugcccaguuaaug

SEQ ID NO: 81149 - RNA, 22 nt, Artificial Sequence
  LRRK2 RNA guide
aacugcccaguuaauguaaauc

SEQ ID NO: 81150 - RNA, 22 nt, Artificial Sequence
  LRRK2 RNA guide
acauuaacugggcaguuaaaaa

SEQ ID NO: 81151 - RNA, 22 nt, Artificial Sequence
  LRRK2 RNA guide
accagauuuacauuaacugggc

SEQ ID NO: 81152 - RNA, 22 nt, Artificial Sequence
  LRRK2 RNA guide
acugcccaguuaauguaaaucu

SEQ ID NO: 81153 - RNA, 22 nt, Artificial Sequence
  LRRK2 RNA guide
agaccagauuuacauuaacugg

SEQ ID NO: 81154 - RNA, 22 nt, Artificial Sequence
  LRRK2 RNA guide
agauuuacauuaacugggcagu

SEQ ID NO: 81155 - RNA, 22 nt, Artificial Sequence
  LRRK2 RNA guide
auuuacauuaacugggcaguua

SEQ ID NO: 81156 - RNA, 22 nt, Artificial Sequence
  LRRK2 RNA guide
caauucauagaccagauuuaca

SEQ ID NO: 81157 - RNA, 22 nt, Artificial Sequence
  LRRK2 RNA guide
cagauuuacauuaacugggcag

SEQ ID NO: 81158 - RNA, 22 nt, Artificial Sequence
  LRRK2 RNA guide
caguuaauguaaaucuggucua

SEQ ID NO: 81159 - RNA, 22 nt, Artificial Sequence
  LRRK2 RNA guide
cauagaccagauuuacauuaac

SEQ ID NO: 81160 - RNA, 22 nt, Artificial Sequence
  LRRK2 RNA guide
cauuaacugggcaguuaaaaaa

SEQ ID NO: 81161 - RNA, 22 nt, Artificial Sequence
  LRRK2 RNA guide
ccagauuuacauuaacugggca

SEQ ID NO: 81162 - RNA, 22 nt, Artificial Sequence
  LRRK2 RNA guide
ccaguuaauguaaaucuggucu

SEQ ID NO: 81163 - RNA, 22 nt, Artificial Sequence
  LRRK2 RNA guide
cccaguuaauguaaaucugguc

SEQ ID NO: 81164 - RNA, 22 nt, Artificial Sequence
  LRRK2 RNA guide
cugcccaguuaauguaaaucug

SEQ ID NO: 81165 - RNA, 22 nt, Artificial Sequence
  LRRK2 RNA guide
gaccagauuuacauuaacuggg

SEQ ID NO: 81166 - RNA, 22 nt, Artificial Sequence
  LRRK2 RNA guide
gauuuacauuaacugggcaguu

SEQ ID NO: 81167 - RNA, 22 nt, Artificial Sequence
  LRRK2 RNA guide
gcccaguuaauguaaaucuggu

SEQ ID NO: 81168 - RNA, 22 nt, Artificial Sequence
  LRRK2 RNA guide
guuaauguaaaucuggucuaug

SEQ ID NO: 81169 - RNA, 22 nt, Artificial Sequence
  LRRK2 RNA guide
guuuuuuaacugcccaguuaau

SEQ ID NO: 81170 - RNA, 22 nt, Artificial Sequence
  LRRK2 RNA guide
uaacugcccaguuaauguaaau

SEQ ID NO: 81171 - RNA, 22 nt, Artificial Sequence
  LRRK2 RNA guide
uacauuaacugggcaguuaaaa

SEQ ID NO: 81172 - RNA, 22 nt, Artificial Sequence
  LRRK2 RNA guide
uagaccagauuuacauuaacug

SEQ ID NO: 81173 - RNA, 22 nt, Artificial Sequence
  LRRK2 RNA guide
ugcccaguuaauguaaaucugg

SEQ ID NO: 81174 - RNA, 22 nt, Artificial Sequence
  LRRK2 RNA guide
uuaacugcccaguuaauguaaa

SEQ ID NO: 81175 - RNA, 22 nt, Artificial Sequence
  LRRK2 RNA guide
uuacauuaacugggcaguuaaa

SEQ ID NO: 81176 - RNA, 22 nt, Artificial Sequence
  LRRK2 RNA guide
uuuaacugcccaguuaauguaa

SEQ ID NO: 81177 - RNA, 22 nt, Artificial Sequence
  LRRK2 RNA guide
uuuacauuaacugggcaguuaa

SEQ ID NO: 81178 - RNA, 22 nt, Artificial Sequence
  LRRK2 RNA guide
uuuuaacugcccaguuaaugua

SEQ ID NO: 81179 - RNA, 22 nt, Artificial Sequence
  LRRK2 RNA guide
uuuuuaacugcccaguuaaugu

SEQ ID NO: 81180 - RNA, 22 nt, Artificial Sequence
  LRRK2 RNA guide
uuuuuuaacugcccaguuaaug

SEQ ID NO: 81181 - RNA, 20 nt, Artificial Sequence
  LRRK2 RNA guide
aaaaauugcuacucacaagc

SEQ ID NO: 81182 - RNA, 20 nt, Artificial Sequence
  LRRK2 RNA guide
aaaagguugcugaaaaauug

SEQ ID NO: 81183 - RNA, 20 nt, Artificial Sequence
  LRRK2 RNA guide
aaaauugcuacucacaagcu

SEQ ID NO: 81184 - RNA, 20 nt, Artificial Sequence
  LRRK2 RNA guide
aaagguugcugaaaaauugc

SEQ ID NO: 81185 - RNA, 20 nt, Artificial Sequence
  LRRK2 RNA guide
aaauugcuacucacaagcuu

SEQ ID NO: 81186 - RNA, 20 nt, Artificial Sequence
  LRRK2 RNA guide
aacaagcuugugaguagcaa

SEQ ID NO: 81187 - RNA, 20 nt, Artificial Sequence
  LRRK2 RNA guide
aagcuugugaguagcaauuu

SEQ ID NO: 81188 - RNA, 20 nt, Artificial Sequence
  LRRK2 RNA guide
aagguugcugaaaaauugcu

SEQ ID NO: 81189 - RNA, 20 nt, Artificial Sequence
  LRRK2 RNA guide
aauugcuacucacaagcuug

SEQ ID NO: 81190 - RNA, 20 nt, Artificial Sequence
  LRRK2 RNA guide
acaacaagcuugugaguagc

SEQ ID NO: 81191 - RNA, 20 nt, Artificial Sequence
  LRRK2 RNA guide
acaagcuugugaguagcaau

SEQ ID NO: 81192 - RNA, 20 nt, Artificial Sequence
  LRRK2 RNA guide
acucacaagcuuguugucaa

SEQ ID NO: 81193 - RNA, 20 nt, Artificial Sequence
  LRRK2 RNA guide
agcuugugaguagcaauuuu

SEQ ID NO: 81194 - RNA, 20 nt, Artificial Sequence
  LRRK2 RNA guide
agguugcugaaaaauugcua

SEQ ID NO: 81195 - RNA, 20 nt, Artificial Sequence
  LRRK2 RNA guide
aguagcaauuuuucagcaac

SEQ ID NO: 81196 - RNA, 20 nt, Artificial Sequence
  LRRK2 RNA guide
auugacaacaagcuugugag

SEQ ID NO: 81197 - RNA, 20 nt, Artificial Sequence
  LRRK2 RNA guide
auugcuacucacaagcuugu

SEQ ID NO: 81198 - RNA, 20 nt, Artificial Sequence
  LRRK2 RNA guide
auuguauugacaacaagcuu

SEQ ID NO: 81199 - RNA, 20 nt, Artificial Sequence
  LRRK2 RNA guide
caaaagguugcugaaaaauu

SEQ ID NO: 81200 - RNA, 20 nt, Artificial Sequence
  LRRK2 RNA guide
caacaagcuugugaguagca

SEQ ID NO: 81201 - RNA, 20 nt, Artificial Sequence
  LRRK2 RNA guide
caagcuugugaguagcaauu

SEQ ID NO: 81202 - RNA, 20 nt, Artificial Sequence
  LRRK2 RNA guide
cuacucacaagcuuguuguc

SEQ ID NO: 81203 - RNA, 20 nt, Artificial Sequence
  LRRK2 RNA guide
cugaaaaauugcuacucaca

SEQ ID NO: 81204 - RNA, 20 nt, Artificial Sequence
  LRRK2 RNA guide
cuugugaguagcaauuuuuc

SEQ ID NO: 81205 - RNA, 20 nt, Artificial Sequence
  LRRK2 RNA guide
gaaaaauugcuacucacaag

SEQ ID NO: 81206 - RNA, 20 nt, Artificial Sequence
  LRRK2 RNA guide
gacaacaagcuugugaguag

SEQ ID NO: 81207 - RNA, 20 nt, Artificial Sequence
  LRRK2 RNA guide
gaguagcaauuuuucagcaa

SEQ ID NO: 81208 - RNA, 20 nt, Artificial Sequence
  LRRK2 RNA guide
gcuacucacaagcuuguugu

SEQ ID NO: 81209 - RNA, 20 nt, Artificial Sequence
  LRRK2 RNA guide
gcugaaaaauugcuacucac

SEQ ID NO: 81210 - RNA, 20 nt, Artificial Sequence
  LRRK2 RNA guide
gcuugugaguagcaauuuuu

SEQ ID NO: 81211 - RNA, 20 nt, Artificial Sequence
  LRRK2 RNA guide
gguugcugaaaaauugcuac

SEQ ID NO: 81212 - RNA, 20 nt, Artificial Sequence
  LRRK2 RNA guide
guauugacaacaagcuugug

SEQ ID NO: 81213 - RNA, 20 nt, Artificial Sequence
  LRRK2 RNA guide
gugaguagcaauuuuucagc

SEQ ID NO: 81214 - RNA, 20 nt, Artificial Sequence
  LRRK2 RNA guide
guugcugaaaaauugcuacu

SEQ ID NO: 81215 - RNA, 20 nt, Artificial Sequence
  LRRK2 RNA guide
uacucacaagcuuguuguca

SEQ ID NO: 81216 - RNA, 20 nt, Artificial Sequence
  LRRK2 RNA guide
uauugacaacaagcuuguga

SEQ ID NO: 81217 - RNA, 20 nt, Artificial Sequence
  LRRK2 RNA guide
ugaaaaauugcuacucacaa

SEQ ID NO: 81218 - RNA, 20 nt, Artificial Sequence
  LRRK2 RNA guide
ugacaacaagcuugugagua

SEQ ID NO: 81219 - RNA, 20 nt, Artificial Sequence
  LRRK2 RNA guide
ugaguagcaauuuuucagca

SEQ ID NO: 81220 - RNA, 20 nt, Artificial Sequence
  LRRK2 RNA guide
ugcuacucacaagcuuguug

SEQ ID NO: 81221 - RNA, 20 nt, Artificial Sequence
  LRRK2 RNA guide
ugcugaaaaauugcuacuca

SEQ ID NO: 81222 - RNA, 20 nt, Artificial Sequence
  LRRK2 RNA guide
uguauugacaacaagcuugu

SEQ ID NO: 81223 - RNA, 20 nt, Artificial Sequence
  LRRK2 RNA guide
ugugaguagcaauuuuucag

SEQ ID NO: 81224 - RNA, 20 nt, Artificial Sequence
  LRRK2 RNA guide
uugacaacaagcuugugagu

SEQ ID NO: 81225 - RNA, 20 nt, Artificial Sequence
  LRRK2 RNA guide
uugcuacucacaagcuuguu

SEQ ID NO: 81226 - RNA, 20 nt, Artificial Sequence
  LRRK2 RNA guide
uugcugaaaaauugcuacuc

SEQ ID NO: 81227 - RNA, 20 nt, Artificial Sequence
  LRRK2 RNA guide
uuguauugacaacaagcuug

SEQ ID NO: 81228 - RNA, 20 nt, Artificial Sequence
  LRRK2 RNA guide
uugugaguagcaauuuuuca

SEQ ID NO: 81229 - RNA, 21 nt, Artificial Sequence
  LRRK2 RNA guide
aaaaauugcuacucacaagcu

SEQ ID NO: 81230 - RNA, 21 nt, Artificial Sequence
  LRRK2 RNA guide
aaaagguugcugaaaaauugc

SEQ ID NO: 81231 - RNA, 21 nt, Artificial Sequence
  LRRK2 RNA guide
aaaauugcuacucacaagcuu

SEQ ID NO: 81232 - RNA, 21 nt, Artificial Sequence
  LRRK2 RNA guide
aaagguugcugaaaaauugcu

SEQ ID NO: 81233 - RNA, 21 nt, Artificial Sequence
  LRRK2 RNA guide
aaauugcuacucacaagcuug

SEQ ID NO: 81234 - RNA, 21 nt, Artificial Sequence
  LRRK2 RNA guide
aacaagcuugugaguagcaau

SEQ ID NO: 81235 - RNA, 21 nt, Artificial Sequence
  LRRK2 RNA guide
aagcuugugaguagcaauuuu

SEQ ID NO: 81236 - RNA, 21 nt, Artificial Sequence
  LRRK2 RNA guide
aagguugcugaaaaauugcua

SEQ ID NO: 81237 - RNA, 21 nt, Artificial Sequence
  LRRK2 RNA guide
aauugcuacucacaagcuugu

SEQ ID NO: 81238 - RNA, 21 nt, Artificial Sequence
  LRRK2 RNA guide
acaacaagcuugugaguagca

SEQ ID NO: 81239 - RNA, 21 nt, Artificial Sequence
  LRRK2 RNA guide
acaagcuugugaguagcaauu

SEQ ID NO: 81240 - RNA, 21 nt, Artificial Sequence
  LRRK2 RNA guide
acucacaagcuuguugucaau

SEQ ID NO: 81241 - RNA, 21 nt, Artificial Sequence
  LRRK2 RNA guide
agcuugugaguagcaauuuuu

SEQ ID NO: 81242 - RNA, 21 nt, Artificial Sequence
  LRRK2 RNA guide
agguugcugaaaaauugcuac

SEQ ID NO: 81243 - RNA, 21 nt, Artificial Sequence
  LRRK2 RNA guide
aguagcaauuuuucagcaacc

SEQ ID NO: 81244 - RNA, 21 nt, Artificial Sequence
  LRRK2 RNA guide
auugacaacaagcuugugagu

SEQ ID NO: 81245 - RNA, 21 nt, Artificial Sequence
  LRRK2 RNA guide
auugcuacucacaagcuuguu

SEQ ID NO: 81246 - RNA, 21 nt, Artificial Sequence
  LRRK2 RNA guide
auuguauugacaacaagcuug

SEQ ID NO: 81247 - RNA, 21 nt, Artificial Sequence
  LRRK2 RNA guide
caaaagguugcugaaaaauug

SEQ ID NO: 81248 - RNA, 21 nt, Artificial Sequence
  LRRK2 RNA guide
caacaagcuugugaguagcaa

SEQ ID NO: 81249 - RNA, 21 nt, Artificial Sequence
  LRRK2 RNA guide
caagcuugugaguagcaauuu

SEQ ID NO: 81250 - RNA, 21 nt, Artificial Sequence
  LRRK2 RNA guide
cuacucacaagcuuguuguca

SEQ ID NO: 81251 - RNA, 21 nt, Artificial Sequence
  LRRK2 RNA guide
cugaaaaauugcuacucacaa

SEQ ID NO: 81252 - RNA, 21 nt, Artificial Sequence
  LRRK2 RNA guide
cuugugaguagcaauuuuuca

SEQ ID NO: 81253 - RNA, 21 nt, Artificial Sequence
  LRRK2 RNA guide
gaaaaauugcuacucacaagc

SEQ ID NO: 81254 - RNA, 21 nt, Artificial Sequence
  LRRK2 RNA guide
gacaacaagcuugugaguagc

SEQ ID NO: 81255 - RNA, 21 nt, Artificial Sequence
  LRRK2 RNA guide
gaguagcaauuuuucagcaac

SEQ ID NO: 81256 - RNA, 21 nt, Artificial Sequence
  LRRK2 RNA guide
gcaaaagguugcugaaaaauu

SEQ ID NO: 81257 - RNA, 21 nt, Artificial Sequence
  LRRK2 RNA guide
gcuacucacaagcuuguuguc

SEQ ID NO: 81258 - RNA, 21 nt, Artificial Sequence
  LRRK2 RNA guide
gcugaaaaauugcuacucaca

SEQ ID NO: 81259 - RNA, 21 nt, Artificial Sequence
  LRRK2 RNA guide
gcuugugaguagcaauuuuuc

SEQ ID NO: 81260 - RNA, 21 nt, Artificial Sequence
  LRRK2 RNA guide
gguugcugaaaaauugcuacu

SEQ ID NO: 81261 - RNA, 21 nt, Artificial Sequence
  LRRK2 RNA guide
guauugacaacaagcuuguga

SEQ ID NO: 81262 - RNA, 21 nt, Artificial Sequence
  LRRK2 RNA guide
gugaguagcaauuuuucagca

SEQ ID NO: 81263 - RNA, 21 nt, Artificial Sequence
  LRRK2 RNA guide
guugcugaaaaauugcuacuc

SEQ ID NO: 81264 - RNA, 21 nt, Artificial Sequence
  LRRK2 RNA guide
uacucacaagcuuguugucaa

SEQ ID NO: 81265 - RNA, 21 nt, Artificial Sequence
  LRRK2 RNA guide
uauugacaacaagcuugugag

SEQ ID NO: 81266 - RNA, 21 nt, Artificial Sequence
  LRRK2 RNA guide
ugaaaaauugcuacucacaag

SEQ ID NO: 81267 - RNA, 21 nt, Artificial Sequence
  LRRK2 RNA guide
ugacaacaagcuugugaguag

SEQ ID NO: 81268 - RNA, 21 nt, Artificial Sequence
  LRRK2 RNA guide
ugaguagcaauuuuucagcaa

SEQ ID NO: 81269 - RNA, 21 nt, Artificial Sequence
  LRRK2 RNA guide
ugcuacucacaagcuuguugu

SEQ ID NO: 81270 - RNA, 21 nt, Artificial Sequence
  LRRK2 RNA guide
ugcugaaaaauugcuacucac

SEQ ID NO: 81271 - RNA, 21 nt, Artificial Sequence
  LRRK2 RNA guide
uguauugacaacaagcuugug

SEQ ID NO: 81272 - RNA, 21 nt, Artificial Sequence
  LRRK2 RNA guide
ugugaguagcaauuuuucagc

SEQ ID NO: 81273 - RNA, 21 nt, Artificial Sequence
  LRRK2 RNA guide
uugacaacaagcuugugagua

SEQ ID NO: 81274 - RNA, 21 nt, Artificial Sequence
  LRRK2 RNA guide
uugcuacucacaagcuuguug

SEQ ID NO: 81275 - RNA, 21 nt, Artificial Sequence
  LRRK2 RNA guide
uugcugaaaaauugcuacuca

SEQ ID NO: 81276 - RNA, 21 nt, Artificial Sequence
  LRRK2 RNA guide
uuguauugacaacaagcuugu

SEQ ID NO: 81277 - RNA, 21 nt, Artificial Sequence
  LRRK2 RNA guide
uugugaguagcaauuuuucag

SEQ ID NO: 81278 - RNA, 22 nt, Artificial Sequence
  LRRK2 RNA guide
aaaaauugcuacucacaagcuu

SEQ ID NO: 81279 - RNA, 22 nt, Artificial Sequence
  LRRK2 RNA guide
aaaagguugcugaaaaauugcu

SEQ ID NO: 81280 - RNA, 22 nt, Artificial Sequence
  LRRK2 RNA guide
aaaauugcuacucacaagcuug

SEQ ID NO: 81281 - RNA, 22 nt, Artificial Sequence
  LRRK2 RNA guide
aaagguugcugaaaaauugcua

SEQ ID NO: 81282 - RNA, 22 nt, Artificial Sequence
  LRRK2 RNA guide
aaauugcuacucacaagcuugu

SEQ ID NO: 81283 - RNA, 22 nt, Artificial Sequence
  LRRK2 RNA guide
aacaagcuugugaguagcaauu

SEQ ID NO: 81284 - RNA, 22 nt, Artificial Sequence
  LRRK2 RNA guide
aagcuugugaguagcaauuuuu

SEQ ID NO: 81285 - RNA, 22 nt, Artificial Sequence
  LRRK2 RNA guide
aagguugcugaaaaauugcuac

SEQ ID NO: 81286 - RNA, 22 nt, Artificial Sequence
  LRRK2 RNA guide
aauugcuacucacaagcuuguu

SEQ ID NO: 81287 - RNA, 22 nt, Artificial Sequence
  LRRK2 RNA guide
aauuguauugacaacaagcuug

SEQ ID NO: 81288 - RNA, 22 nt, Artificial Sequence
  LRRK2 RNA guide
acaacaagcuugugaguagcaa

SEQ ID NO: 81289 - RNA, 22 nt, Artificial Sequence
  LRRK2 RNA guide
acaagcuugugaguagcaauuu

SEQ ID NO: 81290 - RNA, 22 nt, Artificial Sequence
  LRRK2 RNA guide
acucacaagcuuguugucaaua

SEQ ID NO: 81291 - RNA, 22 nt, Artificial Sequence
  LRRK2 RNA guide
agcaaaagguugcugaaaaauu

SEQ ID NO: 81292 - RNA, 22 nt, Artificial Sequence
  LRRK2 RNA guide
agcuugugaguagcaauuuuuc

SEQ ID NO: 81293 - RNA, 22 nt, Artificial Sequence
  LRRK2 RNA guide
agguugcugaaaaauugcuacu

SEQ ID NO: 81294 - RNA, 22 nt, Artificial Sequence
  LRRK2 RNA guide
aguagcaauuuuucagcaaccu

SEQ ID NO: 81295 - RNA, 22 nt, Artificial Sequence
  LRRK2 RNA guide
auugacaacaagcuugugagua

SEQ ID NO: 81296 - RNA, 22 nt, Artificial Sequence
  LRRK2 RNA guide
auugcuacucacaagcuuguug

SEQ ID NO: 81297 - RNA, 22 nt, Artificial Sequence
  LRRK2 RNA guide
auuguauugacaacaagcuugu

SEQ ID NO: 81298 - RNA, 22 nt, Artificial Sequence
  LRRK2 RNA guide
caaaagguugcugaaaaauugc

SEQ ID NO: 81299 - RNA, 22 nt, Artificial Sequence
  LRRK2 RNA guide
caacaagcuugugaguagcaau

SEQ ID NO: 81300 - RNA, 22 nt, Artificial Sequence
  LRRK2 RNA guide
caagcuugugaguagcaauuuu

SEQ ID NO: 81301 - RNA, 22 nt, Artificial Sequence
  LRRK2 RNA guide
cuacucacaagcuuguugucaa

SEQ ID NO: 81302 - RNA, 22 nt, Artificial Sequence
  LRRK2 RNA guide
cugaaaaauugcuacucacaag

SEQ ID NO: 81303 - RNA, 22 nt, Artificial Sequence
  LRRK2 RNA guide
cuugugaguagcaauuuuucag

SEQ ID NO: 81304 - RNA, 22 nt, Artificial Sequence
  LRRK2 RNA guide
gaaaaauugcuacucacaagcu

SEQ ID NO: 81305 - RNA, 22 nt, Artificial Sequence
  LRRK2 RNA guide
gaauuguauugacaacaagcuu

SEQ ID NO: 81306 - RNA, 22 nt, Artificial Sequence
  LRRK2 RNA guide
gacaacaagcuugugaguagca

SEQ ID NO: 81307 - RNA, 22 nt, Artificial Sequence
  LRRK2 RNA guide
gaguagcaauuuuucagcaacc

SEQ ID NO: 81308 - RNA, 22 nt, Artificial Sequence
  LRRK2 RNA guide
gcaaaagguugcugaaaaauug

SEQ ID NO: 81309 - RNA, 22 nt, Artificial Sequence
  LRRK2 RNA guide
gcuacucacaagcuuguuguca

SEQ ID NO: 81310 - RNA, 22 nt, Artificial Sequence
  LRRK2 RNA guide
gcugaaaaauugcuacucacaa

SEQ ID NO: 81311 - RNA, 22 nt, Artificial Sequence
  LRRK2 RNA guide
gcuugugaguagcaauuuuuca

SEQ ID NO: 81312 - RNA, 22 nt, Artificial Sequence
  LRRK2 RNA guide
gguugcugaaaaauugcuacuc

SEQ ID NO: 81313 - RNA, 22 nt, Artificial Sequence
  LRRK2 RNA guide
guauugacaacaagcuugugag

SEQ ID NO: 81314 - RNA, 22 nt, Artificial Sequence
  LRRK2 RNA guide
gugaguagcaauuuuucagcaa

SEQ ID NO: 81315 - RNA, 22 nt, Artificial Sequence
  LRRK2 RNA guide
guugcugaaaaauugcuacuca

SEQ ID NO: 81316 - RNA, 22 nt, Artificial Sequence
  LRRK2 RNA guide
uacucacaagcuuguugucaau

SEQ ID NO: 81317 - RNA, 22 nt, Artificial Sequence
  LRRK2 RNA guide
uauugacaacaagcuugugagu

SEQ ID NO: 81318 - RNA, 22 nt, Artificial Sequence
  LRRK2 RNA guide
ugaaaaauugcuacucacaagc

SEQ ID NO: 81319 - RNA, 22 nt, Artificial Sequence
  LRRK2 RNA guide
ugacaacaagcuugugaguagc

SEQ ID NO: 81320 - RNA, 22 nt, Artificial Sequence
  LRRK2 RNA guide
ugaguagcaauuuuucagcaac

SEQ ID NO: 81321 - RNA, 22 nt, Artificial Sequence
  LRRK2 RNA guide
ugcuacucacaagcuuguuguc

SEQ ID NO: 81322 - RNA, 22 nt, Artificial Sequence
  LRRK2 RNA guide
ugcugaaaaauugcuacucaca

SEQ ID NO: 81323 - RNA, 22 nt, Artificial Sequence
  LRRK2 RNA guide
uguauugacaacaagcuuguga

SEQ ID NO: 81324 - RNA, 22 nt, Artificial Sequence
  LRRK2 RNA guide
ugugaguagcaauuuuucagca

SEQ ID NO: 81325 - RNA, 22 nt, Artificial Sequence
  LRRK2 RNA guide
uugacaacaagcuugugaguag

SEQ ID NO: 81326 - RNA, 22 nt, Artificial Sequence
  LRRK2 RNA guide
uugcuacucacaagcuuguugu

SEQ ID NO: 81327 - RNA, 22 nt, Artificial Sequence
  LRRK2 RNA guide
uugcugaaaaauugcuacucac

SEQ ID NO: 81328 - RNA, 22 nt, Artificial Sequence
  LRRK2 RNA guide
uuguauugacaacaagcuugug

SEQ ID NO: 81329 - RNA, 22 nt, Artificial Sequence
  LRRK2 RNA guide
uugugaguagcaauuuuucagc

SEQ ID NO: 81330 - RNA, 20 nt, Artificial Sequence
  LRRK2 RNA guide
aaaaauugcuauucacaagc

SEQ ID NO: 81331 - RNA, 20 nt, Artificial Sequence
  LRRK2 RNA guide
aaaauugcuauucacaagcu

SEQ ID NO: 81332 - RNA, 20 nt, Artificial Sequence
  LRRK2 RNA guide
aaauugcuauucacaagcuu

SEQ ID NO: 81333 - RNA, 20 nt, Artificial Sequence
  LRRK2 RNA guide
aacaagcuugugaauagcaa

SEQ ID NO: 81334 - RNA, 20 nt, Artificial Sequence
  LRRK2 RNA guide
aagcuugugaauagcaauuu

SEQ ID NO: 81335 - RNA, 20 nt, Artificial Sequence
  LRRK2 RNA guide
aauagcaauuuuucagcaac

SEQ ID NO: 81336 - RNA, 20 nt, Artificial Sequence
  LRRK2 RNA guide
aauugcuauucacaagcuug

SEQ ID NO: 81337 - RNA, 20 nt, Artificial Sequence
  LRRK2 RNA guide
acaacaagcuugugaauagc

SEQ ID NO: 81338 - RNA, 20 nt, Artificial Sequence
  LRRK2 RNA guide
acaagcuugugaauagcaau

SEQ ID NO: 81339 - RNA, 20 nt, Artificial Sequence
  LRRK2 RNA guide
agcuugugaauagcaauuuu

SEQ ID NO: 81340 - RNA, 20 nt, Artificial Sequence
  LRRK2 RNA guide
auucacaagcuuguugucaa

SEQ ID NO: 81341 - RNA, 20 nt, Artificial Sequence
  LRRK2 RNA guide
auugacaacaagcuugugaa

SEQ ID NO: 81342 - RNA, 20 nt, Artificial Sequence
  LRRK2 RNA guide
auugcuauucacaagcuugu

SEQ ID NO: 81343 - RNA, 20 nt, Artificial Sequence
  LRRK2 RNA guide
caacaagcuugugaauagca

SEQ ID NO: 81344 - RNA, 20 nt, Artificial Sequence
  LRRK2 RNA guide
caagcuugugaauagcaauu

SEQ ID NO: 81345 - RNA, 20 nt, Artificial Sequence
  LRRK2 RNA guide
cuauucacaagcuuguuguc

SEQ ID NO: 81346 - RNA, 20 nt, Artificial Sequence
  LRRK2 RNA guide
cugaaaaauugcuauucaca

SEQ ID NO: 81347 - RNA, 20 nt, Artificial Sequence
  LRRK2 RNA guide
cuugugaauagcaauuuuuc

SEQ ID NO: 81348 - RNA, 20 nt, Artificial Sequence
  LRRK2 RNA guide
gaaaaauugcuauucacaag

SEQ ID NO: 81349 - RNA, 20 nt, Artificial Sequence
  LRRK2 RNA guide
gaauagcaauuuuucagcaa

SEQ ID NO: 81350 - RNA, 20 nt, Artificial Sequence
  LRRK2 RNA guide
gacaacaagcuugugaauag

SEQ ID NO: 81351 - RNA, 20 nt, Artificial Sequence
  LRRK2 RNA guide
gcuauucacaagcuuguugu

SEQ ID NO: 81352 - RNA, 20 nt, Artificial Sequence
  LRRK2 RNA guide
gcugaaaaauugcuauucac

SEQ ID NO: 81353 - RNA, 20 nt, Artificial Sequence
  LRRK2 RNA guide
gcuugugaauagcaauuuuu

SEQ ID NO: 81354 - RNA, 20 nt, Artificial Sequence
  LRRK2 RNA guide
gguugcugaaaaauugcuau

SEQ ID NO: 81355 - RNA, 20 nt, Artificial Sequence
  LRRK2 RNA guide
gugaauagcaauuuuucagc

SEQ ID NO: 81356 - RNA, 20 nt, Artificial Sequence
  LRRK2 RNA guide
guugcugaaaaauugcuauu

SEQ ID NO: 81357 - RNA, 20 nt, Artificial Sequence
  LRRK2 RNA guide
uauucacaagcuuguuguca

SEQ ID NO: 81358 - RNA, 20 nt, Artificial Sequence
  LRRK2 RNA guide
ugaauagcaauuuuucagca

SEQ ID NO: 81359 - RNA, 20 nt, Artificial Sequence
  LRRK2 RNA guide
ugacaacaagcuugugaaua

SEQ ID NO: 81360 - RNA, 20 nt, Artificial Sequence
  LRRK2 RNA guide
ugcuauucacaagcuuguug

SEQ ID NO: 81361 - RNA, 20 nt, Artificial Sequence
  LRRK2 RNA guide
ugcugaaaaauugcuauuca

SEQ ID NO: 81362 - RNA, 20 nt, Artificial Sequence
  LRRK2 RNA guide
ugugaauagcaauuuuucag

SEQ ID NO: 81363 - RNA, 20 nt, Artificial Sequence
  LRRK2 RNA guide
uugacaacaagcuugugaau

SEQ ID NO: 81364 - RNA, 20 nt, Artificial Sequence
  LRRK2 RNA guide
uugcuauucacaagcuuguu

SEQ ID NO: 81365 - RNA, 20 nt, Artificial Sequence
  LRRK2 RNA guide
uugcugaaaaauugcuauuc

SEQ ID NO: 81366 - RNA, 21 nt, Artificial Sequence
  LRRK2 RNA guide
aaauugcuauucacaagcuug

SEQ ID NO: 81367 - RNA, 21 nt, Artificial Sequence
  LRRK2 RNA guide
aacaagcuugugaauagcaau

SEQ ID NO: 81368 - RNA, 21 nt, Artificial Sequence
  LRRK2 RNA guide
aauagcaauuuuucagcaacc

SEQ ID NO: 81369 - RNA, 21 nt, Artificial Sequence
  LRRK2 RNA guide
aauugcuauucacaagcuugu

SEQ ID NO: 81370 - RNA, 21 nt, Artificial Sequence
  LRRK2 RNA guide
acaacaagcuugugaauagca

SEQ ID NO: 81371 - RNA, 21 nt, Artificial Sequence
  LRRK2 RNA guide
acaagcuugugaauagcaauu

SEQ ID NO: 81372 - RNA, 21 nt, Artificial Sequence
  LRRK2 RNA guide
agguugcugaaaaauugcuau

SEQ ID NO: 81373 - RNA, 21 nt, Artificial Sequence
  LRRK2 RNA guide
auucacaagcuuguugucaau

SEQ ID NO: 81374 - RNA, 21 nt, Artificial Sequence
  LRRK2 RNA guide
auugacaacaagcuugugaau

SEQ ID NO: 81375 - RNA, 21 nt, Artificial Sequence
  LRRK2 RNA guide
auugcuauucacaagcuuguu

SEQ ID NO: 81376 - RNA, 21 nt, Artificial Sequence
  LRRK2 RNA guide
caacaagcuugugaauagcaa

SEQ ID NO: 81377 - RNA, 21 nt, Artificial Sequence
  LRRK2 RNA guide
caagcuugugaauagcaauuu

SEQ ID NO: 81378 - RNA, 21 nt, Artificial Sequence
  LRRK2 RNA guide
cuauucacaagcuuguuguca

SEQ ID NO: 81379 - RNA, 21 nt, Artificial Sequence
  LRRK2 RNA guide
gaaaaauugcuauucacaagc

SEQ ID NO: 81380 - RNA, 21 nt, Artificial Sequence
  LRRK2 RNA guide
gaauagcaauuuuucagcaac

SEQ ID NO: 81381 - RNA, 21 nt, Artificial Sequence
  LRRK2 RNA guide
gacaacaagcuugugaauagc

SEQ ID NO: 81382 - RNA, 21 nt, Artificial Sequence
  LRRK2 RNA guide
gcuauucacaagcuuguuguc

SEQ ID NO: 81383 - RNA, 21 nt, Artificial Sequence
  LRRK2 RNA guide
gcugaaaaauugcuauucaca

SEQ ID NO: 81384 - RNA, 21 nt, Artificial Sequence
  LRRK2 RNA guide
gcuugugaauagcaauuuuuc

SEQ ID NO: 81385 - RNA, 21 nt, Artificial Sequence
  LRRK2 RNA guide
gguugcugaaaaauugcuauu

SEQ ID NO: 81386 - RNA, 21 nt, Artificial Sequence
  LRRK2 RNA guide
gugaauagcaauuuuucagca

SEQ ID NO: 81387 - RNA, 21 nt, Artificial Sequence
  LRRK2 RNA guide
guugcugaaaaauugcuauuc

SEQ ID NO: 81388 - RNA, 21 nt, Artificial Sequence
  LRRK2 RNA guide
uauucacaagcuuguugucaa

SEQ ID NO: 81389 - RNA, 21 nt, Artificial Sequence
  LRRK2 RNA guide
uauugacaacaagcuugugaa

SEQ ID NO: 81390 - RNA, 21 nt, Artificial Sequence
  LRRK2 RNA guide
ugacaacaagcuugugaauag

SEQ ID NO: 81391 - RNA, 21 nt, Artificial Sequence
  LRRK2 RNA guide
ugcuauucacaagcuuguugu

SEQ ID NO: 81392 - RNA, 21 nt, Artificial Sequence
  LRRK2 RNA guide
ugcugaaaaauugcuauucac

SEQ ID NO: 81393 - RNA, 21 nt, Artificial Sequence
  LRRK2 RNA guide
ugugaauagcaauuuuucagc

SEQ ID NO: 81394 - RNA, 21 nt, Artificial Sequence
  LRRK2 RNA guide
uugacaacaagcuugugaaua

SEQ ID NO: 81395 - RNA, 21 nt, Artificial Sequence
  LRRK2 RNA guide
uugcuauucacaagcuuguug

SEQ ID NO: 81396 - RNA, 22 nt, Artificial Sequence
  LRRK2 RNA guide
aaaauugcuauucacaagcuug

SEQ ID NO: 81397 - RNA, 22 nt, Artificial Sequence
  LRRK2 RNA guide
aaauugcuauucacaagcuugu

SEQ ID NO: 81398 - RNA, 22 nt, Artificial Sequence
  LRRK2 RNA guide
aacaagcuugugaauagcaauu

SEQ ID NO: 81399 - RNA, 22 nt, Artificial Sequence
  LRRK2 RNA guide
aagguugcugaaaaauugcuau

SEQ ID NO: 81400 - RNA, 22 nt, Artificial Sequence
  LRRK2 RNA guide
aauagcaauuuuucagcaaccu

SEQ ID NO: 81401 - RNA, 22 nt, Artificial Sequence
  LRRK2 RNA guide
aauugcuauucacaagcuuguu

SEQ ID NO: 81402 - RNA, 22 nt, Artificial Sequence
  LRRK2 RNA guide
acaacaagcuugugaauagcaa

SEQ ID NO: 81403 - RNA, 22 nt, Artificial Sequence
  LRRK2 RNA guide
acaagcuugugaauagcaauuu

SEQ ID NO: 81404 - RNA, 22 nt, Artificial Sequence
  LRRK2 RNA guide
agcuugugaauagcaauuuuuc

SEQ ID NO: 81405 - RNA, 22 nt, Artificial Sequence
  LRRK2 RNA guide
agguugcugaaaaauugcuauu

SEQ ID NO: 81406 - RNA, 22 nt, Artificial Sequence
  LRRK2 RNA guide
auucacaagcuuguugucaaua

SEQ ID NO: 81407 - RNA, 22 nt, Artificial Sequence
  LRRK2 RNA guide
auugacaacaagcuugugaaua

SEQ ID NO: 81408 - RNA, 22 nt, Artificial Sequence
  LRRK2 RNA guide
auugcuauucacaagcuuguug

SEQ ID NO: 81409 - RNA, 22 nt, Artificial Sequence
  LRRK2 RNA guide
caacaagcuugugaauagcaau

SEQ ID NO: 81410 - RNA, 22 nt, Artificial Sequence
  LRRK2 RNA guide
caagcuugugaauagcaauuuu

SEQ ID NO: 81411 - RNA, 22 nt, Artificial Sequence
  LRRK2 RNA guide
cuauucacaagcuuguugucaa

SEQ ID NO: 81412 - RNA, 22 nt, Artificial Sequence
  LRRK2 RNA guide
cugaaaaauugcuauucacaag

SEQ ID NO: 81413 - RNA, 22 nt, Artificial Sequence
  LRRK2 RNA guide
cuugugaauagcaauuuuucag

SEQ ID NO: 81414 - RNA, 22 nt, Artificial Sequence
  LRRK2 RNA guide
gaaaaauugcuauucacaagcu

SEQ ID NO: 81415 - RNA, 22 nt, Artificial Sequence
  LRRK2 RNA guide
gaauagcaauuuuucagcaacc

SEQ ID NO: 81416 - RNA, 22 nt, Artificial Sequence
  LRRK2 RNA guide
gacaacaagcuugugaauagca

SEQ ID NO: 81417 - RNA, 22 nt, Artificial Sequence
  LRRK2 RNA guide
gcuauucacaagcuuguuguca

SEQ ID NO: 81418 - RNA, 22 nt, Artificial Sequence
  LRRK2 RNA guide
gcugaaaaauugcuauucacaa

SEQ ID NO: 81419 - RNA, 22 nt, Artificial Sequence
  LRRK2 RNA guide
gcuugugaauagcaauuuuuca

SEQ ID NO: 81420 - RNA, 22 nt, Artificial Sequence
  LRRK2 RNA guide
gguugcugaaaaauugcuauuc

SEQ ID NO: 81421 - RNA, 22 nt, Artificial Sequence
  LRRK2 RNA guide
guauugacaacaagcuugugaa

SEQ ID NO: 81422 - RNA, 22 nt, Artificial Sequence
  LRRK2 RNA guide
gugaauagcaauuuuucagcaa

SEQ ID NO: 81423 - RNA, 22 nt, Artificial Sequence
  LRRK2 RNA guide
guugcugaaaaauugcuauuca

SEQ ID NO: 81424 - RNA, 22 nt, Artificial Sequence
  LRRK2 RNA guide
uauucacaagcuuguugucaau

SEQ ID NO: 81425 - RNA, 22 nt, Artificial Sequence
  LRRK2 RNA guide
uauugacaacaagcuugugaau

SEQ ID NO: 81426 - RNA, 22 nt, Artificial Sequence
  LRRK2 RNA guide
ugaaaaauugcuauucacaagc

SEQ ID NO: 81427 - RNA, 22 nt, Artificial Sequence
  LRRK2 RNA guide
ugaauagcaauuuuucagcaac

SEQ ID NO: 81428 - RNA, 22 nt, Artificial Sequence
  LRRK2 RNA guide
ugacaacaagcuugugaauagc

SEQ ID NO: 81429 - RNA, 22 nt, Artificial Sequence
  LRRK2 RNA guide
ugcuauucacaagcuuguuguc

SEQ ID NO: 81430 - RNA, 22 nt, Artificial Sequence
  LRRK2 RNA guide
ugcugaaaaauugcuauucaca

SEQ ID NO: 81431 - RNA, 22 nt, Artificial Sequence
  LRRK2 RNA guide
ugugaauagcaauuuuucagca

SEQ ID NO: 81432 - RNA, 22 nt, Artificial Sequence
  LRRK2 RNA guide
uugacaacaagcuugugaauag

SEQ ID NO: 81433 - RNA, 22 nt, Artificial Sequence
  LRRK2 RNA guide
uugcuauucacaagcuuguugu

SEQ ID NO: 81434 - RNA, 22 nt, Artificial Sequence
  LRRK2 RNA guide
uugcugaaaaauugcuauucac

SEQ ID NO: 81435 - RNA, 22 nt, Artificial Sequence
  LRRK2 RNA guide
uugugaauagcaauuuuucagc

SEQ ID NO: 81436 - RNA, 20 nt, Artificial Sequence
  LRRK2 RNA guide
aagcauccaagaguauacau

SEQ ID NO: 81437 - RNA, 20 nt, Artificial Sequence
  LRRK2 RNA guide
agcauccaagaguauacauu

SEQ ID NO: 81438 - RNA, 20 nt, Artificial Sequence
  LRRK2 RNA guide
caagacaaagugagauaaua

SEQ ID NO: 81439 - RNA, 20 nt, Artificial Sequence
  LRRK2 RNA guide
cauccaagaguauacauuua

SEQ ID NO: 81440 - RNA, 20 nt, Artificial Sequence
  LRRK2 RNA guide
ccaagacaaagugagauaau

SEQ ID NO: 81441 - RNA, 20 nt, Artificial Sequence
  LRRK2 RNA guide
cugccaagacaaagugagau

SEQ ID NO: 81442 - RNA, 20 nt, Artificial Sequence
  LRRK2 RNA guide
gcauccaagaguauacauuu

SEQ ID NO: 81443 - RNA, 20 nt, Artificial Sequence
  LRRK2 RNA guide
gccaagacaaagugagauaa

SEQ ID NO: 81444 - RNA, 20 nt, Artificial Sequence
  LRRK2 RNA guide
gucugccaagacaaagugag

SEQ ID NO: 81445 - RNA, 20 nt, Artificial Sequence
  LRRK2 RNA guide
uauuaucucacuuugucuug

SEQ ID NO: 81446 - RNA, 20 nt, Artificial Sequence
  LRRK2 RNA guide
ucugccaagacaaagugaga

SEQ ID NO: 81447 - RNA, 20 nt, Artificial Sequence
  LRRK2 RNA guide
ugccaagacaaagugagaua

SEQ ID NO: 81448 - RNA, 21 nt, Artificial Sequence
  LRRK2 RNA guide
aaagcauccaagaguauacau

SEQ ID NO: 81449 - RNA, 21 nt, Artificial Sequence
  LRRK2 RNA guide
aagcauccaagaguauacauu

SEQ ID NO: 81450 - RNA, 21 nt, Artificial Sequence
  LRRK2 RNA guide
agcauccaagaguauacauuu

SEQ ID NO: 81451 - RNA, 21 nt, Artificial Sequence
  LRRK2 RNA guide
ccaagacaaagugagauaaua

SEQ ID NO: 81452 - RNA, 21 nt, Artificial Sequence
  LRRK2 RNA guide
cugccaagacaaagugagaua

SEQ ID NO: 81453 - RNA, 21 nt, Artificial Sequence
  LRRK2 RNA guide
gcauccaagaguauacauuua

SEQ ID NO: 81454 - RNA, 21 nt, Artificial Sequence
  LRRK2 RNA guide
gccaagacaaagugagauaau

SEQ ID NO: 81455 - RNA, 21 nt, Artificial Sequence
  LRRK2 RNA guide
gucugccaagacaaagugaga

SEQ ID NO: 81456 - RNA, 21 nt, Artificial Sequence
  LRRK2 RNA guide
uauuaucucacuuugucuugg

SEQ ID NO: 81457 - RNA, 21 nt, Artificial Sequence
  LRRK2 RNA guide
ucugccaagacaaagugagau

SEQ ID NO: 81458 - RNA, 21 nt, Artificial Sequence
  LRRK2 RNA guide
ugccaagacaaagugagauaa

SEQ ID NO: 81459 - RNA, 21 nt, Artificial Sequence
  LRRK2 RNA guide
ugucugccaagacaaagugag

SEQ ID NO: 81460 - RNA, 22 nt, Artificial Sequence
  LRRK2 RNA guide
aaagcauccaagaguauacauu

SEQ ID NO: 81461 - RNA, 22 nt, Artificial Sequence
  LRRK2 RNA guide
aagcauccaagaguauacauuu

SEQ ID NO: 81462 - RNA, 22 nt, Artificial Sequence
  LRRK2 RNA guide
agcauccaagaguauacauuua

SEQ ID NO: 81463 - RNA, 22 nt, Artificial Sequence
  LRRK2 RNA guide
auauuaucucacuuugucuugg

SEQ ID NO: 81464 - RNA, 22 nt, Artificial Sequence
  LRRK2 RNA guide
caaagcauccaagaguauacau

SEQ ID NO: 81465 - RNA, 22 nt, Artificial Sequence
  LRRK2 RNA guide
ccaagacaaagugagauaauau

SEQ ID NO: 81466 - RNA, 22 nt, Artificial Sequence
  LRRK2 RNA guide
cugccaagacaaagugagauaa

SEQ ID NO: 81467 - RNA, 22 nt, Artificial Sequence
  LRRK2 RNA guide
gcauccaagaguauacauuuau

SEQ ID NO: 81468 - RNA, 22 nt, Artificial Sequence
  LRRK2 RNA guide
gccaagacaaagugagauaaua

SEQ ID NO: 81469 - RNA, 22 nt, Artificial Sequence
  LRRK2 RNA guide
gucugccaagacaaagugagau

SEQ ID NO: 81470 - RNA, 22 nt, Artificial Sequence
  LRRK2 RNA guide
uauuaucucacuuugucuuggc

SEQ ID NO: 81471 - RNA, 22 nt, Artificial Sequence
  LRRK2 RNA guide
ucugccaagacaaagugagaua

SEQ ID NO: 81472 - RNA, 22 nt, Artificial Sequence
  LRRK2 RNA guide
ugccaagacaaagugagauaau

SEQ ID NO: 81473 - RNA, 22 nt, Artificial Sequence
  LRRK2 RNA guide
ugucugccaagacaaagugaga

SEQ ID NO: 81474 - RNA, 22 nt, Artificial Sequence
  LRRK2 RNA guide
uugucugccaagacaaagugag

SEQ ID NO: 81475 - RNA, 20 nt, Artificial Sequence
  LRRK2 RNA guide
caagacaaagugagauaaaa

SEQ ID NO: 81476 - RNA, 20 nt, Artificial Sequence
  LRRK2 RNA guide
ccaagacaaagugagauaaa

SEQ ID NO: 81477 - RNA, 20 nt, Artificial Sequence
  LRRK2 RNA guide
uuuuaucucacuuugucuug

SEQ ID NO: 81478 - RNA, 21 nt, Artificial Sequence
  LRRK2 RNA guide
ccaagacaaagugagauaaaa

SEQ ID NO: 81479 - RNA, 21 nt, Artificial Sequence
  LRRK2 RNA guide
gccaagacaaagugagauaaa

SEQ ID NO: 81480 - RNA, 21 nt, Artificial Sequence
  LRRK2 RNA guide
uuuuaucucacuuugucuugg

SEQ ID NO: 81481 - RNA, 22 nt, Artificial Sequence
  LRRK2 RNA guide
auuuuaucucacuuugucuugg

SEQ ID NO: 81482 - RNA, 22 nt, Artificial Sequence
  LRRK2 RNA guide
ccaagacaaagugagauaaaau

SEQ ID NO: 81483 - RNA, 22 nt, Artificial Sequence
  LRRK2 RNA guide
gccaagacaaagugagauaaaa

SEQ ID NO: 81484 - RNA, 22 nt, Artificial Sequence
  LRRK2 RNA guide
ugccaagacaaagugagauaaa

SEQ ID NO: 81485 - RNA, 22 nt, Artificial Sequence
  LRRK2 RNA guide
uuuuaucucacuuugucuuggc

SEQ ID NO: 81486 - RNA, 20 nt, Artificial Sequence
  LRRK2 RNA guide
aaaccagagaggucagugga

SEQ ID NO: 81487 - RNA, 20 nt, Artificial Sequence
  LRRK2 RNA guide
aaccagagaggucaguggac

SEQ ID NO: 81488 - RNA, 20 nt, Artificial Sequence
  LRRK2 RNA guide
aagucuggcuuuaggggucc

SEQ ID NO: 81489 - RNA, 20 nt, Artificial Sequence
  LRRK2 RNA guide
acagaaaccagagaggucag

SEQ ID NO: 81490 - RNA, 20 nt, Artificial Sequence
  LRRK2 RNA guide
accagagaggucaguggacc

SEQ ID NO: 81491 - RNA, 20 nt, Artificial Sequence
  LRRK2 RNA guide
agaaaccagagaggucagug

SEQ ID NO: 81492 - RNA, 20 nt, Artificial Sequence
  LRRK2 RNA guide
agacagaaaccagagagguc

SEQ ID NO: 81493 - RNA, 20 nt, Artificial Sequence
  LRRK2 RNA guide
agagaggucaguggaccccu

SEQ ID NO: 81494 - RNA, 20 nt, Artificial Sequence
  LRRK2 RNA guide
agaggucaguggaccccuaa

SEQ ID NO: 81495 - RNA, 20 nt, Artificial Sequence
  LRRK2 RNA guide
agggcaagucuggcuuuagg

SEQ ID NO: 81496 - RNA, 20 nt, Artificial Sequence
  LRRK2 RNA guide
agggguccacugaccucucu

SEQ ID NO: 81497 - RNA, 20 nt, Artificial Sequence
  LRRK2 RNA guide
aggucaguggaccccuaaag

SEQ ID NO: 81498 - RNA, 20 nt, Artificial Sequence
  LRRK2 RNA guide
agucuggcuuuaggggucca

SEQ ID NO: 81499 - RNA, 20 nt, Artificial Sequence
  LRRK2 RNA guide
aguggaccccuaaagccaga

SEQ ID NO: 81500 - RNA, 20 nt, Artificial Sequence
  LRRK2 RNA guide
caagucuggcuuuagggguc

SEQ ID NO: 81501 - RNA, 20 nt, Artificial Sequence
  LRRK2 RNA guide
cagaaaccagagaggucagu

SEQ ID NO: 81502 - RNA, 20 nt, Artificial Sequence
  LRRK2 RNA guide
cagagaggucaguggacccc

SEQ ID NO: 81503 - RNA, 20 nt, Artificial Sequence
  LRRK2 RNA guide
caguggaccccuaaagccag

SEQ ID NO: 81504 - RNA, 20 nt, Artificial Sequence
  LRRK2 RNA guide
ccacugaccucucugguuuc

SEQ ID NO: 81505 - RNA, 20 nt, Artificial Sequence
  LRRK2 RNA guide
ccagagaggucaguggaccc

SEQ ID NO: 81506 - RNA, 20 nt, Artificial Sequence
  LRRK2 RNA guide
cuggcuuuagggguccacug

SEQ ID NO: 81507 - RNA, 20 nt, Artificial Sequence
  LRRK2 RNA guide
cuuuagggguccacugaccu

SEQ ID NO: 81508 - RNA, 20 nt, Artificial Sequence
  LRRK2 RNA guide
gaaaccagagaggucagugg

SEQ ID NO: 81509 - RNA, 20 nt, Artificial Sequence
  LRRK2 RNA guide
gacagaaaccagagagguca

SEQ ID NO: 81510 - RNA, 20 nt, Artificial Sequence
  LRRK2 RNA guide
gagacagaaaccagagaggu

SEQ ID NO: 81511 - RNA, 20 nt, Artificial Sequence
  LRRK2 RNA guide
gagaggucaguggaccccua

SEQ ID NO: 81512 - RNA, 20 nt, Artificial Sequence
  LRRK2 RNA guide
gaggucaguggaccccuaaa

SEQ ID NO: 81513 - RNA, 20 nt, Artificial Sequence
  LRRK2 RNA guide
gcaagucuggcuuuaggggu

SEQ ID NO: 81514 - RNA, 20 nt, Artificial Sequence
  LRRK2 RNA guide
gcuuuagggguccacugacc

SEQ ID NO: 81515 - RNA, 20 nt, Artificial Sequence
  LRRK2 RNA guide
ggcaagucuggcuuuagggg

SEQ ID NO: 81516 - RNA, 20 nt, Artificial Sequence
  LRRK2 RNA guide
ggcuuuagggguccacugac

SEQ ID NO: 81517 - RNA, 20 nt, Artificial Sequence
  LRRK2 RNA guide
gggcaagucuggcuuuaggg

SEQ ID NO: 81518 - RNA, 20 nt, Artificial Sequence
  LRRK2 RNA guide
gggguccacugaccucucug

SEQ ID NO: 81519 - RNA, 20 nt, Artificial Sequence
  LRRK2 RNA guide
ggguccacugaccucucugg

SEQ ID NO: 81520 - RNA, 20 nt, Artificial Sequence
  LRRK2 RNA guide
ggucaguggaccccuaaagc

SEQ ID NO: 81521 - RNA, 20 nt, Artificial Sequence
  LRRK2 RNA guide
gguccacugaccucucuggu

SEQ ID NO: 81522 - RNA, 20 nt, Artificial Sequence
  LRRK2 RNA guide
gucaguggaccccuaaagcc

SEQ ID NO: 81523 - RNA, 20 nt, Artificial Sequence
  LRRK2 RNA guide
guccacugaccucucugguu

SEQ ID NO: 81524 - RNA, 20 nt, Artificial Sequence
  LRRK2 RNA guide
gucuggcuuuagggguccac

SEQ ID NO: 81525 - RNA, 20 nt, Artificial Sequence
  LRRK2 RNA guide
guggaccccuaaagccagac

SEQ ID NO: 81526 - RNA, 20 nt, Artificial Sequence
  LRRK2 RNA guide
uagggguccacugaccucuc

SEQ ID NO: 81527 - RNA, 20 nt, Artificial Sequence
  LRRK2 RNA guide
ucaguggaccccuaaagcca

SEQ ID NO: 81528 - RNA, 20 nt, Artificial Sequence
  LRRK2 RNA guide
uccacugaccucucugguuu

SEQ ID NO: 81529 - RNA, 20 nt, Artificial Sequence
  LRRK2 RNA guide
ucuggcuuuagggguccacu

SEQ ID NO: 81530 - RNA, 20 nt, Artificial Sequence
  LRRK2 RNA guide
uggaccccuaaagccagacu

SEQ ID NO: 81531 - RNA, 20 nt, Artificial Sequence
  LRRK2 RNA guide
uggcuuuagggguccacuga

SEQ ID NO: 81532 - RNA, 20 nt, Artificial Sequence
  LRRK2 RNA guide
uuagggguccacugaccucu

SEQ ID NO: 81533 - RNA, 20 nt, Artificial Sequence
  LRRK2 RNA guide
uuuagggguccacugaccuc

SEQ ID NO: 81534 - RNA, 21 nt, Artificial Sequence
  LRRK2 RNA guide
aaaccagagaggucaguggac

SEQ ID NO: 81535 - RNA, 21 nt, Artificial Sequence
  LRRK2 RNA guide
aaccagagaggucaguggacc

SEQ ID NO: 81536 - RNA, 21 nt, Artificial Sequence
  LRRK2 RNA guide
aagucuggcuuuaggggucca

SEQ ID NO: 81537 - RNA, 21 nt, Artificial Sequence
  LRRK2 RNA guide
acagaaaccagagaggucagu

SEQ ID NO: 81538 - RNA, 21 nt, Artificial Sequence
  LRRK2 RNA guide
accagagaggucaguggaccc

SEQ ID NO: 81539 - RNA, 21 nt, Artificial Sequence
  LRRK2 RNA guide
agaaaccagagaggucagugg

SEQ ID NO: 81540 - RNA, 21 nt, Artificial Sequence
  LRRK2 RNA guide
agacagaaaccagagagguca

SEQ ID NO: 81541 - RNA, 21 nt, Artificial Sequence
  LRRK2 RNA guide
agagacagaaaccagagaggu

SEQ ID NO: 81542 - RNA, 21 nt, Artificial Sequence
  LRRK2 RNA guide
agagaggucaguggaccccua

SEQ ID NO: 81543 - RNA, 21 nt, Artificial Sequence
  LRRK2 RNA guide
agaggucaguggaccccuaaa

SEQ ID NO: 81544 - RNA, 21 nt, Artificial Sequence
  LRRK2 RNA guide
agggcaagucuggcuuuaggg

SEQ ID NO: 81545 - RNA, 21 nt, Artificial Sequence
  LRRK2 RNA guide
agggguccacugaccucucug

SEQ ID NO: 81546 - RNA, 21 nt, Artificial Sequence
  LRRK2 RNA guide
aggucaguggaccccuaaagc

SEQ ID NO: 81547 - RNA, 21 nt, Artificial Sequence
  LRRK2 RNA guide
agucuggcuuuagggguccac

SEQ ID NO: 81548 - RNA, 21 nt, Artificial Sequence
  LRRK2 RNA guide
aguggaccccuaaagccagac

SEQ ID NO: 81549 - RNA, 21 nt, Artificial Sequence
  LRRK2 RNA guide
caagucuggcuuuaggggucc

SEQ ID NO: 81550 - RNA, 21 nt, Artificial Sequence
  LRRK2 RNA guide
cagaaaccagagaggucagug

SEQ ID NO: 81551 - RNA, 21 nt, Artificial Sequence
  LRRK2 RNA guide
cagagaggucaguggaccccu

SEQ ID NO: 81552 - RNA, 21 nt, Artificial Sequence
  LRRK2 RNA guide
cagggcaagucuggcuuuagg

SEQ ID NO: 81553 - RNA, 21 nt, Artificial Sequence
  LRRK2 RNA guide
caguggaccccuaaagccaga

SEQ ID NO: 81554 - RNA, 21 nt, Artificial Sequence
  LRRK2 RNA guide
ccacugaccucucugguuucu

SEQ ID NO: 81555 - RNA, 21 nt, Artificial Sequence
  LRRK2 RNA guide
ccagagaggucaguggacccc

SEQ ID NO: 81556 - RNA, 21 nt, Artificial Sequence
  LRRK2 RNA guide
cuggcuuuagggguccacuga

SEQ ID NO: 81557 - RNA, 21 nt, Artificial Sequence
  LRRK2 RNA guide
cuuuagggguccacugaccuc

SEQ ID NO: 81558 - RNA, 21 nt, Artificial Sequence
  LRRK2 RNA guide
gaaaccagagaggucagugga

SEQ ID NO: 81559 - RNA, 21 nt, Artificial Sequence
  LRRK2 RNA guide
gacagaaaccagagaggucag

SEQ ID NO: 81560 - RNA, 21 nt, Artificial Sequence
  LRRK2 RNA guide
gagacagaaaccagagagguc

SEQ ID NO: 81561 - RNA, 21 nt, Artificial Sequence
  LRRK2 RNA guide
gagaggucaguggaccccuaa

SEQ ID NO: 81562 - RNA, 21 nt, Artificial Sequence
  LRRK2 RNA guide
gaggucaguggaccccuaaag

SEQ ID NO: 81563 - RNA, 21 nt, Artificial Sequence
  LRRK2 RNA guide
gcaagucuggcuuuagggguc

SEQ ID NO: 81564 - RNA, 21 nt, Artificial Sequence
  LRRK2 RNA guide
gcuuuagggguccacugaccu

SEQ ID NO: 81565 - RNA, 21 nt, Artificial Sequence
  LRRK2 RNA guide
ggcaagucuggcuuuaggggu

SEQ ID NO: 81566 - RNA, 21 nt, Artificial Sequence
  LRRK2 RNA guide
ggcuuuagggguccacugacc

SEQ ID NO: 81567 - RNA, 21 nt, Artificial Sequence
  LRRK2 RNA guide
gggcaagucuggcuuuagggg

SEQ ID NO: 81568 - RNA, 21 nt, Artificial Sequence
  LRRK2 RNA guide
gggguccacugaccucucugg

SEQ ID NO: 81569 - RNA, 21 nt, Artificial Sequence
  LRRK2 RNA guide
ggguccacugaccucucuggu

SEQ ID NO: 81570 - RNA, 21 nt, Artificial Sequence
  LRRK2 RNA guide
ggucaguggaccccuaaagcc

SEQ ID NO: 81571 - RNA, 21 nt, Artificial Sequence
  LRRK2 RNA guide
gguccacugaccucucugguu

SEQ ID NO: 81572 - RNA, 21 nt, Artificial Sequence
  LRRK2 RNA guide
gucaguggaccccuaaagcca

SEQ ID NO: 81573 - RNA, 21 nt, Artificial Sequence
  LRRK2 RNA guide
guccacugaccucucugguuu

SEQ ID NO: 81574 - RNA, 21 nt, Artificial Sequence
  LRRK2 RNA guide
gucuggcuuuagggguccacu

SEQ ID NO: 81575 - RNA, 21 nt, Artificial Sequence
  LRRK2 RNA guide
guggaccccuaaagccagacu

SEQ ID NO: 81576 - RNA, 21 nt, Artificial Sequence
  LRRK2 RNA guide
uagggguccacugaccucucu

SEQ ID NO: 81577 - RNA, 21 nt, Artificial Sequence
  LRRK2 RNA guide
ucaguggaccccuaaagccag

SEQ ID NO: 81578 - RNA, 21 nt, Artificial Sequence
  LRRK2 RNA guide
uccacugaccucucugguuuc

SEQ ID NO: 81579 - RNA, 21 nt, Artificial Sequence
  LRRK2 RNA guide
ucuggcuuuagggguccacug

SEQ ID NO: 81580 - RNA, 21 nt, Artificial Sequence
  LRRK2 RNA guide
uggaccccuaaagccagacuu

SEQ ID NO: 81581 - RNA, 21 nt, Artificial Sequence
  LRRK2 RNA guide
uggcuuuagggguccacugac

SEQ ID NO: 81582 - RNA, 21 nt, Artificial Sequence
  LRRK2 RNA guide
uuagggguccacugaccucuc

SEQ ID NO: 81583 - RNA, 21 nt, Artificial Sequence
  LRRK2 RNA guide
uuuagggguccacugaccucu

SEQ ID NO: 81584 - RNA, 22 nt, Artificial Sequence
  LRRK2 RNA guide
aaaccagagaggucaguggacc

SEQ ID NO: 81585 - RNA, 22 nt, Artificial Sequence
  LRRK2 RNA guide
aaccagagaggucaguggaccc

SEQ ID NO: 81586 - RNA, 22 nt, Artificial Sequence
  LRRK2 RNA guide
aagucuggcuuuagggguccac

SEQ ID NO: 81587 - RNA, 22 nt, Artificial Sequence
  LRRK2 RNA guide
acagaaaccagagaggucagug

SEQ ID NO: 81588 - RNA, 22 nt, Artificial Sequence
  LRRK2 RNA guide
accagagaggucaguggacccc

SEQ ID NO: 81589 - RNA, 22 nt, Artificial Sequence
  LRRK2 RNA guide
agaaaccagagaggucagugga

SEQ ID NO: 81590 - RNA, 22 nt, Artificial Sequence
  LRRK2 RNA guide
agacagaaaccagagaggucag

SEQ ID NO: 81591 - RNA, 22 nt, Artificial Sequence
  LRRK2 RNA guide
agagacagaaaccagagagguc

SEQ ID NO: 81592 - RNA, 22 nt, Artificial Sequence
  LRRK2 RNA guide
agagaggucaguggaccccuaa

SEQ ID NO: 81593 - RNA, 22 nt, Artificial Sequence
  LRRK2 RNA guide
agaggucaguggaccccuaaag

SEQ ID NO: 81594 - RNA, 22 nt, Artificial Sequence
  LRRK2 RNA guide
agggcaagucuggcuuuagggg

SEQ ID NO: 81595 - RNA, 22 nt, Artificial Sequence
  LRRK2 RNA guide
agggguccacugaccucucugg

SEQ ID NO: 81596 - RNA, 22 nt, Artificial Sequence
  LRRK2 RNA guide
aggucaguggaccccuaaagcc

SEQ ID NO: 81597 - RNA, 22 nt, Artificial Sequence
  LRRK2 RNA guide
agucuggcuuuagggguccacu

SEQ ID NO: 81598 - RNA, 22 nt, Artificial Sequence
  LRRK2 RNA guide
aguggaccccuaaagccagacu

SEQ ID NO: 81599 - RNA, 22 nt, Artificial Sequence
  LRRK2 RNA guide
caagucuggcuuuaggggucca

SEQ ID NO: 81600 - RNA, 22 nt, Artificial Sequence
  LRRK2 RNA guide
cagaaaccagagaggucagugg

SEQ ID NO: 81601 - RNA, 22 nt, Artificial Sequence
  LRRK2 RNA guide
cagagaggucaguggaccccua

SEQ ID NO: 81602 - RNA, 22 nt, Artificial Sequence
  LRRK2 RNA guide
cagggcaagucuggcuuuaggg

SEQ ID NO: 81603 - RNA, 22 nt, Artificial Sequence
  LRRK2 RNA guide
caguggaccccuaaagccagac

SEQ ID NO: 81604 - RNA, 22 nt, Artificial Sequence
  LRRK2 RNA guide
ccacugaccucucugguuucug

SEQ ID NO: 81605 - RNA, 22 nt, Artificial Sequence
  LRRK2 RNA guide
ccagagaggucaguggaccccu

SEQ ID NO: 81606 - RNA, 22 nt, Artificial Sequence
  LRRK2 RNA guide
cuggcuuuagggguccacugac

SEQ ID NO: 81607 - RNA, 22 nt, Artificial Sequence
  LRRK2 RNA guide
cuuuagggguccacugaccucu

SEQ ID NO: 81608 - RNA, 22 nt, Artificial Sequence
  LRRK2 RNA guide
gaaaccagagaggucaguggac

SEQ ID NO: 81609 - RNA, 22 nt, Artificial Sequence
  LRRK2 RNA guide
gacagaaaccagagaggucagu

SEQ ID NO: 81610 - RNA, 22 nt, Artificial Sequence
  LRRK2 RNA guide
gagacagaaaccagagagguca

SEQ ID NO: 81611 - RNA, 22 nt, Artificial Sequence
  LRRK2 RNA guide
gagagacagaaaccagagaggu

SEQ ID NO: 81612 - RNA, 22 nt, Artificial Sequence
  LRRK2 RNA guide
gagaggucaguggaccccuaaa

SEQ ID NO: 81613 - RNA, 22 nt, Artificial Sequence
  LRRK2 RNA guide
gaggucaguggaccccuaaagc

SEQ ID NO: 81614 - RNA, 22 nt, Artificial Sequence
  LRRK2 RNA guide
gcaagucuggcuuuaggggucc

SEQ ID NO: 81615 - RNA, 22 nt, Artificial Sequence
  LRRK2 RNA guide
gcuuuagggguccacugaccuc

SEQ ID NO: 81616 - RNA, 22 nt, Artificial Sequence
  LRRK2 RNA guide
ggcaagucuggcuuuagggguc

SEQ ID NO: 81617 - RNA, 22 nt, Artificial Sequence
  LRRK2 RNA guide
ggcuuuagggguccacugaccu

SEQ ID NO: 81618 - RNA, 22 nt, Artificial Sequence
  LRRK2 RNA guide
gggcaagucuggcuuuaggggu

SEQ ID NO: 81619 - RNA, 22 nt, Artificial Sequence
  LRRK2 RNA guide
gggguccacugaccucucuggu

SEQ ID NO: 81620 - RNA, 22 nt, Artificial Sequence
  LRRK2 RNA guide
ggguccacugaccucucugguu

SEQ ID NO: 81621 - RNA, 22 nt, Artificial Sequence
  LRRK2 RNA guide
ggucaguggaccccuaaagcca

SEQ ID NO: 81622 - RNA, 22 nt, Artificial Sequence
  LRRK2 RNA guide
gguccacugaccucucugguuu

SEQ ID NO: 81623 - RNA, 22 nt, Artificial Sequence
  LRRK2 RNA guide
gucaguggaccccuaaagccag

SEQ ID NO: 81624 - RNA, 22 nt, Artificial Sequence
  LRRK2 RNA guide
guccacugaccucucugguuuc

SEQ ID NO: 81625 - RNA, 22 nt, Artificial Sequence
  LRRK2 RNA guide
gucuggcuuuagggguccacug

SEQ ID NO: 81626 - RNA, 22 nt, Artificial Sequence
  LRRK2 RNA guide
guggaccccuaaagccagacuu

SEQ ID NO: 81627 - RNA, 22 nt, Artificial Sequence
  LRRK2 RNA guide
uagggguccacugaccucucug

SEQ ID NO: 81628 - RNA, 22 nt, Artificial Sequence
  LRRK2 RNA guide
ucagggcaagucuggcuuuagg

SEQ ID NO: 81629 - RNA, 22 nt, Artificial Sequence
  LRRK2 RNA guide
ucaguggaccccuaaagccaga

SEQ ID NO: 81630 - RNA, 22 nt, Artificial Sequence
  LRRK2 RNA guide
uccacugaccucucugguuucu

SEQ ID NO: 81631 - RNA, 22 nt, Artificial Sequence
  LRRK2 RNA guide
ucuggcuuuagggguccacuga

SEQ ID NO: 81632 - RNA, 22 nt, Artificial Sequence
  LRRK2 RNA guide
uggaccccuaaagccagacuug

SEQ ID NO: 81633 - RNA, 22 nt, Artificial Sequence
  LRRK2 RNA guide
uggcuuuagggguccacugacc

SEQ ID NO: 81634 - RNA, 22 nt, Artificial Sequence
  LRRK2 RNA guide
uuagggguccacugaccucucu

SEQ ID NO: 81635 - RNA, 22 nt, Artificial Sequence
  LRRK2 RNA guide
uuuagggguccacugaccucuc

SEQ ID NO: 81636 - RNA, 20 nt, Artificial Sequence
  LRRK2 RNA guide
aaaccagagaggucaguuga

SEQ ID NO: 81637 - RNA, 20 nt, Artificial Sequence
  LRRK2 RNA guide
aaccagagaggucaguugac

SEQ ID NO: 81638 - RNA, 20 nt, Artificial Sequence
  LRRK2 RNA guide
aagucuggcuuuagggguca

SEQ ID NO: 81639 - RNA, 20 nt, Artificial Sequence
  LRRK2 RNA guide
accagagaggucaguugacc

SEQ ID NO: 81640 - RNA, 20 nt, Artificial Sequence
  LRRK2 RNA guide
agaaaccagagaggucaguu

SEQ ID NO: 81641 - RNA, 20 nt, Artificial Sequence
  LRRK2 RNA guide
agagaggucaguugaccccu

SEQ ID NO: 81642 - RNA, 20 nt, Artificial Sequence
  LRRK2 RNA guide
agaggucaguugaccccuaa

SEQ ID NO: 81643 - RNA, 20 nt, Artificial Sequence
  LRRK2 RNA guide
aggggucaacugaccucucu

SEQ ID NO: 81644 - RNA, 20 nt, Artificial Sequence
  LRRK2 RNA guide
aggucaguugaccccuaaag

SEQ ID NO: 81645 - RNA, 20 nt, Artificial Sequence
  LRRK2 RNA guide
agucuggcuuuaggggucaa

SEQ ID NO: 81646 - RNA, 20 nt, Artificial Sequence
  LRRK2 RNA guide
aguugaccccuaaagccaga

SEQ ID NO: 81647 - RNA, 20 nt, Artificial Sequence
  LRRK2 RNA guide
caacugaccucucugguuuc

SEQ ID NO: 81648 - RNA, 20 nt, Artificial Sequence
  LRRK2 RNA guide
cagagaggucaguugacccc

SEQ ID NO: 81649 - RNA, 20 nt, Artificial Sequence
  LRRK2 RNA guide
caguugaccccuaaagccag

SEQ ID NO: 81650 - RNA, 20 nt, Artificial Sequence
  LRRK2 RNA guide
ccagagaggucaguugaccc

SEQ ID NO: 81651 - RNA, 20 nt, Artificial Sequence
  LRRK2 RNA guide
cuggcuuuaggggucaacug

SEQ ID NO: 81652 - RNA, 20 nt, Artificial Sequence
  LRRK2 RNA guide
cuuuaggggucaacugaccu

SEQ ID NO: 81653 - RNA, 20 nt, Artificial Sequence
  LRRK2 RNA guide
gaaaccagagaggucaguug

SEQ ID NO: 81654 - RNA, 20 nt, Artificial Sequence
  LRRK2 RNA guide
gagaggucaguugaccccua

SEQ ID NO: 81655 - RNA, 20 nt, Artificial Sequence
  LRRK2 RNA guide
gaggucaguugaccccuaaa

SEQ ID NO: 81656 - RNA, 20 nt, Artificial Sequence
  LRRK2 RNA guide
gcuuuaggggucaacugacc

SEQ ID NO: 81657 - RNA, 20 nt, Artificial Sequence
  LRRK2 RNA guide
ggcuuuaggggucaacugac

SEQ ID NO: 81658 - RNA, 20 nt, Artificial Sequence
  LRRK2 RNA guide
ggggucaacugaccucucug

SEQ ID NO: 81659 - RNA, 20 nt, Artificial Sequence
  LRRK2 RNA guide
gggucaacugaccucucugg

SEQ ID NO: 81660 - RNA, 20 nt, Artificial Sequence
  LRRK2 RNA guide
ggucaacugaccucucuggu

SEQ ID NO: 81661 - RNA, 20 nt, Artificial Sequence
  LRRK2 RNA guide
ggucaguugaccccuaaagc

SEQ ID NO: 81662 - RNA, 20 nt, Artificial Sequence
  LRRK2 RNA guide
gucaacugaccucucugguu

SEQ ID NO: 81663 - RNA, 20 nt, Artificial Sequence
  LRRK2 RNA guide
gucaguugaccccuaaagcc

SEQ ID NO: 81664 - RNA, 20 nt, Artificial Sequence
  LRRK2 RNA guide
gucuggcuuuaggggucaac

SEQ ID NO: 81665 - RNA, 20 nt, Artificial Sequence
  LRRK2 RNA guide
guugaccccuaaagccagac

SEQ ID NO: 81666 - RNA, 20 nt, Artificial Sequence
  LRRK2 RNA guide
uaggggucaacugaccucuc

SEQ ID NO: 81667 - RNA, 20 nt, Artificial Sequence
  LRRK2 RNA guide
ucaacugaccucucugguuu

SEQ ID NO: 81668 - RNA, 20 nt, Artificial Sequence
  LRRK2 RNA guide
ucaguugaccccuaaagcca

SEQ ID NO: 81669 - RNA, 20 nt, Artificial Sequence
  LRRK2 RNA guide
ucuggcuuuaggggucaacu

SEQ ID NO: 81670 - RNA, 20 nt, Artificial Sequence
  LRRK2 RNA guide
uggcuuuaggggucaacuga

SEQ ID NO: 81671 - RNA, 20 nt, Artificial Sequence
  LRRK2 RNA guide
uuaggggucaacugaccucu

SEQ ID NO: 81672 - RNA, 20 nt, Artificial Sequence
  LRRK2 RNA guide
uugaccccuaaagccagacu

SEQ ID NO: 81673 - RNA, 20 nt, Artificial Sequence
  LRRK2 RNA guide
uuuaggggucaacugaccuc

SEQ ID NO: 81674 - RNA, 21 nt, Artificial Sequence
  LRRK2 RNA guide
aaaccagagaggucaguugac

SEQ ID NO: 81675 - RNA, 21 nt, Artificial Sequence
  LRRK2 RNA guide
aaccagagaggucaguugacc

SEQ ID NO: 81676 - RNA, 21 nt, Artificial Sequence
  LRRK2 RNA guide
aagucuggcuuuaggggucaa

SEQ ID NO: 81677 - RNA, 21 nt, Artificial Sequence
  LRRK2 RNA guide
accagagaggucaguugaccc

SEQ ID NO: 81678 - RNA, 21 nt, Artificial Sequence
  LRRK2 RNA guide
agaaaccagagaggucaguug

SEQ ID NO: 81679 - RNA, 21 nt, Artificial Sequence
  LRRK2 RNA guide
agagaggucaguugaccccua

SEQ ID NO: 81680 - RNA, 21 nt, Artificial Sequence
  LRRK2 RNA guide
agaggucaguugaccccuaaa

SEQ ID NO: 81681 - RNA, 21 nt, Artificial Sequence
  LRRK2 RNA guide
aggggucaacugaccucucug

SEQ ID NO: 81682 - RNA, 21 nt, Artificial Sequence
  LRRK2 RNA guide
aggucaguugaccccuaaagc

SEQ ID NO: 81683 - RNA, 21 nt, Artificial Sequence
  LRRK2 RNA guide
agucuggcuuuaggggucaac

SEQ ID NO: 81684 - RNA, 21 nt, Artificial Sequence
  LRRK2 RNA guide
aguugaccccuaaagccagac

SEQ ID NO: 81685 - RNA, 21 nt, Artificial Sequence
  LRRK2 RNA guide
caacugaccucucugguuucu

SEQ ID NO: 81686 - RNA, 21 nt, Artificial Sequence
  LRRK2 RNA guide
caagucuggcuuuagggguca

SEQ ID NO: 81687 - RNA, 21 nt, Artificial Sequence
  LRRK2 RNA guide
cagaaaccagagaggucaguu

SEQ ID NO: 81688 - RNA, 21 nt, Artificial Sequence
  LRRK2 RNA guide
cagagaggucaguugaccccu

SEQ ID NO: 81689 - RNA, 21 nt, Artificial Sequence
  LRRK2 RNA guide
caguugaccccuaaagccaga

SEQ ID NO: 81690 - RNA, 21 nt, Artificial Sequence
  LRRK2 RNA guide
ccagagaggucaguugacccc

SEQ ID NO: 81691 - RNA, 21 nt, Artificial Sequence
  LRRK2 RNA guide
cuggcuuuaggggucaacuga

SEQ ID NO: 81692 - RNA, 21 nt, Artificial Sequence
  LRRK2 RNA guide
cuuuaggggucaacugaccuc

SEQ ID NO: 81693 - RNA, 21 nt, Artificial Sequence
  LRRK2 RNA guide
gaaaccagagaggucaguuga

SEQ ID NO: 81694 - RNA, 21 nt, Artificial Sequence
  LRRK2 RNA guide
gagaggucaguugaccccuaa

SEQ ID NO: 81695 - RNA, 21 nt, Artificial Sequence
  LRRK2 RNA guide
gaggucaguugaccccuaaag

SEQ ID NO: 81696 - RNA, 21 nt, Artificial Sequence
  LRRK2 RNA guide
gcuuuaggggucaacugaccu

SEQ ID NO: 81697 - RNA, 21 nt, Artificial Sequence
  LRRK2 RNA guide
ggcuuuaggggucaacugacc

SEQ ID NO: 81698 - RNA, 21 nt, Artificial Sequence
  LRRK2 RNA guide
ggggucaacugaccucucugg

SEQ ID NO: 81699 - RNA, 21 nt, Artificial Sequence
  LRRK2 RNA guide
gggucaacugaccucucuggu

SEQ ID NO: 81700 - RNA, 21 nt, Artificial Sequence
  LRRK2 RNA guide
ggucaacugaccucucugguu

SEQ ID NO: 81701 - RNA, 21 nt, Artificial Sequence
  LRRK2 RNA guide
ggucaguugaccccuaaagcc

SEQ ID NO: 81702 - RNA, 21 nt, Artificial Sequence
  LRRK2 RNA guide
gucaacugaccucucugguuu

SEQ ID NO: 81703 - RNA, 21 nt, Artificial Sequence
  LRRK2 RNA guide
gucaguugaccccuaaagcca

SEQ ID NO: 81704 - RNA, 21 nt, Artificial Sequence
  LRRK2 RNA guide
gucuggcuuuaggggucaacu

SEQ ID NO: 81705 - RNA, 21 nt, Artificial Sequence
  LRRK2 RNA guide
guugaccccuaaagccagacu

SEQ ID NO: 81706 - RNA, 21 nt, Artificial Sequence
  LRRK2 RNA guide
uaggggucaacugaccucucu

SEQ ID NO: 81707 - RNA, 21 nt, Artificial Sequence
  LRRK2 RNA guide
ucaacugaccucucugguuuc

SEQ ID NO: 81708 - RNA, 21 nt, Artificial Sequence
  LRRK2 RNA guide
ucaguugaccccuaaagccag

SEQ ID NO: 81709 - RNA, 21 nt, Artificial Sequence
  LRRK2 RNA guide
ucuggcuuuaggggucaacug

SEQ ID NO: 81710 - RNA, 21 nt, Artificial Sequence
  LRRK2 RNA guide
uggcuuuaggggucaacugac

SEQ ID NO: 81711 - RNA, 21 nt, Artificial Sequence
  LRRK2 RNA guide
uuaggggucaacugaccucuc

SEQ ID NO: 81712 - RNA, 21 nt, Artificial Sequence
  LRRK2 RNA guide
uugaccccuaaagccagacuu

SEQ ID NO: 81713 - RNA, 21 nt, Artificial Sequence
  LRRK2 RNA guide
uuuaggggucaacugaccucu

SEQ ID NO: 81714 - RNA, 22 nt, Artificial Sequence
  LRRK2 RNA guide
aaaccagagaggucaguugacc

SEQ ID NO: 81715 - RNA, 22 nt, Artificial Sequence
  LRRK2 RNA guide
aaccagagaggucaguugaccc

SEQ ID NO: 81716 - RNA, 22 nt, Artificial Sequence
  LRRK2 RNA guide
aagucuggcuuuaggggucaac

SEQ ID NO: 81717 - RNA, 22 nt, Artificial Sequence
  LRRK2 RNA guide
acagaaaccagagaggucaguu

SEQ ID NO: 81718 - RNA, 22 nt, Artificial Sequence
  LRRK2 RNA guide
accagagaggucaguugacccc

SEQ ID NO: 81719 - RNA, 22 nt, Artificial Sequence
  LRRK2 RNA guide
agaaaccagagaggucaguuga

SEQ ID NO: 81720 - RNA, 22 nt, Artificial Sequence
  LRRK2 RNA guide
agagaggucaguugaccccuaa

SEQ ID NO: 81721 - RNA, 22 nt, Artificial Sequence
  LRRK2 RNA guide
agaggucaguugaccccuaaag

SEQ ID NO: 81722 - RNA, 22 nt, Artificial Sequence
  LRRK2 RNA guide
aggggucaacugaccucucugg

SEQ ID NO: 81723 - RNA, 22 nt, Artificial Sequence
  LRRK2 RNA guide
aggucaguugaccccuaaagcc

SEQ ID NO: 81724 - RNA, 22 nt, Artificial Sequence
  LRRK2 RNA guide
agucuggcuuuaggggucaacu

SEQ ID NO: 81725 - RNA, 22 nt, Artificial Sequence
  LRRK2 RNA guide
aguugaccccuaaagccagacu

SEQ ID NO: 81726 - RNA, 22 nt, Artificial Sequence
  LRRK2 RNA guide
caacugaccucucugguuucug

SEQ ID NO: 81727 - RNA, 22 nt, Artificial Sequence
  LRRK2 RNA guide
caagucuggcuuuaggggucaa

SEQ ID NO: 81728 - RNA, 22 nt, Artificial Sequence
  LRRK2 RNA guide
cagaaaccagagaggucaguug

SEQ ID NO: 81729 - RNA, 22 nt, Artificial Sequence
  LRRK2 RNA guide
cagagaggucaguugaccccua

SEQ ID NO: 81730 - RNA, 22 nt, Artificial Sequence
  LRRK2 RNA guide
caguugaccccuaaagccagac

SEQ ID NO: 81731 - RNA, 22 nt, Artificial Sequence
  LRRK2 RNA guide
ccagagaggucaguugaccccu

SEQ ID NO: 81732 - RNA, 22 nt, Artificial Sequence
  LRRK2 RNA guide
cuggcuuuaggggucaacugac

SEQ ID NO: 81733 - RNA, 22 nt, Artificial Sequence
  LRRK2 RNA guide
cuuuaggggucaacugaccucu

SEQ ID NO: 81734 - RNA, 22 nt, Artificial Sequence
  LRRK2 RNA guide
gaaaccagagaggucaguugac

SEQ ID NO: 81735 - RNA, 22 nt, Artificial Sequence
  LRRK2 RNA guide
gagaggucaguugaccccuaaa

SEQ ID NO: 81736 - RNA, 22 nt, Artificial Sequence
  LRRK2 RNA guide
gaggucaguugaccccuaaagc

SEQ ID NO: 81737 - RNA, 22 nt, Artificial Sequence
  LRRK2 RNA guide
gcaagucuggcuuuagggguca

SEQ ID NO: 81738 - RNA, 22 nt, Artificial Sequence
  LRRK2 RNA guide
gcuuuaggggucaacugaccuc

SEQ ID NO: 81739 - RNA, 22 nt, Artificial Sequence
  LRRK2 RNA guide
ggcuuuaggggucaacugaccu

SEQ ID NO: 81740 - RNA, 22 nt, Artificial Sequence
  LRRK2 RNA guide
ggggucaacugaccucucuggu

SEQ ID NO: 81741 - RNA, 22 nt, Artificial Sequence
  LRRK2 RNA guide
gggucaacugaccucucugguu

SEQ ID NO: 81742 - RNA, 22 nt, Artificial Sequence
  LRRK2 RNA guide
ggucaacugaccucucugguuu

SEQ ID NO: 81743 - RNA, 22 nt, Artificial Sequence
  LRRK2 RNA guide
ggucaguugaccccuaaagcca

SEQ ID NO: 81744 - RNA, 22 nt, Artificial Sequence
  LRRK2 RNA guide
gucaacugaccucucugguuuc

SEQ ID NO: 81745 - RNA, 22 nt, Artificial Sequence
  LRRK2 RNA guide
gucaguugaccccuaaagccag

SEQ ID NO: 81746 - RNA, 22 nt, Artificial Sequence
  LRRK2 RNA guide
gucuggcuuuaggggucaacug

SEQ ID NO: 81747 - RNA, 22 nt, Artificial Sequence
  LRRK2 RNA guide
guugaccccuaaagccagacuu

SEQ ID NO: 81748 - RNA, 22 nt, Artificial Sequence
  LRRK2 RNA guide
uaggggucaacugaccucucug

SEQ ID NO: 81749 - RNA, 22 nt, Artificial Sequence
  LRRK2 RNA guide
ucaacugaccucucugguuucu

SEQ ID NO: 81750 - RNA, 22 nt, Artificial Sequence
  LRRK2 RNA guide
ucaguugaccccuaaagccaga

SEQ ID NO: 81751 - RNA, 22 nt, Artificial Sequence
  LRRK2 RNA guide
ucuggcuuuaggggucaacuga

SEQ ID NO: 81752 - RNA, 22 nt, Artificial Sequence
  LRRK2 RNA guide
uggcuuuaggggucaacugacc

SEQ ID NO: 81753 - RNA, 22 nt, Artificial Sequence
  LRRK2 RNA guide
uuaggggucaacugaccucucu

SEQ ID NO: 81754 - RNA, 22 nt, Artificial Sequence
  LRRK2 RNA guide
uugaccccuaaagccagacuug

SEQ ID NO: 81755 - RNA, 22 nt, Artificial Sequence
  LRRK2 RNA guide
uuuaggggucaacugaccucuc

SEQ ID NO: 81756 - RNA, 20 nt, Artificial Sequence
  LRRK2 RNA guide
aaggaauuaucaggccgaaa

SEQ ID NO: 81757 - RNA, 20 nt, Artificial Sequence
  LRRK2 RNA guide
aauuaucaggccgaaaucac

SEQ ID NO: 81758 - RNA, 20 nt, Artificial Sequence
  LRRK2 RNA guide
acaccauaaggaauuaucag

SEQ ID NO: 81759 - RNA, 20 nt, Artificial Sequence
  LRRK2 RNA guide
accauaaggaauuaucaggc

SEQ ID NO: 81760 - RNA, 20 nt, Artificial Sequence
  LRRK2 RNA guide
acugugauuucggccugaua

SEQ ID NO: 81761 - RNA, 20 nt, Artificial Sequence
  LRRK2 RNA guide
aggaauuaucaggccgaaau

SEQ ID NO: 81762 - RNA, 20 nt, Artificial Sequence
  LRRK2 RNA guide
aggccgaaaucacagugaga

SEQ ID NO: 81763 - RNA, 20 nt, Artificial Sequence
  LRRK2 RNA guide
auaaggaauuaucaggccga

SEQ ID NO: 81764 - RNA, 20 nt, Artificial Sequence
  LRRK2 RNA guide
aucaggccgaaaucacagug

SEQ ID NO: 81765 - RNA, 20 nt, Artificial Sequence
  LRRK2 RNA guide
auuaucaggccgaaaucaca

SEQ ID NO: 81766 - RNA, 20 nt, Artificial Sequence
  LRRK2 RNA guide
auuucggccugauaauuccu

SEQ ID NO: 81767 - RNA, 20 nt, Artificial Sequence
  LRRK2 RNA guide
caccauaaggaauuaucagg

SEQ ID NO: 81768 - RNA, 20 nt, Artificial Sequence
  LRRK2 RNA guide
cacugugauuucggccugau

SEQ ID NO: 81769 - RNA, 20 nt, Artificial Sequence
  LRRK2 RNA guide
caggccgaaaucacagugag

SEQ ID NO: 81770 - RNA, 20 nt, Artificial Sequence
  LRRK2 RNA guide
cauaaggaauuaucaggccg

SEQ ID NO: 81771 - RNA, 20 nt, Artificial Sequence
  LRRK2 RNA guide
ccauaaggaauuaucaggcc

SEQ ID NO: 81772 - RNA, 20 nt, Artificial Sequence
  LRRK2 RNA guide
ccgaaaucacagugagagac

SEQ ID NO: 81773 - RNA, 20 nt, Artificial Sequence
  LRRK2 RNA guide
cggccugauaauuccuuaug

SEQ ID NO: 81774 - RNA, 20 nt, Artificial Sequence
  LRRK2 RNA guide
cucacugugauuucggccug

SEQ ID NO: 81775 - RNA, 20 nt, Artificial Sequence
  LRRK2 RNA guide
cucucacugugauuucggcc

SEQ ID NO: 81776 - RNA, 20 nt, Artificial Sequence
  LRRK2 RNA guide
cugucucucacugugauuuc

SEQ ID NO: 81777 - RNA, 20 nt, Artificial Sequence
  LRRK2 RNA guide
cugugauuucggccugauaa

SEQ ID NO: 81778 - RNA, 20 nt, Artificial Sequence
  LRRK2 RNA guide
gaauuaucaggccgaaauca

SEQ ID NO: 81779 - RNA, 20 nt, Artificial Sequence
  LRRK2 RNA guide
gacaccauaaggaauuauca

SEQ ID NO: 81780 - RNA, 20 nt, Artificial Sequence
  LRRK2 RNA guide
gauuucggccugauaauucc

SEQ ID NO: 81781 - RNA, 20 nt, Artificial Sequence
  LRRK2 RNA guide
gccgaaaucacagugagaga

SEQ ID NO: 81782 - RNA, 20 nt, Artificial Sequence
  LRRK2 RNA guide
ggaauuaucaggccgaaauc

SEQ ID NO: 81783 - RNA, 20 nt, Artificial Sequence
  LRRK2 RNA guide
ggccgaaaucacagugagag

SEQ ID NO: 81784 - RNA, 20 nt, Artificial Sequence
  LRRK2 RNA guide
gucucucacugugauuucgg

SEQ ID NO: 81785 - RNA, 20 nt, Artificial Sequence
  LRRK2 RNA guide
gugauuucggccugauaauu

SEQ ID NO: 81786 - RNA, 20 nt, Artificial Sequence
  LRRK2 RNA guide
guuucugucucucacuguga

SEQ ID NO: 81787 - RNA, 20 nt, Artificial Sequence
  LRRK2 RNA guide
uaaggaauuaucaggccgaa

SEQ ID NO: 81788 - RNA, 20 nt, Artificial Sequence
  LRRK2 RNA guide
uaucaggccgaaaucacagu

SEQ ID NO: 81789 - RNA, 20 nt, Artificial Sequence
  LRRK2 RNA guide
ucacugugauuucggccuga

SEQ ID NO: 81790 - RNA, 20 nt, Artificial Sequence
  LRRK2 RNA guide
ucaggccgaaaucacaguga

SEQ ID NO: 81791 - RNA, 20 nt, Artificial Sequence
  LRRK2 RNA guide
ucggccugauaauuccuuau

SEQ ID NO: 81792 - RNA, 20 nt, Artificial Sequence
  LRRK2 RNA guide
ucucacugugauuucggccu

SEQ ID NO: 81793 - RNA, 20 nt, Artificial Sequence
  LRRK2 RNA guide
ucucucacugugauuucggc

SEQ ID NO: 81794 - RNA, 20 nt, Artificial Sequence
  LRRK2 RNA guide
ucugucucucacugugauuu

SEQ ID NO: 81795 - RNA, 20 nt, Artificial Sequence
  LRRK2 RNA guide
ugacaccauaaggaauuauc

SEQ ID NO: 81796 - RNA, 20 nt, Artificial Sequence
  LRRK2 RNA guide
ugauuucggccugauaauuc

SEQ ID NO: 81797 - RNA, 20 nt, Artificial Sequence
  LRRK2 RNA guide
ugucucucacugugauuucg

SEQ ID NO: 81798 - RNA, 20 nt, Artificial Sequence
  LRRK2 RNA guide
ugugauuucggccugauaau

SEQ ID NO: 81799 - RNA, 20 nt, Artificial Sequence
  LRRK2 RNA guide
uuaucaggccgaaaucacag

SEQ ID NO: 81800 - RNA, 20 nt, Artificial Sequence
  LRRK2 RNA guide
uucggccugauaauuccuua

SEQ ID NO: 81801 - RNA, 20 nt, Artificial Sequence
  LRRK2 RNA guide
uucugucucucacugugauu

SEQ ID NO: 81802 - RNA, 20 nt, Artificial Sequence
  LRRK2 RNA guide
uuucggccugauaauuccuu

SEQ ID NO: 81803 - RNA, 20 nt, Artificial Sequence
  LRRK2 RNA guide
uuucugucucucacugugau

SEQ ID NO: 81804 - RNA, 21 nt, Artificial Sequence
  LRRK2 RNA guide
aaggaauuaucaggccgaaau

SEQ ID NO: 81805 - RNA, 21 nt, Artificial Sequence
  LRRK2 RNA guide
aauuaucaggccgaaaucaca

SEQ ID NO: 81806 - RNA, 21 nt, Artificial Sequence
  LRRK2 RNA guide
acaccauaaggaauuaucagg

SEQ ID NO: 81807 - RNA, 21 nt, Artificial Sequence
  LRRK2 RNA guide
accauaaggaauuaucaggcc

SEQ ID NO: 81808 - RNA, 21 nt, Artificial Sequence
  LRRK2 RNA guide
acugugauuucggccugauaa

SEQ ID NO: 81809 - RNA, 21 nt, Artificial Sequence
  LRRK2 RNA guide
aggaauuaucaggccgaaauc

SEQ ID NO: 81810 - RNA, 21 nt, Artificial Sequence
  LRRK2 RNA guide
aggccgaaaucacagugagag

SEQ ID NO: 81811 - RNA, 21 nt, Artificial Sequence
  LRRK2 RNA guide
auaaggaauuaucaggccgaa

SEQ ID NO: 81812 - RNA, 21 nt, Artificial Sequence
  LRRK2 RNA guide
aucaggccgaaaucacaguga

SEQ ID NO: 81813 - RNA, 21 nt, Artificial Sequence
  LRRK2 RNA guide
auuaucaggccgaaaucacag

SEQ ID NO: 81814 - RNA, 21 nt, Artificial Sequence
  LRRK2 RNA guide
auuucggccugauaauuccuu

SEQ ID NO: 81815 - RNA, 21 nt, Artificial Sequence
  LRRK2 RNA guide
caccauaaggaauuaucaggc

SEQ ID NO: 81816 - RNA, 21 nt, Artificial Sequence
  LRRK2 RNA guide
cacugugauuucggccugaua

SEQ ID NO: 81817 - RNA, 21 nt, Artificial Sequence
  LRRK2 RNA guide
caggccgaaaucacagugaga

SEQ ID NO: 81818 - RNA, 21 nt, Artificial Sequence
  LRRK2 RNA guide
cauaaggaauuaucaggccga

SEQ ID NO: 81819 - RNA, 21 nt, Artificial Sequence
  LRRK2 RNA guide
ccauaaggaauuaucaggccg

SEQ ID NO: 81820 - RNA, 21 nt, Artificial Sequence
  LRRK2 RNA guide
ccgaaaucacagugagagaca

SEQ ID NO: 81821 - RNA, 21 nt, Artificial Sequence
  LRRK2 RNA guide
cggccugauaauuccuuaugg

SEQ ID NO: 81822 - RNA, 21 nt, Artificial Sequence
  LRRK2 RNA guide
cucacugugauuucggccuga

SEQ ID NO: 81823 - RNA, 21 nt, Artificial Sequence
  LRRK2 RNA guide
cucucacugugauuucggccu

SEQ ID NO: 81824 - RNA, 21 nt, Artificial Sequence
  LRRK2 RNA guide
cugacaccauaaggaauuauc

SEQ ID NO: 81825 - RNA, 21 nt, Artificial Sequence
  LRRK2 RNA guide
cugucucucacugugauuucg

SEQ ID NO: 81826 - RNA, 21 nt, Artificial Sequence
  LRRK2 RNA guide
cugugauuucggccugauaau

SEQ ID NO: 81827 - RNA, 21 nt, Artificial Sequence
  LRRK2 RNA guide
gaauuaucaggccgaaaucac

SEQ ID NO: 81828 - RNA, 21 nt, Artificial Sequence
  LRRK2 RNA guide
gacaccauaaggaauuaucag

SEQ ID NO: 81829 - RNA, 21 nt, Artificial Sequence
  LRRK2 RNA guide
gauuucggccugauaauuccu

SEQ ID NO: 81830 - RNA, 21 nt, Artificial Sequence
  LRRK2 RNA guide
gccgaaaucacagugagagac

SEQ ID NO: 81831 - RNA, 21 nt, Artificial Sequence
  LRRK2 RNA guide
ggaauuaucaggccgaaauca

SEQ ID NO: 81832 - RNA, 21 nt, Artificial Sequence
  LRRK2 RNA guide
ggccgaaaucacagugagaga

SEQ ID NO: 81833 - RNA, 21 nt, Artificial Sequence
  LRRK2 RNA guide
gguuucugucucucacuguga

SEQ ID NO: 81834 - RNA, 21 nt, Artificial Sequence
  LRRK2 RNA guide
gucucucacugugauuucggc

SEQ ID NO: 81835 - RNA, 21 nt, Artificial Sequence
  LRRK2 RNA guide
gugauuucggccugauaauuc

SEQ ID NO: 81836 - RNA, 21 nt, Artificial Sequence
  LRRK2 RNA guide
guuucugucucucacugugau

SEQ ID NO: 81837 - RNA, 21 nt, Artificial Sequence
  LRRK2 RNA guide
uaaggaauuaucaggccgaaa

SEQ ID NO: 81838 - RNA, 21 nt, Artificial Sequence
  LRRK2 RNA guide
uaucaggccgaaaucacagug

SEQ ID NO: 81839 - RNA, 21 nt, Artificial Sequence
  LRRK2 RNA guide
ucacugugauuucggccugau

SEQ ID NO: 81840 - RNA, 21 nt, Artificial Sequence
  LRRK2 RNA guide
ucaggccgaaaucacagugag

SEQ ID NO: 81841 - RNA, 21 nt, Artificial Sequence
  LRRK2 RNA guide
ucggccugauaauuccuuaug

SEQ ID NO: 81842 - RNA, 21 nt, Artificial Sequence
  LRRK2 RNA guide
ucucacugugauuucggccug

SEQ ID NO: 81843 - RNA, 21 nt, Artificial Sequence
  LRRK2 RNA guide
ucucucacugugauuucggcc

SEQ ID NO: 81844 - RNA, 21 nt, Artificial Sequence
  LRRK2 RNA guide
ucugucucucacugugauuuc

SEQ ID NO: 81845 - RNA, 21 nt, Artificial Sequence
  LRRK2 RNA guide
ugacaccauaaggaauuauca

SEQ ID NO: 81846 - RNA, 21 nt, Artificial Sequence
  LRRK2 RNA guide
ugauuucggccugauaauucc

SEQ ID NO: 81847 - RNA, 21 nt, Artificial Sequence
  LRRK2 RNA guide
ugucucucacugugauuucgg

SEQ ID NO: 81848 - RNA, 21 nt, Artificial Sequence
  LRRK2 RNA guide
ugugauuucggccugauaauu

SEQ ID NO: 81849 - RNA, 21 nt, Artificial Sequence
  LRRK2 RNA guide
uuaucaggccgaaaucacagu

SEQ ID NO: 81850 - RNA, 21 nt, Artificial Sequence
  LRRK2 RNA guide
uucggccugauaauuccuuau

SEQ ID NO: 81851 - RNA, 21 nt, Artificial Sequence
  LRRK2 RNA guide
uucugucucucacugugauuu

SEQ ID NO: 81852 - RNA, 21 nt, Artificial Sequence
  LRRK2 RNA guide
uuucggccugauaauuccuua

SEQ ID NO: 81853 - RNA, 21 nt, Artificial Sequence
  LRRK2 RNA guide
uuucugucucucacugugauu

SEQ ID NO: 81854 - RNA, 22 nt, Artificial Sequence
  LRRK2 RNA guide
aaggaauuaucaggccgaaauc

SEQ ID NO: 81855 - RNA, 22 nt, Artificial Sequence
  LRRK2 RNA guide
aauuaucaggccgaaaucacag

SEQ ID NO: 81856 - RNA, 22 nt, Artificial Sequence
  LRRK2 RNA guide
acaccauaaggaauuaucaggc

SEQ ID NO: 81857 - RNA, 22 nt, Artificial Sequence
  LRRK2 RNA guide
accauaaggaauuaucaggccg

SEQ ID NO: 81858 - RNA, 22 nt, Artificial Sequence
  LRRK2 RNA guide
acugugauuucggccugauaau

SEQ ID NO: 81859 - RNA, 22 nt, Artificial Sequence
  LRRK2 RNA guide
aggaauuaucaggccgaaauca

SEQ ID NO: 81860 - RNA, 22 nt, Artificial Sequence
  LRRK2 RNA guide
aggccgaaaucacagugagaga

SEQ ID NO: 81861 - RNA, 22 nt, Artificial Sequence
  LRRK2 RNA guide
auaaggaauuaucaggccgaaa

SEQ ID NO: 81862 - RNA, 22 nt, Artificial Sequence
  LRRK2 RNA guide
aucaggccgaaaucacagugag

SEQ ID NO: 81863 - RNA, 22 nt, Artificial Sequence
  LRRK2 RNA guide
auuaucaggccgaaaucacagu

SEQ ID NO: 81864 - RNA, 22 nt, Artificial Sequence
  LRRK2 RNA guide
auuucggccugauaauuccuua

SEQ ID NO: 81865 - RNA, 22 nt, Artificial Sequence
  LRRK2 RNA guide
caccauaaggaauuaucaggcc

SEQ ID NO: 81866 - RNA, 22 nt, Artificial Sequence
  LRRK2 RNA guide
cacugugauuucggccugauaa

SEQ ID NO: 81867 - RNA, 22 nt, Artificial Sequence
  LRRK2 RNA guide
caggccgaaaucacagugagag

SEQ ID NO: 81868 - RNA, 22 nt, Artificial Sequence
  LRRK2 RNA guide
cauaaggaauuaucaggccgaa

SEQ ID NO: 81869 - RNA, 22 nt, Artificial Sequence
  LRRK2 RNA guide
ccauaaggaauuaucaggccga

SEQ ID NO: 81870 - RNA, 22 nt, Artificial Sequence
  LRRK2 RNA guide
ccgaaaucacagugagagacag

SEQ ID NO: 81871 - RNA, 22 nt, Artificial Sequence
  LRRK2 RNA guide
cggccugauaauuccuuauggu

SEQ ID NO: 81872 - RNA, 22 nt, Artificial Sequence
  LRRK2 RNA guide
cucacugugauuucggccugau

SEQ ID NO: 81873 - RNA, 22 nt, Artificial Sequence
  LRRK2 RNA guide
cucucacugugauuucggccug

SEQ ID NO: 81874 - RNA, 22 nt, Artificial Sequence
  LRRK2 RNA guide
cugacaccauaaggaauuauca

SEQ ID NO: 81875 - RNA, 22 nt, Artificial Sequence
  LRRK2 RNA guide
cugucucucacugugauuucgg

SEQ ID NO: 81876 - RNA, 22 nt, Artificial Sequence
  LRRK2 RNA guide
cugugauuucggccugauaauu

SEQ ID NO: 81877 - RNA, 22 nt, Artificial Sequence
  LRRK2 RNA guide
gaauuaucaggccgaaaucaca

SEQ ID NO: 81878 - RNA, 22 nt, Artificial Sequence
  LRRK2 RNA guide
gacaccauaaggaauuaucagg

SEQ ID NO: 81879 - RNA, 22 nt, Artificial Sequence
  LRRK2 RNA guide
gauuucggccugauaauuccuu

SEQ ID NO: 81880 - RNA, 22 nt, Artificial Sequence
  LRRK2 RNA guide
gccgaaaucacagugagagaca

SEQ ID NO: 81881 - RNA, 22 nt, Artificial Sequence
  LRRK2 RNA guide
ggaauuaucaggccgaaaucac

SEQ ID NO: 81882 - RNA, 22 nt, Artificial Sequence
  LRRK2 RNA guide
ggccgaaaucacagugagagac

SEQ ID NO: 81883 - RNA, 22 nt, Artificial Sequence
  LRRK2 RNA guide
gguuucugucucucacugugau

SEQ ID NO: 81884 - RNA, 22 nt, Artificial Sequence
  LRRK2 RNA guide
gucucucacugugauuucggcc

SEQ ID NO: 81885 - RNA, 22 nt, Artificial Sequence
  LRRK2 RNA guide
gugauuucggccugauaauucc

SEQ ID NO: 81886 - RNA, 22 nt, Artificial Sequence
  LRRK2 RNA guide
guuucugucucucacugugauu

SEQ ID NO: 81887 - RNA, 22 nt, Artificial Sequence
  LRRK2 RNA guide
uaaggaauuaucaggccgaaau

SEQ ID NO: 81888 - RNA, 22 nt, Artificial Sequence
  LRRK2 RNA guide
uaucaggccgaaaucacaguga

SEQ ID NO: 81889 - RNA, 22 nt, Artificial Sequence
  LRRK2 RNA guide
ucacugugauuucggccugaua

SEQ ID NO: 81890 - RNA, 22 nt, Artificial Sequence
  LRRK2 RNA guide
ucaggccgaaaucacagugaga

SEQ ID NO: 81891 - RNA, 22 nt, Artificial Sequence
  LRRK2 RNA guide
ucggccugauaauuccuuaugg

SEQ ID NO: 81892 - RNA, 22 nt, Artificial Sequence
  LRRK2 RNA guide
ucucacugugauuucggccuga

SEQ ID NO: 81893 - RNA, 22 nt, Artificial Sequence
  LRRK2 RNA guide
ucucucacugugauuucggccu

SEQ ID NO: 81894 - RNA, 22 nt, Artificial Sequence
  LRRK2 RNA guide
ucugacaccauaaggaauuauc

SEQ ID NO: 81895 - RNA, 22 nt, Artificial Sequence
  LRRK2 RNA guide
ucugucucucacugugauuucg

SEQ ID NO: 81896 - RNA, 22 nt, Artificial Sequence
  LRRK2 RNA guide
ugacaccauaaggaauuaucag

SEQ ID NO: 81897 - RNA, 22 nt, Artificial Sequence
  LRRK2 RNA guide
ugauuucggccugauaauuccu

SEQ ID NO: 81898 - RNA, 22 nt, Artificial Sequence
  LRRK2 RNA guide
ugguuucugucucucacuguga

SEQ ID NO: 81899 - RNA, 22 nt, Artificial Sequence
  LRRK2 RNA guide
ugucucucacugugauuucggc

SEQ ID NO: 81900 - RNA, 22 nt, Artificial Sequence
  LRRK2 RNA guide
ugugauuucggccugauaauuc

SEQ ID NO: 81901 - RNA, 22 nt, Artificial Sequence
  LRRK2 RNA guide
uuaucaggccgaaaucacagug

SEQ ID NO: 81902 - RNA, 22 nt, Artificial Sequence
  LRRK2 RNA guide
uucggccugauaauuccuuaug

SEQ ID NO: 81903 - RNA, 22 nt, Artificial Sequence
  LRRK2 RNA guide
uucugucucucacugugauuuc

SEQ ID NO: 81904 - RNA, 22 nt, Artificial Sequence
  LRRK2 RNA guide
uuucggccugauaauuccuuau

SEQ ID NO: 81905 - RNA, 22 nt, Artificial Sequence
  LRRK2 RNA guide
uuucugucucucacugugauuu

SEQ ID NO: 81906 - RNA, 20 nt, Artificial Sequence
  LRRK2 RNA guide
aaggaauuaucaggcugaaa

SEQ ID NO: 81907 - RNA, 20 nt, Artificial Sequence
  LRRK2 RNA guide
aauuaucaggcugaaaucac

SEQ ID NO: 81908 - RNA, 20 nt, Artificial Sequence
  LRRK2 RNA guide
acugugauuucagccugaua

SEQ ID NO: 81909 - RNA, 20 nt, Artificial Sequence
  LRRK2 RNA guide
aggaauuaucaggcugaaau

SEQ ID NO: 81910 - RNA, 20 nt, Artificial Sequence
  LRRK2 RNA guide
aggcugaaaucacagugaga

SEQ ID NO: 81911 - RNA, 20 nt, Artificial Sequence
  LRRK2 RNA guide
auaaggaauuaucaggcuga

SEQ ID NO: 81912 - RNA, 20 nt, Artificial Sequence
  LRRK2 RNA guide
aucaggcugaaaucacagug

SEQ ID NO: 81913 - RNA, 20 nt, Artificial Sequence
  LRRK2 RNA guide
auuaucaggcugaaaucaca

SEQ ID NO: 81914 - RNA, 20 nt, Artificial Sequence
  LRRK2 RNA guide
auuucagccugauaauuccu

SEQ ID NO: 81915 - RNA, 20 nt, Artificial Sequence
  LRRK2 RNA guide
cacugugauuucagccugau

SEQ ID NO: 81916 - RNA, 20 nt, Artificial Sequence
  LRRK2 RNA guide
cagccugauaauuccuuaug

SEQ ID NO: 81917 - RNA, 20 nt, Artificial Sequence
  LRRK2 RNA guide
caggcugaaaucacagugag

SEQ ID NO: 81918 - RNA, 20 nt, Artificial Sequence
  LRRK2 RNA guide
cauaaggaauuaucaggcug

SEQ ID NO: 81919 - RNA, 20 nt, Artificial Sequence
  LRRK2 RNA guide
ccauaaggaauuaucaggcu

SEQ ID NO: 81920 - RNA, 20 nt, Artificial Sequence
  LRRK2 RNA guide
cucacugugauuucagccug

SEQ ID NO: 81921 - RNA, 20 nt, Artificial Sequence
  LRRK2 RNA guide
cucucacugugauuucagcc

SEQ ID NO: 81922 - RNA, 20 nt, Artificial Sequence
  LRRK2 RNA guide
cugaaaucacagugagagac

SEQ ID NO: 81923 - RNA, 20 nt, Artificial Sequence
  LRRK2 RNA guide
cugugauuucagccugauaa

SEQ ID NO: 81924 - RNA, 20 nt, Artificial Sequence
  LRRK2 RNA guide
gaauuaucaggcugaaauca

SEQ ID NO: 81925 - RNA, 20 nt, Artificial Sequence
  LRRK2 RNA guide
gauuucagccugauaauucc

SEQ ID NO: 81926 - RNA, 20 nt, Artificial Sequence
  LRRK2 RNA guide
gcugaaaucacagugagaga

SEQ ID NO: 81927 - RNA, 20 nt, Artificial Sequence
  LRRK2 RNA guide
ggaauuaucaggcugaaauc

SEQ ID NO: 81928 - RNA, 20 nt, Artificial Sequence
  LRRK2 RNA guide
ggcugaaaucacagugagag

SEQ ID NO: 81929 - RNA, 20 nt, Artificial Sequence
  LRRK2 RNA guide
gucucucacugugauuucag

SEQ ID NO: 81930 - RNA, 20 nt, Artificial Sequence
  LRRK2 RNA guide
gugauuucagccugauaauu

SEQ ID NO: 81931 - RNA, 20 nt, Artificial Sequence
  LRRK2 RNA guide
uaaggaauuaucaggcugaa

SEQ ID NO: 81932 - RNA, 20 nt, Artificial Sequence
  LRRK2 RNA guide
uaucaggcugaaaucacagu

SEQ ID NO: 81933 - RNA, 20 nt, Artificial Sequence
  LRRK2 RNA guide
ucacugugauuucagccuga

SEQ ID NO: 81934 - RNA, 20 nt, Artificial Sequence
  LRRK2 RNA guide
ucagccugauaauuccuuau

SEQ ID NO: 81935 - RNA, 20 nt, Artificial Sequence
  LRRK2 RNA guide
ucaggcugaaaucacaguga

SEQ ID NO: 81936 - RNA, 20 nt, Artificial Sequence
  LRRK2 RNA guide
ucucacugugauuucagccu

SEQ ID NO: 81937 - RNA, 20 nt, Artificial Sequence
  LRRK2 RNA guide
ucucucacugugauuucagc

SEQ ID NO: 81938 - RNA, 20 nt, Artificial Sequence
  LRRK2 RNA guide
ugauuucagccugauaauuc

SEQ ID NO: 81939 - RNA, 20 nt, Artificial Sequence
  LRRK2 RNA guide
ugucucucacugugauuuca

SEQ ID NO: 81940 - RNA, 20 nt, Artificial Sequence
  LRRK2 RNA guide
ugugauuucagccugauaau

SEQ ID NO: 81941 - RNA, 20 nt, Artificial Sequence
  LRRK2 RNA guide
uuaucaggcugaaaucacag

SEQ ID NO: 81942 - RNA, 20 nt, Artificial Sequence
  LRRK2 RNA guide
uucagccugauaauuccuua

SEQ ID NO: 81943 - RNA, 20 nt, Artificial Sequence
  LRRK2 RNA guide
uuucagccugauaauuccuu

SEQ ID NO: 81944 - RNA, 21 nt, Artificial Sequence
  LRRK2 RNA guide
aaggaauuaucaggcugaaau

SEQ ID NO: 81945 - RNA, 21 nt, Artificial Sequence
  LRRK2 RNA guide
aauuaucaggcugaaaucaca

SEQ ID NO: 81946 - RNA, 21 nt, Artificial Sequence
  LRRK2 RNA guide
accauaaggaauuaucaggcu

SEQ ID NO: 81947 - RNA, 21 nt, Artificial Sequence
  LRRK2 RNA guide
acugugauuucagccugauaa

SEQ ID NO: 81948 - RNA, 21 nt, Artificial Sequence
  LRRK2 RNA guide
aggaauuaucaggcugaaauc

SEQ ID NO: 81949 - RNA, 21 nt, Artificial Sequence
  LRRK2 RNA guide
aggcugaaaucacagugagag

SEQ ID NO: 81950 - RNA, 21 nt, Artificial Sequence
  LRRK2 RNA guide
auaaggaauuaucaggcugaa

SEQ ID NO: 81951 - RNA, 21 nt, Artificial Sequence
  LRRK2 RNA guide
aucaggcugaaaucacaguga

SEQ ID NO: 81952 - RNA, 21 nt, Artificial Sequence
  LRRK2 RNA guide
auuaucaggcugaaaucacag

SEQ ID NO: 81953 - RNA, 21 nt, Artificial Sequence
  LRRK2 RNA guide
auuucagccugauaauuccuu

SEQ ID NO: 81954 - RNA, 21 nt, Artificial Sequence
  LRRK2 RNA guide
cacugugauuucagccugaua

SEQ ID NO: 81955 - RNA, 21 nt, Artificial Sequence
  LRRK2 RNA guide
cagccugauaauuccuuaugg

SEQ ID NO: 81956 - RNA, 21 nt, Artificial Sequence
  LRRK2 RNA guide
caggcugaaaucacagugaga

SEQ ID NO: 81957 - RNA, 21 nt, Artificial Sequence
  LRRK2 RNA guide
cauaaggaauuaucaggcuga

SEQ ID NO: 81958 - RNA, 21 nt, Artificial Sequence
  LRRK2 RNA guide
ccauaaggaauuaucaggcug

SEQ ID NO: 81959 - RNA, 21 nt, Artificial Sequence
  LRRK2 RNA guide
cucacugugauuucagccuga

SEQ ID NO: 81960 - RNA, 21 nt, Artificial Sequence
  LRRK2 RNA guide
cucucacugugauuucagccu

SEQ ID NO: 81961 - RNA, 21 nt, Artificial Sequence
  LRRK2 RNA guide
cugaaaucacagugagagaca

SEQ ID NO: 81962 - RNA, 21 nt, Artificial Sequence
  LRRK2 RNA guide
cugucucucacugugauuuca

SEQ ID NO: 81963 - RNA, 21 nt, Artificial Sequence
  LRRK2 RNA guide
cugugauuucagccugauaau

SEQ ID NO: 81964 - RNA, 21 nt, Artificial Sequence
  LRRK2 RNA guide
gaauuaucaggcugaaaucac

SEQ ID NO: 81965 - RNA, 21 nt, Artificial Sequence
  LRRK2 RNA guide
gauuucagccugauaauuccu

SEQ ID NO: 81966 - RNA, 21 nt, Artificial Sequence
  LRRK2 RNA guide
gcugaaaucacagugagagac

SEQ ID NO: 81967 - RNA, 21 nt, Artificial Sequence
  LRRK2 RNA guide
ggaauuaucaggcugaaauca

SEQ ID NO: 81968 - RNA, 21 nt, Artificial Sequence
  LRRK2 RNA guide
ggcugaaaucacagugagaga

SEQ ID NO: 81969 - RNA, 21 nt, Artificial Sequence
  LRRK2 RNA guide
gucucucacugugauuucagc

SEQ ID NO: 81970 - RNA, 21 nt, Artificial Sequence
  LRRK2 RNA guide
gugauuucagccugauaauuc

SEQ ID NO: 81971 - RNA, 21 nt, Artificial Sequence
  LRRK2 RNA guide
uaaggaauuaucaggcugaaa

SEQ ID NO: 81972 - RNA, 21 nt, Artificial Sequence
  LRRK2 RNA guide
uaucaggcugaaaucacagug

SEQ ID NO: 81973 - RNA, 21 nt, Artificial Sequence
  LRRK2 RNA guide
ucacugugauuucagccugau

SEQ ID NO: 81974 - RNA, 21 nt, Artificial Sequence
  LRRK2 RNA guide
ucagccugauaauuccuuaug

SEQ ID NO: 81975 - RNA, 21 nt, Artificial Sequence
  LRRK2 RNA guide
ucaggcugaaaucacagugag

SEQ ID NO: 81976 - RNA, 21 nt, Artificial Sequence
  LRRK2 RNA guide
ucucacugugauuucagccug

SEQ ID NO: 81977 - RNA, 21 nt, Artificial Sequence
  LRRK2 RNA guide
ucucucacugugauuucagcc

SEQ ID NO: 81978 - RNA, 21 nt, Artificial Sequence
  LRRK2 RNA guide
ugauuucagccugauaauucc

SEQ ID NO: 81979 - RNA, 21 nt, Artificial Sequence
  LRRK2 RNA guide
ugucucucacugugauuucag

SEQ ID NO: 81980 - RNA, 21 nt, Artificial Sequence
  LRRK2 RNA guide
ugugauuucagccugauaauu

SEQ ID NO: 81981 - RNA, 21 nt, Artificial Sequence
  LRRK2 RNA guide
uuaucaggcugaaaucacagu

SEQ ID NO: 81982 - RNA, 21 nt, Artificial Sequence
  LRRK2 RNA guide
uucagccugauaauuccuuau

SEQ ID NO: 81983 - RNA, 21 nt, Artificial Sequence
  LRRK2 RNA guide
uuucagccugauaauuccuua

SEQ ID NO: 81984 - RNA, 22 nt, Artificial Sequence
  LRRK2 RNA guide
aaggaauuaucaggcugaaauc

SEQ ID NO: 81985 - RNA, 22 nt, Artificial Sequence
  LRRK2 RNA guide
aauuaucaggcugaaaucacag

SEQ ID NO: 81986 - RNA, 22 nt, Artificial Sequence
  LRRK2 RNA guide
accauaaggaauuaucaggcug

SEQ ID NO: 81987 - RNA, 22 nt, Artificial Sequence
  LRRK2 RNA guide
acugugauuucagccugauaau

SEQ ID NO: 81988 - RNA, 22 nt, Artificial Sequence
  LRRK2 RNA guide
aggaauuaucaggcugaaauca

SEQ ID NO: 81989 - RNA, 22 nt, Artificial Sequence
  LRRK2 RNA guide
aggcugaaaucacagugagaga

SEQ ID NO: 81990 - RNA, 22 nt, Artificial Sequence
  LRRK2 RNA guide
auaaggaauuaucaggcugaaa

SEQ ID NO: 81991 - RNA, 22 nt, Artificial Sequence
  LRRK2 RNA guide
aucaggcugaaaucacagugag

SEQ ID NO: 81992 - RNA, 22 nt, Artificial Sequence
  LRRK2 RNA guide
auuaucaggcugaaaucacagu

SEQ ID NO: 81993 - RNA, 22 nt, Artificial Sequence
  LRRK2 RNA guide
auuucagccugauaauuccuua

SEQ ID NO: 81994 - RNA, 22 nt, Artificial Sequence
  LRRK2 RNA guide
caccauaaggaauuaucaggcu

SEQ ID NO: 81995 - RNA, 22 nt, Artificial Sequence
  LRRK2 RNA guide
cacugugauuucagccugauaa

SEQ ID NO: 81996 - RNA, 22 nt, Artificial Sequence
  LRRK2 RNA guide
cagccugauaauuccuuauggu

SEQ ID NO: 81997 - RNA, 22 nt, Artificial Sequence
  LRRK2 RNA guide
caggcugaaaucacagugagag

SEQ ID NO: 81998 - RNA, 22 nt, Artificial Sequence
  LRRK2 RNA guide
cauaaggaauuaucaggcugaa

SEQ ID NO: 81999 - RNA, 22 nt, Artificial Sequence
  LRRK2 RNA guide
ccauaaggaauuaucaggcuga

SEQ ID NO: 82000 - RNA, 22 nt, Artificial Sequence
  LRRK2 RNA guide
cucacugugauuucagccugau

SEQ ID NO: 82001 - RNA, 22 nt, Artificial Sequence
  LRRK2 RNA guide
cucucacugugauuucagccug

SEQ ID NO: 82002 - RNA, 22 nt, Artificial Sequence
  LRRK2 RNA guide
cugaaaucacagugagagacag

SEQ ID NO: 82003 - RNA, 22 nt, Artificial Sequence
  LRRK2 RNA guide
cugucucucacugugauuucag

SEQ ID NO: 82004 - RNA, 22 nt, Artificial Sequence
  LRRK2 RNA guide
cugugauuucagccugauaauu

SEQ ID NO: 82005 - RNA, 22 nt, Artificial Sequence
  LRRK2 RNA guide
gaauuaucaggcugaaaucaca

SEQ ID NO: 82006 - RNA, 22 nt, Artificial Sequence
  LRRK2 RNA guide
gauuucagccugauaauuccuu

SEQ ID NO: 82007 - RNA, 22 nt, Artificial Sequence
  LRRK2 RNA guide
gcugaaaucacagugagagaca

SEQ ID NO: 82008 - RNA, 22 nt, Artificial Sequence
  LRRK2 RNA guide
ggaauuaucaggcugaaaucac

SEQ ID NO: 82009 - RNA, 22 nt, Artificial Sequence
  LRRK2 RNA guide
ggcugaaaucacagugagagac

SEQ ID NO: 82010 - RNA, 22 nt, Artificial Sequence
  LRRK2 RNA guide
gucucucacugugauuucagcc

SEQ ID NO: 82011 - RNA, 22 nt, Artificial Sequence
  LRRK2 RNA guide
gugauuucagccugauaauucc

SEQ ID NO: 82012 - RNA, 22 nt, Artificial Sequence
  LRRK2 RNA guide
uaaggaauuaucaggcugaaau

SEQ ID NO: 82013 - RNA, 22 nt, Artificial Sequence
  LRRK2 RNA guide
uaucaggcugaaaucacaguga

SEQ ID NO: 82014 - RNA, 22 nt, Artificial Sequence
  LRRK2 RNA guide
ucacugugauuucagccugaua

SEQ ID NO: 82015 - RNA, 22 nt, Artificial Sequence
  LRRK2 RNA guide
ucagccugauaauuccuuaugg

SEQ ID NO: 82016 - RNA, 22 nt, Artificial Sequence
  LRRK2 RNA guide
ucaggcugaaaucacagugaga

SEQ ID NO: 82017 - RNA, 22 nt, Artificial Sequence
  LRRK2 RNA guide
ucucacugugauuucagccuga

SEQ ID NO: 82018 - RNA, 22 nt, Artificial Sequence
  LRRK2 RNA guide
ucucucacugugauuucagccu

SEQ ID NO: 82019 - RNA, 22 nt, Artificial Sequence
  LRRK2 RNA guide
ucugucucucacugugauuuca

SEQ ID NO: 82020 - RNA, 22 nt, Artificial Sequence
  LRRK2 RNA guide
ugauuucagccugauaauuccu

SEQ ID NO: 82021 - RNA, 22 nt, Artificial Sequence
  LRRK2 RNA guide
ugucucucacugugauuucagc

SEQ ID NO: 82022 - RNA, 22 nt, Artificial Sequence
  LRRK2 RNA guide
ugugauuucagccugauaauuc

SEQ ID NO: 82023 - RNA, 22 nt, Artificial Sequence
  LRRK2 RNA guide
uuaucaggcugaaaucacagug

SEQ ID NO: 82024 - RNA, 22 nt, Artificial Sequence
  LRRK2 RNA guide
uucagccugauaauuccuuaug

SEQ ID NO: 82025 - RNA, 22 nt, Artificial Sequence
  LRRK2 RNA guide
uuucagccugauaauuccuuau

SEQ ID NO: 82026 - RNA, 20 nt, Artificial Sequence
  LRRK2 RNA guide
aauaccaaaucaagagcuca

SEQ ID NO: 82027 - RNA, 20 nt, Artificial Sequence
  LRRK2 RNA guide
accaaaucaagagcucacaa

SEQ ID NO: 82028 - RNA, 20 nt, Artificial Sequence
  LRRK2 RNA guide
agcucuugauuugguauuau

SEQ ID NO: 82029 - RNA, 20 nt, Artificial Sequence
  LRRK2 RNA guide
auaauaccaaaucaagagcu

SEQ ID NO: 82030 - RNA, 20 nt, Artificial Sequence
  LRRK2 RNA guide
auaccaaaucaagagcucac

SEQ ID NO: 82031 - RNA, 20 nt, Artificial Sequence
  LRRK2 RNA guide
auguugugagcucuugauuu

SEQ ID NO: 82032 - RNA, 20 nt, Artificial Sequence
  LRRK2 RNA guide
cuuuauguugugagcucuug

SEQ ID NO: 82033 - RNA, 20 nt, Artificial Sequence
  LRRK2 RNA guide
gagcucuugauuugguauua

SEQ ID NO: 82034 - RNA, 20 nt, Artificial Sequence
  LRRK2 RNA guide
gcucuugauuugguauuaua

SEQ ID NO: 82035 - RNA, 20 nt, Artificial Sequence
  LRRK2 RNA guide
gugagcucuugauuugguau

SEQ ID NO: 82036 - RNA, 20 nt, Artificial Sequence
  LRRK2 RNA guide
guugugagcucuugauuugg

SEQ ID NO: 82037 - RNA, 20 nt, Artificial Sequence
  LRRK2 RNA guide
uaauaccaaaucaagagcuc

SEQ ID NO: 82038 - RNA, 20 nt, Artificial Sequence
  LRRK2 RNA guide
uaccaaaucaagagcucaca

SEQ ID NO: 82039 - RNA, 20 nt, Artificial Sequence
  LRRK2 RNA guide
uauaauaccaaaucaagagc

SEQ ID NO: 82040 - RNA, 20 nt, Artificial Sequence
  LRRK2 RNA guide
uauguugugagcucuugauu

SEQ ID NO: 82041 - RNA, 20 nt, Artificial Sequence
  LRRK2 RNA guide
ugagcucuugauuugguauu

SEQ ID NO: 82042 - RNA, 20 nt, Artificial Sequence
  LRRK2 RNA guide
ugugagcucuugauuuggua

SEQ ID NO: 82043 - RNA, 20 nt, Artificial Sequence
  LRRK2 RNA guide
uguugugagcucuugauuug

SEQ ID NO: 82044 - RNA, 20 nt, Artificial Sequence
  LRRK2 RNA guide
uuauguugugagcucuugau

SEQ ID NO: 82045 - RNA, 20 nt, Artificial Sequence
  LRRK2 RNA guide
uugugagcucuugauuuggu

SEQ ID NO: 82046 - RNA, 20 nt, Artificial Sequence
  LRRK2 RNA guide
uuuauguugugagcucuuga

SEQ ID NO: 82047 - RNA, 21 nt, Artificial Sequence
  LRRK2 RNA guide
aauaccaaaucaagagcucac

SEQ ID NO: 82048 - RNA, 21 nt, Artificial Sequence
  LRRK2 RNA guide
accaaaucaagagcucacaac

SEQ ID NO: 82049 - RNA, 21 nt, Artificial Sequence
  LRRK2 RNA guide
auaauaccaaaucaagagcuc

SEQ ID NO: 82050 - RNA, 21 nt, Artificial Sequence
  LRRK2 RNA guide
auaccaaaucaagagcucaca

SEQ ID NO: 82051 - RNA, 21 nt, Artificial Sequence
  LRRK2 RNA guide
auguugugagcucuugauuug

SEQ ID NO: 82052 - RNA, 21 nt, Artificial Sequence
  LRRK2 RNA guide
ccaaaucaagagcucacaaca

SEQ ID NO: 82053 - RNA, 21 nt, Artificial Sequence
  LRRK2 RNA guide
cuuuauguugugagcucuuga

SEQ ID NO: 82054 - RNA, 21 nt, Artificial Sequence
  LRRK2 RNA guide
gagcucuugauuugguauuau

SEQ ID NO: 82055 - RNA, 21 nt, Artificial Sequence
  LRRK2 RNA guide
gugagcucuugauuugguauu

SEQ ID NO: 82056 - RNA, 21 nt, Artificial Sequence
  LRRK2 RNA guide
guugugagcucuugauuuggu

SEQ ID NO: 82057 - RNA, 21 nt, Artificial Sequence
  LRRK2 RNA guide
uaauaccaaaucaagagcuca

SEQ ID NO: 82058 - RNA, 21 nt, Artificial Sequence
  LRRK2 RNA guide
uaccaaaucaagagcucacaa

SEQ ID NO: 82059 - RNA, 21 nt, Artificial Sequence
  LRRK2 RNA guide
uauguugugagcucuugauuu

SEQ ID NO: 82060 - RNA, 21 nt, Artificial Sequence
  LRRK2 RNA guide
ucuuuauguugugagcucuug

SEQ ID NO: 82061 - RNA, 21 nt, Artificial Sequence
  LRRK2 RNA guide
ugagcucuugauuugguauua

SEQ ID NO: 82062 - RNA, 21 nt, Artificial Sequence
  LRRK2 RNA guide
ugugagcucuugauuugguau

SEQ ID NO: 82063 - RNA, 21 nt, Artificial Sequence
  LRRK2 RNA guide
uguugugagcucuugauuugg

SEQ ID NO: 82064 - RNA, 21 nt, Artificial Sequence
  LRRK2 RNA guide
uuauguugugagcucuugauu

SEQ ID NO: 82065 - RNA, 21 nt, Artificial Sequence
  LRRK2 RNA guide
uugugagcucuugauuuggua

SEQ ID NO: 82066 - RNA, 21 nt, Artificial Sequence
  LRRK2 RNA guide
uuuauguugugagcucuugau

SEQ ID NO: 82067 - RNA, 22 nt, Artificial Sequence
  LRRK2 RNA guide
aauaccaaaucaagagcucaca

SEQ ID NO: 82068 - RNA, 22 nt, Artificial Sequence
  LRRK2 RNA guide
accaaaucaagagcucacaaca

SEQ ID NO: 82069 - RNA, 22 nt, Artificial Sequence
  LRRK2 RNA guide
auaauaccaaaucaagagcuca

SEQ ID NO: 82070 - RNA, 22 nt, Artificial Sequence
  LRRK2 RNA guide
auaccaaaucaagagcucacaa

SEQ ID NO: 82071 - RNA, 22 nt, Artificial Sequence
  LRRK2 RNA guide
aucuuuauguugugagcucuug

SEQ ID NO: 82072 - RNA, 22 nt, Artificial Sequence
  LRRK2 RNA guide
auguugugagcucuugauuugg

SEQ ID NO: 82073 - RNA, 22 nt, Artificial Sequence
  LRRK2 RNA guide
ccaaaucaagagcucacaacau

SEQ ID NO: 82074 - RNA, 22 nt, Artificial Sequence
  LRRK2 RNA guide
cuuuauguugugagcucuugau

SEQ ID NO: 82075 - RNA, 22 nt, Artificial Sequence
  LRRK2 RNA guide
gagcucuugauuugguauuaua

SEQ ID NO: 82076 - RNA, 22 nt, Artificial Sequence
  LRRK2 RNA guide
gugagcucuugauuugguauua

SEQ ID NO: 82077 - RNA, 22 nt, Artificial Sequence
  LRRK2 RNA guide
guugugagcucuugauuuggua

SEQ ID NO: 82078 - RNA, 22 nt, Artificial Sequence
  LRRK2 RNA guide
uaauaccaaaucaagagcucac

SEQ ID NO: 82079 - RNA, 22 nt, Artificial Sequence
  LRRK2 RNA guide
uaccaaaucaagagcucacaac

SEQ ID NO: 82080 - RNA, 22 nt, Artificial Sequence
  LRRK2 RNA guide
uauaauaccaaaucaagagcuc

SEQ ID NO: 82081 - RNA, 22 nt, Artificial Sequence
  LRRK2 RNA guide
uauguugugagcucuugauuug

SEQ ID NO: 82082 - RNA, 22 nt, Artificial Sequence
  LRRK2 RNA guide
ucuuuauguugugagcucuuga

SEQ ID NO: 82083 - RNA, 22 nt, Artificial Sequence
  LRRK2 RNA guide
ugagcucuugauuugguauuau

SEQ ID NO: 82084 - RNA, 22 nt, Artificial Sequence
  LRRK2 RNA guide
ugugagcucuugauuugguauu

SEQ ID NO: 82085 - RNA, 22 nt, Artificial Sequence
  LRRK2 RNA guide
uguugugagcucuugauuuggu

SEQ ID NO: 82086 - RNA, 22 nt, Artificial Sequence
  LRRK2 RNA guide
uuauguugugagcucuugauuu

SEQ ID NO: 82087 - RNA, 22 nt, Artificial Sequence
  LRRK2 RNA guide
uugugagcucuugauuugguau

SEQ ID NO: 82088 - RNA, 22 nt, Artificial Sequence
  LRRK2 RNA guide
uuuauguugugagcucuugauu

SEQ ID NO: 82089 - RNA, 20 nt, Artificial Sequence
  LRRK2 RNA guide
aauacaaaaucaagagcuca

SEQ ID NO: 82090 - RNA, 20 nt, Artificial Sequence
  LRRK2 RNA guide
acaaaaucaagagcucacaa

SEQ ID NO: 82091 - RNA, 20 nt, Artificial Sequence
  LRRK2 RNA guide
auacaaaaucaagagcucac

SEQ ID NO: 82092 - RNA, 20 nt, Artificial Sequence
  LRRK2 RNA guide
caaaaucaagagcucacaac

SEQ ID NO: 82093 - RNA, 20 nt, Artificial Sequence
  LRRK2 RNA guide
gagcucuugauuuuguauua

SEQ ID NO: 82094 - RNA, 20 nt, Artificial Sequence
  LRRK2 RNA guide
gugagcucuugauuuuguau

SEQ ID NO: 82095 - RNA, 20 nt, Artificial Sequence
  LRRK2 RNA guide
guugugagcucuugauuuug

SEQ ID NO: 82096 - RNA, 20 nt, Artificial Sequence
  LRRK2 RNA guide
uaauacaaaaucaagagcuc

SEQ ID NO: 82097 - RNA, 20 nt, Artificial Sequence
  LRRK2 RNA guide
uacaaaaucaagagcucaca

SEQ ID NO: 82098 - RNA, 20 nt, Artificial Sequence
  LRRK2 RNA guide
ugagcucuugauuuuguauu

SEQ ID NO: 82099 - RNA, 20 nt, Artificial Sequence
  LRRK2 RNA guide
ugugagcucuugauuuugua

SEQ ID NO: 82100 - RNA, 20 nt, Artificial Sequence
  LRRK2 RNA guide
uguugugagcucuugauuuu

SEQ ID NO: 82101 - RNA, 20 nt, Artificial Sequence
  LRRK2 RNA guide
uugugagcucuugauuuugu

SEQ ID NO: 82102 - RNA, 21 nt, Artificial Sequence
  LRRK2 RNA guide
aauacaaaaucaagagcucac

SEQ ID NO: 82103 - RNA, 21 nt, Artificial Sequence
  LRRK2 RNA guide
acaaaaucaagagcucacaac

SEQ ID NO: 82104 - RNA, 21 nt, Artificial Sequence
  LRRK2 RNA guide
auacaaaaucaagagcucaca

SEQ ID NO: 82105 - RNA, 21 nt, Artificial Sequence
  LRRK2 RNA guide
auguugugagcucuugauuuu

SEQ ID NO: 82106 - RNA, 21 nt, Artificial Sequence
  LRRK2 RNA guide
caaaaucaagagcucacaaca

SEQ ID NO: 82107 - RNA, 21 nt, Artificial Sequence
  LRRK2 RNA guide
gugagcucuugauuuuguauu

SEQ ID NO: 82108 - RNA, 21 nt, Artificial Sequence
  LRRK2 RNA guide
guugugagcucuugauuuugu

SEQ ID NO: 82109 - RNA, 21 nt, Artificial Sequence
  LRRK2 RNA guide
uacaaaaucaagagcucacaa

SEQ ID NO: 82110 - RNA, 21 nt, Artificial Sequence
  LRRK2 RNA guide
ugugagcucuugauuuuguau

SEQ ID NO: 82111 - RNA, 21 nt, Artificial Sequence
  LRRK2 RNA guide
uguugugagcucuugauuuug

SEQ ID NO: 82112 - RNA, 21 nt, Artificial Sequence
  LRRK2 RNA guide
uugugagcucuugauuuugua

SEQ ID NO: 82113 - RNA, 22 nt, Artificial Sequence
  LRRK2 RNA guide
aauacaaaaucaagagcucaca

SEQ ID NO: 82114 - RNA, 22 nt, Artificial Sequence
  LRRK2 RNA guide
acaaaaucaagagcucacaaca

SEQ ID NO: 82115 - RNA, 22 nt, Artificial Sequence
  LRRK2 RNA guide
auacaaaaucaagagcucacaa

SEQ ID NO: 82116 - RNA, 22 nt, Artificial Sequence
  LRRK2 RNA guide
auguugugagcucuugauuuug

SEQ ID NO: 82117 - RNA, 22 nt, Artificial Sequence
  LRRK2 RNA guide
caaaaucaagagcucacaacau

SEQ ID NO: 82118 - RNA, 22 nt, Artificial Sequence
  LRRK2 RNA guide
gugagcucuugauuuuguauua

SEQ ID NO: 82119 - RNA, 22 nt, Artificial Sequence
  LRRK2 RNA guide
guugugagcucuugauuuugua

SEQ ID NO: 82120 - RNA, 22 nt, Artificial Sequence
  LRRK2 RNA guide
uaauacaaaaucaagagcucac

SEQ ID NO: 82121 - RNA, 22 nt, Artificial Sequence
  LRRK2 RNA guide
uacaaaaucaagagcucacaac

SEQ ID NO: 82122 - RNA, 22 nt, Artificial Sequence
  LRRK2 RNA guide
uauguugugagcucuugauuuu

SEQ ID NO: 82123 - RNA, 22 nt, Artificial Sequence
  LRRK2 RNA guide
ugugagcucuugauuuuguauu

SEQ ID NO: 82124 - RNA, 22 nt, Artificial Sequence
  LRRK2 RNA guide
uguugugagcucuugauuuugu

SEQ ID NO: 82125 - RNA, 22 nt, Artificial Sequence
  LRRK2 RNA guide
uugugagcucuugauuuuguau

SEQ ID NO: 82126 - RNA, 20 nt, Artificial Sequence
  LRRK2 RNA guide
aaaacaaguaaaccaaguag

SEQ ID NO: 82127 - RNA, 20 nt, Artificial Sequence
  LRRK2 RNA guide
aaacaaguaaaccaaguaga

SEQ ID NO: 82128 - RNA, 20 nt, Artificial Sequence
  LRRK2 RNA guide
aacaaguaaaccaaguagaa

SEQ ID NO: 82129 - RNA, 20 nt, Artificial Sequence
  LRRK2 RNA guide
aaguaaaccaaguagaagaa

SEQ ID NO: 82130 - RNA, 20 nt, Artificial Sequence
  LRRK2 RNA guide
acaaguaaaccaaguagaag

SEQ ID NO: 82131 - RNA, 20 nt, Artificial Sequence
  LRRK2 RNA guide
aguaaaccaaguagaagaaa

SEQ ID NO: 82132 - RNA, 20 nt, Artificial Sequence
  LRRK2 RNA guide
caaguaaaccaaguagaaga

SEQ ID NO: 82133 - RNA, 20 nt, Artificial Sequence
  LRRK2 RNA guide
guaaaccaaguagaagaaaa

SEQ ID NO: 82134 - RNA, 20 nt, Artificial Sequence
  LRRK2 RNA guide
ucuucuacuugguuuacuug

SEQ ID NO: 82135 - RNA, 20 nt, Artificial Sequence
  LRRK2 RNA guide
uucuucuacuugguuuacuu

SEQ ID NO: 82136 - RNA, 20 nt, Artificial Sequence
  LRRK2 RNA guide
uuucuucuacuugguuuacu

SEQ ID NO: 82137 - RNA, 20 nt, Artificial Sequence
  LRRK2 RNA guide
uuuucuucuacuugguuuac

SEQ ID NO: 82138 - RNA, 21 nt, Artificial Sequence
  LRRK2 RNA guide
aacaaguaaaccaaguagaag

SEQ ID NO: 82139 - RNA, 21 nt, Artificial Sequence
  LRRK2 RNA guide
acaaguaaaccaaguagaaga

SEQ ID NO: 82140 - RNA, 21 nt, Artificial Sequence
  LRRK2 RNA guide
caaguaaaccaaguagaagaa

SEQ ID NO: 82141 - RNA, 21 nt, Artificial Sequence
  LRRK2 RNA guide
ucuucuacuugguuuacuugu

SEQ ID NO: 82142 - RNA, 21 nt, Artificial Sequence
  LRRK2 RNA guide
uucuucuacuugguuuacuug

SEQ ID NO: 82143 - RNA, 22 nt, Artificial Sequence
  LRRK2 RNA guide
aaacaaguaaaccaaguagaag

SEQ ID NO: 82144 - RNA, 22 nt, Artificial Sequence
  LRRK2 RNA guide
aacaaguaaaccaaguagaaga

SEQ ID NO: 82145 - RNA, 22 nt, Artificial Sequence
  LRRK2 RNA guide
acaaguaaaccaaguagaagaa

SEQ ID NO: 82146 - RNA, 22 nt, Artificial Sequence
  LRRK2 RNA guide
caaguaaaccaaguagaagaaa

SEQ ID NO: 82147 - RNA, 22 nt, Artificial Sequence
  LRRK2 RNA guide
ucuucuacuugguuuacuuguu

SEQ ID NO: 82148 - RNA, 22 nt, Artificial Sequence
  LRRK2 RNA guide
uucuucuacuugguuuacuugu

SEQ ID NO: 82149 - RNA, 22 nt, Artificial Sequence
  LRRK2 RNA guide
uuucuucuacuugguuuacuug

SEQ ID NO: 82150 - RNA, 20 nt, Artificial Sequence
  LRRK2 RNA guide
acaaguaaaccaaguagaaa

SEQ ID NO: 82151 - RNA, 20 nt, Artificial Sequence
  LRRK2 RNA guide
caaguaaaccaaguagaaaa

SEQ ID NO: 82152 - RNA, 20 nt, Artificial Sequence
  LRRK2 RNA guide
uuuucuacuugguuuacuug

SEQ ID NO: 82153 - RNA, 20 nt, Artificial Sequence
  LRRK2 RNA guide
aaagcccauuacucugucug

SEQ ID NO: 82154 - RNA, 20 nt, Artificial Sequence
  LRRK2 RNA guide
aaaugaggcacagacagagu

SEQ ID NO: 82155 - RNA, 20 nt, Artificial Sequence
  LRRK2 RNA guide
aagaaagcccauuacucugu

SEQ ID NO: 82156 - RNA, 20 nt, Artificial Sequence
  LRRK2 RNA guide
aagcccauuacucugucugu

SEQ ID NO: 82157 - RNA, 20 nt, Artificial Sequence
  LRRK2 RNA guide
aaugaggcacagacagagua

SEQ ID NO: 82158 - RNA, 20 nt, Artificial Sequence
  LRRK2 RNA guide
acaccaagaaagcccauuac

SEQ ID NO: 82159 - RNA, 20 nt, Artificial Sequence
  LRRK2 RNA guide
acagacagaguaaugggcuu

SEQ ID NO: 82160 - RNA, 20 nt, Artificial Sequence
  LRRK2 RNA guide
acagaguaaugggcuuucuu

SEQ ID NO: 82161 - RNA, 20 nt, Artificial Sequence
  LRRK2 RNA guide
accaagaaagcccauuacuc

SEQ ID NO: 82162 - RNA, 20 nt, Artificial Sequence
  LRRK2 RNA guide
acucugucugugccucauuu

SEQ ID NO: 82163 - RNA, 20 nt, Artificial Sequence
  LRRK2 RNA guide
agaaagcccauuacucuguc

SEQ ID NO: 82164 - RNA, 20 nt, Artificial Sequence
  LRRK2 RNA guide
agacaccaagaaagcccauu

SEQ ID NO: 82165 - RNA, 20 nt, Artificial Sequence
  LRRK2 RNA guide
agacagaguaaugggcuuuc

SEQ ID NO: 82166 - RNA, 20 nt, Artificial Sequence
  LRRK2 RNA guide
agaguaaugggcuuucuugg

SEQ ID NO: 82167 - RNA, 20 nt, Artificial Sequence
  LRRK2 RNA guide
agcccauuacucugucugug

SEQ ID NO: 82168 - RNA, 20 nt, Artificial Sequence
  LRRK2 RNA guide
aggcacagacagaguaaugg

SEQ ID NO: 82169 - RNA, 20 nt, Artificial Sequence
  LRRK2 RNA guide
augaaaugaggcacagacag

SEQ ID NO: 82170 - RNA, 20 nt, Artificial Sequence
  LRRK2 RNA guide
augaggcacagacagaguaa

SEQ ID NO: 82171 - RNA, 20 nt, Artificial Sequence
  LRRK2 RNA guide
auuacucugucugugccuca

SEQ ID NO: 82172 - RNA, 20 nt, Artificial Sequence
  LRRK2 RNA guide
caagaaagcccauuacucug

SEQ ID NO: 82173 - RNA, 20 nt, Artificial Sequence
  LRRK2 RNA guide
cacagacagaguaaugggcu

SEQ ID NO: 82174 - RNA, 20 nt, Artificial Sequence
  LRRK2 RNA guide
caccaagaaagcccauuacu

SEQ ID NO: 82175 - RNA, 20 nt, Artificial Sequence
  LRRK2 RNA guide
cagacagaguaaugggcuuu

SEQ ID NO: 82176 - RNA, 20 nt, Artificial Sequence
  LRRK2 RNA guide
cagaguaaugggcuuucuug

SEQ ID NO: 82177 - RNA, 20 nt, Artificial Sequence
  LRRK2 RNA guide
cauuacucugucugugccuc

SEQ ID NO: 82178 - RNA, 20 nt, Artificial Sequence
  LRRK2 RNA guide
ccaagaaagcccauuacucu

SEQ ID NO: 82179 - RNA, 20 nt, Artificial Sequence
  LRRK2 RNA guide
ccauuacucugucugugccu

SEQ ID NO: 82180 - RNA, 20 nt, Artificial Sequence
  LRRK2 RNA guide
cccauuacucugucugugcc

SEQ ID NO: 82181 - RNA, 20 nt, Artificial Sequence
  LRRK2 RNA guide
cucugucugugccucauuuc

SEQ ID NO: 82182 - RNA, 20 nt, Artificial Sequence
  LRRK2 RNA guide
gaaagcccauuacucugucu

SEQ ID NO: 82183 - RNA, 20 nt, Artificial Sequence
  LRRK2 RNA guide
gaaaugaggcacagacagag

SEQ ID NO: 82184 - RNA, 20 nt, Artificial Sequence
  LRRK2 RNA guide
gacaccaagaaagcccauua

SEQ ID NO: 82185 - RNA, 20 nt, Artificial Sequence
  LRRK2 RNA guide
gacagaguaaugggcuuucu

SEQ ID NO: 82186 - RNA, 20 nt, Artificial Sequence
  LRRK2 RNA guide
gagacaccaagaaagcccau

SEQ ID NO: 82187 - RNA, 20 nt, Artificial Sequence
  LRRK2 RNA guide
gaggcacagacagaguaaug

SEQ ID NO: 82188 - RNA, 20 nt, Artificial Sequence
  LRRK2 RNA guide
gaguaaugggcuuucuuggu

SEQ ID NO: 82189 - RNA, 20 nt, Artificial Sequence
  LRRK2 RNA guide
gcacagacagaguaaugggc

SEQ ID NO: 82190 - RNA, 20 nt, Artificial Sequence
  LRRK2 RNA guide
gcccauuacucugucugugc

SEQ ID NO: 82191 - RNA, 20 nt, Artificial Sequence
  LRRK2 RNA guide
ggagacaccaagaaagccca

SEQ ID NO: 82192 - RNA, 20 nt, Artificial Sequence
  LRRK2 RNA guide
ggcacagacagaguaauggg

SEQ ID NO: 82193 - RNA, 20 nt, Artificial Sequence
  LRRK2 RNA guide
uacucugucugugccucauu

SEQ ID NO: 82194 - RNA, 20 nt, Artificial Sequence
  LRRK2 RNA guide
uaugaaaugaggcacagaca

SEQ ID NO: 82195 - RNA, 20 nt, Artificial Sequence
  LRRK2 RNA guide
ugaaaugaggcacagacaga

SEQ ID NO: 82196 - RNA, 20 nt, Artificial Sequence
  LRRK2 RNA guide
ugaggcacagacagaguaau

SEQ ID NO: 82197 - RNA, 20 nt, Artificial Sequence
  LRRK2 RNA guide
uuacucugucugugccucau

SEQ ID NO: 82198 - RNA, 20 nt, Artificial Sequence
  LRRK2 RNA guide
uuaugaaaugaggcacagac

SEQ ID NO: 82199 - RNA, 20 nt, Artificial Sequence
  LRRK2 RNA guide
uuuaugaaaugaggcacaga

SEQ ID NO: 82200 - RNA, 20 nt, Artificial Sequence
  LRRK2 RNA guide
uuuuaugaaaugaggcacag

SEQ ID NO: 82201 - RNA, 21 nt, Artificial Sequence
  LRRK2 RNA guide
aaagcccauuacucugucugu

SEQ ID NO: 82202 - RNA, 21 nt, Artificial Sequence
  LRRK2 RNA guide
aaaugaggcacagacagagua

SEQ ID NO: 82203 - RNA, 21 nt, Artificial Sequence
  LRRK2 RNA guide
aagaaagcccauuacucuguc

SEQ ID NO: 82204 - RNA, 21 nt, Artificial Sequence
  LRRK2 RNA guide
aagcccauuacucugucugug

SEQ ID NO: 82205 - RNA, 21 nt, Artificial Sequence
  LRRK2 RNA guide
aaugaggcacagacagaguaa

SEQ ID NO: 82206 - RNA, 21 nt, Artificial Sequence
  LRRK2 RNA guide
acaccaagaaagcccauuacu

SEQ ID NO: 82207 - RNA, 21 nt, Artificial Sequence
  LRRK2 RNA guide
acagacagaguaaugggcuuu

SEQ ID NO: 82208 - RNA, 21 nt, Artificial Sequence
  LRRK2 RNA guide
acagaguaaugggcuuucuug

SEQ ID NO: 82209 - RNA, 21 nt, Artificial Sequence
  LRRK2 RNA guide
accaagaaagcccauuacucu

SEQ ID NO: 82210 - RNA, 21 nt, Artificial Sequence
  LRRK2 RNA guide
acucugucugugccucauuuc

SEQ ID NO: 82211 - RNA, 21 nt, Artificial Sequence
  LRRK2 RNA guide
agaaagcccauuacucugucu

SEQ ID NO: 82212 - RNA, 21 nt, Artificial Sequence
  LRRK2 RNA guide
agacaccaagaaagcccauua

SEQ ID NO: 82213 - RNA, 21 nt, Artificial Sequence
  LRRK2 RNA guide
agacagaguaaugggcuuucu

SEQ ID NO: 82214 - RNA, 21 nt, Artificial Sequence
  LRRK2 RNA guide
agaguaaugggcuuucuuggu

SEQ ID NO: 82215 - RNA, 21 nt, Artificial Sequence
  LRRK2 RNA guide
agcccauuacucugucugugc

SEQ ID NO: 82216 - RNA, 21 nt, Artificial Sequence
  LRRK2 RNA guide
aggagacaccaagaaagccca

SEQ ID NO: 82217 - RNA, 21 nt, Artificial Sequence
  LRRK2 RNA guide
aggcacagacagaguaauggg

SEQ ID NO: 82218 - RNA, 21 nt, Artificial Sequence
  LRRK2 RNA guide
augaaaugaggcacagacaga

SEQ ID NO: 82219 - RNA, 21 nt, Artificial Sequence
  LRRK2 RNA guide
augaggcacagacagaguaau

SEQ ID NO: 82220 - RNA, 21 nt, Artificial Sequence
  LRRK2 RNA guide
auuacucugucugugccucau

SEQ ID NO: 82221 - RNA, 21 nt, Artificial Sequence
  LRRK2 RNA guide
caagaaagcccauuacucugu

SEQ ID NO: 82222 - RNA, 21 nt, Artificial Sequence
  LRRK2 RNA guide
cacagacagaguaaugggcuu

SEQ ID NO: 82223 - RNA, 21 nt, Artificial Sequence
  LRRK2 RNA guide
caccaagaaagcccauuacuc

SEQ ID NO: 82224 - RNA, 21 nt, Artificial Sequence
  LRRK2 RNA guide
cagacagaguaaugggcuuuc

SEQ ID NO: 82225 - RNA, 21 nt, Artificial Sequence
  LRRK2 RNA guide
cagaguaaugggcuuucuugg

SEQ ID NO: 82226 - RNA, 21 nt, Artificial Sequence
  LRRK2 RNA guide
cauuacucugucugugccuca

SEQ ID NO: 82227 - RNA, 21 nt, Artificial Sequence
  LRRK2 RNA guide
ccaagaaagcccauuacucug

SEQ ID NO: 82228 - RNA, 21 nt, Artificial Sequence
  LRRK2 RNA guide
ccauuacucugucugugccuc

SEQ ID NO: 82229 - RNA, 21 nt, Artificial Sequence
  LRRK2 RNA guide
cccauuacucugucugugccu

SEQ ID NO: 82230 - RNA, 21 nt, Artificial Sequence
  LRRK2 RNA guide
cucugucugugccucauuuca

SEQ ID NO: 82231 - RNA, 21 nt, Artificial Sequence
  LRRK2 RNA guide
cuuuuaugaaaugaggcacag

SEQ ID NO: 82232 - RNA, 21 nt, Artificial Sequence
  LRRK2 RNA guide
gaaagcccauuacucugucug

SEQ ID NO: 82233 - RNA, 21 nt, Artificial Sequence
  LRRK2 RNA guide
gaaaugaggcacagacagagu

SEQ ID NO: 82234 - RNA, 21 nt, Artificial Sequence
  LRRK2 RNA guide
gacaccaagaaagcccauuac

SEQ ID NO: 82235 - RNA, 21 nt, Artificial Sequence
  LRRK2 RNA guide
gacagaguaaugggcuuucuu

SEQ ID NO: 82236 - RNA, 21 nt, Artificial Sequence
  LRRK2 RNA guide
gagacaccaagaaagcccauu

SEQ ID NO: 82237 - RNA, 21 nt, Artificial Sequence
  LRRK2 RNA guide
gaggcacagacagaguaaugg

SEQ ID NO: 82238 - RNA, 21 nt, Artificial Sequence
  LRRK2 RNA guide
gaguaaugggcuuucuuggug

SEQ ID NO: 82239 - RNA, 21 nt, Artificial Sequence
  LRRK2 RNA guide
gcacagacagaguaaugggcu

SEQ ID NO: 82240 - RNA, 21 nt, Artificial Sequence
  LRRK2 RNA guide
gcccauuacucugucugugcc

SEQ ID NO: 82241 - RNA, 21 nt, Artificial Sequence
  LRRK2 RNA guide
ggagacaccaagaaagcccau

SEQ ID NO: 82242 - RNA, 21 nt, Artificial Sequence
  LRRK2 RNA guide
ggcacagacagaguaaugggc

SEQ ID NO: 82243 - RNA, 21 nt, Artificial Sequence
  LRRK2 RNA guide
uacucugucugugccucauuu

SEQ ID NO: 82244 - RNA, 21 nt, Artificial Sequence
  LRRK2 RNA guide
uaugaaaugaggcacagacag

SEQ ID NO: 82245 - RNA, 21 nt, Artificial Sequence
  LRRK2 RNA guide
ugaaaugaggcacagacagag

SEQ ID NO: 82246 - RNA, 21 nt, Artificial Sequence
  LRRK2 RNA guide
ugaggcacagacagaguaaug

SEQ ID NO: 82247 - RNA, 21 nt, Artificial Sequence
  LRRK2 RNA guide
uuacucugucugugccucauu

SEQ ID NO: 82248 - RNA, 21 nt, Artificial Sequence
  LRRK2 RNA guide
uuaugaaaugaggcacagaca

SEQ ID NO: 82249 - RNA, 21 nt, Artificial Sequence
  LRRK2 RNA guide
uuuaugaaaugaggcacagac

SEQ ID NO: 82250 - RNA, 21 nt, Artificial Sequence
  LRRK2 RNA guide
uuuuaugaaaugaggcacaga

SEQ ID NO: 82251 - RNA, 22 nt, Artificial Sequence
  LRRK2 RNA guide
aaagcccauuacucugucugug

SEQ ID NO: 82252 - RNA, 22 nt, Artificial Sequence
  LRRK2 RNA guide
aaaugaggcacagacagaguaa

SEQ ID NO: 82253 - RNA, 22 nt, Artificial Sequence
  LRRK2 RNA guide
aagaaagcccauuacucugucu

SEQ ID NO: 82254 - RNA, 22 nt, Artificial Sequence
  LRRK2 RNA guide
aagcccauuacucugucugugc

SEQ ID NO: 82255 - RNA, 22 nt, Artificial Sequence
  LRRK2 RNA guide
aaugaggcacagacagaguaau

SEQ ID NO: 82256 - RNA, 22 nt, Artificial Sequence
  LRRK2 RNA guide
acaccaagaaagcccauuacuc

SEQ ID NO: 82257 - RNA, 22 nt, Artificial Sequence
  LRRK2 RNA guide
acagacagaguaaugggcuuuc

SEQ ID NO: 82258 - RNA, 22 nt, Artificial Sequence
  LRRK2 RNA guide
acagaguaaugggcuuucuugg

SEQ ID NO: 82259 - RNA, 22 nt, Artificial Sequence
  LRRK2 RNA guide
accaagaaagcccauuacucug

SEQ ID NO: 82260 - RNA, 22 nt, Artificial Sequence
  LRRK2 RNA guide
acucugucugugccucauuuca

SEQ ID NO: 82261 - RNA, 22 nt, Artificial Sequence
  LRRK2 RNA guide
acuuuuaugaaaugaggcacag

SEQ ID NO: 82262 - RNA, 22 nt, Artificial Sequence
  LRRK2 RNA guide
agaaagcccauuacucugucug

SEQ ID NO: 82263 - RNA, 22 nt, Artificial Sequence
  LRRK2 RNA guide
agacaccaagaaagcccauuac

SEQ ID NO: 82264 - RNA, 22 nt, Artificial Sequence
  LRRK2 RNA guide
agacagaguaaugggcuuucuu

SEQ ID NO: 82265 - RNA, 22 nt, Artificial Sequence
  LRRK2 RNA guide
agaguaaugggcuuucuuggug

SEQ ID NO: 82266 - RNA, 22 nt, Artificial Sequence
  LRRK2 RNA guide
agcccauuacucugucugugcc

SEQ ID NO: 82267 - RNA, 22 nt, Artificial Sequence
  LRRK2 RNA guide
aggagacaccaagaaagcccau

SEQ ID NO: 82268 - RNA, 22 nt, Artificial Sequence
  LRRK2 RNA guide
aggcacagacagaguaaugggc

SEQ ID NO: 82269 - RNA, 22 nt, Artificial Sequence
  LRRK2 RNA guide
augaaaugaggcacagacagag

SEQ ID NO: 82270 - RNA, 22 nt, Artificial Sequence
  LRRK2 RNA guide
augaggcacagacagaguaaug

SEQ ID NO: 82271 - RNA, 22 nt, Artificial Sequence
  LRRK2 RNA guide
auuacucugucugugccucauu

SEQ ID NO: 82272 - RNA, 22 nt, Artificial Sequence
  LRRK2 RNA guide
caagaaagcccauuacucuguc

SEQ ID NO: 82273 - RNA, 22 nt, Artificial Sequence
  LRRK2 RNA guide
cacagacagaguaaugggcuuu

SEQ ID NO: 82274 - RNA, 22 nt, Artificial Sequence
  LRRK2 RNA guide
caccaagaaagcccauuacucu

SEQ ID NO: 82275 - RNA, 22 nt, Artificial Sequence
  LRRK2 RNA guide
cagacagaguaaugggcuuucu

SEQ ID NO: 82276 - RNA, 22 nt, Artificial Sequence
  LRRK2 RNA guide
cagaguaaugggcuuucuuggu

SEQ ID NO: 82277 - RNA, 22 nt, Artificial Sequence
  LRRK2 RNA guide
caggagacaccaagaaagccca

SEQ ID NO: 82278 - RNA, 22 nt, Artificial Sequence
  LRRK2 RNA guide
cauuacucugucugugccucau

SEQ ID NO: 82279 - RNA, 22 nt, Artificial Sequence
  LRRK2 RNA guide
ccaagaaagcccauuacucugu

SEQ ID NO: 82280 - RNA, 22 nt, Artificial Sequence
  LRRK2 RNA guide
ccauuacucugucugugccuca

SEQ ID NO: 82281 - RNA, 22 nt, Artificial Sequence
  LRRK2 RNA guide
cccauuacucugucugugccuc

SEQ ID NO: 82282 - RNA, 22 nt, Artificial Sequence
  LRRK2 RNA guide
cucugucugugccucauuucau

SEQ ID NO: 82283 - RNA, 22 nt, Artificial Sequence
  LRRK2 RNA guide
cuuuuaugaaaugaggcacaga

SEQ ID NO: 82284 - RNA, 22 nt, Artificial Sequence
  LRRK2 RNA guide
gaaagcccauuacucugucugu

SEQ ID NO: 82285 - RNA, 22 nt, Artificial Sequence
  LRRK2 RNA guide
gaaaugaggcacagacagagua

SEQ ID NO: 82286 - RNA, 22 nt, Artificial Sequence
  LRRK2 RNA guide
gacaccaagaaagcccauuacu

SEQ ID NO: 82287 - RNA, 22 nt, Artificial Sequence
  LRRK2 RNA guide
gacagaguaaugggcuuucuug

SEQ ID NO: 82288 - RNA, 22 nt, Artificial Sequence
  LRRK2 RNA guide
gagacaccaagaaagcccauua

SEQ ID NO: 82289 - RNA, 22 nt, Artificial Sequence
  LRRK2 RNA guide
gaggcacagacagaguaauggg

SEQ ID NO: 82290 - RNA, 22 nt, Artificial Sequence
  LRRK2 RNA guide
gaguaaugggcuuucuuggugu

SEQ ID NO: 82291 - RNA, 22 nt, Artificial Sequence
  LRRK2 RNA guide
gcacagacagaguaaugggcuu

SEQ ID NO: 82292 - RNA, 22 nt, Artificial Sequence
  LRRK2 RNA guide
gcccauuacucugucugugccu

SEQ ID NO: 82293 - RNA, 22 nt, Artificial Sequence
  LRRK2 RNA guide
ggagacaccaagaaagcccauu

SEQ ID NO: 82294 - RNA, 22 nt, Artificial Sequence
  LRRK2 RNA guide
ggcacagacagaguaaugggcu

SEQ ID NO: 82295 - RNA, 22 nt, Artificial Sequence
  LRRK2 RNA guide
uacucugucugugccucauuuc

SEQ ID NO: 82296 - RNA, 22 nt, Artificial Sequence
  LRRK2 RNA guide
uaugaaaugaggcacagacaga

SEQ ID NO: 82297 - RNA, 22 nt, Artificial Sequence
  LRRK2 RNA guide
ugaaaugaggcacagacagagu

SEQ ID NO: 82298 - RNA, 22 nt, Artificial Sequence
  LRRK2 RNA guide
ugaggcacagacagaguaaugg

SEQ ID NO: 82299 - RNA, 22 nt, Artificial Sequence
  LRRK2 RNA guide
uuacucugucugugccucauuu

SEQ ID NO: 82300 - RNA, 22 nt, Artificial Sequence
  LRRK2 RNA guide
uuaugaaaugaggcacagacag

SEQ ID NO: 82301 - RNA, 22 nt, Artificial Sequence
  LRRK2 RNA guide
uuuaugaaaugaggcacagaca

SEQ ID NO: 82302 - RNA, 22 nt, Artificial Sequence
  LRRK2 RNA guide
uuuuaugaaaugaggcacagac

SEQ ID NO: 82303 - RNA, 20 nt, Artificial Sequence
  LRRK2 RNA guide
aaagcccauuacgcugucug

SEQ ID NO: 82304 - RNA, 20 nt, Artificial Sequence
  LRRK2 RNA guide
aaaugaggcacagacagcgu

SEQ ID NO: 82305 - RNA, 20 nt, Artificial Sequence
  LRRK2 RNA guide
aagaaagcccauuacgcugu

SEQ ID NO: 82306 - RNA, 20 nt, Artificial Sequence
  LRRK2 RNA guide
aagcccauuacgcugucugu

SEQ ID NO: 82307 - RNA, 20 nt, Artificial Sequence
  LRRK2 RNA guide
aaugaggcacagacagcgua

SEQ ID NO: 82308 - RNA, 20 nt, Artificial Sequence
  LRRK2 RNA guide
acagacagcguaaugggcuu

SEQ ID NO: 82309 - RNA, 20 nt, Artificial Sequence
  LRRK2 RNA guide
acagcguaaugggcuuucuu

SEQ ID NO: 82310 - RNA, 20 nt, Artificial Sequence
  LRRK2 RNA guide
accaagaaagcccauuacgc

SEQ ID NO: 82311 - RNA, 20 nt, Artificial Sequence
  LRRK2 RNA guide
acgcugucugugccucauuu

SEQ ID NO: 82312 - RNA, 20 nt, Artificial Sequence
  LRRK2 RNA guide
agaaagcccauuacgcuguc

SEQ ID NO: 82313 - RNA, 20 nt, Artificial Sequence
  LRRK2 RNA guide
agacagcguaaugggcuuuc

SEQ ID NO: 82314 - RNA, 20 nt, Artificial Sequence
  LRRK2 RNA guide
agcccauuacgcugucugug

SEQ ID NO: 82315 - RNA, 20 nt, Artificial Sequence
  LRRK2 RNA guide
agcguaaugggcuuucuugg

SEQ ID NO: 82316 - RNA, 20 nt, Artificial Sequence
  LRRK2 RNA guide
aggcacagacagcguaaugg

SEQ ID NO: 82317 - RNA, 20 nt, Artificial Sequence
  LRRK2 RNA guide
augaggcacagacagcguaa

SEQ ID NO: 82318 - RNA, 20 nt, Artificial Sequence
  LRRK2 RNA guide
auuacgcugucugugccuca

SEQ ID NO: 82319 - RNA, 20 nt, Artificial Sequence
  LRRK2 RNA guide
caagaaagcccauuacgcug

SEQ ID NO: 82320 - RNA, 20 nt, Artificial Sequence
  LRRK2 RNA guide
cacagacagcguaaugggcu

SEQ ID NO: 82321 - RNA, 20 nt, Artificial Sequence
  LRRK2 RNA guide
caccaagaaagcccauuacg

SEQ ID NO: 82322 - RNA, 20 nt, Artificial Sequence
  LRRK2 RNA guide
cagacagcguaaugggcuuu

SEQ ID NO: 82323 - RNA, 20 nt, Artificial Sequence
  LRRK2 RNA guide
cagcguaaugggcuuucuug

SEQ ID NO: 82324 - RNA, 20 nt, Artificial Sequence
  LRRK2 RNA guide
cauuacgcugucugugccuc

SEQ ID NO: 82325 - RNA, 20 nt, Artificial Sequence
  LRRK2 RNA guide
ccaagaaagcccauuacgcu

SEQ ID NO: 82326 - RNA, 20 nt, Artificial Sequence
  LRRK2 RNA guide
ccauuacgcugucugugccu

SEQ ID NO: 82327 - RNA, 20 nt, Artificial Sequence
  LRRK2 RNA guide
cccauuacgcugucugugcc

SEQ ID NO: 82328 - RNA, 20 nt, Artificial Sequence
  LRRK2 RNA guide
cgcugucugugccucauuuc

SEQ ID NO: 82329 - RNA, 20 nt, Artificial Sequence
  LRRK2 RNA guide
gaaagcccauuacgcugucu

SEQ ID NO: 82330 - RNA, 20 nt, Artificial Sequence
  LRRK2 RNA guide
gaaaugaggcacagacagcg

SEQ ID NO: 82331 - RNA, 20 nt, Artificial Sequence
  LRRK2 RNA guide
gacagcguaaugggcuuucu

SEQ ID NO: 82332 - RNA, 20 nt, Artificial Sequence
  LRRK2 RNA guide
gaggcacagacagcguaaug

SEQ ID NO: 82333 - RNA, 20 nt, Artificial Sequence
  LRRK2 RNA guide
gcacagacagcguaaugggc

SEQ ID NO: 82334 - RNA, 20 nt, Artificial Sequence
  LRRK2 RNA guide
gcccauuacgcugucugugc

SEQ ID NO: 82335 - RNA, 20 nt, Artificial Sequence
  LRRK2 RNA guide
gcguaaugggcuuucuuggu

SEQ ID NO: 82336 - RNA, 20 nt, Artificial Sequence
  LRRK2 RNA guide
ggcacagacagcguaauggg

SEQ ID NO: 82337 - RNA, 20 nt, Artificial Sequence
  LRRK2 RNA guide
uacgcugucugugccucauu

SEQ ID NO: 82338 - RNA, 20 nt, Artificial Sequence
  LRRK2 RNA guide
ugaaaugaggcacagacagc

SEQ ID NO: 82339 - RNA, 20 nt, Artificial Sequence
  LRRK2 RNA guide
ugaggcacagacagcguaau

SEQ ID NO: 82340 - RNA, 20 nt, Artificial Sequence
  LRRK2 RNA guide
uuacgcugucugugccucau

SEQ ID NO: 82341 - RNA, 21 nt, Artificial Sequence
  LRRK2 RNA guide
aaagcccauuacgcugucugu

SEQ ID NO: 82342 - RNA, 21 nt, Artificial Sequence
  LRRK2 RNA guide
aaaugaggcacagacagcgua

SEQ ID NO: 82343 - RNA, 21 nt, Artificial Sequence
  LRRK2 RNA guide
aagaaagcccauuacgcuguc

SEQ ID NO: 82344 - RNA, 21 nt, Artificial Sequence
  LRRK2 RNA guide
aagcccauuacgcugucugug

SEQ ID NO: 82345 - RNA, 21 nt, Artificial Sequence
  LRRK2 RNA guide
aaugaggcacagacagcguaa

SEQ ID NO: 82346 - RNA, 21 nt, Artificial Sequence
  LRRK2 RNA guide
acaccaagaaagcccauuacg

SEQ ID NO: 82347 - RNA, 21 nt, Artificial Sequence
  LRRK2 RNA guide
acagacagcguaaugggcuuu

SEQ ID NO: 82348 - RNA, 21 nt, Artificial Sequence
  LRRK2 RNA guide
acagcguaaugggcuuucuug

SEQ ID NO: 82349 - RNA, 21 nt, Artificial Sequence
  LRRK2 RNA guide
accaagaaagcccauuacgcu

SEQ ID NO: 82350 - RNA, 21 nt, Artificial Sequence
  LRRK2 RNA guide
acgcugucugugccucauuuc

SEQ ID NO: 82351 - RNA, 21 nt, Artificial Sequence
  LRRK2 RNA guide
agaaagcccauuacgcugucu

SEQ ID NO: 82352 - RNA, 21 nt, Artificial Sequence
  LRRK2 RNA guide
agacagcguaaugggcuuucu

SEQ ID NO: 82353 - RNA, 21 nt, Artificial Sequence
  LRRK2 RNA guide
agcccauuacgcugucugugc

SEQ ID NO: 82354 - RNA, 21 nt, Artificial Sequence
  LRRK2 RNA guide
agcguaaugggcuuucuuggu

SEQ ID NO: 82355 - RNA, 21 nt, Artificial Sequence
  LRRK2 RNA guide
aggcacagacagcguaauggg

SEQ ID NO: 82356 - RNA, 21 nt, Artificial Sequence
  LRRK2 RNA guide
augaaaugaggcacagacagc

SEQ ID NO: 82357 - RNA, 21 nt, Artificial Sequence
  LRRK2 RNA guide
augaggcacagacagcguaau

SEQ ID NO: 82358 - RNA, 21 nt, Artificial Sequence
  LRRK2 RNA guide
auuacgcugucugugccucau

SEQ ID NO: 82359 - RNA, 21 nt, Artificial Sequence
  LRRK2 RNA guide
caagaaagcccauuacgcugu

SEQ ID NO: 82360 - RNA, 21 nt, Artificial Sequence
  LRRK2 RNA guide
cacagacagcguaaugggcuu

SEQ ID NO: 82361 - RNA, 21 nt, Artificial Sequence
  LRRK2 RNA guide
caccaagaaagcccauuacgc

SEQ ID NO: 82362 - RNA, 21 nt, Artificial Sequence
  LRRK2 RNA guide
cagacagcguaaugggcuuuc

SEQ ID NO: 82363 - RNA, 21 nt, Artificial Sequence
  LRRK2 RNA guide
cagcguaaugggcuuucuugg

SEQ ID NO: 82364 - RNA, 21 nt, Artificial Sequence
  LRRK2 RNA guide
cauuacgcugucugugccuca

SEQ ID NO: 82365 - RNA, 21 nt, Artificial Sequence
  LRRK2 RNA guide
ccaagaaagcccauuacgcug

SEQ ID NO: 82366 - RNA, 21 nt, Artificial Sequence
  LRRK2 RNA guide
ccauuacgcugucugugccuc

SEQ ID NO: 82367 - RNA, 21 nt, Artificial Sequence
  LRRK2 RNA guide
cccauuacgcugucugugccu

SEQ ID NO: 82368 - RNA, 21 nt, Artificial Sequence
  LRRK2 RNA guide
cgcugucugugccucauuuca

SEQ ID NO: 82369 - RNA, 21 nt, Artificial Sequence
  LRRK2 RNA guide
gaaagcccauuacgcugucug

SEQ ID NO: 82370 - RNA, 21 nt, Artificial Sequence
  LRRK2 RNA guide
gaaaugaggcacagacagcgu

SEQ ID NO: 82371 - RNA, 21 nt, Artificial Sequence
  LRRK2 RNA guide
gacagcguaaugggcuuucuu

SEQ ID NO: 82372 - RNA, 21 nt, Artificial Sequence
  LRRK2 RNA guide
gaggcacagacagcguaaugg

SEQ ID NO: 82373 - RNA, 21 nt, Artificial Sequence
  LRRK2 RNA guide
gcacagacagcguaaugggcu

SEQ ID NO: 82374 - RNA, 21 nt, Artificial Sequence
  LRRK2 RNA guide
gcccauuacgcugucugugcc

SEQ ID NO: 82375 - RNA, 21 nt, Artificial Sequence
  LRRK2 RNA guide
gcguaaugggcuuucuuggug

SEQ ID NO: 82376 - RNA, 21 nt, Artificial Sequence
  LRRK2 RNA guide
ggcacagacagcguaaugggc

SEQ ID NO: 82377 - RNA, 21 nt, Artificial Sequence
  LRRK2 RNA guide
uacgcugucugugccucauuu

SEQ ID NO: 82378 - RNA, 21 nt, Artificial Sequence
  LRRK2 RNA guide
ugaaaugaggcacagacagcg

SEQ ID NO: 82379 - RNA, 21 nt, Artificial Sequence
  LRRK2 RNA guide
ugaggcacagacagcguaaug

SEQ ID NO: 82380 - RNA, 21 nt, Artificial Sequence
  LRRK2 RNA guide
uuacgcugucugugccucauu

SEQ ID NO: 82381 - RNA, 22 nt, Artificial Sequence
  LRRK2 RNA guide
aaagcccauuacgcugucugug

SEQ ID NO: 82382 - RNA, 22 nt, Artificial Sequence
  LRRK2 RNA guide
aaaugaggcacagacagcguaa

SEQ ID NO: 82383 - RNA, 22 nt, Artificial Sequence
  LRRK2 RNA guide
aagaaagcccauuacgcugucu

SEQ ID NO: 82384 - RNA, 22 nt, Artificial Sequence
  LRRK2 RNA guide
aagcccauuacgcugucugugc

SEQ ID NO: 82385 - RNA, 22 nt, Artificial Sequence
  LRRK2 RNA guide
aaugaggcacagacagcguaau

SEQ ID NO: 82386 - RNA, 22 nt, Artificial Sequence
  LRRK2 RNA guide
acaccaagaaagcccauuacgc

SEQ ID NO: 82387 - RNA, 22 nt, Artificial Sequence
  LRRK2 RNA guide
acagacagcguaaugggcuuuc

SEQ ID NO: 82388 - RNA, 22 nt, Artificial Sequence
  LRRK2 RNA guide
acagcguaaugggcuuucuugg

SEQ ID NO: 82389 - RNA, 22 nt, Artificial Sequence
  LRRK2 RNA guide
accaagaaagcccauuacgcug

SEQ ID NO: 82390 - RNA, 22 nt, Artificial Sequence
  LRRK2 RNA guide
acgcugucugugccucauuuca

SEQ ID NO: 82391 - RNA, 22 nt, Artificial Sequence
  LRRK2 RNA guide
agaaagcccauuacgcugucug

SEQ ID NO: 82392 - RNA, 22 nt, Artificial Sequence
  LRRK2 RNA guide
agacagcguaaugggcuuucuu

SEQ ID NO: 82393 - RNA, 22 nt, Artificial Sequence
  LRRK2 RNA guide
agcccauuacgcugucugugcc

SEQ ID NO: 82394 - RNA, 22 nt, Artificial Sequence
  LRRK2 RNA guide
agcguaaugggcuuucuuggug

SEQ ID NO: 82395 - RNA, 22 nt, Artificial Sequence
  LRRK2 RNA guide
aggcacagacagcguaaugggc

SEQ ID NO: 82396 - RNA, 22 nt, Artificial Sequence
  LRRK2 RNA guide
augaaaugaggcacagacagcg

SEQ ID NO: 82397 - RNA, 22 nt, Artificial Sequence
  LRRK2 RNA guide
augaggcacagacagcguaaug

SEQ ID NO: 82398 - RNA, 22 nt, Artificial Sequence
  LRRK2 RNA guide
auuacgcugucugugccucauu

SEQ ID NO: 82399 - RNA, 22 nt, Artificial Sequence
  LRRK2 RNA guide
caagaaagcccauuacgcuguc

SEQ ID NO: 82400 - RNA, 22 nt, Artificial Sequence
  LRRK2 RNA guide
cacagacagcguaaugggcuuu

SEQ ID NO: 82401 - RNA, 22 nt, Artificial Sequence
  LRRK2 RNA guide
caccaagaaagcccauuacgcu

SEQ ID NO: 82402 - RNA, 22 nt, Artificial Sequence
  LRRK2 RNA guide
cagacagcguaaugggcuuucu

SEQ ID NO: 82403 - RNA, 22 nt, Artificial Sequence
  LRRK2 RNA guide
cagcguaaugggcuuucuuggu

SEQ ID NO: 82404 - RNA, 22 nt, Artificial Sequence
  LRRK2 RNA guide
cauuacgcugucugugccucau

SEQ ID NO: 82405 - RNA, 22 nt, Artificial Sequence
  LRRK2 RNA guide
ccaagaaagcccauuacgcugu

SEQ ID NO: 82406 - RNA, 22 nt, Artificial Sequence
  LRRK2 RNA guide
ccauuacgcugucugugccuca

SEQ ID NO: 82407 - RNA, 22 nt, Artificial Sequence
  LRRK2 RNA guide
cccauuacgcugucugugccuc

SEQ ID NO: 82408 - RNA, 22 nt, Artificial Sequence
  LRRK2 RNA guide
cgcugucugugccucauuucau

SEQ ID NO: 82409 - RNA, 22 nt, Artificial Sequence
  LRRK2 RNA guide
gaaagcccauuacgcugucugu

SEQ ID NO: 82410 - RNA, 22 nt, Artificial Sequence
  LRRK2 RNA guide
gaaaugaggcacagacagcgua

SEQ ID NO: 82411 - RNA, 22 nt, Artificial Sequence
  LRRK2 RNA guide
gacaccaagaaagcccauuacg

SEQ ID NO: 82412 - RNA, 22 nt, Artificial Sequence
  LRRK2 RNA guide
gacagcguaaugggcuuucuug

SEQ ID NO: 82413 - RNA, 22 nt, Artificial Sequence
  LRRK2 RNA guide
gaggcacagacagcguaauggg

SEQ ID NO: 82414 - RNA, 22 nt, Artificial Sequence
  LRRK2 RNA guide
gcacagacagcguaaugggcuu

SEQ ID NO: 82415 - RNA, 22 nt, Artificial Sequence
  LRRK2 RNA guide
gcccauuacgcugucugugccu

SEQ ID NO: 82416 - RNA, 22 nt, Artificial Sequence
  LRRK2 RNA guide
gcguaaugggcuuucuuggugu

SEQ ID NO: 82417 - RNA, 22 nt, Artificial Sequence
  LRRK2 RNA guide
ggcacagacagcguaaugggcu

SEQ ID NO: 82418 - RNA, 22 nt, Artificial Sequence
  LRRK2 RNA guide
uacgcugucugugccucauuuc

SEQ ID NO: 82419 - RNA, 22 nt, Artificial Sequence
  LRRK2 RNA guide
uaugaaaugaggcacagacagc

SEQ ID NO: 82420 - RNA, 22 nt, Artificial Sequence
  LRRK2 RNA guide
ugaaaugaggcacagacagcgu

SEQ ID NO: 82421 - RNA, 22 nt, Artificial Sequence
  LRRK2 RNA guide
ugaggcacagacagcguaaugg

SEQ ID NO: 82422 - RNA, 22 nt, Artificial Sequence
  LRRK2 RNA guide
uuacgcugucugugccucauuu

SEQ ID NO: 82423 - RNA, 20 nt, Artificial Sequence
  LRRK2 RNA guide
acauggccaccugcccgcca

SEQ ID NO: 82424 - RNA, 20 nt, Artificial Sequence
  LRRK2 RNA guide
accugcccgccacucaggag

SEQ ID NO: 82425 - RNA, 20 nt, Artificial Sequence
  LRRK2 RNA guide
agcugugacauggccaccug

SEQ ID NO: 82426 - RNA, 20 nt, Artificial Sequence
  LRRK2 RNA guide
aguggcgggcagguggccau

SEQ ID NO: 82427 - RNA, 20 nt, Artificial Sequence
  LRRK2 RNA guide
auggccaccugcccgccacu

SEQ ID NO: 82428 - RNA, 20 nt, Artificial Sequence
  LRRK2 RNA guide
caccugcccgccacucagga

SEQ ID NO: 82429 - RNA, 20 nt, Artificial Sequence
  LRRK2 RNA guide
cauggccaccugcccgccac

SEQ ID NO: 82430 - RNA, 20 nt, Artificial Sequence
  LRRK2 RNA guide
ccaccugcccgccacucagg

SEQ ID NO: 82431 - RNA, 20 nt, Artificial Sequence
  LRRK2 RNA guide
cccgccacucaggagacacc

SEQ ID NO: 82432 - RNA, 20 nt, Artificial Sequence
  LRRK2 RNA guide
ccgccacucaggagacacca

SEQ ID NO: 82433 - RNA, 20 nt, Artificial Sequence
  LRRK2 RNA guide
ccugaguggcgggcaggugg

SEQ ID NO: 82434 - RNA, 20 nt, Artificial Sequence
  LRRK2 RNA guide
ccugcccgccacucaggaga

SEQ ID NO: 82435 - RNA, 20 nt, Artificial Sequence
  LRRK2 RNA guide
cgggcagguggccaugucac

SEQ ID NO: 82436 - RNA, 20 nt, Artificial Sequence
  LRRK2 RNA guide
cuccugaguggcgggcaggu

SEQ ID NO: 82437 - RNA, 20 nt, Artificial Sequence
  LRRK2 RNA guide
cugaguggcgggcagguggc

SEQ ID NO: 82438 - RNA, 20 nt, Artificial Sequence
  LRRK2 RNA guide
cugcccgccacucaggagac

SEQ ID NO: 82439 - RNA, 20 nt, Artificial Sequence
  LRRK2 RNA guide
cugugacauggccaccugcc

SEQ ID NO: 82440 - RNA, 20 nt, Artificial Sequence
  LRRK2 RNA guide
cuuggugucuccugaguggc

SEQ ID NO: 82441 - RNA, 20 nt, Artificial Sequence
  LRRK2 RNA guide
cuuucuuggugucuccugag

SEQ ID NO: 82442 - RNA, 20 nt, Artificial Sequence
  LRRK2 RNA guide
gacauggccaccugcccgcc

SEQ ID NO: 82443 - RNA, 20 nt, Artificial Sequence
  LRRK2 RNA guide
gagcugugacauggccaccu

SEQ ID NO: 82444 - RNA, 20 nt, Artificial Sequence
  LRRK2 RNA guide
gaguggcgggcagguggcca

SEQ ID NO: 82445 - RNA, 20 nt, Artificial Sequence
  LRRK2 RNA guide
gccaccugcccgccacucag

SEQ ID NO: 82446 - RNA, 20 nt, Artificial Sequence
  LRRK2 RNA guide
gcccgccacucaggagacac

SEQ ID NO: 82447 - RNA, 20 nt, Artificial Sequence
  LRRK2 RNA guide
gcgggcagguggccauguca

SEQ ID NO: 82448 - RNA, 20 nt, Artificial Sequence
  LRRK2 RNA guide
gcugugacauggccaccugc

SEQ ID NO: 82449 - RNA, 20 nt, Artificial Sequence
  LRRK2 RNA guide
ggccaccugcccgccacuca

SEQ ID NO: 82450 - RNA, 20 nt, Artificial Sequence
  LRRK2 RNA guide
ggcgggcagguggccauguc

SEQ ID NO: 82451 - RNA, 20 nt, Artificial Sequence
  LRRK2 RNA guide
ggugucuccugaguggcggg

SEQ ID NO: 82452 - RNA, 20 nt, Artificial Sequence
  LRRK2 RNA guide
gucuccugaguggcgggcag

SEQ ID NO: 82453 - RNA, 20 nt, Artificial Sequence
  LRRK2 RNA guide
gugacauggccaccugcccg

SEQ ID NO: 82454 - RNA, 20 nt, Artificial Sequence
  LRRK2 RNA guide
guggcgggcagguggccaug

SEQ ID NO: 82455 - RNA, 20 nt, Artificial Sequence
  LRRK2 RNA guide
gugucuccugaguggcgggc

SEQ ID NO: 82456 - RNA, 20 nt, Artificial Sequence
  LRRK2 RNA guide
uccugaguggcgggcaggug

SEQ ID NO: 82457 - RNA, 20 nt, Artificial Sequence
  LRRK2 RNA guide
ucuccugaguggcgggcagg

SEQ ID NO: 82458 - RNA, 20 nt, Artificial Sequence
  LRRK2 RNA guide
ucuuggugucuccugagugg

SEQ ID NO: 82459 - RNA, 20 nt, Artificial Sequence
  LRRK2 RNA guide
ugacauggccaccugcccgc

SEQ ID NO: 82460 - RNA, 20 nt, Artificial Sequence
  LRRK2 RNA guide
ugaguggcgggcagguggcc

SEQ ID NO: 82461 - RNA, 20 nt, Artificial Sequence
  LRRK2 RNA guide
ugcccgccacucaggagaca

SEQ ID NO: 82462 - RNA, 20 nt, Artificial Sequence
  LRRK2 RNA guide
uggccaccugcccgccacuc

SEQ ID NO: 82463 - RNA, 20 nt, Artificial Sequence
  LRRK2 RNA guide
uggcgggcagguggccaugu

SEQ ID NO: 82464 - RNA, 20 nt, Artificial Sequence
  LRRK2 RNA guide
uggugucuccugaguggcgg

SEQ ID NO: 82465 - RNA, 20 nt, Artificial Sequence
  LRRK2 RNA guide
ugucuccugaguggcgggca

SEQ ID NO: 82466 - RNA, 20 nt, Artificial Sequence
  LRRK2 RNA guide
ugugacauggccaccugccc

SEQ ID NO: 82467 - RNA, 20 nt, Artificial Sequence
  LRRK2 RNA guide
uucuuggugucuccugagug

SEQ ID NO: 82468 - RNA, 20 nt, Artificial Sequence
  LRRK2 RNA guide
uuggugucuccugaguggcg

SEQ ID NO: 82469 - RNA, 20 nt, Artificial Sequence
  LRRK2 RNA guide
uuucuuggugucuccugagu

SEQ ID NO: 82470 - RNA, 21 nt, Artificial Sequence
  LRRK2 RNA guide
acauggccaccugcccgccac

SEQ ID NO: 82471 - RNA, 21 nt, Artificial Sequence
  LRRK2 RNA guide
accugcccgccacucaggaga

SEQ ID NO: 82472 - RNA, 21 nt, Artificial Sequence
  LRRK2 RNA guide
agagcugugacauggccaccu

SEQ ID NO: 82473 - RNA, 21 nt, Artificial Sequence
  LRRK2 RNA guide
agcugugacauggccaccugc

SEQ ID NO: 82474 - RNA, 21 nt, Artificial Sequence
  LRRK2 RNA guide
aguggcgggcagguggccaug

SEQ ID NO: 82475 - RNA, 21 nt, Artificial Sequence
  LRRK2 RNA guide
auggccaccugcccgccacuc

SEQ ID NO: 82476 - RNA, 21 nt, Artificial Sequence
  LRRK2 RNA guide
caccugcccgccacucaggag

SEQ ID NO: 82477 - RNA, 21 nt, Artificial Sequence
  LRRK2 RNA guide
cauggccaccugcccgccacu

SEQ ID NO: 82478 - RNA, 21 nt, Artificial Sequence
  LRRK2 RNA guide
ccaccugcccgccacucagga

SEQ ID NO: 82479 - RNA, 21 nt, Artificial Sequence
  LRRK2 RNA guide
cccgccacucaggagacacca

SEQ ID NO: 82480 - RNA, 21 nt, Artificial Sequence
  LRRK2 RNA guide
ccgccacucaggagacaccaa

SEQ ID NO: 82481 - RNA, 21 nt, Artificial Sequence
  LRRK2 RNA guide
ccugaguggcgggcagguggc

SEQ ID NO: 82482 - RNA, 21 nt, Artificial Sequence
  LRRK2 RNA guide
ccugcccgccacucaggagac

SEQ ID NO: 82483 - RNA, 21 nt, Artificial Sequence
  LRRK2 RNA guide
cgggcagguggccaugucaca

SEQ ID NO: 82484 - RNA, 21 nt, Artificial Sequence
  LRRK2 RNA guide
cuccugaguggcgggcaggug

SEQ ID NO: 82485 - RNA, 21 nt, Artificial Sequence
  LRRK2 RNA guide
cugaguggcgggcagguggcc

SEQ ID NO: 82486 - RNA, 21 nt, Artificial Sequence
  LRRK2 RNA guide
cugcccgccacucaggagaca

SEQ ID NO: 82487 - RNA, 21 nt, Artificial Sequence
  LRRK2 RNA guide
cugugacauggccaccugccc

SEQ ID NO: 82488 - RNA, 21 nt, Artificial Sequence
  LRRK2 RNA guide
cuuggugucuccugaguggcg

SEQ ID NO: 82489 - RNA, 21 nt, Artificial Sequence
  LRRK2 RNA guide
cuuucuuggugucuccugagu

SEQ ID NO: 82490 - RNA, 21 nt, Artificial Sequence
  LRRK2 RNA guide
gacauggccaccugcccgcca

SEQ ID NO: 82491 - RNA, 21 nt, Artificial Sequence
  LRRK2 RNA guide
gagcugugacauggccaccug

SEQ ID NO: 82492 - RNA, 21 nt, Artificial Sequence
  LRRK2 RNA guide
gaguggcgggcagguggccau

SEQ ID NO: 82493 - RNA, 21 nt, Artificial Sequence
  LRRK2 RNA guide
gccaccugcccgccacucagg

SEQ ID NO: 82494 - RNA, 21 nt, Artificial Sequence
  LRRK2 RNA guide
gcccgccacucaggagacacc

SEQ ID NO: 82495 - RNA, 21 nt, Artificial Sequence
  LRRK2 RNA guide
gcgggcagguggccaugucac

SEQ ID NO: 82496 - RNA, 21 nt, Artificial Sequence
  LRRK2 RNA guide
gcugugacauggccaccugcc

SEQ ID NO: 82497 - RNA, 21 nt, Artificial Sequence
  LRRK2 RNA guide
gcuuucuuggugucuccugag

SEQ ID NO: 82498 - RNA, 21 nt, Artificial Sequence
  LRRK2 RNA guide
ggccaccugcccgccacucag

SEQ ID NO: 82499 - RNA, 21 nt, Artificial Sequence
  LRRK2 RNA guide
ggcgggcagguggccauguca

SEQ ID NO: 82500 - RNA, 21 nt, Artificial Sequence
  LRRK2 RNA guide
ggugucuccugaguggcgggc

SEQ ID NO: 82501 - RNA, 21 nt, Artificial Sequence
  LRRK2 RNA guide
gucuccugaguggcgggcagg

SEQ ID NO: 82502 - RNA, 21 nt, Artificial Sequence
  LRRK2 RNA guide
gugacauggccaccugcccgc

SEQ ID NO: 82503 - RNA, 21 nt, Artificial Sequence
  LRRK2 RNA guide
guggcgggcagguggccaugu

SEQ ID NO: 82504 - RNA, 21 nt, Artificial Sequence
  LRRK2 RNA guide
gugucuccugaguggcgggca

SEQ ID NO: 82505 - RNA, 21 nt, Artificial Sequence
  LRRK2 RNA guide
uagagcugugacauggccacc

SEQ ID NO: 82506 - RNA, 21 nt, Artificial Sequence
  LRRK2 RNA guide
uccugaguggcgggcaggugg

SEQ ID NO: 82507 - RNA, 21 nt, Artificial Sequence
  LRRK2 RNA guide
ucuccugaguggcgggcaggu

SEQ ID NO: 82508 - RNA, 21 nt, Artificial Sequence
  LRRK2 RNA guide
ucuuggugucuccugaguggc

SEQ ID NO: 82509 - RNA, 21 nt, Artificial Sequence
  LRRK2 RNA guide
ugacauggccaccugcccgcc

SEQ ID NO: 82510 - RNA, 21 nt, Artificial Sequence
  LRRK2 RNA guide
ugaguggcgggcagguggcca

SEQ ID NO: 82511 - RNA, 21 nt, Artificial Sequence
  LRRK2 RNA guide
ugcccgccacucaggagacac

SEQ ID NO: 82512 - RNA, 21 nt, Artificial Sequence
  LRRK2 RNA guide
uggccaccugcccgccacuca

SEQ ID NO: 82513 - RNA, 21 nt, Artificial Sequence
  LRRK2 RNA guide
uggcgggcagguggccauguc

SEQ ID NO: 82514 - RNA, 21 nt, Artificial Sequence
  LRRK2 RNA guide
uggugucuccugaguggcggg

SEQ ID NO: 82515 - RNA, 21 nt, Artificial Sequence
  LRRK2 RNA guide
ugucuccugaguggcgggcag

SEQ ID NO: 82516 - RNA, 21 nt, Artificial Sequence
  LRRK2 RNA guide
ugugacauggccaccugcccg

SEQ ID NO: 82517 - RNA, 21 nt, Artificial Sequence
  LRRK2 RNA guide
uucuuggugucuccugagugg

SEQ ID NO: 82518 - RNA, 21 nt, Artificial Sequence
  LRRK2 RNA guide
uuggugucuccugaguggcgg

SEQ ID NO: 82519 - RNA, 21 nt, Artificial Sequence
  LRRK2 RNA guide
uuucuuggugucuccugagug

SEQ ID NO: 82520 - RNA, 22 nt, Artificial Sequence
  LRRK2 RNA guide
acauggccaccugcccgccacu

SEQ ID NO: 82521 - RNA, 22 nt, Artificial Sequence
  LRRK2 RNA guide
accugcccgccacucaggagac

SEQ ID NO: 82522 - RNA, 22 nt, Artificial Sequence
  LRRK2 RNA guide
agagcugugacauggccaccug

SEQ ID NO: 82523 - RNA, 22 nt, Artificial Sequence
  LRRK2 RNA guide
agcugugacauggccaccugcc

SEQ ID NO: 82524 - RNA, 22 nt, Artificial Sequence
  LRRK2 RNA guide
aguggcgggcagguggccaugu

SEQ ID NO: 82525 - RNA, 22 nt, Artificial Sequence
  LRRK2 RNA guide
auggccaccugcccgccacuca

SEQ ID NO: 82526 - RNA, 22 nt, Artificial Sequence
  LRRK2 RNA guide
caccugcccgccacucaggaga

SEQ ID NO: 82527 - RNA, 22 nt, Artificial Sequence
  LRRK2 RNA guide
cauggccaccugcccgccacuc

SEQ ID NO: 82528 - RNA, 22 nt, Artificial Sequence
  LRRK2 RNA guide
ccaccugcccgccacucaggag

SEQ ID NO: 82529 - RNA, 22 nt, Artificial Sequence
  LRRK2 RNA guide
cccgccacucaggagacaccaa

SEQ ID NO: 82530 - RNA, 22 nt, Artificial Sequence
  LRRK2 RNA guide
ccgccacucaggagacaccaag

SEQ ID NO: 82531 - RNA, 22 nt, Artificial Sequence
  LRRK2 RNA guide
ccugaguggcgggcagguggcc

SEQ ID NO: 82532 - RNA, 22 nt, Artificial Sequence
  LRRK2 RNA guide
ccugcccgccacucaggagaca

SEQ ID NO: 82533 - RNA, 22 nt, Artificial Sequence
  LRRK2 RNA guide
cgggcagguggccaugucacag

SEQ ID NO: 82534 - RNA, 22 nt, Artificial Sequence
  LRRK2 RNA guide
cuccugaguggcgggcaggugg

SEQ ID NO: 82535 - RNA, 22 nt, Artificial Sequence
  LRRK2 RNA guide
cugaguggcgggcagguggcca

SEQ ID NO: 82536 - RNA, 22 nt, Artificial Sequence
  LRRK2 RNA guide
cugcccgccacucaggagacac

SEQ ID NO: 82537 - RNA, 22 nt, Artificial Sequence
  LRRK2 RNA guide
cugugacauggccaccugcccg

SEQ ID NO: 82538 - RNA, 22 nt, Artificial Sequence
  LRRK2 RNA guide
cuuggugucuccugaguggcgg

SEQ ID NO: 82539 - RNA, 22 nt, Artificial Sequence
  LRRK2 RNA guide
cuuucuuggugucuccugagug

SEQ ID NO: 82540 - RNA, 22 nt, Artificial Sequence
  LRRK2 RNA guide
gacauggccaccugcccgccac

SEQ ID NO: 82541 - RNA, 22 nt, Artificial Sequence
  LRRK2 RNA guide
gagcugugacauggccaccugc

SEQ ID NO: 82542 - RNA, 22 nt, Artificial Sequence
  LRRK2 RNA guide
gaguggcgggcagguggccaug

SEQ ID NO: 82543 - RNA, 22 nt, Artificial Sequence
  LRRK2 RNA guide
gccaccugcccgccacucagga

SEQ ID NO: 82544 - RNA, 22 nt, Artificial Sequence
  LRRK2 RNA guide
gcccgccacucaggagacacca

SEQ ID NO: 82545 - RNA, 22 nt, Artificial Sequence
  LRRK2 RNA guide
gcgggcagguggccaugucaca

SEQ ID NO: 82546 - RNA, 22 nt, Artificial Sequence
  LRRK2 RNA guide
gcugugacauggccaccugccc

SEQ ID NO: 82547 - RNA, 22 nt, Artificial Sequence
  LRRK2 RNA guide
gcuuucuuggugucuccugagu

SEQ ID NO: 82548 - RNA, 22 nt, Artificial Sequence
  LRRK2 RNA guide
ggccaccugcccgccacucagg

SEQ ID NO: 82549 - RNA, 22 nt, Artificial Sequence
  LRRK2 RNA guide
ggcgggcagguggccaugucac

SEQ ID NO: 82550 - RNA, 22 nt, Artificial Sequence
  LRRK2 RNA guide
ggcuuucuuggugucuccugag

SEQ ID NO: 82551 - RNA, 22 nt, Artificial Sequence
  LRRK2 RNA guide
ggugucuccugaguggcgggca

SEQ ID NO: 82552 - RNA, 22 nt, Artificial Sequence
  LRRK2 RNA guide
gucuccugaguggcgggcaggu

SEQ ID NO: 82553 - RNA, 22 nt, Artificial Sequence
  LRRK2 RNA guide
gugacauggccaccugcccgcc

SEQ ID NO: 82554 - RNA, 22 nt, Artificial Sequence
  LRRK2 RNA guide
guggcgggcagguggccauguc

SEQ ID NO: 82555 - RNA, 22 nt, Artificial Sequence
  LRRK2 RNA guide
gugucuccugaguggcgggcag

SEQ ID NO: 82556 - RNA, 22 nt, Artificial Sequence
  LRRK2 RNA guide
uagagcugugacauggccaccu

SEQ ID NO: 82557 - RNA, 22 nt, Artificial Sequence
  LRRK2 RNA guide
uccugaguggcgggcagguggc

SEQ ID NO: 82558 - RNA, 22 nt, Artificial Sequence
  LRRK2 RNA guide
ucuccugaguggcgggcaggug

SEQ ID NO: 82559 - RNA, 22 nt, Artificial Sequence
  LRRK2 RNA guide
ucuuggugucuccugaguggcg

SEQ ID NO: 82560 - RNA, 22 nt, Artificial Sequence
  LRRK2 RNA guide
ugacauggccaccugcccgcca

SEQ ID NO: 82561 - RNA, 22 nt, Artificial Sequence
  LRRK2 RNA guide
ugaguggcgggcagguggccau

SEQ ID NO: 82562 - RNA, 22 nt, Artificial Sequence
  LRRK2 RNA guide
ugcccgccacucaggagacacc

SEQ ID NO: 82563 - RNA, 22 nt, Artificial Sequence
  LRRK2 RNA guide
uggccaccugcccgccacucag

SEQ ID NO: 82564 - RNA, 22 nt, Artificial Sequence
  LRRK2 RNA guide
uggcgggcagguggccauguca

SEQ ID NO: 82565 - RNA, 22 nt, Artificial Sequence
  LRRK2 RNA guide
uggugucuccugaguggcgggc

SEQ ID NO: 82566 - RNA, 22 nt, Artificial Sequence
  LRRK2 RNA guide
ugucuccugaguggcgggcagg

SEQ ID NO: 82567 - RNA, 22 nt, Artificial Sequence
  LRRK2 RNA guide
ugugacauggccaccugcccgc

SEQ ID NO: 82568 - RNA, 22 nt, Artificial Sequence
  LRRK2 RNA guide
uuagagcugugacauggccacc

SEQ ID NO: 82569 - RNA, 22 nt, Artificial Sequence
  LRRK2 RNA guide
uucuuggugucuccugaguggc

SEQ ID NO: 82570 - RNA, 22 nt, Artificial Sequence
  LRRK2 RNA guide
uuggugucuccugaguggcggg

SEQ ID NO: 82571 - RNA, 22 nt, Artificial Sequence
  LRRK2 RNA guide
uuucuuggugucuccugagugg

SEQ ID NO: 82572 - RNA, 20 nt, Artificial Sequence
  LRRK2 RNA guide
acauggccaccugccugcca

SEQ ID NO: 82573 - RNA, 20 nt, Artificial Sequence
  LRRK2 RNA guide
accugccugccacucaggag

SEQ ID NO: 82574 - RNA, 20 nt, Artificial Sequence
  LRRK2 RNA guide
aguggcaggcagguggccau

SEQ ID NO: 82575 - RNA, 20 nt, Artificial Sequence
  LRRK2 RNA guide
auggccaccugccugccacu

SEQ ID NO: 82576 - RNA, 20 nt, Artificial Sequence
  LRRK2 RNA guide
caccugccugccacucagga

SEQ ID NO: 82577 - RNA, 20 nt, Artificial Sequence
  LRRK2 RNA guide
caggcagguggccaugucac

SEQ ID NO: 82578 - RNA, 20 nt, Artificial Sequence
  LRRK2 RNA guide
cauggccaccugccugccac

SEQ ID NO: 82579 - RNA, 20 nt, Artificial Sequence
  LRRK2 RNA guide
ccaccugccugccacucagg

SEQ ID NO: 82580 - RNA, 20 nt, Artificial Sequence
  LRRK2 RNA guide
ccugaguggcaggcaggugg

SEQ ID NO: 82581 - RNA, 20 nt, Artificial Sequence
  LRRK2 RNA guide
ccugccacucaggagacacc

SEQ ID NO: 82582 - RNA, 20 nt, Artificial Sequence
  LRRK2 RNA guide
ccugccugccacucaggaga

SEQ ID NO: 82583 - RNA, 20 nt, Artificial Sequence
  LRRK2 RNA guide
cuccugaguggcaggcaggu

SEQ ID NO: 82584 - RNA, 20 nt, Artificial Sequence
  LRRK2 RNA guide
cugaguggcaggcagguggc

SEQ ID NO: 82585 - RNA, 20 nt, Artificial Sequence
  LRRK2 RNA guide
cugccacucaggagacacca

SEQ ID NO: 82586 - RNA, 20 nt, Artificial Sequence
  LRRK2 RNA guide
cugccugccacucaggagac

SEQ ID NO: 82587 - RNA, 20 nt, Artificial Sequence
  LRRK2 RNA guide
gacauggccaccugccugcc

SEQ ID NO: 82588 - RNA, 20 nt, Artificial Sequence
  LRRK2 RNA guide
gaguggcaggcagguggcca

SEQ ID NO: 82589 - RNA, 20 nt, Artificial Sequence
  LRRK2 RNA guide
gcaggcagguggccauguca

SEQ ID NO: 82590 - RNA, 20 nt, Artificial Sequence
  LRRK2 RNA guide
gccaccugccugccacucag

SEQ ID NO: 82591 - RNA, 20 nt, Artificial Sequence
  LRRK2 RNA guide
gccugccacucaggagacac

SEQ ID NO: 82592 - RNA, 20 nt, Artificial Sequence
  LRRK2 RNA guide
ggcaggcagguggccauguc

SEQ ID NO: 82593 - RNA, 20 nt, Artificial Sequence
  LRRK2 RNA guide
ggccaccugccugccacuca

SEQ ID NO: 82594 - RNA, 20 nt, Artificial Sequence
  LRRK2 RNA guide
ggugucuccugaguggcagg

SEQ ID NO: 82595 - RNA, 20 nt, Artificial Sequence
  LRRK2 RNA guide
gucuccugaguggcaggcag

SEQ ID NO: 82596 - RNA, 20 nt, Artificial Sequence
  LRRK2 RNA guide
gugacauggccaccugccug

SEQ ID NO: 82597 - RNA, 20 nt, Artificial Sequence
  LRRK2 RNA guide
guggcaggcagguggccaug

SEQ ID NO: 82598 - RNA, 20 nt, Artificial Sequence
  LRRK2 RNA guide
gugucuccugaguggcaggc

SEQ ID NO: 82599 - RNA, 20 nt, Artificial Sequence
  LRRK2 RNA guide
uccugaguggcaggcaggug

SEQ ID NO: 82600 - RNA, 20 nt, Artificial Sequence
  LRRK2 RNA guide
ucuccugaguggcaggcagg

SEQ ID NO: 82601 - RNA, 20 nt, Artificial Sequence
  LRRK2 RNA guide
ugacauggccaccugccugc

SEQ ID NO: 82602 - RNA, 20 nt, Artificial Sequence
  LRRK2 RNA guide
ugaguggcaggcagguggcc

SEQ ID NO: 82603 - RNA, 20 nt, Artificial Sequence
  LRRK2 RNA guide
ugccugccacucaggagaca

SEQ ID NO: 82604 - RNA, 20 nt, Artificial Sequence
  LRRK2 RNA guide
uggcaggcagguggccaugu

SEQ ID NO: 82605 - RNA, 20 nt, Artificial Sequence
  LRRK2 RNA guide
uggccaccugccugccacuc

SEQ ID NO: 82606 - RNA, 20 nt, Artificial Sequence
  LRRK2 RNA guide
uggugucuccugaguggcag

SEQ ID NO: 82607 - RNA, 20 nt, Artificial Sequence
  LRRK2 RNA guide
ugucuccugaguggcaggca

SEQ ID NO: 82608 - RNA, 20 nt, Artificial Sequence
  LRRK2 RNA guide
ugugacauggccaccugccu

SEQ ID NO: 82609 - RNA, 20 nt, Artificial Sequence
  LRRK2 RNA guide
uuggugucuccugaguggca

SEQ ID NO: 82610 - RNA, 21 nt, Artificial Sequence
  LRRK2 RNA guide
acauggccaccugccugccac

SEQ ID NO: 82611 - RNA, 21 nt, Artificial Sequence
  LRRK2 RNA guide
accugccugccacucaggaga

SEQ ID NO: 82612 - RNA, 21 nt, Artificial Sequence
  LRRK2 RNA guide
aguggcaggcagguggccaug

SEQ ID NO: 82613 - RNA, 21 nt, Artificial Sequence
  LRRK2 RNA guide
auggccaccugccugccacuc

SEQ ID NO: 82614 - RNA, 21 nt, Artificial Sequence
  LRRK2 RNA guide
caccugccugccacucaggag

SEQ ID NO: 82615 - RNA, 21 nt, Artificial Sequence
  LRRK2 RNA guide
caggcagguggccaugucaca

SEQ ID NO: 82616 - RNA, 21 nt, Artificial Sequence
  LRRK2 RNA guide
cauggccaccugccugccacu

SEQ ID NO: 82617 - RNA, 21 nt, Artificial Sequence
  LRRK2 RNA guide
ccaccugccugccacucagga

SEQ ID NO: 82618 - RNA, 21 nt, Artificial Sequence
  LRRK2 RNA guide
ccugaguggcaggcagguggc

SEQ ID NO: 82619 - RNA, 21 nt, Artificial Sequence
  LRRK2 RNA guide
ccugccacucaggagacacca

SEQ ID NO: 82620 - RNA, 21 nt, Artificial Sequence
  LRRK2 RNA guide
ccugccugccacucaggagac

SEQ ID NO: 82621 - RNA, 21 nt, Artificial Sequence
  LRRK2 RNA guide
cuccugaguggcaggcaggug

SEQ ID NO: 82622 - RNA, 21 nt, Artificial Sequence
  LRRK2 RNA guide
cugaguggcaggcagguggcc

SEQ ID NO: 82623 - RNA, 21 nt, Artificial Sequence
  LRRK2 RNA guide
cugccacucaggagacaccaa

SEQ ID NO: 82624 - RNA, 21 nt, Artificial Sequence
  LRRK2 RNA guide
cugccugccacucaggagaca

SEQ ID NO: 82625 - RNA, 21 nt, Artificial Sequence
  LRRK2 RNA guide
cugugacauggccaccugccu

SEQ ID NO: 82626 - RNA, 21 nt, Artificial Sequence
  LRRK2 RNA guide
cuuggugucuccugaguggca

SEQ ID NO: 82627 - RNA, 21 nt, Artificial Sequence
  LRRK2 RNA guide
gacauggccaccugccugcca

SEQ ID NO: 82628 - RNA, 21 nt, Artificial Sequence
  LRRK2 RNA guide
gaguggcaggcagguggccau

SEQ ID NO: 82629 - RNA, 21 nt, Artificial Sequence
  LRRK2 RNA guide
gcaggcagguggccaugucac

SEQ ID NO: 82630 - RNA, 21 nt, Artificial Sequence
  LRRK2 RNA guide
gccaccugccugccacucagg

SEQ ID NO: 82631 - RNA, 21 nt, Artificial Sequence
  LRRK2 RNA guide
gccugccacucaggagacacc

SEQ ID NO: 82632 - RNA, 21 nt, Artificial Sequence
  LRRK2 RNA guide
ggcaggcagguggccauguca

SEQ ID NO: 82633 - RNA, 21 nt, Artificial Sequence
  LRRK2 RNA guide
ggccaccugccugccacucag

SEQ ID NO: 82634 - RNA, 21 nt, Artificial Sequence
  LRRK2 RNA guide
ggugucuccugaguggcaggc

SEQ ID NO: 82635 - RNA, 21 nt, Artificial Sequence
  LRRK2 RNA guide
gucuccugaguggcaggcagg

SEQ ID NO: 82636 - RNA, 21 nt, Artificial Sequence
  LRRK2 RNA guide
gugacauggccaccugccugc

SEQ ID NO: 82637 - RNA, 21 nt, Artificial Sequence
  LRRK2 RNA guide
guggcaggcagguggccaugu

SEQ ID NO: 82638 - RNA, 21 nt, Artificial Sequence
  LRRK2 RNA guide
gugucuccugaguggcaggca

SEQ ID NO: 82639 - RNA, 21 nt, Artificial Sequence
  LRRK2 RNA guide
uccugaguggcaggcaggugg

SEQ ID NO: 82640 - RNA, 21 nt, Artificial Sequence
  LRRK2 RNA guide
ucuccugaguggcaggcaggu

SEQ ID NO: 82641 - RNA, 21 nt, Artificial Sequence
  LRRK2 RNA guide
ugacauggccaccugccugcc

SEQ ID NO: 82642 - RNA, 21 nt, Artificial Sequence
  LRRK2 RNA guide
ugaguggcaggcagguggcca

SEQ ID NO: 82643 - RNA, 21 nt, Artificial Sequence
  LRRK2 RNA guide
ugccugccacucaggagacac

SEQ ID NO: 82644 - RNA, 21 nt, Artificial Sequence
  LRRK2 RNA guide
uggcaggcagguggccauguc

SEQ ID NO: 82645 - RNA, 21 nt, Artificial Sequence
  LRRK2 RNA guide
uggccaccugccugccacuca

SEQ ID NO: 82646 - RNA, 21 nt, Artificial Sequence
  LRRK2 RNA guide
uggugucuccugaguggcagg

SEQ ID NO: 82647 - RNA, 21 nt, Artificial Sequence
  LRRK2 RNA guide
ugucuccugaguggcaggcag

SEQ ID NO: 82648 - RNA, 21 nt, Artificial Sequence
  LRRK2 RNA guide
ugugacauggccaccugccug

SEQ ID NO: 82649 - RNA, 21 nt, Artificial Sequence
  LRRK2 RNA guide
uuggugucuccugaguggcag

SEQ ID NO: 82650 - RNA, 22 nt, Artificial Sequence
  LRRK2 RNA guide
acauggccaccugccugccacu

SEQ ID NO: 82651 - RNA, 22 nt, Artificial Sequence
  LRRK2 RNA guide
accugccugccacucaggagac

SEQ ID NO: 82652 - RNA, 22 nt, Artificial Sequence
  LRRK2 RNA guide
aguggcaggcagguggccaugu

SEQ ID NO: 82653 - RNA, 22 nt, Artificial Sequence
  LRRK2 RNA guide
auggccaccugccugccacuca

SEQ ID NO: 82654 - RNA, 22 nt, Artificial Sequence
  LRRK2 RNA guide
caccugccugccacucaggaga

SEQ ID NO: 82655 - RNA, 22 nt, Artificial Sequence
  LRRK2 RNA guide
caggcagguggccaugucacag

SEQ ID NO: 82656 - RNA, 22 nt, Artificial Sequence
  LRRK2 RNA guide
cauggccaccugccugccacuc

SEQ ID NO: 82657 - RNA, 22 nt, Artificial Sequence
  LRRK2 RNA guide
ccaccugccugccacucaggag

SEQ ID NO: 82658 - RNA, 22 nt, Artificial Sequence
  LRRK2 RNA guide
ccugaguggcaggcagguggcc

SEQ ID NO: 82659 - RNA, 22 nt, Artificial Sequence
  LRRK2 RNA guide
ccugccacucaggagacaccaa

SEQ ID NO: 82660 - RNA, 22 nt, Artificial Sequence
  LRRK2 RNA guide
ccugccugccacucaggagaca

SEQ ID NO: 82661 - RNA, 22 nt, Artificial Sequence
  LRRK2 RNA guide
cuccugaguggcaggcaggugg

SEQ ID NO: 82662 - RNA, 22 nt, Artificial Sequence
  LRRK2 RNA guide
cugaguggcaggcagguggcca

SEQ ID NO: 82663 - RNA, 22 nt, Artificial Sequence
  LRRK2 RNA guide
cugccacucaggagacaccaag

SEQ ID NO: 82664 - RNA, 22 nt, Artificial Sequence
  LRRK2 RNA guide
cugccugccacucaggagacac

SEQ ID NO: 82665 - RNA, 22 nt, Artificial Sequence
  LRRK2 RNA guide
cugugacauggccaccugccug

SEQ ID NO: 82666 - RNA, 22 nt, Artificial Sequence
  LRRK2 RNA guide
cuuggugucuccugaguggcag

SEQ ID NO: 82667 - RNA, 22 nt, Artificial Sequence
  LRRK2 RNA guide
gacauggccaccugccugccac

SEQ ID NO: 82668 - RNA, 22 nt, Artificial Sequence
  LRRK2 RNA guide
gaguggcaggcagguggccaug

SEQ ID NO: 82669 - RNA, 22 nt, Artificial Sequence
  LRRK2 RNA guide
gcaggcagguggccaugucaca

SEQ ID NO: 82670 - RNA, 22 nt, Artificial Sequence
  LRRK2 RNA guide
gccaccugccugccacucagga

SEQ ID NO: 82671 - RNA, 22 nt, Artificial Sequence
  LRRK2 RNA guide
gccugccacucaggagacacca

SEQ ID NO: 82672 - RNA, 22 nt, Artificial Sequence
  LRRK2 RNA guide
gcugugacauggccaccugccu

SEQ ID NO: 82673 - RNA, 22 nt, Artificial Sequence
  LRRK2 RNA guide
ggcaggcagguggccaugucac

SEQ ID NO: 82674 - RNA, 22 nt, Artificial Sequence
  LRRK2 RNA guide
ggccaccugccugccacucagg

SEQ ID NO: 82675 - RNA, 22 nt, Artificial Sequence
  LRRK2 RNA guide
ggugucuccugaguggcaggca

SEQ ID NO: 82676 - RNA, 22 nt, Artificial Sequence
  LRRK2 RNA guide
gucuccugaguggcaggcaggu

SEQ ID NO: 82677 - RNA, 22 nt, Artificial Sequence
  LRRK2 RNA guide
gugacauggccaccugccugcc

SEQ ID NO: 82678 - RNA, 22 nt, Artificial Sequence
  LRRK2 RNA guide
guggcaggcagguggccauguc

SEQ ID NO: 82679 - RNA, 22 nt, Artificial Sequence
  LRRK2 RNA guide
gugucuccugaguggcaggcag

SEQ ID NO: 82680 - RNA, 22 nt, Artificial Sequence
  LRRK2 RNA guide
uccugaguggcaggcagguggc

SEQ ID NO: 82681 - RNA, 22 nt, Artificial Sequence
  LRRK2 RNA guide
ucuccugaguggcaggcaggug

SEQ ID NO: 82682 - RNA, 22 nt, Artificial Sequence
  LRRK2 RNA guide
ucuuggugucuccugaguggca

SEQ ID NO: 82683 - RNA, 22 nt, Artificial Sequence
  LRRK2 RNA guide
ugacauggccaccugccugcca

SEQ ID NO: 82684 - RNA, 22 nt, Artificial Sequence
  LRRK2 RNA guide
ugaguggcaggcagguggccau

SEQ ID NO: 82685 - RNA, 22 nt, Artificial Sequence
  LRRK2 RNA guide
ugccugccacucaggagacacc

SEQ ID NO: 82686 - RNA, 22 nt, Artificial Sequence
  LRRK2 RNA guide
uggcaggcagguggccauguca

SEQ ID NO: 82687 - RNA, 22 nt, Artificial Sequence
  LRRK2 RNA guide
uggccaccugccugccacucag

SEQ ID NO: 82688 - RNA, 22 nt, Artificial Sequence
  LRRK2 RNA guide
uggugucuccugaguggcaggc

SEQ ID NO: 82689 - RNA, 22 nt, Artificial Sequence
  LRRK2 RNA guide
ugucuccugaguggcaggcagg

SEQ ID NO: 82690 - RNA, 22 nt, Artificial Sequence
  LRRK2 RNA guide
ugugacauggccaccugccugc

SEQ ID NO: 82691 - RNA, 22 nt, Artificial Sequence
  LRRK2 RNA guide
uuggugucuccugaguggcagg

SEQ ID NO: 82692 - RNA, 20 nt, Artificial Sequence
  LRRK2 RNA guide
ccaagauuaguaaucuaaac

SEQ ID NO: 82693 - RNA, 22 nt, Artificial Sequence
  LRRK2 RNA guide
caccaagauuaguaaucuaaac

SEQ ID NO: 82694 - RNA, 20 nt, Artificial Sequence
  LRRK2 RNA guide
aaaaagcucagcagaaaugu

SEQ ID NO: 82695 - RNA, 20 nt, Artificial Sequence
  LRRK2 RNA guide
aaaagcucagcagaaaugug

SEQ ID NO: 82696 - RNA, 20 nt, Artificial Sequence
  LRRK2 RNA guide
aaaccacauuucugcugagc

SEQ ID NO: 82697 - RNA, 20 nt, Artificial Sequence
  LRRK2 RNA guide
aaagcucagcagaaaugugg

SEQ ID NO: 82698 - RNA, 20 nt, Artificial Sequence
  LRRK2 RNA guide
aaaugugguuucugaagagg

SEQ ID NO: 82699 - RNA, 20 nt, Artificial Sequence
  LRRK2 RNA guide
aaccacauuucugcugagcu

SEQ ID NO: 82700 - RNA, 20 nt, Artificial Sequence
  LRRK2 RNA guide
aagcucagcagaaauguggu

SEQ ID NO: 82701 - RNA, 20 nt, Artificial Sequence
  LRRK2 RNA guide
aaugugguuucugaagaggu

SEQ ID NO: 82702 - RNA, 20 nt, Artificial Sequence
  LRRK2 RNA guide
accucuucagaaaccacauu

SEQ ID NO: 82703 - RNA, 20 nt, Artificial Sequence
  LRRK2 RNA guide
acugaggcuggaccucuuca

SEQ ID NO: 82704 - RNA, 20 nt, Artificial Sequence
  LRRK2 RNA guide
agaaaccacauuucugcuga

SEQ ID NO: 82705 - RNA, 20 nt, Artificial Sequence
  LRRK2 RNA guide
agaaaugugguuucugaaga

SEQ ID NO: 82706 - RNA, 20 nt, Artificial Sequence
  LRRK2 RNA guide
agcagaaaugugguuucuga

SEQ ID NO: 82707 - RNA, 20 nt, Artificial Sequence
  LRRK2 RNA guide
agcucagcagaaaugugguu

SEQ ID NO: 82708 - RNA, 20 nt, Artificial Sequence
  LRRK2 RNA guide
aggcuggaccucuucagaaa

SEQ ID NO: 82709 - RNA, 20 nt, Artificial Sequence
  LRRK2 RNA guide
augugguuucugaagagguc

SEQ ID NO: 82710 - RNA, 20 nt, Artificial Sequence
  LRRK2 RNA guide
cagaaaccacauuucugcug

SEQ ID NO: 82711 - RNA, 20 nt, Artificial Sequence
  LRRK2 RNA guide
cagaaaugugguuucugaag

SEQ ID NO: 82712 - RNA, 20 nt, Artificial Sequence
  LRRK2 RNA guide
cagcagaaaugugguuucug

SEQ ID NO: 82713 - RNA, 20 nt, Artificial Sequence
  LRRK2 RNA guide
ccucuucagaaaccacauuu

SEQ ID NO: 82714 - RNA, 20 nt, Artificial Sequence
  LRRK2 RNA guide
cucagcagaaaugugguuuc

SEQ ID NO: 82715 - RNA, 20 nt, Artificial Sequence
  LRRK2 RNA guide
cucuucagaaaccacauuuc

SEQ ID NO: 82716 - RNA, 20 nt, Artificial Sequence
  LRRK2 RNA guide
cugaggcuggaccucuucag

SEQ ID NO: 82717 - RNA, 20 nt, Artificial Sequence
  LRRK2 RNA guide
cuggaccucuucagaaacca

SEQ ID NO: 82718 - RNA, 20 nt, Artificial Sequence
  LRRK2 RNA guide
cuucagaaaccacauuucug

SEQ ID NO: 82719 - RNA, 20 nt, Artificial Sequence
  LRRK2 RNA guide
gaaaaagcucagcagaaaug

SEQ ID NO: 82720 - RNA, 20 nt, Artificial Sequence
  LRRK2 RNA guide
gaaaccacauuucugcugag

SEQ ID NO: 82721 - RNA, 20 nt, Artificial Sequence
  LRRK2 RNA guide
gaaaugugguuucugaagag

SEQ ID NO: 82722 - RNA, 20 nt, Artificial Sequence
  LRRK2 RNA guide
gaccucuucagaaaccacau

SEQ ID NO: 82723 - RNA, 20 nt, Artificial Sequence
  LRRK2 RNA guide
gacugaggcuggaccucuuc

SEQ ID NO: 82724 - RNA, 20 nt, Artificial Sequence
  LRRK2 RNA guide
gaggcuggaccucuucagaa

SEQ ID NO: 82725 - RNA, 20 nt, Artificial Sequence
  LRRK2 RNA guide
gcagaaaugugguuucugaa

SEQ ID NO: 82726 - RNA, 20 nt, Artificial Sequence
  LRRK2 RNA guide
gcucagcagaaaugugguuu

SEQ ID NO: 82727 - RNA, 20 nt, Artificial Sequence
  LRRK2 RNA guide
gcuggaccucuucagaaacc

SEQ ID NO: 82728 - RNA, 20 nt, Artificial Sequence
  LRRK2 RNA guide
ggaaaaagcucagcagaaau

SEQ ID NO: 82729 - RNA, 20 nt, Artificial Sequence
  LRRK2 RNA guide
ggaccucuucagaaaccaca

SEQ ID NO: 82730 - RNA, 20 nt, Artificial Sequence
  LRRK2 RNA guide
ggcuggaccucuucagaaac

SEQ ID NO: 82731 - RNA, 20 nt, Artificial Sequence
  LRRK2 RNA guide
gguuucugaagagguccagc

SEQ ID NO: 82732 - RNA, 20 nt, Artificial Sequence
  LRRK2 RNA guide
gugguuucugaagaggucca

SEQ ID NO: 82733 - RNA, 20 nt, Artificial Sequence
  LRRK2 RNA guide
guuucugaagagguccagcc

SEQ ID NO: 82734 - RNA, 20 nt, Artificial Sequence
  LRRK2 RNA guide
ucagaaaccacauuucugcu

SEQ ID NO: 82735 - RNA, 20 nt, Artificial Sequence
  LRRK2 RNA guide
ucagcagaaaugugguuucu

SEQ ID NO: 82736 - RNA, 20 nt, Artificial Sequence
  LRRK2 RNA guide
ucuucagaaaccacauuucu

SEQ ID NO: 82737 - RNA, 20 nt, Artificial Sequence
  LRRK2 RNA guide
ugaggcuggaccucuucaga

SEQ ID NO: 82738 - RNA, 20 nt, Artificial Sequence
  LRRK2 RNA guide
uggaccucuucagaaaccac

SEQ ID NO: 82739 - RNA, 20 nt, Artificial Sequence
  LRRK2 RNA guide
ugguuucugaagagguccag

SEQ ID NO: 82740 - RNA, 20 nt, Artificial Sequence
  LRRK2 RNA guide
ugugguuucugaagaggucc

SEQ ID NO: 82741 - RNA, 21 nt, Artificial Sequence
  LRRK2 RNA guide
aaaaagcucagcagaaaugug

SEQ ID NO: 82742 - RNA, 21 nt, Artificial Sequence
  LRRK2 RNA guide
aaaagcucagcagaaaugugg

SEQ ID NO: 82743 - RNA, 21 nt, Artificial Sequence
  LRRK2 RNA guide
aaaccacauuucugcugagcu

SEQ ID NO: 82744 - RNA, 21 nt, Artificial Sequence
  LRRK2 RNA guide
aaagcucagcagaaauguggu

SEQ ID NO: 82745 - RNA, 21 nt, Artificial Sequence
  LRRK2 RNA guide
aaaugugguuucugaagaggu

SEQ ID NO: 82746 - RNA, 21 nt, Artificial Sequence
  LRRK2 RNA guide
aaccacauuucugcugagcuu

SEQ ID NO: 82747 - RNA, 21 nt, Artificial Sequence
  LRRK2 RNA guide
aagcucagcagaaaugugguu

SEQ ID NO: 82748 - RNA, 21 nt, Artificial Sequence
  LRRK2 RNA guide
aaugugguuucugaagagguc

SEQ ID NO: 82749 - RNA, 21 nt, Artificial Sequence
  LRRK2 RNA guide
accucuucagaaaccacauuu

SEQ ID NO: 82750 - RNA, 21 nt, Artificial Sequence
  LRRK2 RNA guide
acugaggcuggaccucuucag

SEQ ID NO: 82751 - RNA, 21 nt, Artificial Sequence
  LRRK2 RNA guide
agaaaccacauuucugcugag

SEQ ID NO: 82752 - RNA, 21 nt, Artificial Sequence
  LRRK2 RNA guide
agaaaugugguuucugaagag

SEQ ID NO: 82753 - RNA, 21 nt, Artificial Sequence
  LRRK2 RNA guide
agacugaggcuggaccucuuc

SEQ ID NO: 82754 - RNA, 21 nt, Artificial Sequence
  LRRK2 RNA guide
agcagaaaugugguuucugaa

SEQ ID NO: 82755 - RNA, 21 nt, Artificial Sequence
  LRRK2 RNA guide
agcucagcagaaaugugguuu

SEQ ID NO: 82756 - RNA, 21 nt, Artificial Sequence
  LRRK2 RNA guide
aggaaaaagcucagcagaaau

SEQ ID NO: 82757 - RNA, 21 nt, Artificial Sequence
  LRRK2 RNA guide
aggcuggaccucuucagaaac

SEQ ID NO: 82758 - RNA, 21 nt, Artificial Sequence
  LRRK2 RNA guide
augugguuucugaagaggucc

SEQ ID NO: 82759 - RNA, 21 nt, Artificial Sequence
  LRRK2 RNA guide
cagaaaccacauuucugcuga

SEQ ID NO: 82760 - RNA, 21 nt, Artificial Sequence
  LRRK2 RNA guide
cagaaaugugguuucugaaga

SEQ ID NO: 82761 - RNA, 21 nt, Artificial Sequence
  LRRK2 RNA guide
cagcagaaaugugguuucuga

SEQ ID NO: 82762 - RNA, 21 nt, Artificial Sequence
  LRRK2 RNA guide
ccucuucagaaaccacauuuc

SEQ ID NO: 82763 - RNA, 21 nt, Artificial Sequence
  LRRK2 RNA guide
cucagcagaaaugugguuucu

SEQ ID NO: 82764 - RNA, 21 nt, Artificial Sequence
  LRRK2 RNA guide
cucuucagaaaccacauuucu

SEQ ID NO: 82765 - RNA, 21 nt, Artificial Sequence
  LRRK2 RNA guide
cugaggcuggaccucuucaga

SEQ ID NO: 82766 - RNA, 21 nt, Artificial Sequence
  LRRK2 RNA guide
cuggaccucuucagaaaccac

SEQ ID NO: 82767 - RNA, 21 nt, Artificial Sequence
  LRRK2 RNA guide
cuucagaaaccacauuucugc

SEQ ID NO: 82768 - RNA, 21 nt, Artificial Sequence
  LRRK2 RNA guide
gaaaaagcucagcagaaaugu

SEQ ID NO: 82769 - RNA, 21 nt, Artificial Sequence
  LRRK2 RNA guide
gaaaccacauuucugcugagc

SEQ ID NO: 82770 - RNA, 21 nt, Artificial Sequence
  LRRK2 RNA guide
gaaaugugguuucugaagagg

SEQ ID NO: 82771 - RNA, 21 nt, Artificial Sequence
  LRRK2 RNA guide
gaccucuucagaaaccacauu

SEQ ID NO: 82772 - RNA, 21 nt, Artificial Sequence
  LRRK2 RNA guide
gacugaggcuggaccucuuca

SEQ ID NO: 82773 - RNA, 21 nt, Artificial Sequence
  LRRK2 RNA guide
gaggcuggaccucuucagaaa

SEQ ID NO: 82774 - RNA, 21 nt, Artificial Sequence
  LRRK2 RNA guide
gcagaaaugugguuucugaag

SEQ ID NO: 82775 - RNA, 21 nt, Artificial Sequence
  LRRK2 RNA guide
gcucagcagaaaugugguuuc

SEQ ID NO: 82776 - RNA, 21 nt, Artificial Sequence
  LRRK2 RNA guide
gcuggaccucuucagaaacca

SEQ ID NO: 82777 - RNA, 21 nt, Artificial Sequence
  LRRK2 RNA guide
ggaaaaagcucagcagaaaug

SEQ ID NO: 82778 - RNA, 21 nt, Artificial Sequence
  LRRK2 RNA guide
ggaccucuucagaaaccacau

SEQ ID NO: 82779 - RNA, 21 nt, Artificial Sequence
  LRRK2 RNA guide
ggcuggaccucuucagaaacc

SEQ ID NO: 82780 - RNA, 21 nt, Artificial Sequence
  LRRK2 RNA guide
gguuucugaagagguccagcc

SEQ ID NO: 82781 - RNA, 21 nt, Artificial Sequence
  LRRK2 RNA guide
gugguuucugaagagguccag

SEQ ID NO: 82782 - RNA, 21 nt, Artificial Sequence
  LRRK2 RNA guide
guuucugaagagguccagccu

SEQ ID NO: 82783 - RNA, 21 nt, Artificial Sequence
  LRRK2 RNA guide
ucagaaaccacauuucugcug

SEQ ID NO: 82784 - RNA, 21 nt, Artificial Sequence
  LRRK2 RNA guide
ucagcagaaaugugguuucug

SEQ ID NO: 82785 - RNA, 21 nt, Artificial Sequence
  LRRK2 RNA guide
ucuucagaaaccacauuucug

SEQ ID NO: 82786 - RNA, 21 nt, Artificial Sequence
  LRRK2 RNA guide
ugaggcuggaccucuucagaa

SEQ ID NO: 82787 - RNA, 21 nt, Artificial Sequence
  LRRK2 RNA guide
uggaccucuucagaaaccaca

SEQ ID NO: 82788 - RNA, 21 nt, Artificial Sequence
  LRRK2 RNA guide
ugguuucugaagagguccagc

SEQ ID NO: 82789 - RNA, 21 nt, Artificial Sequence
  LRRK2 RNA guide
ugugguuucugaagaggucca

SEQ ID NO: 82790 - RNA, 21 nt, Artificial Sequence
  LRRK2 RNA guide
uucagaaaccacauuucugcu

SEQ ID NO: 82791 - RNA, 22 nt, Artificial Sequence
  LRRK2 RNA guide
aaaaagcucagcagaaaugugg

SEQ ID NO: 82792 - RNA, 22 nt, Artificial Sequence
  LRRK2 RNA guide
aaaagcucagcagaaauguggu

SEQ ID NO: 82793 - RNA, 22 nt, Artificial Sequence
  LRRK2 RNA guide
aaaccacauuucugcugagcuu

SEQ ID NO: 82794 - RNA, 22 nt, Artificial Sequence
  LRRK2 RNA guide
aaagcucagcagaaaugugguu

SEQ ID NO: 82795 - RNA, 22 nt, Artificial Sequence
  LRRK2 RNA guide
aaaugugguuucugaagagguc

SEQ ID NO: 82796 - RNA, 22 nt, Artificial Sequence
  LRRK2 RNA guide
aaccacauuucugcugagcuuu

SEQ ID NO: 82797 - RNA, 22 nt, Artificial Sequence
  LRRK2 RNA guide
aagcucagcagaaaugugguuu

SEQ ID NO: 82798 - RNA, 22 nt, Artificial Sequence
  LRRK2 RNA guide
aaugugguuucugaagaggucc

SEQ ID NO: 82799 - RNA, 22 nt, Artificial Sequence
  LRRK2 RNA guide
accucuucagaaaccacauuuc

SEQ ID NO: 82800 - RNA, 22 nt, Artificial Sequence
  LRRK2 RNA guide
acugaggcuggaccucuucaga

SEQ ID NO: 82801 - RNA, 22 nt, Artificial Sequence
  LRRK2 RNA guide
agaaaccacauuucugcugagc

SEQ ID NO: 82802 - RNA, 22 nt, Artificial Sequence
  LRRK2 RNA guide
agaaaugugguuucugaagagg

SEQ ID NO: 82803 - RNA, 22 nt, Artificial Sequence
  LRRK2 RNA guide
agacugaggcuggaccucuuca

SEQ ID NO: 82804 - RNA, 22 nt, Artificial Sequence
  LRRK2 RNA guide
agcagaaaugugguuucugaag

SEQ ID NO: 82805 - RNA, 22 nt, Artificial Sequence
  LRRK2 RNA guide
agcucagcagaaaugugguuuc

SEQ ID NO: 82806 - RNA, 22 nt, Artificial Sequence
  LRRK2 RNA guide
aggaaaaagcucagcagaaaug

SEQ ID NO: 82807 - RNA, 22 nt, Artificial Sequence
  LRRK2 RNA guide
aggcuggaccucuucagaaacc

SEQ ID NO: 82808 - RNA, 22 nt, Artificial Sequence
  LRRK2 RNA guide
augugguuucugaagaggucca

SEQ ID NO: 82809 - RNA, 22 nt, Artificial Sequence
  LRRK2 RNA guide
cagaaaccacauuucugcugag

SEQ ID NO: 82810 - RNA, 22 nt, Artificial Sequence
  LRRK2 RNA guide
cagaaaugugguuucugaagag

SEQ ID NO: 82811 - RNA, 22 nt, Artificial Sequence
  LRRK2 RNA guide
cagcagaaaugugguuucugaa

SEQ ID NO: 82812 - RNA, 22 nt, Artificial Sequence
  LRRK2 RNA guide
ccucuucagaaaccacauuucu

SEQ ID NO: 82813 - RNA, 22 nt, Artificial Sequence
  LRRK2 RNA guide
cucagcagaaaugugguuucug

SEQ ID NO: 82814 - RNA, 22 nt, Artificial Sequence
  LRRK2 RNA guide
cucuucagaaaccacauuucug

SEQ ID NO: 82815 - RNA, 22 nt, Artificial Sequence
  LRRK2 RNA guide
cugaggcuggaccucuucagaa

SEQ ID NO: 82816 - RNA, 22 nt, Artificial Sequence
  LRRK2 RNA guide
cuggaccucuucagaaaccaca

SEQ ID NO: 82817 - RNA, 22 nt, Artificial Sequence
  LRRK2 RNA guide
cuucagaaaccacauuucugcu

SEQ ID NO: 82818 - RNA, 22 nt, Artificial Sequence
  LRRK2 RNA guide
gaaaaagcucagcagaaaugug

SEQ ID NO: 82819 - RNA, 22 nt, Artificial Sequence
  LRRK2 RNA guide
gaaaccacauuucugcugagcu

SEQ ID NO: 82820 - RNA, 22 nt, Artificial Sequence
  LRRK2 RNA guide
gaaaugugguuucugaagaggu

SEQ ID NO: 82821 - RNA, 22 nt, Artificial Sequence
  LRRK2 RNA guide
gaccucuucagaaaccacauuu

SEQ ID NO: 82822 - RNA, 22 nt, Artificial Sequence
  LRRK2 RNA guide
gacugaggcuggaccucuucag

SEQ ID NO: 82823 - RNA, 22 nt, Artificial Sequence
  LRRK2 RNA guide
gagacugaggcuggaccucuuc

SEQ ID NO: 82824 - RNA, 22 nt, Artificial Sequence
  LRRK2 RNA guide
gaggaaaaagcucagcagaaau

SEQ ID NO: 82825 - RNA, 22 nt, Artificial Sequence
  LRRK2 RNA guide
gaggcuggaccucuucagaaac

SEQ ID NO: 82826 - RNA, 22 nt, Artificial Sequence
  LRRK2 RNA guide
gcagaaaugugguuucugaaga

SEQ ID NO: 82827 - RNA, 22 nt, Artificial Sequence
  LRRK2 RNA guide
gcucagcagaaaugugguuucu

SEQ ID NO: 82828 - RNA, 22 nt, Artificial Sequence
  LRRK2 RNA guide
gcuggaccucuucagaaaccac

SEQ ID NO: 82829 - RNA, 22 nt, Artificial Sequence
  LRRK2 RNA guide
ggaaaaagcucagcagaaaugu

SEQ ID NO: 82830 - RNA, 22 nt, Artificial Sequence
  LRRK2 RNA guide
ggaccucuucagaaaccacauu

SEQ ID NO: 82831 - RNA, 22 nt, Artificial Sequence
  LRRK2 RNA guide
ggcuggaccucuucagaaacca

SEQ ID NO: 82832 - RNA, 22 nt, Artificial Sequence
  LRRK2 RNA guide
gguuucugaagagguccagccu

SEQ ID NO: 82833 - RNA, 22 nt, Artificial Sequence
  LRRK2 RNA guide
gugguuucugaagagguccagc

SEQ ID NO: 82834 - RNA, 22 nt, Artificial Sequence
  LRRK2 RNA guide
guuucugaagagguccagccuc

SEQ ID NO: 82835 - RNA, 22 nt, Artificial Sequence
  LRRK2 RNA guide
ucagaaaccacauuucugcuga

SEQ ID NO: 82836 - RNA, 22 nt, Artificial Sequence
  LRRK2 RNA guide
ucagcagaaaugugguuucuga

SEQ ID NO: 82837 - RNA, 22 nt, Artificial Sequence
  LRRK2 RNA guide
ucuucagaaaccacauuucugc

SEQ ID NO: 82838 - RNA, 22 nt, Artificial Sequence
  LRRK2 RNA guide
ugaggcuggaccucuucagaaa

SEQ ID NO: 82839 - RNA, 22 nt, Artificial Sequence
  LRRK2 RNA guide
uggaccucuucagaaaccacau

SEQ ID NO: 82840 - RNA, 22 nt, Artificial Sequence
  LRRK2 RNA guide
ugguuucugaagagguccagcc

SEQ ID NO: 82841 - RNA, 22 nt, Artificial Sequence
  LRRK2 RNA guide
ugugguuucugaagagguccag

SEQ ID NO: 82842 - RNA, 22 nt, Artificial Sequence
  LRRK2 RNA guide
uucagaaaccacauuucugcug

SEQ ID NO: 82843 - RNA, 20 nt, Artificial Sequence
  LRRK2 RNA guide
aaauguggcuucugaagagg

SEQ ID NO: 82844 - RNA, 20 nt, Artificial Sequence
  LRRK2 RNA guide
aagccacauuucugcugagc

SEQ ID NO: 82845 - RNA, 20 nt, Artificial Sequence
  LRRK2 RNA guide
aagcucagcagaaauguggc

SEQ ID NO: 82846 - RNA, 20 nt, Artificial Sequence
  LRRK2 RNA guide
aauguggcuucugaagaggu

SEQ ID NO: 82847 - RNA, 20 nt, Artificial Sequence
  LRRK2 RNA guide
accucuucagaagccacauu

SEQ ID NO: 82848 - RNA, 20 nt, Artificial Sequence
  LRRK2 RNA guide
agaaauguggcuucugaaga

SEQ ID NO: 82849 - RNA, 20 nt, Artificial Sequence
  LRRK2 RNA guide
agaagccacauuucugcuga

SEQ ID NO: 82850 - RNA, 20 nt, Artificial Sequence
  LRRK2 RNA guide
agcagaaauguggcuucuga

SEQ ID NO: 82851 - RNA, 20 nt, Artificial Sequence
  LRRK2 RNA guide
agccacauuucugcugagcu

SEQ ID NO: 82852 - RNA, 20 nt, Artificial Sequence
  LRRK2 RNA guide
agcucagcagaaauguggcu

SEQ ID NO: 82853 - RNA, 20 nt, Artificial Sequence
  LRRK2 RNA guide
aggcuggaccucuucagaag

SEQ ID NO: 82854 - RNA, 20 nt, Artificial Sequence
  LRRK2 RNA guide
auguggcuucugaagagguc

SEQ ID NO: 82855 - RNA, 20 nt, Artificial Sequence
  LRRK2 RNA guide
cagaaauguggcuucugaag

SEQ ID NO: 82856 - RNA, 20 nt, Artificial Sequence
  LRRK2 RNA guide
cagaagccacauuucugcug

SEQ ID NO: 82857 - RNA, 20 nt, Artificial Sequence
  LRRK2 RNA guide
cagcagaaauguggcuucug

SEQ ID NO: 82858 - RNA, 20 nt, Artificial Sequence
  LRRK2 RNA guide
ccucuucagaagccacauuu

SEQ ID NO: 82859 - RNA, 20 nt, Artificial Sequence
  LRRK2 RNA guide
cucagcagaaauguggcuuc

SEQ ID NO: 82860 - RNA, 20 nt, Artificial Sequence
  LRRK2 RNA guide
cucuucagaagccacauuuc

SEQ ID NO: 82861 - RNA, 20 nt, Artificial Sequence
  LRRK2 RNA guide
cuggaccucuucagaagcca

SEQ ID NO: 82862 - RNA, 20 nt, Artificial Sequence
  LRRK2 RNA guide
cuucagaagccacauuucug

SEQ ID NO: 82863 - RNA, 20 nt, Artificial Sequence
  LRRK2 RNA guide
gaaauguggcuucugaagag

SEQ ID NO: 82864 - RNA, 20 nt, Artificial Sequence
  LRRK2 RNA guide
gaagccacauuucugcugag

SEQ ID NO: 82865 - RNA, 20 nt, Artificial Sequence
  LRRK2 RNA guide
gaccucuucagaagccacau

SEQ ID NO: 82866 - RNA, 20 nt, Artificial Sequence
  LRRK2 RNA guide
gcagaaauguggcuucugaa

SEQ ID NO: 82867 - RNA, 20 nt, Artificial Sequence
  LRRK2 RNA guide
gcucagcagaaauguggcuu

SEQ ID NO: 82868 - RNA, 20 nt, Artificial Sequence
  LRRK2 RNA guide
gcuggaccucuucagaagcc

SEQ ID NO: 82869 - RNA, 20 nt, Artificial Sequence
  LRRK2 RNA guide
gcuucugaagagguccagcc

SEQ ID NO: 82870 - RNA, 20 nt, Artificial Sequence
  LRRK2 RNA guide
ggaccucuucagaagccaca

SEQ ID NO: 82871 - RNA, 20 nt, Artificial Sequence
  LRRK2 RNA guide
ggcuggaccucuucagaagc

SEQ ID NO: 82872 - RNA, 20 nt, Artificial Sequence
  LRRK2 RNA guide
ggcuucugaagagguccagc

SEQ ID NO: 82873 - RNA, 20 nt, Artificial Sequence
  LRRK2 RNA guide
guggcuucugaagaggucca

SEQ ID NO: 82874 - RNA, 20 nt, Artificial Sequence
  LRRK2 RNA guide
ucagaagccacauuucugcu

SEQ ID NO: 82875 - RNA, 20 nt, Artificial Sequence
  LRRK2 RNA guide
ucagcagaaauguggcuucu

SEQ ID NO: 82876 - RNA, 20 nt, Artificial Sequence
  LRRK2 RNA guide
ucuucagaagccacauuucu

SEQ ID NO: 82877 - RNA, 20 nt, Artificial Sequence
  LRRK2 RNA guide
uggaccucuucagaagccac

SEQ ID NO: 82878 - RNA, 20 nt, Artificial Sequence
  LRRK2 RNA guide
uggcuucugaagagguccag

SEQ ID NO: 82879 - RNA, 20 nt, Artificial Sequence
  LRRK2 RNA guide
uguggcuucugaagaggucc

SEQ ID NO: 82880 - RNA, 20 nt, Artificial Sequence
  LRRK2 RNA guide
uucagaagccacauuucugc

SEQ ID NO: 82881 - RNA, 21 nt, Artificial Sequence
  LRRK2 RNA guide
aaagcucagcagaaauguggc

SEQ ID NO: 82882 - RNA, 21 nt, Artificial Sequence
  LRRK2 RNA guide
aaauguggcuucugaagaggu

SEQ ID NO: 82883 - RNA, 21 nt, Artificial Sequence
  LRRK2 RNA guide
aagccacauuucugcugagcu

SEQ ID NO: 82884 - RNA, 21 nt, Artificial Sequence
  LRRK2 RNA guide
aagcucagcagaaauguggcu

SEQ ID NO: 82885 - RNA, 21 nt, Artificial Sequence
  LRRK2 RNA guide
aauguggcuucugaagagguc

SEQ ID NO: 82886 - RNA, 21 nt, Artificial Sequence
  LRRK2 RNA guide
accucuucagaagccacauuu

SEQ ID NO: 82887 - RNA, 21 nt, Artificial Sequence
  LRRK2 RNA guide
agaaauguggcuucugaagag

SEQ ID NO: 82888 - RNA, 21 nt, Artificial Sequence
  LRRK2 RNA guide
agaagccacauuucugcugag

SEQ ID NO: 82889 - RNA, 21 nt, Artificial Sequence
  LRRK2 RNA guide
agcagaaauguggcuucugaa

SEQ ID NO: 82890 - RNA, 21 nt, Artificial Sequence
  LRRK2 RNA guide
agccacauuucugcugagcuu

SEQ ID NO: 82891 - RNA, 21 nt, Artificial Sequence
  LRRK2 RNA guide
agcucagcagaaauguggcuu

SEQ ID NO: 82892 - RNA, 21 nt, Artificial Sequence
  LRRK2 RNA guide
aggcuggaccucuucagaagc

SEQ ID NO: 82893 - RNA, 21 nt, Artificial Sequence
  LRRK2 RNA guide
auguggcuucugaagaggucc

SEQ ID NO: 82894 - RNA, 21 nt, Artificial Sequence
  LRRK2 RNA guide
cagaaauguggcuucugaaga

SEQ ID NO: 82895 - RNA, 21 nt, Artificial Sequence
  LRRK2 RNA guide
cagaagccacauuucugcuga

SEQ ID NO: 82896 - RNA, 21 nt, Artificial Sequence
  LRRK2 RNA guide
cagcagaaauguggcuucuga

SEQ ID NO: 82897 - RNA, 21 nt, Artificial Sequence
  LRRK2 RNA guide
ccucuucagaagccacauuuc

SEQ ID NO: 82898 - RNA, 21 nt, Artificial Sequence
  LRRK2 RNA guide
cucagcagaaauguggcuucu

SEQ ID NO: 82899 - RNA, 21 nt, Artificial Sequence
  LRRK2 RNA guide
cucuucagaagccacauuucu

SEQ ID NO: 82900 - RNA, 21 nt, Artificial Sequence
  LRRK2 RNA guide
cuggaccucuucagaagccac

SEQ ID NO: 82901 - RNA, 21 nt, Artificial Sequence
  LRRK2 RNA guide
cuucagaagccacauuucugc

SEQ ID NO: 82902 - RNA, 21 nt, Artificial Sequence
  LRRK2 RNA guide
gaaauguggcuucugaagagg

SEQ ID NO: 82903 - RNA, 21 nt, Artificial Sequence
  LRRK2 RNA guide
gaagccacauuucugcugagc

SEQ ID NO: 82904 - RNA, 21 nt, Artificial Sequence
  LRRK2 RNA guide
gaccucuucagaagccacauu

SEQ ID NO: 82905 - RNA, 21 nt, Artificial Sequence
  LRRK2 RNA guide
gaggcuggaccucuucagaag

SEQ ID NO: 82906 - RNA, 21 nt, Artificial Sequence
  LRRK2 RNA guide
gcagaaauguggcuucugaag

SEQ ID NO: 82907 - RNA, 21 nt, Artificial Sequence
  LRRK2 RNA guide
gcucagcagaaauguggcuuc

SEQ ID NO: 82908 - RNA, 21 nt, Artificial Sequence
  LRRK2 RNA guide
gcuggaccucuucagaagcca

SEQ ID NO: 82909 - RNA, 21 nt, Artificial Sequence
  LRRK2 RNA guide
gcuucugaagagguccagccu

SEQ ID NO: 82910 - RNA, 21 nt, Artificial Sequence
  LRRK2 RNA guide
ggaccucuucagaagccacau

SEQ ID NO: 82911 - RNA, 21 nt, Artificial Sequence
  LRRK2 RNA guide
ggcuggaccucuucagaagcc

SEQ ID NO: 82912 - RNA, 21 nt, Artificial Sequence
  LRRK2 RNA guide
ggcuucugaagagguccagcc

SEQ ID NO: 82913 - RNA, 21 nt, Artificial Sequence
  LRRK2 RNA guide
guggcuucugaagagguccag

SEQ ID NO: 82914 - RNA, 21 nt, Artificial Sequence
  LRRK2 RNA guide
ucagaagccacauuucugcug

SEQ ID NO: 82915 - RNA, 21 nt, Artificial Sequence
  LRRK2 RNA guide
ucagcagaaauguggcuucug

SEQ ID NO: 82916 - RNA, 21 nt, Artificial Sequence
  LRRK2 RNA guide
ucuucagaagccacauuucug

SEQ ID NO: 82917 - RNA, 21 nt, Artificial Sequence
  LRRK2 RNA guide
uggaccucuucagaagccaca

SEQ ID NO: 82918 - RNA, 21 nt, Artificial Sequence
  LRRK2 RNA guide
uggcuucugaagagguccagc

SEQ ID NO: 82919 - RNA, 21 nt, Artificial Sequence
  LRRK2 RNA guide
uguggcuucugaagaggucca

SEQ ID NO: 82920 - RNA, 21 nt, Artificial Sequence
  LRRK2 RNA guide
uucagaagccacauuucugcu

SEQ ID NO: 82921 - RNA, 22 nt, Artificial Sequence
  LRRK2 RNA guide
aaaagcucagcagaaauguggc

SEQ ID NO: 82922 - RNA, 22 nt, Artificial Sequence
  LRRK2 RNA guide
aaagcucagcagaaauguggcu

SEQ ID NO: 82923 - RNA, 22 nt, Artificial Sequence
  LRRK2 RNA guide
aaauguggcuucugaagagguc

SEQ ID NO: 82924 - RNA, 22 nt, Artificial Sequence
  LRRK2 RNA guide
aagccacauuucugcugagcuu

SEQ ID NO: 82925 - RNA, 22 nt, Artificial Sequence
  LRRK2 RNA guide
aagcucagcagaaauguggcuu

SEQ ID NO: 82926 - RNA, 22 nt, Artificial Sequence
  LRRK2 RNA guide
aauguggcuucugaagaggucc

SEQ ID NO: 82927 - RNA, 22 nt, Artificial Sequence
  LRRK2 RNA guide
accucuucagaagccacauuuc

SEQ ID NO: 82928 - RNA, 22 nt, Artificial Sequence
  LRRK2 RNA guide
agaaauguggcuucugaagagg

SEQ ID NO: 82929 - RNA, 22 nt, Artificial Sequence
  LRRK2 RNA guide
agaagccacauuucugcugagc

SEQ ID NO: 82930 - RNA, 22 nt, Artificial Sequence
  LRRK2 RNA guide
agcagaaauguggcuucugaag

SEQ ID NO: 82931 - RNA, 22 nt, Artificial Sequence
  LRRK2 RNA guide
agccacauuucugcugagcuuu

SEQ ID NO: 82932 - RNA, 22 nt, Artificial Sequence
  LRRK2 RNA guide
agcucagcagaaauguggcuuc

SEQ ID NO: 82933 - RNA, 22 nt, Artificial Sequence
  LRRK2 RNA guide
aggcuggaccucuucagaagcc

SEQ ID NO: 82934 - RNA, 22 nt, Artificial Sequence
  LRRK2 RNA guide
auguggcuucugaagaggucca

SEQ ID NO: 82935 - RNA, 22 nt, Artificial Sequence
  LRRK2 RNA guide
cagaaauguggcuucugaagag

SEQ ID NO: 82936 - RNA, 22 nt, Artificial Sequence
  LRRK2 RNA guide
cagaagccacauuucugcugag

SEQ ID NO: 82937 - RNA, 22 nt, Artificial Sequence
  LRRK2 RNA guide
cagcagaaauguggcuucugaa

SEQ ID NO: 82938 - RNA, 22 nt, Artificial Sequence
  LRRK2 RNA guide
ccucuucagaagccacauuucu

SEQ ID NO: 82939 - RNA, 22 nt, Artificial Sequence
  LRRK2 RNA guide
cucagcagaaauguggcuucug

SEQ ID NO: 82940 - RNA, 22 nt, Artificial Sequence
  LRRK2 RNA guide
cucuucagaagccacauuucug

SEQ ID NO: 82941 - RNA, 22 nt, Artificial Sequence
  LRRK2 RNA guide
cuggaccucuucagaagccaca

SEQ ID NO: 82942 - RNA, 22 nt, Artificial Sequence
  LRRK2 RNA guide
cuucagaagccacauuucugcu

SEQ ID NO: 82943 - RNA, 22 nt, Artificial Sequence
  LRRK2 RNA guide
gaaauguggcuucugaagaggu

SEQ ID NO: 82944 - RNA, 22 nt, Artificial Sequence
  LRRK2 RNA guide
gaagccacauuucugcugagcu

SEQ ID NO: 82945 - RNA, 22 nt, Artificial Sequence
  LRRK2 RNA guide
gaccucuucagaagccacauuu

SEQ ID NO: 82946 - RNA, 22 nt, Artificial Sequence
  LRRK2 RNA guide
gaggcuggaccucuucagaagc

SEQ ID NO: 82947 - RNA, 22 nt, Artificial Sequence
  LRRK2 RNA guide
gcagaaauguggcuucugaaga

SEQ ID NO: 82948 - RNA, 22 nt, Artificial Sequence
  LRRK2 RNA guide
gcucagcagaaauguggcuucu

SEQ ID NO: 82949 - RNA, 22 nt, Artificial Sequence
  LRRK2 RNA guide
gcuggaccucuucagaagccac

SEQ ID NO: 82950 - RNA, 22 nt, Artificial Sequence
  LRRK2 RNA guide
gcuucugaagagguccagccuc

SEQ ID NO: 82951 - RNA, 22 nt, Artificial Sequence
  LRRK2 RNA guide
ggaccucuucagaagccacauu

SEQ ID NO: 82952 - RNA, 22 nt, Artificial Sequence
  LRRK2 RNA guide
ggcuggaccucuucagaagcca

SEQ ID NO: 82953 - RNA, 22 nt, Artificial Sequence
  LRRK2 RNA guide
ggcuucugaagagguccagccu

SEQ ID NO: 82954 - RNA, 22 nt, Artificial Sequence
  LRRK2 RNA guide
guggcuucugaagagguccagc

SEQ ID NO: 82955 - RNA, 22 nt, Artificial Sequence
  LRRK2 RNA guide
ucagaagccacauuucugcuga

SEQ ID NO: 82956 - RNA, 22 nt, Artificial Sequence
  LRRK2 RNA guide
ucagcagaaauguggcuucuga

SEQ ID NO: 82957 - RNA, 22 nt, Artificial Sequence
  LRRK2 RNA guide
ucuucagaagccacauuucugc

SEQ ID NO: 82958 - RNA, 22 nt, Artificial Sequence
  LRRK2 RNA guide
ugaggcuggaccucuucagaag

SEQ ID NO: 82959 - RNA, 22 nt, Artificial Sequence
  LRRK2 RNA guide
uggaccucuucagaagccacau

SEQ ID NO: 82960 - RNA, 22 nt, Artificial Sequence
  LRRK2 RNA guide
uggcuucugaagagguccagcc

SEQ ID NO: 82961 - RNA, 22 nt, Artificial Sequence
  LRRK2 RNA guide
uguggcuucugaagagguccag

SEQ ID NO: 82962 - RNA, 22 nt, Artificial Sequence
  LRRK2 RNA guide
uucagaagccacauuucugcug

SEQ ID NO: 82963 - RNA, 20 nt, Artificial Sequence
  LRRK2 RNA guide
aaaauucugugcuccuauuc

SEQ ID NO: 82964 - RNA, 20 nt, Artificial Sequence
  LRRK2 RNA guide
aaauucugugcuccuauuca

SEQ ID NO: 82965 - RNA, 20 nt, Artificial Sequence
  LRRK2 RNA guide
aauaggagcacagaauuuuc

SEQ ID NO: 82966 - RNA, 20 nt, Artificial Sequence
  LRRK2 RNA guide
aauaugaauaggagcacaga

SEQ ID NO: 82967 - RNA, 20 nt, Artificial Sequence
  LRRK2 RNA guide
aauucugugcuccuauucau

SEQ ID NO: 82968 - RNA, 20 nt, Artificial Sequence
  LRRK2 RNA guide
acagaauuuucccacugcca

SEQ ID NO: 82969 - RNA, 20 nt, Artificial Sequence
  LRRK2 RNA guide
agaauuuucccacugccagg

SEQ ID NO: 82970 - RNA, 20 nt, Artificial Sequence
  LRRK2 RNA guide
agcacagaauuuucccacug

SEQ ID NO: 82971 - RNA, 20 nt, Artificial Sequence
  LRRK2 RNA guide
aggagcacagaauuuuccca

SEQ ID NO: 82972 - RNA, 20 nt, Artificial Sequence
  LRRK2 RNA guide
agugggaaaauucugugcuc

SEQ ID NO: 82973 - RNA, 20 nt, Artificial Sequence
  LRRK2 RNA guide
auaggagcacagaauuuucc

SEQ ID NO: 82974 - RNA, 20 nt, Artificial Sequence
  LRRK2 RNA guide
auaugaauaggagcacagaa

SEQ ID NO: 82975 - RNA, 20 nt, Artificial Sequence
  LRRK2 RNA guide
augaauaggagcacagaauu

SEQ ID NO: 82976 - RNA, 20 nt, Artificial Sequence
  LRRK2 RNA guide
auucugugcuccuauucaua

SEQ ID NO: 82977 - RNA, 20 nt, Artificial Sequence
  LRRK2 RNA guide
cacagaauuuucccacugcc

SEQ ID NO: 82978 - RNA, 20 nt, Artificial Sequence
  LRRK2 RNA guide
cagaauuuucccacugccag

SEQ ID NO: 82979 - RNA, 20 nt, Artificial Sequence
  LRRK2 RNA guide
cagugggaaaauucugugcu

SEQ ID NO: 82980 - RNA, 20 nt, Artificial Sequence
  LRRK2 RNA guide
cccuugccuggcagugggaa

SEQ ID NO: 82981 - RNA, 20 nt, Artificial Sequence
  LRRK2 RNA guide
ccuggcagugggaaaauucu

SEQ ID NO: 82982 - RNA, 20 nt, Artificial Sequence
  LRRK2 RNA guide
ccuugccuggcagugggaaa

SEQ ID NO: 82983 - RNA, 20 nt, Artificial Sequence
  LRRK2 RNA guide
cucuggaauaugaauaggag

SEQ ID NO: 82984 - RNA, 20 nt, Artificial Sequence
  LRRK2 RNA guide
cuggaauaugaauaggagca

SEQ ID NO: 82985 - RNA, 20 nt, Artificial Sequence
  LRRK2 RNA guide
cuggcagugggaaaauucug

SEQ ID NO: 82986 - RNA, 20 nt, Artificial Sequence
  LRRK2 RNA guide
gaaaauucugugcuccuauu

SEQ ID NO: 82987 - RNA, 20 nt, Artificial Sequence
  LRRK2 RNA guide
gaauaggagcacagaauuuu

SEQ ID NO: 82988 - RNA, 20 nt, Artificial Sequence
  LRRK2 RNA guide
gaauaugaauaggagcacag

SEQ ID NO: 82989 - RNA, 20 nt, Artificial Sequence
  LRRK2 RNA guide
gagcacagaauuuucccacu

SEQ ID NO: 82990 - RNA, 20 nt, Artificial Sequence
  LRRK2 RNA guide
gcacagaauuuucccacugc

SEQ ID NO: 82991 - RNA, 20 nt, Artificial Sequence
  LRRK2 RNA guide
gcagugggaaaauucugugc

SEQ ID NO: 82992 - RNA, 20 nt, Artificial Sequence
  LRRK2 RNA guide
gccuggcagugggaaaauuc

SEQ ID NO: 82993 - RNA, 20 nt, Artificial Sequence
  LRRK2 RNA guide
ggaaaauucugugcuccuau

SEQ ID NO: 82994 - RNA, 20 nt, Artificial Sequence
  LRRK2 RNA guide
ggaauaugaauaggagcaca

SEQ ID NO: 82995 - RNA, 20 nt, Artificial Sequence
  LRRK2 RNA guide
ggagcacagaauuuucccac

SEQ ID NO: 82996 - RNA, 20 nt, Artificial Sequence
  LRRK2 RNA guide
ggcagugggaaaauucugug

SEQ ID NO: 82997 - RNA, 20 nt, Artificial Sequence
  LRRK2 RNA guide
gggaaaauucugugcuccua

SEQ ID NO: 82998 - RNA, 20 nt, Artificial Sequence
  LRRK2 RNA guide
gugggaaaauucugugcucc

SEQ ID NO: 82999 - RNA, 20 nt, Artificial Sequence
  LRRK2 RNA guide
uaggagcacagaauuuuccc

SEQ ID NO: 83000 - RNA, 20 nt, Artificial Sequence
  LRRK2 RNA guide
uaugaauaggagcacagaau

SEQ ID NO: 83001 - RNA, 20 nt, Artificial Sequence
  LRRK2 RNA guide
ucuggaauaugaauaggagc

SEQ ID NO: 83002 - RNA, 20 nt, Artificial Sequence
  LRRK2 RNA guide
ucugugcuccuauucauauu

SEQ ID NO: 83003 - RNA, 20 nt, Artificial Sequence
  LRRK2 RNA guide
ugaauaggagcacagaauuu

SEQ ID NO: 83004 - RNA, 20 nt, Artificial Sequence
  LRRK2 RNA guide
ugccuggcagugggaaaauu

SEQ ID NO: 83005 - RNA, 20 nt, Artificial Sequence
  LRRK2 RNA guide
uggaauaugaauaggagcac

SEQ ID NO: 83006 - RNA, 20 nt, Artificial Sequence
  LRRK2 RNA guide
uggcagugggaaaauucugu

SEQ ID NO: 83007 - RNA, 20 nt, Artificial Sequence
  LRRK2 RNA guide
ugggaaaauucugugcuccu

SEQ ID NO: 83008 - RNA, 20 nt, Artificial Sequence
  LRRK2 RNA guide
uucugugcuccuauucauau

SEQ ID NO: 83009 - RNA, 20 nt, Artificial Sequence
  LRRK2 RNA guide
uugccuggcagugggaaaau

SEQ ID NO: 83010 - RNA, 21 nt, Artificial Sequence
  LRRK2 RNA guide
aaaauucugugcuccuauuca

SEQ ID NO: 83011 - RNA, 21 nt, Artificial Sequence
  LRRK2 RNA guide
aaauucugugcuccuauucau

SEQ ID NO: 83012 - RNA, 21 nt, Artificial Sequence
  LRRK2 RNA guide
aauaggagcacagaauuuucc

SEQ ID NO: 83013 - RNA, 21 nt, Artificial Sequence
  LRRK2 RNA guide
aauaugaauaggagcacagaa

SEQ ID NO: 83014 - RNA, 21 nt, Artificial Sequence
  LRRK2 RNA guide
aauucugugcuccuauucaua

SEQ ID NO: 83015 - RNA, 21 nt, Artificial Sequence
  LRRK2 RNA guide
acagaauuuucccacugccag

SEQ ID NO: 83016 - RNA, 21 nt, Artificial Sequence
  LRRK2 RNA guide
agaauuuucccacugccaggc

SEQ ID NO: 83017 - RNA, 21 nt, Artificial Sequence
  LRRK2 RNA guide
agcacagaauuuucccacugc

SEQ ID NO: 83018 - RNA, 21 nt, Artificial Sequence
  LRRK2 RNA guide
aggagcacagaauuuucccac

SEQ ID NO: 83019 - RNA, 21 nt, Artificial Sequence
  LRRK2 RNA guide
agugggaaaauucugugcucc

SEQ ID NO: 83020 - RNA, 21 nt, Artificial Sequence
  LRRK2 RNA guide
auaggagcacagaauuuuccc

SEQ ID NO: 83021 - RNA, 21 nt, Artificial Sequence
  LRRK2 RNA guide
auaugaauaggagcacagaau

SEQ ID NO: 83022 - RNA, 21 nt, Artificial Sequence
  LRRK2 RNA guide
augaauaggagcacagaauuu

SEQ ID NO: 83023 - RNA, 21 nt, Artificial Sequence
  LRRK2 RNA guide
auucugugcuccuauucauau

SEQ ID NO: 83024 - RNA, 21 nt, Artificial Sequence
  LRRK2 RNA guide
cacagaauuuucccacugcca

SEQ ID NO: 83025 - RNA, 21 nt, Artificial Sequence
  LRRK2 RNA guide
cagaauuuucccacugccagg

SEQ ID NO: 83026 - RNA, 21 nt, Artificial Sequence
  LRRK2 RNA guide
cagugggaaaauucugugcuc

SEQ ID NO: 83027 - RNA, 21 nt, Artificial Sequence
  LRRK2 RNA guide
cccuugccuggcagugggaaa

SEQ ID NO: 83028 - RNA, 21 nt, Artificial Sequence
  LRRK2 RNA guide
ccuggcagugggaaaauucug

SEQ ID NO: 83029 - RNA, 21 nt, Artificial Sequence
  LRRK2 RNA guide
ccuugccuggcagugggaaaa

SEQ ID NO: 83030 - RNA, 21 nt, Artificial Sequence
  LRRK2 RNA guide
cucuggaauaugaauaggagc

SEQ ID NO: 83031 - RNA, 21 nt, Artificial Sequence
  LRRK2 RNA guide
cuggaauaugaauaggagcac

SEQ ID NO: 83032 - RNA, 21 nt, Artificial Sequence
  LRRK2 RNA guide
cuggcagugggaaaauucugu

SEQ ID NO: 83033 - RNA, 21 nt, Artificial Sequence
  LRRK2 RNA guide
cuugccuggcagugggaaaau

SEQ ID NO: 83034 - RNA, 21 nt, Artificial Sequence
  LRRK2 RNA guide
gaaaauucugugcuccuauuc

SEQ ID NO: 83035 - RNA, 21 nt, Artificial Sequence
  LRRK2 RNA guide
gaauaggagcacagaauuuuc

SEQ ID NO: 83036 - RNA, 21 nt, Artificial Sequence
  LRRK2 RNA guide
gaauaugaauaggagcacaga

SEQ ID NO: 83037 - RNA, 21 nt, Artificial Sequence
  LRRK2 RNA guide
gagcacagaauuuucccacug

SEQ ID NO: 83038 - RNA, 21 nt, Artificial Sequence
  LRRK2 RNA guide
gcacagaauuuucccacugcc

SEQ ID NO: 83039 - RNA, 21 nt, Artificial Sequence
  LRRK2 RNA guide
gcagugggaaaauucugugcu

SEQ ID NO: 83040 - RNA, 21 nt, Artificial Sequence
  LRRK2 RNA guide
gccuggcagugggaaaauucu

SEQ ID NO: 83041 - RNA, 21 nt, Artificial Sequence
  LRRK2 RNA guide
gcucuggaauaugaauaggag

SEQ ID NO: 83042 - RNA, 21 nt, Artificial Sequence
  LRRK2 RNA guide
ggaaaauucugugcuccuauu

SEQ ID NO: 83043 - RNA, 21 nt, Artificial Sequence
  LRRK2 RNA guide
ggaauaugaauaggagcacag

SEQ ID NO: 83044 - RNA, 21 nt, Artificial Sequence
  LRRK2 RNA guide
ggagcacagaauuuucccacu

SEQ ID NO: 83045 - RNA, 21 nt, Artificial Sequence
  LRRK2 RNA guide
ggcagugggaaaauucugugc

SEQ ID NO: 83046 - RNA, 21 nt, Artificial Sequence
  LRRK2 RNA guide
gggaaaauucugugcuccuau

SEQ ID NO: 83047 - RNA, 21 nt, Artificial Sequence
  LRRK2 RNA guide
gugggaaaauucugugcuccu

SEQ ID NO: 83048 - RNA, 21 nt, Artificial Sequence
  LRRK2 RNA guide
uaggagcacagaauuuuccca

SEQ ID NO: 83049 - RNA, 21 nt, Artificial Sequence
  LRRK2 RNA guide
uaugaauaggagcacagaauu

SEQ ID NO: 83050 - RNA, 21 nt, Artificial Sequence
  LRRK2 RNA guide
ucccuugccuggcagugggaa

SEQ ID NO: 83051 - RNA, 21 nt, Artificial Sequence
  LRRK2 RNA guide
ucuggaauaugaauaggagca

SEQ ID NO: 83052 - RNA, 21 nt, Artificial Sequence
  LRRK2 RNA guide
ucugugcuccuauucauauuc

SEQ ID NO: 83053 - RNA, 21 nt, Artificial Sequence
  LRRK2 RNA guide
ugaauaggagcacagaauuuu

SEQ ID NO: 83054 - RNA, 21 nt, Artificial Sequence
  LRRK2 RNA guide
ugccuggcagugggaaaauuc

SEQ ID NO: 83055 - RNA, 21 nt, Artificial Sequence
  LRRK2 RNA guide
uggaauaugaauaggagcaca

SEQ ID NO: 83056 - RNA, 21 nt, Artificial Sequence
  LRRK2 RNA guide
uggcagugggaaaauucugug

SEQ ID NO: 83057 - RNA, 21 nt, Artificial Sequence
  LRRK2 RNA guide
ugggaaaauucugugcuccua

SEQ ID NO: 83058 - RNA, 21 nt, Artificial Sequence
  LRRK2 RNA guide
uucugugcuccuauucauauu

SEQ ID NO: 83059 - RNA, 21 nt, Artificial Sequence
  LRRK2 RNA guide
uugccuggcagugggaaaauu

SEQ ID NO: 83060 - RNA, 22 nt, Artificial Sequence
  LRRK2 RNA guide
aaaauucugugcuccuauucau

SEQ ID NO: 83061 - RNA, 22 nt, Artificial Sequence
  LRRK2 RNA guide
aaauucugugcuccuauucaua

SEQ ID NO: 83062 - RNA, 22 nt, Artificial Sequence
  LRRK2 RNA guide
aauaggagcacagaauuuuccc

SEQ ID NO: 83063 - RNA, 22 nt, Artificial Sequence
  LRRK2 RNA guide
aauaugaauaggagcacagaau

SEQ ID NO: 83064 - RNA, 22 nt, Artificial Sequence
  LRRK2 RNA guide
aauucugugcuccuauucauau

SEQ ID NO: 83065 - RNA, 22 nt, Artificial Sequence
  LRRK2 RNA guide
acagaauuuucccacugccagg

SEQ ID NO: 83066 - RNA, 22 nt, Artificial Sequence
  LRRK2 RNA guide
agaauuuucccacugccaggca

SEQ ID NO: 83067 - RNA, 22 nt, Artificial Sequence
  LRRK2 RNA guide
agcacagaauuuucccacugcc

SEQ ID NO: 83068 - RNA, 22 nt, Artificial Sequence
  LRRK2 RNA guide
agcucuggaauaugaauaggag

SEQ ID NO: 83069 - RNA, 22 nt, Artificial Sequence
  LRRK2 RNA guide
aggagcacagaauuuucccacu

SEQ ID NO: 83070 - RNA, 22 nt, Artificial Sequence
  LRRK2 RNA guide
agugggaaaauucugugcuccu

SEQ ID NO: 83071 - RNA, 22 nt, Artificial Sequence
  LRRK2 RNA guide
auaggagcacagaauuuuccca

SEQ ID NO: 83072 - RNA, 22 nt, Artificial Sequence
  LRRK2 RNA guide
auaugaauaggagcacagaauu

SEQ ID NO: 83073 - RNA, 22 nt, Artificial Sequence
  LRRK2 RNA guide
augaauaggagcacagaauuuu

SEQ ID NO: 83074 - RNA, 22 nt, Artificial Sequence
  LRRK2 RNA guide
auucugugcuccuauucauauu

SEQ ID NO: 83075 - RNA, 22 nt, Artificial Sequence
  LRRK2 RNA guide
cacagaauuuucccacugccag

SEQ ID NO: 83076 - RNA, 22 nt, Artificial Sequence
  LRRK2 RNA guide
cagaauuuucccacugccaggc

SEQ ID NO: 83077 - RNA, 22 nt, Artificial Sequence
  LRRK2 RNA guide
cagugggaaaauucugugcucc

SEQ ID NO: 83078 - RNA, 22 nt, Artificial Sequence
  LRRK2 RNA guide
cccuugccuggcagugggaaaa

SEQ ID NO: 83079 - RNA, 22 nt, Artificial Sequence
  LRRK2 RNA guide
ccuggcagugggaaaauucugu

SEQ ID NO: 83080 - RNA, 22 nt, Artificial Sequence
  LRRK2 RNA guide
ccuugccuggcagugggaaaau

SEQ ID NO: 83081 - RNA, 22 nt, Artificial Sequence
  LRRK2 RNA guide
cucccuugccuggcagugggaa

SEQ ID NO: 83082 - RNA, 22 nt, Artificial Sequence
  LRRK2 RNA guide
cucuggaauaugaauaggagca

SEQ ID NO: 83083 - RNA, 22 nt, Artificial Sequence
  LRRK2 RNA guide
cuggaauaugaauaggagcaca

SEQ ID NO: 83084 - RNA, 22 nt, Artificial Sequence
  LRRK2 RNA guide
cuggcagugggaaaauucugug

SEQ ID NO: 83085 - RNA, 22 nt, Artificial Sequence
  LRRK2 RNA guide
cuugccuggcagugggaaaauu

SEQ ID NO: 83086 - RNA, 22 nt, Artificial Sequence
  LRRK2 RNA guide
gaaaauucugugcuccuauuca

SEQ ID NO: 83087 - RNA, 22 nt, Artificial Sequence
  LRRK2 RNA guide
gaauaggagcacagaauuuucc

SEQ ID NO: 83088 - RNA, 22 nt, Artificial Sequence
  LRRK2 RNA guide
gaauaugaauaggagcacagaa

SEQ ID NO: 83089 - RNA, 22 nt, Artificial Sequence
  LRRK2 RNA guide
gagcacagaauuuucccacugc

SEQ ID NO: 83090 - RNA, 22 nt, Artificial Sequence
  LRRK2 RNA guide
gcacagaauuuucccacugcca

SEQ ID NO: 83091 - RNA, 22 nt, Artificial Sequence
  LRRK2 RNA guide
gcagugggaaaauucugugcuc

SEQ ID NO: 83092 - RNA, 22 nt, Artificial Sequence
  LRRK2 RNA guide
gccuggcagugggaaaauucug

SEQ ID NO: 83093 - RNA, 22 nt, Artificial Sequence
  LRRK2 RNA guide
gcucuggaauaugaauaggagc

SEQ ID NO: 83094 - RNA, 22 nt, Artificial Sequence
  LRRK2 RNA guide
ggaaaauucugugcuccuauuc

SEQ ID NO: 83095 - RNA, 22 nt, Artificial Sequence
  LRRK2 RNA guide
ggaauaugaauaggagcacaga

SEQ ID NO: 83096 - RNA, 22 nt, Artificial Sequence
  LRRK2 RNA guide
ggagcacagaauuuucccacug

SEQ ID NO: 83097 - RNA, 22 nt, Artificial Sequence
  LRRK2 RNA guide
ggcagugggaaaauucugugcu

SEQ ID NO: 83098 - RNA, 22 nt, Artificial Sequence
  LRRK2 RNA guide
gggaaaauucugugcuccuauu

SEQ ID NO: 83099 - RNA, 22 nt, Artificial Sequence
  LRRK2 RNA guide
gugggaaaauucugugcuccua

SEQ ID NO: 83100 - RNA, 22 nt, Artificial Sequence
  LRRK2 RNA guide
uaggagcacagaauuuucccac

SEQ ID NO: 83101 - RNA, 22 nt, Artificial Sequence
  LRRK2 RNA guide
uaugaauaggagcacagaauuu

SEQ ID NO: 83102 - RNA, 22 nt, Artificial Sequence
  LRRK2 RNA guide
ucccuugccuggcagugggaaa

SEQ ID NO: 83103 - RNA, 22 nt, Artificial Sequence
  LRRK2 RNA guide
ucuggaauaugaauaggagcac

SEQ ID NO: 83104 - RNA, 22 nt, Artificial Sequence
  LRRK2 RNA guide
ucugugcuccuauucauauucc

SEQ ID NO: 83105 - RNA, 22 nt, Artificial Sequence
  LRRK2 RNA guide
ugaauaggagcacagaauuuuc

SEQ ID NO: 83106 - RNA, 22 nt, Artificial Sequence
  LRRK2 RNA guide
ugccuggcagugggaaaauucu

SEQ ID NO: 83107 - RNA, 22 nt, Artificial Sequence
  LRRK2 RNA guide
uggaauaugaauaggagcacag

SEQ ID NO: 83108 - RNA, 22 nt, Artificial Sequence
  LRRK2 RNA guide
uggcagugggaaaauucugugc

SEQ ID NO: 83109 - RNA, 22 nt, Artificial Sequence
  LRRK2 RNA guide
ugggaaaauucugugcuccuau

SEQ ID NO: 83110 - RNA, 22 nt, Artificial Sequence
  LRRK2 RNA guide
uucugugcuccuauucauauuc

SEQ ID NO: 83111 - RNA, 22 nt, Artificial Sequence
  LRRK2 RNA guide
uugccuggcagugggaaaauuc

SEQ ID NO: 83112 - RNA, 20 nt, Artificial Sequence
  LRRK2 RNA guide
aaaauugugugcuccuauuc

SEQ ID NO: 83113 - RNA, 20 nt, Artificial Sequence
  LRRK2 RNA guide
aaauugugugcuccuauuca

SEQ ID NO: 83114 - RNA, 20 nt, Artificial Sequence
  LRRK2 RNA guide
aauaggagcacacaauuuuc

SEQ ID NO: 83115 - RNA, 20 nt, Artificial Sequence
  LRRK2 RNA guide
aauaugaauaggagcacaca

SEQ ID NO: 83116 - RNA, 20 nt, Artificial Sequence
  LRRK2 RNA guide
aauugugugcuccuauucau

SEQ ID NO: 83117 - RNA, 20 nt, Artificial Sequence
  LRRK2 RNA guide
acaauuuucccacugccagg

SEQ ID NO: 83118 - RNA, 20 nt, Artificial Sequence
  LRRK2 RNA guide
acacaauuuucccacugcca

SEQ ID NO: 83119 - RNA, 20 nt, Artificial Sequence
  LRRK2 RNA guide
agcacacaauuuucccacug

SEQ ID NO: 83120 - RNA, 20 nt, Artificial Sequence
  LRRK2 RNA guide
aggagcacacaauuuuccca

SEQ ID NO: 83121 - RNA, 20 nt, Artificial Sequence
  LRRK2 RNA guide
agugggaaaauugugugcuc

SEQ ID NO: 83122 - RNA, 20 nt, Artificial Sequence
  LRRK2 RNA guide
auaggagcacacaauuuucc

SEQ ID NO: 83123 - RNA, 20 nt, Artificial Sequence
  LRRK2 RNA guide
auaugaauaggagcacacaa

SEQ ID NO: 83124 - RNA, 20 nt, Artificial Sequence
  LRRK2 RNA guide
augaauaggagcacacaauu

SEQ ID NO: 83125 - RNA, 20 nt, Artificial Sequence
  LRRK2 RNA guide
auugugugcuccuauucaua

SEQ ID NO: 83126 - RNA, 20 nt, Artificial Sequence
  LRRK2 RNA guide
cacaauuuucccacugccag

SEQ ID NO: 83127 - RNA, 20 nt, Artificial Sequence
  LRRK2 RNA guide
cacacaauuuucccacugcc

SEQ ID NO: 83128 - RNA, 20 nt, Artificial Sequence
  LRRK2 RNA guide
cagugggaaaauugugugcu

SEQ ID NO: 83129 - RNA, 20 nt, Artificial Sequence
  LRRK2 RNA guide
ccuggcagugggaaaauugu

SEQ ID NO: 83130 - RNA, 20 nt, Artificial Sequence
  LRRK2 RNA guide
cuggcagugggaaaauugug

SEQ ID NO: 83131 - RNA, 20 nt, Artificial Sequence
  LRRK2 RNA guide
gaaaauugugugcuccuauu

SEQ ID NO: 83132 - RNA, 20 nt, Artificial Sequence
  LRRK2 RNA guide
gaauaggagcacacaauuuu

SEQ ID NO: 83133 - RNA, 20 nt, Artificial Sequence
  LRRK2 RNA guide
gaauaugaauaggagcacac

SEQ ID NO: 83134 - RNA, 20 nt, Artificial Sequence
  LRRK2 RNA guide
gagcacacaauuuucccacu

SEQ ID NO: 83135 - RNA, 20 nt, Artificial Sequence
  LRRK2 RNA guide
gcacacaauuuucccacugc

SEQ ID NO: 83136 - RNA, 20 nt, Artificial Sequence
  LRRK2 RNA guide
gcagugggaaaauugugugc

SEQ ID NO: 83137 - RNA, 20 nt, Artificial Sequence
  LRRK2 RNA guide
gccuggcagugggaaaauug

SEQ ID NO: 83138 - RNA, 20 nt, Artificial Sequence
  LRRK2 RNA guide
ggaaaauugugugcuccuau

SEQ ID NO: 83139 - RNA, 20 nt, Artificial Sequence
  LRRK2 RNA guide
ggagcacacaauuuucccac

SEQ ID NO: 83140 - RNA, 20 nt, Artificial Sequence
  LRRK2 RNA guide
ggcagugggaaaauugugug

SEQ ID NO: 83141 - RNA, 20 nt, Artificial Sequence
  LRRK2 RNA guide
gggaaaauugugugcuccua

SEQ ID NO: 83142 - RNA, 20 nt, Artificial Sequence
  LRRK2 RNA guide
gugggaaaauugugugcucc

SEQ ID NO: 83143 - RNA, 20 nt, Artificial Sequence
  LRRK2 RNA guide
uaggagcacacaauuuuccc

SEQ ID NO: 83144 - RNA, 20 nt, Artificial Sequence
  LRRK2 RNA guide
uaugaauaggagcacacaau

SEQ ID NO: 83145 - RNA, 20 nt, Artificial Sequence
  LRRK2 RNA guide
ugaauaggagcacacaauuu

SEQ ID NO: 83146 - RNA, 20 nt, Artificial Sequence
  LRRK2 RNA guide
uggcagugggaaaauugugu

SEQ ID NO: 83147 - RNA, 20 nt, Artificial Sequence
  LRRK2 RNA guide
ugggaaaauugugugcuccu

SEQ ID NO: 83148 - RNA, 20 nt, Artificial Sequence
  LRRK2 RNA guide
ugugugcuccuauucauauu

SEQ ID NO: 83149 - RNA, 20 nt, Artificial Sequence
  LRRK2 RNA guide
uugugugcuccuauucauau

SEQ ID NO: 83150 - RNA, 21 nt, Artificial Sequence
  LRRK2 RNA guide
aaaauugugugcuccuauuca

SEQ ID NO: 83151 - RNA, 21 nt, Artificial Sequence
  LRRK2 RNA guide
aaauugugugcuccuauucau

SEQ ID NO: 83152 - RNA, 21 nt, Artificial Sequence
  LRRK2 RNA guide
aauaggagcacacaauuuucc

SEQ ID NO: 83153 - RNA, 21 nt, Artificial Sequence
  LRRK2 RNA guide
aauaugaauaggagcacacaa

SEQ ID NO: 83154 - RNA, 21 nt, Artificial Sequence
  LRRK2 RNA guide
aauugugugcuccuauucaua

SEQ ID NO: 83155 - RNA, 21 nt, Artificial Sequence
  LRRK2 RNA guide
acaauuuucccacugccaggc

SEQ ID NO: 83156 - RNA, 21 nt, Artificial Sequence
  LRRK2 RNA guide
acacaauuuucccacugccag

SEQ ID NO: 83157 - RNA, 21 nt, Artificial Sequence
  LRRK2 RNA guide
agcacacaauuuucccacugc

SEQ ID NO: 83158 - RNA, 21 nt, Artificial Sequence
  LRRK2 RNA guide
aggagcacacaauuuucccac

SEQ ID NO: 83159 - RNA, 21 nt, Artificial Sequence
  LRRK2 RNA guide
agugggaaaauugugugcucc

SEQ ID NO: 83160 - RNA, 21 nt, Artificial Sequence
  LRRK2 RNA guide
auaggagcacacaauuuuccc

SEQ ID NO: 83161 - RNA, 21 nt, Artificial Sequence
  LRRK2 RNA guide
auaugaauaggagcacacaau

SEQ ID NO: 83162 - RNA, 21 nt, Artificial Sequence
  LRRK2 RNA guide
augaauaggagcacacaauuu

SEQ ID NO: 83163 - RNA, 21 nt, Artificial Sequence
  LRRK2 RNA guide
auugugugcuccuauucauau

SEQ ID NO: 83164 - RNA, 21 nt, Artificial Sequence
  LRRK2 RNA guide
cacaauuuucccacugccagg

SEQ ID NO: 83165 - RNA, 21 nt, Artificial Sequence
  LRRK2 RNA guide
cacacaauuuucccacugcca

SEQ ID NO: 83166 - RNA, 21 nt, Artificial Sequence
  LRRK2 RNA guide
cagugggaaaauugugugcuc

SEQ ID NO: 83167 - RNA, 21 nt, Artificial Sequence
  LRRK2 RNA guide
ccuggcagugggaaaauugug

SEQ ID NO: 83168 - RNA, 21 nt, Artificial Sequence
  LRRK2 RNA guide
cuggcagugggaaaauugugu

SEQ ID NO: 83169 - RNA, 21 nt, Artificial Sequence
  LRRK2 RNA guide
gaaaauugugugcuccuauuc

SEQ ID NO: 83170 - RNA, 21 nt, Artificial Sequence
  LRRK2 RNA guide
gaauaggagcacacaauuuuc

SEQ ID NO: 83171 - RNA, 21 nt, Artificial Sequence
  LRRK2 RNA guide
gaauaugaauaggagcacaca

SEQ ID NO: 83172 - RNA, 21 nt, Artificial Sequence
  LRRK2 RNA guide
gagcacacaauuuucccacug

SEQ ID NO: 83173 - RNA, 21 nt, Artificial Sequence
  LRRK2 RNA guide
gcacacaauuuucccacugcc

SEQ ID NO: 83174 - RNA, 21 nt, Artificial Sequence
  LRRK2 RNA guide
gcagugggaaaauugugugcu

SEQ ID NO: 83175 - RNA, 21 nt, Artificial Sequence
  LRRK2 RNA guide
gccuggcagugggaaaauugu

SEQ ID NO: 83176 - RNA, 21 nt, Artificial Sequence
  LRRK2 RNA guide
ggaaaauugugugcuccuauu

SEQ ID NO: 83177 - RNA, 21 nt, Artificial Sequence
  LRRK2 RNA guide
ggaauaugaauaggagcacac

SEQ ID NO: 83178 - RNA, 21 nt, Artificial Sequence
  LRRK2 RNA guide
ggagcacacaauuuucccacu

SEQ ID NO: 83179 - RNA, 21 nt, Artificial Sequence
  LRRK2 RNA guide
ggcagugggaaaauugugugc

SEQ ID NO: 83180 - RNA, 21 nt, Artificial Sequence
  LRRK2 RNA guide
gggaaaauugugugcuccuau

SEQ ID NO: 83181 - RNA, 21 nt, Artificial Sequence
  LRRK2 RNA guide
gugggaaaauugugugcuccu

SEQ ID NO: 83182 - RNA, 21 nt, Artificial Sequence
  LRRK2 RNA guide
uaggagcacacaauuuuccca

SEQ ID NO: 83183 - RNA, 21 nt, Artificial Sequence
  LRRK2 RNA guide
uaugaauaggagcacacaauu

SEQ ID NO: 83184 - RNA, 21 nt, Artificial Sequence
  LRRK2 RNA guide
ugaauaggagcacacaauuuu

SEQ ID NO: 83185 - RNA, 21 nt, Artificial Sequence
  LRRK2 RNA guide
ugccuggcagugggaaaauug

SEQ ID NO: 83186 - RNA, 21 nt, Artificial Sequence
  LRRK2 RNA guide
uggcagugggaaaauugugug

SEQ ID NO: 83187 - RNA, 21 nt, Artificial Sequence
  LRRK2 RNA guide
ugggaaaauugugugcuccua

SEQ ID NO: 83188 - RNA, 21 nt, Artificial Sequence
  LRRK2 RNA guide
ugugugcuccuauucauauuc

SEQ ID NO: 83189 - RNA, 21 nt, Artificial Sequence
  LRRK2 RNA guide
uugugugcuccuauucauauu

SEQ ID NO: 83190 - RNA, 22 nt, Artificial Sequence
  LRRK2 RNA guide
aaaauugugugcuccuauucau

SEQ ID NO: 83191 - RNA, 22 nt, Artificial Sequence
  LRRK2 RNA guide
aaauugugugcuccuauucaua

SEQ ID NO: 83192 - RNA, 22 nt, Artificial Sequence
  LRRK2 RNA guide
aauaggagcacacaauuuuccc

SEQ ID NO: 83193 - RNA, 22 nt, Artificial Sequence
  LRRK2 RNA guide
aauaugaauaggagcacacaau

SEQ ID NO: 83194 - RNA, 22 nt, Artificial Sequence
  LRRK2 RNA guide
aauugugugcuccuauucauau

SEQ ID NO: 83195 - RNA, 22 nt, Artificial Sequence
  LRRK2 RNA guide
acaauuuucccacugccaggca

SEQ ID NO: 83196 - RNA, 22 nt, Artificial Sequence
  LRRK2 RNA guide
acacaauuuucccacugccagg

SEQ ID NO: 83197 - RNA, 22 nt, Artificial Sequence
  LRRK2 RNA guide
agcacacaauuuucccacugcc

SEQ ID NO: 83198 - RNA, 22 nt, Artificial Sequence
  LRRK2 RNA guide
aggagcacacaauuuucccacu

SEQ ID NO: 83199 - RNA, 22 nt, Artificial Sequence
  LRRK2 RNA guide
agugggaaaauugugugcuccu

SEQ ID NO: 83200 - RNA, 22 nt, Artificial Sequence
  LRRK2 RNA guide
auaggagcacacaauuuuccca

SEQ ID NO: 83201 - RNA, 22 nt, Artificial Sequence
  LRRK2 RNA guide
auaugaauaggagcacacaauu

SEQ ID NO: 83202 - RNA, 22 nt, Artificial Sequence
  LRRK2 RNA guide
augaauaggagcacacaauuuu

SEQ ID NO: 83203 - RNA, 22 nt, Artificial Sequence
  LRRK2 RNA guide
auugugugcuccuauucauauu

SEQ ID NO: 83204 - RNA, 22 nt, Artificial Sequence
  LRRK2 RNA guide
cacaauuuucccacugccaggc

SEQ ID NO: 83205 - RNA, 22 nt, Artificial Sequence
  LRRK2 RNA guide
cacacaauuuucccacugccag

SEQ ID NO: 83206 - RNA, 22 nt, Artificial Sequence
  LRRK2 RNA guide
cagugggaaaauugugugcucc

SEQ ID NO: 83207 - RNA, 22 nt, Artificial Sequence
  LRRK2 RNA guide
ccuggcagugggaaaauugugu

SEQ ID NO: 83208 - RNA, 22 nt, Artificial Sequence
  LRRK2 RNA guide
cuggcagugggaaaauugugug

SEQ ID NO: 83209 - RNA, 22 nt, Artificial Sequence
  LRRK2 RNA guide
gaaaauugugugcuccuauuca

SEQ ID NO: 83210 - RNA, 22 nt, Artificial Sequence
  LRRK2 RNA guide
gaauaggagcacacaauuuucc

SEQ ID NO: 83211 - RNA, 22 nt, Artificial Sequence
  LRRK2 RNA guide
gaauaugaauaggagcacacaa

SEQ ID NO: 83212 - RNA, 22 nt, Artificial Sequence
  LRRK2 RNA guide
gagcacacaauuuucccacugc

SEQ ID NO: 83213 - RNA, 22 nt, Artificial Sequence
  LRRK2 RNA guide
gcacacaauuuucccacugcca

SEQ ID NO: 83214 - RNA, 22 nt, Artificial Sequence
  LRRK2 RNA guide
gcagugggaaaauugugugcuc

SEQ ID NO: 83215 - RNA, 22 nt, Artificial Sequence
  LRRK2 RNA guide
gccuggcagugggaaaauugug

SEQ ID NO: 83216 - RNA, 22 nt, Artificial Sequence
  LRRK2 RNA guide
ggaaaauugugugcuccuauuc

SEQ ID NO: 83217 - RNA, 22 nt, Artificial Sequence
  LRRK2 RNA guide
ggaauaugaauaggagcacaca

SEQ ID NO: 83218 - RNA, 22 nt, Artificial Sequence
  LRRK2 RNA guide
ggagcacacaauuuucccacug

SEQ ID NO: 83219 - RNA, 22 nt, Artificial Sequence
  LRRK2 RNA guide
ggcagugggaaaauugugugcu

SEQ ID NO: 83220 - RNA, 22 nt, Artificial Sequence
  LRRK2 RNA guide
gggaaaauugugugcuccuauu

SEQ ID NO: 83221 - RNA, 22 nt, Artificial Sequence
  LRRK2 RNA guide
gugggaaaauugugugcuccua

SEQ ID NO: 83222 - RNA, 22 nt, Artificial Sequence
  LRRK2 RNA guide
uaggagcacacaauuuucccac

SEQ ID NO: 83223 - RNA, 22 nt, Artificial Sequence
  LRRK2 RNA guide
uaugaauaggagcacacaauuu

SEQ ID NO: 83224 - RNA, 22 nt, Artificial Sequence
  LRRK2 RNA guide
ugaauaggagcacacaauuuuc

SEQ ID NO: 83225 - RNA, 22 nt, Artificial Sequence
  LRRK2 RNA guide
ugccuggcagugggaaaauugu

SEQ ID NO: 83226 - RNA, 22 nt, Artificial Sequence
  LRRK2 RNA guide
uggaauaugaauaggagcacac

SEQ ID NO: 83227 - RNA, 22 nt, Artificial Sequence
  LRRK2 RNA guide
uggcagugggaaaauugugugc

SEQ ID NO: 83228 - RNA, 22 nt, Artificial Sequence
  LRRK2 RNA guide
ugggaaaauugugugcuccuau

SEQ ID NO: 83229 - RNA, 22 nt, Artificial Sequence
  LRRK2 RNA guide
ugugugcuccuauucauauucc

SEQ ID NO: 83230 - RNA, 22 nt, Artificial Sequence
  LRRK2 RNA guide
uugccuggcagugggaaaauug

SEQ ID NO: 83231 - RNA, 22 nt, Artificial Sequence
  LRRK2 RNA guide
uugugugcuccuauucauauuc

SEQ ID NO: 83232 - RNA, 20 nt, Artificial Sequence
  LRRK2 RNA guide
aaagacuggcucccuugccu

SEQ ID NO: 83233 - RNA, 20 nt, Artificial Sequence
  LRRK2 RNA guide
aagacuggcucccuugccug

SEQ ID NO: 83234 - RNA, 20 nt, Artificial Sequence
  LRRK2 RNA guide
aauuuucccacugccaggca

SEQ ID NO: 83235 - RNA, 20 nt, Artificial Sequence
  LRRK2 RNA guide
acugccaggcaagggagcca

SEQ ID NO: 83236 - RNA, 20 nt, Artificial Sequence
  LRRK2 RNA guide
acuggcucccuugccuggca

SEQ ID NO: 83237 - RNA, 20 nt, Artificial Sequence
  LRRK2 RNA guide
agacuggcucccuugccugg

SEQ ID NO: 83238 - RNA, 20 nt, Artificial Sequence
  LRRK2 RNA guide
auuuucccacugccaggcaa

SEQ ID NO: 83239 - RNA, 20 nt, Artificial Sequence
  LRRK2 RNA guide
cacugccaggcaagggagcc

SEQ ID NO: 83240 - RNA, 20 nt, Artificial Sequence
  LRRK2 RNA guide
ccacugccaggcaagggagc

SEQ ID NO: 83241 - RNA, 20 nt, Artificial Sequence
  LRRK2 RNA guide
cccacugccaggcaagggag

SEQ ID NO: 83242 - RNA, 20 nt, Artificial Sequence
  LRRK2 RNA guide
cucccuugccuggcaguggg

SEQ ID NO: 83243 - RNA, 20 nt, Artificial Sequence
  LRRK2 RNA guide
cugccaggcaagggagccag

SEQ ID NO: 83244 - RNA, 20 nt, Artificial Sequence
  LRRK2 RNA guide
cuggcucccuugccuggcag

SEQ ID NO: 83245 - RNA, 20 nt, Artificial Sequence
  LRRK2 RNA guide
gaaagacuggcucccuugcc

SEQ ID NO: 83246 - RNA, 20 nt, Artificial Sequence
  LRRK2 RNA guide
gaauuuucccacugccaggc

SEQ ID NO: 83247 - RNA, 20 nt, Artificial Sequence
  LRRK2 RNA guide
gacuggcucccuugccuggc

SEQ ID NO: 83248 - RNA, 20 nt, Artificial Sequence
  LRRK2 RNA guide
gcucccuugccuggcagugg

SEQ ID NO: 83249 - RNA, 20 nt, Artificial Sequence
  LRRK2 RNA guide
ggcucccuugccuggcagug

SEQ ID NO: 83250 - RNA, 20 nt, Artificial Sequence
  LRRK2 RNA guide
ucccacugccaggcaaggga

SEQ ID NO: 83251 - RNA, 20 nt, Artificial Sequence
  LRRK2 RNA guide
ucccuugccuggcaguggga

SEQ ID NO: 83252 - RNA, 20 nt, Artificial Sequence
  LRRK2 RNA guide
uggcucccuugccuggcagu

SEQ ID NO: 83253 - RNA, 20 nt, Artificial Sequence
  LRRK2 RNA guide
uucccacugccaggcaaggg

SEQ ID NO: 83254 - RNA, 20 nt, Artificial Sequence
  LRRK2 RNA guide
uuucccacugccaggcaagg

SEQ ID NO: 83255 - RNA, 20 nt, Artificial Sequence
  LRRK2 RNA guide
uuuucccacugccaggcaag

SEQ ID NO: 83256 - RNA, 21 nt, Artificial Sequence
  LRRK2 RNA guide
aaagacuggcucccuugccug

SEQ ID NO: 83257 - RNA, 21 nt, Artificial Sequence
  LRRK2 RNA guide
aagacuggcucccuugccugg

SEQ ID NO: 83258 - RNA, 21 nt, Artificial Sequence
  LRRK2 RNA guide
aauuuucccacugccaggcaa

SEQ ID NO: 83259 - RNA, 21 nt, Artificial Sequence
  LRRK2 RNA guide
acugccaggcaagggagccag

SEQ ID NO: 83260 - RNA, 21 nt, Artificial Sequence
  LRRK2 RNA guide
acuggcucccuugccuggcag

SEQ ID NO: 83261 - RNA, 21 nt, Artificial Sequence
  LRRK2 RNA guide
agacuggcucccuugccuggc

SEQ ID NO: 83262 - RNA, 21 nt, Artificial Sequence
  LRRK2 RNA guide
auuuucccacugccaggcaag

SEQ ID NO: 83263 - RNA, 21 nt, Artificial Sequence
  LRRK2 RNA guide
cacugccaggcaagggagcca

SEQ ID NO: 83264 - RNA, 21 nt, Artificial Sequence
  LRRK2 RNA guide
ccacugccaggcaagggagcc

SEQ ID NO: 83265 - RNA, 21 nt, Artificial Sequence
  LRRK2 RNA guide
cccacugccaggcaagggagc

SEQ ID NO: 83266 - RNA, 21 nt, Artificial Sequence
  LRRK2 RNA guide
cucccuugccuggcaguggga

SEQ ID NO: 83267 - RNA, 21 nt, Artificial Sequence
  LRRK2 RNA guide
cugccaggcaagggagccagu

SEQ ID NO: 83268 - RNA, 21 nt, Artificial Sequence
  LRRK2 RNA guide
cuggcucccuugccuggcagu

SEQ ID NO: 83269 - RNA, 21 nt, Artificial Sequence
  LRRK2 RNA guide
gaaagacuggcucccuugccu

SEQ ID NO: 83270 - RNA, 21 nt, Artificial Sequence
  LRRK2 RNA guide
gaauuuucccacugccaggca

SEQ ID NO: 83271 - RNA, 21 nt, Artificial Sequence
  LRRK2 RNA guide
gacuggcucccuugccuggca

SEQ ID NO: 83272 - RNA, 21 nt, Artificial Sequence
  LRRK2 RNA guide
gcucccuugccuggcaguggg

SEQ ID NO: 83273 - RNA, 21 nt, Artificial Sequence
  LRRK2 RNA guide
ggcucccuugccuggcagugg

SEQ ID NO: 83274 - RNA, 21 nt, Artificial Sequence
  LRRK2 RNA guide
ucccacugccaggcaagggag

SEQ ID NO: 83275 - RNA, 21 nt, Artificial Sequence
  LRRK2 RNA guide
ugaaagacuggcucccuugcc

SEQ ID NO: 83276 - RNA, 21 nt, Artificial Sequence
  LRRK2 RNA guide
uggcucccuugccuggcagug

SEQ ID NO: 83277 - RNA, 21 nt, Artificial Sequence
  LRRK2 RNA guide
uucccacugccaggcaaggga

SEQ ID NO: 83278 - RNA, 21 nt, Artificial Sequence
  LRRK2 RNA guide
uuucccacugccaggcaaggg

SEQ ID NO: 83279 - RNA, 21 nt, Artificial Sequence
  LRRK2 RNA guide
uuuucccacugccaggcaagg

SEQ ID NO: 83280 - RNA, 22 nt, Artificial Sequence
  LRRK2 RNA guide
aaagacuggcucccuugccugg

SEQ ID NO: 83281 - RNA, 22 nt, Artificial Sequence
  LRRK2 RNA guide
aagacuggcucccuugccuggc

SEQ ID NO: 83282 - RNA, 22 nt, Artificial Sequence
  LRRK2 RNA guide
aauuuucccacugccaggcaag

SEQ ID NO: 83283 - RNA, 22 nt, Artificial Sequence
  LRRK2 RNA guide
acugccaggcaagggagccagu

SEQ ID NO: 83284 - RNA, 22 nt, Artificial Sequence
  LRRK2 RNA guide
acuggcucccuugccuggcagu

SEQ ID NO: 83285 - RNA, 22 nt, Artificial Sequence
  LRRK2 RNA guide
agacuggcucccuugccuggca

SEQ ID NO: 83286 - RNA, 22 nt, Artificial Sequence
  LRRK2 RNA guide
augaaagacuggcucccuugcc

SEQ ID NO: 83287 - RNA, 22 nt, Artificial Sequence
  LRRK2 RNA guide
auuuucccacugccaggcaagg

SEQ ID NO: 83288 - RNA, 22 nt, Artificial Sequence
  LRRK2 RNA guide
cacugccaggcaagggagccag

SEQ ID NO: 83289 - RNA, 22 nt, Artificial Sequence
  LRRK2 RNA guide
ccacugccaggcaagggagcca

SEQ ID NO: 83290 - RNA, 22 nt, Artificial Sequence
  LRRK2 RNA guide
cccacugccaggcaagggagcc

SEQ ID NO: 83291 - RNA, 22 nt, Artificial Sequence
  LRRK2 RNA guide
cugccaggcaagggagccaguc

SEQ ID NO: 83292 - RNA, 22 nt, Artificial Sequence
  LRRK2 RNA guide
cuggcucccuugccuggcagug

SEQ ID NO: 83293 - RNA, 22 nt, Artificial Sequence
  LRRK2 RNA guide
gaaagacuggcucccuugccug

SEQ ID NO: 83294 - RNA, 22 nt, Artificial Sequence
  LRRK2 RNA guide
gaauuuucccacugccaggcaa

SEQ ID NO: 83295 - RNA, 22 nt, Artificial Sequence
  LRRK2 RNA guide
gacuggcucccuugccuggcag

SEQ ID NO: 83296 - RNA, 22 nt, Artificial Sequence
  LRRK2 RNA guide
gcucccuugccuggcaguggga

SEQ ID NO: 83297 - RNA, 22 nt, Artificial Sequence
  LRRK2 RNA guide
ggcucccuugccuggcaguggg

SEQ ID NO: 83298 - RNA, 22 nt, Artificial Sequence
  LRRK2 RNA guide
ucccacugccaggcaagggagc

SEQ ID NO: 83299 - RNA, 22 nt, Artificial Sequence
  LRRK2 RNA guide
ugaaagacuggcucccuugccu

SEQ ID NO: 83300 - RNA, 22 nt, Artificial Sequence
  LRRK2 RNA guide
uggcucccuugccuggcagugg

SEQ ID NO: 83301 - RNA, 22 nt, Artificial Sequence
  LRRK2 RNA guide
uucccacugccaggcaagggag

SEQ ID NO: 83302 - RNA, 22 nt, Artificial Sequence
  LRRK2 RNA guide
uuucccacugccaggcaaggga

SEQ ID NO: 83303 - RNA, 22 nt, Artificial Sequence
  LRRK2 RNA guide
uuuucccacugccaggcaaggg

SEQ ID NO: 83304 - RNA, 20 nt, Artificial Sequence
  LRRK2 RNA guide
aauuuucccaccgccaggca

SEQ ID NO: 83305 - RNA, 20 nt, Artificial Sequence
  LRRK2 RNA guide
acagaauuuucccaccgcca

SEQ ID NO: 83306 - RNA, 20 nt, Artificial Sequence
  LRRK2 RNA guide
accgccaggcaagggagcca

SEQ ID NO: 83307 - RNA, 20 nt, Artificial Sequence
  LRRK2 RNA guide
acuggcucccuugccuggcg

SEQ ID NO: 83308 - RNA, 20 nt, Artificial Sequence
  LRRK2 RNA guide
agaauuuucccaccgccagg

SEQ ID NO: 83309 - RNA, 20 nt, Artificial Sequence
  LRRK2 RNA guide
agcacagaauuuucccaccg

SEQ ID NO: 83310 - RNA, 20 nt, Artificial Sequence
  LRRK2 RNA guide
auuuucccaccgccaggcaa

SEQ ID NO: 83311 - RNA, 20 nt, Artificial Sequence
  LRRK2 RNA guide
cacagaauuuucccaccgcc

SEQ ID NO: 83312 - RNA, 20 nt, Artificial Sequence
  LRRK2 RNA guide
caccgccaggcaagggagcc

SEQ ID NO: 83313 - RNA, 20 nt, Artificial Sequence
  LRRK2 RNA guide
cagaauuuucccaccgccag

SEQ ID NO: 83314 - RNA, 20 nt, Artificial Sequence
  LRRK2 RNA guide
ccaccgccaggcaagggagc

SEQ ID NO: 83315 - RNA, 20 nt, Artificial Sequence
  LRRK2 RNA guide
cccaccgccaggcaagggag

SEQ ID NO: 83316 - RNA, 20 nt, Artificial Sequence
  LRRK2 RNA guide
cccuugccuggcggugggaa

SEQ ID NO: 83317 - RNA, 20 nt, Artificial Sequence
  LRRK2 RNA guide
ccgccaggcaagggagccag

SEQ ID NO: 83318 - RNA, 20 nt, Artificial Sequence
  LRRK2 RNA guide
ccuggcggugggaaaauucu

SEQ ID NO: 83319 - RNA, 20 nt, Artificial Sequence
  LRRK2 RNA guide
ccuugccuggcggugggaaa

SEQ ID NO: 83320 - RNA, 20 nt, Artificial Sequence
  LRRK2 RNA guide
cggugggaaaauucugugcu

SEQ ID NO: 83321 - RNA, 20 nt, Artificial Sequence
  LRRK2 RNA guide
cucccuugccuggcgguggg

SEQ ID NO: 83322 - RNA, 20 nt, Artificial Sequence
  LRRK2 RNA guide
cuggcggugggaaaauucug

SEQ ID NO: 83323 - RNA, 20 nt, Artificial Sequence
  LRRK2 RNA guide
cuggcucccuugccuggcgg

SEQ ID NO: 83324 - RNA, 20 nt, Artificial Sequence
  LRRK2 RNA guide
cuugccuggcggugggaaaa

SEQ ID NO: 83325 - RNA, 20 nt, Artificial Sequence
  LRRK2 RNA guide
gaauuuucccaccgccaggc

SEQ ID NO: 83326 - RNA, 20 nt, Artificial Sequence
  LRRK2 RNA guide
gagcacagaauuuucccacc

SEQ ID NO: 83327 - RNA, 20 nt, Artificial Sequence
  LRRK2 RNA guide
gcacagaauuuucccaccgc

SEQ ID NO: 83328 - RNA, 20 nt, Artificial Sequence
  LRRK2 RNA guide
gccuggcggugggaaaauuc

SEQ ID NO: 83329 - RNA, 20 nt, Artificial Sequence
  LRRK2 RNA guide
gcggugggaaaauucugugc

SEQ ID NO: 83330 - RNA, 20 nt, Artificial Sequence
  LRRK2 RNA guide
gcucccuugccuggcggugg

SEQ ID NO: 83331 - RNA, 20 nt, Artificial Sequence
  LRRK2 RNA guide
ggcggugggaaaauucugug

SEQ ID NO: 83332 - RNA, 20 nt, Artificial Sequence
  LRRK2 RNA guide
ggcucccuugccuggcggug

SEQ ID NO: 83333 - RNA, 20 nt, Artificial Sequence
  LRRK2 RNA guide
ucccaccgccaggcaaggga

SEQ ID NO: 83334 - RNA, 20 nt, Artificial Sequence
  LRRK2 RNA guide
ucccuugccuggcgguggga

SEQ ID NO: 83335 - RNA, 20 nt, Artificial Sequence
  LRRK2 RNA guide
ugccuggcggugggaaaauu

SEQ ID NO: 83336 - RNA, 20 nt, Artificial Sequence
  LRRK2 RNA guide
uggcggugggaaaauucugu

SEQ ID NO: 83337 - RNA, 20 nt, Artificial Sequence
  LRRK2 RNA guide
uggcucccuugccuggcggu

SEQ ID NO: 83338 - RNA, 20 nt, Artificial Sequence
  LRRK2 RNA guide
uucccaccgccaggcaaggg

SEQ ID NO: 83339 - RNA, 20 nt, Artificial Sequence
  LRRK2 RNA guide
uugccuggcggugggaaaau

SEQ ID NO: 83340 - RNA, 20 nt, Artificial Sequence
  LRRK2 RNA guide
uuucccaccgccaggcaagg

SEQ ID NO: 83341 - RNA, 20 nt, Artificial Sequence
  LRRK2 RNA guide
uuuucccaccgccaggcaag

SEQ ID NO: 83342 - RNA, 21 nt, Artificial Sequence
  LRRK2 RNA guide
aauuuucccaccgccaggcaa

SEQ ID NO: 83343 - RNA, 21 nt, Artificial Sequence
  LRRK2 RNA guide
acagaauuuucccaccgccag

SEQ ID NO: 83344 - RNA, 21 nt, Artificial Sequence
  LRRK2 RNA guide
accgccaggcaagggagccag

SEQ ID NO: 83345 - RNA, 21 nt, Artificial Sequence
  LRRK2 RNA guide
acuggcucccuugccuggcgg

SEQ ID NO: 83346 - RNA, 21 nt, Artificial Sequence
  LRRK2 RNA guide
agaauuuucccaccgccaggc

SEQ ID NO: 83347 - RNA, 21 nt, Artificial Sequence
  LRRK2 RNA guide
agcacagaauuuucccaccgc

SEQ ID NO: 83348 - RNA, 21 nt, Artificial Sequence
  LRRK2 RNA guide
auuuucccaccgccaggcaag

SEQ ID NO: 83349 - RNA, 21 nt, Artificial Sequence
  LRRK2 RNA guide
cacagaauuuucccaccgcca

SEQ ID NO: 83350 - RNA, 21 nt, Artificial Sequence
  LRRK2 RNA guide
caccgccaggcaagggagcca

SEQ ID NO: 83351 - RNA, 21 nt, Artificial Sequence
  LRRK2 RNA guide
cagaauuuucccaccgccagg

SEQ ID NO: 83352 - RNA, 21 nt, Artificial Sequence
  LRRK2 RNA guide
ccaccgccaggcaagggagcc

SEQ ID NO: 83353 - RNA, 21 nt, Artificial Sequence
  LRRK2 RNA guide
cccaccgccaggcaagggagc

SEQ ID NO: 83354 - RNA, 21 nt, Artificial Sequence
  LRRK2 RNA guide
cccuugccuggcggugggaaa

SEQ ID NO: 83355 - RNA, 21 nt, Artificial Sequence
  LRRK2 RNA guide
ccgccaggcaagggagccagu

SEQ ID NO: 83356 - RNA, 21 nt, Artificial Sequence
  LRRK2 RNA guide
ccuggcggugggaaaauucug

SEQ ID NO: 83357 - RNA, 21 nt, Artificial Sequence
  LRRK2 RNA guide
ccuugccuggcggugggaaaa

SEQ ID NO: 83358 - RNA, 21 nt, Artificial Sequence
  LRRK2 RNA guide
cggugggaaaauucugugcuc

SEQ ID NO: 83359 - RNA, 21 nt, Artificial Sequence
  LRRK2 RNA guide
cucccuugccuggcgguggga

SEQ ID NO: 83360 - RNA, 21 nt, Artificial Sequence
  LRRK2 RNA guide
cuggcggugggaaaauucugu

SEQ ID NO: 83361 - RNA, 21 nt, Artificial Sequence
  LRRK2 RNA guide
cuggcucccuugccuggcggu

SEQ ID NO: 83362 - RNA, 21 nt, Artificial Sequence
  LRRK2 RNA guide
cuugccuggcggugggaaaau

SEQ ID NO: 83363 - RNA, 21 nt, Artificial Sequence
  LRRK2 RNA guide
gaauuuucccaccgccaggca

SEQ ID NO: 83364 - RNA, 21 nt, Artificial Sequence
  LRRK2 RNA guide
gacuggcucccuugccuggcg

SEQ ID NO: 83365 - RNA, 21 nt, Artificial Sequence
  LRRK2 RNA guide
gagcacagaauuuucccaccg

SEQ ID NO: 83366 - RNA, 21 nt, Artificial Sequence
  LRRK2 RNA guide
gcacagaauuuucccaccgcc

SEQ ID NO: 83367 - RNA, 21 nt, Artificial Sequence
  LRRK2 RNA guide
gccuggcggugggaaaauucu

SEQ ID NO: 83368 - RNA, 21 nt, Artificial Sequence
  LRRK2 RNA guide
gcggugggaaaauucugugcu

SEQ ID NO: 83369 - RNA, 21 nt, Artificial Sequence
  LRRK2 RNA guide
gcucccuugccuggcgguggg

SEQ ID NO: 83370 - RNA, 21 nt, Artificial Sequence
  LRRK2 RNA guide
ggagcacagaauuuucccacc

SEQ ID NO: 83371 - RNA, 21 nt, Artificial Sequence
  LRRK2 RNA guide
ggcggugggaaaauucugugc

SEQ ID NO: 83372 - RNA, 21 nt, Artificial Sequence
  LRRK2 RNA guide
ggcucccuugccuggcggugg

SEQ ID NO: 83373 - RNA, 21 nt, Artificial Sequence
  LRRK2 RNA guide
ucccaccgccaggcaagggag

SEQ ID NO: 83374 - RNA, 21 nt, Artificial Sequence
  LRRK2 RNA guide
ucccuugccuggcggugggaa

SEQ ID NO: 83375 - RNA, 21 nt, Artificial Sequence
  LRRK2 RNA guide
ugccuggcggugggaaaauuc

SEQ ID NO: 83376 - RNA, 21 nt, Artificial Sequence
  LRRK2 RNA guide
uggcggugggaaaauucugug

SEQ ID NO: 83377 - RNA, 21 nt, Artificial Sequence
  LRRK2 RNA guide
uggcucccuugccuggcggug

SEQ ID NO: 83378 - RNA, 21 nt, Artificial Sequence
  LRRK2 RNA guide
uucccaccgccaggcaaggga

SEQ ID NO: 83379 - RNA, 21 nt, Artificial Sequence
  LRRK2 RNA guide
uugccuggcggugggaaaauu

SEQ ID NO: 83380 - RNA, 21 nt, Artificial Sequence
  LRRK2 RNA guide
uuucccaccgccaggcaaggg

SEQ ID NO: 83381 - RNA, 21 nt, Artificial Sequence
  LRRK2 RNA guide
uuuucccaccgccaggcaagg

SEQ ID NO: 83382 - RNA, 22 nt, Artificial Sequence
  LRRK2 RNA guide
aauuuucccaccgccaggcaag

SEQ ID NO: 83383 - RNA, 22 nt, Artificial Sequence
  LRRK2 RNA guide
acagaauuuucccaccgccagg

SEQ ID NO: 83384 - RNA, 22 nt, Artificial Sequence
  LRRK2 RNA guide
accgccaggcaagggagccagu

SEQ ID NO: 83385 - RNA, 22 nt, Artificial Sequence
  LRRK2 RNA guide
acuggcucccuugccuggcggu

SEQ ID NO: 83386 - RNA, 22 nt, Artificial Sequence
  LRRK2 RNA guide
agaauuuucccaccgccaggca

SEQ ID NO: 83387 - RNA, 22 nt, Artificial Sequence
  LRRK2 RNA guide
agacuggcucccuugccuggcg

SEQ ID NO: 83388 - RNA, 22 nt, Artificial Sequence
  LRRK2 RNA guide
agcacagaauuuucccaccgcc

SEQ ID NO: 83389 - RNA, 22 nt, Artificial Sequence
  LRRK2 RNA guide
aggagcacagaauuuucccacc

SEQ ID NO: 83390 - RNA, 22 nt, Artificial Sequence
  LRRK2 RNA guide
auuuucccaccgccaggcaagg

SEQ ID NO: 83391 - RNA, 22 nt, Artificial Sequence
  LRRK2 RNA guide
cacagaauuuucccaccgccag

SEQ ID NO: 83392 - RNA, 22 nt, Artificial Sequence
  LRRK2 RNA guide
caccgccaggcaagggagccag

SEQ ID NO: 83393 - RNA, 22 nt, Artificial Sequence
  LRRK2 RNA guide
cagaauuuucccaccgccaggc

SEQ ID NO: 83394 - RNA, 22 nt, Artificial Sequence
  LRRK2 RNA guide
ccaccgccaggcaagggagcca

SEQ ID NO: 83395 - RNA, 22 nt, Artificial Sequence
  LRRK2 RNA guide
cccaccgccaggcaagggagcc

SEQ ID NO: 83396 - RNA, 22 nt, Artificial Sequence
  LRRK2 RNA guide
cccuugccuggcggugggaaaa

SEQ ID NO: 83397 - RNA, 22 nt, Artificial Sequence
  LRRK2 RNA guide
ccgccaggcaagggagccaguc

SEQ ID NO: 83398 - RNA, 22 nt, Artificial Sequence
  LRRK2 RNA guide
ccuggcggugggaaaauucugu

SEQ ID NO: 83399 - RNA, 22 nt, Artificial Sequence
  LRRK2 RNA guide
ccuugccuggcggugggaaaau

SEQ ID NO: 83400 - RNA, 22 nt, Artificial Sequence
  LRRK2 RNA guide
cggugggaaaauucugugcucc

SEQ ID NO: 83401 - RNA, 22 nt, Artificial Sequence
  LRRK2 RNA guide
cucccuugccuggcggugggaa

SEQ ID NO: 83402 - RNA, 22 nt, Artificial Sequence
  LRRK2 RNA guide
cuggcggugggaaaauucugug

SEQ ID NO: 83403 - RNA, 22 nt, Artificial Sequence
  LRRK2 RNA guide
cuggcucccuugccuggcggug

SEQ ID NO: 83404 - RNA, 22 nt, Artificial Sequence
  LRRK2 RNA guide
cuugccuggcggugggaaaauu

SEQ ID NO: 83405 - RNA, 22 nt, Artificial Sequence
  LRRK2 RNA guide
gaauuuucccaccgccaggcaa

SEQ ID NO: 83406 - RNA, 22 nt, Artificial Sequence
  LRRK2 RNA guide
gacuggcucccuugccuggcgg

SEQ ID NO: 83407 - RNA, 22 nt, Artificial Sequence
  LRRK2 RNA guide
gagcacagaauuuucccaccgc

SEQ ID NO: 83408 - RNA, 22 nt, Artificial Sequence
  LRRK2 RNA guide
gcacagaauuuucccaccgcca

SEQ ID NO: 83409 - RNA, 22 nt, Artificial Sequence
  LRRK2 RNA guide
gccuggcggugggaaaauucug

SEQ ID NO: 83410 - RNA, 22 nt, Artificial Sequence
  LRRK2 RNA guide
gcggugggaaaauucugugcuc

SEQ ID NO: 83411 - RNA, 22 nt, Artificial Sequence
  LRRK2 RNA guide
gcucccuugccuggcgguggga

SEQ ID NO: 83412 - RNA, 22 nt, Artificial Sequence
  LRRK2 RNA guide
ggagcacagaauuuucccaccg

SEQ ID NO: 83413 - RNA, 22 nt, Artificial Sequence
  LRRK2 RNA guide
ggcggugggaaaauucugugcu

SEQ ID NO: 83414 - RNA, 22 nt, Artificial Sequence
  LRRK2 RNA guide
ggcucccuugccuggcgguggg

SEQ ID NO: 83415 - RNA, 22 nt, Artificial Sequence
  LRRK2 RNA guide
ucccaccgccaggcaagggagc

SEQ ID NO: 83416 - RNA, 22 nt, Artificial Sequence
  LRRK2 RNA guide
ucccuugccuggcggugggaaa

SEQ ID NO: 83417 - RNA, 22 nt, Artificial Sequence
  LRRK2 RNA guide
ugccuggcggugggaaaauucu

SEQ ID NO: 83418 - RNA, 22 nt, Artificial Sequence
  LRRK2 RNA guide
uggcggugggaaaauucugugc

SEQ ID NO: 83419 - RNA, 22 nt, Artificial Sequence
  LRRK2 RNA guide
uggcucccuugccuggcggugg

SEQ ID NO: 83420 - RNA, 22 nt, Artificial Sequence
  LRRK2 RNA guide
uucccaccgccaggcaagggag

SEQ ID NO: 83421 - RNA, 22 nt, Artificial Sequence
  LRRK2 RNA guide
uugccuggcggugggaaaauuc

SEQ ID NO: 83422 - RNA, 22 nt, Artificial Sequence
  LRRK2 RNA guide
uuucccaccgccaggcaaggga

SEQ ID NO: 83423 - RNA, 22 nt, Artificial Sequence
  LRRK2 RNA guide
uuuucccaccgccaggcaaggg

SEQ ID NO: 83424 - RNA, 20 nt, Artificial Sequence
  LRRK2 RNA guide
aaugacugaacaauauguga

SEQ ID NO: 83425 - RNA, 20 nt, Artificial Sequence
  LRRK2 RNA guide
acauauuguucagucauugg

SEQ ID NO: 83426 - RNA, 20 nt, Artificial Sequence
  LRRK2 RNA guide
acugaacaauaugugagaau

SEQ ID NO: 83427 - RNA, 20 nt, Artificial Sequence
  LRRK2 RNA guide
agauugcagccaaugacuga

SEQ ID NO: 83428 - RNA, 20 nt, Artificial Sequence
  LRRK2 RNA guide
agcagauugcagccaaugac

SEQ ID NO: 83429 - RNA, 20 nt, Artificial Sequence
  LRRK2 RNA guide
agccaaugacugaacaauau

SEQ ID NO: 83430 - RNA, 20 nt, Artificial Sequence
  LRRK2 RNA guide
agucuuucauucucacauau

SEQ ID NO: 83431 - RNA, 20 nt, Artificial Sequence
  LRRK2 RNA guide
auauuguucagucauuggcu

SEQ ID NO: 83432 - RNA, 20 nt, Artificial Sequence
  LRRK2 RNA guide
augacugaacaauaugugag

SEQ ID NO: 83433 - RNA, 20 nt, Artificial Sequence
  LRRK2 RNA guide
auucucacauauuguucagu

SEQ ID NO: 83434 - RNA, 20 nt, Artificial Sequence
  LRRK2 RNA guide
auugcagccaaugacugaac

SEQ ID NO: 83435 - RNA, 20 nt, Artificial Sequence
  LRRK2 RNA guide
auuguucagucauuggcugc

SEQ ID NO: 83436 - RNA, 20 nt, Artificial Sequence
  LRRK2 RNA guide
caaugacugaacaauaugug

SEQ ID NO: 83437 - RNA, 20 nt, Artificial Sequence
  LRRK2 RNA guide
cacauauuguucagucauug

SEQ ID NO: 83438 - RNA, 20 nt, Artificial Sequence
  LRRK2 RNA guide
cagauugcagccaaugacug

SEQ ID NO: 83439 - RNA, 20 nt, Artificial Sequence
  LRRK2 RNA guide
cagcagauugcagccaauga

SEQ ID NO: 83440 - RNA, 20 nt, Artificial Sequence
  LRRK2 RNA guide
cagccaaugacugaacaaua

SEQ ID NO: 83441 - RNA, 20 nt, Artificial Sequence
  LRRK2 RNA guide
cauauuguucagucauuggc

SEQ ID NO: 83442 - RNA, 20 nt, Artificial Sequence
  LRRK2 RNA guide
cauucucacauauuguucag

SEQ ID NO: 83443 - RNA, 20 nt, Artificial Sequence
  LRRK2 RNA guide
ccaaugacugaacaauaugu

SEQ ID NO: 83444 - RNA, 20 nt, Artificial Sequence
  LRRK2 RNA guide
ccagcagauugcagccaaug

SEQ ID NO: 83445 - RNA, 20 nt, Artificial Sequence
  LRRK2 RNA guide
cccagcagauugcagccaau

SEQ ID NO: 83446 - RNA, 20 nt, Artificial Sequence
  LRRK2 RNA guide
cucacauauuguucagucau

SEQ ID NO: 83447 - RNA, 20 nt, Artificial Sequence
  LRRK2 RNA guide
cugaacaauaugugagaaug

SEQ ID NO: 83448 - RNA, 20 nt, Artificial Sequence
  LRRK2 RNA guide
cuuucauucucacauauugu

SEQ ID NO: 83449 - RNA, 20 nt, Artificial Sequence
  LRRK2 RNA guide
gacugaacaauaugugagaa

SEQ ID NO: 83450 - RNA, 20 nt, Artificial Sequence
  LRRK2 RNA guide
gauugcagccaaugacugaa

SEQ ID NO: 83451 - RNA, 20 nt, Artificial Sequence
  LRRK2 RNA guide
gcagauugcagccaaugacu

SEQ ID NO: 83452 - RNA, 20 nt, Artificial Sequence
  LRRK2 RNA guide
gcagccaaugacugaacaau

SEQ ID NO: 83453 - RNA, 20 nt, Artificial Sequence
  LRRK2 RNA guide
gccaaugacugaacaauaug

SEQ ID NO: 83454 - RNA, 20 nt, Artificial Sequence
  LRRK2 RNA guide
gucuuucauucucacauauu

SEQ ID NO: 83455 - RNA, 20 nt, Artificial Sequence
  LRRK2 RNA guide
guucagucauuggcugcaau

SEQ ID NO: 83456 - RNA, 20 nt, Artificial Sequence
  LRRK2 RNA guide
uauuguucagucauuggcug

SEQ ID NO: 83457 - RNA, 20 nt, Artificial Sequence
  LRRK2 RNA guide
ucacauauuguucagucauu

SEQ ID NO: 83458 - RNA, 20 nt, Artificial Sequence
  LRRK2 RNA guide
ucagucauuggcugcaaucu

SEQ ID NO: 83459 - RNA, 20 nt, Artificial Sequence
  LRRK2 RNA guide
ucauucucacauauuguuca

SEQ ID NO: 83460 - RNA, 20 nt, Artificial Sequence
  LRRK2 RNA guide
ucucacauauuguucaguca

SEQ ID NO: 83461 - RNA, 20 nt, Artificial Sequence
  LRRK2 RNA guide
ucuuucauucucacauauug

SEQ ID NO: 83462 - RNA, 20 nt, Artificial Sequence
  LRRK2 RNA guide
ugaacaauaugugagaauga

SEQ ID NO: 83463 - RNA, 20 nt, Artificial Sequence
  LRRK2 RNA guide
ugacugaacaauaugugaga

SEQ ID NO: 83464 - RNA, 20 nt, Artificial Sequence
  LRRK2 RNA guide
ugcagccaaugacugaacaa

SEQ ID NO: 83465 - RNA, 20 nt, Artificial Sequence
  LRRK2 RNA guide
uguucagucauuggcugcaa

SEQ ID NO: 83466 - RNA, 20 nt, Artificial Sequence
  LRRK2 RNA guide
uucagucauuggcugcaauc

SEQ ID NO: 83467 - RNA, 20 nt, Artificial Sequence
  LRRK2 RNA guide
uucauucucacauauuguuc

SEQ ID NO: 83468 - RNA, 20 nt, Artificial Sequence
  LRRK2 RNA guide
uucucacauauuguucaguc

SEQ ID NO: 83469 - RNA, 20 nt, Artificial Sequence
  LRRK2 RNA guide
uugcagccaaugacugaaca

SEQ ID NO: 83470 - RNA, 20 nt, Artificial Sequence
  LRRK2 RNA guide
uuguucagucauuggcugca

SEQ ID NO: 83471 - RNA, 21 nt, Artificial Sequence
  LRRK2 RNA guide
aaugacugaacaauaugugag

SEQ ID NO: 83472 - RNA, 21 nt, Artificial Sequence
  LRRK2 RNA guide
acauauuguucagucauuggc

SEQ ID NO: 83473 - RNA, 21 nt, Artificial Sequence
  LRRK2 RNA guide
acugaacaauaugugagaaug

SEQ ID NO: 83474 - RNA, 21 nt, Artificial Sequence
  LRRK2 RNA guide
agauugcagccaaugacugaa

SEQ ID NO: 83475 - RNA, 21 nt, Artificial Sequence
  LRRK2 RNA guide
agcagauugcagccaaugacu

SEQ ID NO: 83476 - RNA, 21 nt, Artificial Sequence
  LRRK2 RNA guide
agccaaugacugaacaauaug

SEQ ID NO: 83477 - RNA, 21 nt, Artificial Sequence
  LRRK2 RNA guide
auauuguucagucauuggcug

SEQ ID NO: 83478 - RNA, 21 nt, Artificial Sequence
  LRRK2 RNA guide
augacugaacaauaugugaga

SEQ ID NO: 83479 - RNA, 21 nt, Artificial Sequence
  LRRK2 RNA guide
auucucacauauuguucaguc

SEQ ID NO: 83480 - RNA, 21 nt, Artificial Sequence
  LRRK2 RNA guide
auugcagccaaugacugaaca

SEQ ID NO: 83481 - RNA, 21 nt, Artificial Sequence
  LRRK2 RNA guide
auuguucagucauuggcugca

SEQ ID NO: 83482 - RNA, 21 nt, Artificial Sequence
  LRRK2 RNA guide
caaugacugaacaauauguga

SEQ ID NO: 83483 - RNA, 21 nt, Artificial Sequence
  LRRK2 RNA guide
cacauauuguucagucauugg

SEQ ID NO: 83484 - RNA, 21 nt, Artificial Sequence
  LRRK2 RNA guide
cagauugcagccaaugacuga

SEQ ID NO: 83485 - RNA, 21 nt, Artificial Sequence
  LRRK2 RNA guide
cagcagauugcagccaaugac

SEQ ID NO: 83486 - RNA, 21 nt, Artificial Sequence
  LRRK2 RNA guide
cagccaaugacugaacaauau

SEQ ID NO: 83487 - RNA, 21 nt, Artificial Sequence
  LRRK2 RNA guide
cagucuuucauucucacauau

SEQ ID NO: 83488 - RNA, 21 nt, Artificial Sequence
  LRRK2 RNA guide
cauauuguucagucauuggcu

SEQ ID NO: 83489 - RNA, 21 nt, Artificial Sequence
  LRRK2 RNA guide
cauucucacauauuguucagu

SEQ ID NO: 83490 - RNA, 21 nt, Artificial Sequence
  LRRK2 RNA guide
ccaaugacugaacaauaugug

SEQ ID NO: 83491 - RNA, 21 nt, Artificial Sequence
  LRRK2 RNA guide
ccagcagauugcagccaauga

SEQ ID NO: 83492 - RNA, 21 nt, Artificial Sequence
  LRRK2 RNA guide
cccagcagauugcagccaaug

SEQ ID NO: 83493 - RNA, 21 nt, Artificial Sequence
  LRRK2 RNA guide
cucacauauuguucagucauu

SEQ ID NO: 83494 - RNA, 21 nt, Artificial Sequence
  LRRK2 RNA guide
cugaacaauaugugagaauga

SEQ ID NO: 83495 - RNA, 21 nt, Artificial Sequence
  LRRK2 RNA guide
gacugaacaauaugugagaau

SEQ ID NO: 83496 - RNA, 21 nt, Artificial Sequence
  LRRK2 RNA guide
gauugcagccaaugacugaac

SEQ ID NO: 83497 - RNA, 21 nt, Artificial Sequence
  LRRK2 RNA guide
gcagauugcagccaaugacug

SEQ ID NO: 83498 - RNA, 21 nt, Artificial Sequence
  LRRK2 RNA guide
gcagccaaugacugaacaaua

SEQ ID NO: 83499 - RNA, 21 nt, Artificial Sequence
  LRRK2 RNA guide
gccaaugacugaacaauaugu

SEQ ID NO: 83500 - RNA, 21 nt, Artificial Sequence
  LRRK2 RNA guide
gucuuucauucucacauauug

SEQ ID NO: 83501 - RNA, 21 nt, Artificial Sequence
  LRRK2 RNA guide
guucagucauuggcugcaauc

SEQ ID NO: 83502 - RNA, 21 nt, Artificial Sequence
  LRRK2 RNA guide
uauuguucagucauuggcugc

SEQ ID NO: 83503 - RNA, 21 nt, Artificial Sequence
  LRRK2 RNA guide
ucacauauuguucagucauug

SEQ ID NO: 83504 - RNA, 21 nt, Artificial Sequence
  LRRK2 RNA guide
ucagucauuggcugcaaucug

SEQ ID NO: 83505 - RNA, 21 nt, Artificial Sequence
  LRRK2 RNA guide
ucauucucacauauuguucag

SEQ ID NO: 83506 - RNA, 21 nt, Artificial Sequence
  LRRK2 RNA guide
ucccagcagauugcagccaau

SEQ ID NO: 83507 - RNA, 21 nt, Artificial Sequence
  LRRK2 RNA guide
ucucacauauuguucagucau

SEQ ID NO: 83508 - RNA, 21 nt, Artificial Sequence
  LRRK2 RNA guide
ugacugaacaauaugugagaa

SEQ ID NO: 83509 - RNA, 21 nt, Artificial Sequence
  LRRK2 RNA guide
ugcagccaaugacugaacaau

SEQ ID NO: 83510 - RNA, 21 nt, Artificial Sequence
  LRRK2 RNA guide
uguucagucauuggcugcaau

SEQ ID NO: 83511 - RNA, 21 nt, Artificial Sequence
  LRRK2 RNA guide
uucagucauuggcugcaaucu

SEQ ID NO: 83512 - RNA, 21 nt, Artificial Sequence
  LRRK2 RNA guide
uucucacauauuguucaguca

SEQ ID NO: 83513 - RNA, 21 nt, Artificial Sequence
  LRRK2 RNA guide
uugcagccaaugacugaacaa

SEQ ID NO: 83514 - RNA, 21 nt, Artificial Sequence
  LRRK2 RNA guide
uuguucagucauuggcugcaa

SEQ ID NO: 83515 - RNA, 22 nt, Artificial Sequence
  LRRK2 RNA guide
aaugacugaacaauaugugaga

SEQ ID NO: 83516 - RNA, 22 nt, Artificial Sequence
  LRRK2 RNA guide
acauauuguucagucauuggcu

SEQ ID NO: 83517 - RNA, 22 nt, Artificial Sequence
  LRRK2 RNA guide
acugaacaauaugugagaauga

SEQ ID NO: 83518 - RNA, 22 nt, Artificial Sequence
  LRRK2 RNA guide
agauugcagccaaugacugaac

SEQ ID NO: 83519 - RNA, 22 nt, Artificial Sequence
  LRRK2 RNA guide
agcagauugcagccaaugacug

SEQ ID NO: 83520 - RNA, 22 nt, Artificial Sequence
  LRRK2 RNA guide
agccaaugacugaacaauaugu

SEQ ID NO: 83521 - RNA, 22 nt, Artificial Sequence
  LRRK2 RNA guide
agucuuucauucucacauauug

SEQ ID NO: 83522 - RNA, 22 nt, Artificial Sequence
  LRRK2 RNA guide
auauuguucagucauuggcugc

SEQ ID NO: 83523 - RNA, 22 nt, Artificial Sequence
  LRRK2 RNA guide
augacugaacaauaugugagaa

SEQ ID NO: 83524 - RNA, 22 nt, Artificial Sequence
  LRRK2 RNA guide
auucucacauauuguucaguca

SEQ ID NO: 83525 - RNA, 22 nt, Artificial Sequence
  LRRK2 RNA guide
auugcagccaaugacugaacaa

SEQ ID NO: 83526 - RNA, 22 nt, Artificial Sequence
  LRRK2 RNA guide
auuguucagucauuggcugcaa

SEQ ID NO: 83527 - RNA, 22 nt, Artificial Sequence
  LRRK2 RNA guide
caaugacugaacaauaugugag

SEQ ID NO: 83528 - RNA, 22 nt, Artificial Sequence
  LRRK2 RNA guide
cacauauuguucagucauuggc

SEQ ID NO: 83529 - RNA, 22 nt, Artificial Sequence
  LRRK2 RNA guide
cagauugcagccaaugacugaa

SEQ ID NO: 83530 - RNA, 22 nt, Artificial Sequence
  LRRK2 RNA guide
cagcagauugcagccaaugacu

SEQ ID NO: 83531 - RNA, 22 nt, Artificial Sequence
  LRRK2 RNA guide
cagccaaugacugaacaauaug

SEQ ID NO: 83532 - RNA, 22 nt, Artificial Sequence
  LRRK2 RNA guide
cagucuuucauucucacauauu

SEQ ID NO: 83533 - RNA, 22 nt, Artificial Sequence
  LRRK2 RNA guide
cauauuguucagucauuggcug

SEQ ID NO: 83534 - RNA, 22 nt, Artificial Sequence
  LRRK2 RNA guide
cauucucacauauuguucaguc

SEQ ID NO: 83535 - RNA, 22 nt, Artificial Sequence
  LRRK2 RNA guide
ccaaugacugaacaauauguga

SEQ ID NO: 83536 - RNA, 22 nt, Artificial Sequence
  LRRK2 RNA guide
ccagcagauugcagccaaugac

SEQ ID NO: 83537 - RNA, 22 nt, Artificial Sequence
  LRRK2 RNA guide
ccagucuuucauucucacauau

SEQ ID NO: 83538 - RNA, 22 nt, Artificial Sequence
  LRRK2 RNA guide
cccagcagauugcagccaauga

SEQ ID NO: 83539 - RNA, 22 nt, Artificial Sequence
  LRRK2 RNA guide
cucacauauuguucagucauug

SEQ ID NO: 83540 - RNA, 22 nt, Artificial Sequence
  LRRK2 RNA guide
cucccagcagauugcagccaau

SEQ ID NO: 83541 - RNA, 22 nt, Artificial Sequence
  LRRK2 RNA guide
cugaacaauaugugagaaugaa

SEQ ID NO: 83542 - RNA, 22 nt, Artificial Sequence
  LRRK2 RNA guide
cuuucauucucacauauuguuc

SEQ ID NO: 83543 - RNA, 22 nt, Artificial Sequence
  LRRK2 RNA guide
gacugaacaauaugugagaaug

SEQ ID NO: 83544 - RNA, 22 nt, Artificial Sequence
  LRRK2 RNA guide
gauugcagccaaugacugaaca

SEQ ID NO: 83545 - RNA, 22 nt, Artificial Sequence
  LRRK2 RNA guide
gcagauugcagccaaugacuga

SEQ ID NO: 83546 - RNA, 22 nt, Artificial Sequence
  LRRK2 RNA guide
gcagccaaugacugaacaauau

SEQ ID NO: 83547 - RNA, 22 nt, Artificial Sequence
  LRRK2 RNA guide
gccaaugacugaacaauaugug

SEQ ID NO: 83548 - RNA, 22 nt, Artificial Sequence
  LRRK2 RNA guide
gucuuucauucucacauauugu

SEQ ID NO: 83549 - RNA, 22 nt, Artificial Sequence
  LRRK2 RNA guide
guucagucauuggcugcaaucu

SEQ ID NO: 83550 - RNA, 22 nt, Artificial Sequence
  LRRK2 RNA guide
uauuguucagucauuggcugca

SEQ ID NO: 83551 - RNA, 22 nt, Artificial Sequence
  LRRK2 RNA guide
ucacauauuguucagucauugg

SEQ ID NO: 83552 - RNA, 22 nt, Artificial Sequence
  LRRK2 RNA guide
ucagucauuggcugcaaucugc

SEQ ID NO: 83553 - RNA, 22 nt, Artificial Sequence
  LRRK2 RNA guide
ucauucucacauauuguucagu

SEQ ID NO: 83554 - RNA, 22 nt, Artificial Sequence
  LRRK2 RNA guide
ucccagcagauugcagccaaug

SEQ ID NO: 83555 - RNA, 22 nt, Artificial Sequence
  LRRK2 RNA guide
ucucacauauuguucagucauu

SEQ ID NO: 83556 - RNA, 22 nt, Artificial Sequence
  LRRK2 RNA guide
ugacugaacaauaugugagaau

SEQ ID NO: 83557 - RNA, 22 nt, Artificial Sequence
  LRRK2 RNA guide
ugcagccaaugacugaacaaua

SEQ ID NO: 83558 - RNA, 22 nt, Artificial Sequence
  LRRK2 RNA guide
uguucagucauuggcugcaauc

SEQ ID NO: 83559 - RNA, 22 nt, Artificial Sequence
  LRRK2 RNA guide
uucagucauuggcugcaaucug

SEQ ID NO: 83560 - RNA, 22 nt, Artificial Sequence
  LRRK2 RNA guide
uucauucucacauauuguucag

SEQ ID NO: 83561 - RNA, 22 nt, Artificial Sequence
  LRRK2 RNA guide
uucucacauauuguucagucau

SEQ ID NO: 83562 - RNA, 22 nt, Artificial Sequence
  LRRK2 RNA guide
uugcagccaaugacugaacaau

SEQ ID NO: 83563 - RNA, 22 nt, Artificial Sequence
  LRRK2 RNA guide
uuguucagucauuggcugcaau

SEQ ID NO: 83564 - RNA, 20 nt, Artificial Sequence
  LRRK2 RNA guide
acauauuguuuagucauugg

SEQ ID NO: 83565 - RNA, 20 nt, Artificial Sequence
  LRRK2 RNA guide
agauugcagccaaugacuaa

SEQ ID NO: 83566 - RNA, 20 nt, Artificial Sequence
  LRRK2 RNA guide
agccaaugacuaaacaauau

SEQ ID NO: 83567 - RNA, 20 nt, Artificial Sequence
  LRRK2 RNA guide
auauuguuuagucauuggcu

SEQ ID NO: 83568 - RNA, 20 nt, Artificial Sequence
  LRRK2 RNA guide
augacuaaacaauaugugag

SEQ ID NO: 83569 - RNA, 20 nt, Artificial Sequence
  LRRK2 RNA guide
auugcagccaaugacuaaac

SEQ ID NO: 83570 - RNA, 20 nt, Artificial Sequence
  LRRK2 RNA guide
auuguuuagucauuggcugc

SEQ ID NO: 83571 - RNA, 20 nt, Artificial Sequence
  LRRK2 RNA guide
caaugacuaaacaauaugug

SEQ ID NO: 83572 - RNA, 20 nt, Artificial Sequence
  LRRK2 RNA guide
cacauauuguuuagucauug

SEQ ID NO: 83573 - RNA, 20 nt, Artificial Sequence
  LRRK2 RNA guide
cagauugcagccaaugacua

SEQ ID NO: 83574 - RNA, 20 nt, Artificial Sequence
  LRRK2 RNA guide
cagccaaugacuaaacaaua

SEQ ID NO: 83575 - RNA, 20 nt, Artificial Sequence
  LRRK2 RNA guide
cauauuguuuagucauuggc

SEQ ID NO: 83576 - RNA, 20 nt, Artificial Sequence
  LRRK2 RNA guide
cauucucacauauuguuuag

SEQ ID NO: 83577 - RNA, 20 nt, Artificial Sequence
  LRRK2 RNA guide
ccaaugacuaaacaauaugu

SEQ ID NO: 83578 - RNA, 20 nt, Artificial Sequence
  LRRK2 RNA guide
cuaaacaauaugugagaaug

SEQ ID NO: 83579 - RNA, 20 nt, Artificial Sequence
  LRRK2 RNA guide
cucacauauuguuuagucau

SEQ ID NO: 83580 - RNA, 20 nt, Artificial Sequence
  LRRK2 RNA guide
gacuaaacaauaugugagaa

SEQ ID NO: 83581 - RNA, 20 nt, Artificial Sequence
  LRRK2 RNA guide
gauugcagccaaugacuaaa

SEQ ID NO: 83582 - RNA, 20 nt, Artificial Sequence
  LRRK2 RNA guide
gcagccaaugacuaaacaau

SEQ ID NO: 83583 - RNA, 20 nt, Artificial Sequence
  LRRK2 RNA guide
gccaaugacuaaacaauaug

SEQ ID NO: 83584 - RNA, 20 nt, Artificial Sequence
  LRRK2 RNA guide
guuuagucauuggcugcaau

SEQ ID NO: 83585 - RNA, 20 nt, Artificial Sequence
  LRRK2 RNA guide
uauuguuuagucauuggcug

SEQ ID NO: 83586 - RNA, 20 nt, Artificial Sequence
  LRRK2 RNA guide
ucucacauauuguuuaguca

SEQ ID NO: 83587 - RNA, 20 nt, Artificial Sequence
  LRRK2 RNA guide
ugacuaaacaauaugugaga

SEQ ID NO: 83588 - RNA, 20 nt, Artificial Sequence
  LRRK2 RNA guide
ugcagccaaugacuaaacaa

SEQ ID NO: 83589 - RNA, 20 nt, Artificial Sequence
  LRRK2 RNA guide
uguuuagucauuggcugcaa

SEQ ID NO: 83590 - RNA, 20 nt, Artificial Sequence
  LRRK2 RNA guide
uuagucauuggcugcaaucu

SEQ ID NO: 83591 - RNA, 20 nt, Artificial Sequence
  LRRK2 RNA guide
uucucacauauuguuuaguc

SEQ ID NO: 83592 - RNA, 20 nt, Artificial Sequence
  LRRK2 RNA guide
uugcagccaaugacuaaaca

SEQ ID NO: 83593 - RNA, 20 nt, Artificial Sequence
  LRRK2 RNA guide
uuguuuagucauuggcugca

SEQ ID NO: 83594 - RNA, 20 nt, Artificial Sequence
  LRRK2 RNA guide
uuuagucauuggcugcaauc

SEQ ID NO: 83595 - RNA, 21 nt, Artificial Sequence
  LRRK2 RNA guide
acauauuguuuagucauuggc

SEQ ID NO: 83596 - RNA, 21 nt, Artificial Sequence
  LRRK2 RNA guide
agauugcagccaaugacuaaa

SEQ ID NO: 83597 - RNA, 21 nt, Artificial Sequence
  LRRK2 RNA guide
agccaaugacuaaacaauaug

SEQ ID NO: 83598 - RNA, 21 nt, Artificial Sequence
  LRRK2 RNA guide
auauuguuuagucauuggcug

SEQ ID NO: 83599 - RNA, 21 nt, Artificial Sequence
  LRRK2 RNA guide
auugcagccaaugacuaaaca

SEQ ID NO: 83600 - RNA, 21 nt, Artificial Sequence
  LRRK2 RNA guide
auuguuuagucauuggcugca

SEQ ID NO: 83601 - RNA, 21 nt, Artificial Sequence
  LRRK2 RNA guide
cacauauuguuuagucauugg

SEQ ID NO: 83602 - RNA, 21 nt, Artificial Sequence
  LRRK2 RNA guide
cagauugcagccaaugacuaa

SEQ ID NO: 83603 - RNA, 21 nt, Artificial Sequence
  LRRK2 RNA guide
cagccaaugacuaaacaauau

SEQ ID NO: 83604 - RNA, 21 nt, Artificial Sequence
  LRRK2 RNA guide
cauauuguuuagucauuggcu

SEQ ID NO: 83605 - RNA, 21 nt, Artificial Sequence
  LRRK2 RNA guide
ccaaugacuaaacaauaugug

SEQ ID NO: 83606 - RNA, 21 nt, Artificial Sequence
  LRRK2 RNA guide
gauugcagccaaugacuaaac

SEQ ID NO: 83607 - RNA, 21 nt, Artificial Sequence
  LRRK2 RNA guide
gcagauugcagccaaugacua

SEQ ID NO: 83608 - RNA, 21 nt, Artificial Sequence
  LRRK2 RNA guide
gcagccaaugacuaaacaaua

SEQ ID NO: 83609 - RNA, 21 nt, Artificial Sequence
  LRRK2 RNA guide
gccaaugacuaaacaauaugu

SEQ ID NO: 83610 - RNA, 21 nt, Artificial Sequence
  LRRK2 RNA guide
guuuagucauuggcugcaauc

SEQ ID NO: 83611 - RNA, 21 nt, Artificial Sequence
  LRRK2 RNA guide
uauuguuuagucauuggcugc

SEQ ID NO: 83612 - RNA, 21 nt, Artificial Sequence
  LRRK2 RNA guide
ugcagccaaugacuaaacaau

SEQ ID NO: 83613 - RNA, 21 nt, Artificial Sequence
  LRRK2 RNA guide
uguuuagucauuggcugcaau

SEQ ID NO: 83614 - RNA, 21 nt, Artificial Sequence
  LRRK2 RNA guide
uuagucauuggcugcaaucug

SEQ ID NO: 83615 - RNA, 21 nt, Artificial Sequence
  LRRK2 RNA guide
uugcagccaaugacuaaacaa

SEQ ID NO: 83616 - RNA, 21 nt, Artificial Sequence
  LRRK2 RNA guide
uuguuuagucauuggcugcaa

SEQ ID NO: 83617 - RNA, 21 nt, Artificial Sequence
  LRRK2 RNA guide
uuuagucauuggcugcaaucu

SEQ ID NO: 83618 - RNA, 22 nt, Artificial Sequence
  LRRK2 RNA guide
acauauuguuuagucauuggcu

SEQ ID NO: 83619 - RNA, 22 nt, Artificial Sequence
  LRRK2 RNA guide
agauugcagccaaugacuaaac

SEQ ID NO: 83620 - RNA, 22 nt, Artificial Sequence
  LRRK2 RNA guide
agcagauugcagccaaugacua

SEQ ID NO: 83621 - RNA, 22 nt, Artificial Sequence
  LRRK2 RNA guide
agccaaugacuaaacaauaugu

SEQ ID NO: 83622 - RNA, 22 nt, Artificial Sequence
  LRRK2 RNA guide
auauuguuuagucauuggcugc

SEQ ID NO: 83623 - RNA, 22 nt, Artificial Sequence
  LRRK2 RNA guide
auugcagccaaugacuaaacaa

SEQ ID NO: 83624 - RNA, 22 nt, Artificial Sequence
  LRRK2 RNA guide
auuguuuagucauuggcugcaa

SEQ ID NO: 83625 - RNA, 22 nt, Artificial Sequence
  LRRK2 RNA guide
caaugacuaaacaauaugugag

SEQ ID NO: 83626 - RNA, 22 nt, Artificial Sequence
  LRRK2 RNA guide
cacauauuguuuagucauuggc

SEQ ID NO: 83627 - RNA, 22 nt, Artificial Sequence
  LRRK2 RNA guide
cagauugcagccaaugacuaaa

SEQ ID NO: 83628 - RNA, 22 nt, Artificial Sequence
  LRRK2 RNA guide
cagccaaugacuaaacaauaug

SEQ ID NO: 83629 - RNA, 22 nt, Artificial Sequence
  LRRK2 RNA guide
cauauuguuuagucauuggcug

SEQ ID NO: 83630 - RNA, 22 nt, Artificial Sequence
  LRRK2 RNA guide
cauucucacauauuguuuaguc

SEQ ID NO: 83631 - RNA, 22 nt, Artificial Sequence
  LRRK2 RNA guide
ccaaugacuaaacaauauguga

SEQ ID NO: 83632 - RNA, 22 nt, Artificial Sequence
  LRRK2 RNA guide
cucacauauuguuuagucauug

SEQ ID NO: 83633 - RNA, 22 nt, Artificial Sequence
  LRRK2 RNA guide
gacuaaacaauaugugagaaug

SEQ ID NO: 83634 - RNA, 22 nt, Artificial Sequence
  LRRK2 RNA guide
gauugcagccaaugacuaaaca

SEQ ID NO: 83635 - RNA, 22 nt, Artificial Sequence
  LRRK2 RNA guide
gcagauugcagccaaugacuaa

SEQ ID NO: 83636 - RNA, 22 nt, Artificial Sequence
  LRRK2 RNA guide
gcagccaaugacuaaacaauau

SEQ ID NO: 83637 - RNA, 22 nt, Artificial Sequence
  LRRK2 RNA guide
gccaaugacuaaacaauaugug

SEQ ID NO: 83638 - RNA, 22 nt, Artificial Sequence
  LRRK2 RNA guide
guuuagucauuggcugcaaucu

SEQ ID NO: 83639 - RNA, 22 nt, Artificial Sequence
  LRRK2 RNA guide
uauuguuuagucauuggcugca

SEQ ID NO: 83640 - RNA, 22 nt, Artificial Sequence
  LRRK2 RNA guide
ucacauauuguuuagucauugg

SEQ ID NO: 83641 - RNA, 22 nt, Artificial Sequence
  LRRK2 RNA guide
ugcagccaaugacuaaacaaua

SEQ ID NO: 83642 - RNA, 22 nt, Artificial Sequence
  LRRK2 RNA guide
uguuuagucauuggcugcaauc

SEQ ID NO: 83643 - RNA, 22 nt, Artificial Sequence
  LRRK2 RNA guide
uuagucauuggcugcaaucugc

SEQ ID NO: 83644 - RNA, 22 nt, Artificial Sequence
  LRRK2 RNA guide
uugcagccaaugacuaaacaau

SEQ ID NO: 83645 - RNA, 22 nt, Artificial Sequence
  LRRK2 RNA guide
uuguuuagucauuggcugcaau

SEQ ID NO: 83646 - RNA, 22 nt, Artificial Sequence
  LRRK2 RNA guide
uuuagucauuggcugcaaucug

SEQ ID NO: 83647 - RNA, 20 nt, Artificial Sequence
  LRRK2 RNA guide
aagcugccuccugucaucug

SEQ ID NO: 83648 - RNA, 20 nt, Artificial Sequence
  LRRK2 RNA guide
aauacccucagaugacagga

SEQ ID NO: 83649 - RNA, 20 nt, Artificial Sequence
  LRRK2 RNA guide
acagaauacccucagaugac

SEQ ID NO: 83650 - RNA, 20 nt, Artificial Sequence
  LRRK2 RNA guide
acccucagaugacaggaggc

SEQ ID NO: 83651 - RNA, 20 nt, Artificial Sequence
  LRRK2 RNA guide
agaauacccucagaugacag

SEQ ID NO: 83652 - RNA, 20 nt, Artificial Sequence
  LRRK2 RNA guide
agcugccuccugucaucuga

SEQ ID NO: 83653 - RNA, 20 nt, Artificial Sequence
  LRRK2 RNA guide
auacccucagaugacaggag

SEQ ID NO: 83654 - RNA, 20 nt, Artificial Sequence
  LRRK2 RNA guide
aucacagaauacccucagau

SEQ ID NO: 83655 - RNA, 20 nt, Artificial Sequence
  LRRK2 RNA guide
aucugaggguauucugugau

SEQ ID NO: 83656 - RNA, 20 nt, Artificial Sequence
  LRRK2 RNA guide
auuuaucacagaauacccuc

SEQ ID NO: 83657 - RNA, 20 nt, Artificial Sequence
  LRRK2 RNA guide
caagcugccuccugucaucu

SEQ ID NO: 83658 - RNA, 20 nt, Artificial Sequence
  LRRK2 RNA guide
cacagaauacccucagauga

SEQ ID NO: 83659 - RNA, 20 nt, Artificial Sequence
  LRRK2 RNA guide
cagaauacccucagaugaca

SEQ ID NO: 83660 - RNA, 20 nt, Artificial Sequence
  LRRK2 RNA guide
caucugaggguauucuguga

SEQ ID NO: 83661 - RNA, 20 nt, Artificial Sequence
  LRRK2 RNA guide
cccucagaugacaggaggca

SEQ ID NO: 83662 - RNA, 20 nt, Artificial Sequence
  LRRK2 RNA guide
ccucagaugacaggaggcag

SEQ ID NO: 83663 - RNA, 20 nt, Artificial Sequence
  LRRK2 RNA guide
ccuccugucaucugagggua

SEQ ID NO: 83664 - RNA, 20 nt, Artificial Sequence
  LRRK2 RNA guide
ccugucaucugaggguauuc

SEQ ID NO: 83665 - RNA, 20 nt, Artificial Sequence
  LRRK2 RNA guide
cuauuuaucacagaauaccc

SEQ ID NO: 83666 - RNA, 20 nt, Artificial Sequence
  LRRK2 RNA guide
cucagaugacaggaggcagc

SEQ ID NO: 83667 - RNA, 20 nt, Artificial Sequence
  LRRK2 RNA guide
cuccugucaucugaggguau

SEQ ID NO: 83668 - RNA, 20 nt, Artificial Sequence
  LRRK2 RNA guide
cugaggguauucugugauaa

SEQ ID NO: 83669 - RNA, 20 nt, Artificial Sequence
  LRRK2 RNA guide
cugccuccugucaucugagg

SEQ ID NO: 83670 - RNA, 20 nt, Artificial Sequence
  LRRK2 RNA guide
cugucaucugaggguauucu

SEQ ID NO: 83671 - RNA, 20 nt, Artificial Sequence
  LRRK2 RNA guide
gaauacccucagaugacagg

SEQ ID NO: 83672 - RNA, 20 nt, Artificial Sequence
  LRRK2 RNA guide
gaggguauucugugauaaau

SEQ ID NO: 83673 - RNA, 20 nt, Artificial Sequence
  LRRK2 RNA guide
gcaagcugccuccugucauc

SEQ ID NO: 83674 - RNA, 20 nt, Artificial Sequence
  LRRK2 RNA guide
gccuccugucaucugagggu

SEQ ID NO: 83675 - RNA, 20 nt, Artificial Sequence
  LRRK2 RNA guide
gcuauuuaucacagaauacc

SEQ ID NO: 83676 - RNA, 20 nt, Artificial Sequence
  LRRK2 RNA guide
gcugccuccugucaucugag

SEQ ID NO: 83677 - RNA, 20 nt, Artificial Sequence
  LRRK2 RNA guide
ggcaagcugccuccugucau

SEQ ID NO: 83678 - RNA, 20 nt, Artificial Sequence
  LRRK2 RNA guide
gggcaagcugccuccuguca

SEQ ID NO: 83679 - RNA, 20 nt, Artificial Sequence
  LRRK2 RNA guide
gucaucugaggguauucugu

SEQ ID NO: 83680 - RNA, 20 nt, Artificial Sequence
  LRRK2 RNA guide
gugcuauuuaucacagaaua

SEQ ID NO: 83681 - RNA, 20 nt, Artificial Sequence
  LRRK2 RNA guide
uacccucagaugacaggagg

SEQ ID NO: 83682 - RNA, 20 nt, Artificial Sequence
  LRRK2 RNA guide
uaucacagaauacccucaga

SEQ ID NO: 83683 - RNA, 20 nt, Artificial Sequence
  LRRK2 RNA guide
uauuuaucacagaauacccu

SEQ ID NO: 83684 - RNA, 20 nt, Artificial Sequence
  LRRK2 RNA guide
ucacagaauacccucagaug

SEQ ID NO: 83685 - RNA, 20 nt, Artificial Sequence
  LRRK2 RNA guide
ucaucugaggguauucugug

SEQ ID NO: 83686 - RNA, 20 nt, Artificial Sequence
  LRRK2 RNA guide
uccugucaucugaggguauu

SEQ ID NO: 83687 - RNA, 20 nt, Artificial Sequence
  LRRK2 RNA guide
ucugaggguauucugugaua

SEQ ID NO: 83688 - RNA, 20 nt, Artificial Sequence
  LRRK2 RNA guide
ugaggguauucugugauaaa

SEQ ID NO: 83689 - RNA, 20 nt, Artificial Sequence
  LRRK2 RNA guide
ugccuccugucaucugaggg

SEQ ID NO: 83690 - RNA, 20 nt, Artificial Sequence
  LRRK2 RNA guide
ugcuauuuaucacagaauac

SEQ ID NO: 83691 - RNA, 20 nt, Artificial Sequence
  LRRK2 RNA guide
ugucaucugaggguauucug

SEQ ID NO: 83692 - RNA, 20 nt, Artificial Sequence
  LRRK2 RNA guide
ugugcuauuuaucacagaau

SEQ ID NO: 83693 - RNA, 20 nt, Artificial Sequence
  LRRK2 RNA guide
uuaucacagaauacccucag

SEQ ID NO: 83694 - RNA, 20 nt, Artificial Sequence
  LRRK2 RNA guide
uuuaucacagaauacccuca

SEQ ID NO: 83695 - RNA, 21 nt, Artificial Sequence
  LRRK2 RNA guide
aagcugccuccugucaucuga

SEQ ID NO: 83696 - RNA, 21 nt, Artificial Sequence
  LRRK2 RNA guide
aauacccucagaugacaggag

SEQ ID NO: 83697 - RNA, 21 nt, Artificial Sequence
  LRRK2 RNA guide
acagaauacccucagaugaca

SEQ ID NO: 83698 - RNA, 21 nt, Artificial Sequence
  LRRK2 RNA guide
acccucagaugacaggaggca

SEQ ID NO: 83699 - RNA, 21 nt, Artificial Sequence
  LRRK2 RNA guide
agaauacccucagaugacagg

SEQ ID NO: 83700 - RNA, 21 nt, Artificial Sequence
  LRRK2 RNA guide
agcugccuccugucaucugag

SEQ ID NO: 83701 - RNA, 21 nt, Artificial Sequence
  LRRK2 RNA guide
auacccucagaugacaggagg

SEQ ID NO: 83702 - RNA, 21 nt, Artificial Sequence
  LRRK2 RNA guide
aucacagaauacccucagaug

SEQ ID NO: 83703 - RNA, 21 nt, Artificial Sequence
  LRRK2 RNA guide
aucugaggguauucugugaua

SEQ ID NO: 83704 - RNA, 21 nt, Artificial Sequence
  LRRK2 RNA guide
auuuaucacagaauacccuca

SEQ ID NO: 83705 - RNA, 21 nt, Artificial Sequence
  LRRK2 RNA guide
caagcugccuccugucaucug

SEQ ID NO: 83706 - RNA, 21 nt, Artificial Sequence
  LRRK2 RNA guide
cacagaauacccucagaugac

SEQ ID NO: 83707 - RNA, 21 nt, Artificial Sequence
  LRRK2 RNA guide
cagaauacccucagaugacag

SEQ ID NO: 83708 - RNA, 21 nt, Artificial Sequence
  LRRK2 RNA guide
caucugaggguauucugugau

SEQ ID NO: 83709 - RNA, 21 nt, Artificial Sequence
  LRRK2 RNA guide
cccucagaugacaggaggcag

SEQ ID NO: 83710 - RNA, 21 nt, Artificial Sequence
  LRRK2 RNA guide
ccucagaugacaggaggcagc

SEQ ID NO: 83711 - RNA, 21 nt, Artificial Sequence
  LRRK2 RNA guide
ccuccugucaucugaggguau

SEQ ID NO: 83712 - RNA, 21 nt, Artificial Sequence
  LRRK2 RNA guide
ccugucaucugaggguauucu

SEQ ID NO: 83713 - RNA, 21 nt, Artificial Sequence
  LRRK2 RNA guide
cuauuuaucacagaauacccu

SEQ ID NO: 83714 - RNA, 21 nt, Artificial Sequence
  LRRK2 RNA guide
cucagaugacaggaggcagcu

SEQ ID NO: 83715 - RNA, 21 nt, Artificial Sequence
  LRRK2 RNA guide
cuccugucaucugaggguauu

SEQ ID NO: 83716 - RNA, 21 nt, Artificial Sequence
  LRRK2 RNA guide
cugaggguauucugugauaaa

SEQ ID NO: 83717 - RNA, 21 nt, Artificial Sequence
  LRRK2 RNA guide
cugccuccugucaucugaggg

SEQ ID NO: 83718 - RNA, 21 nt, Artificial Sequence
  LRRK2 RNA guide
cugucaucugaggguauucug

SEQ ID NO: 83719 - RNA, 21 nt, Artificial Sequence
  LRRK2 RNA guide
gaauacccucagaugacagga

SEQ ID NO: 83720 - RNA, 21 nt, Artificial Sequence
  LRRK2 RNA guide
gaggguauucugugauaaaua

SEQ ID NO: 83721 - RNA, 21 nt, Artificial Sequence
  LRRK2 RNA guide
gcaagcugccuccugucaucu

SEQ ID NO: 83722 - RNA, 21 nt, Artificial Sequence
  LRRK2 RNA guide
gccuccugucaucugagggua

SEQ ID NO: 83723 - RNA, 21 nt, Artificial Sequence
  LRRK2 RNA guide
gcuauuuaucacagaauaccc

SEQ ID NO: 83724 - RNA, 21 nt, Artificial Sequence
  LRRK2 RNA guide
gcugccuccugucaucugagg

SEQ ID NO: 83725 - RNA, 21 nt, Artificial Sequence
  LRRK2 RNA guide
ggcaagcugccuccugucauc

SEQ ID NO: 83726 - RNA, 21 nt, Artificial Sequence
  LRRK2 RNA guide
gggcaagcugccuccugucau

SEQ ID NO: 83727 - RNA, 21 nt, Artificial Sequence
  LRRK2 RNA guide
gucaucugaggguauucugug

SEQ ID NO: 83728 - RNA, 21 nt, Artificial Sequence
  LRRK2 RNA guide
gugcuauuuaucacagaauac

SEQ ID NO: 83729 - RNA, 21 nt, Artificial Sequence
  LRRK2 RNA guide
uacccucagaugacaggaggc

SEQ ID NO: 83730 - RNA, 21 nt, Artificial Sequence
  LRRK2 RNA guide
uaucacagaauacccucagau

SEQ ID NO: 83731 - RNA, 21 nt, Artificial Sequence
  LRRK2 RNA guide
uauuuaucacagaauacccuc

SEQ ID NO: 83732 - RNA, 21 nt, Artificial Sequence
  LRRK2 RNA guide
ucacagaauacccucagauga

SEQ ID NO: 83733 - RNA, 21 nt, Artificial Sequence
  LRRK2 RNA guide
ucaucugaggguauucuguga

SEQ ID NO: 83734 - RNA, 21 nt, Artificial Sequence
  LRRK2 RNA guide
uccugucaucugaggguauuc

SEQ ID NO: 83735 - RNA, 21 nt, Artificial Sequence
  LRRK2 RNA guide
ucugaggguauucugugauaa

SEQ ID NO: 83736 - RNA, 21 nt, Artificial Sequence
  LRRK2 RNA guide
ugaggguauucugugauaaau

SEQ ID NO: 83737 - RNA, 21 nt, Artificial Sequence
  LRRK2 RNA guide
ugccuccugucaucugagggu

SEQ ID NO: 83738 - RNA, 21 nt, Artificial Sequence
  LRRK2 RNA guide
ugcuauuuaucacagaauacc

SEQ ID NO: 83739 - RNA, 21 nt, Artificial Sequence
  LRRK2 RNA guide
ugggcaagcugccuccuguca

SEQ ID NO: 83740 - RNA, 21 nt, Artificial Sequence
  LRRK2 RNA guide
ugucaucugaggguauucugu

SEQ ID NO: 83741 - RNA, 21 nt, Artificial Sequence
  LRRK2 RNA guide
uuaucacagaauacccucaga

SEQ ID NO: 83742 - RNA, 21 nt, Artificial Sequence
  LRRK2 RNA guide
uuuaucacagaauacccucag

SEQ ID NO: 83743 - RNA, 22 nt, Artificial Sequence
  LRRK2 RNA guide
aagcugccuccugucaucugag

SEQ ID NO: 83744 - RNA, 22 nt, Artificial Sequence
  LRRK2 RNA guide
aauacccucagaugacaggagg

SEQ ID NO: 83745 - RNA, 22 nt, Artificial Sequence
  LRRK2 RNA guide
acagaauacccucagaugacag

SEQ ID NO: 83746 - RNA, 22 nt, Artificial Sequence
  LRRK2 RNA guide
acccucagaugacaggaggcag

SEQ ID NO: 83747 - RNA, 22 nt, Artificial Sequence
  LRRK2 RNA guide
agaauacccucagaugacagga

SEQ ID NO: 83748 - RNA, 22 nt, Artificial Sequence
  LRRK2 RNA guide
agcugccuccugucaucugagg

SEQ ID NO: 83749 - RNA, 22 nt, Artificial Sequence
  LRRK2 RNA guide
auacccucagaugacaggaggc

SEQ ID NO: 83750 - RNA, 22 nt, Artificial Sequence
  LRRK2 RNA guide
aucacagaauacccucagauga

SEQ ID NO: 83751 - RNA, 22 nt, Artificial Sequence
  LRRK2 RNA guide
aucugaggguauucugugauaa

SEQ ID NO: 83752 - RNA, 22 nt, Artificial Sequence
  LRRK2 RNA guide
auuuaucacagaauacccucag

SEQ ID NO: 83753 - RNA, 22 nt, Artificial Sequence
  LRRK2 RNA guide
caagcugccuccugucaucuga

SEQ ID NO: 83754 - RNA, 22 nt, Artificial Sequence
  LRRK2 RNA guide
cacagaauacccucagaugaca

SEQ ID NO: 83755 - RNA, 22 nt, Artificial Sequence
  LRRK2 RNA guide
cagaauacccucagaugacagg

SEQ ID NO: 83756 - RNA, 22 nt, Artificial Sequence
  LRRK2 RNA guide
caucugaggguauucugugaua

SEQ ID NO: 83757 - RNA, 22 nt, Artificial Sequence
  LRRK2 RNA guide
cccucagaugacaggaggcagc

SEQ ID NO: 83758 - RNA, 22 nt, Artificial Sequence
  LRRK2 RNA guide
ccucagaugacaggaggcagcu

SEQ ID NO: 83759 - RNA, 22 nt, Artificial Sequence
  LRRK2 RNA guide
ccuccugucaucugaggguauu

SEQ ID NO: 83760 - RNA, 22 nt, Artificial Sequence
  LRRK2 RNA guide
ccugucaucugaggguauucug

SEQ ID NO: 83761 - RNA, 22 nt, Artificial Sequence
  LRRK2 RNA guide
cuauuuaucacagaauacccuc

SEQ ID NO: 83762 - RNA, 22 nt, Artificial Sequence
  LRRK2 RNA guide
cucagaugacaggaggcagcuu

SEQ ID NO: 83763 - RNA, 22 nt, Artificial Sequence
  LRRK2 RNA guide
cuccugucaucugaggguauuc

SEQ ID NO: 83764 - RNA, 22 nt, Artificial Sequence
  LRRK2 RNA guide
cugaggguauucugugauaaau

SEQ ID NO: 83765 - RNA, 22 nt, Artificial Sequence
  LRRK2 RNA guide
cugccuccugucaucugagggu

SEQ ID NO: 83766 - RNA, 22 nt, Artificial Sequence
  LRRK2 RNA guide
cugggcaagcugccuccuguca

SEQ ID NO: 83767 - RNA, 22 nt, Artificial Sequence
  LRRK2 RNA guide
cugucaucugaggguauucugu

SEQ ID NO: 83768 - RNA, 22 nt, Artificial Sequence
  LRRK2 RNA guide
gaauacccucagaugacaggag

SEQ ID NO: 83769 - RNA, 22 nt, Artificial Sequence
  LRRK2 RNA guide
gaggguauucugugauaaauag

SEQ ID NO: 83770 - RNA, 22 nt, Artificial Sequence
  LRRK2 RNA guide
gaugugcuauuuaucacagaau

SEQ ID NO: 83771 - RNA, 22 nt, Artificial Sequence
  LRRK2 RNA guide
gcaagcugccuccugucaucug

SEQ ID NO: 83772 - RNA, 22 nt, Artificial Sequence
  LRRK2 RNA guide
gccuccugucaucugaggguau

SEQ ID NO: 83773 - RNA, 22 nt, Artificial Sequence
  LRRK2 RNA guide
gcuauuuaucacagaauacccu

SEQ ID NO: 83774 - RNA, 22 nt, Artificial Sequence
  LRRK2 RNA guide
gcugccuccugucaucugaggg

SEQ ID NO: 83775 - RNA, 22 nt, Artificial Sequence
  LRRK2 RNA guide
ggcaagcugccuccugucaucu

SEQ ID NO: 83776 - RNA, 22 nt, Artificial Sequence
  LRRK2 RNA guide
gggcaagcugccuccugucauc

SEQ ID NO: 83777 - RNA, 22 nt, Artificial Sequence
  LRRK2 RNA guide
gucaucugaggguauucuguga

SEQ ID NO: 83778 - RNA, 22 nt, Artificial Sequence
  LRRK2 RNA guide
gugcuauuuaucacagaauacc

SEQ ID NO: 83779 - RNA, 22 nt, Artificial Sequence
  LRRK2 RNA guide
uacccucagaugacaggaggca

SEQ ID NO: 83780 - RNA, 22 nt, Artificial Sequence
  LRRK2 RNA guide
uaucacagaauacccucagaug

SEQ ID NO: 83781 - RNA, 22 nt, Artificial Sequence
  LRRK2 RNA guide
uauuuaucacagaauacccuca

SEQ ID NO: 83782 - RNA, 22 nt, Artificial Sequence
  LRRK2 RNA guide
ucacagaauacccucagaugac

SEQ ID NO: 83783 - RNA, 22 nt, Artificial Sequence
  LRRK2 RNA guide
ucaucugaggguauucugugau

SEQ ID NO: 83784 - RNA, 22 nt, Artificial Sequence
  LRRK2 RNA guide
uccugucaucugaggguauucu

SEQ ID NO: 83785 - RNA, 22 nt, Artificial Sequence
  LRRK2 RNA guide
ucugaggguauucugugauaaa

SEQ ID NO: 83786 - RNA, 22 nt, Artificial Sequence
  LRRK2 RNA guide
ugaggguauucugugauaaaua

SEQ ID NO: 83787 - RNA, 22 nt, Artificial Sequence
  LRRK2 RNA guide
ugccuccugucaucugagggua

SEQ ID NO: 83788 - RNA, 22 nt, Artificial Sequence
  LRRK2 RNA guide
ugcuauuuaucacagaauaccc

SEQ ID NO: 83789 - RNA, 22 nt, Artificial Sequence
  LRRK2 RNA guide
ugggcaagcugccuccugucau

SEQ ID NO: 83790 - RNA, 22 nt, Artificial Sequence
  LRRK2 RNA guide
ugucaucugaggguauucugug

SEQ ID NO: 83791 - RNA, 22 nt, Artificial Sequence
  LRRK2 RNA guide
ugugcuauuuaucacagaauac

SEQ ID NO: 83792 - RNA, 22 nt, Artificial Sequence
  LRRK2 RNA guide
uuaucacagaauacccucagau

SEQ ID NO: 83793 - RNA, 22 nt, Artificial Sequence
  LRRK2 RNA guide
uuuaucacagaauacccucaga

SEQ ID NO: 83794 - RNA, 20 nt, Artificial Sequence
  LRRK2 RNA guide
aauaccucagaugacaggag

SEQ ID NO: 83795 - RNA, 20 nt, Artificial Sequence
  LRRK2 RNA guide
acagaauaccucagaugaca

SEQ ID NO: 83796 - RNA, 20 nt, Artificial Sequence
  LRRK2 RNA guide
accucagaugacaggaggca

SEQ ID NO: 83797 - RNA, 20 nt, Artificial Sequence
  LRRK2 RNA guide
agaauaccucagaugacagg

SEQ ID NO: 83798 - RNA, 20 nt, Artificial Sequence
  LRRK2 RNA guide
auaccucagaugacaggagg

SEQ ID NO: 83799 - RNA, 20 nt, Artificial Sequence
  LRRK2 RNA guide
aucacagaauaccucagaug

SEQ ID NO: 83800 - RNA, 20 nt, Artificial Sequence
  LRRK2 RNA guide
aucugagguauucugugaua

SEQ ID NO: 83801 - RNA, 20 nt, Artificial Sequence
  LRRK2 RNA guide
augugcuauuuaucacagaa

SEQ ID NO: 83802 - RNA, 20 nt, Artificial Sequence
  LRRK2 RNA guide
auuuaucacagaauaccuca

SEQ ID NO: 83803 - RNA, 20 nt, Artificial Sequence
  LRRK2 RNA guide
cacagaauaccucagaugac

SEQ ID NO: 83804 - RNA, 20 nt, Artificial Sequence
  LRRK2 RNA guide
cagaauaccucagaugacag

SEQ ID NO: 83805 - RNA, 20 nt, Artificial Sequence
  LRRK2 RNA guide
caucugagguauucugugau

SEQ ID NO: 83806 - RNA, 20 nt, Artificial Sequence
  LRRK2 RNA guide
ccuccugucaucugagguau

SEQ ID NO: 83807 - RNA, 20 nt, Artificial Sequence
  LRRK2 RNA guide
ccugucaucugagguauucu

SEQ ID NO: 83808 - RNA, 20 nt, Artificial Sequence
  LRRK2 RNA guide
cuauuuaucacagaauaccu

SEQ ID NO: 83809 - RNA, 20 nt, Artificial Sequence
  LRRK2 RNA guide
cuccugucaucugagguauu

SEQ ID NO: 83810 - RNA, 20 nt, Artificial Sequence
  LRRK2 RNA guide
cugagguauucugugauaaa

SEQ ID NO: 83811 - RNA, 20 nt, Artificial Sequence
  LRRK2 RNA guide
cugucaucugagguauucug

SEQ ID NO: 83812 - RNA, 20 nt, Artificial Sequence
  LRRK2 RNA guide
gaauaccucagaugacagga

SEQ ID NO: 83813 - RNA, 20 nt, Artificial Sequence
  LRRK2 RNA guide
gagguauucugugauaaaua

SEQ ID NO: 83814 - RNA, 20 nt, Artificial Sequence
  LRRK2 RNA guide
gccuccugucaucugaggua

SEQ ID NO: 83815 - RNA, 20 nt, Artificial Sequence
  LRRK2 RNA guide
gucaucugagguauucugug

SEQ ID NO: 83816 - RNA, 20 nt, Artificial Sequence
  LRRK2 RNA guide
uaccucagaugacaggaggc

SEQ ID NO: 83817 - RNA, 20 nt, Artificial Sequence
  LRRK2 RNA guide
uaucacagaauaccucagau

SEQ ID NO: 83818 - RNA, 20 nt, Artificial Sequence
  LRRK2 RNA guide
uauuuaucacagaauaccuc

SEQ ID NO: 83819 - RNA, 20 nt, Artificial Sequence
  LRRK2 RNA guide
ucacagaauaccucagauga

SEQ ID NO: 83820 - RNA, 20 nt, Artificial Sequence
  LRRK2 RNA guide
ucaucugagguauucuguga

SEQ ID NO: 83821 - RNA, 20 nt, Artificial Sequence
  LRRK2 RNA guide
uccugucaucugagguauuc

SEQ ID NO: 83822 - RNA, 20 nt, Artificial Sequence
  LRRK2 RNA guide
ucugagguauucugugauaa

SEQ ID NO: 83823 - RNA, 20 nt, Artificial Sequence
  LRRK2 RNA guide
ugagguauucugugauaaau

SEQ ID NO: 83824 - RNA, 20 nt, Artificial Sequence
  LRRK2 RNA guide
ugccuccugucaucugaggu

SEQ ID NO: 83825 - RNA, 20 nt, Artificial Sequence
  LRRK2 RNA guide
ugucaucugagguauucugu

SEQ ID NO: 83826 - RNA, 20 nt, Artificial Sequence
  LRRK2 RNA guide
uuaucacagaauaccucaga

SEQ ID NO: 83827 - RNA, 20 nt, Artificial Sequence
  LRRK2 RNA guide
uuuaucacagaauaccucag

SEQ ID NO: 83828 - RNA, 21 nt, Artificial Sequence
  LRRK2 RNA guide
aauaccucagaugacaggagg

SEQ ID NO: 83829 - RNA, 21 nt, Artificial Sequence
  LRRK2 RNA guide
acagaauaccucagaugacag

SEQ ID NO: 83830 - RNA, 21 nt, Artificial Sequence
  LRRK2 RNA guide
accucagaugacaggaggcag

SEQ ID NO: 83831 - RNA, 21 nt, Artificial Sequence
  LRRK2 RNA guide
agaauaccucagaugacagga

SEQ ID NO: 83832 - RNA, 21 nt, Artificial Sequence
  LRRK2 RNA guide
auaccucagaugacaggaggc

SEQ ID NO: 83833 - RNA, 21 nt, Artificial Sequence
  LRRK2 RNA guide
aucacagaauaccucagauga

SEQ ID NO: 83834 - RNA, 21 nt, Artificial Sequence
  LRRK2 RNA guide
aucugagguauucugugauaa

SEQ ID NO: 83835 - RNA, 21 nt, Artificial Sequence
  LRRK2 RNA guide
auuuaucacagaauaccucag

SEQ ID NO: 83836 - RNA, 21 nt, Artificial Sequence
  LRRK2 RNA guide
cacagaauaccucagaugaca

SEQ ID NO: 83837 - RNA, 21 nt, Artificial Sequence
  LRRK2 RNA guide
cagaauaccucagaugacagg

SEQ ID NO: 83838 - RNA, 21 nt, Artificial Sequence
  LRRK2 RNA guide
caucugagguauucugugaua

SEQ ID NO: 83839 - RNA, 21 nt, Artificial Sequence
  LRRK2 RNA guide
ccuccugucaucugagguauu

SEQ ID NO: 83840 - RNA, 21 nt, Artificial Sequence
  LRRK2 RNA guide
ccugucaucugagguauucug

SEQ ID NO: 83841 - RNA, 21 nt, Artificial Sequence
  LRRK2 RNA guide
cuauuuaucacagaauaccuc

SEQ ID NO: 83842 - RNA, 21 nt, Artificial Sequence
  LRRK2 RNA guide
cuccugucaucugagguauuc

SEQ ID NO: 83843 - RNA, 21 nt, Artificial Sequence
  LRRK2 RNA guide
cugagguauucugugauaaau

SEQ ID NO: 83844 - RNA, 21 nt, Artificial Sequence
  LRRK2 RNA guide
cugccuccugucaucugaggu

SEQ ID NO: 83845 - RNA, 21 nt, Artificial Sequence
  LRRK2 RNA guide
cugucaucugagguauucugu

SEQ ID NO: 83846 - RNA, 21 nt, Artificial Sequence
  LRRK2 RNA guide
gaauaccucagaugacaggag

SEQ ID NO: 83847 - RNA, 21 nt, Artificial Sequence
  LRRK2 RNA guide
gagguauucugugauaaauag

SEQ ID NO: 83848 - RNA, 21 nt, Artificial Sequence
  LRRK2 RNA guide
gaugugcuauuuaucacagaa

SEQ ID NO: 83849 - RNA, 21 nt, Artificial Sequence
  LRRK2 RNA guide
gccuccugucaucugagguau

SEQ ID NO: 83850 - RNA, 21 nt, Artificial Sequence
  LRRK2 RNA guide
gcuauuuaucacagaauaccu

SEQ ID NO: 83851 - RNA, 21 nt, Artificial Sequence
  LRRK2 RNA guide
gucaucugagguauucuguga

SEQ ID NO: 83852 - RNA, 21 nt, Artificial Sequence
  LRRK2 RNA guide
uaccucagaugacaggaggca

SEQ ID NO: 83853 - RNA, 21 nt, Artificial Sequence
  LRRK2 RNA guide
uaucacagaauaccucagaug

SEQ ID NO: 83854 - RNA, 21 nt, Artificial Sequence
  LRRK2 RNA guide
ucacagaauaccucagaugac

SEQ ID NO: 83855 - RNA, 21 nt, Artificial Sequence
  LRRK2 RNA guide
ucaucugagguauucugugau

SEQ ID NO: 83856 - RNA, 21 nt, Artificial Sequence
  LRRK2 RNA guide
uccugucaucugagguauucu

SEQ ID NO: 83857 - RNA, 21 nt, Artificial Sequence
  LRRK2 RNA guide
ucugagguauucugugauaaa

SEQ ID NO: 83858 - RNA, 21 nt, Artificial Sequence
  LRRK2 RNA guide
ugccuccugucaucugaggua

SEQ ID NO: 83859 - RNA, 21 nt, Artificial Sequence
  LRRK2 RNA guide
ugucaucugagguauucugug

SEQ ID NO: 83860 - RNA, 21 nt, Artificial Sequence
  LRRK2 RNA guide
uuaucacagaauaccucagau

SEQ ID NO: 83861 - RNA, 21 nt, Artificial Sequence
  LRRK2 RNA guide
uuuaucacagaauaccucaga

SEQ ID NO: 83862 - RNA, 22 nt, Artificial Sequence
  LRRK2 RNA guide
aauaccucagaugacaggaggc

SEQ ID NO: 83863 - RNA, 22 nt, Artificial Sequence
  LRRK2 RNA guide
acagaauaccucagaugacagg

SEQ ID NO: 83864 - RNA, 22 nt, Artificial Sequence
  LRRK2 RNA guide
accucagaugacaggaggcagc

SEQ ID NO: 83865 - RNA, 22 nt, Artificial Sequence
  LRRK2 RNA guide
agaauaccucagaugacaggag

SEQ ID NO: 83866 - RNA, 22 nt, Artificial Sequence
  LRRK2 RNA guide
agaugugcuauuuaucacagaa

SEQ ID NO: 83867 - RNA, 22 nt, Artificial Sequence
  LRRK2 RNA guide
auaccucagaugacaggaggca

SEQ ID NO: 83868 - RNA, 22 nt, Artificial Sequence
  LRRK2 RNA guide
aucacagaauaccucagaugac

SEQ ID NO: 83869 - RNA, 22 nt, Artificial Sequence
  LRRK2 RNA guide
aucugagguauucugugauaaa

SEQ ID NO: 83870 - RNA, 22 nt, Artificial Sequence
  LRRK2 RNA guide
auuuaucacagaauaccucaga

SEQ ID NO: 83871 - RNA, 22 nt, Artificial Sequence
  LRRK2 RNA guide
cacagaauaccucagaugacag

SEQ ID NO: 83872 - RNA, 22 nt, Artificial Sequence
  LRRK2 RNA guide
cagaauaccucagaugacagga

SEQ ID NO: 83873 - RNA, 22 nt, Artificial Sequence
  LRRK2 RNA guide
caucugagguauucugugauaa

SEQ ID NO: 83874 - RNA, 22 nt, Artificial Sequence
  LRRK2 RNA guide
ccuccugucaucugagguauuc

SEQ ID NO: 83875 - RNA, 22 nt, Artificial Sequence
  LRRK2 RNA guide
ccugucaucugagguauucugu

SEQ ID NO: 83876 - RNA, 22 nt, Artificial Sequence
  LRRK2 RNA guide
cuauuuaucacagaauaccuca

SEQ ID NO: 83877 - RNA, 22 nt, Artificial Sequence
  LRRK2 RNA guide
cuccugucaucugagguauucu

SEQ ID NO: 83878 - RNA, 22 nt, Artificial Sequence
  LRRK2 RNA guide
cugagguauucugugauaaaua

SEQ ID NO: 83879 - RNA, 22 nt, Artificial Sequence
  LRRK2 RNA guide
cugccuccugucaucugaggua

SEQ ID NO: 83880 - RNA, 22 nt, Artificial Sequence
  LRRK2 RNA guide
cugucaucugagguauucugug

SEQ ID NO: 83881 - RNA, 22 nt, Artificial Sequence
  LRRK2 RNA guide
gaauaccucagaugacaggagg

SEQ ID NO: 83882 - RNA, 22 nt, Artificial Sequence
  LRRK2 RNA guide
gagguauucugugauaaauagc

SEQ ID NO: 83883 - RNA, 22 nt, Artificial Sequence
  LRRK2 RNA guide
gccuccugucaucugagguauu

SEQ ID NO: 83884 - RNA, 22 nt, Artificial Sequence
  LRRK2 RNA guide
gcuauuuaucacagaauaccuc

SEQ ID NO: 83885 - RNA, 22 nt, Artificial Sequence
  LRRK2 RNA guide
gcugccuccugucaucugaggu

SEQ ID NO: 83886 - RNA, 22 nt, Artificial Sequence
  LRRK2 RNA guide
gucaucugagguauucugugau

SEQ ID NO: 83887 - RNA, 22 nt, Artificial Sequence
  LRRK2 RNA guide
uaccucagaugacaggaggcag

SEQ ID NO: 83888 - RNA, 22 nt, Artificial Sequence
  LRRK2 RNA guide
uaucacagaauaccucagauga

SEQ ID NO: 83889 - RNA, 22 nt, Artificial Sequence
  LRRK2 RNA guide
uauuuaucacagaauaccucag

SEQ ID NO: 83890 - RNA, 22 nt, Artificial Sequence
  LRRK2 RNA guide
ucacagaauaccucagaugaca

SEQ ID NO: 83891 - RNA, 22 nt, Artificial Sequence
  LRRK2 RNA guide
ucaucugagguauucugugaua

SEQ ID NO: 83892 - RNA, 22 nt, Artificial Sequence
  LRRK2 RNA guide
uccugucaucugagguauucug

SEQ ID NO: 83893 - RNA, 22 nt, Artificial Sequence
  LRRK2 RNA guide
ucugagguauucugugauaaau

SEQ ID NO: 83894 - RNA, 22 nt, Artificial Sequence
  LRRK2 RNA guide
ugagguauucugugauaaauag

SEQ ID NO: 83895 - RNA, 22 nt, Artificial Sequence
  LRRK2 RNA guide
ugccuccugucaucugagguau

SEQ ID NO: 83896 - RNA, 22 nt, Artificial Sequence
  LRRK2 RNA guide
ugcuauuuaucacagaauaccu

SEQ ID NO: 83897 - RNA, 22 nt, Artificial Sequence
  LRRK2 RNA guide
ugucaucugagguauucuguga

SEQ ID NO: 83898 - RNA, 22 nt, Artificial Sequence
  LRRK2 RNA guide
uuaucacagaauaccucagaug

SEQ ID NO: 83899 - RNA, 22 nt, Artificial Sequence
  LRRK2 RNA guide
uuuaucacagaauaccucagau

SEQ ID NO: 83900 - RNA, 20 nt, Artificial Sequence
  LRRK2 RNA guide
aaauagcacaucucugaacu

SEQ ID NO: 83901 - RNA, 20 nt, Artificial Sequence
  LRRK2 RNA guide
aacuauaguagccaacacuc

SEQ ID NO: 83902 - RNA, 20 nt, Artificial Sequence
  LRRK2 RNA guide
aauagcacaucucugaacua

SEQ ID NO: 83903 - RNA, 20 nt, Artificial Sequence
  LRRK2 RNA guide
acaucucugaacuauaguag

SEQ ID NO: 83904 - RNA, 20 nt, Artificial Sequence
  LRRK2 RNA guide
acccugaguguuggcuacua

SEQ ID NO: 83905 - RNA, 20 nt, Artificial Sequence
  LRRK2 RNA guide
acuauaguagccaacacuca

SEQ ID NO: 83906 - RNA, 20 nt, Artificial Sequence
  LRRK2 RNA guide
acuauaguucagagaugugc

SEQ ID NO: 83907 - RNA, 20 nt, Artificial Sequence
  LRRK2 RNA guide
agcacaucucugaacuauag

SEQ ID NO: 83908 - RNA, 20 nt, Artificial Sequence
  LRRK2 RNA guide
agcuacccugaguguuggcu

SEQ ID NO: 83909 - RNA, 20 nt, Artificial Sequence
  LRRK2 RNA guide
aguguuggcuacuauaguuc

SEQ ID NO: 83910 - RNA, 20 nt, Artificial Sequence
  LRRK2 RNA guide
auaaauagcacaucucugaa

SEQ ID NO: 83911 - RNA, 20 nt, Artificial Sequence
  LRRK2 RNA guide
auagcacaucucugaacuau

SEQ ID NO: 83912 - RNA, 20 nt, Artificial Sequence
  LRRK2 RNA guide
auaguagccaacacucaggg

SEQ ID NO: 83913 - RNA, 20 nt, Artificial Sequence
  LRRK2 RNA guide
aucucugaacuauaguagcc

SEQ ID NO: 83914 - RNA, 20 nt, Artificial Sequence
  LRRK2 RNA guide
cacaucucugaacuauagua

SEQ ID NO: 83915 - RNA, 20 nt, Artificial Sequence
  LRRK2 RNA guide
cagcuacccugaguguuggc

SEQ ID NO: 83916 - RNA, 20 nt, Artificial Sequence
  LRRK2 RNA guide
caucucugaacuauaguagc

SEQ ID NO: 83917 - RNA, 20 nt, Artificial Sequence
  LRRK2 RNA guide
cccugaguguuggcuacuau

SEQ ID NO: 83918 - RNA, 20 nt, Artificial Sequence
  LRRK2 RNA guide
ccugaguguuggcuacuaua

SEQ ID NO: 83919 - RNA, 20 nt, Artificial Sequence
  LRRK2 RNA guide
cuacccugaguguuggcuac

SEQ ID NO: 83920 - RNA, 20 nt, Artificial Sequence
  LRRK2 RNA guide
cuacuauaguucagagaugu

SEQ ID NO: 83921 - RNA, 20 nt, Artificial Sequence
  LRRK2 RNA guide
cuauaguagccaacacucag

SEQ ID NO: 83922 - RNA, 20 nt, Artificial Sequence
  LRRK2 RNA guide
cuauaguucagagaugugcu

SEQ ID NO: 83923 - RNA, 20 nt, Artificial Sequence
  LRRK2 RNA guide
cucugaacuauaguagccaa

SEQ ID NO: 83924 - RNA, 20 nt, Artificial Sequence
  LRRK2 RNA guide
cugaacuauaguagccaaca

SEQ ID NO: 83925 - RNA, 20 nt, Artificial Sequence
  LRRK2 RNA guide
cugaguguuggcuacuauag

SEQ ID NO: 83926 - RNA, 20 nt, Artificial Sequence
  LRRK2 RNA guide
gaacuauaguagccaacacu

SEQ ID NO: 83927 - RNA, 20 nt, Artificial Sequence
  LRRK2 RNA guide
gaguguuggcuacuauaguu

SEQ ID NO: 83928 - RNA, 20 nt, Artificial Sequence
  LRRK2 RNA guide
gauaaauagcacaucucuga

SEQ ID NO: 83929 - RNA, 20 nt, Artificial Sequence
  LRRK2 RNA guide
gcacaucucugaacuauagu

SEQ ID NO: 83930 - RNA, 20 nt, Artificial Sequence
  LRRK2 RNA guide
gcuacccugaguguuggcua

SEQ ID NO: 83931 - RNA, 20 nt, Artificial Sequence
  LRRK2 RNA guide
gcuacuauaguucagagaug

SEQ ID NO: 83932 - RNA, 20 nt, Artificial Sequence
  LRRK2 RNA guide
ggcuacuauaguucagagau

SEQ ID NO: 83933 - RNA, 20 nt, Artificial Sequence
  LRRK2 RNA guide
guguuggcuacuauaguuca

SEQ ID NO: 83934 - RNA, 20 nt, Artificial Sequence
  LRRK2 RNA guide
guuggcuacuauaguucaga

SEQ ID NO: 83935 - RNA, 20 nt, Artificial Sequence
  LRRK2 RNA guide
uaaauagcacaucucugaac

SEQ ID NO: 83936 - RNA, 20 nt, Artificial Sequence
  LRRK2 RNA guide
uacccugaguguuggcuacu

SEQ ID NO: 83937 - RNA, 20 nt, Artificial Sequence
  LRRK2 RNA guide
uacuauaguucagagaugug

SEQ ID NO: 83938 - RNA, 20 nt, Artificial Sequence
  LRRK2 RNA guide
uagcacaucucugaacuaua

SEQ ID NO: 83939 - RNA, 20 nt, Artificial Sequence
  LRRK2 RNA guide
uauaguagccaacacucagg

SEQ ID NO: 83940 - RNA, 20 nt, Artificial Sequence
  LRRK2 RNA guide
uauaguucagagaugugcua

SEQ ID NO: 83941 - RNA, 20 nt, Artificial Sequence
  LRRK2 RNA guide
ucucugaacuauaguagcca

SEQ ID NO: 83942 - RNA, 20 nt, Artificial Sequence
  LRRK2 RNA guide
ucugaacuauaguagccaac

SEQ ID NO: 83943 - RNA, 20 nt, Artificial Sequence
  LRRK2 RNA guide
ugaacuauaguagccaacac

SEQ ID NO: 83944 - RNA, 20 nt, Artificial Sequence
  LRRK2 RNA guide
ugaguguuggcuacuauagu

SEQ ID NO: 83945 - RNA, 20 nt, Artificial Sequence
  LRRK2 RNA guide
uggcuacuauaguucagaga

SEQ ID NO: 83946 - RNA, 20 nt, Artificial Sequence
  LRRK2 RNA guide
uguuggcuacuauaguucag

SEQ ID NO: 83947 - RNA, 20 nt, Artificial Sequence
  LRRK2 RNA guide
uuggcuacuauaguucagag

SEQ ID NO: 83948 - RNA, 21 nt, Artificial Sequence
  LRRK2 RNA guide
aaauagcacaucucugaacua

SEQ ID NO: 83949 - RNA, 21 nt, Artificial Sequence
  LRRK2 RNA guide
aacuauaguagccaacacuca

SEQ ID NO: 83950 - RNA, 21 nt, Artificial Sequence
  LRRK2 RNA guide
aauagcacaucucugaacuau

SEQ ID NO: 83951 - RNA, 21 nt, Artificial Sequence
  LRRK2 RNA guide
acaucucugaacuauaguagc

SEQ ID NO: 83952 - RNA, 21 nt, Artificial Sequence
  LRRK2 RNA guide
acccugaguguuggcuacuau

SEQ ID NO: 83953 - RNA, 21 nt, Artificial Sequence
  LRRK2 RNA guide
acuauaguagccaacacucag

SEQ ID NO: 83954 - RNA, 21 nt, Artificial Sequence
  LRRK2 RNA guide
acuauaguucagagaugugcu

SEQ ID NO: 83955 - RNA, 21 nt, Artificial Sequence
  LRRK2 RNA guide
agcacaucucugaacuauagu

SEQ ID NO: 83956 - RNA, 21 nt, Artificial Sequence
  LRRK2 RNA guide
agcuacccugaguguuggcua

SEQ ID NO: 83957 - RNA, 21 nt, Artificial Sequence
  LRRK2 RNA guide
aguguuggcuacuauaguuca

SEQ ID NO: 83958 - RNA, 21 nt, Artificial Sequence
  LRRK2 RNA guide
auaaauagcacaucucugaac

SEQ ID NO: 83959 - RNA, 21 nt, Artificial Sequence
  LRRK2 RNA guide
auagcacaucucugaacuaua

SEQ ID NO: 83960 - RNA, 21 nt, Artificial Sequence
  LRRK2 RNA guide
auaguagccaacacucagggu

SEQ ID NO: 83961 - RNA, 21 nt, Artificial Sequence
  LRRK2 RNA guide
aucucugaacuauaguagcca

SEQ ID NO: 83962 - RNA, 21 nt, Artificial Sequence
  LRRK2 RNA guide
cacaucucugaacuauaguag

SEQ ID NO: 83963 - RNA, 21 nt, Artificial Sequence
  LRRK2 RNA guide
cagcuacccugaguguuggcu

SEQ ID NO: 83964 - RNA, 21 nt, Artificial Sequence
  LRRK2 RNA guide
caucucugaacuauaguagcc

SEQ ID NO: 83965 - RNA, 21 nt, Artificial Sequence
  LRRK2 RNA guide
ccagcuacccugaguguuggc

SEQ ID NO: 83966 - RNA, 21 nt, Artificial Sequence
  LRRK2 RNA guide
cccugaguguuggcuacuaua

SEQ ID NO: 83967 - RNA, 21 nt, Artificial Sequence
  LRRK2 RNA guide
ccugaguguuggcuacuauag

SEQ ID NO: 83968 - RNA, 21 nt, Artificial Sequence
  LRRK2 RNA guide
cuacccugaguguuggcuacu

SEQ ID NO: 83969 - RNA, 21 nt, Artificial Sequence
  LRRK2 RNA guide
cuacuauaguucagagaugug

SEQ ID NO: 83970 - RNA, 21 nt, Artificial Sequence
  LRRK2 RNA guide
cuauaguagccaacacucagg

SEQ ID NO: 83971 - RNA, 21 nt, Artificial Sequence
  LRRK2 RNA guide
cuauaguucagagaugugcua

SEQ ID NO: 83972 - RNA, 21 nt, Artificial Sequence
  LRRK2 RNA guide
cucugaacuauaguagccaac

SEQ ID NO: 83973 - RNA, 21 nt, Artificial Sequence
  LRRK2 RNA guide
cugaacuauaguagccaacac

SEQ ID NO: 83974 - RNA, 21 nt, Artificial Sequence
  LRRK2 RNA guide
cugaguguuggcuacuauagu

SEQ ID NO: 83975 - RNA, 21 nt, Artificial Sequence
  LRRK2 RNA guide
gaacuauaguagccaacacuc

SEQ ID NO: 83976 - RNA, 21 nt, Artificial Sequence
  LRRK2 RNA guide
gaguguuggcuacuauaguuc

SEQ ID NO: 83977 - RNA, 21 nt, Artificial Sequence
  LRRK2 RNA guide
gauaaauagcacaucucugaa

SEQ ID NO: 83978 - RNA, 21 nt, Artificial Sequence
  LRRK2 RNA guide
gcacaucucugaacuauagua

SEQ ID NO: 83979 - RNA, 21 nt, Artificial Sequence
  LRRK2 RNA guide
gcuacccugaguguuggcuac

SEQ ID NO: 83980 - RNA, 21 nt, Artificial Sequence
  LRRK2 RNA guide
gcuacuauaguucagagaugu

SEQ ID NO: 83981 - RNA, 21 nt, Artificial Sequence
  LRRK2 RNA guide
ggcuacuauaguucagagaug

SEQ ID NO: 83982 - RNA, 21 nt, Artificial Sequence
  LRRK2 RNA guide
guguuggcuacuauaguucag

SEQ ID NO: 83983 - RNA, 21 nt, Artificial Sequence
  LRRK2 RNA guide
guuggcuacuauaguucagag

SEQ ID NO: 83984 - RNA, 21 nt, Artificial Sequence
  LRRK2 RNA guide
uaaauagcacaucucugaacu

SEQ ID NO: 83985 - RNA, 21 nt, Artificial Sequence
  LRRK2 RNA guide
uacccugaguguuggcuacua

SEQ ID NO: 83986 - RNA, 21 nt, Artificial Sequence
  LRRK2 RNA guide
uacuauaguucagagaugugc

SEQ ID NO: 83987 - RNA, 21 nt, Artificial Sequence
  LRRK2 RNA guide
uagcacaucucugaacuauag

SEQ ID NO: 83988 - RNA, 21 nt, Artificial Sequence
  LRRK2 RNA guide
uauaguagccaacacucaggg

SEQ ID NO: 83989 - RNA, 21 nt, Artificial Sequence
  LRRK2 RNA guide
uauaguucagagaugugcuau

SEQ ID NO: 83990 - RNA, 21 nt, Artificial Sequence
  LRRK2 RNA guide
ucucugaacuauaguagccaa

SEQ ID NO: 83991 - RNA, 21 nt, Artificial Sequence
  LRRK2 RNA guide
ucugaacuauaguagccaaca

SEQ ID NO: 83992 - RNA, 21 nt, Artificial Sequence
  LRRK2 RNA guide
ugaacuauaguagccaacacu

SEQ ID NO: 83993 - RNA, 21 nt, Artificial Sequence
  LRRK2 RNA guide
ugaguguuggcuacuauaguu

SEQ ID NO: 83994 - RNA, 21 nt, Artificial Sequence
  LRRK2 RNA guide
ugauaaauagcacaucucuga

SEQ ID NO: 83995 - RNA, 21 nt, Artificial Sequence
  LRRK2 RNA guide
uggcuacuauaguucagagau

SEQ ID NO: 83996 - RNA, 21 nt, Artificial Sequence
  LRRK2 RNA guide
uguuggcuacuauaguucaga

SEQ ID NO: 83997 - RNA, 21 nt, Artificial Sequence
  LRRK2 RNA guide
uuggcuacuauaguucagaga

SEQ ID NO: 83998 - RNA, 22 nt, Artificial Sequence
  LRRK2 RNA guide
aaauagcacaucucugaacuau

SEQ ID NO: 83999 - RNA, 22 nt, Artificial Sequence
  LRRK2 RNA guide
aacuauaguagccaacacucag

SEQ ID NO: 84000 - RNA, 22 nt, Artificial Sequence
  LRRK2 RNA guide
aauagcacaucucugaacuaua

SEQ ID NO: 84001 - RNA, 22 nt, Artificial Sequence
  LRRK2 RNA guide
acaucucugaacuauaguagcc

SEQ ID NO: 84002 - RNA, 22 nt, Artificial Sequence
  LRRK2 RNA guide
acccugaguguuggcuacuaua

SEQ ID NO: 84003 - RNA, 22 nt, Artificial Sequence
  LRRK2 RNA guide
acuauaguagccaacacucagg

SEQ ID NO: 84004 - RNA, 22 nt, Artificial Sequence
  LRRK2 RNA guide
acuauaguucagagaugugcua

SEQ ID NO: 84005 - RNA, 22 nt, Artificial Sequence
  LRRK2 RNA guide
agcacaucucugaacuauagua

SEQ ID NO: 84006 - RNA, 22 nt, Artificial Sequence
  LRRK2 RNA guide
agcuacccugaguguuggcuac

SEQ ID NO: 84007 - RNA, 22 nt, Artificial Sequence
  LRRK2 RNA guide
aguguuggcuacuauaguucag

SEQ ID NO: 84008 - RNA, 22 nt, Artificial Sequence
  LRRK2 RNA guide
auaaauagcacaucucugaacu

SEQ ID NO: 84009 - RNA, 22 nt, Artificial Sequence
  LRRK2 RNA guide
auagcacaucucugaacuauag

SEQ ID NO: 84010 - RNA, 22 nt, Artificial Sequence
  LRRK2 RNA guide
auaguagccaacacucagggua

SEQ ID NO: 84011 - RNA, 22 nt, Artificial Sequence
  LRRK2 RNA guide
aucucugaacuauaguagccaa

SEQ ID NO: 84012 - RNA, 22 nt, Artificial Sequence
  LRRK2 RNA guide
cacaucucugaacuauaguagc

SEQ ID NO: 84013 - RNA, 22 nt, Artificial Sequence
  LRRK2 RNA guide
cagcuacccugaguguuggcua

SEQ ID NO: 84014 - RNA, 22 nt, Artificial Sequence
  LRRK2 RNA guide
caucucugaacuauaguagcca

SEQ ID NO: 84015 - RNA, 22 nt, Artificial Sequence
  LRRK2 RNA guide
ccagcuacccugaguguuggcu

SEQ ID NO: 84016 - RNA, 22 nt, Artificial Sequence
  LRRK2 RNA guide
cccagcuacccugaguguuggc

SEQ ID NO: 84017 - RNA, 22 nt, Artificial Sequence
  LRRK2 RNA guide
cccugaguguuggcuacuauag

SEQ ID NO: 84018 - RNA, 22 nt, Artificial Sequence
  LRRK2 RNA guide
ccugaguguuggcuacuauagu

SEQ ID NO: 84019 - RNA, 22 nt, Artificial Sequence
  LRRK2 RNA guide
cuacccugaguguuggcuacua

SEQ ID NO: 84020 - RNA, 22 nt, Artificial Sequence
  LRRK2 RNA guide
cuacuauaguucagagaugugc

SEQ ID NO: 84021 - RNA, 22 nt, Artificial Sequence
  LRRK2 RNA guide
cuauaguagccaacacucaggg

SEQ ID NO: 84022 - RNA, 22 nt, Artificial Sequence
  LRRK2 RNA guide
cuauaguucagagaugugcuau

SEQ ID NO: 84023 - RNA, 22 nt, Artificial Sequence
  LRRK2 RNA guide
cucugaacuauaguagccaaca

SEQ ID NO: 84024 - RNA, 22 nt, Artificial Sequence
  LRRK2 RNA guide
cugaacuauaguagccaacacu

SEQ ID NO: 84025 - RNA, 22 nt, Artificial Sequence
  LRRK2 RNA guide
cugaguguuggcuacuauaguu

SEQ ID NO: 84026 - RNA, 22 nt, Artificial Sequence
  LRRK2 RNA guide
gaacuauaguagccaacacuca

SEQ ID NO: 84027 - RNA, 22 nt, Artificial Sequence
  LRRK2 RNA guide
gaguguuggcuacuauaguuca

SEQ ID NO: 84028 - RNA, 22 nt, Artificial Sequence
  LRRK2 RNA guide
gauaaauagcacaucucugaac

SEQ ID NO: 84029 - RNA, 22 nt, Artificial Sequence
  LRRK2 RNA guide
gcacaucucugaacuauaguag

SEQ ID NO: 84030 - RNA, 22 nt, Artificial Sequence
  LRRK2 RNA guide
gcuacccugaguguuggcuacu

SEQ ID NO: 84031 - RNA, 22 nt, Artificial Sequence
  LRRK2 RNA guide
gcuacuauaguucagagaugug

SEQ ID NO: 84032 - RNA, 22 nt, Artificial Sequence
  LRRK2 RNA guide
ggcuacuauaguucagagaugu

SEQ ID NO: 84033 - RNA, 22 nt, Artificial Sequence
  LRRK2 RNA guide
gugauaaauagcacaucucuga

SEQ ID NO: 84034 - RNA, 22 nt, Artificial Sequence
  LRRK2 RNA guide
guguuggcuacuauaguucaga

SEQ ID NO: 84035 - RNA, 22 nt, Artificial Sequence
  LRRK2 RNA guide
guuggcuacuauaguucagaga

SEQ ID NO: 84036 - RNA, 22 nt, Artificial Sequence
  LRRK2 RNA guide
uaaauagcacaucucugaacua

SEQ ID NO: 84037 - RNA, 22 nt, Artificial Sequence
  LRRK2 RNA guide
uacccugaguguuggcuacuau

SEQ ID NO: 84038 - RNA, 22 nt, Artificial Sequence
  LRRK2 RNA guide
uacuauaguucagagaugugcu

SEQ ID NO: 84039 - RNA, 22 nt, Artificial Sequence
  LRRK2 RNA guide
uagcacaucucugaacuauagu

SEQ ID NO: 84040 - RNA, 22 nt, Artificial Sequence
  LRRK2 RNA guide
uauaguagccaacacucagggu

SEQ ID NO: 84041 - RNA, 22 nt, Artificial Sequence
  LRRK2 RNA guide
uauaguucagagaugugcuauu

SEQ ID NO: 84042 - RNA, 22 nt, Artificial Sequence
  LRRK2 RNA guide
ucucugaacuauaguagccaac

SEQ ID NO: 84043 - RNA, 22 nt, Artificial Sequence
  LRRK2 RNA guide
ucugaacuauaguagccaacac

SEQ ID NO: 84044 - RNA, 22 nt, Artificial Sequence
  LRRK2 RNA guide
ugaacuauaguagccaacacuc

SEQ ID NO: 84045 - RNA, 22 nt, Artificial Sequence
  LRRK2 RNA guide
ugaguguuggcuacuauaguuc

SEQ ID NO: 84046 - RNA, 22 nt, Artificial Sequence
  LRRK2 RNA guide
ugauaaauagcacaucucugaa

SEQ ID NO: 84047 - RNA, 22 nt, Artificial Sequence
  LRRK2 RNA guide
uggcuacuauaguucagagaug

SEQ ID NO: 84048 - RNA, 22 nt, Artificial Sequence
  LRRK2 RNA guide
uguuggcuacuauaguucagag

SEQ ID NO: 84049 - RNA, 22 nt, Artificial Sequence
  LRRK2 RNA guide
uuggcuacuauaguucagagau

SEQ ID NO: 84050 - RNA, 20 nt, Artificial Sequence
  LRRK2 RNA guide
aacuacaguagccaacacuc

SEQ ID NO: 84051 - RNA, 20 nt, Artificial Sequence
  LRRK2 RNA guide
acaguagccaacacucaggg

SEQ ID NO: 84052 - RNA, 20 nt, Artificial Sequence
  LRRK2 RNA guide
acaucucugaacuacaguag

SEQ ID NO: 84053 - RNA, 20 nt, Artificial Sequence
  LRRK2 RNA guide
acccugaguguuggcuacug

SEQ ID NO: 84054 - RNA, 20 nt, Artificial Sequence
  LRRK2 RNA guide
acuacaguagccaacacuca

SEQ ID NO: 84055 - RNA, 20 nt, Artificial Sequence
  LRRK2 RNA guide
acuguaguucagagaugugc

SEQ ID NO: 84056 - RNA, 20 nt, Artificial Sequence
  LRRK2 RNA guide
agcacaucucugaacuacag

SEQ ID NO: 84057 - RNA, 20 nt, Artificial Sequence
  LRRK2 RNA guide
aguguuggcuacuguaguuc

SEQ ID NO: 84058 - RNA, 20 nt, Artificial Sequence
  LRRK2 RNA guide
auagcacaucucugaacuac

SEQ ID NO: 84059 - RNA, 20 nt, Artificial Sequence
  LRRK2 RNA guide
aucucugaacuacaguagcc

SEQ ID NO: 84060 - RNA, 20 nt, Artificial Sequence
  LRRK2 RNA guide
cacaucucugaacuacagua

SEQ ID NO: 84061 - RNA, 20 nt, Artificial Sequence
  LRRK2 RNA guide
caucucugaacuacaguagc

SEQ ID NO: 84062 - RNA, 20 nt, Artificial Sequence
  LRRK2 RNA guide
cccugaguguuggcuacugu

SEQ ID NO: 84063 - RNA, 20 nt, Artificial Sequence
  LRRK2 RNA guide
ccugaguguuggcuacugua

SEQ ID NO: 84064 - RNA, 20 nt, Artificial Sequence
  LRRK2 RNA guide
cuacaguagccaacacucag

SEQ ID NO: 84065 - RNA, 20 nt, Artificial Sequence
  LRRK2 RNA guide
cuacuguaguucagagaugu

SEQ ID NO: 84066 - RNA, 20 nt, Artificial Sequence
  LRRK2 RNA guide
cucugaacuacaguagccaa

SEQ ID NO: 84067 - RNA, 20 nt, Artificial Sequence
  LRRK2 RNA guide
cugaacuacaguagccaaca

SEQ ID NO: 84068 - RNA, 20 nt, Artificial Sequence
  LRRK2 RNA guide
cugaguguuggcuacuguag

SEQ ID NO: 84069 - RNA, 20 nt, Artificial Sequence
  LRRK2 RNA guide
cuguaguucagagaugugcu

SEQ ID NO: 84070 - RNA, 20 nt, Artificial Sequence
  LRRK2 RNA guide
gaacuacaguagccaacacu

SEQ ID NO: 84071 - RNA, 20 nt, Artificial Sequence
  LRRK2 RNA guide
gaguguuggcuacuguaguu

SEQ ID NO: 84072 - RNA, 20 nt, Artificial Sequence
  LRRK2 RNA guide
gcacaucucugaacuacagu

SEQ ID NO: 84073 - RNA, 20 nt, Artificial Sequence
  LRRK2 RNA guide
gcuacuguaguucagagaug

SEQ ID NO: 84074 - RNA, 20 nt, Artificial Sequence
  LRRK2 RNA guide
ggcuacuguaguucagagau

SEQ ID NO: 84075 - RNA, 20 nt, Artificial Sequence
  LRRK2 RNA guide
guguuggcuacuguaguuca

SEQ ID NO: 84076 - RNA, 20 nt, Artificial Sequence
  LRRK2 RNA guide
guuggcuacuguaguucaga

SEQ ID NO: 84077 - RNA, 20 nt, Artificial Sequence
  LRRK2 RNA guide
uacaguagccaacacucagg

SEQ ID NO: 84078 - RNA, 20 nt, Artificial Sequence
  LRRK2 RNA guide
uacuguaguucagagaugug

SEQ ID NO: 84079 - RNA, 20 nt, Artificial Sequence
  LRRK2 RNA guide
uagcacaucucugaacuaca

SEQ ID NO: 84080 - RNA, 20 nt, Artificial Sequence
  LRRK2 RNA guide
ucucugaacuacaguagcca

SEQ ID NO: 84081 - RNA, 20 nt, Artificial Sequence
  LRRK2 RNA guide
ucugaacuacaguagccaac

SEQ ID NO: 84082 - RNA, 20 nt, Artificial Sequence
  LRRK2 RNA guide
ugaacuacaguagccaacac

SEQ ID NO: 84083 - RNA, 20 nt, Artificial Sequence
  LRRK2 RNA guide
ugaguguuggcuacuguagu

SEQ ID NO: 84084 - RNA, 20 nt, Artificial Sequence
  LRRK2 RNA guide
uggcuacuguaguucagaga

SEQ ID NO: 84085 - RNA, 20 nt, Artificial Sequence
  LRRK2 RNA guide
uguaguucagagaugugcua

SEQ ID NO: 84086 - RNA, 20 nt, Artificial Sequence
  LRRK2 RNA guide
uguuggcuacuguaguucag

SEQ ID NO: 84087 - RNA, 20 nt, Artificial Sequence
  LRRK2 RNA guide
uuggcuacuguaguucagag

SEQ ID NO: 84088 - RNA, 21 nt, Artificial Sequence
  LRRK2 RNA guide
aacuacaguagccaacacuca

SEQ ID NO: 84089 - RNA, 21 nt, Artificial Sequence
  LRRK2 RNA guide
aauagcacaucucugaacuac

SEQ ID NO: 84090 - RNA, 21 nt, Artificial Sequence
  LRRK2 RNA guide
acaguagccaacacucagggu

SEQ ID NO: 84091 - RNA, 21 nt, Artificial Sequence
  LRRK2 RNA guide
acaucucugaacuacaguagc

SEQ ID NO: 84092 - RNA, 21 nt, Artificial Sequence
  LRRK2 RNA guide
acccugaguguuggcuacugu

SEQ ID NO: 84093 - RNA, 21 nt, Artificial Sequence
  LRRK2 RNA guide
acuacaguagccaacacucag

SEQ ID NO: 84094 - RNA, 21 nt, Artificial Sequence
  LRRK2 RNA guide
acuguaguucagagaugugcu

SEQ ID NO: 84095 - RNA, 21 nt, Artificial Sequence
  LRRK2 RNA guide
agcacaucucugaacuacagu

SEQ ID NO: 84096 - RNA, 21 nt, Artificial Sequence
  LRRK2 RNA guide
aguguuggcuacuguaguuca

SEQ ID NO: 84097 - RNA, 21 nt, Artificial Sequence
  LRRK2 RNA guide
auagcacaucucugaacuaca

SEQ ID NO: 84098 - RNA, 21 nt, Artificial Sequence
  LRRK2 RNA guide
aucucugaacuacaguagcca

SEQ ID NO: 84099 - RNA, 21 nt, Artificial Sequence
  LRRK2 RNA guide
cacaucucugaacuacaguag

SEQ ID NO: 84100 - RNA, 21 nt, Artificial Sequence
  LRRK2 RNA guide
caucucugaacuacaguagcc

SEQ ID NO: 84101 - RNA, 21 nt, Artificial Sequence
  LRRK2 RNA guide
cccugaguguuggcuacugua

SEQ ID NO: 84102 - RNA, 21 nt, Artificial Sequence
  LRRK2 RNA guide
ccugaguguuggcuacuguag

SEQ ID NO: 84103 - RNA, 21 nt, Artificial Sequence
  LRRK2 RNA guide
cuacaguagccaacacucagg

SEQ ID NO: 84104 - RNA, 21 nt, Artificial Sequence
  LRRK2 RNA guide
cuacuguaguucagagaugug

SEQ ID NO: 84105 - RNA, 21 nt, Artificial Sequence
  LRRK2 RNA guide
cucugaacuacaguagccaac

SEQ ID NO: 84106 - RNA, 21 nt, Artificial Sequence
  LRRK2 RNA guide
cugaacuacaguagccaacac

SEQ ID NO: 84107 - RNA, 21 nt, Artificial Sequence
  LRRK2 RNA guide
cugaguguuggcuacuguagu

SEQ ID NO: 84108 - RNA, 21 nt, Artificial Sequence
  LRRK2 RNA guide
cuguaguucagagaugugcua

SEQ ID NO: 84109 - RNA, 21 nt, Artificial Sequence
  LRRK2 RNA guide
gaacuacaguagccaacacuc

SEQ ID NO: 84110 - RNA, 21 nt, Artificial Sequence
  LRRK2 RNA guide
gaguguuggcuacuguaguuc

SEQ ID NO: 84111 - RNA, 21 nt, Artificial Sequence
  LRRK2 RNA guide
gcacaucucugaacuacagua

SEQ ID NO: 84112 - RNA, 21 nt, Artificial Sequence
  LRRK2 RNA guide
gcuacuguaguucagagaugu

SEQ ID NO: 84113 - RNA, 21 nt, Artificial Sequence
  LRRK2 RNA guide
ggcuacuguaguucagagaug

SEQ ID NO: 84114 - RNA, 21 nt, Artificial Sequence
  LRRK2 RNA guide
guguuggcuacuguaguucag

SEQ ID NO: 84115 - RNA, 21 nt, Artificial Sequence
  LRRK2 RNA guide
guuggcuacuguaguucagag

SEQ ID NO: 84116 - RNA, 21 nt, Artificial Sequence
  LRRK2 RNA guide
uacaguagccaacacucaggg

SEQ ID NO: 84117 - RNA, 21 nt, Artificial Sequence
  LRRK2 RNA guide
uacccugaguguuggcuacug

SEQ ID NO: 84118 - RNA, 21 nt, Artificial Sequence
  LRRK2 RNA guide
uacuguaguucagagaugugc

SEQ ID NO: 84119 - RNA, 21 nt, Artificial Sequence
  LRRK2 RNA guide
uagcacaucucugaacuacag

SEQ ID NO: 84120 - RNA, 21 nt, Artificial Sequence
  LRRK2 RNA guide
ucucugaacuacaguagccaa

SEQ ID NO: 84121 - RNA, 21 nt, Artificial Sequence
  LRRK2 RNA guide
ucugaacuacaguagccaaca

SEQ ID NO: 84122 - RNA, 21 nt, Artificial Sequence
  LRRK2 RNA guide
ugaacuacaguagccaacacu

SEQ ID NO: 84123 - RNA, 21 nt, Artificial Sequence
  LRRK2 RNA guide
ugaguguuggcuacuguaguu

SEQ ID NO: 84124 - RNA, 21 nt, Artificial Sequence
  LRRK2 RNA guide
uggcuacuguaguucagagau

SEQ ID NO: 84125 - RNA, 21 nt, Artificial Sequence
  LRRK2 RNA guide
uguaguucagagaugugcuau

SEQ ID NO: 84126 - RNA, 21 nt, Artificial Sequence
  LRRK2 RNA guide
uguuggcuacuguaguucaga

SEQ ID NO: 84127 - RNA, 21 nt, Artificial Sequence
  LRRK2 RNA guide
uuggcuacuguaguucagaga

SEQ ID NO: 84128 - RNA, 22 nt, Artificial Sequence
  LRRK2 RNA guide
aaauagcacaucucugaacuac

SEQ ID NO: 84129 - RNA, 22 nt, Artificial Sequence
  LRRK2 RNA guide
aacuacaguagccaacacucag

SEQ ID NO: 84130 - RNA, 22 nt, Artificial Sequence
  LRRK2 RNA guide
aauagcacaucucugaacuaca

SEQ ID NO: 84131 - RNA, 22 nt, Artificial Sequence
  LRRK2 RNA guide
acaguagccaacacucagggua

SEQ ID NO: 84132 - RNA, 22 nt, Artificial Sequence
  LRRK2 RNA guide
acaucucugaacuacaguagcc

SEQ ID NO: 84133 - RNA, 22 nt, Artificial Sequence
  LRRK2 RNA guide
acccugaguguuggcuacugua

SEQ ID NO: 84134 - RNA, 22 nt, Artificial Sequence
  LRRK2 RNA guide
acuacaguagccaacacucagg

SEQ ID NO: 84135 - RNA, 22 nt, Artificial Sequence
  LRRK2 RNA guide
acuguaguucagagaugugcua

SEQ ID NO: 84136 - RNA, 22 nt, Artificial Sequence
  LRRK2 RNA guide
agcacaucucugaacuacagua

SEQ ID NO: 84137 - RNA, 22 nt, Artificial Sequence
  LRRK2 RNA guide
aguguuggcuacuguaguucag

SEQ ID NO: 84138 - RNA, 22 nt, Artificial Sequence
  LRRK2 RNA guide
auagcacaucucugaacuacag

SEQ ID NO: 84139 - RNA, 22 nt, Artificial Sequence
  LRRK2 RNA guide
aucucugaacuacaguagccaa

SEQ ID NO: 84140 - RNA, 22 nt, Artificial Sequence
  LRRK2 RNA guide
cacaucucugaacuacaguagc

SEQ ID NO: 84141 - RNA, 22 nt, Artificial Sequence
  LRRK2 RNA guide
caucucugaacuacaguagcca

SEQ ID NO: 84142 - RNA, 22 nt, Artificial Sequence
  LRRK2 RNA guide
cccugaguguuggcuacuguag

SEQ ID NO: 84143 - RNA, 22 nt, Artificial Sequence
  LRRK2 RNA guide
ccugaguguuggcuacuguagu

SEQ ID NO: 84144 - RNA, 22 nt, Artificial Sequence
  LRRK2 RNA guide
cuacaguagccaacacucaggg

SEQ ID NO: 84145 - RNA, 22 nt, Artificial Sequence
  LRRK2 RNA guide
cuacccugaguguuggcuacug

SEQ ID NO: 84146 - RNA, 22 nt, Artificial Sequence
  LRRK2 RNA guide
cuacuguaguucagagaugugc

SEQ ID NO: 84147 - RNA, 22 nt, Artificial Sequence
  LRRK2 RNA guide
cucugaacuacaguagccaaca

SEQ ID NO: 84148 - RNA, 22 nt, Artificial Sequence
  LRRK2 RNA guide
cugaacuacaguagccaacacu

SEQ ID NO: 84149 - RNA, 22 nt, Artificial Sequence
  LRRK2 RNA guide
cugaguguuggcuacuguaguu

SEQ ID NO: 84150 - RNA, 22 nt, Artificial Sequence
  LRRK2 RNA guide
cuguaguucagagaugugcuau

SEQ ID NO: 84151 - RNA, 22 nt, Artificial Sequence
  LRRK2 RNA guide
gaacuacaguagccaacacuca

SEQ ID NO: 84152 - RNA, 22 nt, Artificial Sequence
  LRRK2 RNA guide
gaguguuggcuacuguaguuca

SEQ ID NO: 84153 - RNA, 22 nt, Artificial Sequence
  LRRK2 RNA guide
gcacaucucugaacuacaguag

SEQ ID NO: 84154 - RNA, 22 nt, Artificial Sequence
  LRRK2 RNA guide
gcuacuguaguucagagaugug

SEQ ID NO: 84155 - RNA, 22 nt, Artificial Sequence
  LRRK2 RNA guide
ggcuacuguaguucagagaugu

SEQ ID NO: 84156 - RNA, 22 nt, Artificial Sequence
  LRRK2 RNA guide
guguuggcuacuguaguucaga

SEQ ID NO: 84157 - RNA, 22 nt, Artificial Sequence
  LRRK2 RNA guide
guuggcuacuguaguucagaga

SEQ ID NO: 84158 - RNA, 22 nt, Artificial Sequence
  LRRK2 RNA guide
uacaguagccaacacucagggu

SEQ ID NO: 84159 - RNA, 22 nt, Artificial Sequence
  LRRK2 RNA guide
uacccugaguguuggcuacugu

SEQ ID NO: 84160 - RNA, 22 nt, Artificial Sequence
  LRRK2 RNA guide
uacuguaguucagagaugugcu

SEQ ID NO: 84161 - RNA, 22 nt, Artificial Sequence
  LRRK2 RNA guide
uagcacaucucugaacuacagu

SEQ ID NO: 84162 - RNA, 22 nt, Artificial Sequence
  LRRK2 RNA guide
ucucugaacuacaguagccaac

SEQ ID NO: 84163 - RNA, 22 nt, Artificial Sequence
  LRRK2 RNA guide
ucugaacuacaguagccaacac

SEQ ID NO: 84164 - RNA, 22 nt, Artificial Sequence
  LRRK2 RNA guide
ugaacuacaguagccaacacuc

SEQ ID NO: 84165 - RNA, 22 nt, Artificial Sequence
  LRRK2 RNA guide
ugaguguuggcuacuguaguuc

SEQ ID NO: 84166 - RNA, 22 nt, Artificial Sequence
  LRRK2 RNA guide
uggcuacuguaguucagagaug

SEQ ID NO: 84167 - RNA, 22 nt, Artificial Sequence
  LRRK2 RNA guide
uguaguucagagaugugcuauu

SEQ ID NO: 84168 - RNA, 22 nt, Artificial Sequence
  LRRK2 RNA guide
uguuggcuacuguaguucagag

SEQ ID NO: 84169 - RNA, 22 nt, Artificial Sequence
  LRRK2 RNA guide
uuggcuacuguaguucagagau

SEQ ID NO: 84170 - RNA, 20 nt, Artificial Sequence
  LRRK2 RNA guide
aaaagauuguuuaaccucag

SEQ ID NO: 84171 - RNA, 20 nt, Artificial Sequence
  LRRK2 RNA guide
aaagauuguuuaaccucaga

SEQ ID NO: 84172 - RNA, 20 nt, Artificial Sequence
  LRRK2 RNA guide
aagauuguuuaaccucagaa

SEQ ID NO: 84173 - RNA, 20 nt, Artificial Sequence
  LRRK2 RNA guide
acauuaguucugagguuaaa

SEQ ID NO: 84174 - RNA, 20 nt, Artificial Sequence
  LRRK2 RNA guide
agauuguuuaaccucagaac

SEQ ID NO: 84175 - RNA, 20 nt, Artificial Sequence
  LRRK2 RNA guide
aguucugagguuaaacaauc

SEQ ID NO: 84176 - RNA, 20 nt, Artificial Sequence
  LRRK2 RNA guide
auuaguucugagguuaaaca

SEQ ID NO: 84177 - RNA, 20 nt, Artificial Sequence
  LRRK2 RNA guide
cauuaguucugagguuaaac

SEQ ID NO: 84178 - RNA, 20 nt, Artificial Sequence
  LRRK2 RNA guide
cugagguuaaacaaucuuuu

SEQ ID NO: 84179 - RNA, 20 nt, Artificial Sequence
  LRRK2 RNA guide
guucugagguuaaacaaucu

SEQ ID NO: 84180 - RNA, 20 nt, Artificial Sequence
  LRRK2 RNA guide
uaguucugagguuaaacaau

SEQ ID NO: 84181 - RNA, 20 nt, Artificial Sequence
  LRRK2 RNA guide
ucugagguuaaacaaucuuu

SEQ ID NO: 84182 - RNA, 20 nt, Artificial Sequence
  LRRK2 RNA guide
uuaguucugagguuaaacaa

SEQ ID NO: 84183 - RNA, 20 nt, Artificial Sequence
  LRRK2 RNA guide
uucugagguuaaacaaucuu

SEQ ID NO: 84184 - RNA, 21 nt, Artificial Sequence
  LRRK2 RNA guide
aagauuguuuaaccucagaac

SEQ ID NO: 84185 - RNA, 21 nt, Artificial Sequence
  LRRK2 RNA guide
acauuaguucugagguuaaac

SEQ ID NO: 84186 - RNA, 21 nt, Artificial Sequence
  LRRK2 RNA guide
agauuguuuaaccucagaacu

SEQ ID NO: 84187 - RNA, 21 nt, Artificial Sequence
  LRRK2 RNA guide
aguucugagguuaaacaaucu

SEQ ID NO: 84188 - RNA, 21 nt, Artificial Sequence
  LRRK2 RNA guide
cauuaguucugagguuaaaca

SEQ ID NO: 84189 - RNA, 21 nt, Artificial Sequence
  LRRK2 RNA guide
guucugagguuaaacaaucuu

SEQ ID NO: 84190 - RNA, 21 nt, Artificial Sequence
  LRRK2 RNA guide
uaguucugagguuaaacaauc

SEQ ID NO: 84191 - RNA, 22 nt, Artificial Sequence
  LRRK2 RNA guide
aaagauuguuuaaccucagaac

SEQ ID NO: 84192 - RNA, 22 nt, Artificial Sequence
  LRRK2 RNA guide
aacauuaguucugagguuaaac

SEQ ID NO: 84193 - RNA, 22 nt, Artificial Sequence
  LRRK2 RNA guide
aagauuguuuaaccucagaacu

SEQ ID NO: 84194 - RNA, 22 nt, Artificial Sequence
  LRRK2 RNA guide
acauuaguucugagguuaaaca

SEQ ID NO: 84195 - RNA, 22 nt, Artificial Sequence
  LRRK2 RNA guide
agauuguuuaaccucagaacua

SEQ ID NO: 84196 - RNA, 22 nt, Artificial Sequence
  LRRK2 RNA guide
aguucugagguuaaacaaucuu

SEQ ID NO: 84197 - RNA, 22 nt, Artificial Sequence
  LRRK2 RNA guide
caacauuaguucugagguuaaa

SEQ ID NO: 84198 - RNA, 22 nt, Artificial Sequence
  LRRK2 RNA guide
cauuaguucugagguuaaacaa

SEQ ID NO: 84199 - RNA, 22 nt, Artificial Sequence
  LRRK2 RNA guide
guucugagguuaaacaaucuuu

SEQ ID NO: 84200 - RNA, 22 nt, Artificial Sequence
  LRRK2 RNA guide
uaguucugagguuaaacaaucu

SEQ ID NO: 84201 - RNA, 22 nt, Artificial Sequence
  LRRK2 RNA guide
uuaguucugagguuaaacaauc

SEQ ID NO: 84202 - RNA, 20 nt, Artificial Sequence
  LRRK2 RNA guide
aaagcacagcuugcaccgcc

SEQ ID NO: 84203 - RNA, 20 nt, Artificial Sequence
  LRRK2 RNA guide
aacaaagcacagcuugcacc

SEQ ID NO: 84204 - RNA, 20 nt, Artificial Sequence
  LRRK2 RNA guide
aagcacagcuugcaccgccc

SEQ ID NO: 84205 - RNA, 20 nt, Artificial Sequence
  LRRK2 RNA guide
aagcugugcuuuguuaaaca

SEQ ID NO: 84206 - RNA, 20 nt, Artificial Sequence
  LRRK2 RNA guide
aagggcggugcaagcugugc

SEQ ID NO: 84207 - RNA, 20 nt, Artificial Sequence
  LRRK2 RNA guide
acaaagcacagcuugcaccg

SEQ ID NO: 84208 - RNA, 20 nt, Artificial Sequence
  LRRK2 RNA guide
acagcuugcaccgcccuuaa

SEQ ID NO: 84209 - RNA, 20 nt, Artificial Sequence
  LRRK2 RNA guide
agcacagcuugcaccgcccu

SEQ ID NO: 84210 - RNA, 20 nt, Artificial Sequence
  LRRK2 RNA guide
agcaucuguuuaacaaagca

SEQ ID NO: 84211 - RNA, 20 nt, Artificial Sequence
  LRRK2 RNA guide
agcugugcuuuguuaaacag

SEQ ID NO: 84212 - RNA, 20 nt, Artificial Sequence
  LRRK2 RNA guide
agcuugcaccgcccuuaauc

SEQ ID NO: 84213 - RNA, 20 nt, Artificial Sequence
  LRRK2 RNA guide
agggcggugcaagcugugcu

SEQ ID NO: 84214 - RNA, 20 nt, Artificial Sequence
  LRRK2 RNA guide
aucuguuuaacaaagcacag

SEQ ID NO: 84215 - RNA, 20 nt, Artificial Sequence
  LRRK2 RNA guide
auggauuaagggcggugcaa

SEQ ID NO: 84216 - RNA, 20 nt, Artificial Sequence
  LRRK2 RNA guide
auuaagggcggugcaagcug

SEQ ID NO: 84217 - RNA, 20 nt, Artificial Sequence
  LRRK2 RNA guide
caaagcacagcuugcaccgc

SEQ ID NO: 84218 - RNA, 20 nt, Artificial Sequence
  LRRK2 RNA guide
caagcugugcuuuguuaaac

SEQ ID NO: 84219 - RNA, 20 nt, Artificial Sequence
  LRRK2 RNA guide
cacagcuugcaccgcccuua

SEQ ID NO: 84220 - RNA, 20 nt, Artificial Sequence
  LRRK2 RNA guide
cagcuugcaccgcccuuaau

SEQ ID NO: 84221 - RNA, 20 nt, Artificial Sequence
  LRRK2 RNA guide
caucuguuuaacaaagcaca

SEQ ID NO: 84222 - RNA, 20 nt, Artificial Sequence
  LRRK2 RNA guide
cggugcaagcugugcuuugu

SEQ ID NO: 84223 - RNA, 20 nt, Artificial Sequence
  LRRK2 RNA guide
cuguuuaacaaagcacagcu

SEQ ID NO: 84224 - RNA, 20 nt, Artificial Sequence
  LRRK2 RNA guide
gauuaagggcggugcaagcu

SEQ ID NO: 84225 - RNA, 20 nt, Artificial Sequence
  LRRK2 RNA guide
gcaagcugugcuuuguuaaa

SEQ ID NO: 84226 - RNA, 20 nt, Artificial Sequence
  LRRK2 RNA guide
gcacagcuugcaccgcccuu

SEQ ID NO: 84227 - RNA, 20 nt, Artificial Sequence
  LRRK2 RNA guide
gcaucuguuuaacaaagcac

SEQ ID NO: 84228 - RNA, 20 nt, Artificial Sequence
  LRRK2 RNA guide
gcggugcaagcugugcuuug

SEQ ID NO: 84229 - RNA, 20 nt, Artificial Sequence
  LRRK2 RNA guide
gcugugcuuuguuaaacaga

SEQ ID NO: 84230 - RNA, 20 nt, Artificial Sequence
  LRRK2 RNA guide
ggauuaagggcggugcaagc

SEQ ID NO: 84231 - RNA, 20 nt, Artificial Sequence
  LRRK2 RNA guide
ggcggugcaagcugugcuuu

SEQ ID NO: 84232 - RNA, 20 nt, Artificial Sequence
  LRRK2 RNA guide
gggcggugcaagcugugcuu

SEQ ID NO: 84233 - RNA, 20 nt, Artificial Sequence
  LRRK2 RNA guide
ggugcaagcugugcuuuguu

SEQ ID NO: 84234 - RNA, 20 nt, Artificial Sequence
  LRRK2 RNA guide
gugcaagcugugcuuuguua

SEQ ID NO: 84235 - RNA, 20 nt, Artificial Sequence
  LRRK2 RNA guide
guuuaacaaagcacagcuug

SEQ ID NO: 84236 - RNA, 20 nt, Artificial Sequence
  LRRK2 RNA guide
uaaauggauuaagggcggug

SEQ ID NO: 84237 - RNA, 20 nt, Artificial Sequence
  LRRK2 RNA guide
uaacaaagcacagcuugcac

SEQ ID NO: 84238 - RNA, 20 nt, Artificial Sequence
  LRRK2 RNA guide
uaagggcggugcaagcugug

SEQ ID NO: 84239 - RNA, 20 nt, Artificial Sequence
  LRRK2 RNA guide
ucuguuuaacaaagcacagc

SEQ ID NO: 84240 - RNA, 20 nt, Artificial Sequence
  LRRK2 RNA guide
ugcaagcugugcuuuguuaa

SEQ ID NO: 84241 - RNA, 20 nt, Artificial Sequence
  LRRK2 RNA guide
uguuuaacaaagcacagcuu

SEQ ID NO: 84242 - RNA, 20 nt, Artificial Sequence
  LRRK2 RNA guide
uuaacaaagcacagcuugca

SEQ ID NO: 84243 - RNA, 20 nt, Artificial Sequence
  LRRK2 RNA guide
uuaagggcggugcaagcugu

SEQ ID NO: 84244 - RNA, 20 nt, Artificial Sequence
  LRRK2 RNA guide
uuuaacaaagcacagcuugc

SEQ ID NO: 84245 - RNA, 21 nt, Artificial Sequence
  LRRK2 RNA guide
aaagcacagcuugcaccgccc

SEQ ID NO: 84246 - RNA, 21 nt, Artificial Sequence
  LRRK2 RNA guide
aaauggauuaagggcggugca

SEQ ID NO: 84247 - RNA, 21 nt, Artificial Sequence
  LRRK2 RNA guide
aacaaagcacagcuugcaccg

SEQ ID NO: 84248 - RNA, 21 nt, Artificial Sequence
  LRRK2 RNA guide
aagcacagcuugcaccgcccu

SEQ ID NO: 84249 - RNA, 21 nt, Artificial Sequence
  LRRK2 RNA guide
aagcaucuguuuaacaaagca

SEQ ID NO: 84250 - RNA, 21 nt, Artificial Sequence
  LRRK2 RNA guide
aagcugugcuuuguuaaacag

SEQ ID NO: 84251 - RNA, 21 nt, Artificial Sequence
  LRRK2 RNA guide
aagggcggugcaagcugugcu

SEQ ID NO: 84252 - RNA, 21 nt, Artificial Sequence
  LRRK2 RNA guide
aauggauuaagggcggugcaa

SEQ ID NO: 84253 - RNA, 21 nt, Artificial Sequence
  LRRK2 RNA guide
acaaagcacagcuugcaccgc

SEQ ID NO: 84254 - RNA, 21 nt, Artificial Sequence
  LRRK2 RNA guide
acagcuugcaccgcccuuaau

SEQ ID NO: 84255 - RNA, 21 nt, Artificial Sequence
  LRRK2 RNA guide
agcacagcuugcaccgcccuu

SEQ ID NO: 84256 - RNA, 21 nt, Artificial Sequence
  LRRK2 RNA guide
agcaucuguuuaacaaagcac

SEQ ID NO: 84257 - RNA, 21 nt, Artificial Sequence
  LRRK2 RNA guide
agcugugcuuuguuaaacaga

SEQ ID NO: 84258 - RNA, 21 nt, Artificial Sequence
  LRRK2 RNA guide
agcuugcaccgcccuuaaucc

SEQ ID NO: 84259 - RNA, 21 nt, Artificial Sequence
  LRRK2 RNA guide
agggcggugcaagcugugcuu

SEQ ID NO: 84260 - RNA, 21 nt, Artificial Sequence
  LRRK2 RNA guide
aucuguuuaacaaagcacagc

SEQ ID NO: 84261 - RNA, 21 nt, Artificial Sequence
  LRRK2 RNA guide
auggauuaagggcggugcaag

SEQ ID NO: 84262 - RNA, 21 nt, Artificial Sequence
  LRRK2 RNA guide
auuaagggcggugcaagcugu

SEQ ID NO: 84263 - RNA, 21 nt, Artificial Sequence
  LRRK2 RNA guide
caaagcacagcuugcaccgcc

SEQ ID NO: 84264 - RNA, 21 nt, Artificial Sequence
  LRRK2 RNA guide
caagcaucuguuuaacaaagc

SEQ ID NO: 84265 - RNA, 21 nt, Artificial Sequence
  LRRK2 RNA guide
caagcugugcuuuguuaaaca

SEQ ID NO: 84266 - RNA, 21 nt, Artificial Sequence
  LRRK2 RNA guide
cacagcuugcaccgcccuuaa

SEQ ID NO: 84267 - RNA, 21 nt, Artificial Sequence
  LRRK2 RNA guide
cagcuugcaccgcccuuaauc

SEQ ID NO: 84268 - RNA, 21 nt, Artificial Sequence
  LRRK2 RNA guide
caucuguuuaacaaagcacag

SEQ ID NO: 84269 - RNA, 21 nt, Artificial Sequence
  LRRK2 RNA guide
cggugcaagcugugcuuuguu

SEQ ID NO: 84270 - RNA, 21 nt, Artificial Sequence
  LRRK2 RNA guide
cuguuuaacaaagcacagcuu

SEQ ID NO: 84271 - RNA, 21 nt, Artificial Sequence
  LRRK2 RNA guide
gauuaagggcggugcaagcug

SEQ ID NO: 84272 - RNA, 21 nt, Artificial Sequence
  LRRK2 RNA guide
gcaagcugugcuuuguuaaac

SEQ ID NO: 84273 - RNA, 21 nt, Artificial Sequence
  LRRK2 RNA guide
gcacagcuugcaccgcccuua

SEQ ID NO: 84274 - RNA, 21 nt, Artificial Sequence
  LRRK2 RNA guide
gcaucuguuuaacaaagcaca

SEQ ID NO: 84275 - RNA, 21 nt, Artificial Sequence
  LRRK2 RNA guide
gcggugcaagcugugcuuugu

SEQ ID NO: 84276 - RNA, 21 nt, Artificial Sequence
  LRRK2 RNA guide
gcugugcuuuguuaaacagau

SEQ ID NO: 84277 - RNA, 21 nt, Artificial Sequence
  LRRK2 RNA guide
ggauuaagggcggugcaagcu

SEQ ID NO: 84278 - RNA, 21 nt, Artificial Sequence
  LRRK2 RNA guide
ggcggugcaagcugugcuuug

SEQ ID NO: 84279 - RNA, 21 nt, Artificial Sequence
  LRRK2 RNA guide
gggcggugcaagcugugcuuu

SEQ ID NO: 84280 - RNA, 21 nt, Artificial Sequence
  LRRK2 RNA guide
ggugcaagcugugcuuuguua

SEQ ID NO: 84281 - RNA, 21 nt, Artificial Sequence
  LRRK2 RNA guide
gugcaagcugugcuuuguuaa

SEQ ID NO: 84282 - RNA, 21 nt, Artificial Sequence
  LRRK2 RNA guide
guuuaacaaagcacagcuugc

SEQ ID NO: 84283 - RNA, 21 nt, Artificial Sequence
  LRRK2 RNA guide
uaaauggauuaagggcggugc

SEQ ID NO: 84284 - RNA, 21 nt, Artificial Sequence
  LRRK2 RNA guide
uaacaaagcacagcuugcacc

SEQ ID NO: 84285 - RNA, 21 nt, Artificial Sequence
  LRRK2 RNA guide
uaagggcggugcaagcugugc

SEQ ID NO: 84286 - RNA, 21 nt, Artificial Sequence
  LRRK2 RNA guide
ucaagcaucuguuuaacaaag

SEQ ID NO: 84287 - RNA, 21 nt, Artificial Sequence
  LRRK2 RNA guide
ucuguuuaacaaagcacagcu

SEQ ID NO: 84288 - RNA, 21 nt, Artificial Sequence
  LRRK2 RNA guide
ugcaagcugugcuuuguuaaa

SEQ ID NO: 84289 - RNA, 21 nt, Artificial Sequence
  LRRK2 RNA guide
uggauuaagggcggugcaagc

SEQ ID NO: 84290 - RNA, 21 nt, Artificial Sequence
  LRRK2 RNA guide
uguuuaacaaagcacagcuug

SEQ ID NO: 84291 - RNA, 21 nt, Artificial Sequence
  LRRK2 RNA guide
uuaaauggauuaagggcggug

SEQ ID NO: 84292 - RNA, 21 nt, Artificial Sequence
  LRRK2 RNA guide
uuaacaaagcacagcuugcac

SEQ ID NO: 84293 - RNA, 21 nt, Artificial Sequence
  LRRK2 RNA guide
uuaagggcggugcaagcugug

SEQ ID NO: 84294 - RNA, 21 nt, Artificial Sequence
  LRRK2 RNA guide
uuuaacaaagcacagcuugca

SEQ ID NO: 84295 - RNA, 22 nt, Artificial Sequence
  LRRK2 RNA guide
aaagcacagcuugcaccgcccu

SEQ ID NO: 84296 - RNA, 22 nt, Artificial Sequence
  LRRK2 RNA guide
aaauggauuaagggcggugcaa

SEQ ID NO: 84297 - RNA, 22 nt, Artificial Sequence
  LRRK2 RNA guide
aacaaagcacagcuugcaccgc

SEQ ID NO: 84298 - RNA, 22 nt, Artificial Sequence
  LRRK2 RNA guide
aagcacagcuugcaccgcccuu

SEQ ID NO: 84299 - RNA, 22 nt, Artificial Sequence
  LRRK2 RNA guide
aagcaucuguuuaacaaagcac

SEQ ID NO: 84300 - RNA, 22 nt, Artificial Sequence
  LRRK2 RNA guide
aagcugugcuuuguuaaacaga

SEQ ID NO: 84301 - RNA, 22 nt, Artificial Sequence
  LRRK2 RNA guide
aagggcggugcaagcugugcuu

SEQ ID NO: 84302 - RNA, 22 nt, Artificial Sequence
  LRRK2 RNA guide
aauggauuaagggcggugcaag

SEQ ID NO: 84303 - RNA, 22 nt, Artificial Sequence
  LRRK2 RNA guide
acaaagcacagcuugcaccgcc

SEQ ID NO: 84304 - RNA, 22 nt, Artificial Sequence
  LRRK2 RNA guide
acagcuugcaccgcccuuaauc

SEQ ID NO: 84305 - RNA, 22 nt, Artificial Sequence
  LRRK2 RNA guide
agcacagcuugcaccgcccuua

SEQ ID NO: 84306 - RNA, 22 nt, Artificial Sequence
  LRRK2 RNA guide
agcaucuguuuaacaaagcaca

SEQ ID NO: 84307 - RNA, 22 nt, Artificial Sequence
  LRRK2 RNA guide
agcugugcuuuguuaaacagau

SEQ ID NO: 84308 - RNA, 22 nt, Artificial Sequence
  LRRK2 RNA guide
agcuugcaccgcccuuaaucca

SEQ ID NO: 84309 - RNA, 22 nt, Artificial Sequence
  LRRK2 RNA guide
agggcggugcaagcugugcuuu

SEQ ID NO: 84310 - RNA, 22 nt, Artificial Sequence
  LRRK2 RNA guide
aucuguuuaacaaagcacagcu

SEQ ID NO: 84311 - RNA, 22 nt, Artificial Sequence
  LRRK2 RNA guide
auggauuaagggcggugcaagc

SEQ ID NO: 84312 - RNA, 22 nt, Artificial Sequence
  LRRK2 RNA guide
auuaagggcggugcaagcugug

SEQ ID NO: 84313 - RNA, 22 nt, Artificial Sequence
  LRRK2 RNA guide
caaagcacagcuugcaccgccc

SEQ ID NO: 84314 - RNA, 22 nt, Artificial Sequence
  LRRK2 RNA guide
caagcaucuguuuaacaaagca

SEQ ID NO: 84315 - RNA, 22 nt, Artificial Sequence
  LRRK2 RNA guide
caagcugugcuuuguuaaacag

SEQ ID NO: 84316 - RNA, 22 nt, Artificial Sequence
  LRRK2 RNA guide
cacagcuugcaccgcccuuaau

SEQ ID NO: 84317 - RNA, 22 nt, Artificial Sequence
  LRRK2 RNA guide
cagcuugcaccgcccuuaaucc

SEQ ID NO: 84318 - RNA, 22 nt, Artificial Sequence
  LRRK2 RNA guide
caucuguuuaacaaagcacagc

SEQ ID NO: 84319 - RNA, 22 nt, Artificial Sequence
  LRRK2 RNA guide
cggugcaagcugugcuuuguua

SEQ ID NO: 84320 - RNA, 22 nt, Artificial Sequence
  LRRK2 RNA guide
cuguuuaacaaagcacagcuug

SEQ ID NO: 84321 - RNA, 22 nt, Artificial Sequence
  LRRK2 RNA guide
gauuaagggcggugcaagcugu

SEQ ID NO: 84322 - RNA, 22 nt, Artificial Sequence
  LRRK2 RNA guide
gcaagcugugcuuuguuaaaca

SEQ ID NO: 84323 - RNA, 22 nt, Artificial Sequence
  LRRK2 RNA guide
gcacagcuugcaccgcccuuaa

SEQ ID NO: 84324 - RNA, 22 nt, Artificial Sequence
  LRRK2 RNA guide
gcaucuguuuaacaaagcacag

SEQ ID NO: 84325 - RNA, 22 nt, Artificial Sequence
  LRRK2 RNA guide
gcggugcaagcugugcuuuguu

SEQ ID NO: 84326 - RNA, 22 nt, Artificial Sequence
  LRRK2 RNA guide
gcugugcuuuguuaaacagaug

SEQ ID NO: 84327 - RNA, 22 nt, Artificial Sequence
  LRRK2 RNA guide
ggauuaagggcggugcaagcug

SEQ ID NO: 84328 - RNA, 22 nt, Artificial Sequence
  LRRK2 RNA guide
ggcggugcaagcugugcuuugu

SEQ ID NO: 84329 - RNA, 22 nt, Artificial Sequence
  LRRK2 RNA guide
gggcggugcaagcugugcuuug

SEQ ID NO: 84330 - RNA, 22 nt, Artificial Sequence
  LRRK2 RNA guide
ggugcaagcugugcuuuguuaa

SEQ ID NO: 84331 - RNA, 22 nt, Artificial Sequence
  LRRK2 RNA guide
gugcaagcugugcuuuguuaaa

SEQ ID NO: 84332 - RNA, 22 nt, Artificial Sequence
  LRRK2 RNA guide
guuaaauggauuaagggcggug

SEQ ID NO: 84333 - RNA, 22 nt, Artificial Sequence
  LRRK2 RNA guide
guuuaacaaagcacagcuugca

SEQ ID NO: 84334 - RNA, 22 nt, Artificial Sequence
  LRRK2 RNA guide
uaaauggauuaagggcggugca

SEQ ID NO: 84335 - RNA, 22 nt, Artificial Sequence
  LRRK2 RNA guide
uaacaaagcacagcuugcaccg

SEQ ID NO: 84336 - RNA, 22 nt, Artificial Sequence
  LRRK2 RNA guide
uaagggcggugcaagcugugcu

SEQ ID NO: 84337 - RNA, 22 nt, Artificial Sequence
  LRRK2 RNA guide
ucaagcaucuguuuaacaaagc

SEQ ID NO: 84338 - RNA, 22 nt, Artificial Sequence
  LRRK2 RNA guide
ucuguuuaacaaagcacagcuu

SEQ ID NO: 84339 - RNA, 22 nt, Artificial Sequence
  LRRK2 RNA guide
ugcaagcugugcuuuguuaaac

SEQ ID NO: 84340 - RNA, 22 nt, Artificial Sequence
  LRRK2 RNA guide
uggauuaagggcggugcaagcu

SEQ ID NO: 84341 - RNA, 22 nt, Artificial Sequence
  LRRK2 RNA guide
uguuuaacaaagcacagcuugc

SEQ ID NO: 84342 - RNA, 22 nt, Artificial Sequence
  LRRK2 RNA guide
uuaaauggauuaagggcggugc

SEQ ID NO: 84343 - RNA, 22 nt, Artificial Sequence
  LRRK2 RNA guide
uuaacaaagcacagcuugcacc

SEQ ID NO: 84344 - RNA, 22 nt, Artificial Sequence
  LRRK2 RNA guide
uuaagggcggugcaagcugugc

SEQ ID NO: 84345 - RNA, 22 nt, Artificial Sequence
  LRRK2 RNA guide
uucaagcaucuguuuaacaaag

SEQ ID NO: 84346 - RNA, 22 nt, Artificial Sequence
  LRRK2 RNA guide
uuuaacaaagcacagcuugcac

SEQ ID NO: 84347 - RNA, 20 nt, Artificial Sequence
  LRRK2 RNA guide
acagaaaucagauuguugcu

SEQ ID NO: 84348 - RNA, 20 nt, Artificial Sequence
  LRRK2 RNA guide
acauagcaacaaucugauuu

SEQ ID NO: 84349 - RNA, 20 nt, Artificial Sequence
  LRRK2 RNA guide
agacauagcaacaaucugau

SEQ ID NO: 84350 - RNA, 20 nt, Artificial Sequence
  LRRK2 RNA guide
agauacagaaaucagauugu

SEQ ID NO: 84351 - RNA, 20 nt, Artificial Sequence
  LRRK2 RNA guide
auacagaaaucagauuguug

SEQ ID NO: 84352 - RNA, 20 nt, Artificial Sequence
  LRRK2 RNA guide
auagcaacaaucugauuucu

SEQ ID NO: 84353 - RNA, 20 nt, Artificial Sequence
  LRRK2 RNA guide
cagaaaucagauuguugcua

SEQ ID NO: 84354 - RNA, 20 nt, Artificial Sequence
  LRRK2 RNA guide
cauagcaacaaucugauuuc

SEQ ID NO: 84355 - RNA, 20 nt, Artificial Sequence
  LRRK2 RNA guide
gacauagcaacaaucugauu

SEQ ID NO: 84356 - RNA, 20 nt, Artificial Sequence
  LRRK2 RNA guide
gauacagaaaucagauuguu

SEQ ID NO: 84357 - RNA, 20 nt, Artificial Sequence
  LRRK2 RNA guide
uacagaaaucagauuguugc

SEQ ID NO: 84358 - RNA, 21 nt, Artificial Sequence
  LRRK2 RNA guide
acagaaaucagauuguugcua

SEQ ID NO: 84359 - RNA, 21 nt, Artificial Sequence
  LRRK2 RNA guide
acauagcaacaaucugauuuc

SEQ ID NO: 84360 - RNA, 21 nt, Artificial Sequence
  LRRK2 RNA guide
agacauagcaacaaucugauu

SEQ ID NO: 84361 - RNA, 21 nt, Artificial Sequence
  LRRK2 RNA guide
auacagaaaucagauuguugc

SEQ ID NO: 84362 - RNA, 21 nt, Artificial Sequence
  LRRK2 RNA guide
auagcaacaaucugauuucug

SEQ ID NO: 84363 - RNA, 21 nt, Artificial Sequence
  LRRK2 RNA guide
cagaaaucagauuguugcuau

SEQ ID NO: 84364 - RNA, 21 nt, Artificial Sequence
  LRRK2 RNA guide
cagacauagcaacaaucugau

SEQ ID NO: 84365 - RNA, 21 nt, Artificial Sequence
  LRRK2 RNA guide
cauagcaacaaucugauuucu

SEQ ID NO: 84366 - RNA, 21 nt, Artificial Sequence
  LRRK2 RNA guide
gacauagcaacaaucugauuu

SEQ ID NO: 84367 - RNA, 21 nt, Artificial Sequence
  LRRK2 RNA guide
gauacagaaaucagauuguug

SEQ ID NO: 84368 - RNA, 21 nt, Artificial Sequence
  LRRK2 RNA guide
uacagaaaucagauuguugcu

SEQ ID NO: 84369 - RNA, 22 nt, Artificial Sequence
  LRRK2 RNA guide
acagaaaucagauuguugcuau

SEQ ID NO: 84370 - RNA, 22 nt, Artificial Sequence
  LRRK2 RNA guide
acagacauagcaacaaucugau

SEQ ID NO: 84371 - RNA, 22 nt, Artificial Sequence
  LRRK2 RNA guide
acauagcaacaaucugauuucu

SEQ ID NO: 84372 - RNA, 22 nt, Artificial Sequence
  LRRK2 RNA guide
agacauagcaacaaucugauuu

SEQ ID NO: 84373 - RNA, 22 nt, Artificial Sequence
  LRRK2 RNA guide
agauacagaaaucagauuguug

SEQ ID NO: 84374 - RNA, 22 nt, Artificial Sequence
  LRRK2 RNA guide
auacagaaaucagauuguugcu

SEQ ID NO: 84375 - RNA, 22 nt, Artificial Sequence
  LRRK2 RNA guide
auagcaacaaucugauuucugu

SEQ ID NO: 84376 - RNA, 22 nt, Artificial Sequence
  LRRK2 RNA guide
cagaaaucagauuguugcuaug

SEQ ID NO: 84377 - RNA, 22 nt, Artificial Sequence
  LRRK2 RNA guide
cagacauagcaacaaucugauu

SEQ ID NO: 84378 - RNA, 22 nt, Artificial Sequence
  LRRK2 RNA guide
cauagcaacaaucugauuucug

SEQ ID NO: 84379 - RNA, 22 nt, Artificial Sequence
  LRRK2 RNA guide
gacauagcaacaaucugauuuc

SEQ ID NO: 84380 - RNA, 22 nt, Artificial Sequence
  LRRK2 RNA guide
gauacagaaaucagauuguugc

SEQ ID NO: 84381 - RNA, 22 nt, Artificial Sequence
  LRRK2 RNA guide
uacagaaaucagauuguugcua

SEQ ID NO: 84382 - RNA, 20 nt, Artificial Sequence
  LRRK2 RNA guide
acguuggcgguuuugucgag

SEQ ID NO: 84383 - RNA, 20 nt, Artificial Sequence
  LRRK2 RNA guide
acucgacaaaaccgccaacg

SEQ ID NO: 84384 - RNA, 20 nt, Artificial Sequence
  LRRK2 RNA guide
augacguuggcgguuuuguc

SEQ ID NO: 84385 - RNA, 20 nt, Artificial Sequence
  LRRK2 RNA guide
augaugacguuggcgguuuu

SEQ ID NO: 84386 - RNA, 20 nt, Artificial Sequence
  LRRK2 RNA guide
caugaugacguuggcgguuu

SEQ ID NO: 84387 - RNA, 20 nt, Artificial Sequence
  LRRK2 RNA guide
cgacaaaaccgccaacguca

SEQ ID NO: 84388 - RNA, 20 nt, Artificial Sequence
  LRRK2 RNA guide
cguuggcgguuuugucgagu

SEQ ID NO: 84389 - RNA, 20 nt, Artificial Sequence
  LRRK2 RNA guide
cuacucgacaaaaccgccaa

SEQ ID NO: 84390 - RNA, 20 nt, Artificial Sequence
  LRRK2 RNA guide
cucgacaaaaccgccaacgu

SEQ ID NO: 84391 - RNA, 20 nt, Artificial Sequence
  LRRK2 RNA guide
cuuuucuacucgacaaaacc

SEQ ID NO: 84392 - RNA, 20 nt, Artificial Sequence
  LRRK2 RNA guide
gacguuggcgguuuugucga

SEQ ID NO: 84393 - RNA, 20 nt, Artificial Sequence
  LRRK2 RNA guide
gaugacguuggcgguuuugu

SEQ ID NO: 84394 - RNA, 20 nt, Artificial Sequence
  LRRK2 RNA guide
guuggcgguuuugucgagua

SEQ ID NO: 84395 - RNA, 20 nt, Artificial Sequence
  LRRK2 RNA guide
uacucgacaaaaccgccaac

SEQ ID NO: 84396 - RNA, 20 nt, Artificial Sequence
  LRRK2 RNA guide
ucgacaaaaccgccaacguc

SEQ ID NO: 84397 - RNA, 20 nt, Artificial Sequence
  LRRK2 RNA guide
ucuacucgacaaaaccgcca

SEQ ID NO: 84398 - RNA, 20 nt, Artificial Sequence
  LRRK2 RNA guide
ugacguuggcgguuuugucg

SEQ ID NO: 84399 - RNA, 20 nt, Artificial Sequence
  LRRK2 RNA guide
ugaugacguuggcgguuuug

SEQ ID NO: 84400 - RNA, 20 nt, Artificial Sequence
  LRRK2 RNA guide
uucuacucgacaaaaccgcc

SEQ ID NO: 84401 - RNA, 20 nt, Artificial Sequence
  LRRK2 RNA guide
uuggcgguuuugucgaguag

SEQ ID NO: 84402 - RNA, 20 nt, Artificial Sequence
  LRRK2 RNA guide
uuucuacucgacaaaaccgc

SEQ ID NO: 84403 - RNA, 20 nt, Artificial Sequence
  LRRK2 RNA guide
uuuucuacucgacaaaaccg

SEQ ID NO: 84404 - RNA, 21 nt, Artificial Sequence
  LRRK2 RNA guide
acguuggcgguuuugucgagu

SEQ ID NO: 84405 - RNA, 21 nt, Artificial Sequence
  LRRK2 RNA guide
acucgacaaaaccgccaacgu

SEQ ID NO: 84406 - RNA, 21 nt, Artificial Sequence
  LRRK2 RNA guide
augacguuggcgguuuugucg

SEQ ID NO: 84407 - RNA, 21 nt, Artificial Sequence
  LRRK2 RNA guide
augaugacguuggcgguuuug

SEQ ID NO: 84408 - RNA, 21 nt, Artificial Sequence
  LRRK2 RNA guide
caugaugacguuggcgguuuu

SEQ ID NO: 84409 - RNA, 21 nt, Artificial Sequence
  LRRK2 RNA guide
ccaugaugacguuggcgguuu

SEQ ID NO: 84410 - RNA, 21 nt, Artificial Sequence
  LRRK2 RNA guide
ccuuuucuacucgacaaaacc

SEQ ID NO: 84411 - RNA, 21 nt, Artificial Sequence
  LRRK2 RNA guide
cgacaaaaccgccaacgucau

SEQ ID NO: 84412 - RNA, 21 nt, Artificial Sequence
  LRRK2 RNA guide
cguuggcgguuuugucgagua

SEQ ID NO: 84413 - RNA, 21 nt, Artificial Sequence
  LRRK2 RNA guide
cuacucgacaaaaccgccaac

SEQ ID NO: 84414 - RNA, 21 nt, Artificial Sequence
  LRRK2 RNA guide
cucgacaaaaccgccaacguc

SEQ ID NO: 84415 - RNA, 21 nt, Artificial Sequence
  LRRK2 RNA guide
cuuuucuacucgacaaaaccg

SEQ ID NO: 84416 - RNA, 21 nt, Artificial Sequence
  LRRK2 RNA guide
gacguuggcgguuuugucgag

SEQ ID NO: 84417 - RNA, 21 nt, Artificial Sequence
  LRRK2 RNA guide
gaugacguuggcgguuuuguc

SEQ ID NO: 84418 - RNA, 21 nt, Artificial Sequence
  LRRK2 RNA guide
guuggcgguuuugucgaguag

SEQ ID NO: 84419 - RNA, 21 nt, Artificial Sequence
  LRRK2 RNA guide
uacucgacaaaaccgccaacg

SEQ ID NO: 84420 - RNA, 21 nt, Artificial Sequence
  LRRK2 RNA guide
ucgacaaaaccgccaacguca

SEQ ID NO: 84421 - RNA, 21 nt, Artificial Sequence
  LRRK2 RNA guide
ucuacucgacaaaaccgccaa

SEQ ID NO: 84422 - RNA, 21 nt, Artificial Sequence
  LRRK2 RNA guide
ugacguuggcgguuuugucga

SEQ ID NO: 84423 - RNA, 21 nt, Artificial Sequence
  LRRK2 RNA guide
ugaugacguuggcgguuuugu

SEQ ID NO: 84424 - RNA, 21 nt, Artificial Sequence
  LRRK2 RNA guide
uucuacucgacaaaaccgcca

SEQ ID NO: 84425 - RNA, 21 nt, Artificial Sequence
  LRRK2 RNA guide
uuggcgguuuugucgaguaga

SEQ ID NO: 84426 - RNA, 21 nt, Artificial Sequence
  LRRK2 RNA guide
uuucuacucgacaaaaccgcc

SEQ ID NO: 84427 - RNA, 21 nt, Artificial Sequence
  LRRK2 RNA guide
uuuucuacucgacaaaaccgc

SEQ ID NO: 84428 - RNA, 22 nt, Artificial Sequence
  LRRK2 RNA guide
acguuggcgguuuugucgagua

SEQ ID NO: 84429 - RNA, 22 nt, Artificial Sequence
  LRRK2 RNA guide
acucgacaaaaccgccaacguc

SEQ ID NO: 84430 - RNA, 22 nt, Artificial Sequence
  LRRK2 RNA guide
augacguuggcgguuuugucga

SEQ ID NO: 84431 - RNA, 22 nt, Artificial Sequence
  LRRK2 RNA guide
augaugacguuggcgguuuugu

SEQ ID NO: 84432 - RNA, 22 nt, Artificial Sequence
  LRRK2 RNA guide
caugaugacguuggcgguuuug

SEQ ID NO: 84433 - RNA, 22 nt, Artificial Sequence
  LRRK2 RNA guide
ccaugaugacguuggcgguuuu

SEQ ID NO: 84434 - RNA, 22 nt, Artificial Sequence
  LRRK2 RNA guide
cccuuuucuacucgacaaaacc

SEQ ID NO: 84435 - RNA, 22 nt, Artificial Sequence
  LRRK2 RNA guide
ccuuuucuacucgacaaaaccg

SEQ ID NO: 84436 - RNA, 22 nt, Artificial Sequence
  LRRK2 RNA guide
cgacaaaaccgccaacgucauc

SEQ ID NO: 84437 - RNA, 22 nt, Artificial Sequence
  LRRK2 RNA guide
cguuggcgguuuugucgaguag

SEQ ID NO: 84438 - RNA, 22 nt, Artificial Sequence
  LRRK2 RNA guide
cuacucgacaaaaccgccaacg

SEQ ID NO: 84439 - RNA, 22 nt, Artificial Sequence
  LRRK2 RNA guide
cucgacaaaaccgccaacguca

SEQ ID NO: 84440 - RNA, 22 nt, Artificial Sequence
  LRRK2 RNA guide
cuuuucuacucgacaaaaccgc

SEQ ID NO: 84441 - RNA, 22 nt, Artificial Sequence
  LRRK2 RNA guide
gacguuggcgguuuugucgagu

SEQ ID NO: 84442 - RNA, 22 nt, Artificial Sequence
  LRRK2 RNA guide
gaugacguuggcgguuuugucg

SEQ ID NO: 84443 - RNA, 22 nt, Artificial Sequence
  LRRK2 RNA guide
gccaugaugacguuggcgguuu

SEQ ID NO: 84444 - RNA, 22 nt, Artificial Sequence
  LRRK2 RNA guide
guuggcgguuuugucgaguaga

SEQ ID NO: 84445 - RNA, 22 nt, Artificial Sequence
  LRRK2 RNA guide
uacucgacaaaaccgccaacgu

SEQ ID NO: 84446 - RNA, 22 nt, Artificial Sequence
  LRRK2 RNA guide
ucgacaaaaccgccaacgucau

SEQ ID NO: 84447 - RNA, 22 nt, Artificial Sequence
  LRRK2 RNA guide
ucuacucgacaaaaccgccaac

SEQ ID NO: 84448 - RNA, 22 nt, Artificial Sequence
  LRRK2 RNA guide
ugacguuggcgguuuugucgag

SEQ ID NO: 84449 - RNA, 22 nt, Artificial Sequence
  LRRK2 RNA guide
ugaugacguuggcgguuuuguc

SEQ ID NO: 84450 - RNA, 22 nt, Artificial Sequence
  LRRK2 RNA guide
uucuacucgacaaaaccgccaa

SEQ ID NO: 84451 - RNA, 22 nt, Artificial Sequence
  LRRK2 RNA guide
uuggcgguuuugucgaguagaa

SEQ ID NO: 84452 - RNA, 22 nt, Artificial Sequence
  LRRK2 RNA guide
uuucuacucgacaaaaccgcca

SEQ ID NO: 84453 - RNA, 22 nt, Artificial Sequence
  LRRK2 RNA guide
uuuucuacucgacaaaaccgcc

SEQ ID NO: 84454 - RNA, 20 nt, Artificial Sequence
  LRRK2 RNA guide
acauuucccccuuuucuacu

SEQ ID NO: 84455 - RNA, 20 nt, Artificial Sequence
  LRRK2 RNA guide
acguuggcgguuuuguggag

SEQ ID NO: 84456 - RNA, 20 nt, Artificial Sequence
  LRRK2 RNA guide
acuccacaaaaccgccaacg

SEQ ID NO: 84457 - RNA, 20 nt, Artificial Sequence
  LRRK2 RNA guide
augacguuggcgguuuugug

SEQ ID NO: 84458 - RNA, 20 nt, Artificial Sequence
  LRRK2 RNA guide
auuucccccuuuucuacucc

SEQ ID NO: 84459 - RNA, 20 nt, Artificial Sequence
  LRRK2 RNA guide
cacauuucccccuuuucuac

SEQ ID NO: 84460 - RNA, 20 nt, Artificial Sequence
  LRRK2 RNA guide
cauuucccccuuuucuacuc

SEQ ID NO: 84461 - RNA, 20 nt, Artificial Sequence
  LRRK2 RNA guide
ccacaaaaccgccaacguca

SEQ ID NO: 84462 - RNA, 20 nt, Artificial Sequence
  LRRK2 RNA guide
ccacauuucccccuuuucua

SEQ ID NO: 84463 - RNA, 20 nt, Artificial Sequence
  LRRK2 RNA guide
ccaugaugacguuggcgguu

SEQ ID NO: 84464 - RNA, 20 nt, Artificial Sequence
  LRRK2 RNA guide
cguuggcgguuuuguggagu

SEQ ID NO: 84465 - RNA, 20 nt, Artificial Sequence
  LRRK2 RNA guide
cuacuccacaaaaccgccaa

SEQ ID NO: 84466 - RNA, 20 nt, Artificial Sequence
  LRRK2 RNA guide
cuccacaaaaccgccaacgu

SEQ ID NO: 84467 - RNA, 20 nt, Artificial Sequence
  LRRK2 RNA guide
cuuuucuacuccacaaaacc

SEQ ID NO: 84468 - RNA, 20 nt, Artificial Sequence
  LRRK2 RNA guide
gacguuggcgguuuugugga

SEQ ID NO: 84469 - RNA, 20 nt, Artificial Sequence
  LRRK2 RNA guide
guggaguagaaaagggggaa

SEQ ID NO: 84470 - RNA, 20 nt, Artificial Sequence
  LRRK2 RNA guide
guuggcgguuuuguggagua

SEQ ID NO: 84471 - RNA, 20 nt, Artificial Sequence
  LRRK2 RNA guide
uacuccacaaaaccgccaac

SEQ ID NO: 84472 - RNA, 20 nt, Artificial Sequence
  LRRK2 RNA guide
uccacaaaaccgccaacguc

SEQ ID NO: 84473 - RNA, 20 nt, Artificial Sequence
  LRRK2 RNA guide
ucuacuccacaaaaccgcca

SEQ ID NO: 84474 - RNA, 20 nt, Artificial Sequence
  LRRK2 RNA guide
ugacguuggcgguuuugugg

SEQ ID NO: 84475 - RNA, 20 nt, Artificial Sequence
  LRRK2 RNA guide
uggaguagaaaagggggaaa

SEQ ID NO: 84476 - RNA, 20 nt, Artificial Sequence
  LRRK2 RNA guide
uguggaguagaaaaggggga

SEQ ID NO: 84477 - RNA, 20 nt, Artificial Sequence
  LRRK2 RNA guide
uucuacuccacaaaaccgcc

SEQ ID NO: 84478 - RNA, 20 nt, Artificial Sequence
  LRRK2 RNA guide
uuggcgguuuuguggaguag

SEQ ID NO: 84479 - RNA, 20 nt, Artificial Sequence
  LRRK2 RNA guide
uuguggaguagaaaaggggg

SEQ ID NO: 84480 - RNA, 20 nt, Artificial Sequence
  LRRK2 RNA guide
uuucuacuccacaaaaccgc

SEQ ID NO: 84481 - RNA, 20 nt, Artificial Sequence
  LRRK2 RNA guide
uuuguggaguagaaaagggg

SEQ ID NO: 84482 - RNA, 20 nt, Artificial Sequence
  LRRK2 RNA guide
uuuucuacuccacaaaaccg

SEQ ID NO: 84483 - RNA, 21 nt, Artificial Sequence
  LRRK2 RNA guide
acauuucccccuuuucuacuc

SEQ ID NO: 84484 - RNA, 21 nt, Artificial Sequence
  LRRK2 RNA guide
acguuggcgguuuuguggagu

SEQ ID NO: 84485 - RNA, 21 nt, Artificial Sequence
  LRRK2 RNA guide
acuccacaaaaccgccaacgu

SEQ ID NO: 84486 - RNA, 21 nt, Artificial Sequence
  LRRK2 RNA guide
augacguuggcgguuuugugg

SEQ ID NO: 84487 - RNA, 21 nt, Artificial Sequence
  LRRK2 RNA guide
auuucccccuuuucuacucca

SEQ ID NO: 84488 - RNA, 21 nt, Artificial Sequence
  LRRK2 RNA guide
cacauuucccccuuuucuacu

SEQ ID NO: 84489 - RNA, 21 nt, Artificial Sequence
  LRRK2 RNA guide
cauuucccccuuuucuacucc

SEQ ID NO: 84490 - RNA, 21 nt, Artificial Sequence
  LRRK2 RNA guide
ccacaaaaccgccaacgucau

SEQ ID NO: 84491 - RNA, 21 nt, Artificial Sequence
  LRRK2 RNA guide
ccacauuucccccuuuucuac

SEQ ID NO: 84492 - RNA, 21 nt, Artificial Sequence
  LRRK2 RNA guide
cccacauuucccccuuuucua

SEQ ID NO: 84493 - RNA, 21 nt, Artificial Sequence
  LRRK2 RNA guide
ccccacauuucccccuuuucu

SEQ ID NO: 84494 - RNA, 21 nt, Artificial Sequence
  LRRK2 RNA guide
ccuuuucuacuccacaaaacc

SEQ ID NO: 84495 - RNA, 21 nt, Artificial Sequence
  LRRK2 RNA guide
cguuggcgguuuuguggagua

SEQ ID NO: 84496 - RNA, 21 nt, Artificial Sequence
  LRRK2 RNA guide
cuacuccacaaaaccgccaac

SEQ ID NO: 84497 - RNA, 21 nt, Artificial Sequence
  LRRK2 RNA guide
cuccacaaaaccgccaacguc

SEQ ID NO: 84498 - RNA, 21 nt, Artificial Sequence
  LRRK2 RNA guide
cuuuucuacuccacaaaaccg

SEQ ID NO: 84499 - RNA, 21 nt, Artificial Sequence
  LRRK2 RNA guide
gacguuggcgguuuuguggag

SEQ ID NO: 84500 - RNA, 21 nt, Artificial Sequence
  LRRK2 RNA guide
gaugacguuggcgguuuugug

SEQ ID NO: 84501 - RNA, 21 nt, Artificial Sequence
  LRRK2 RNA guide
gccaugaugacguuggcgguu

SEQ ID NO: 84502 - RNA, 21 nt, Artificial Sequence
  LRRK2 RNA guide
guggaguagaaaagggggaaa

SEQ ID NO: 84503 - RNA, 21 nt, Artificial Sequence
  LRRK2 RNA guide
guuggcgguuuuguggaguag

SEQ ID NO: 84504 - RNA, 21 nt, Artificial Sequence
  LRRK2 RNA guide
uacuccacaaaaccgccaacg

SEQ ID NO: 84505 - RNA, 21 nt, Artificial Sequence
  LRRK2 RNA guide
uccacaaaaccgccaacguca

SEQ ID NO: 84506 - RNA, 21 nt, Artificial Sequence
  LRRK2 RNA guide
ucuacuccacaaaaccgccaa

SEQ ID NO: 84507 - RNA, 21 nt, Artificial Sequence
  LRRK2 RNA guide
ugacguuggcgguuuugugga

SEQ ID NO: 84508 - RNA, 21 nt, Artificial Sequence
  LRRK2 RNA guide
uggaguagaaaagggggaaau

SEQ ID NO: 84509 - RNA, 21 nt, Artificial Sequence
  LRRK2 RNA guide
uguggaguagaaaagggggaa

SEQ ID NO: 84510 - RNA, 21 nt, Artificial Sequence
  LRRK2 RNA guide
uucuacuccacaaaaccgcca

SEQ ID NO: 84511 - RNA, 21 nt, Artificial Sequence
  LRRK2 RNA guide
uuggcgguuuuguggaguaga

SEQ ID NO: 84512 - RNA, 21 nt, Artificial Sequence
  LRRK2 RNA guide
uuguggaguagaaaaggggga

SEQ ID NO: 84513 - RNA, 21 nt, Artificial Sequence
  LRRK2 RNA guide
uuucuacuccacaaaaccgcc

SEQ ID NO: 84514 - RNA, 21 nt, Artificial Sequence
  LRRK2 RNA guide
uuuguggaguagaaaaggggg

SEQ ID NO: 84515 - RNA, 21 nt, Artificial Sequence
  LRRK2 RNA guide
uuuucuacuccacaaaaccgc

SEQ ID NO: 84516 - RNA, 21 nt, Artificial Sequence
  LRRK2 RNA guide
uuuuguggaguagaaaagggg

SEQ ID NO: 84517 - RNA, 22 nt, Artificial Sequence
  LRRK2 RNA guide
acauuucccccuuuucuacucc

SEQ ID NO: 84518 - RNA, 22 nt, Artificial Sequence
  LRRK2 RNA guide
acguuggcgguuuuguggagua

SEQ ID NO: 84519 - RNA, 22 nt, Artificial Sequence
  LRRK2 RNA guide
acuccacaaaaccgccaacguc

SEQ ID NO: 84520 - RNA, 22 nt, Artificial Sequence
  LRRK2 RNA guide
augacguuggcgguuuugugga

SEQ ID NO: 84521 - RNA, 22 nt, Artificial Sequence
  LRRK2 RNA guide
auuucccccuuuucuacuccac

SEQ ID NO: 84522 - RNA, 22 nt, Artificial Sequence
  LRRK2 RNA guide
cacauuucccccuuuucuacuc

SEQ ID NO: 84523 - RNA, 22 nt, Artificial Sequence
  LRRK2 RNA guide
cauuucccccuuuucuacucca

SEQ ID NO: 84524 - RNA, 22 nt, Artificial Sequence
  LRRK2 RNA guide
ccacaaaaccgccaacgucauc

SEQ ID NO: 84525 - RNA, 22 nt, Artificial Sequence
  LRRK2 RNA guide
ccacauuucccccuuuucuacu

SEQ ID NO: 84526 - RNA, 22 nt, Artificial Sequence
  LRRK2 RNA guide
cccacauuucccccuuuucuac

SEQ ID NO: 84527 - RNA, 22 nt, Artificial Sequence
  LRRK2 RNA guide
ccccacauuucccccuuuucua

SEQ ID NO: 84528 - RNA, 22 nt, Artificial Sequence
  LRRK2 RNA guide
cccuuuucuacuccacaaaacc

SEQ ID NO: 84529 - RNA, 22 nt, Artificial Sequence
  LRRK2 RNA guide
ccuuuucuacuccacaaaaccg

SEQ ID NO: 84530 - RNA, 22 nt, Artificial Sequence
  LRRK2 RNA guide
cguuggcgguuuuguggaguag

SEQ ID NO: 84531 - RNA, 22 nt, Artificial Sequence
  LRRK2 RNA guide
cuacuccacaaaaccgccaacg

SEQ ID NO: 84532 - RNA, 22 nt, Artificial Sequence
  LRRK2 RNA guide
cuccacaaaaccgccaacguca

SEQ ID NO: 84533 - RNA, 22 nt, Artificial Sequence
  LRRK2 RNA guide
cuuuucuacuccacaaaaccgc

SEQ ID NO: 84534 - RNA, 22 nt, Artificial Sequence
  LRRK2 RNA guide
gacguuggcgguuuuguggagu

SEQ ID NO: 84535 - RNA, 22 nt, Artificial Sequence
  LRRK2 RNA guide
gaugacguuggcgguuuugugg

SEQ ID NO: 84536 - RNA, 22 nt, Artificial Sequence
  LRRK2 RNA guide
ggccaugaugacguuggcgguu

SEQ ID NO: 84537 - RNA, 22 nt, Artificial Sequence
  LRRK2 RNA guide
guggaguagaaaagggggaaau

SEQ ID NO: 84538 - RNA, 22 nt, Artificial Sequence
  LRRK2 RNA guide
guuggcgguuuuguggaguaga

SEQ ID NO: 84539 - RNA, 22 nt, Artificial Sequence
  LRRK2 RNA guide
guuuuguggaguagaaaagggg

SEQ ID NO: 84540 - RNA, 22 nt, Artificial Sequence
  LRRK2 RNA guide
uacuccacaaaaccgccaacgu

SEQ ID NO: 84541 - RNA, 22 nt, Artificial Sequence
  LRRK2 RNA guide
uccacaaaaccgccaacgucau

SEQ ID NO: 84542 - RNA, 22 nt, Artificial Sequence
  LRRK2 RNA guide
uccccacauuucccccuuuucu

SEQ ID NO: 84543 - RNA, 22 nt, Artificial Sequence
  LRRK2 RNA guide
ucuacuccacaaaaccgccaac

SEQ ID NO: 84544 - RNA, 22 nt, Artificial Sequence
  LRRK2 RNA guide
ugacguuggcgguuuuguggag

SEQ ID NO: 84545 - RNA, 22 nt, Artificial Sequence
  LRRK2 RNA guide
ugaugacguuggcgguuuugug

SEQ ID NO: 84546 - RNA, 22 nt, Artificial Sequence
  LRRK2 RNA guide
uggaguagaaaagggggaaaug

SEQ ID NO: 84547 - RNA, 22 nt, Artificial Sequence
  LRRK2 RNA guide
uguggaguagaaaagggggaaa

SEQ ID NO: 84548 - RNA, 22 nt, Artificial Sequence
  LRRK2 RNA guide
uucuacuccacaaaaccgccaa

SEQ ID NO: 84549 - RNA, 22 nt, Artificial Sequence
  LRRK2 RNA guide
uuggcgguuuuguggaguagaa

SEQ ID NO: 84550 - RNA, 22 nt, Artificial Sequence
  LRRK2 RNA guide
uuguggaguagaaaagggggaa

SEQ ID NO: 84551 - RNA, 22 nt, Artificial Sequence
  LRRK2 RNA guide
uuucuacuccacaaaaccgcca

SEQ ID NO: 84552 - RNA, 22 nt, Artificial Sequence
  LRRK2 RNA guide
uuuguggaguagaaaaggggga

SEQ ID NO: 84553 - RNA, 22 nt, Artificial Sequence
  LRRK2 RNA guide
uuuucuacuccacaaaaccgcc

SEQ ID NO: 84554 - RNA, 22 nt, Artificial Sequence
  LRRK2 RNA guide
uuuuguggaguagaaaaggggg

SEQ ID NO: 84555 - RNA, 22 nt, Artificial Sequence
  LRRK2 RNA guide
auccgggagguggggggcagcc

SEQ ID NO: 84556 - RNA, 20 nt, Artificial Sequence
  LRRK2 RNA guide
accucccggaugggguggcu

SEQ ID NO: 84557 - RNA, 20 nt, Artificial Sequence
  LRRK2 RNA guide
agcgucuccgcugggcagcc

SEQ ID NO: 84558 - RNA, 20 nt, Artificial Sequence
  LRRK2 RNA guide
aggagcgucuccgcugggca

SEQ ID NO: 84559 - RNA, 20 nt, Artificial Sequence
  LRRK2 RNA guide
augggguggcugcccagcgg

SEQ ID NO: 84560 - RNA, 20 nt, Artificial Sequence
  LRRK2 RNA guide
caccucccggaugggguggc

SEQ ID NO: 84561 - RNA, 20 nt, Artificial Sequence
  LRRK2 RNA guide
cccggaugggguggcugccc

SEQ ID NO: 84562 - RNA, 20 nt, Artificial Sequence
  LRRK2 RNA guide
ccgcugggcagccaccccau

SEQ ID NO: 84563 - RNA, 20 nt, Artificial Sequence
  LRRK2 RNA guide
ccggaugggguggcugccca

SEQ ID NO: 84564 - RNA, 20 nt, Artificial Sequence
  LRRK2 RNA guide
ccucccggaugggguggcug

SEQ ID NO: 84565 - RNA, 20 nt, Artificial Sequence
  LRRK2 RNA guide
cgcugggcagccaccccauc

SEQ ID NO: 84566 - RNA, 20 nt, Artificial Sequence
  LRRK2 RNA guide
cggaugggguggcugcccag

SEQ ID NO: 84567 - RNA, 20 nt, Artificial Sequence
  LRRK2 RNA guide
cgucuccgcugggcagccac

SEQ ID NO: 84568 - RNA, 20 nt, Artificial Sequence
  LRRK2 RNA guide
cucccggaugggguggcugc

SEQ ID NO: 84569 - RNA, 20 nt, Artificial Sequence
  LRRK2 RNA guide
cuccgcugggcagccacccc

SEQ ID NO: 84570 - RNA, 20 nt, Artificial Sequence
  LRRK2 RNA guide
cugggcagccaccccauccg

SEQ ID NO: 84571 - RNA, 20 nt, Artificial Sequence
  LRRK2 RNA guide
gagcgucuccgcugggcagc

SEQ ID NO: 84572 - RNA, 20 nt, Artificial Sequence
  LRRK2 RNA guide
gaggagcgucuccgcugggc

SEQ ID NO: 84573 - RNA, 20 nt, Artificial Sequence
  LRRK2 RNA guide
gaugggguggcugcccagcg

SEQ ID NO: 84574 - RNA, 20 nt, Artificial Sequence
  LRRK2 RNA guide
gcgucuccgcugggcagcca

SEQ ID NO: 84575 - RNA, 20 nt, Artificial Sequence
  LRRK2 RNA guide
gcugggcagccaccccaucc

SEQ ID NO: 84576 - RNA, 20 nt, Artificial Sequence
  LRRK2 RNA guide
ggagcgucuccgcugggcag

SEQ ID NO: 84577 - RNA, 20 nt, Artificial Sequence
  LRRK2 RNA guide
ggaugggguggcugcccagc

SEQ ID NO: 84578 - RNA, 20 nt, Artificial Sequence
  LRRK2 RNA guide
gggcagccaccccauccggg

SEQ ID NO: 84579 - RNA, 20 nt, Artificial Sequence
  LRRK2 RNA guide
gggguggcugcccagcggag

SEQ ID NO: 84580 - RNA, 20 nt, Artificial Sequence
  LRRK2 RNA guide
ggguggcugcccagcggaga

SEQ ID NO: 84581 - RNA, 20 nt, Artificial Sequence
  LRRK2 RNA guide
gguggcugcccagcggagac

SEQ ID NO: 84582 - RNA, 20 nt, Artificial Sequence
  LRRK2 RNA guide
gucuccgcugggcagccacc

SEQ ID NO: 84583 - RNA, 20 nt, Artificial Sequence
  LRRK2 RNA guide
guggcugcccagcggagacg

SEQ ID NO: 84584 - RNA, 20 nt, Artificial Sequence
  LRRK2 RNA guide
ucccggaugggguggcugcc

SEQ ID NO: 84585 - RNA, 20 nt, Artificial Sequence
  LRRK2 RNA guide
uccgcugggcagccacccca

SEQ ID NO: 84586 - RNA, 20 nt, Artificial Sequence
  LRRK2 RNA guide
ucuccgcugggcagccaccc

SEQ ID NO: 84587 - RNA, 20 nt, Artificial Sequence
  LRRK2 RNA guide
ugggcagccaccccauccgg

SEQ ID NO: 84588 - RNA, 20 nt, Artificial Sequence
  LRRK2 RNA guide
ugggguggcugcccagcgga

SEQ ID NO: 84589 - RNA, 21 nt, Artificial Sequence
  LRRK2 RNA guide
accucccggaugggguggcug

SEQ ID NO: 84590 - RNA, 21 nt, Artificial Sequence
  LRRK2 RNA guide
agcgucuccgcugggcagcca

SEQ ID NO: 84591 - RNA, 21 nt, Artificial Sequence
  LRRK2 RNA guide
aggagcgucuccgcugggcag

SEQ ID NO: 84592 - RNA, 21 nt, Artificial Sequence
  LRRK2 RNA guide
augggguggcugcccagcgga

SEQ ID NO: 84593 - RNA, 21 nt, Artificial Sequence
  LRRK2 RNA guide
caccucccggaugggguggcu

SEQ ID NO: 84594 - RNA, 21 nt, Artificial Sequence
  LRRK2 RNA guide
ccaccucccggaugggguggc

SEQ ID NO: 84595 - RNA, 21 nt, Artificial Sequence
  LRRK2 RNA guide
cccggaugggguggcugccca

SEQ ID NO: 84596 - RNA, 21 nt, Artificial Sequence
  LRRK2 RNA guide
ccgcugggcagccaccccauc

SEQ ID NO: 84597 - RNA, 21 nt, Artificial Sequence
  LRRK2 RNA guide
ccggaugggguggcugcccag

SEQ ID NO: 84598 - RNA, 21 nt, Artificial Sequence
  LRRK2 RNA guide
ccucccggaugggguggcugc

SEQ ID NO: 84599 - RNA, 21 nt, Artificial Sequence
  LRRK2 RNA guide
cgcugggcagccaccccaucc

SEQ ID NO: 84600 - RNA, 21 nt, Artificial Sequence
  LRRK2 RNA guide
cggaugggguggcugcccagc

SEQ ID NO: 84601 - RNA, 21 nt, Artificial Sequence
  LRRK2 RNA guide
cgucuccgcugggcagccacc

SEQ ID NO: 84602 - RNA, 21 nt, Artificial Sequence
  LRRK2 RNA guide
cucccggaugggguggcugcc

SEQ ID NO: 84603 - RNA, 21 nt, Artificial Sequence
  LRRK2 RNA guide
cuccgcugggcagccacccca

SEQ ID NO: 84604 - RNA, 21 nt, Artificial Sequence
  LRRK2 RNA guide
cugggcagccaccccauccgg

SEQ ID NO: 84605 - RNA, 21 nt, Artificial Sequence
  LRRK2 RNA guide
gagcgucuccgcugggcagcc

SEQ ID NO: 84606 - RNA, 21 nt, Artificial Sequence
  LRRK2 RNA guide
gaggagcgucuccgcugggca

SEQ ID NO: 84607 - RNA, 21 nt, Artificial Sequence
  LRRK2 RNA guide
gaugggguggcugcccagcgg

SEQ ID NO: 84608 - RNA, 21 nt, Artificial Sequence
  LRRK2 RNA guide
gcgucuccgcugggcagccac

SEQ ID NO: 84609 - RNA, 21 nt, Artificial Sequence
  LRRK2 RNA guide
gcugggcagccaccccauccg

SEQ ID NO: 84610 - RNA, 21 nt, Artificial Sequence
  LRRK2 RNA guide
ggagcgucuccgcugggcagc

SEQ ID NO: 84611 - RNA, 21 nt, Artificial Sequence
  LRRK2 RNA guide
ggaugggguggcugcccagcg

SEQ ID NO: 84612 - RNA, 21 nt, Artificial Sequence
  LRRK2 RNA guide
gggcagccaccccauccggga

SEQ ID NO: 84613 - RNA, 21 nt, Artificial Sequence
  LRRK2 RNA guide
gggguggcugcccagcggaga

SEQ ID NO: 84614 - RNA, 21 nt, Artificial Sequence
  LRRK2 RNA guide
ggguggcugcccagcggagac

SEQ ID NO: 84615 - RNA, 21 nt, Artificial Sequence
  LRRK2 RNA guide
gguggcugcccagcggagacg

SEQ ID NO: 84616 - RNA, 21 nt, Artificial Sequence
  LRRK2 RNA guide
gucuccgcugggcagccaccc

SEQ ID NO: 84617 - RNA, 21 nt, Artificial Sequence
  LRRK2 RNA guide
guggcugcccagcggagacgc

SEQ ID NO: 84618 - RNA, 21 nt, Artificial Sequence
  LRRK2 RNA guide
ucccggaugggguggcugccc

SEQ ID NO: 84619 - RNA, 21 nt, Artificial Sequence
  LRRK2 RNA guide
uccgcugggcagccaccccau

SEQ ID NO: 84620 - RNA, 21 nt, Artificial Sequence
  LRRK2 RNA guide
ucuccgcugggcagccacccc

SEQ ID NO: 84621 - RNA, 21 nt, Artificial Sequence
  LRRK2 RNA guide
ugaggagcgucuccgcugggc

SEQ ID NO: 84622 - RNA, 21 nt, Artificial Sequence
  LRRK2 RNA guide
ugggcagccaccccauccggg

SEQ ID NO: 84623 - RNA, 21 nt, Artificial Sequence
  LRRK2 RNA guide
ugggguggcugcccagcggag

SEQ ID NO: 84624 - RNA, 22 nt, Artificial Sequence
  LRRK2 RNA guide
accucccggaugggguggcugc

SEQ ID NO: 84625 - RNA, 22 nt, Artificial Sequence
  LRRK2 RNA guide
agcgucuccgcugggcagccac

SEQ ID NO: 84626 - RNA, 22 nt, Artificial Sequence
  LRRK2 RNA guide
aggagcgucuccgcugggcagc

SEQ ID NO: 84627 - RNA, 22 nt, Artificial Sequence
  LRRK2 RNA guide
augggguggcugcccagcggag

SEQ ID NO: 84628 - RNA, 22 nt, Artificial Sequence
  LRRK2 RNA guide
caccucccggaugggguggcug

SEQ ID NO: 84629 - RNA, 22 nt, Artificial Sequence
  LRRK2 RNA guide
ccaccucccggaugggguggcu

SEQ ID NO: 84630 - RNA, 22 nt, Artificial Sequence
  LRRK2 RNA guide
cccaccucccggaugggguggc

SEQ ID NO: 84631 - RNA, 22 nt, Artificial Sequence
  LRRK2 RNA guide
cccggaugggguggcugcccag

SEQ ID NO: 84632 - RNA, 22 nt, Artificial Sequence
  LRRK2 RNA guide
ccgcugggcagccaccccaucc

SEQ ID NO: 84633 - RNA, 22 nt, Artificial Sequence
  LRRK2 RNA guide
ccggaugggguggcugcccagc

SEQ ID NO: 84634 - RNA, 22 nt, Artificial Sequence
  LRRK2 RNA guide
ccucccggaugggguggcugcc

SEQ ID NO: 84635 - RNA, 22 nt, Artificial Sequence
  LRRK2 RNA guide
cgcugggcagccaccccauccg

SEQ ID NO: 84636 - RNA, 22 nt, Artificial Sequence
  LRRK2 RNA guide
cggaugggguggcugcccagcg

SEQ ID NO: 84637 - RNA, 22 nt, Artificial Sequence
  LRRK2 RNA guide
cgucuccgcugggcagccaccc

SEQ ID NO: 84638 - RNA, 22 nt, Artificial Sequence
  LRRK2 RNA guide
cucccggaugggguggcugccc

SEQ ID NO: 84639 - RNA, 22 nt, Artificial Sequence
  LRRK2 RNA guide
cuccgcugggcagccaccccau

SEQ ID NO: 84640 - RNA, 22 nt, Artificial Sequence
  LRRK2 RNA guide
cugggcagccaccccauccggg

SEQ ID NO: 84641 - RNA, 22 nt, Artificial Sequence
  LRRK2 RNA guide
gagcgucuccgcugggcagcca

SEQ ID NO: 84642 - RNA, 22 nt, Artificial Sequence
  LRRK2 RNA guide
gaggagcgucuccgcugggcag

SEQ ID NO: 84643 - RNA, 22 nt, Artificial Sequence
  LRRK2 RNA guide
gaugggguggcugcccagcgga

SEQ ID NO: 84644 - RNA, 22 nt, Artificial Sequence
  LRRK2 RNA guide
gcgucuccgcugggcagccacc

SEQ ID NO: 84645 - RNA, 22 nt, Artificial Sequence
  LRRK2 RNA guide
gcugggcagccaccccauccgg

SEQ ID NO: 84646 - RNA, 22 nt, Artificial Sequence
  LRRK2 RNA guide
ggagcgucuccgcugggcagcc

SEQ ID NO: 84647 - RNA, 22 nt, Artificial Sequence
  LRRK2 RNA guide
ggaugggguggcugcccagcgg

SEQ ID NO: 84648 - RNA, 22 nt, Artificial Sequence
  LRRK2 RNA guide
gggcagccaccccauccgggag

SEQ ID NO: 84649 - RNA, 22 nt, Artificial Sequence
  LRRK2 RNA guide
gggguggcugcccagcggagac

SEQ ID NO: 84650 - RNA, 22 nt, Artificial Sequence
  LRRK2 RNA guide
ggguggcugcccagcggagacg

SEQ ID NO: 84651 - RNA, 22 nt, Artificial Sequence
  LRRK2 RNA guide
gguggcugcccagcggagacgc

SEQ ID NO: 84652 - RNA, 22 nt, Artificial Sequence
  LRRK2 RNA guide
gucuccgcugggcagccacccc

SEQ ID NO: 84653 - RNA, 22 nt, Artificial Sequence
  LRRK2 RNA guide
gugaggagcgucuccgcugggc

SEQ ID NO: 84654 - RNA, 22 nt, Artificial Sequence
  LRRK2 RNA guide
guggcugcccagcggagacgcu

SEQ ID NO: 84655 - RNA, 22 nt, Artificial Sequence
  LRRK2 RNA guide
ucccggaugggguggcugccca

SEQ ID NO: 84656 - RNA, 22 nt, Artificial Sequence
  LRRK2 RNA guide
uccgcugggcagccaccccauc

SEQ ID NO: 84657 - RNA, 22 nt, Artificial Sequence
  LRRK2 RNA guide
ucuccgcugggcagccacccca

SEQ ID NO: 84658 - RNA, 22 nt, Artificial Sequence
  LRRK2 RNA guide
ugaggagcgucuccgcugggca

SEQ ID NO: 84659 - RNA, 22 nt, Artificial Sequence
  LRRK2 RNA guide
ugggcagccaccccauccggga

SEQ ID NO: 84660 - RNA, 22 nt, Artificial Sequence
  LRRK2 RNA guide
ugggguggcugcccagcggaga

SEQ ID NO: 84661 - RNA, 20 nt, Artificial Sequence
  LRRK2 RNA guide
accucccggauggggcggcu

SEQ ID NO: 84662 - RNA, 20 nt, Artificial Sequence
  LRRK2 RNA guide
auggggcggcugcccagcgg

SEQ ID NO: 84663 - RNA, 20 nt, Artificial Sequence
  LRRK2 RNA guide
ccgcugggcagccgccccau

SEQ ID NO: 84664 - RNA, 20 nt, Artificial Sequence
  LRRK2 RNA guide
ccggauggggcggcugccca

SEQ ID NO: 84665 - RNA, 20 nt, Artificial Sequence
  LRRK2 RNA guide
cgcugggcagccgccccauc

SEQ ID NO: 84666 - RNA, 20 nt, Artificial Sequence
  LRRK2 RNA guide
cggauggggcggcugcccag

SEQ ID NO: 84667 - RNA, 20 nt, Artificial Sequence
  LRRK2 RNA guide
cgucuccgcugggcagccgc

SEQ ID NO: 84668 - RNA, 20 nt, Artificial Sequence
  LRRK2 RNA guide
cucccggauggggcggcugc

SEQ ID NO: 84669 - RNA, 20 nt, Artificial Sequence
  LRRK2 RNA guide
cugggcagccgccccauccg

SEQ ID NO: 84670 - RNA, 20 nt, Artificial Sequence
  LRRK2 RNA guide
gauggggcggcugcccagcg

SEQ ID NO: 84671 - RNA, 20 nt, Artificial Sequence
  LRRK2 RNA guide
gcggcugcccagcggagacg

SEQ ID NO: 84672 - RNA, 20 nt, Artificial Sequence
  LRRK2 RNA guide
gcgucuccgcugggcagccg

SEQ ID NO: 84673 - RNA, 20 nt, Artificial Sequence
  LRRK2 RNA guide
gcugggcagccgccccaucc

SEQ ID NO: 84674 - RNA, 20 nt, Artificial Sequence
  LRRK2 RNA guide
ggauggggcggcugcccagc

SEQ ID NO: 84675 - RNA, 20 nt, Artificial Sequence
  LRRK2 RNA guide
ggcggcugcccagcggagac

SEQ ID NO: 84676 - RNA, 20 nt, Artificial Sequence
  LRRK2 RNA guide
gggcggcugcccagcggaga

SEQ ID NO: 84677 - RNA, 20 nt, Artificial Sequence
  LRRK2 RNA guide
gucuccgcugggcagccgcc

SEQ ID NO: 84678 - RNA, 20 nt, Artificial Sequence
  LRRK2 RNA guide
ucccggauggggcggcugcc

SEQ ID NO: 84679 - RNA, 20 nt, Artificial Sequence
  LRRK2 RNA guide
uccgcugggcagccgcccca

SEQ ID NO: 84680 - RNA, 20 nt, Artificial Sequence
  LRRK2 RNA guide
ucuccgcugggcagccgccc

SEQ ID NO: 84681 - RNA, 20 nt, Artificial Sequence
  LRRK2 RNA guide
ugggcagccgccccauccgg

SEQ ID NO: 84682 - RNA, 20 nt, Artificial Sequence
  LRRK2 RNA guide
uggggcggcugcccagcgga

SEQ ID NO: 84683 - RNA, 21 nt, Artificial Sequence
  LRRK2 RNA guide
accucccggauggggcggcug

SEQ ID NO: 84684 - RNA, 21 nt, Artificial Sequence
  LRRK2 RNA guide
agcgucuccgcugggcagccg

SEQ ID NO: 84685 - RNA, 21 nt, Artificial Sequence
  LRRK2 RNA guide
auggggcggcugcccagcgga

SEQ ID NO: 84686 - RNA, 21 nt, Artificial Sequence
  LRRK2 RNA guide
caccucccggauggggcggcu

SEQ ID NO: 84687 - RNA, 21 nt, Artificial Sequence
  LRRK2 RNA guide
uccgcugggcagccgccccau

SEQ ID NO: 84688 - RNA, 22 nt, Artificial Sequence
  LRRK2 RNA guide
accucccggauggggcggcugc

SEQ ID NO: 84689 - RNA, 22 nt, Artificial Sequence
  LRRK2 RNA guide
agcgucuccgcugggcagccgc

SEQ ID NO: 84690 - RNA, 22 nt, Artificial Sequence
  LRRK2 RNA guide
auggggcggcugcccagcggag

SEQ ID NO: 84691 - RNA, 22 nt, Artificial Sequence
  LRRK2 RNA guide
caccucccggauggggcggcug

SEQ ID NO: 84692 - RNA, 22 nt, Artificial Sequence
  LRRK2 RNA guide
ccaccucccggauggggcggcu

SEQ ID NO: 84693 - RNA, 22 nt, Artificial Sequence
  LRRK2 RNA guide
cuccgcugggcagccgccccau

SEQ ID NO: 84694 - RNA, 22 nt, Artificial Sequence
  LRRK2 RNA guide
gagcgucuccgcugggcagccg

SEQ ID NO: 84695 - RNA, 22 nt, Artificial Sequence
  LRRK2 RNA guide
gauggggcggcugcccagcgga

SEQ ID NO: 84696 - RNA, 22 nt, Artificial Sequence
  LRRK2 RNA guide
gcggcugcccagcggagacgcu

SEQ ID NO: 84697 - RNA, 22 nt, Artificial Sequence
  LRRK2 RNA guide
ucccggauggggcggcugccca

SEQ ID NO: 84698 - RNA, 22 nt, Artificial Sequence
  LRRK2 RNA guide
uccgcugggcagccgccccauc

SEQ ID NO: 84699 - RNA, 22 nt, Artificial Sequence
  LRRK2 RNA guide
ucuccgcugggcagccgcccca

SEQ ID NO: 84700 - RNA, 22 nt, Artificial Sequence
  LRRK2 RNA guide
ugggcagccgccccauccggga

SEQ ID NO: 84701 - RNA, 22 nt, Artificial Sequence
  LRRK2 RNA guide
uggggcggcugcccagcggaga

SEQ ID NO: 84702 - RNA, 21 nt, Artificial Sequence
  LRRK2 RNA guide
ggagaagugaggagccccucc

SEQ ID NO: 84703 - RNA, 22 nt, Artificial Sequence
  LRRK2 RNA guide
cggagaagugaggagccccucc

SEQ ID NO: 84704 - RNA, 22 nt, Artificial Sequence
  LRRK2 RNA guide
cugggcggaggggcuccucacu

SEQ ID NO: 84705 - RNA, 22 nt, Artificial Sequence
  LRRK2 RNA guide
ggagaagugaggagccccuccg

SEQ ID NO: 84706 - RNA, 20 nt, Artificial Sequence
  LRRK2 RNA guide
acuucuccgacggggcggcu

SEQ ID NO: 84707 - RNA, 20 nt, Artificial Sequence
  LRRK2 RNA guide
agcagccgccccgucggaga

SEQ ID NO: 84708 - RNA, 20 nt, Artificial Sequence
  LRRK2 RNA guide
cacuucuccgacggggcggc

SEQ ID NO: 84709 - RNA, 20 nt, Artificial Sequence
  LRRK2 RNA guide
cagcagccgccccgucggag

SEQ ID NO: 84710 - RNA, 20 nt, Artificial Sequence
  LRRK2 RNA guide
ccagcagccgccccgucgga

SEQ ID NO: 84711 - RNA, 20 nt, Artificial Sequence
  LRRK2 RNA guide
cuccgacggggcggcugcug

SEQ ID NO: 84712 - RNA, 20 nt, Artificial Sequence
  LRRK2 RNA guide
cuucuccgacggggcggcug

SEQ ID NO: 84713 - RNA, 20 nt, Artificial Sequence
  LRRK2 RNA guide
ucacuucuccgacggggcgg

SEQ ID NO: 84714 - RNA, 20 nt, Artificial Sequence
  LRRK2 RNA guide
uccgacggggcggcugcugg

SEQ ID NO: 84715 - RNA, 20 nt, Artificial Sequence
  LRRK2 RNA guide
ucuccgacggggcggcugcu

SEQ ID NO: 84716 - RNA, 20 nt, Artificial Sequence
  LRRK2 RNA guide
uucuccgacggggcggcugc

SEQ ID NO: 84717 - RNA, 21 nt, Artificial Sequence
  LRRK2 RNA guide
acuucuccgacggggcggcug

SEQ ID NO: 84718 - RNA, 21 nt, Artificial Sequence
  LRRK2 RNA guide
agcagccgccccgucggagaa

SEQ ID NO: 84719 - RNA, 21 nt, Artificial Sequence
  LRRK2 RNA guide
cacuucuccgacggggcggcu

SEQ ID NO: 84720 - RNA, 21 nt, Artificial Sequence
  LRRK2 RNA guide
cagcagccgccccgucggaga

SEQ ID NO: 84721 - RNA, 21 nt, Artificial Sequence
  LRRK2 RNA guide
cucacuucuccgacggggcgg

SEQ ID NO: 84722 - RNA, 21 nt, Artificial Sequence
  LRRK2 RNA guide
cuucuccgacggggcggcugc

SEQ ID NO: 84723 - RNA, 21 nt, Artificial Sequence
  LRRK2 RNA guide
ucacuucuccgacggggcggc

SEQ ID NO: 84724 - RNA, 21 nt, Artificial Sequence
  LRRK2 RNA guide
ucuccgacggggcggcugcug

SEQ ID NO: 84725 - RNA, 21 nt, Artificial Sequence
  LRRK2 RNA guide
uucuccgacggggcggcugcu

SEQ ID NO: 84726 - RNA, 22 nt, Artificial Sequence
  LRRK2 RNA guide
acuucuccgacggggcggcugc

SEQ ID NO: 84727 - RNA, 22 nt, Artificial Sequence
  LRRK2 RNA guide
agcagccgccccgucggagaag

SEQ ID NO: 84728 - RNA, 22 nt, Artificial Sequence
  LRRK2 RNA guide
cacuucuccgacggggcggcug

SEQ ID NO: 84729 - RNA, 22 nt, Artificial Sequence
  LRRK2 RNA guide
cagcagccgccccgucggagaa

SEQ ID NO: 84730 - RNA, 22 nt, Artificial Sequence
  LRRK2 RNA guide
ccagcagccgccccgucggaga

SEQ ID NO: 84731 - RNA, 22 nt, Artificial Sequence
  LRRK2 RNA guide
ccucacuucuccgacggggcgg

SEQ ID NO: 84732 - RNA, 22 nt, Artificial Sequence
  LRRK2 RNA guide
cucacuucuccgacggggcggc

SEQ ID NO: 84733 - RNA, 22 nt, Artificial Sequence
  LRRK2 RNA guide
cuucuccgacggggcggcugcu

SEQ ID NO: 84734 - RNA, 22 nt, Artificial Sequence
  LRRK2 RNA guide
ucacuucuccgacggggcggcu

SEQ ID NO: 84735 - RNA, 22 nt, Artificial Sequence
  LRRK2 RNA guide
ucuccgacggggcggcugcugg

SEQ ID NO: 84736 - RNA, 22 nt, Artificial Sequence
  LRRK2 RNA guide
uucuccgacggggcggcugcug

SEQ ID NO: 84737 - RNA, 20 nt, Artificial Sequence
  LRRK2 RNA guide
acuucuccgauggggcggcu

SEQ ID NO: 84738 - RNA, 20 nt, Artificial Sequence
  LRRK2 RNA guide
agcagccgccccaucggaga

SEQ ID NO: 84739 - RNA, 20 nt, Artificial Sequence
  LRRK2 RNA guide
agccgccccaucggagaagu

SEQ ID NO: 84740 - RNA, 20 nt, Artificial Sequence
  LRRK2 RNA guide
aggggcuccucacuucuccg

SEQ ID NO: 84741 - RNA, 20 nt, Artificial Sequence
  LRRK2 RNA guide
cacuucuccgauggggcggc

SEQ ID NO: 84742 - RNA, 20 nt, Artificial Sequence
  LRRK2 RNA guide
cagcagccgccccaucggag

SEQ ID NO: 84743 - RNA, 20 nt, Artificial Sequence
  LRRK2 RNA guide
cagccgccccaucggagaag

SEQ ID NO: 84744 - RNA, 20 nt, Artificial Sequence
  LRRK2 RNA guide
caucggagaagugaggagcc

SEQ ID NO: 84745 - RNA, 20 nt, Artificial Sequence
  LRRK2 RNA guide
ccagcagccgccccaucgga

SEQ ID NO: 84746 - RNA, 20 nt, Artificial Sequence
  LRRK2 RNA guide
ccaucggagaagugaggagc

SEQ ID NO: 84747 - RNA, 20 nt, Artificial Sequence
  LRRK2 RNA guide
cccagcagccgccccaucgg

SEQ ID NO: 84748 - RNA, 20 nt, Artificial Sequence
  LRRK2 RNA guide
cccaucggagaagugaggag

SEQ ID NO: 84749 - RNA, 20 nt, Artificial Sequence
  LRRK2 RNA guide
ccccaucggagaagugagga

SEQ ID NO: 84750 - RNA, 20 nt, Artificial Sequence
  LRRK2 RNA guide
ccgauggggcggcugcuggg

SEQ ID NO: 84751 - RNA, 20 nt, Artificial Sequence
  LRRK2 RNA guide
ccgcccagcagccgccccau

SEQ ID NO: 84752 - RNA, 20 nt, Artificial Sequence
  LRRK2 RNA guide
ccgccccaucggagaaguga

SEQ ID NO: 84753 - RNA, 20 nt, Artificial Sequence
  LRRK2 RNA guide
ccucacuucuccgauggggc

SEQ ID NO: 84754 - RNA, 20 nt, Artificial Sequence
  LRRK2 RNA guide
cgauggggcggcugcugggc

SEQ ID NO: 84755 - RNA, 20 nt, Artificial Sequence
  LRRK2 RNA guide
cgcccagcagccgccccauc

SEQ ID NO: 84756 - RNA, 20 nt, Artificial Sequence
  LRRK2 RNA guide
cgccccaucggagaagugag

SEQ ID NO: 84757 - RNA, 20 nt, Artificial Sequence
  LRRK2 RNA guide
cucacuucuccgauggggcg

SEQ ID NO: 84758 - RNA, 20 nt, Artificial Sequence
  LRRK2 RNA guide
cuccgauggggcggcugcug

SEQ ID NO: 84759 - RNA, 20 nt, Artificial Sequence
  LRRK2 RNA guide
cuccucacuucuccgauggg

SEQ ID NO: 84760 - RNA, 20 nt, Artificial Sequence
  LRRK2 RNA guide
cuucuccgauggggcggcug

SEQ ID NO: 84761 - RNA, 20 nt, Artificial Sequence
  LRRK2 RNA guide
gaggggcuccucacuucucc

SEQ ID NO: 84762 - RNA, 20 nt, Artificial Sequence
  LRRK2 RNA guide
gcagccgccccaucggagaa

SEQ ID NO: 84763 - RNA, 20 nt, Artificial Sequence
  LRRK2 RNA guide
gcccagcagccgccccaucg

SEQ ID NO: 84764 - RNA, 20 nt, Artificial Sequence
  LRRK2 RNA guide
gccccaucggagaagugagg

SEQ ID NO: 84765 - RNA, 20 nt, Artificial Sequence
  LRRK2 RNA guide
gccgccccaucggagaagug

SEQ ID NO: 84766 - RNA, 20 nt, Artificial Sequence
  LRRK2 RNA guide
gcuccucacuucuccgaugg

SEQ ID NO: 84767 - RNA, 20 nt, Artificial Sequence
  LRRK2 RNA guide
ggaggggcuccucacuucuc

SEQ ID NO: 84768 - RNA, 20 nt, Artificial Sequence
  LRRK2 RNA guide
ggcuccucacuucuccgaug

SEQ ID NO: 84769 - RNA, 20 nt, Artificial Sequence
  LRRK2 RNA guide
gggcuccucacuucuccgau

SEQ ID NO: 84770 - RNA, 20 nt, Artificial Sequence
  LRRK2 RNA guide
ggggcuccucacuucuccga

SEQ ID NO: 84771 - RNA, 20 nt, Artificial Sequence
  LRRK2 RNA guide
ucacuucuccgauggggcgg

SEQ ID NO: 84772 - RNA, 20 nt, Artificial Sequence
  LRRK2 RNA guide
uccgauggggcggcugcugg

SEQ ID NO: 84773 - RNA, 20 nt, Artificial Sequence
  LRRK2 RNA guide
uccgcccagcagccgcccca

SEQ ID NO: 84774 - RNA, 20 nt, Artificial Sequence
  LRRK2 RNA guide
uccucacuucuccgaugggg

SEQ ID NO: 84775 - RNA, 20 nt, Artificial Sequence
  LRRK2 RNA guide
ucuccgauggggcggcugcu

SEQ ID NO: 84776 - RNA, 20 nt, Artificial Sequence
  LRRK2 RNA guide
uucuccgauggggcggcugc

SEQ ID NO: 84777 - RNA, 21 nt, Artificial Sequence
  LRRK2 RNA guide
acuucuccgauggggcggcug

SEQ ID NO: 84778 - RNA, 21 nt, Artificial Sequence
  LRRK2 RNA guide
agcagccgccccaucggagaa

SEQ ID NO: 84779 - RNA, 21 nt, Artificial Sequence
  LRRK2 RNA guide
agccgccccaucggagaagug

SEQ ID NO: 84780 - RNA, 21 nt, Artificial Sequence
  LRRK2 RNA guide
aggggcuccucacuucuccga

SEQ ID NO: 84781 - RNA, 21 nt, Artificial Sequence
  LRRK2 RNA guide
cacuucuccgauggggcggcu

SEQ ID NO: 84782 - RNA, 21 nt, Artificial Sequence
  LRRK2 RNA guide
cagcagccgccccaucggaga

SEQ ID NO: 84783 - RNA, 21 nt, Artificial Sequence
  LRRK2 RNA guide
cagccgccccaucggagaagu

SEQ ID NO: 84784 - RNA, 21 nt, Artificial Sequence
  LRRK2 RNA guide
caucggagaagugaggagccc

SEQ ID NO: 84785 - RNA, 21 nt, Artificial Sequence
  LRRK2 RNA guide
ccagcagccgccccaucggag

SEQ ID NO: 84786 - RNA, 21 nt, Artificial Sequence
  LRRK2 RNA guide
ccaucggagaagugaggagcc

SEQ ID NO: 84787 - RNA, 21 nt, Artificial Sequence
  LRRK2 RNA guide
cccagcagccgccccaucgga

SEQ ID NO: 84788 - RNA, 21 nt, Artificial Sequence
  LRRK2 RNA guide
cccaucggagaagugaggagc

SEQ ID NO: 84789 - RNA, 21 nt, Artificial Sequence
  LRRK2 RNA guide
ccccaucggagaagugaggag

SEQ ID NO: 84790 - RNA, 21 nt, Artificial Sequence
  LRRK2 RNA guide
ccgccccaucggagaagugag

SEQ ID NO: 84791 - RNA, 21 nt, Artificial Sequence
  LRRK2 RNA guide
ccucacuucuccgauggggcg

SEQ ID NO: 84792 - RNA, 21 nt, Artificial Sequence
  LRRK2 RNA guide
cgccccaucggagaagugagg

SEQ ID NO: 84793 - RNA, 21 nt, Artificial Sequence
  LRRK2 RNA guide
cggaggggcuccucacuucuc

SEQ ID NO: 84794 - RNA, 21 nt, Artificial Sequence
  LRRK2 RNA guide
cucacuucuccgauggggcgg

SEQ ID NO: 84795 - RNA, 21 nt, Artificial Sequence
  LRRK2 RNA guide
cuccgauggggcggcugcugg

SEQ ID NO: 84796 - RNA, 21 nt, Artificial Sequence
  LRRK2 RNA guide
cuccucacuucuccgaugggg

SEQ ID NO: 84797 - RNA, 21 nt, Artificial Sequence
  LRRK2 RNA guide
cuucuccgauggggcggcugc

SEQ ID NO: 84798 - RNA, 21 nt, Artificial Sequence
  LRRK2 RNA guide
gaggggcuccucacuucuccg

SEQ ID NO: 84799 - RNA, 21 nt, Artificial Sequence
  LRRK2 RNA guide
gcagccgccccaucggagaag

SEQ ID NO: 84800 - RNA, 21 nt, Artificial Sequence
  LRRK2 RNA guide
gccccaucggagaagugagga

SEQ ID NO: 84801 - RNA, 21 nt, Artificial Sequence
  LRRK2 RNA guide
gccgccccaucggagaaguga

SEQ ID NO: 84802 - RNA, 21 nt, Artificial Sequence
  LRRK2 RNA guide
gcggaggggcuccucacuucu

SEQ ID NO: 84803 - RNA, 21 nt, Artificial Sequence
  LRRK2 RNA guide
gcuccucacuucuccgauggg

SEQ ID NO: 84804 - RNA, 21 nt, Artificial Sequence
  LRRK2 RNA guide
ggaggggcuccucacuucucc

SEQ ID NO: 84805 - RNA, 21 nt, Artificial Sequence
  LRRK2 RNA guide
ggcuccucacuucuccgaugg

SEQ ID NO: 84806 - RNA, 21 nt, Artificial Sequence
  LRRK2 RNA guide
gggcuccucacuucuccgaug

SEQ ID NO: 84807 - RNA, 21 nt, Artificial Sequence
  LRRK2 RNA guide
ggggcuccucacuucuccgau

SEQ ID NO: 84808 - RNA, 21 nt, Artificial Sequence
  LRRK2 RNA guide
ucacuucuccgauggggcggc

SEQ ID NO: 84809 - RNA, 21 nt, Artificial Sequence
  LRRK2 RNA guide
uccgauggggcggcugcuggg

SEQ ID NO: 84810 - RNA, 21 nt, Artificial Sequence
  LRRK2 RNA guide
uccgcccagcagccgccccau

SEQ ID NO: 84811 - RNA, 21 nt, Artificial Sequence
  LRRK2 RNA guide
uccucacuucuccgauggggc

SEQ ID NO: 84812 - RNA, 21 nt, Artificial Sequence
  LRRK2 RNA guide
ucuccgauggggcggcugcug

SEQ ID NO: 84813 - RNA, 21 nt, Artificial Sequence
  LRRK2 RNA guide
uucuccgauggggcggcugcu

SEQ ID NO: 84814 - RNA, 22 nt, Artificial Sequence
  LRRK2 RNA guide
acuucuccgauggggcggcugc

SEQ ID NO: 84815 - RNA, 22 nt, Artificial Sequence
  LRRK2 RNA guide
agcagccgccccaucggagaag

SEQ ID NO: 84816 - RNA, 22 nt, Artificial Sequence
  LRRK2 RNA guide
agccgccccaucggagaaguga

SEQ ID NO: 84817 - RNA, 22 nt, Artificial Sequence
  LRRK2 RNA guide
aggggcuccucacuucuccgau

SEQ ID NO: 84818 - RNA, 22 nt, Artificial Sequence
  LRRK2 RNA guide
cacuucuccgauggggcggcug

SEQ ID NO: 84819 - RNA, 22 nt, Artificial Sequence
  LRRK2 RNA guide
cagcagccgccccaucggagaa

SEQ ID NO: 84820 - RNA, 22 nt, Artificial Sequence
  LRRK2 RNA guide
cagccgccccaucggagaagug

SEQ ID NO: 84821 - RNA, 22 nt, Artificial Sequence
  LRRK2 RNA guide
caucggagaagugaggagcccc

SEQ ID NO: 84822 - RNA, 22 nt, Artificial Sequence
  LRRK2 RNA guide
ccagcagccgccccaucggaga

SEQ ID NO: 84823 - RNA, 22 nt, Artificial Sequence
  LRRK2 RNA guide
ccaucggagaagugaggagccc

SEQ ID NO: 84824 - RNA, 22 nt, Artificial Sequence
  LRRK2 RNA guide
cccagcagccgccccaucggag

SEQ ID NO: 84825 - RNA, 22 nt, Artificial Sequence
  LRRK2 RNA guide
cccaucggagaagugaggagcc

SEQ ID NO: 84826 - RNA, 22 nt, Artificial Sequence
  LRRK2 RNA guide
ccccaucggagaagugaggagc

SEQ ID NO: 84827 - RNA, 22 nt, Artificial Sequence
  LRRK2 RNA guide
ccgccccaucggagaagugagg

SEQ ID NO: 84828 - RNA, 22 nt, Artificial Sequence
  LRRK2 RNA guide
ccucacuucuccgauggggcgg

SEQ ID NO: 84829 - RNA, 22 nt, Artificial Sequence
  LRRK2 RNA guide
cgccccaucggagaagugagga

SEQ ID NO: 84830 - RNA, 22 nt, Artificial Sequence
  LRRK2 RNA guide
cggaggggcuccucacuucucc

SEQ ID NO: 84831 - RNA, 22 nt, Artificial Sequence
  LRRK2 RNA guide
cucacuucuccgauggggcggc

SEQ ID NO: 84832 - RNA, 22 nt, Artificial Sequence
  LRRK2 RNA guide
cuccgauggggcggcugcuggg

SEQ ID NO: 84833 - RNA, 22 nt, Artificial Sequence
  LRRK2 RNA guide
cuccgcccagcagccgccccau

SEQ ID NO: 84834 - RNA, 22 nt, Artificial Sequence
  LRRK2 RNA guide
cuccucacuucuccgauggggc

SEQ ID NO: 84835 - RNA, 22 nt, Artificial Sequence
  LRRK2 RNA guide
cuucuccgauggggcggcugcu

SEQ ID NO: 84836 - RNA, 22 nt, Artificial Sequence
  LRRK2 RNA guide
gaggggcuccucacuucuccga

SEQ ID NO: 84837 - RNA, 22 nt, Artificial Sequence
  LRRK2 RNA guide
gcagccgccccaucggagaagu

SEQ ID NO: 84838 - RNA, 22 nt, Artificial Sequence
  LRRK2 RNA guide
gcccagcagccgccccaucgga

SEQ ID NO: 84839 - RNA, 22 nt, Artificial Sequence
  LRRK2 RNA guide
gccccaucggagaagugaggag

SEQ ID NO: 84840 - RNA, 22 nt, Artificial Sequence
  LRRK2 RNA guide
gccgccccaucggagaagugag

SEQ ID NO: 84841 - RNA, 22 nt, Artificial Sequence
  LRRK2 RNA guide
gcggaggggcuccucacuucuc

SEQ ID NO: 84842 - RNA, 22 nt, Artificial Sequence
  LRRK2 RNA guide
gcuccucacuucuccgaugggg

SEQ ID NO: 84843 - RNA, 22 nt, Artificial Sequence
  LRRK2 RNA guide
ggaggggcuccucacuucuccg

SEQ ID NO: 84844 - RNA, 22 nt, Artificial Sequence
  LRRK2 RNA guide
ggcggaggggcuccucacuucu

SEQ ID NO: 84845 - RNA, 22 nt, Artificial Sequence
  LRRK2 RNA guide
ggcuccucacuucuccgauggg

SEQ ID NO: 84846 - RNA, 22 nt, Artificial Sequence
  LRRK2 RNA guide
gggcuccucacuucuccgaugg

SEQ ID NO: 84847 - RNA, 22 nt, Artificial Sequence
  LRRK2 RNA guide
ggggcuccucacuucuccgaug

SEQ ID NO: 84848 - RNA, 22 nt, Artificial Sequence
  LRRK2 RNA guide
ucacuucuccgauggggcggcu

SEQ ID NO: 84849 - RNA, 22 nt, Artificial Sequence
  LRRK2 RNA guide
uccgauggggcggcugcugggc

SEQ ID NO: 84850 - RNA, 22 nt, Artificial Sequence
  LRRK2 RNA guide
uccgcccagcagccgccccauc

SEQ ID NO: 84851 - RNA, 22 nt, Artificial Sequence
  LRRK2 RNA guide
uccucacuucuccgauggggcg

SEQ ID NO: 84852 - RNA, 22 nt, Artificial Sequence
  LRRK2 RNA guide
ucuccgauggggcggcugcugg

SEQ ID NO: 84853 - RNA, 22 nt, Artificial Sequence
  LRRK2 RNA guide
uucuccgauggggcggcugcug

SEQ ID NO: 84854 - RNA, 20 nt, Artificial Sequence
  LRRK2 RNA guide
acuucuccgacgggguggcu

SEQ ID NO: 84855 - RNA, 20 nt, Artificial Sequence
  LRRK2 RNA guide
agcagccaccccgucggaga

SEQ ID NO: 84856 - RNA, 20 nt, Artificial Sequence
  LRRK2 RNA guide
agccaccccgucggagaagu

SEQ ID NO: 84857 - RNA, 20 nt, Artificial Sequence
  LRRK2 RNA guide
caccccgucggagaagugag

SEQ ID NO: 84858 - RNA, 20 nt, Artificial Sequence
  LRRK2 RNA guide
cacuucuccgacgggguggc

SEQ ID NO: 84859 - RNA, 20 nt, Artificial Sequence
  LRRK2 RNA guide
cagcagccaccccgucggag

SEQ ID NO: 84860 - RNA, 20 nt, Artificial Sequence
  LRRK2 RNA guide
cagccaccccgucggagaag

SEQ ID NO: 84861 - RNA, 20 nt, Artificial Sequence
  LRRK2 RNA guide
ccaccccgucggagaaguga

SEQ ID NO: 84862 - RNA, 20 nt, Artificial Sequence
  LRRK2 RNA guide
ccagcagccaccccgucgga

SEQ ID NO: 84863 - RNA, 20 nt, Artificial Sequence
  LRRK2 RNA guide
cccagcagccaccccgucgg

SEQ ID NO: 84864 - RNA, 20 nt, Artificial Sequence
  LRRK2 RNA guide
ccgacgggguggcugcuggg

SEQ ID NO: 84865 - RNA, 20 nt, Artificial Sequence
  LRRK2 RNA guide
ccgcccagcagccaccccgu

SEQ ID NO: 84866 - RNA, 20 nt, Artificial Sequence
  LRRK2 RNA guide
ccucacuucuccgacggggu

SEQ ID NO: 84867 - RNA, 20 nt, Artificial Sequence
  LRRK2 RNA guide
ccuccgcccagcagccaccc

SEQ ID NO: 84868 - RNA, 20 nt, Artificial Sequence
  LRRK2 RNA guide
cgacgggguggcugcugggc

SEQ ID NO: 84869 - RNA, 20 nt, Artificial Sequence
  LRRK2 RNA guide
cgcccagcagccaccccguc

SEQ ID NO: 84870 - RNA, 20 nt, Artificial Sequence
  LRRK2 RNA guide
cucacuucuccgacggggug

SEQ ID NO: 84871 - RNA, 20 nt, Artificial Sequence
  LRRK2 RNA guide
cuccgacgggguggcugcug

SEQ ID NO: 84872 - RNA, 20 nt, Artificial Sequence
  LRRK2 RNA guide
cuccgcccagcagccacccc

SEQ ID NO: 84873 - RNA, 20 nt, Artificial Sequence
  LRRK2 RNA guide
cuccucacuucuccgacggg

SEQ ID NO: 84874 - RNA, 20 nt, Artificial Sequence
  LRRK2 RNA guide
cuucuccgacgggguggcug

SEQ ID NO: 84875 - RNA, 20 nt, Artificial Sequence
  LRRK2 RNA guide
gcagccaccccgucggagaa

SEQ ID NO: 84876 - RNA, 20 nt, Artificial Sequence
  LRRK2 RNA guide
gccaccccgucggagaagug

SEQ ID NO: 84877 - RNA, 20 nt, Artificial Sequence
  LRRK2 RNA guide
gcccagcagccaccccgucg

SEQ ID NO: 84878 - RNA, 20 nt, Artificial Sequence
  LRRK2 RNA guide
gcuccucacuucuccgacgg

SEQ ID NO: 84879 - RNA, 20 nt, Artificial Sequence
  LRRK2 RNA guide
ggcuccucacuucuccgacg

SEQ ID NO: 84880 - RNA, 20 nt, Artificial Sequence
  LRRK2 RNA guide
gggcuccucacuucuccgac

SEQ ID NO: 84881 - RNA, 20 nt, Artificial Sequence
  LRRK2 RNA guide
ucacuucuccgacggggugg

SEQ ID NO: 84882 - RNA, 20 nt, Artificial Sequence
  LRRK2 RNA guide
uccgacgggguggcugcugg

SEQ ID NO: 84883 - RNA, 20 nt, Artificial Sequence
  LRRK2 RNA guide
uccgcccagcagccaccccg

SEQ ID NO: 84884 - RNA, 20 nt, Artificial Sequence
  LRRK2 RNA guide
uccucacuucuccgacgggg

SEQ ID NO: 84885 - RNA, 20 nt, Artificial Sequence
  LRRK2 RNA guide
ucuccgacgggguggcugcu

SEQ ID NO: 84886 - RNA, 20 nt, Artificial Sequence
  LRRK2 RNA guide
uucuccgacgggguggcugc

SEQ ID NO: 84887 - RNA, 21 nt, Artificial Sequence
  LRRK2 RNA guide
acuucuccgacgggguggcug

SEQ ID NO: 84888 - RNA, 21 nt, Artificial Sequence
  LRRK2 RNA guide
agcagccaccccgucggagaa

SEQ ID NO: 84889 - RNA, 21 nt, Artificial Sequence
  LRRK2 RNA guide
agccaccccgucggagaagug

SEQ ID NO: 84890 - RNA, 21 nt, Artificial Sequence
  LRRK2 RNA guide
caccccgucggagaagugagg

SEQ ID NO: 84891 - RNA, 21 nt, Artificial Sequence
  LRRK2 RNA guide
cacuucuccgacgggguggcu

SEQ ID NO: 84892 - RNA, 21 nt, Artificial Sequence
  LRRK2 RNA guide
cagcagccaccccgucggaga

SEQ ID NO: 84893 - RNA, 21 nt, Artificial Sequence
  LRRK2 RNA guide
cagccaccccgucggagaagu

SEQ ID NO: 84894 - RNA, 21 nt, Artificial Sequence
  LRRK2 RNA guide
ccaccccgucggagaagugag

SEQ ID NO: 84895 - RNA, 21 nt, Artificial Sequence
  LRRK2 RNA guide
ccagcagccaccccgucggag

SEQ ID NO: 84896 - RNA, 21 nt, Artificial Sequence
  LRRK2 RNA guide
cccagcagccaccccgucgga

SEQ ID NO: 84897 - RNA, 21 nt, Artificial Sequence
  LRRK2 RNA guide
ccucacuucuccgacggggug

SEQ ID NO: 84898 - RNA, 21 nt, Artificial Sequence
  LRRK2 RNA guide
cucacuucuccgacggggugg

SEQ ID NO: 84899 - RNA, 21 nt, Artificial Sequence
  LRRK2 RNA guide
cuccgacgggguggcugcugg

SEQ ID NO: 84900 - RNA, 21 nt, Artificial Sequence
  LRRK2 RNA guide
cuccucacuucuccgacgggg

SEQ ID NO: 84901 - RNA, 21 nt, Artificial Sequence
  LRRK2 RNA guide
cuucuccgacgggguggcugc

SEQ ID NO: 84902 - RNA, 21 nt, Artificial Sequence
  LRRK2 RNA guide
gcagccaccccgucggagaag

SEQ ID NO: 84903 - RNA, 21 nt, Artificial Sequence
  LRRK2 RNA guide
gccaccccgucggagaaguga

SEQ ID NO: 84904 - RNA, 21 nt, Artificial Sequence
  LRRK2 RNA guide
gcuccucacuucuccgacggg

SEQ ID NO: 84905 - RNA, 21 nt, Artificial Sequence
  LRRK2 RNA guide
ggcuccucacuucuccgacgg

SEQ ID NO: 84906 - RNA, 21 nt, Artificial Sequence
  LRRK2 RNA guide
gggcuccucacuucuccgacg

SEQ ID NO: 84907 - RNA, 21 nt, Artificial Sequence
  LRRK2 RNA guide
ggggcuccucacuucuccgac

SEQ ID NO: 84908 - RNA, 21 nt, Artificial Sequence
  LRRK2 RNA guide
ucacuucuccgacgggguggc

SEQ ID NO: 84909 - RNA, 21 nt, Artificial Sequence
  LRRK2 RNA guide
uccgacgggguggcugcuggg

SEQ ID NO: 84910 - RNA, 21 nt, Artificial Sequence
  LRRK2 RNA guide
uccgcccagcagccaccccgu

SEQ ID NO: 84911 - RNA, 21 nt, Artificial Sequence
  LRRK2 RNA guide
uccucacuucuccgacggggu

SEQ ID NO: 84912 - RNA, 21 nt, Artificial Sequence
  LRRK2 RNA guide
ucuccgacgggguggcugcug

SEQ ID NO: 84913 - RNA, 21 nt, Artificial Sequence
  LRRK2 RNA guide
uucuccgacgggguggcugcu

SEQ ID NO: 84914 - RNA, 22 nt, Artificial Sequence
  LRRK2 RNA guide
acuucuccgacgggguggcugc

SEQ ID NO: 84915 - RNA, 22 nt, Artificial Sequence
  LRRK2 RNA guide
agcagccaccccgucggagaag

SEQ ID NO: 84916 - RNA, 22 nt, Artificial Sequence
  LRRK2 RNA guide
agccaccccgucggagaaguga

SEQ ID NO: 84917 - RNA, 22 nt, Artificial Sequence
  LRRK2 RNA guide
aggggcuccucacuucuccgac

SEQ ID NO: 84918 - RNA, 22 nt, Artificial Sequence
  LRRK2 RNA guide
caccccgucggagaagugagga

SEQ ID NO: 84919 - RNA, 22 nt, Artificial Sequence
  LRRK2 RNA guide
cacuucuccgacgggguggcug

SEQ ID NO: 84920 - RNA, 22 nt, Artificial Sequence
  LRRK2 RNA guide
cagcagccaccccgucggagaa

SEQ ID NO: 84921 - RNA, 22 nt, Artificial Sequence
  LRRK2 RNA guide
cagccaccccgucggagaagug

SEQ ID NO: 84922 - RNA, 22 nt, Artificial Sequence
  LRRK2 RNA guide
ccaccccgucggagaagugagg

SEQ ID NO: 84923 - RNA, 22 nt, Artificial Sequence
  LRRK2 RNA guide
ccagcagccaccccgucggaga

SEQ ID NO: 84924 - RNA, 22 nt, Artificial Sequence
  LRRK2 RNA guide
cccagcagccaccccgucggag

SEQ ID NO: 84925 - RNA, 22 nt, Artificial Sequence
  LRRK2 RNA guide
ccucacuucuccgacggggugg

SEQ ID NO: 84926 - RNA, 22 nt, Artificial Sequence
  LRRK2 RNA guide
cucacuucuccgacgggguggc

SEQ ID NO: 84927 - RNA, 22 nt, Artificial Sequence
  LRRK2 RNA guide
cuccgacgggguggcugcuggg

SEQ ID NO: 84928 - RNA, 22 nt, Artificial Sequence
  LRRK2 RNA guide
cuccgcccagcagccaccccgu

SEQ ID NO: 84929 - RNA, 22 nt, Artificial Sequence
  LRRK2 RNA guide
cuccucacuucuccgacggggu

SEQ ID NO: 84930 - RNA, 22 nt, Artificial Sequence
  LRRK2 RNA guide
cuucuccgacgggguggcugcu

SEQ ID NO: 84931 - RNA, 22 nt, Artificial Sequence
  LRRK2 RNA guide
gcagccaccccgucggagaagu

SEQ ID NO: 84932 - RNA, 22 nt, Artificial Sequence
  LRRK2 RNA guide
gccaccccgucggagaagugag

SEQ ID NO: 84933 - RNA, 22 nt, Artificial Sequence
  LRRK2 RNA guide
gcccagcagccaccccgucgga

SEQ ID NO: 84934 - RNA, 22 nt, Artificial Sequence
  LRRK2 RNA guide
gcuccucacuucuccgacgggg

SEQ ID NO: 84935 - RNA, 22 nt, Artificial Sequence
  LRRK2 RNA guide
ggcuccucacuucuccgacggg

SEQ ID NO: 84936 - RNA, 22 nt, Artificial Sequence
  LRRK2 RNA guide
gggcuccucacuucuccgacgg

SEQ ID NO: 84937 - RNA, 22 nt, Artificial Sequence
  LRRK2 RNA guide
ggggcuccucacuucuccgacg

SEQ ID NO: 84938 - RNA, 22 nt, Artificial Sequence
  LRRK2 RNA guide
ucacuucuccgacgggguggcu

SEQ ID NO: 84939 - RNA, 22 nt, Artificial Sequence
  LRRK2 RNA guide
uccgacgggguggcugcugggc

SEQ ID NO: 84940 - RNA, 22 nt, Artificial Sequence
  LRRK2 RNA guide
uccgcccagcagccaccccguc

SEQ ID NO: 84941 - RNA, 22 nt, Artificial Sequence
  LRRK2 RNA guide
uccucacuucuccgacggggug

SEQ ID NO: 84942 - RNA, 22 nt, Artificial Sequence
  LRRK2 RNA guide
ucuccgacgggguggcugcugg

SEQ ID NO: 84943 - RNA, 22 nt, Artificial Sequence
  LRRK2 RNA guide
uucuccgacgggguggcugcug

SEQ ID NO: 84944 - RNA, 20 nt, Artificial Sequence
  LRRK2 RNA guide
aaugaggagccccuccgccc

SEQ ID NO: 84945 - RNA, 20 nt, Artificial Sequence
  LRRK2 RNA guide
auuucucagacggggcagcu

SEQ ID NO: 84946 - RNA, 20 nt, Artificial Sequence
  LRRK2 RNA guide
cauuucucagacggggcagc

SEQ ID NO: 84947 - RNA, 20 nt, Artificial Sequence
  LRRK2 RNA guide
ccuggcagcugccccgucug

SEQ ID NO: 84948 - RNA, 20 nt, Artificial Sequence
  LRRK2 RNA guide
cugcugggcggaggggcucc

SEQ ID NO: 84949 - RNA, 20 nt, Artificial Sequence
  LRRK2 RNA guide
cuggcagcugccccgucuga

SEQ ID NO: 84950 - RNA, 20 nt, Artificial Sequence
  LRRK2 RNA guide
gcugcugggcggaggggcuc

SEQ ID NO: 84951 - RNA, 20 nt, Artificial Sequence
  LRRK2 RNA guide
uggcagcugccccgucugag

SEQ ID NO: 84952 - RNA, 21 nt, Artificial Sequence
  LRRK2 RNA guide
aaaugaggagccccuccgccc

SEQ ID NO: 84953 - RNA, 21 nt, Artificial Sequence
  LRRK2 RNA guide
aaugaggagccccuccgccca

SEQ ID NO: 84954 - RNA, 21 nt, Artificial Sequence
  LRRK2 RNA guide
auuucucagacggggcagcug

SEQ ID NO: 84955 - RNA, 21 nt, Artificial Sequence
  LRRK2 RNA guide
cauuucucagacggggcagcu

SEQ ID NO: 84956 - RNA, 21 nt, Artificial Sequence
  LRRK2 RNA guide
ccuggcagcugccccgucuga

SEQ ID NO: 84957 - RNA, 21 nt, Artificial Sequence
  LRRK2 RNA guide
cugcugggcggaggggcuccu

SEQ ID NO: 84958 - RNA, 21 nt, Artificial Sequence
  LRRK2 RNA guide
cuggcagcugccccgucugag

SEQ ID NO: 84959 - RNA, 21 nt, Artificial Sequence
  LRRK2 RNA guide
gccuggcagcugccccgucug

SEQ ID NO: 84960 - RNA, 21 nt, Artificial Sequence
  LRRK2 RNA guide
ucauuucucagacggggcagc

SEQ ID NO: 84961 - RNA, 21 nt, Artificial Sequence
  LRRK2 RNA guide
uggcagcugccccgucugaga

SEQ ID NO: 84962 - RNA, 22 nt, Artificial Sequence
  LRRK2 RNA guide
aaaugaggagccccuccgccca

SEQ ID NO: 84963 - RNA, 22 nt, Artificial Sequence
  LRRK2 RNA guide
aaugaggagccccuccgcccag

SEQ ID NO: 84964 - RNA, 22 nt, Artificial Sequence
  LRRK2 RNA guide
auuucucagacggggcagcugc

SEQ ID NO: 84965 - RNA, 22 nt, Artificial Sequence
  LRRK2 RNA guide
cauuucucagacggggcagcug

SEQ ID NO: 84966 - RNA, 22 nt, Artificial Sequence
  LRRK2 RNA guide
ccuggcagcugccccgucugag

SEQ ID NO: 84967 - RNA, 22 nt, Artificial Sequence
  LRRK2 RNA guide
cucauuucucagacggggcagc

SEQ ID NO: 84968 - RNA, 22 nt, Artificial Sequence
  LRRK2 RNA guide
cugcugggcggaggggcuccuc

SEQ ID NO: 84969 - RNA, 22 nt, Artificial Sequence
  LRRK2 RNA guide
cuggcagcugccccgucugaga

SEQ ID NO: 84970 - RNA, 22 nt, Artificial Sequence
  LRRK2 RNA guide
gaaaugaggagccccuccgccc

SEQ ID NO: 84971 - RNA, 22 nt, Artificial Sequence
  LRRK2 RNA guide
gccuggcagcugccccgucuga

SEQ ID NO: 84972 - RNA, 22 nt, Artificial Sequence
  LRRK2 RNA guide
gcugcugggcggaggggcuccu

SEQ ID NO: 84973 - RNA, 22 nt, Artificial Sequence
  LRRK2 RNA guide
ucauuucucagacggggcagcu

SEQ ID NO: 84974 - RNA, 22 nt, Artificial Sequence
  LRRK2 RNA guide
ugccuggcagcugccccgucug

SEQ ID NO: 84975 - RNA, 22 nt, Artificial Sequence
  LRRK2 RNA guide
uggcagcugccccgucugagaa

SEQ ID NO: 84976 - RNA, 20 nt, Artificial Sequence
  LRRK2 RNA guide
acggggcagcugccaggcaa

SEQ ID NO: 84977 - RNA, 20 nt, Artificial Sequence
  LRRK2 RNA guide
agacggggcagcugccaggc

SEQ ID NO: 84978 - RNA, 20 nt, Artificial Sequence
  LRRK2 RNA guide
cagacggggcagcugccagg

SEQ ID NO: 84979 - RNA, 20 nt, Artificial Sequence
  LRRK2 RNA guide
ccccuuugccuggcagcugc

SEQ ID NO: 84980 - RNA, 20 nt, Artificial Sequence
  LRRK2 RNA guide
cccuuugccuggcagcugcc

SEQ ID NO: 84981 - RNA, 20 nt, Artificial Sequence
  LRRK2 RNA guide
ccuuugccuggcagcugccc

SEQ ID NO: 84982 - RNA, 20 nt, Artificial Sequence
  LRRK2 RNA guide
cucagacggggcagcugcca

SEQ ID NO: 84983 - RNA, 20 nt, Artificial Sequence
  LRRK2 RNA guide
cuuugccuggcagcugcccc

SEQ ID NO: 84984 - RNA, 20 nt, Artificial Sequence
  LRRK2 RNA guide
gacggggcagcugccaggca

SEQ ID NO: 84985 - RNA, 20 nt, Artificial Sequence
  LRRK2 RNA guide
gccccuuugccuggcagcug

SEQ ID NO: 84986 - RNA, 20 nt, Artificial Sequence
  LRRK2 RNA guide
ucagacggggcagcugccag

SEQ ID NO: 84987 - RNA, 20 nt, Artificial Sequence
  LRRK2 RNA guide
uugccuggcagcugccccgu

SEQ ID NO: 84988 - RNA, 20 nt, Artificial Sequence
  LRRK2 RNA guide
uuugccuggcagcugccccg

SEQ ID NO: 84989 - RNA, 21 nt, Artificial Sequence
  LRRK2 RNA guide
acggggcagcugccaggcaaa

SEQ ID NO: 84990 - RNA, 21 nt, Artificial Sequence
  LRRK2 RNA guide
agacggggcagcugccaggca

SEQ ID NO: 84991 - RNA, 21 nt, Artificial Sequence
  LRRK2 RNA guide
agccccuuugccuggcagcug

SEQ ID NO: 84992 - RNA, 21 nt, Artificial Sequence
  LRRK2 RNA guide
cagacggggcagcugccaggc

SEQ ID NO: 84993 - RNA, 21 nt, Artificial Sequence
  LRRK2 RNA guide
ccccuuugccuggcagcugcc

SEQ ID NO: 84994 - RNA, 21 nt, Artificial Sequence
  LRRK2 RNA guide
cccuuugccuggcagcugccc

SEQ ID NO: 84995 - RNA, 21 nt, Artificial Sequence
  LRRK2 RNA guide
ccuuugccuggcagcugcccc

SEQ ID NO: 84996 - RNA, 21 nt, Artificial Sequence
  LRRK2 RNA guide
cucagacggggcagcugccag

SEQ ID NO: 84997 - RNA, 21 nt, Artificial Sequence
  LRRK2 RNA guide
cuuugccuggcagcugccccg

SEQ ID NO: 84998 - RNA, 21 nt, Artificial Sequence
  LRRK2 RNA guide
gacggggcagcugccaggcaa

SEQ ID NO: 84999 - RNA, 21 nt, Artificial Sequence
  LRRK2 RNA guide
gccccuuugccuggcagcugc

SEQ ID NO: 85000 - RNA, 21 nt, Artificial Sequence
  LRRK2 RNA guide
ucagacggggcagcugccagg

SEQ ID NO: 85001 - RNA, 21 nt, Artificial Sequence
  LRRK2 RNA guide
ucucagacggggcagcugcca

SEQ ID NO: 85002 - RNA, 21 nt, Artificial Sequence
  LRRK2 RNA guide
uugccuggcagcugccccguc

SEQ ID NO: 85003 - RNA, 21 nt, Artificial Sequence
  LRRK2 RNA guide
uuugccuggcagcugccccgu

SEQ ID NO: 85004 - RNA, 22 nt, Artificial Sequence
  LRRK2 RNA guide
acggggcagcugccaggcaaag

SEQ ID NO: 85005 - RNA, 22 nt, Artificial Sequence
  LRRK2 RNA guide
agacggggcagcugccaggcaa

SEQ ID NO: 85006 - RNA, 22 nt, Artificial Sequence
  LRRK2 RNA guide
agccccuuugccuggcagcugc

SEQ ID NO: 85007 - RNA, 22 nt, Artificial Sequence
  LRRK2 RNA guide
cagacggggcagcugccaggca

SEQ ID NO: 85008 - RNA, 22 nt, Artificial Sequence
  LRRK2 RNA guide
ccccuuugccuggcagcugccc

SEQ ID NO: 85009 - RNA, 22 nt, Artificial Sequence
  LRRK2 RNA guide
cccuuugccuggcagcugcccc

SEQ ID NO: 85010 - RNA, 22 nt, Artificial Sequence
  LRRK2 RNA guide
ccuuugccuggcagcugccccg

SEQ ID NO: 85011 - RNA, 22 nt, Artificial Sequence
  LRRK2 RNA guide
cucagacggggcagcugccagg

SEQ ID NO: 85012 - RNA, 22 nt, Artificial Sequence
  LRRK2 RNA guide
cuuugccuggcagcugccccgu

SEQ ID NO: 85013 - RNA, 22 nt, Artificial Sequence
  LRRK2 RNA guide
gacggggcagcugccaggcaaa

SEQ ID NO: 85014 - RNA, 22 nt, Artificial Sequence
  LRRK2 RNA guide
gagccccuuugccuggcagcug

SEQ ID NO: 85015 - RNA, 22 nt, Artificial Sequence
  LRRK2 RNA guide
gccccuuugccuggcagcugcc

SEQ ID NO: 85016 - RNA, 22 nt, Artificial Sequence
  LRRK2 RNA guide
ucagacggggcagcugccaggc

SEQ ID NO: 85017 - RNA, 22 nt, Artificial Sequence
  LRRK2 RNA guide
ucucagacggggcagcugccag

SEQ ID NO: 85018 - RNA, 22 nt, Artificial Sequence
  LRRK2 RNA guide
uucucagacggggcagcugcca

SEQ ID NO: 85019 - RNA, 22 nt, Artificial Sequence
  LRRK2 RNA guide
uugccuggcagcugccccgucu

SEQ ID NO: 85020 - RNA, 22 nt, Artificial Sequence
  LRRK2 RNA guide
uuugccuggcagcugccccguc

SEQ ID NO: 85021 - RNA, 20 nt, Artificial Sequence
  LRRK2 RNA guide
acuucucagauggggcagcu

SEQ ID NO: 85022 - RNA, 20 nt, Artificial Sequence
  LRRK2 RNA guide
agauggggcagcugccaggc

SEQ ID NO: 85023 - RNA, 20 nt, Artificial Sequence
  LRRK2 RNA guide
auggggcagcugccaggcaa

SEQ ID NO: 85024 - RNA, 20 nt, Artificial Sequence
  LRRK2 RNA guide
cacuucucagauggggcagc

SEQ ID NO: 85025 - RNA, 20 nt, Artificial Sequence
  LRRK2 RNA guide
cagauggggcagcugccagg

SEQ ID NO: 85026 - RNA, 20 nt, Artificial Sequence
  LRRK2 RNA guide
ccuggcagcugccccaucug

SEQ ID NO: 85027 - RNA, 20 nt, Artificial Sequence
  LRRK2 RNA guide
cucagauggggcagcugcca

SEQ ID NO: 85028 - RNA, 20 nt, Artificial Sequence
  LRRK2 RNA guide
cuggcagcugccccaucuga

SEQ ID NO: 85029 - RNA, 20 nt, Artificial Sequence
  LRRK2 RNA guide
cuucucagauggggcagcug

SEQ ID NO: 85030 - RNA, 20 nt, Artificial Sequence
  LRRK2 RNA guide
gauggggcagcugccaggca

SEQ ID NO: 85031 - RNA, 20 nt, Artificial Sequence
  LRRK2 RNA guide
gccuggcagcugccccaucu

SEQ ID NO: 85032 - RNA, 20 nt, Artificial Sequence
  LRRK2 RNA guide
ucagauggggcagcugccag

SEQ ID NO: 85033 - RNA, 20 nt, Artificial Sequence
  LRRK2 RNA guide
ucucagauggggcagcugcc

SEQ ID NO: 85034 - RNA, 20 nt, Artificial Sequence
  LRRK2 RNA guide
ugccuggcagcugccccauc

SEQ ID NO: 85035 - RNA, 20 nt, Artificial Sequence
  LRRK2 RNA guide
uggcagcugccccaucugag

SEQ ID NO: 85036 - RNA, 20 nt, Artificial Sequence
  LRRK2 RNA guide
uucucagauggggcagcugc

SEQ ID NO: 85037 - RNA, 20 nt, Artificial Sequence
  LRRK2 RNA guide
uugccuggcagcugccccau

SEQ ID NO: 85038 - RNA, 20 nt, Artificial Sequence
  LRRK2 RNA guide
uuugccuggcagcugcccca

SEQ ID NO: 85039 - RNA, 21 nt, Artificial Sequence
  LRRK2 RNA guide
acuucucagauggggcagcug

SEQ ID NO: 85040 - RNA, 21 nt, Artificial Sequence
  LRRK2 RNA guide
agauggggcagcugccaggca

SEQ ID NO: 85041 - RNA, 21 nt, Artificial Sequence
  LRRK2 RNA guide
auggggcagcugccaggcaaa

SEQ ID NO: 85042 - RNA, 21 nt, Artificial Sequence
  LRRK2 RNA guide
cacuucucagauggggcagcu

SEQ ID NO: 85043 - RNA, 21 nt, Artificial Sequence
  LRRK2 RNA guide
cagauggggcagcugccaggc

SEQ ID NO: 85044 - RNA, 21 nt, Artificial Sequence
  LRRK2 RNA guide
ccuggcagcugccccaucuga

SEQ ID NO: 85045 - RNA, 21 nt, Artificial Sequence
  LRRK2 RNA guide
cucagauggggcagcugccag

SEQ ID NO: 85046 - RNA, 21 nt, Artificial Sequence
  LRRK2 RNA guide
cuggcagcugccccaucugag

SEQ ID NO: 85047 - RNA, 21 nt, Artificial Sequence
  LRRK2 RNA guide
cuucucagauggggcagcugc

SEQ ID NO: 85048 - RNA, 21 nt, Artificial Sequence
  LRRK2 RNA guide
cuuugccuggcagcugcccca

SEQ ID NO: 85049 - RNA, 21 nt, Artificial Sequence
  LRRK2 RNA guide
gauggggcagcugccaggcaa

SEQ ID NO: 85050 - RNA, 21 nt, Artificial Sequence
  LRRK2 RNA guide
gccuggcagcugccccaucug

SEQ ID NO: 85051 - RNA, 21 nt, Artificial Sequence
  LRRK2 RNA guide
ucacuucucagauggggcagc

SEQ ID NO: 85052 - RNA, 21 nt, Artificial Sequence
  LRRK2 RNA guide
ucagauggggcagcugccagg

SEQ ID NO: 85053 - RNA, 21 nt, Artificial Sequence
  LRRK2 RNA guide
ucucagauggggcagcugcca

SEQ ID NO: 85054 - RNA, 21 nt, Artificial Sequence
  LRRK2 RNA guide
ugccuggcagcugccccaucu

SEQ ID NO: 85055 - RNA, 21 nt, Artificial Sequence
  LRRK2 RNA guide
uggcagcugccccaucugaga

SEQ ID NO: 85056 - RNA, 21 nt, Artificial Sequence
  LRRK2 RNA guide
uucucagauggggcagcugcc

SEQ ID NO: 85057 - RNA, 21 nt, Artificial Sequence
  LRRK2 RNA guide
uugccuggcagcugccccauc

SEQ ID NO: 85058 - RNA, 21 nt, Artificial Sequence
  LRRK2 RNA guide
uuugccuggcagcugccccau

SEQ ID NO: 85059 - RNA, 22 nt, Artificial Sequence
  LRRK2 RNA guide
acuucucagauggggcagcugc

SEQ ID NO: 85060 - RNA, 22 nt, Artificial Sequence
  LRRK2 RNA guide
agauggggcagcugccaggcaa

SEQ ID NO: 85061 - RNA, 22 nt, Artificial Sequence
  LRRK2 RNA guide
auggggcagcugccaggcaaag

SEQ ID NO: 85062 - RNA, 22 nt, Artificial Sequence
  LRRK2 RNA guide
cacuucucagauggggcagcug

SEQ ID NO: 85063 - RNA, 22 nt, Artificial Sequence
  LRRK2 RNA guide
cagauggggcagcugccaggca

SEQ ID NO: 85064 - RNA, 22 nt, Artificial Sequence
  LRRK2 RNA guide
ccuggcagcugccccaucugag

SEQ ID NO: 85065 - RNA, 22 nt, Artificial Sequence
  LRRK2 RNA guide
ccuuugccuggcagcugcccca

SEQ ID NO: 85066 - RNA, 22 nt, Artificial Sequence
  LRRK2 RNA guide
cucacuucucagauggggcagc

SEQ ID NO: 85067 - RNA, 22 nt, Artificial Sequence
  LRRK2 RNA guide
cucagauggggcagcugccagg

SEQ ID NO: 85068 - RNA, 22 nt, Artificial Sequence
  LRRK2 RNA guide
cuggcagcugccccaucugaga

SEQ ID NO: 85069 - RNA, 22 nt, Artificial Sequence
  LRRK2 RNA guide
cuucucagauggggcagcugcc

SEQ ID NO: 85070 - RNA, 22 nt, Artificial Sequence
  LRRK2 RNA guide
cuuugccuggcagcugccccau

SEQ ID NO: 85071 - RNA, 22 nt, Artificial Sequence
  LRRK2 RNA guide
gauggggcagcugccaggcaaa

SEQ ID NO: 85072 - RNA, 22 nt, Artificial Sequence
  LRRK2 RNA guide
gccuggcagcugccccaucuga

SEQ ID NO: 85073 - RNA, 22 nt, Artificial Sequence
  LRRK2 RNA guide
ucacuucucagauggggcagcu

SEQ ID NO: 85074 - RNA, 22 nt, Artificial Sequence
  LRRK2 RNA guide
ucagauggggcagcugccaggc

SEQ ID NO: 85075 - RNA, 22 nt, Artificial Sequence
  LRRK2 RNA guide
ucucagauggggcagcugccag

SEQ ID NO: 85076 - RNA, 22 nt, Artificial Sequence
  LRRK2 RNA guide
ugccuggcagcugccccaucug

SEQ ID NO: 85077 - RNA, 22 nt, Artificial Sequence
  LRRK2 RNA guide
uggcagcugccccaucugagaa

SEQ ID NO: 85078 - RNA, 22 nt, Artificial Sequence
  LRRK2 RNA guide
uucucagauggggcagcugcca

SEQ ID NO: 85079 - RNA, 22 nt, Artificial Sequence
  LRRK2 RNA guide
uugccuggcagcugccccaucu

SEQ ID NO: 85080 - RNA, 22 nt, Artificial Sequence
  LRRK2 RNA guide
uuugccuggcagcugccccauc

SEQ ID NO: 85081 - RNA, 20 nt, Artificial Sequence
  LRRK2 RNA guide
aagugaggagccccuuugcc

SEQ ID NO: 85082 - RNA, 20 nt, Artificial Sequence
  LRRK2 RNA guide
agaagugaggagccccuuug

SEQ ID NO: 85083 - RNA, 20 nt, Artificial Sequence
  LRRK2 RNA guide
agccccuuugccuggcagcu

SEQ ID NO: 85084 - RNA, 20 nt, Artificial Sequence
  LRRK2 RNA guide
agcugccaggcaaaggggcu

SEQ ID NO: 85085 - RNA, 20 nt, Artificial Sequence
  LRRK2 RNA guide
aggagccccuuugccuggca

SEQ ID NO: 85086 - RNA, 20 nt, Artificial Sequence
  LRRK2 RNA guide
aggcaaaggggcuccucacu

SEQ ID NO: 85087 - RNA, 20 nt, Artificial Sequence
  LRRK2 RNA guide
agugaggagccccuuugccu

SEQ ID NO: 85088 - RNA, 20 nt, Artificial Sequence
  LRRK2 RNA guide
cagcugccaggcaaaggggc

SEQ ID NO: 85089 - RNA, 20 nt, Artificial Sequence
  LRRK2 RNA guide
caggcaaaggggcuccucac

SEQ ID NO: 85090 - RNA, 20 nt, Artificial Sequence
  LRRK2 RNA guide
ccaggcaaaggggcuccuca

SEQ ID NO: 85091 - RNA, 20 nt, Artificial Sequence
  LRRK2 RNA guide
cggggcagcugccaggcaaa

SEQ ID NO: 85092 - RNA, 20 nt, Artificial Sequence
  LRRK2 RNA guide
cugccaggcaaaggggcucc

SEQ ID NO: 85093 - RNA, 20 nt, Artificial Sequence
  LRRK2 RNA guide
gagaagugaggagccccuuu

SEQ ID NO: 85094 - RNA, 20 nt, Artificial Sequence
  LRRK2 RNA guide
gagccccuuugccuggcagc

SEQ ID NO: 85095 - RNA, 20 nt, Artificial Sequence
  LRRK2 RNA guide
gaggagccccuuugccuggc

SEQ ID NO: 85096 - RNA, 20 nt, Artificial Sequence
  LRRK2 RNA guide
gcagcugccaggcaaagggg

SEQ ID NO: 85097 - RNA, 20 nt, Artificial Sequence
  LRRK2 RNA guide
gcugccaggcaaaggggcuc

SEQ ID NO: 85098 - RNA, 20 nt, Artificial Sequence
  LRRK2 RNA guide
ggagccccuuugccuggcag

SEQ ID NO: 85099 - RNA, 20 nt, Artificial Sequence
  LRRK2 RNA guide
ggcagcugccaggcaaaggg

SEQ ID NO: 85100 - RNA, 20 nt, Artificial Sequence
  LRRK2 RNA guide
gggcagcugccaggcaaagg

SEQ ID NO: 85101 - RNA, 20 nt, Artificial Sequence
  LRRK2 RNA guide
ggggcagcugccaggcaaag

SEQ ID NO: 85102 - RNA, 20 nt, Artificial Sequence
  LRRK2 RNA guide
gugaggagccccuuugccug

SEQ ID NO: 85103 - RNA, 20 nt, Artificial Sequence
  LRRK2 RNA guide
ugagaagugaggagccccuu

SEQ ID NO: 85104 - RNA, 20 nt, Artificial Sequence
  LRRK2 RNA guide
ugaggagccccuuugccugg

SEQ ID NO: 85105 - RNA, 20 nt, Artificial Sequence
  LRRK2 RNA guide
ugccaggcaaaggggcuccu

SEQ ID NO: 85106 - RNA, 21 nt, Artificial Sequence
  LRRK2 RNA guide
aagugaggagccccuuugccu

SEQ ID NO: 85107 - RNA, 21 nt, Artificial Sequence
  LRRK2 RNA guide
agaagugaggagccccuuugc

SEQ ID NO: 85108 - RNA, 21 nt, Artificial Sequence
  LRRK2 RNA guide
agcugccaggcaaaggggcuc

SEQ ID NO: 85109 - RNA, 21 nt, Artificial Sequence
  LRRK2 RNA guide
aggagccccuuugccuggcag

SEQ ID NO: 85110 - RNA, 21 nt, Artificial Sequence
  LRRK2 RNA guide
aggcaaaggggcuccucacuu

SEQ ID NO: 85111 - RNA, 21 nt, Artificial Sequence
  LRRK2 RNA guide
agugaggagccccuuugccug

SEQ ID NO: 85112 - RNA, 21 nt, Artificial Sequence
  LRRK2 RNA guide
cagcugccaggcaaaggggcu

SEQ ID NO: 85113 - RNA, 21 nt, Artificial Sequence
  LRRK2 RNA guide
caggcaaaggggcuccucacu

SEQ ID NO: 85114 - RNA, 21 nt, Artificial Sequence
  LRRK2 RNA guide
ccaggcaaaggggcuccucac

SEQ ID NO: 85115 - RNA, 21 nt, Artificial Sequence
  LRRK2 RNA guide
cggggcagcugccaggcaaag

SEQ ID NO: 85116 - RNA, 21 nt, Artificial Sequence
  LRRK2 RNA guide
cugagaagugaggagccccuu

SEQ ID NO: 85117 - RNA, 21 nt, Artificial Sequence
  LRRK2 RNA guide
cugccaggcaaaggggcuccu

SEQ ID NO: 85118 - RNA, 21 nt, Artificial Sequence
  LRRK2 RNA guide
gaagugaggagccccuuugcc

SEQ ID NO: 85119 - RNA, 21 nt, Artificial Sequence
  LRRK2 RNA guide
gagaagugaggagccccuuug

SEQ ID NO: 85120 - RNA, 21 nt, Artificial Sequence
  LRRK2 RNA guide
gagccccuuugccuggcagcu

SEQ ID NO: 85121 - RNA, 21 nt, Artificial Sequence
  LRRK2 RNA guide
gaggagccccuuugccuggca

SEQ ID NO: 85122 - RNA, 21 nt, Artificial Sequence
  LRRK2 RNA guide
gcagcugccaggcaaaggggc

SEQ ID NO: 85123 - RNA, 21 nt, Artificial Sequence
  LRRK2 RNA guide
gccaggcaaaggggcuccuca

SEQ ID NO: 85124 - RNA, 21 nt, Artificial Sequence
  LRRK2 RNA guide
gcugccaggcaaaggggcucc

SEQ ID NO: 85125 - RNA, 21 nt, Artificial Sequence
  LRRK2 RNA guide
ggagccccuuugccuggcagc

SEQ ID NO: 85126 - RNA, 21 nt, Artificial Sequence
  LRRK2 RNA guide
ggcagcugccaggcaaagggg

SEQ ID NO: 85127 - RNA, 21 nt, Artificial Sequence
  LRRK2 RNA guide
gggcagcugccaggcaaaggg

SEQ ID NO: 85128 - RNA, 21 nt, Artificial Sequence
  LRRK2 RNA guide
ggggcagcugccaggcaaagg

SEQ ID NO: 85129 - RNA, 21 nt, Artificial Sequence
  LRRK2 RNA guide
gugaggagccccuuugccugg

SEQ ID NO: 85130 - RNA, 21 nt, Artificial Sequence
  LRRK2 RNA guide
ugagaagugaggagccccuuu

SEQ ID NO: 85131 - RNA, 21 nt, Artificial Sequence
  LRRK2 RNA guide
ugaggagccccuuugccuggc

SEQ ID NO: 85132 - RNA, 21 nt, Artificial Sequence
  LRRK2 RNA guide
ugccaggcaaaggggcuccuc

SEQ ID NO: 85133 - RNA, 22 nt, Artificial Sequence
  LRRK2 RNA guide
aagugaggagccccuuugccug

SEQ ID NO: 85134 - RNA, 22 nt, Artificial Sequence
  LRRK2 RNA guide
agaagugaggagccccuuugcc

SEQ ID NO: 85135 - RNA, 22 nt, Artificial Sequence
  LRRK2 RNA guide
agcugccaggcaaaggggcucc

SEQ ID NO: 85136 - RNA, 22 nt, Artificial Sequence
  LRRK2 RNA guide
aggagccccuuugccuggcagc

SEQ ID NO: 85137 - RNA, 22 nt, Artificial Sequence
  LRRK2 RNA guide
aggcaaaggggcuccucacuuc

SEQ ID NO: 85138 - RNA, 22 nt, Artificial Sequence
  LRRK2 RNA guide
agugaggagccccuuugccugg

SEQ ID NO: 85139 - RNA, 22 nt, Artificial Sequence
  LRRK2 RNA guide
cagcugccaggcaaaggggcuc

SEQ ID NO: 85140 - RNA, 22 nt, Artificial Sequence
  LRRK2 RNA guide
caggcaaaggggcuccucacuu

SEQ ID NO: 85141 - RNA, 22 nt, Artificial Sequence
  LRRK2 RNA guide
ccaggcaaaggggcuccucacu

SEQ ID NO: 85142 - RNA, 22 nt, Artificial Sequence
  LRRK2 RNA guide
cggggcagcugccaggcaaagg

SEQ ID NO: 85143 - RNA, 22 nt, Artificial Sequence
  LRRK2 RNA guide
cugagaagugaggagccccuuu

SEQ ID NO: 85144 - RNA, 22 nt, Artificial Sequence
  LRRK2 RNA guide
cugccaggcaaaggggcuccuc

SEQ ID NO: 85145 - RNA, 22 nt, Artificial Sequence
  LRRK2 RNA guide
gaagugaggagccccuuugccu

SEQ ID NO: 85146 - RNA, 22 nt, Artificial Sequence
  LRRK2 RNA guide
gagaagugaggagccccuuugc

SEQ ID NO: 85147 - RNA, 22 nt, Artificial Sequence
  LRRK2 RNA guide
gaggagccccuuugccuggcag

SEQ ID NO: 85148 - RNA, 22 nt, Artificial Sequence
  LRRK2 RNA guide
gcagcugccaggcaaaggggcu

SEQ ID NO: 85149 - RNA, 22 nt, Artificial Sequence
  LRRK2 RNA guide
gccaggcaaaggggcuccucac

SEQ ID NO: 85150 - RNA, 22 nt, Artificial Sequence
  LRRK2 RNA guide
gcugccaggcaaaggggcuccu

SEQ ID NO: 85151 - RNA, 22 nt, Artificial Sequence
  LRRK2 RNA guide
ggagccccuuugccuggcagcu

SEQ ID NO: 85152 - RNA, 22 nt, Artificial Sequence
  LRRK2 RNA guide
ggcagcugccaggcaaaggggc

SEQ ID NO: 85153 - RNA, 22 nt, Artificial Sequence
  LRRK2 RNA guide
gggcagcugccaggcaaagggg

SEQ ID NO: 85154 - RNA, 22 nt, Artificial Sequence
  LRRK2 RNA guide
ggggcagcugccaggcaaaggg

SEQ ID NO: 85155 - RNA, 22 nt, Artificial Sequence
  LRRK2 RNA guide
gugaggagccccuuugccuggc

SEQ ID NO: 85156 - RNA, 22 nt, Artificial Sequence
  LRRK2 RNA guide
ucugagaagugaggagccccuu

SEQ ID NO: 85157 - RNA, 22 nt, Artificial Sequence
  LRRK2 RNA guide
ugagaagugaggagccccuuug

SEQ ID NO: 85158 - RNA, 22 nt, Artificial Sequence
  LRRK2 RNA guide
ugaggagccccuuugccuggca

SEQ ID NO: 85159 - RNA, 22 nt, Artificial Sequence
  LRRK2 RNA guide
ugccaggcaaaggggcuccuca

SEQ ID NO: 85160 - RNA, 20 nt, Artificial Sequence
  LRRK2 RNA guide
aagugaggagccccgccugg

SEQ ID NO: 85161 - RNA, 20 nt, Artificial Sequence
  LRRK2 RNA guide
acggggcagcugccaggcgg

SEQ ID NO: 85162 - RNA, 20 nt, Artificial Sequence
  LRRK2 RNA guide
agaagugaggagccccgccu

SEQ ID NO: 85163 - RNA, 20 nt, Artificial Sequence
  LRRK2 RNA guide
agccccgccuggcagcugcc

SEQ ID NO: 85164 - RNA, 20 nt, Artificial Sequence
  LRRK2 RNA guide
agcugccaggcggggcuccu

SEQ ID NO: 85165 - RNA, 20 nt, Artificial Sequence
  LRRK2 RNA guide
aggagccccgccuggcagcu

SEQ ID NO: 85166 - RNA, 20 nt, Artificial Sequence
  LRRK2 RNA guide
aggcggggcuccucacuucu

SEQ ID NO: 85167 - RNA, 20 nt, Artificial Sequence
  LRRK2 RNA guide
agugaggagccccgccuggc

SEQ ID NO: 85168 - RNA, 20 nt, Artificial Sequence
  LRRK2 RNA guide
cagcugccaggcggggcucc

SEQ ID NO: 85169 - RNA, 20 nt, Artificial Sequence
  LRRK2 RNA guide
caggcggggcuccucacuuc

SEQ ID NO: 85170 - RNA, 20 nt, Artificial Sequence
  LRRK2 RNA guide
ccaggcggggcuccucacuu

SEQ ID NO: 85171 - RNA, 20 nt, Artificial Sequence
  LRRK2 RNA guide
cugagaagugaggagccccg

SEQ ID NO: 85172 - RNA, 20 nt, Artificial Sequence
  LRRK2 RNA guide
cugccaggcggggcuccuca

SEQ ID NO: 85173 - RNA, 20 nt, Artificial Sequence
  LRRK2 RNA guide
gaagugaggagccccgccug

SEQ ID NO: 85174 - RNA, 20 nt, Artificial Sequence
  LRRK2 RNA guide
gacggggcagcugccaggcg

SEQ ID NO: 85175 - RNA, 20 nt, Artificial Sequence
  LRRK2 RNA guide
gagaagugaggagccccgcc

SEQ ID NO: 85176 - RNA, 20 nt, Artificial Sequence
  LRRK2 RNA guide
gagccccgccuggcagcugc

SEQ ID NO: 85177 - RNA, 20 nt, Artificial Sequence
  LRRK2 RNA guide
gaggagccccgccuggcagc

SEQ ID NO: 85178 - RNA, 20 nt, Artificial Sequence
  LRRK2 RNA guide
gcagcugccaggcggggcuc

SEQ ID NO: 85179 - RNA, 20 nt, Artificial Sequence
  LRRK2 RNA guide
gccaggcggggcuccucacu

SEQ ID NO: 85180 - RNA, 20 nt, Artificial Sequence
  LRRK2 RNA guide
gcugccaggcggggcuccuc

SEQ ID NO: 85181 - RNA, 20 nt, Artificial Sequence
  LRRK2 RNA guide
ggagccccgccuggcagcug

SEQ ID NO: 85182 - RNA, 20 nt, Artificial Sequence
  LRRK2 RNA guide
ggcagcugccaggcggggcu

SEQ ID NO: 85183 - RNA, 20 nt, Artificial Sequence
  LRRK2 RNA guide
gucugagaagugaggagccc

SEQ ID NO: 85184 - RNA, 20 nt, Artificial Sequence
  LRRK2 RNA guide
gugaggagccccgccuggca

SEQ ID NO: 85185 - RNA, 20 nt, Artificial Sequence
  LRRK2 RNA guide
ucugagaagugaggagcccc

SEQ ID NO: 85186 - RNA, 20 nt, Artificial Sequence
  LRRK2 RNA guide
ugagaagugaggagccccgc

SEQ ID NO: 85187 - RNA, 20 nt, Artificial Sequence
  LRRK2 RNA guide
ugaggagccccgccuggcag

SEQ ID NO: 85188 - RNA, 20 nt, Artificial Sequence
  LRRK2 RNA guide
ugccaggcggggcuccucac

SEQ ID NO: 85189 - RNA, 21 nt, Artificial Sequence
  LRRK2 RNA guide
aagugaggagccccgccuggc

SEQ ID NO: 85190 - RNA, 21 nt, Artificial Sequence
  LRRK2 RNA guide
agaagugaggagccccgccug

SEQ ID NO: 85191 - RNA, 21 nt, Artificial Sequence
  LRRK2 RNA guide
agacggggcagcugccaggcg

SEQ ID NO: 85192 - RNA, 21 nt, Artificial Sequence
  LRRK2 RNA guide
agcugccaggcggggcuccuc

SEQ ID NO: 85193 - RNA, 21 nt, Artificial Sequence
  LRRK2 RNA guide
aggagccccgccuggcagcug

SEQ ID NO: 85194 - RNA, 21 nt, Artificial Sequence
  LRRK2 RNA guide
aggcggggcuccucacuucuc

SEQ ID NO: 85195 - RNA, 21 nt, Artificial Sequence
  LRRK2 RNA guide
agugaggagccccgccuggca

SEQ ID NO: 85196 - RNA, 21 nt, Artificial Sequence
  LRRK2 RNA guide
cagcugccaggcggggcuccu

SEQ ID NO: 85197 - RNA, 21 nt, Artificial Sequence
  LRRK2 RNA guide
caggcggggcuccucacuucu

SEQ ID NO: 85198 - RNA, 21 nt, Artificial Sequence
  LRRK2 RNA guide
ccaggcggggcuccucacuuc

SEQ ID NO: 85199 - RNA, 21 nt, Artificial Sequence
  LRRK2 RNA guide
cgucugagaagugaggagccc

SEQ ID NO: 85200 - RNA, 21 nt, Artificial Sequence
  LRRK2 RNA guide
cugagaagugaggagccccgc

SEQ ID NO: 85201 - RNA, 21 nt, Artificial Sequence
  LRRK2 RNA guide
cugccaggcggggcuccucac

SEQ ID NO: 85202 - RNA, 21 nt, Artificial Sequence
  LRRK2 RNA guide
gaagugaggagccccgccugg

SEQ ID NO: 85203 - RNA, 21 nt, Artificial Sequence
  LRRK2 RNA guide
gagaagugaggagccccgccu

SEQ ID NO: 85204 - RNA, 21 nt, Artificial Sequence
  LRRK2 RNA guide
gaggagccccgccuggcagcu

SEQ ID NO: 85205 - RNA, 21 nt, Artificial Sequence
  LRRK2 RNA guide
gccaggcggggcuccucacuu

SEQ ID NO: 85206 - RNA, 21 nt, Artificial Sequence
  LRRK2 RNA guide
gcugccaggcggggcuccuca

SEQ ID NO: 85207 - RNA, 21 nt, Artificial Sequence
  LRRK2 RNA guide
gucugagaagugaggagcccc

SEQ ID NO: 85208 - RNA, 21 nt, Artificial Sequence
  LRRK2 RNA guide
gugaggagccccgccuggcag

SEQ ID NO: 85209 - RNA, 21 nt, Artificial Sequence
  LRRK2 RNA guide
ucugagaagugaggagccccg

SEQ ID NO: 85210 - RNA, 21 nt, Artificial Sequence
  LRRK2 RNA guide
ugagaagugaggagccccgcc

SEQ ID NO: 85211 - RNA, 21 nt, Artificial Sequence
  LRRK2 RNA guide
ugaggagccccgccuggcagc

SEQ ID NO: 85212 - RNA, 21 nt, Artificial Sequence
  LRRK2 RNA guide
ugccaggcggggcuccucacu

SEQ ID NO: 85213 - RNA, 22 nt, Artificial Sequence
  LRRK2 RNA guide
aagugaggagccccgccuggca

SEQ ID NO: 85214 - RNA, 22 nt, Artificial Sequence
  LRRK2 RNA guide
agaagugaggagccccgccugg

SEQ ID NO: 85215 - RNA, 22 nt, Artificial Sequence
  LRRK2 RNA guide
agacggggcagcugccaggcgg

SEQ ID NO: 85216 - RNA, 22 nt, Artificial Sequence
  LRRK2 RNA guide
agcugccaggcggggcuccuca

SEQ ID NO: 85217 - RNA, 22 nt, Artificial Sequence
  LRRK2 RNA guide
aggagccccgccuggcagcugc

SEQ ID NO: 85218 - RNA, 22 nt, Artificial Sequence
  LRRK2 RNA guide
aggcggggcuccucacuucuca

SEQ ID NO: 85219 - RNA, 22 nt, Artificial Sequence
  LRRK2 RNA guide
agugaggagccccgccuggcag

SEQ ID NO: 85220 - RNA, 22 nt, Artificial Sequence
  LRRK2 RNA guide
cagacggggcagcugccaggcg

SEQ ID NO: 85221 - RNA, 22 nt, Artificial Sequence
  LRRK2 RNA guide
cagcugccaggcggggcuccuc

SEQ ID NO: 85222 - RNA, 22 nt, Artificial Sequence
  LRRK2 RNA guide
caggcggggcuccucacuucuc

SEQ ID NO: 85223 - RNA, 22 nt, Artificial Sequence
  LRRK2 RNA guide
ccaggcggggcuccucacuucu

SEQ ID NO: 85224 - RNA, 22 nt, Artificial Sequence
  LRRK2 RNA guide
ccgucugagaagugaggagccc

SEQ ID NO: 85225 - RNA, 22 nt, Artificial Sequence
  LRRK2 RNA guide
cgucugagaagugaggagcccc

SEQ ID NO: 85226 - RNA, 22 nt, Artificial Sequence
  LRRK2 RNA guide
cugagaagugaggagccccgcc

SEQ ID NO: 85227 - RNA, 22 nt, Artificial Sequence
  LRRK2 RNA guide
cugccaggcggggcuccucacu

SEQ ID NO: 85228 - RNA, 22 nt, Artificial Sequence
  LRRK2 RNA guide
gaagugaggagccccgccuggc

SEQ ID NO: 85229 - RNA, 22 nt, Artificial Sequence
  LRRK2 RNA guide
gagaagugaggagccccgccug

SEQ ID NO: 85230 - RNA, 22 nt, Artificial Sequence
  LRRK2 RNA guide
gaggagccccgccuggcagcug

SEQ ID NO: 85231 - RNA, 22 nt, Artificial Sequence
  LRRK2 RNA guide
gcagcugccaggcggggcuccu

SEQ ID NO: 85232 - RNA, 22 nt, Artificial Sequence
  LRRK2 RNA guide
gccaggcggggcuccucacuuc

SEQ ID NO: 85233 - RNA, 22 nt, Artificial Sequence
  LRRK2 RNA guide
gcugccaggcggggcuccucac

SEQ ID NO: 85234 - RNA, 22 nt, Artificial Sequence
  LRRK2 RNA guide
gucugagaagugaggagccccg

SEQ ID NO: 85235 - RNA, 22 nt, Artificial Sequence
  LRRK2 RNA guide
gugaggagccccgccuggcagc

SEQ ID NO: 85236 - RNA, 22 nt, Artificial Sequence
  LRRK2 RNA guide
ucugagaagugaggagccccgc

SEQ ID NO: 85237 - RNA, 22 nt, Artificial Sequence
  LRRK2 RNA guide
ugagaagugaggagccccgccu

SEQ ID NO: 85238 - RNA, 22 nt, Artificial Sequence
  LRRK2 RNA guide
ugaggagccccgccuggcagcu

SEQ ID NO: 85239 - RNA, 22 nt, Artificial Sequence
  LRRK2 RNA guide
ugccaggcggggcuccucacuu

SEQ ID NO: 85240 - RNA, 22 nt, Artificial Sequence
  LRRK2 RNA guide
cccgucugagaagugaggagcc

SEQ ID NO: 85241 - RNA, 20 nt, Artificial Sequence
  LRRK2 RNA guide
aagugaggagccccuucgcc

SEQ ID NO: 85242 - RNA, 20 nt, Artificial Sequence
  LRRK2 RNA guide
acggggcagcugccaggcga

SEQ ID NO: 85243 - RNA, 20 nt, Artificial Sequence
  LRRK2 RNA guide
agaagugaggagccccuucg

SEQ ID NO: 85244 - RNA, 20 nt, Artificial Sequence
  LRRK2 RNA guide
agccccuucgccuggcagcu

SEQ ID NO: 85245 - RNA, 20 nt, Artificial Sequence
  LRRK2 RNA guide
agcugccaggcgaaggggcu

SEQ ID NO: 85246 - RNA, 20 nt, Artificial Sequence
  LRRK2 RNA guide
aggagccccuucgccuggca

SEQ ID NO: 85247 - RNA, 20 nt, Artificial Sequence
  LRRK2 RNA guide
aggcgaaggggcuccucacu

SEQ ID NO: 85248 - RNA, 20 nt, Artificial Sequence
  LRRK2 RNA guide
agugaggagccccuucgccu

SEQ ID NO: 85249 - RNA, 20 nt, Artificial Sequence
  LRRK2 RNA guide
cagcugccaggcgaaggggc

SEQ ID NO: 85250 - RNA, 20 nt, Artificial Sequence
  LRRK2 RNA guide
caggcgaaggggcuccucac

SEQ ID NO: 85251 - RNA, 20 nt, Artificial Sequence
  LRRK2 RNA guide
ccaggcgaaggggcuccuca

SEQ ID NO: 85252 - RNA, 20 nt, Artificial Sequence
  LRRK2 RNA guide
ccccuucgccuggcagcugc

SEQ ID NO: 85253 - RNA, 20 nt, Artificial Sequence
  LRRK2 RNA guide
cccuucgccuggcagcugcc

SEQ ID NO: 85254 - RNA, 20 nt, Artificial Sequence
  LRRK2 RNA guide
ccuucgccuggcagcugccc

SEQ ID NO: 85255 - RNA, 20 nt, Artificial Sequence
  LRRK2 RNA guide
cggggcagcugccaggcgaa

SEQ ID NO: 85256 - RNA, 20 nt, Artificial Sequence
  LRRK2 RNA guide
cugccaggcgaaggggcucc

SEQ ID NO: 85257 - RNA, 20 nt, Artificial Sequence
  LRRK2 RNA guide
cuucgccuggcagcugcccc

SEQ ID NO: 85258 - RNA, 20 nt, Artificial Sequence
  LRRK2 RNA guide
gaagugaggagccccuucgc

SEQ ID NO: 85259 - RNA, 20 nt, Artificial Sequence
  LRRK2 RNA guide
gagaagugaggagccccuuc

SEQ ID NO: 85260 - RNA, 20 nt, Artificial Sequence
  LRRK2 RNA guide
gagccccuucgccuggcagc

SEQ ID NO: 85261 - RNA, 20 nt, Artificial Sequence
  LRRK2 RNA guide
gaggagccccuucgccuggc

SEQ ID NO: 85262 - RNA, 20 nt, Artificial Sequence
  LRRK2 RNA guide
gcagcugccaggcgaagggg

SEQ ID NO: 85263 - RNA, 20 nt, Artificial Sequence
  LRRK2 RNA guide
gccaggcgaaggggcuccuc

SEQ ID NO: 85264 - RNA, 20 nt, Artificial Sequence
  LRRK2 RNA guide
gccccuucgccuggcagcug

SEQ ID NO: 85265 - RNA, 20 nt, Artificial Sequence
  LRRK2 RNA guide
gcugccaggcgaaggggcuc

SEQ ID NO: 85266 - RNA, 20 nt, Artificial Sequence
  LRRK2 RNA guide
ggagccccuucgccuggcag

SEQ ID NO: 85267 - RNA, 20 nt, Artificial Sequence
  LRRK2 RNA guide
ggcagcugccaggcgaaggg

SEQ ID NO: 85268 - RNA, 20 nt, Artificial Sequence
  LRRK2 RNA guide
gggcagcugccaggcgaagg

SEQ ID NO: 85269 - RNA, 20 nt, Artificial Sequence
  LRRK2 RNA guide
ggggcagcugccaggcgaag

SEQ ID NO: 85270 - RNA, 20 nt, Artificial Sequence
  LRRK2 RNA guide
gugaggagccccuucgccug

SEQ ID NO: 85271 - RNA, 20 nt, Artificial Sequence
  LRRK2 RNA guide
ucgccuggcagcugccccgu

SEQ ID NO: 85272 - RNA, 20 nt, Artificial Sequence
  LRRK2 RNA guide
ugaggagccccuucgccugg

SEQ ID NO: 85273 - RNA, 20 nt, Artificial Sequence
  LRRK2 RNA guide
ugccaggcgaaggggcuccu

SEQ ID NO: 85274 - RNA, 20 nt, Artificial Sequence
  LRRK2 RNA guide
uucgccuggcagcugccccg

SEQ ID NO: 85275 - RNA, 21 nt, Artificial Sequence
  LRRK2 RNA guide
aagugaggagccccuucgccu

SEQ ID NO: 85276 - RNA, 21 nt, Artificial Sequence
  LRRK2 RNA guide
acggggcagcugccaggcgaa

SEQ ID NO: 85277 - RNA, 21 nt, Artificial Sequence
  LRRK2 RNA guide
agaagugaggagccccuucgc

SEQ ID NO: 85278 - RNA, 21 nt, Artificial Sequence
  LRRK2 RNA guide
agccccuucgccuggcagcug

SEQ ID NO: 85279 - RNA, 21 nt, Artificial Sequence
  LRRK2 RNA guide
agcugccaggcgaaggggcuc

SEQ ID NO: 85280 - RNA, 21 nt, Artificial Sequence
  LRRK2 RNA guide
aggagccccuucgccuggcag

SEQ ID NO: 85281 - RNA, 21 nt, Artificial Sequence
  LRRK2 RNA guide
aggcgaaggggcuccucacuu

SEQ ID NO: 85282 - RNA, 21 nt, Artificial Sequence
  LRRK2 RNA guide
agugaggagccccuucgccug

SEQ ID NO: 85283 - RNA, 21 nt, Artificial Sequence
  LRRK2 RNA guide
cagcugccaggcgaaggggcu

SEQ ID NO: 85284 - RNA, 21 nt, Artificial Sequence
  LRRK2 RNA guide
caggcgaaggggcuccucacu

SEQ ID NO: 85285 - RNA, 21 nt, Artificial Sequence
  LRRK2 RNA guide
ccaggcgaaggggcuccucac

SEQ ID NO: 85286 - RNA, 21 nt, Artificial Sequence
  LRRK2 RNA guide
ccccuucgccuggcagcugcc

SEQ ID NO: 85287 - RNA, 21 nt, Artificial Sequence
  LRRK2 RNA guide
cccuucgccuggcagcugccc

SEQ ID NO: 85288 - RNA, 21 nt, Artificial Sequence
  LRRK2 RNA guide
ccuucgccuggcagcugcccc

SEQ ID NO: 85289 - RNA, 21 nt, Artificial Sequence
  LRRK2 RNA guide
cggggcagcugccaggcgaag

SEQ ID NO: 85290 - RNA, 21 nt, Artificial Sequence
  LRRK2 RNA guide
cugccaggcgaaggggcuccu

SEQ ID NO: 85291 - RNA, 21 nt, Artificial Sequence
  LRRK2 RNA guide
cuucgccuggcagcugccccg

SEQ ID NO: 85292 - RNA, 21 nt, Artificial Sequence
  LRRK2 RNA guide
gaagugaggagccccuucgcc

SEQ ID NO: 85293 - RNA, 21 nt, Artificial Sequence
  LRRK2 RNA guide
gacggggcagcugccaggcga

SEQ ID NO: 85294 - RNA, 21 nt, Artificial Sequence
  LRRK2 RNA guide
gagaagugaggagccccuucg

SEQ ID NO: 85295 - RNA, 21 nt, Artificial Sequence
  LRRK2 RNA guide
gagccccuucgccuggcagcu

SEQ ID NO: 85296 - RNA, 21 nt, Artificial Sequence
  LRRK2 RNA guide
gaggagccccuucgccuggca

SEQ ID NO: 85297 - RNA, 21 nt, Artificial Sequence
  LRRK2 RNA guide
gcagcugccaggcgaaggggc

SEQ ID NO: 85298 - RNA, 21 nt, Artificial Sequence
  LRRK2 RNA guide
gccaggcgaaggggcuccuca

SEQ ID NO: 85299 - RNA, 21 nt, Artificial Sequence
  LRRK2 RNA guide
gccccuucgccuggcagcugc

SEQ ID NO: 85300 - RNA, 21 nt, Artificial Sequence
  LRRK2 RNA guide
gcugccaggcgaaggggcucc

SEQ ID NO: 85301 - RNA, 21 nt, Artificial Sequence
  LRRK2 RNA guide
ggagccccuucgccuggcagc

SEQ ID NO: 85302 - RNA, 21 nt, Artificial Sequence
  LRRK2 RNA guide
ggcagcugccaggcgaagggg

SEQ ID NO: 85303 - RNA, 21 nt, Artificial Sequence
  LRRK2 RNA guide
gggcagcugccaggcgaaggg

SEQ ID NO: 85304 - RNA, 21 nt, Artificial Sequence
  LRRK2 RNA guide
ggggcagcugccaggcgaagg

SEQ ID NO: 85305 - RNA, 21 nt, Artificial Sequence
  LRRK2 RNA guide
gugaggagccccuucgccugg

SEQ ID NO: 85306 - RNA, 21 nt, Artificial Sequence
  LRRK2 RNA guide
ucgccuggcagcugccccguc

SEQ ID NO: 85307 - RNA, 21 nt, Artificial Sequence
  LRRK2 RNA guide
ugagaagugaggagccccuuc

SEQ ID NO: 85308 - RNA, 21 nt, Artificial Sequence
  LRRK2 RNA guide
ugaggagccccuucgccuggc

SEQ ID NO: 85309 - RNA, 21 nt, Artificial Sequence
  LRRK2 RNA guide
ugccaggcgaaggggcuccuc

SEQ ID NO: 85310 - RNA, 21 nt, Artificial Sequence
  LRRK2 RNA guide
uucgccuggcagcugccccgu

SEQ ID NO: 85311 - RNA, 22 nt, Artificial Sequence
  LRRK2 RNA guide
aagugaggagccccuucgccug

SEQ ID NO: 85312 - RNA, 22 nt, Artificial Sequence
  LRRK2 RNA guide
acggggcagcugccaggcgaag

SEQ ID NO: 85313 - RNA, 22 nt, Artificial Sequence
  LRRK2 RNA guide
agaagugaggagccccuucgcc

SEQ ID NO: 85314 - RNA, 22 nt, Artificial Sequence
  LRRK2 RNA guide
agacggggcagcugccaggcga

SEQ ID NO: 85315 - RNA, 22 nt, Artificial Sequence
  LRRK2 RNA guide
agccccuucgccuggcagcugc

SEQ ID NO: 85316 - RNA, 22 nt, Artificial Sequence
  LRRK2 RNA guide
agcugccaggcgaaggggcucc

SEQ ID NO: 85317 - RNA, 22 nt, Artificial Sequence
  LRRK2 RNA guide
aggagccccuucgccuggcagc

SEQ ID NO: 85318 - RNA, 22 nt, Artificial Sequence
  LRRK2 RNA guide
aggcgaaggggcuccucacuuc

SEQ ID NO: 85319 - RNA, 22 nt, Artificial Sequence
  LRRK2 RNA guide
agugaggagccccuucgccugg

SEQ ID NO: 85320 - RNA, 22 nt, Artificial Sequence
  LRRK2 RNA guide
cagcugccaggcgaaggggcuc

SEQ ID NO: 85321 - RNA, 22 nt, Artificial Sequence
  LRRK2 RNA guide
caggcgaaggggcuccucacuu

SEQ ID NO: 85322 - RNA, 22 nt, Artificial Sequence
  LRRK2 RNA guide
ccaggcgaaggggcuccucacu

SEQ ID NO: 85323 - RNA, 22 nt, Artificial Sequence
  LRRK2 RNA guide
ccccuucgccuggcagcugccc

SEQ ID NO: 85324 - RNA, 22 nt, Artificial Sequence
  LRRK2 RNA guide
cccuucgccuggcagcugcccc

SEQ ID NO: 85325 - RNA, 22 nt, Artificial Sequence
  LRRK2 RNA guide
ccuucgccuggcagcugccccg

SEQ ID NO: 85326 - RNA, 22 nt, Artificial Sequence
  LRRK2 RNA guide
cggggcagcugccaggcgaagg

SEQ ID NO: 85327 - RNA, 22 nt, Artificial Sequence
  LRRK2 RNA guide
cugagaagugaggagccccuuc

SEQ ID NO: 85328 - RNA, 22 nt, Artificial Sequence
  LRRK2 RNA guide
cugccaggcgaaggggcuccuc

SEQ ID NO: 85329 - RNA, 22 nt, Artificial Sequence
  LRRK2 RNA guide
cuucgccuggcagcugccccgu

SEQ ID NO: 85330 - RNA, 22 nt, Artificial Sequence
  LRRK2 RNA guide
gaagugaggagccccuucgccu

SEQ ID NO: 85331 - RNA, 22 nt, Artificial Sequence
  LRRK2 RNA guide
gacggggcagcugccaggcgaa

SEQ ID NO: 85332 - RNA, 22 nt, Artificial Sequence
  LRRK2 RNA guide
gagaagugaggagccccuucgc

SEQ ID NO: 85333 - RNA, 22 nt, Artificial Sequence
  LRRK2 RNA guide
gagccccuucgccuggcagcug

SEQ ID NO: 85334 - RNA, 22 nt, Artificial Sequence
  LRRK2 RNA guide
gaggagccccuucgccuggcag

SEQ ID NO: 85335 - RNA, 22 nt, Artificial Sequence
  LRRK2 RNA guide
gcagcugccaggcgaaggggcu

SEQ ID NO: 85336 - RNA, 22 nt, Artificial Sequence
  LRRK2 RNA guide
gccaggcgaaggggcuccucac

SEQ ID NO: 85337 - RNA, 22 nt, Artificial Sequence
  LRRK2 RNA guide
gccccuucgccuggcagcugcc

SEQ ID NO: 85338 - RNA, 22 nt, Artificial Sequence
  LRRK2 RNA guide
gcugccaggcgaaggggcuccu

SEQ ID NO: 85339 - RNA, 22 nt, Artificial Sequence
  LRRK2 RNA guide
ggagccccuucgccuggcagcu

SEQ ID NO: 85340 - RNA, 22 nt, Artificial Sequence
  LRRK2 RNA guide
ggcagcugccaggcgaaggggc

SEQ ID NO: 85341 - RNA, 22 nt, Artificial Sequence
  LRRK2 RNA guide
gggcagcugccaggcgaagggg

SEQ ID NO: 85342 - RNA, 22 nt, Artificial Sequence
  LRRK2 RNA guide
ggggcagcugccaggcgaaggg

SEQ ID NO: 85343 - RNA, 22 nt, Artificial Sequence
  LRRK2 RNA guide
gugaggagccccuucgccuggc

SEQ ID NO: 85344 - RNA, 22 nt, Artificial Sequence
  LRRK2 RNA guide
ucgccuggcagcugccccgucu

SEQ ID NO: 85345 - RNA, 22 nt, Artificial Sequence
  LRRK2 RNA guide
ugagaagugaggagccccuucg

SEQ ID NO: 85346 - RNA, 22 nt, Artificial Sequence
  LRRK2 RNA guide
ugaggagccccuucgccuggca

SEQ ID NO: 85347 - RNA, 22 nt, Artificial Sequence
  LRRK2 RNA guide
ugccaggcgaaggggcuccuca

SEQ ID NO: 85348 - RNA, 22 nt, Artificial Sequence
  LRRK2 RNA guide
uucgccuggcagcugccccguc

SEQ ID NO: 85349 - RNA, 22 nt, Artificial Sequence
  LRRK2 RNA guide
aaaggggcuccucacuucucag

SEQ ID NO: 85350 - RNA, 20 nt, Artificial Sequence
  LRRK2 RNA guide
aaaggagggacuccucacuu

SEQ ID NO: 85351 - RNA, 20 nt, Artificial Sequence
  LRRK2 RNA guide
aaggagggacuccucacuuc

SEQ ID NO: 85352 - RNA, 20 nt, Artificial Sequence
  LRRK2 RNA guide
aagugaggagucccuccuuu

SEQ ID NO: 85353 - RNA, 20 nt, Artificial Sequence
  LRRK2 RNA guide
agaagugaggagucccuccu

SEQ ID NO: 85354 - RNA, 20 nt, Artificial Sequence
  LRRK2 RNA guide
agcugccaggcaaaggaggg

SEQ ID NO: 85355 - RNA, 20 nt, Artificial Sequence
  LRRK2 RNA guide
aggagggacuccucacuucu

SEQ ID NO: 85356 - RNA, 20 nt, Artificial Sequence
  LRRK2 RNA guide
aggagucccuccuuugccug

SEQ ID NO: 85357 - RNA, 20 nt, Artificial Sequence
  LRRK2 RNA guide
aggcaaaggagggacuccuc

SEQ ID NO: 85358 - RNA, 20 nt, Artificial Sequence
  LRRK2 RNA guide
agucccuccuuugccuggca

SEQ ID NO: 85359 - RNA, 20 nt, Artificial Sequence
  LRRK2 RNA guide
agugaggagucccuccuuug

SEQ ID NO: 85360 - RNA, 20 nt, Artificial Sequence
  LRRK2 RNA guide
caaaggagggacuccucacu

SEQ ID NO: 85361 - RNA, 20 nt, Artificial Sequence
  LRRK2 RNA guide
cagcugccaggcaaaggagg

SEQ ID NO: 85362 - RNA, 20 nt, Artificial Sequence
  LRRK2 RNA guide
caggcaaaggagggacuccu

SEQ ID NO: 85363 - RNA, 20 nt, Artificial Sequence
  LRRK2 RNA guide
ccaggcaaaggagggacucc

SEQ ID NO: 85364 - RNA, 20 nt, Artificial Sequence
  LRRK2 RNA guide
cccuccuuugccuggcagcu

SEQ ID NO: 85365 - RNA, 20 nt, Artificial Sequence
  LRRK2 RNA guide
ccuccuuugccuggcagcug

SEQ ID NO: 85366 - RNA, 20 nt, Artificial Sequence
  LRRK2 RNA guide
cuccuuugccuggcagcugc

SEQ ID NO: 85367 - RNA, 20 nt, Artificial Sequence
  LRRK2 RNA guide
cugagaagugaggagucccu

SEQ ID NO: 85368 - RNA, 20 nt, Artificial Sequence
  LRRK2 RNA guide
cugccaggcaaaggagggac

SEQ ID NO: 85369 - RNA, 20 nt, Artificial Sequence
  LRRK2 RNA guide
gaagugaggagucccuccuu

SEQ ID NO: 85370 - RNA, 20 nt, Artificial Sequence
  LRRK2 RNA guide
gagaagugaggagucccucc

SEQ ID NO: 85371 - RNA, 20 nt, Artificial Sequence
  LRRK2 RNA guide
gaggagucccuccuuugccu

SEQ ID NO: 85372 - RNA, 20 nt, Artificial Sequence
  LRRK2 RNA guide
gagucccuccuuugccuggc

SEQ ID NO: 85373 - RNA, 20 nt, Artificial Sequence
  LRRK2 RNA guide
gcaaaggagggacuccucac

SEQ ID NO: 85374 - RNA, 20 nt, Artificial Sequence
  LRRK2 RNA guide
gcagcugccaggcaaaggag

SEQ ID NO: 85375 - RNA, 20 nt, Artificial Sequence
  LRRK2 RNA guide
gccaggcaaaggagggacuc

SEQ ID NO: 85376 - RNA, 20 nt, Artificial Sequence
  LRRK2 RNA guide
gcugccaggcaaaggaggga

SEQ ID NO: 85377 - RNA, 20 nt, Artificial Sequence
  LRRK2 RNA guide
ggagucccuccuuugccugg

SEQ ID NO: 85378 - RNA, 20 nt, Artificial Sequence
  LRRK2 RNA guide
ggcaaaggagggacuccuca

SEQ ID NO: 85379 - RNA, 20 nt, Artificial Sequence
  LRRK2 RNA guide
ggcagcugccaggcaaagga

SEQ ID NO: 85380 - RNA, 20 nt, Artificial Sequence
  LRRK2 RNA guide
gucccuccuuugccuggcag

SEQ ID NO: 85381 - RNA, 20 nt, Artificial Sequence
  LRRK2 RNA guide
gucugagaagugaggagucc

SEQ ID NO: 85382 - RNA, 20 nt, Artificial Sequence
  LRRK2 RNA guide
gugaggagucccuccuuugc

SEQ ID NO: 85383 - RNA, 20 nt, Artificial Sequence
  LRRK2 RNA guide
ucccuccuuugccuggcagc

SEQ ID NO: 85384 - RNA, 20 nt, Artificial Sequence
  LRRK2 RNA guide
uccuuugccuggcagcugcc

SEQ ID NO: 85385 - RNA, 20 nt, Artificial Sequence
  LRRK2 RNA guide
ucugagaagugaggaguccc

SEQ ID NO: 85386 - RNA, 20 nt, Artificial Sequence
  LRRK2 RNA guide
ugagaagugaggagucccuc

SEQ ID NO: 85387 - RNA, 20 nt, Artificial Sequence
  LRRK2 RNA guide
ugaggagucccuccuuugcc

SEQ ID NO: 85388 - RNA, 20 nt, Artificial Sequence
  LRRK2 RNA guide
ugccaggcaaaggagggacu

SEQ ID NO: 85389 - RNA, 20 nt, Artificial Sequence
  LRRK2 RNA guide
ugucugagaagugaggaguc

SEQ ID NO: 85390 - RNA, 21 nt, Artificial Sequence
  LRRK2 RNA guide
aaaggagggacuccucacuuc

SEQ ID NO: 85391 - RNA, 21 nt, Artificial Sequence
  LRRK2 RNA guide
aaggagggacuccucacuucu

SEQ ID NO: 85392 - RNA, 21 nt, Artificial Sequence
  LRRK2 RNA guide
aagugaggagucccuccuuug

SEQ ID NO: 85393 - RNA, 21 nt, Artificial Sequence
  LRRK2 RNA guide
agaagugaggagucccuccuu

SEQ ID NO: 85394 - RNA, 21 nt, Artificial Sequence
  LRRK2 RNA guide
agcugccaggcaaaggaggga

SEQ ID NO: 85395 - RNA, 21 nt, Artificial Sequence
  LRRK2 RNA guide
aggagggacuccucacuucuc

SEQ ID NO: 85396 - RNA, 21 nt, Artificial Sequence
  LRRK2 RNA guide
aggagucccuccuuugccugg

SEQ ID NO: 85397 - RNA, 21 nt, Artificial Sequence
  LRRK2 RNA guide
aggcaaaggagggacuccuca

SEQ ID NO: 85398 - RNA, 21 nt, Artificial Sequence
  LRRK2 RNA guide
agucccuccuuugccuggcag

SEQ ID NO: 85399 - RNA, 21 nt, Artificial Sequence
  LRRK2 RNA guide
agugaggagucccuccuuugc

SEQ ID NO: 85400 - RNA, 21 nt, Artificial Sequence
  LRRK2 RNA guide
caaaggagggacuccucacuu

SEQ ID NO: 85401 - RNA, 21 nt, Artificial Sequence
  LRRK2 RNA guide
cagcugccaggcaaaggaggg

SEQ ID NO: 85402 - RNA, 21 nt, Artificial Sequence
  LRRK2 RNA guide
caggcaaaggagggacuccuc

SEQ ID NO: 85403 - RNA, 21 nt, Artificial Sequence
  LRRK2 RNA guide
ccaggcaaaggagggacuccu

SEQ ID NO: 85404 - RNA, 21 nt, Artificial Sequence
  LRRK2 RNA guide
cccuccuuugccuggcagcug

SEQ ID NO: 85405 - RNA, 21 nt, Artificial Sequence
  LRRK2 RNA guide
ccuccuuugccuggcagcugc

SEQ ID NO: 85406 - RNA, 21 nt, Artificial Sequence
  LRRK2 RNA guide
cuccuuugccuggcagcugcc

SEQ ID NO: 85407 - RNA, 21 nt, Artificial Sequence
  LRRK2 RNA guide
cugagaagugaggagucccuc

SEQ ID NO: 85408 - RNA, 21 nt, Artificial Sequence
  LRRK2 RNA guide
cugccaggcaaaggagggacu

SEQ ID NO: 85409 - RNA, 21 nt, Artificial Sequence
  LRRK2 RNA guide
cugucugagaagugaggaguc

SEQ ID NO: 85410 - RNA, 21 nt, Artificial Sequence
  LRRK2 RNA guide
gaagugaggagucccuccuuu

SEQ ID NO: 85411 - RNA, 21 nt, Artificial Sequence
  LRRK2 RNA guide
gagaagugaggagucccuccu

SEQ ID NO: 85412 - RNA, 21 nt, Artificial Sequence
  LRRK2 RNA guide
gaggagucccuccuuugccug

SEQ ID NO: 85413 - RNA, 21 nt, Artificial Sequence
  LRRK2 RNA guide
gagucccuccuuugccuggca

SEQ ID NO: 85414 - RNA, 21 nt, Artificial Sequence
  LRRK2 RNA guide
gcaaaggagggacuccucacu

SEQ ID NO: 85415 - RNA, 21 nt, Artificial Sequence
  LRRK2 RNA guide
gcagcugccaggcaaaggagg

SEQ ID NO: 85416 - RNA, 21 nt, Artificial Sequence
  LRRK2 RNA guide
gccaggcaaaggagggacucc

SEQ ID NO: 85417 - RNA, 21 nt, Artificial Sequence
  LRRK2 RNA guide
gcugccaggcaaaggagggac

SEQ ID NO: 85418 - RNA, 21 nt, Artificial Sequence
  LRRK2 RNA guide
ggagucccuccuuugccuggc

SEQ ID NO: 85419 - RNA, 21 nt, Artificial Sequence
  LRRK2 RNA guide
ggcaaaggagggacuccucac

SEQ ID NO: 85420 - RNA, 21 nt, Artificial Sequence
  LRRK2 RNA guide
ggcagcugccaggcaaaggag

SEQ ID NO: 85421 - RNA, 21 nt, Artificial Sequence
  LRRK2 RNA guide
gggcagcugccaggcaaagga

SEQ ID NO: 85422 - RNA, 21 nt, Artificial Sequence
  LRRK2 RNA guide
gucccuccuuugccuggcagc

SEQ ID NO: 85423 - RNA, 21 nt, Artificial Sequence
  LRRK2 RNA guide
gucugagaagugaggaguccc

SEQ ID NO: 85424 - RNA, 21 nt, Artificial Sequence
  LRRK2 RNA guide
gugaggagucccuccuuugcc

SEQ ID NO: 85425 - RNA, 21 nt, Artificial Sequence
  LRRK2 RNA guide
ucccuccuuugccuggcagcu

SEQ ID NO: 85426 - RNA, 21 nt, Artificial Sequence
  LRRK2 RNA guide
uccuuugccuggcagcugccc

SEQ ID NO: 85427 - RNA, 21 nt, Artificial Sequence
  LRRK2 RNA guide
ucugagaagugaggagucccu

SEQ ID NO: 85428 - RNA, 21 nt, Artificial Sequence
  LRRK2 RNA guide
ugagaagugaggagucccucc

SEQ ID NO: 85429 - RNA, 21 nt, Artificial Sequence
  LRRK2 RNA guide
ugaggagucccuccuuugccu

SEQ ID NO: 85430 - RNA, 21 nt, Artificial Sequence
  LRRK2 RNA guide
ugccaggcaaaggagggacuc

SEQ ID NO: 85431 - RNA, 21 nt, Artificial Sequence
  LRRK2 RNA guide
ugucugagaagugaggagucc

SEQ ID NO: 85432 - RNA, 22 nt, Artificial Sequence
  LRRK2 RNA guide
aaaggagggacuccucacuucu

SEQ ID NO: 85433 - RNA, 22 nt, Artificial Sequence
  LRRK2 RNA guide
aaggagggacuccucacuucuc

SEQ ID NO: 85434 - RNA, 22 nt, Artificial Sequence
  LRRK2 RNA guide
aagugaggagucccuccuuugc

SEQ ID NO: 85435 - RNA, 22 nt, Artificial Sequence
  LRRK2 RNA guide
agaagugaggagucccuccuuu

SEQ ID NO: 85436 - RNA, 22 nt, Artificial Sequence
  LRRK2 RNA guide
agcugccaggcaaaggagggac

SEQ ID NO: 85437 - RNA, 22 nt, Artificial Sequence
  LRRK2 RNA guide
aggagggacuccucacuucuca

SEQ ID NO: 85438 - RNA, 22 nt, Artificial Sequence
  LRRK2 RNA guide
aggagucccuccuuugccuggc

SEQ ID NO: 85439 - RNA, 22 nt, Artificial Sequence
  LRRK2 RNA guide
aggcaaaggagggacuccucac

SEQ ID NO: 85440 - RNA, 22 nt, Artificial Sequence
  LRRK2 RNA guide
agucccuccuuugccuggcagc

SEQ ID NO: 85441 - RNA, 22 nt, Artificial Sequence
  LRRK2 RNA guide
agugaggagucccuccuuugcc

SEQ ID NO: 85442 - RNA, 22 nt, Artificial Sequence
  LRRK2 RNA guide
caaaggagggacuccucacuuc

SEQ ID NO: 85443 - RNA, 22 nt, Artificial Sequence
  LRRK2 RNA guide
cagcugccaggcaaaggaggga

SEQ ID NO: 85444 - RNA, 22 nt, Artificial Sequence
  LRRK2 RNA guide
caggcaaaggagggacuccuca

SEQ ID NO: 85445 - RNA, 22 nt, Artificial Sequence
  LRRK2 RNA guide
ccaggcaaaggagggacuccuc

SEQ ID NO: 85446 - RNA, 22 nt, Artificial Sequence
  LRRK2 RNA guide
cccuccuuugccuggcagcugc

SEQ ID NO: 85447 - RNA, 22 nt, Artificial Sequence
  LRRK2 RNA guide
ccuccuuugccuggcagcugcc

SEQ ID NO: 85448 - RNA, 22 nt, Artificial Sequence
  LRRK2 RNA guide
ccugucugagaagugaggaguc

SEQ ID NO: 85449 - RNA, 22 nt, Artificial Sequence
  LRRK2 RNA guide
cuccuuugccuggcagcugccc

SEQ ID NO: 85450 - RNA, 22 nt, Artificial Sequence
  LRRK2 RNA guide
cugagaagugaggagucccucc

SEQ ID NO: 85451 - RNA, 22 nt, Artificial Sequence
  LRRK2 RNA guide
cugccaggcaaaggagggacuc

SEQ ID NO: 85452 - RNA, 22 nt, Artificial Sequence
  LRRK2 RNA guide
cugucugagaagugaggagucc

SEQ ID NO: 85453 - RNA, 22 nt, Artificial Sequence
  LRRK2 RNA guide
gaagugaggagucccuccuuug

SEQ ID NO: 85454 - RNA, 22 nt, Artificial Sequence
  LRRK2 RNA guide
gagaagugaggagucccuccuu

SEQ ID NO: 85455 - RNA, 22 nt, Artificial Sequence
  LRRK2 RNA guide
gaggagucccuccuuugccugg

SEQ ID NO: 85456 - RNA, 22 nt, Artificial Sequence
  LRRK2 RNA guide
gagucccuccuuugccuggcag

SEQ ID NO: 85457 - RNA, 22 nt, Artificial Sequence
  LRRK2 RNA guide
gcaaaggagggacuccucacuu

SEQ ID NO: 85458 - RNA, 22 nt, Artificial Sequence
  LRRK2 RNA guide
gcagcugccaggcaaaggaggg

SEQ ID NO: 85459 - RNA, 22 nt, Artificial Sequence
  LRRK2 RNA guide
gccaggcaaaggagggacuccu

SEQ ID NO: 85460 - RNA, 22 nt, Artificial Sequence
  LRRK2 RNA guide
gcugccaggcaaaggagggacu

SEQ ID NO: 85461 - RNA, 22 nt, Artificial Sequence
  LRRK2 RNA guide
ggagucccuccuuugccuggca

SEQ ID NO: 85462 - RNA, 22 nt, Artificial Sequence
  LRRK2 RNA guide
ggcaaaggagggacuccucacu

SEQ ID NO: 85463 - RNA, 22 nt, Artificial Sequence
  LRRK2 RNA guide
ggcagcugccaggcaaaggagg

SEQ ID NO: 85464 - RNA, 22 nt, Artificial Sequence
  LRRK2 RNA guide
gggcagcugccaggcaaaggag

SEQ ID NO: 85465 - RNA, 22 nt, Artificial Sequence
  LRRK2 RNA guide
ggggcagcugccaggcaaagga

SEQ ID NO: 85466 - RNA, 22 nt, Artificial Sequence
  LRRK2 RNA guide
gucccuccuuugccuggcagcu

SEQ ID NO: 85467 - RNA, 22 nt, Artificial Sequence
  LRRK2 RNA guide
gucugagaagugaggagucccu

SEQ ID NO: 85468 - RNA, 22 nt, Artificial Sequence
  LRRK2 RNA guide
gugaggagucccuccuuugccu

SEQ ID NO: 85469 - RNA, 22 nt, Artificial Sequence
  LRRK2 RNA guide
ucccuccuuugccuggcagcug

SEQ ID NO: 85470 - RNA, 22 nt, Artificial Sequence
  LRRK2 RNA guide
uccuuugccuggcagcugcccc

SEQ ID NO: 85471 - RNA, 22 nt, Artificial Sequence
  LRRK2 RNA guide
ucugagaagugaggagucccuc

SEQ ID NO: 85472 - RNA, 22 nt, Artificial Sequence
  LRRK2 RNA guide
ugagaagugaggagucccuccu

SEQ ID NO: 85473 - RNA, 22 nt, Artificial Sequence
  LRRK2 RNA guide
ugaggagucccuccuuugccug

SEQ ID NO: 85474 - RNA, 22 nt, Artificial Sequence
  LRRK2 RNA guide
ugccaggcaaaggagggacucc

SEQ ID NO: 85475 - RNA, 22 nt, Artificial Sequence
  LRRK2 RNA guide
ugucugagaagugaggaguccc

SEQ ID NO: 85476 - RNA, 20 nt, Artificial Sequence
  LRRK2 RNA guide
aaaggggcuccucacuucuc

SEQ ID NO: 85477 - RNA, 20 nt, Artificial Sequence
  LRRK2 RNA guide
caaaggggcuccucacuucu

SEQ ID NO: 85478 - RNA, 20 nt, Artificial Sequence
  LRRK2 RNA guide
caucugagaagugaggagcc

SEQ ID NO: 85479 - RNA, 21 nt, Artificial Sequence
  LRRK2 RNA guide
aaaggggcuccucacuucuca

SEQ ID NO: 85480 - RNA, 21 nt, Artificial Sequence
  LRRK2 RNA guide
caaaggggcuccucacuucuc

SEQ ID NO: 85481 - RNA, 21 nt, Artificial Sequence
  LRRK2 RNA guide
caucugagaagugaggagccc

SEQ ID NO: 85482 - RNA, 21 nt, Artificial Sequence
  LRRK2 RNA guide
ccaucugagaagugaggagcc

SEQ ID NO: 85483 - RNA, 21 nt, Artificial Sequence
  LRRK2 RNA guide
gcaaaggggcuccucacuucu

SEQ ID NO: 85484 - RNA, 22 nt, Artificial Sequence
  LRRK2 RNA guide
caaaggggcuccucacuucuca

SEQ ID NO: 85485 - RNA, 22 nt, Artificial Sequence
  LRRK2 RNA guide
caucugagaagugaggagcccc

SEQ ID NO: 85486 - RNA, 22 nt, Artificial Sequence
  LRRK2 RNA guide
ccaucugagaagugaggagccc

SEQ ID NO: 85487 - RNA, 22 nt, Artificial Sequence
  LRRK2 RNA guide
cccaucugagaagugaggagcc

SEQ ID NO: 85488 - RNA, 22 nt, Artificial Sequence
  LRRK2 RNA guide
gcaaaggggcuccucacuucuc

SEQ ID NO: 85489 - RNA, 22 nt, Artificial Sequence
  LRRK2 RNA guide
ggcaaaggggcuccucacuucu

SEQ ID NO: 85490 - RNA, 20 nt, Artificial Sequence
  LRRK2 RNA guide
ccgcccugucugagaaguga

SEQ ID NO: 85491 - RNA, 20 nt, Artificial Sequence
  LRRK2 RNA guide
cgcccugucugagaagugag

SEQ ID NO: 85492 - RNA, 20 nt, Artificial Sequence
  LRRK2 RNA guide
gacuccucacuucucagaca

SEQ ID NO: 85493 - RNA, 20 nt, Artificial Sequence
  LRRK2 RNA guide
gcccugucugagaagugagg

SEQ ID NO: 85494 - RNA, 20 nt, Artificial Sequence
  LRRK2 RNA guide
ggacuccucacuucucagac

SEQ ID NO: 85495 - RNA, 21 nt, Artificial Sequence
  LRRK2 RNA guide
ccgcccugucugagaagugag

SEQ ID NO: 85496 - RNA, 21 nt, Artificial Sequence
  LRRK2 RNA guide
cgcccugucugagaagugagg

SEQ ID NO: 85497 - RNA, 21 nt, Artificial Sequence
  LRRK2 RNA guide
gacuccucacuucucagacag

SEQ ID NO: 85498 - RNA, 21 nt, Artificial Sequence
  LRRK2 RNA guide
gcccugucugagaagugagga

SEQ ID NO: 85499 - RNA, 21 nt, Artificial Sequence
  LRRK2 RNA guide
gccgcccugucugagaaguga

SEQ ID NO: 85500 - RNA, 21 nt, Artificial Sequence
  LRRK2 RNA guide
ggacuccucacuucucagaca

SEQ ID NO: 85501 - RNA, 21 nt, Artificial Sequence
  LRRK2 RNA guide
gggacuccucacuucucagac

SEQ ID NO: 85502 - RNA, 22 nt, Artificial Sequence
  LRRK2 RNA guide
agggacuccucacuucucagac

SEQ ID NO: 85503 - RNA, 22 nt, Artificial Sequence
  LRRK2 RNA guide
ccgcccugucugagaagugagg

SEQ ID NO: 85504 - RNA, 22 nt, Artificial Sequence
  LRRK2 RNA guide
cgcccugucugagaagugagga

SEQ ID NO: 85505 - RNA, 22 nt, Artificial Sequence
  LRRK2 RNA guide
gacuccucacuucucagacagg

SEQ ID NO: 85506 - RNA, 22 nt, Artificial Sequence
  LRRK2 RNA guide
gcccugucugagaagugaggag

SEQ ID NO: 85507 - RNA, 22 nt, Artificial Sequence
  LRRK2 RNA guide
gccgcccugucugagaagugag

SEQ ID NO: 85508 - RNA, 22 nt, Artificial Sequence
  LRRK2 RNA guide
ggacuccucacuucucagacag

SEQ ID NO: 85509 - RNA, 22 nt, Artificial Sequence
  LRRK2 RNA guide
ggccgcccugucugagaaguga

SEQ ID NO: 85510 - RNA, 22 nt, Artificial Sequence
  LRRK2 RNA guide
gggacuccucacuucucagaca

SEQ ID NO: 85511 - RNA, 20 nt, Artificial Sequence
  LRRK2 RNA guide
acaggguugcggccgggcau

SEQ ID NO: 85512 - RNA, 20 nt, Artificial Sequence
  LRRK2 RNA guide
agacaggguugcggccgggc

SEQ ID NO: 85513 - RNA, 20 nt, Artificial Sequence
  LRRK2 RNA guide
agagccuaugcccggccgca

SEQ ID NO: 85514 - RNA, 20 nt, Artificial Sequence
  LRRK2 RNA guide
agccuaugcccggccgcaac

SEQ ID NO: 85515 - RNA, 20 nt, Artificial Sequence
  LRRK2 RNA guide
augcccggccgcaacccugu

SEQ ID NO: 85516 - RNA, 20 nt, Artificial Sequence
  LRRK2 RNA guide
cagacaggguugcggccggg

SEQ ID NO: 85517 - RNA, 20 nt, Artificial Sequence
  LRRK2 RNA guide
caggguugcggccgggcaua

SEQ ID NO: 85518 - RNA, 20 nt, Artificial Sequence
  LRRK2 RNA guide
ccagacaggguugcggccgg

SEQ ID NO: 85519 - RNA, 20 nt, Artificial Sequence
  LRRK2 RNA guide
cccagacaggguugcggccg

SEQ ID NO: 85520 - RNA, 20 nt, Artificial Sequence
  LRRK2 RNA guide
ccuaugcccggccgcaaccc

SEQ ID NO: 85521 - RNA, 20 nt, Artificial Sequence
  LRRK2 RNA guide
cuaugcccggccgcaacccu

SEQ ID NO: 85522 - RNA, 20 nt, Artificial Sequence
  LRRK2 RNA guide
gacaggguugcggccgggca

SEQ ID NO: 85523 - RNA, 20 nt, Artificial Sequence
  LRRK2 RNA guide
gagccuaugcccggccgcaa

SEQ ID NO: 85524 - RNA, 20 nt, Artificial Sequence
  LRRK2 RNA guide
gccuaugcccggccgcaacc

SEQ ID NO: 85525 - RNA, 20 nt, Artificial Sequence
  LRRK2 RNA guide
uaugcccggccgcaacccug

SEQ ID NO: 85526 - RNA, 21 nt, Artificial Sequence
  LRRK2 RNA guide
acaggguugcggccgggcaua

SEQ ID NO: 85527 - RNA, 21 nt, Artificial Sequence
  LRRK2 RNA guide
agacaggguugcggccgggca

SEQ ID NO: 85528 - RNA, 21 nt, Artificial Sequence
  LRRK2 RNA guide
agagccuaugcccggccgcaa

SEQ ID NO: 85529 - RNA, 21 nt, Artificial Sequence
  LRRK2 RNA guide
agccuaugcccggccgcaacc

SEQ ID NO: 85530 - RNA, 21 nt, Artificial Sequence
  LRRK2 RNA guide
augcccggccgcaacccuguc

SEQ ID NO: 85531 - RNA, 21 nt, Artificial Sequence
  LRRK2 RNA guide
cagacaggguugcggccgggc

SEQ ID NO: 85532 - RNA, 21 nt, Artificial Sequence
  LRRK2 RNA guide
caggguugcggccgggcauag

SEQ ID NO: 85533 - RNA, 21 nt, Artificial Sequence
  LRRK2 RNA guide
ccagacaggguugcggccggg

SEQ ID NO: 85534 - RNA, 21 nt, Artificial Sequence
  LRRK2 RNA guide
cccagacaggguugcggccgg

SEQ ID NO: 85535 - RNA, 21 nt, Artificial Sequence
  LRRK2 RNA guide
ccuaugcccggccgcaacccu

SEQ ID NO: 85536 - RNA, 21 nt, Artificial Sequence
  LRRK2 RNA guide
cuaugcccggccgcaacccug

SEQ ID NO: 85537 - RNA, 21 nt, Artificial Sequence
  LRRK2 RNA guide
gacaggguugcggccgggcau

SEQ ID NO: 85538 - RNA, 21 nt, Artificial Sequence
  LRRK2 RNA guide
gagagccuaugcccggccgca

SEQ ID NO: 85539 - RNA, 21 nt, Artificial Sequence
  LRRK2 RNA guide
gagccuaugcccggccgcaac

SEQ ID NO: 85540 - RNA, 21 nt, Artificial Sequence
  LRRK2 RNA guide
gccuaugcccggccgcaaccc

SEQ ID NO: 85541 - RNA, 21 nt, Artificial Sequence
  LRRK2 RNA guide
uaugcccggccgcaacccugu

SEQ ID NO: 85542 - RNA, 21 nt, Artificial Sequence
  LRRK2 RNA guide
ucccagacaggguugcggccg

SEQ ID NO: 85543 - RNA, 22 nt, Artificial Sequence
  LRRK2 RNA guide
acaggguugcggccgggcauag

SEQ ID NO: 85544 - RNA, 22 nt, Artificial Sequence
  LRRK2 RNA guide
agacaggguugcggccgggcau

SEQ ID NO: 85545 - RNA, 22 nt, Artificial Sequence
  LRRK2 RNA guide
agagccuaugcccggccgcaac

SEQ ID NO: 85546 - RNA, 22 nt, Artificial Sequence
  LRRK2 RNA guide
agccuaugcccggccgcaaccc

SEQ ID NO: 85547 - RNA, 22 nt, Artificial Sequence
  LRRK2 RNA guide
augcccggccgcaacccugucu

SEQ ID NO: 85548 - RNA, 22 nt, Artificial Sequence
  LRRK2 RNA guide
cagacaggguugcggccgggca

SEQ ID NO: 85549 - RNA, 22 nt, Artificial Sequence
  LRRK2 RNA guide
caggguugcggccgggcauagg

SEQ ID NO: 85550 - RNA, 22 nt, Artificial Sequence
  LRRK2 RNA guide
ccagacaggguugcggccgggc

SEQ ID NO: 85551 - RNA, 22 nt, Artificial Sequence
  LRRK2 RNA guide
cccagacaggguugcggccggg

SEQ ID NO: 85552 - RNA, 22 nt, Artificial Sequence
  LRRK2 RNA guide
ccuaugcccggccgcaacccug

SEQ ID NO: 85553 - RNA, 22 nt, Artificial Sequence
  LRRK2 RNA guide
cuaugcccggccgcaacccugu

SEQ ID NO: 85554 - RNA, 22 nt, Artificial Sequence
  LRRK2 RNA guide
cucccagacaggguugcggccg

SEQ ID NO: 85555 - RNA, 22 nt, Artificial Sequence
  LRRK2 RNA guide
gacaggguugcggccgggcaua

SEQ ID NO: 85556 - RNA, 22 nt, Artificial Sequence
  LRRK2 RNA guide
gagagccuaugcccggccgcaa

SEQ ID NO: 85557 - RNA, 22 nt, Artificial Sequence
  LRRK2 RNA guide
gagccuaugcccggccgcaacc

SEQ ID NO: 85558 - RNA, 22 nt, Artificial Sequence
  LRRK2 RNA guide
gccuaugcccggccgcaacccu

SEQ ID NO: 85559 - RNA, 22 nt, Artificial Sequence
  LRRK2 RNA guide
ggagagccuaugcccggccgca

SEQ ID NO: 85560 - RNA, 22 nt, Artificial Sequence
  LRRK2 RNA guide
uaugcccggccgcaacccuguc

SEQ ID NO: 85561 - RNA, 22 nt, Artificial Sequence
  LRRK2 RNA guide
ucccagacaggguugcggccgg

SEQ ID NO: 85562 - RNA, 20 nt, Artificial Sequence
  LRRK2 RNA guide
acgggguugcggccgggcau

SEQ ID NO: 85563 - RNA, 20 nt, Artificial Sequence
  LRRK2 RNA guide
agacgggguugcggccgggc

SEQ ID NO: 85564 - RNA, 20 nt, Artificial Sequence
  LRRK2 RNA guide
augcccggccgcaaccccgu

SEQ ID NO: 85565 - RNA, 20 nt, Artificial Sequence
  LRRK2 RNA guide
cagacgggguugcggccggg

SEQ ID NO: 85566 - RNA, 20 nt, Artificial Sequence
  LRRK2 RNA guide
ccagacgggguugcggccgg

SEQ ID NO: 85567 - RNA, 20 nt, Artificial Sequence
  LRRK2 RNA guide
cccagacgggguugcggccg

SEQ ID NO: 85568 - RNA, 20 nt, Artificial Sequence
  LRRK2 RNA guide
cgggguugcggccgggcaua

SEQ ID NO: 85569 - RNA, 20 nt, Artificial Sequence
  LRRK2 RNA guide
cuaugcccggccgcaacccc

SEQ ID NO: 85570 - RNA, 20 nt, Artificial Sequence
  LRRK2 RNA guide
gacgggguugcggccgggca

SEQ ID NO: 85571 - RNA, 20 nt, Artificial Sequence
  LRRK2 RNA guide
uaugcccggccgcaaccccg

SEQ ID NO: 85572 - RNA, 21 nt, Artificial Sequence
  LRRK2 RNA guide
acgggguugcggccgggcaua

SEQ ID NO: 85573 - RNA, 21 nt, Artificial Sequence
  LRRK2 RNA guide
agacgggguugcggccgggca

SEQ ID NO: 85574 - RNA, 21 nt, Artificial Sequence
  LRRK2 RNA guide
augcccggccgcaaccccguc

SEQ ID NO: 85575 - RNA, 21 nt, Artificial Sequence
  LRRK2 RNA guide
ccuaugcccggccgcaacccc

SEQ ID NO: 85576 - RNA, 21 nt, Artificial Sequence
  LRRK2 RNA guide
cgggguugcggccgggcauag

SEQ ID NO: 85577 - RNA, 21 nt, Artificial Sequence
  LRRK2 RNA guide
cuaugcccggccgcaaccccg

SEQ ID NO: 85578 - RNA, 21 nt, Artificial Sequence
  LRRK2 RNA guide
gacgggguugcggccgggcau

SEQ ID NO: 85579 - RNA, 21 nt, Artificial Sequence
  LRRK2 RNA guide
uaugcccggccgcaaccccgu

SEQ ID NO: 85580 - RNA, 21 nt, Artificial Sequence
  LRRK2 RNA guide
ucccagacgggguugcggccg

SEQ ID NO: 85581 - RNA, 22 nt, Artificial Sequence
  LRRK2 RNA guide
acgggguugcggccgggcauag

SEQ ID NO: 85582 - RNA, 22 nt, Artificial Sequence
  LRRK2 RNA guide
agacgggguugcggccgggcau

SEQ ID NO: 85583 - RNA, 22 nt, Artificial Sequence
  LRRK2 RNA guide
augcccggccgcaaccccgucu

SEQ ID NO: 85584 - RNA, 22 nt, Artificial Sequence
  LRRK2 RNA guide
cagacgggguugcggccgggca

SEQ ID NO: 85585 - RNA, 22 nt, Artificial Sequence
  LRRK2 RNA guide
ccuaugcccggccgcaaccccg

SEQ ID NO: 85586 - RNA, 22 nt, Artificial Sequence
  LRRK2 RNA guide
cgggguugcggccgggcauagg

SEQ ID NO: 85587 - RNA, 22 nt, Artificial Sequence
  LRRK2 RNA guide
cuaugcccggccgcaaccccgu

SEQ ID NO: 85588 - RNA, 22 nt, Artificial Sequence
  LRRK2 RNA guide
cucccagacgggguugcggccg

SEQ ID NO: 85589 - RNA, 22 nt, Artificial Sequence
  LRRK2 RNA guide
gacgggguugcggccgggcaua

SEQ ID NO: 85590 - RNA, 22 nt, Artificial Sequence
  LRRK2 RNA guide
gccuaugcccggccgcaacccc

SEQ ID NO: 85591 - RNA, 22 nt, Artificial Sequence
  LRRK2 RNA guide
uaugcccggccgcaaccccguc

SEQ ID NO: 85592 - RNA, 22 nt, Artificial Sequence
  LRRK2 RNA guide
ucccagacgggguugcggccgg

SEQ ID NO: 85593 - RNA, 20 nt, Artificial Sequence
  LRRK2 RNA guide
auaggcucuccucacauccc

SEQ ID NO: 85594 - RNA, 20 nt, Artificial Sequence
  LRRK2 RNA guide
cauaggcucuccucacaucc

SEQ ID NO: 85595 - RNA, 20 nt, Artificial Sequence
  LRRK2 RNA guide
ccgucugggaugugaggaga

SEQ ID NO: 85596 - RNA, 20 nt, Artificial Sequence
  LRRK2 RNA guide
cgucugggaugugaggagag

SEQ ID NO: 85597 - RNA, 20 nt, Artificial Sequence
  LRRK2 RNA guide
uaggcucuccucacauccca

SEQ ID NO: 85598 - RNA, 21 nt, Artificial Sequence
  LRRK2 RNA guide
auaggcucuccucacauccca

SEQ ID NO: 85599 - RNA, 21 nt, Artificial Sequence
  LRRK2 RNA guide
cauaggcucuccucacauccc

SEQ ID NO: 85600 - RNA, 21 nt, Artificial Sequence
  LRRK2 RNA guide
cccgucugggaugugaggaga

SEQ ID NO: 85601 - RNA, 21 nt, Artificial Sequence
  LRRK2 RNA guide
ccgucugggaugugaggagag

SEQ ID NO: 85602 - RNA, 21 nt, Artificial Sequence
  LRRK2 RNA guide
cgucugggaugugaggagagc

SEQ ID NO: 85603 - RNA, 21 nt, Artificial Sequence
  LRRK2 RNA guide
gcauaggcucuccucacaucc

SEQ ID NO: 85604 - RNA, 21 nt, Artificial Sequence
  LRRK2 RNA guide
uaggcucuccucacaucccag

SEQ ID NO: 85605 - RNA, 22 nt, Artificial Sequence
  LRRK2 RNA guide
auaggcucuccucacaucccag

SEQ ID NO: 85606 - RNA, 22 nt, Artificial Sequence
  LRRK2 RNA guide
cauaggcucuccucacauccca

SEQ ID NO: 85607 - RNA, 22 nt, Artificial Sequence
  LRRK2 RNA guide
ccccgucugggaugugaggaga

SEQ ID NO: 85608 - RNA, 22 nt, Artificial Sequence
  LRRK2 RNA guide
cccgucugggaugugaggagag

SEQ ID NO: 85609 - RNA, 22 nt, Artificial Sequence
  LRRK2 RNA guide
ccgucugggaugugaggagagc

SEQ ID NO: 85610 - RNA, 22 nt, Artificial Sequence
  LRRK2 RNA guide
cgucugggaugugaggagagcc

SEQ ID NO: 85611 - RNA, 22 nt, Artificial Sequence
  LRRK2 RNA guide
gcauaggcucuccucacauccc

SEQ ID NO: 85612 - RNA, 22 nt, Artificial Sequence
  LRRK2 RNA guide
ggcauaggcucuccucacaucc

SEQ ID NO: 85613 - RNA, 22 nt, Artificial Sequence
  LRRK2 RNA guide
uaggcucuccucacaucccaga

SEQ ID NO: 85614 - RNA, 20 nt, Artificial Sequence
  LRRK2 RNA guide
caucugggaugugaggagag

SEQ ID NO: 85615 - RNA, 20 nt, Artificial Sequence
  LRRK2 RNA guide
ccaucugggaugugaggaga

SEQ ID NO: 85616 - RNA, 20 nt, Artificial Sequence
  LRRK2 RNA guide
ccgccccaucugggauguga

SEQ ID NO: 85617 - RNA, 20 nt, Artificial Sequence
  LRRK2 RNA guide
cgccccaucugggaugugag

SEQ ID NO: 85618 - RNA, 20 nt, Artificial Sequence
  LRRK2 RNA guide
cucuccucacaucccagaug

SEQ ID NO: 85619 - RNA, 20 nt, Artificial Sequence
  LRRK2 RNA guide
gccccaucugggaugugagg

SEQ ID NO: 85620 - RNA, 20 nt, Artificial Sequence
  LRRK2 RNA guide
gcucuccucacaucccagau

SEQ ID NO: 85621 - RNA, 20 nt, Artificial Sequence
  LRRK2 RNA guide
ucuccucacaucccagaugg

SEQ ID NO: 85622 - RNA, 21 nt, Artificial Sequence
  LRRK2 RNA guide
caucugggaugugaggagagc

SEQ ID NO: 85623 - RNA, 21 nt, Artificial Sequence
  LRRK2 RNA guide
ccaucugggaugugaggagag

SEQ ID NO: 85624 - RNA, 21 nt, Artificial Sequence
  LRRK2 RNA guide
cccaucugggaugugaggaga

SEQ ID NO: 85625 - RNA, 21 nt, Artificial Sequence
  LRRK2 RNA guide
ccgccccaucugggaugugag

SEQ ID NO: 85626 - RNA, 21 nt, Artificial Sequence
  LRRK2 RNA guide
cgccccaucugggaugugagg

SEQ ID NO: 85627 - RNA, 21 nt, Artificial Sequence
  LRRK2 RNA guide
cucuccucacaucccagaugg

SEQ ID NO: 85628 - RNA, 21 nt, Artificial Sequence
  LRRK2 RNA guide
gccccaucugggaugugagga

SEQ ID NO: 85629 - RNA, 21 nt, Artificial Sequence
  LRRK2 RNA guide
gccgccccaucugggauguga

SEQ ID NO: 85630 - RNA, 21 nt, Artificial Sequence
  LRRK2 RNA guide
gcucuccucacaucccagaug

SEQ ID NO: 85631 - RNA, 21 nt, Artificial Sequence
  LRRK2 RNA guide
ggcucuccucacaucccagau

SEQ ID NO: 85632 - RNA, 21 nt, Artificial Sequence
  LRRK2 RNA guide
ucuccucacaucccagauggg

SEQ ID NO: 85633 - RNA, 22 nt, Artificial Sequence
  LRRK2 RNA guide
aggcucuccucacaucccagau

SEQ ID NO: 85634 - RNA, 22 nt, Artificial Sequence
  LRRK2 RNA guide
caucugggaugugaggagagcc

SEQ ID NO: 85635 - RNA, 22 nt, Artificial Sequence
  LRRK2 RNA guide
ccaucugggaugugaggagagc

SEQ ID NO: 85636 - RNA, 22 nt, Artificial Sequence
  LRRK2 RNA guide
cccaucugggaugugaggagag

SEQ ID NO: 85637 - RNA, 22 nt, Artificial Sequence
  LRRK2 RNA guide
ccccaucugggaugugaggaga

SEQ ID NO: 85638 - RNA, 22 nt, Artificial Sequence
  LRRK2 RNA guide
ccgccccaucugggaugugagg

SEQ ID NO: 85639 - RNA, 22 nt, Artificial Sequence
  LRRK2 RNA guide
cgccccaucugggaugugagga

SEQ ID NO: 85640 - RNA, 22 nt, Artificial Sequence
  LRRK2 RNA guide
cucuccucacaucccagauggg

SEQ ID NO: 85641 - RNA, 22 nt, Artificial Sequence
  LRRK2 RNA guide
gccccaucugggaugugaggag

SEQ ID NO: 85642 - RNA, 22 nt, Artificial Sequence
  LRRK2 RNA guide
gccgccccaucugggaugugag

SEQ ID NO: 85643 - RNA, 22 nt, Artificial Sequence
  LRRK2 RNA guide
gcucuccucacaucccagaugg

SEQ ID NO: 85644 - RNA, 22 nt, Artificial Sequence
  LRRK2 RNA guide
ggcucuccucacaucccagaug

SEQ ID NO: 85645 - RNA, 22 nt, Artificial Sequence
  LRRK2 RNA guide
ucuccucacaucccagaugggg

SEQ ID NO: 85646 - RNA, 22 nt, Artificial Sequence
  LRRK2 RNA guide
ugccgccccaucugggauguga

SEQ ID NO: 85647 - RNA, 20 nt, Artificial Sequence
  LRRK2 RNA guide
aagugaugagcggcucugcc

SEQ ID NO: 85648 - RNA, 20 nt, Artificial Sequence
  LRRK2 RNA guide
aaugggcggccgggcagagc

SEQ ID NO: 85649 - RNA, 20 nt, Artificial Sequence
  LRRK2 RNA guide
acaaugggcggccgggcaga

SEQ ID NO: 85650 - RNA, 20 nt, Artificial Sequence
  LRRK2 RNA guide
agacaaugggcggccgggca

SEQ ID NO: 85651 - RNA, 20 nt, Artificial Sequence
  LRRK2 RNA guide
agagccgcucaucacuuccu

SEQ ID NO: 85652 - RNA, 20 nt, Artificial Sequence
  LRRK2 RNA guide
agccgcucaucacuuccuag

SEQ ID NO: 85653 - RNA, 20 nt, Artificial Sequence
  LRRK2 RNA guide
aggaagugaugagcggcucu

SEQ ID NO: 85654 - RNA, 20 nt, Artificial Sequence
  LRRK2 RNA guide
agugaugagcggcucugccc

SEQ ID NO: 85655 - RNA, 20 nt, Artificial Sequence
  LRRK2 RNA guide
aucccgucuaggaagugaug

SEQ ID NO: 85656 - RNA, 20 nt, Artificial Sequence
  LRRK2 RNA guide
augagcggcucugcccggcc

SEQ ID NO: 85657 - RNA, 20 nt, Artificial Sequence
  LRRK2 RNA guide
augggcggccgggcagagcc

SEQ ID NO: 85658 - RNA, 20 nt, Artificial Sequence
  LRRK2 RNA guide
caaugggcggccgggcagag

SEQ ID NO: 85659 - RNA, 20 nt, Artificial Sequence
  LRRK2 RNA guide
cagacaaugggcggccgggc

SEQ ID NO: 85660 - RNA, 20 nt, Artificial Sequence
  LRRK2 RNA guide
cagagccgcucaucacuucc

SEQ ID NO: 85661 - RNA, 20 nt, Artificial Sequence
  LRRK2 RNA guide
cccgucuaggaagugaugag

SEQ ID NO: 85662 - RNA, 20 nt, Artificial Sequence
  LRRK2 RNA guide
ccgggcagagccgcucauca

SEQ ID NO: 85663 - RNA, 20 nt, Artificial Sequence
  LRRK2 RNA guide
ccgucuaggaagugaugagc

SEQ ID NO: 85664 - RNA, 20 nt, Artificial Sequence
  LRRK2 RNA guide
cggccgggcagagccgcuca

SEQ ID NO: 85665 - RNA, 20 nt, Artificial Sequence
  LRRK2 RNA guide
cgggcagagccgcucaucac

SEQ ID NO: 85666 - RNA, 20 nt, Artificial Sequence
  LRRK2 RNA guide
cgucuaggaagugaugagcg

SEQ ID NO: 85667 - RNA, 20 nt, Artificial Sequence
  LRRK2 RNA guide
cuaggaagugaugagcggcu

SEQ ID NO: 85668 - RNA, 20 nt, Artificial Sequence
  LRRK2 RNA guide
gaagugaugagcggcucugc

SEQ ID NO: 85669 - RNA, 20 nt, Artificial Sequence
  LRRK2 RNA guide
gacaaugggcggccgggcag

SEQ ID NO: 85670 - RNA, 20 nt, Artificial Sequence
  LRRK2 RNA guide
gagccgcucaucacuuccua

SEQ ID NO: 85671 - RNA, 20 nt, Artificial Sequence
  LRRK2 RNA guide
gaugagcggcucugcccggc

SEQ ID NO: 85672 - RNA, 20 nt, Artificial Sequence
  LRRK2 RNA guide
gcagagccgcucaucacuuc

SEQ ID NO: 85673 - RNA, 20 nt, Artificial Sequence
  LRRK2 RNA guide
gccgcucaucacuuccuaga

SEQ ID NO: 85674 - RNA, 20 nt, Artificial Sequence
  LRRK2 RNA guide
gccgggcagagccgcucauc

SEQ ID NO: 85675 - RNA, 20 nt, Artificial Sequence
  LRRK2 RNA guide
ggaagugaugagcggcucug

SEQ ID NO: 85676 - RNA, 20 nt, Artificial Sequence
  LRRK2 RNA guide
ggcagagccgcucaucacuu

SEQ ID NO: 85677 - RNA, 20 nt, Artificial Sequence
  LRRK2 RNA guide
ggccgggcagagccgcucau

SEQ ID NO: 85678 - RNA, 20 nt, Artificial Sequence
  LRRK2 RNA guide
ggcucugcccggccgcccau

SEQ ID NO: 85679 - RNA, 20 nt, Artificial Sequence
  LRRK2 RNA guide
gggcagagccgcucaucacu

SEQ ID NO: 85680 - RNA, 20 nt, Artificial Sequence
  LRRK2 RNA guide
gucuaggaagugaugagcgg

SEQ ID NO: 85681 - RNA, 20 nt, Artificial Sequence
  LRRK2 RNA guide
gugaugagcggcucugcccg

SEQ ID NO: 85682 - RNA, 20 nt, Artificial Sequence
  LRRK2 RNA guide
uaggaagugaugagcggcuc

SEQ ID NO: 85683 - RNA, 20 nt, Artificial Sequence
  LRRK2 RNA guide
ucccgucuaggaagugauga

SEQ ID NO: 85684 - RNA, 20 nt, Artificial Sequence
  LRRK2 RNA guide
ucuaggaagugaugagcggc

SEQ ID NO: 85685 - RNA, 20 nt, Artificial Sequence
  LRRK2 RNA guide
ugagcggcucugcccggccg

SEQ ID NO: 85686 - RNA, 20 nt, Artificial Sequence
  LRRK2 RNA guide
ugaugagcggcucugcccgg

SEQ ID NO: 85687 - RNA, 21 nt, Artificial Sequence
  LRRK2 RNA guide
aagugaugagcggcucugccc

SEQ ID NO: 85688 - RNA, 21 nt, Artificial Sequence
  LRRK2 RNA guide
aaugggcggccgggcagagcc

SEQ ID NO: 85689 - RNA, 21 nt, Artificial Sequence
  LRRK2 RNA guide
acaaugggcggccgggcagag

SEQ ID NO: 85690 - RNA, 21 nt, Artificial Sequence
  LRRK2 RNA guide
agacaaugggcggccgggcag

SEQ ID NO: 85691 - RNA, 21 nt, Artificial Sequence
  LRRK2 RNA guide
agagccgcucaucacuuccua

SEQ ID NO: 85692 - RNA, 21 nt, Artificial Sequence
  LRRK2 RNA guide
agccgcucaucacuuccuaga

SEQ ID NO: 85693 - RNA, 21 nt, Artificial Sequence
  LRRK2 RNA guide
aggaagugaugagcggcucug

SEQ ID NO: 85694 - RNA, 21 nt, Artificial Sequence
  LRRK2 RNA guide
agugaugagcggcucugcccg

SEQ ID NO: 85695 - RNA, 21 nt, Artificial Sequence
  LRRK2 RNA guide
aucccgucuaggaagugauga

SEQ ID NO: 85696 - RNA, 21 nt, Artificial Sequence
  LRRK2 RNA guide
augagcggcucugcccggccg

SEQ ID NO: 85697 - RNA, 21 nt, Artificial Sequence
  LRRK2 RNA guide
caaugggcggccgggcagagc

SEQ ID NO: 85698 - RNA, 21 nt, Artificial Sequence
  LRRK2 RNA guide
cagacaaugggcggccgggca

SEQ ID NO: 85699 - RNA, 21 nt, Artificial Sequence
  LRRK2 RNA guide
cagagccgcucaucacuuccu

SEQ ID NO: 85700 - RNA, 21 nt, Artificial Sequence
  LRRK2 RNA guide
caucccgucuaggaagugaug

SEQ ID NO: 85701 - RNA, 21 nt, Artificial Sequence
  LRRK2 RNA guide
cccgucuaggaagugaugagc

SEQ ID NO: 85702 - RNA, 21 nt, Artificial Sequence
  LRRK2 RNA guide
ccgggcagagccgcucaucac

SEQ ID NO: 85703 - RNA, 21 nt, Artificial Sequence
  LRRK2 RNA guide
ccgucuaggaagugaugagcg

SEQ ID NO: 85704 - RNA, 21 nt, Artificial Sequence
  LRRK2 RNA guide
cggccgggcagagccgcucau

SEQ ID NO: 85705 - RNA, 21 nt, Artificial Sequence
  LRRK2 RNA guide
cgggcagagccgcucaucacu

SEQ ID NO: 85706 - RNA, 21 nt, Artificial Sequence
  LRRK2 RNA guide
cgucuaggaagugaugagcgg

SEQ ID NO: 85707 - RNA, 21 nt, Artificial Sequence
  LRRK2 RNA guide
cuaggaagugaugagcggcuc

SEQ ID NO: 85708 - RNA, 21 nt, Artificial Sequence
  LRRK2 RNA guide
gaagugaugagcggcucugcc

SEQ ID NO: 85709 - RNA, 21 nt, Artificial Sequence
  LRRK2 RNA guide
gacaaugggcggccgggcaga

SEQ ID NO: 85710 - RNA, 21 nt, Artificial Sequence
  LRRK2 RNA guide
gagccgcucaucacuuccuag

SEQ ID NO: 85711 - RNA, 21 nt, Artificial Sequence
  LRRK2 RNA guide
gaugagcggcucugcccggcc

SEQ ID NO: 85712 - RNA, 21 nt, Artificial Sequence
  LRRK2 RNA guide
gcagagccgcucaucacuucc

SEQ ID NO: 85713 - RNA, 21 nt, Artificial Sequence
  LRRK2 RNA guide
gccgcucaucacuuccuagac

SEQ ID NO: 85714 - RNA, 21 nt, Artificial Sequence
  LRRK2 RNA guide
gccgggcagagccgcucauca

SEQ ID NO: 85715 - RNA, 21 nt, Artificial Sequence
  LRRK2 RNA guide
ggaagugaugagcggcucugc

SEQ ID NO: 85716 - RNA, 21 nt, Artificial Sequence
  LRRK2 RNA guide
ggcagagccgcucaucacuuc

SEQ ID NO: 85717 - RNA, 21 nt, Artificial Sequence
  LRRK2 RNA guide
ggccgggcagagccgcucauc

SEQ ID NO: 85718 - RNA, 21 nt, Artificial Sequence
  LRRK2 RNA guide
ggcucugcccggccgcccauu

SEQ ID NO: 85719 - RNA, 21 nt, Artificial Sequence
  LRRK2 RNA guide
gggcagagccgcucaucacuu

SEQ ID NO: 85720 - RNA, 21 nt, Artificial Sequence
  LRRK2 RNA guide
gucuaggaagugaugagcggc

SEQ ID NO: 85721 - RNA, 21 nt, Artificial Sequence
  LRRK2 RNA guide
gugaugagcggcucugcccgg

SEQ ID NO: 85722 - RNA, 21 nt, Artificial Sequence
  LRRK2 RNA guide
uaggaagugaugagcggcucu

SEQ ID NO: 85723 - RNA, 21 nt, Artificial Sequence
  LRRK2 RNA guide
ucagacaaugggcggccgggc

SEQ ID NO: 85724 - RNA, 21 nt, Artificial Sequence
  LRRK2 RNA guide
ucccgucuaggaagugaugag

SEQ ID NO: 85725 - RNA, 21 nt, Artificial Sequence
  LRRK2 RNA guide
ucuaggaagugaugagcggcu

SEQ ID NO: 85726 - RNA, 21 nt, Artificial Sequence
  LRRK2 RNA guide
ugaugagcggcucugcccggc

SEQ ID NO: 85727 - RNA, 22 nt, Artificial Sequence
  LRRK2 RNA guide
aagugaugagcggcucugcccg

SEQ ID NO: 85728 - RNA, 22 nt, Artificial Sequence
  LRRK2 RNA guide
aaugggcggccgggcagagccg

SEQ ID NO: 85729 - RNA, 22 nt, Artificial Sequence
  LRRK2 RNA guide
acaaugggcggccgggcagagc

SEQ ID NO: 85730 - RNA, 22 nt, Artificial Sequence
  LRRK2 RNA guide
agacaaugggcggccgggcaga

SEQ ID NO: 85731 - RNA, 22 nt, Artificial Sequence
  LRRK2 RNA guide
agagccgcucaucacuuccuag

SEQ ID NO: 85732 - RNA, 22 nt, Artificial Sequence
  LRRK2 RNA guide
agccgcucaucacuuccuagac

SEQ ID NO: 85733 - RNA, 22 nt, Artificial Sequence
  LRRK2 RNA guide
aggaagugaugagcggcucugc

SEQ ID NO: 85734 - RNA, 22 nt, Artificial Sequence
  LRRK2 RNA guide
agugaugagcggcucugcccgg

SEQ ID NO: 85735 - RNA, 22 nt, Artificial Sequence
  LRRK2 RNA guide
aucccgucuaggaagugaugag

SEQ ID NO: 85736 - RNA, 22 nt, Artificial Sequence
  LRRK2 RNA guide
augagcggcucugcccggccgc

SEQ ID NO: 85737 - RNA, 22 nt, Artificial Sequence
  LRRK2 RNA guide
caaugggcggccgggcagagcc

SEQ ID NO: 85738 - RNA, 22 nt, Artificial Sequence
  LRRK2 RNA guide
cagacaaugggcggccgggcag

SEQ ID NO: 85739 - RNA, 22 nt, Artificial Sequence
  LRRK2 RNA guide
cagagccgcucaucacuuccua

SEQ ID NO: 85740 - RNA, 22 nt, Artificial Sequence
  LRRK2 RNA guide
caucccgucuaggaagugauga

SEQ ID NO: 85741 - RNA, 22 nt, Artificial Sequence
  LRRK2 RNA guide
ccaucccgucuaggaagugaug

SEQ ID NO: 85742 - RNA, 22 nt, Artificial Sequence
  LRRK2 RNA guide
cccgucuaggaagugaugagcg

SEQ ID NO: 85743 - RNA, 22 nt, Artificial Sequence
  LRRK2 RNA guide
ccgggcagagccgcucaucacu

SEQ ID NO: 85744 - RNA, 22 nt, Artificial Sequence
  LRRK2 RNA guide
ccgucuaggaagugaugagcgg

SEQ ID NO: 85745 - RNA, 22 nt, Artificial Sequence
  LRRK2 RNA guide
cggccgggcagagccgcucauc

SEQ ID NO: 85746 - RNA, 22 nt, Artificial Sequence
  LRRK2 RNA guide
cggcucugcccggccgcccauu

SEQ ID NO: 85747 - RNA, 22 nt, Artificial Sequence
  LRRK2 RNA guide
cgggcagagccgcucaucacuu

SEQ ID NO: 85748 - RNA, 22 nt, Artificial Sequence
  LRRK2 RNA guide
cgucuaggaagugaugagcggc

SEQ ID NO: 85749 - RNA, 22 nt, Artificial Sequence
  LRRK2 RNA guide
cuaggaagugaugagcggcucu

SEQ ID NO: 85750 - RNA, 22 nt, Artificial Sequence
  LRRK2 RNA guide
cucagacaaugggcggccgggc

SEQ ID NO: 85751 - RNA, 22 nt, Artificial Sequence
  LRRK2 RNA guide
gaagugaugagcggcucugccc

SEQ ID NO: 85752 - RNA, 22 nt, Artificial Sequence
  LRRK2 RNA guide
gacaaugggcggccgggcagag

SEQ ID NO: 85753 - RNA, 22 nt, Artificial Sequence
  LRRK2 RNA guide
gagccgcucaucacuuccuaga

SEQ ID NO: 85754 - RNA, 22 nt, Artificial Sequence
  LRRK2 RNA guide
gaugagcggcucugcccggccg

SEQ ID NO: 85755 - RNA, 22 nt, Artificial Sequence
  LRRK2 RNA guide
gcagagccgcucaucacuuccu

SEQ ID NO: 85756 - RNA, 22 nt, Artificial Sequence
  LRRK2 RNA guide
gccgcucaucacuuccuagacg

SEQ ID NO: 85757 - RNA, 22 nt, Artificial Sequence
  LRRK2 RNA guide
gccgggcagagccgcucaucac

SEQ ID NO: 85758 - RNA, 22 nt, Artificial Sequence
  LRRK2 RNA guide
gcggccgggcagagccgcucau

SEQ ID NO: 85759 - RNA, 22 nt, Artificial Sequence
  LRRK2 RNA guide
ggaagugaugagcggcucugcc

SEQ ID NO: 85760 - RNA, 22 nt, Artificial Sequence
  LRRK2 RNA guide
ggcagagccgcucaucacuucc

SEQ ID NO: 85761 - RNA, 22 nt, Artificial Sequence
  LRRK2 RNA guide
ggccgggcagagccgcucauca

SEQ ID NO: 85762 - RNA, 22 nt, Artificial Sequence
  LRRK2 RNA guide
ggcucugcccggccgcccauug

SEQ ID NO: 85763 - RNA, 22 nt, Artificial Sequence
  LRRK2 RNA guide
gggcagagccgcucaucacuuc

SEQ ID NO: 85764 - RNA, 22 nt, Artificial Sequence
  LRRK2 RNA guide
gucuaggaagugaugagcggcu

SEQ ID NO: 85765 - RNA, 22 nt, Artificial Sequence
  LRRK2 RNA guide
gugaugagcggcucugcccggc

SEQ ID NO: 85766 - RNA, 22 nt, Artificial Sequence
  LRRK2 RNA guide
uaggaagugaugagcggcucug

SEQ ID NO: 85767 - RNA, 22 nt, Artificial Sequence
  LRRK2 RNA guide
ucagacaaugggcggccgggca

SEQ ID NO: 85768 - RNA, 22 nt, Artificial Sequence
  LRRK2 RNA guide
ucccgucuaggaagugaugagc

SEQ ID NO: 85769 - RNA, 22 nt, Artificial Sequence
  LRRK2 RNA guide
ucuaggaagugaugagcggcuc

SEQ ID NO: 85770 - RNA, 22 nt, Artificial Sequence
  LRRK2 RNA guide
ugaugagcggcucugcccggcc

SEQ ID NO: 85771 - RNA, 20 nt, Artificial Sequence
  LRRK2 RNA guide
agugaugagcgucucugccc

SEQ ID NO: 85772 - RNA, 20 nt, Artificial Sequence
  LRRK2 RNA guide
augagcgucucugcccggcc

SEQ ID NO: 85773 - RNA, 20 nt, Artificial Sequence
  LRRK2 RNA guide
cggccgggcagagacgcuca

SEQ ID NO: 85774 - RNA, 20 nt, Artificial Sequence
  LRRK2 RNA guide
gacgcucaucacuuccuaga

SEQ ID NO: 85775 - RNA, 20 nt, Artificial Sequence
  LRRK2 RNA guide
ugggcggccgggcagagacg

SEQ ID NO: 85776 - RNA, 21 nt, Artificial Sequence
  LRRK2 RNA guide
aagugaugagcgucucugccc

SEQ ID NO: 85777 - RNA, 21 nt, Artificial Sequence
  LRRK2 RNA guide
aaugggcggccgggcagagac

SEQ ID NO: 85778 - RNA, 21 nt, Artificial Sequence
  LRRK2 RNA guide
agacgcucaucacuuccuaga

SEQ ID NO: 85779 - RNA, 21 nt, Artificial Sequence
  LRRK2 RNA guide
agugaugagcgucucugcccg

SEQ ID NO: 85780 - RNA, 21 nt, Artificial Sequence
  LRRK2 RNA guide
augagcgucucugcccggccg

SEQ ID NO: 85781 - RNA, 21 nt, Artificial Sequence
  LRRK2 RNA guide
augggcggccgggcagagacg

SEQ ID NO: 85782 - RNA, 21 nt, Artificial Sequence
  LRRK2 RNA guide
cggccgggcagagacgcucau

SEQ ID NO: 85783 - RNA, 21 nt, Artificial Sequence
  LRRK2 RNA guide
gacgcucaucacuuccuagac

SEQ ID NO: 85784 - RNA, 21 nt, Artificial Sequence
  LRRK2 RNA guide
gaugagcgucucugcccggcc

SEQ ID NO: 85785 - RNA, 21 nt, Artificial Sequence
  LRRK2 RNA guide
gcggccgggcagagacgcuca

SEQ ID NO: 85786 - RNA, 21 nt, Artificial Sequence
  LRRK2 RNA guide
ugagcgucucugcccggccgc

SEQ ID NO: 85787 - RNA, 22 nt, Artificial Sequence
  LRRK2 RNA guide
aagugaugagcgucucugcccg

SEQ ID NO: 85788 - RNA, 22 nt, Artificial Sequence
  LRRK2 RNA guide
aaugggcggccgggcagagacg

SEQ ID NO: 85789 - RNA, 22 nt, Artificial Sequence
  LRRK2 RNA guide
agacgcucaucacuuccuagac

SEQ ID NO: 85790 - RNA, 22 nt, Artificial Sequence
  LRRK2 RNA guide
agugaugagcgucucugcccgg

SEQ ID NO: 85791 - RNA, 22 nt, Artificial Sequence
  LRRK2 RNA guide
augagcgucucugcccggccgc

SEQ ID NO: 85792 - RNA, 22 nt, Artificial Sequence
  LRRK2 RNA guide
augggcggccgggcagagacgc

SEQ ID NO: 85793 - RNA, 22 nt, Artificial Sequence
  LRRK2 RNA guide
caaugggcggccgggcagagac

SEQ ID NO: 85794 - RNA, 22 nt, Artificial Sequence
  LRRK2 RNA guide
cggccgggcagagacgcucauc

SEQ ID NO: 85795 - RNA, 22 nt, Artificial Sequence
  LRRK2 RNA guide
gaagugaugagcgucucugccc

SEQ ID NO: 85796 - RNA, 22 nt, Artificial Sequence
  LRRK2 RNA guide
gacgcucaucacuuccuagacg

SEQ ID NO: 85797 - RNA, 22 nt, Artificial Sequence
  LRRK2 RNA guide
gagacgcucaucacuuccuaga

SEQ ID NO: 85798 - RNA, 22 nt, Artificial Sequence
  LRRK2 RNA guide
gaugagcgucucugcccggccg

SEQ ID NO: 85799 - RNA, 22 nt, Artificial Sequence
  LRRK2 RNA guide
gcggccgggcagagacgcucau

SEQ ID NO: 85800 - RNA, 22 nt, Artificial Sequence
  LRRK2 RNA guide
ggcggccgggcagagacgcuca

SEQ ID NO: 85801 - RNA, 22 nt, Artificial Sequence
  LRRK2 RNA guide
ugagcgucucugcccggccgcc

SEQ ID NO: 85802 - RNA, 22 nt, Artificial Sequence
  LRRK2 RNA guide
ugaugagcgucucugcccggcc

SEQ ID NO: 85803 - RNA, 22 nt, Artificial Sequence
  LRRK2 RNA guide
ugggcggccgggcagagacgcu

SEQ ID NO: 85804 - RNA, 20 nt, Artificial Sequence
  LRRK2 RNA guide
aucacuuccuagacgggaug

SEQ ID NO: 85805 - RNA, 20 nt, Artificial Sequence
  LRRK2 RNA guide
caucacuuccuagacgggau

SEQ ID NO: 85806 - RNA, 20 nt, Artificial Sequence
  LRRK2 RNA guide
ccgccaucccgucuaggaag

SEQ ID NO: 85807 - RNA, 20 nt, Artificial Sequence
  LRRK2 RNA guide
cucaucacuuccuagacggg

SEQ ID NO: 85808 - RNA, 20 nt, Artificial Sequence
  LRRK2 RNA guide
gccgccaucccgucuaggaa

SEQ ID NO: 85809 - RNA, 20 nt, Artificial Sequence
  LRRK2 RNA guide
ucaucacuuccuagacggga

SEQ ID NO: 85810 - RNA, 21 nt, Artificial Sequence
  LRRK2 RNA guide
aucacuuccuagacgggaugg

SEQ ID NO: 85811 - RNA, 21 nt, Artificial Sequence
  LRRK2 RNA guide
caucacuuccuagacgggaug

SEQ ID NO: 85812 - RNA, 21 nt, Artificial Sequence
  LRRK2 RNA guide
ccgccaucccgucuaggaagu

SEQ ID NO: 85813 - RNA, 21 nt, Artificial Sequence
  LRRK2 RNA guide
cgccaucccgucuaggaagug

SEQ ID NO: 85814 - RNA, 21 nt, Artificial Sequence
  LRRK2 RNA guide
cucaucacuuccuagacggga

SEQ ID NO: 85815 - RNA, 21 nt, Artificial Sequence
  LRRK2 RNA guide
gccgccaucccgucuaggaag

SEQ ID NO: 85816 - RNA, 21 nt, Artificial Sequence
  LRRK2 RNA guide
gcucaucacuuccuagacggg

SEQ ID NO: 85817 - RNA, 21 nt, Artificial Sequence
  LRRK2 RNA guide
ggccgccaucccgucuaggaa

SEQ ID NO: 85818 - RNA, 21 nt, Artificial Sequence
  LRRK2 RNA guide
ucaucacuuccuagacgggau

SEQ ID NO: 85819 - RNA, 22 nt, Artificial Sequence
  LRRK2 RNA guide
aucacuuccuagacgggauggc

SEQ ID NO: 85820 - RNA, 22 nt, Artificial Sequence
  LRRK2 RNA guide
caucacuuccuagacgggaugg

SEQ ID NO: 85821 - RNA, 22 nt, Artificial Sequence
  LRRK2 RNA guide
ccgccaucccgucuaggaagug

SEQ ID NO: 85822 - RNA, 22 nt, Artificial Sequence
  LRRK2 RNA guide
cgccaucccgucuaggaaguga

SEQ ID NO: 85823 - RNA, 22 nt, Artificial Sequence
  LRRK2 RNA guide
cgcucaucacuuccuagacggg

SEQ ID NO: 85824 - RNA, 22 nt, Artificial Sequence
  LRRK2 RNA guide
cggccgccaucccgucuaggaa

SEQ ID NO: 85825 - RNA, 22 nt, Artificial Sequence
  LRRK2 RNA guide
cucaucacuuccuagacgggau

SEQ ID NO: 85826 - RNA, 22 nt, Artificial Sequence
  LRRK2 RNA guide
gccgccaucccgucuaggaagu

SEQ ID NO: 85827 - RNA, 22 nt, Artificial Sequence
  LRRK2 RNA guide
gcucaucacuuccuagacggga

SEQ ID NO: 85828 - RNA, 22 nt, Artificial Sequence
  LRRK2 RNA guide
ggccgccaucccgucuaggaag

SEQ ID NO: 85829 - RNA, 22 nt, Artificial Sequence
  LRRK2 RNA guide
ucaucacuuccuagacgggaug

SEQ ID NO: 85830 - RNA, 20 nt, Artificial Sequence
  LRRK2 RNA guide
aaugaggagcgccucuuccc

SEQ ID NO: 85831 - RNA, 20 nt, Artificial Sequence
  LRRK2 RNA guide
augaggagcgccucuucccg

SEQ ID NO: 85832 - RNA, 20 nt, Artificial Sequence
  LRRK2 RNA guide
caccaucccgucuaggaagu

SEQ ID NO: 85833 - RNA, 20 nt, Artificial Sequence
  LRRK2 RNA guide
ccaccaucccgucuaggaag

SEQ ID NO: 85834 - RNA, 20 nt, Artificial Sequence
  LRRK2 RNA guide
gccaccaucccgucuaggaa

SEQ ID NO: 85835 - RNA, 20 nt, Artificial Sequence
  LRRK2 RNA guide
guggccgggaagaggcgcuc

SEQ ID NO: 85836 - RNA, 21 nt, Artificial Sequence
  LRRK2 RNA guide
aaaugaggagcgccucuuccc

SEQ ID NO: 85837 - RNA, 21 nt, Artificial Sequence
  LRRK2 RNA guide
aaugaggagcgccucuucccg

SEQ ID NO: 85838 - RNA, 21 nt, Artificial Sequence
  LRRK2 RNA guide
augaggagcgccucuucccgg

SEQ ID NO: 85839 - RNA, 21 nt, Artificial Sequence
  LRRK2 RNA guide
caccaucccgucuaggaagug

SEQ ID NO: 85840 - RNA, 21 nt, Artificial Sequence
  LRRK2 RNA guide
ccaccaucccgucuaggaagu

SEQ ID NO: 85841 - RNA, 21 nt, Artificial Sequence
  LRRK2 RNA guide
gccaccaucccgucuaggaag

SEQ ID NO: 85842 - RNA, 21 nt, Artificial Sequence
  LRRK2 RNA guide
ggccaccaucccgucuaggaa

SEQ ID NO: 85843 - RNA, 21 nt, Artificial Sequence
  LRRK2 RNA guide
gguggccgggaagaggcgcuc

SEQ ID NO: 85844 - RNA, 21 nt, Artificial Sequence
  LRRK2 RNA guide
guggccgggaagaggcgcucc

SEQ ID NO: 85845 - RNA, 22 nt, Artificial Sequence
  LRRK2 RNA guide
aaaugaggagcgccucuucccg

SEQ ID NO: 85846 - RNA, 22 nt, Artificial Sequence
  LRRK2 RNA guide
aaugaggagcgccucuucccgg

SEQ ID NO: 85847 - RNA, 22 nt, Artificial Sequence
  LRRK2 RNA guide
aucacuuccuagacgggauggu

SEQ ID NO: 85848 - RNA, 22 nt, Artificial Sequence
  LRRK2 RNA guide
augaggagcgccucuucccggc

SEQ ID NO: 85849 - RNA, 22 nt, Artificial Sequence
  LRRK2 RNA guide
caccaucccgucuaggaaguga

SEQ ID NO: 85850 - RNA, 22 nt, Artificial Sequence
  LRRK2 RNA guide
ccaccaucccgucuaggaagug

SEQ ID NO: 85851 - RNA, 22 nt, Artificial Sequence
  LRRK2 RNA guide
cggccaccaucccgucuaggaa

SEQ ID NO: 85852 - RNA, 22 nt, Artificial Sequence
  LRRK2 RNA guide
gaaaugaggagcgccucuuccc

SEQ ID NO: 85853 - RNA, 22 nt, Artificial Sequence
  LRRK2 RNA guide
gccaccaucccgucuaggaagu

SEQ ID NO: 85854 - RNA, 22 nt, Artificial Sequence
  LRRK2 RNA guide
ggccaccaucccgucuaggaag

SEQ ID NO: 85855 - RNA, 22 nt, Artificial Sequence
  LRRK2 RNA guide
gguggccgggaagaggcgcucc

SEQ ID NO: 85856 - RNA, 22 nt, Artificial Sequence
  LRRK2 RNA guide
guggccgggaagaggcgcuccu

SEQ ID NO: 85857 - RNA, 22 nt, Artificial Sequence
  LRRK2 RNA guide
ugguggccgggaagaggcgcuc

SEQ ID NO: 85858 - RNA, 20 nt, Artificial Sequence
  LRRK2 RNA guide
acugggcagccgggcagagg

SEQ ID NO: 85859 - RNA, 20 nt, Artificial Sequence
  LRRK2 RNA guide
agagggggcuccucacaucc

SEQ ID NO: 85860 - RNA, 20 nt, Artificial Sequence
  LRRK2 RNA guide
agcccccucugcccggcugc

SEQ ID NO: 85861 - RNA, 20 nt, Artificial Sequence
  LRRK2 RNA guide
agccgggcagagggggcucc

SEQ ID NO: 85862 - RNA, 20 nt, Artificial Sequence
  LRRK2 RNA guide
aggagcccccucugcccggc

SEQ ID NO: 85863 - RNA, 20 nt, Artificial Sequence
  LRRK2 RNA guide
augugaggagcccccucugc

SEQ ID NO: 85864 - RNA, 20 nt, Artificial Sequence
  LRRK2 RNA guide
cagccgggcagagggggcuc

SEQ ID NO: 85865 - RNA, 20 nt, Artificial Sequence
  LRRK2 RNA guide
ccgggcagagggggcuccuc

SEQ ID NO: 85866 - RNA, 20 nt, Artificial Sequence
  LRRK2 RNA guide
cgggcagagggggcuccuca

SEQ ID NO: 85867 - RNA, 20 nt, Artificial Sequence
  LRRK2 RNA guide
cgucugggaugugaggagcc

SEQ ID NO: 85868 - RNA, 20 nt, Artificial Sequence
  LRRK2 RNA guide
cugggcagccgggcagaggg

SEQ ID NO: 85869 - RNA, 20 nt, Artificial Sequence
  LRRK2 RNA guide
gagcccccucugcccggcug

SEQ ID NO: 85870 - RNA, 20 nt, Artificial Sequence
  LRRK2 RNA guide
gaggagcccccucugcccgg

SEQ ID NO: 85871 - RNA, 20 nt, Artificial Sequence
  LRRK2 RNA guide
gagggggcuccucacauccc

SEQ ID NO: 85872 - RNA, 20 nt, Artificial Sequence
  LRRK2 RNA guide
gaugugaggagcccccucug

SEQ ID NO: 85873 - RNA, 20 nt, Artificial Sequence
  LRRK2 RNA guide
gcagccgggcagagggggcu

SEQ ID NO: 85874 - RNA, 20 nt, Artificial Sequence
  LRRK2 RNA guide
gccgggcagagggggcuccu

SEQ ID NO: 85875 - RNA, 20 nt, Artificial Sequence
  LRRK2 RNA guide
ggagcccccucugcccggcu

SEQ ID NO: 85876 - RNA, 20 nt, Artificial Sequence
  LRRK2 RNA guide
ggaugugaggagcccccucu

SEQ ID NO: 85877 - RNA, 20 nt, Artificial Sequence
  LRRK2 RNA guide
gggaugugaggagcccccuc

SEQ ID NO: 85878 - RNA, 20 nt, Artificial Sequence
  LRRK2 RNA guide
gggcagagggggcuccucac

SEQ ID NO: 85879 - RNA, 20 nt, Artificial Sequence
  LRRK2 RNA guide
gucugggaugugaggagccc

SEQ ID NO: 85880 - RNA, 20 nt, Artificial Sequence
  LRRK2 RNA guide
gugaggagcccccucugccc

SEQ ID NO: 85881 - RNA, 20 nt, Artificial Sequence
  LRRK2 RNA guide
ucgucugggaugugaggagc

SEQ ID NO: 85882 - RNA, 20 nt, Artificial Sequence
  LRRK2 RNA guide
ugaggagcccccucugcccg

SEQ ID NO: 85883 - RNA, 20 nt, Artificial Sequence
  LRRK2 RNA guide
ugggcagccgggcagagggg

SEQ ID NO: 85884 - RNA, 20 nt, Artificial Sequence
  LRRK2 RNA guide
ugugaggagcccccucugcc

SEQ ID NO: 85885 - RNA, 21 nt, Artificial Sequence
  LRRK2 RNA guide
acugggcagccgggcagaggg

SEQ ID NO: 85886 - RNA, 21 nt, Artificial Sequence
  LRRK2 RNA guide
agacugggcagccgggcagag

SEQ ID NO: 85887 - RNA, 21 nt, Artificial Sequence
  LRRK2 RNA guide
agagggggcuccucacauccc

SEQ ID NO: 85888 - RNA, 21 nt, Artificial Sequence
  LRRK2 RNA guide
agccgggcagagggggcuccu

SEQ ID NO: 85889 - RNA, 21 nt, Artificial Sequence
  LRRK2 RNA guide
aggagcccccucugcccggcu

SEQ ID NO: 85890 - RNA, 21 nt, Artificial Sequence
  LRRK2 RNA guide
aucgucugggaugugaggagc

SEQ ID NO: 85891 - RNA, 21 nt, Artificial Sequence
  LRRK2 RNA guide
augugaggagcccccucugcc

SEQ ID NO: 85892 - RNA, 21 nt, Artificial Sequence
  LRRK2 RNA guide
cagacugggcagccgggcaga

SEQ ID NO: 85893 - RNA, 21 nt, Artificial Sequence
  LRRK2 RNA guide
cagagggggcuccucacaucc

SEQ ID NO: 85894 - RNA, 21 nt, Artificial Sequence
  LRRK2 RNA guide
ccgggcagagggggcuccuca

SEQ ID NO: 85895 - RNA, 21 nt, Artificial Sequence
  LRRK2 RNA guide
cgggcagagggggcuccucac

SEQ ID NO: 85896 - RNA, 21 nt, Artificial Sequence
  LRRK2 RNA guide
cgucugggaugugaggagccc

SEQ ID NO: 85897 - RNA, 21 nt, Artificial Sequence
  LRRK2 RNA guide
gacugggcagccgggcagagg

SEQ ID NO: 85898 - RNA, 21 nt, Artificial Sequence
  LRRK2 RNA guide
gagggggcuccucacauccca

SEQ ID NO: 85899 - RNA, 21 nt, Artificial Sequence
  LRRK2 RNA guide
gaugugaggagcccccucugc

SEQ ID NO: 85900 - RNA, 21 nt, Artificial Sequence
  LRRK2 RNA guide
ggaugugaggagcccccucug

SEQ ID NO: 85901 - RNA, 21 nt, Artificial Sequence
  LRRK2 RNA guide
gggaugugaggagcccccucu

SEQ ID NO: 85902 - RNA, 21 nt, Artificial Sequence
  LRRK2 RNA guide
gggcagagggggcuccucaca

SEQ ID NO: 85903 - RNA, 21 nt, Artificial Sequence
  LRRK2 RNA guide
gucugggaugugaggagcccc

SEQ ID NO: 85904 - RNA, 21 nt, Artificial Sequence
  LRRK2 RNA guide
gugaggagcccccucugcccg

SEQ ID NO: 85905 - RNA, 21 nt, Artificial Sequence
  LRRK2 RNA guide
ucgucugggaugugaggagcc

SEQ ID NO: 85906 - RNA, 21 nt, Artificial Sequence
  LRRK2 RNA guide
ugaggagcccccucugcccgg

SEQ ID NO: 85907 - RNA, 21 nt, Artificial Sequence
  LRRK2 RNA guide
ugggaugugaggagcccccuc

SEQ ID NO: 85908 - RNA, 21 nt, Artificial Sequence
  LRRK2 RNA guide
ugugaggagcccccucugccc

SEQ ID NO: 85909 - RNA, 22 nt, Artificial Sequence
  LRRK2 RNA guide
acugggcagccgggcagagggg

SEQ ID NO: 85910 - RNA, 22 nt, Artificial Sequence
  LRRK2 RNA guide
agacugggcagccgggcagagg

SEQ ID NO: 85911 - RNA, 22 nt, Artificial Sequence
  LRRK2 RNA guide
agagggggcuccucacauccca

SEQ ID NO: 85912 - RNA, 22 nt, Artificial Sequence
  LRRK2 RNA guide
agccgggcagagggggcuccuc

SEQ ID NO: 85913 - RNA, 22 nt, Artificial Sequence
  LRRK2 RNA guide
aggagcccccucugcccggcug

SEQ ID NO: 85914 - RNA, 22 nt, Artificial Sequence
  LRRK2 RNA guide
aucgucugggaugugaggagcc

SEQ ID NO: 85915 - RNA, 22 nt, Artificial Sequence
  LRRK2 RNA guide
augugaggagcccccucugccc

SEQ ID NO: 85916 - RNA, 22 nt, Artificial Sequence
  LRRK2 RNA guide
cagacugggcagccgggcagag

SEQ ID NO: 85917 - RNA, 22 nt, Artificial Sequence
  LRRK2 RNA guide
cagagggggcuccucacauccc

SEQ ID NO: 85918 - RNA, 22 nt, Artificial Sequence
  LRRK2 RNA guide
cagccgggcagagggggcuccu

SEQ ID NO: 85919 - RNA, 22 nt, Artificial Sequence
  LRRK2 RNA guide
caucgucugggaugugaggagc

SEQ ID NO: 85920 - RNA, 22 nt, Artificial Sequence
  LRRK2 RNA guide
ccagacugggcagccgggcaga

SEQ ID NO: 85921 - RNA, 22 nt, Artificial Sequence
  LRRK2 RNA guide
ccgggcagagggggcuccucac

SEQ ID NO: 85922 - RNA, 22 nt, Artificial Sequence
  LRRK2 RNA guide
cgggcagagggggcuccucaca

SEQ ID NO: 85923 - RNA, 22 nt, Artificial Sequence
  LRRK2 RNA guide
cgucugggaugugaggagcccc

SEQ ID NO: 85924 - RNA, 22 nt, Artificial Sequence
  LRRK2 RNA guide
cugggaugugaggagcccccuc

SEQ ID NO: 85925 - RNA, 22 nt, Artificial Sequence
  LRRK2 RNA guide
gacugggcagccgggcagaggg

SEQ ID NO: 85926 - RNA, 22 nt, Artificial Sequence
  LRRK2 RNA guide
gaggagcccccucugcccggcu

SEQ ID NO: 85927 - RNA, 22 nt, Artificial Sequence
  LRRK2 RNA guide
gagggggcuccucacaucccag

SEQ ID NO: 85928 - RNA, 22 nt, Artificial Sequence
  LRRK2 RNA guide
gaugugaggagcccccucugcc

SEQ ID NO: 85929 - RNA, 22 nt, Artificial Sequence
  LRRK2 RNA guide
gcagagggggcuccucacaucc

SEQ ID NO: 85930 - RNA, 22 nt, Artificial Sequence
  LRRK2 RNA guide
gccgggcagagggggcuccuca

SEQ ID NO: 85931 - RNA, 22 nt, Artificial Sequence
  LRRK2 RNA guide
ggaugugaggagcccccucugc

SEQ ID NO: 85932 - RNA, 22 nt, Artificial Sequence
  LRRK2 RNA guide
gggaugugaggagcccccucug

SEQ ID NO: 85933 - RNA, 22 nt, Artificial Sequence
  LRRK2 RNA guide
gggcagagggggcuccucacau

SEQ ID NO: 85934 - RNA, 22 nt, Artificial Sequence
  LRRK2 RNA guide
gucugggaugugaggagccccc

SEQ ID NO: 85935 - RNA, 22 nt, Artificial Sequence
  LRRK2 RNA guide
gugaggagcccccucugcccgg

SEQ ID NO: 85936 - RNA, 22 nt, Artificial Sequence
  LRRK2 RNA guide
ucgucugggaugugaggagccc

SEQ ID NO: 85937 - RNA, 22 nt, Artificial Sequence
  LRRK2 RNA guide
ugaggagcccccucugcccggc

SEQ ID NO: 85938 - RNA, 22 nt, Artificial Sequence
  LRRK2 RNA guide
ugggaugugaggagcccccucu

SEQ ID NO: 85939 - RNA, 22 nt, Artificial Sequence
  LRRK2 RNA guide
ugugaggagcccccucugcccg

SEQ ID NO: 85940 - RNA, 20 nt, Artificial Sequence
  LRRK2 RNA guide
accuacaaccuccaccuccc

SEQ ID NO: 85941 - RNA, 21 nt, Artificial Sequence
  LRRK2 RNA guide
accuacaaccuccaccuccca

SEQ ID NO: 85942 - RNA, 21 nt, Artificial Sequence
  LRRK2 RNA guide
gcggcugggagguggagguug

SEQ ID NO: 85943 - RNA, 21 nt, Artificial Sequence
  LRRK2 RNA guide
uaccuacaaccuccaccuccc

SEQ ID NO: 85944 - RNA, 22 nt, Artificial Sequence
  LRRK2 RNA guide
accuacaaccuccaccucccag

SEQ ID NO: 85945 - RNA, 22 nt, Artificial Sequence
  LRRK2 RNA guide
cuaccuacaaccuccaccuccc

SEQ ID NO: 85946 - RNA, 22 nt, Artificial Sequence
  LRRK2 RNA guide
gcggcugggagguggagguugu

SEQ ID NO: 85947 - RNA, 22 nt, Artificial Sequence
  LRRK2 RNA guide
ggcggcugggagguggagguug

SEQ ID NO: 85948 - RNA, 22 nt, Artificial Sequence
  LRRK2 RNA guide
uaccuacaaccuccaccuccca

SEQ ID NO: 85949 - RNA, 21 nt, Artificial Sequence
  LRRK2 RNA guide
guggcugggagguggagguug

SEQ ID NO: 85950 - RNA, 22 nt, Artificial Sequence
  LRRK2 RNA guide
gguggcugggagguggagguug

SEQ ID NO: 85951 - RNA, 22 nt, Artificial Sequence
  LRRK2 RNA guide
guggcugggagguggagguugu

SEQ ID NO: 85952 - RNA, 20 nt, Artificial Sequence
  LRRK2 RNA guide
agguagccaagaucacgcca

SEQ ID NO: 85953 - RNA, 20 nt, Artificial Sequence
  LRRK2 RNA guide
agguggagguuguagguagc

SEQ ID NO: 85954 - RNA, 20 nt, Artificial Sequence
  LRRK2 RNA guide
agguuguagguagccaagau

SEQ ID NO: 85955 - RNA, 20 nt, Artificial Sequence
  LRRK2 RNA guide
aguggcgugaucuuggcuac

SEQ ID NO: 85956 - RNA, 20 nt, Artificial Sequence
  LRRK2 RNA guide
aucuuggcuaccuacaaccu

SEQ ID NO: 85957 - RNA, 20 nt, Artificial Sequence
  LRRK2 RNA guide
caguggcgugaucuuggcua

SEQ ID NO: 85958 - RNA, 20 nt, Artificial Sequence
  LRRK2 RNA guide
cgugaucuuggcuaccuaca

SEQ ID NO: 85959 - RNA, 20 nt, Artificial Sequence
  LRRK2 RNA guide
cuuggcuaccuacaaccucc

SEQ ID NO: 85960 - RNA, 20 nt, Artificial Sequence
  LRRK2 RNA guide
gagguggagguuguagguag

SEQ ID NO: 85961 - RNA, 20 nt, Artificial Sequence
  LRRK2 RNA guide
gagguuguagguagccaaga

SEQ ID NO: 85962 - RNA, 20 nt, Artificial Sequence
  LRRK2 RNA guide
gaucuuggcuaccuacaacc

SEQ ID NO: 85963 - RNA, 20 nt, Artificial Sequence
  LRRK2 RNA guide
gcaguggcgugaucuuggcu

SEQ ID NO: 85964 - RNA, 20 nt, Artificial Sequence
  LRRK2 RNA guide
gcgugaucuuggcuaccuac

SEQ ID NO: 85965 - RNA, 20 nt, Artificial Sequence
  LRRK2 RNA guide
ggagguggagguuguaggua

SEQ ID NO: 85966 - RNA, 20 nt, Artificial Sequence
  LRRK2 RNA guide
ggagguuguagguagccaag

SEQ ID NO: 85967 - RNA, 20 nt, Artificial Sequence
  LRRK2 RNA guide
ggcgugaucuuggcuaccua

SEQ ID NO: 85968 - RNA, 20 nt, Artificial Sequence
  LRRK2 RNA guide
gggagguggagguuguaggu

SEQ ID NO: 85969 - RNA, 20 nt, Artificial Sequence
  LRRK2 RNA guide
gguggagguuguagguagcc

SEQ ID NO: 85970 - RNA, 20 nt, Artificial Sequence
  LRRK2 RNA guide
gguuguagguagccaagauc

SEQ ID NO: 85971 - RNA, 20 nt, Artificial Sequence
  LRRK2 RNA guide
guagguagccaagaucacgc

SEQ ID NO: 85972 - RNA, 20 nt, Artificial Sequence
  LRRK2 RNA guide
gugaucuuggcuaccuacaa

SEQ ID NO: 85973 - RNA, 20 nt, Artificial Sequence
  LRRK2 RNA guide
guggagguuguagguagcca

SEQ ID NO: 85974 - RNA, 20 nt, Artificial Sequence
  LRRK2 RNA guide
guggcgugaucuuggcuacc

SEQ ID NO: 85975 - RNA, 20 nt, Artificial Sequence
  LRRK2 RNA guide
guuguagguagccaagauca

SEQ ID NO: 85976 - RNA, 20 nt, Artificial Sequence
  LRRK2 RNA guide
uagguagccaagaucacgcc

SEQ ID NO: 85977 - RNA, 20 nt, Artificial Sequence
  LRRK2 RNA guide
ucuuggcuaccuacaaccuc

SEQ ID NO: 85978 - RNA, 20 nt, Artificial Sequence
  LRRK2 RNA guide
ugaucuuggcuaccuacaac

SEQ ID NO: 85979 - RNA, 20 nt, Artificial Sequence
  LRRK2 RNA guide
ugcaguggcgugaucuuggc

SEQ ID NO: 85980 - RNA, 20 nt, Artificial Sequence
  LRRK2 RNA guide
uggagguuguagguagccaa

SEQ ID NO: 85981 - RNA, 20 nt, Artificial Sequence
  LRRK2 RNA guide
uggcgugaucuuggcuaccu

SEQ ID NO: 85982 - RNA, 20 nt, Artificial Sequence
  LRRK2 RNA guide
uggcuaccuacaaccuccac

SEQ ID NO: 85983 - RNA, 20 nt, Artificial Sequence
  LRRK2 RNA guide
ugggagguggagguuguagg

SEQ ID NO: 85984 - RNA, 20 nt, Artificial Sequence
  LRRK2 RNA guide
uguagguagccaagaucacg

SEQ ID NO: 85985 - RNA, 20 nt, Artificial Sequence
  LRRK2 RNA guide
uuggcuaccuacaaccucca

SEQ ID NO: 85986 - RNA, 20 nt, Artificial Sequence
  LRRK2 RNA guide
uuguagguagccaagaucac

SEQ ID NO: 85987 - RNA, 21 nt, Artificial Sequence
  LRRK2 RNA guide
agguagccaagaucacgccac

SEQ ID NO: 85988 - RNA, 21 nt, Artificial Sequence
  LRRK2 RNA guide
agguggagguuguagguagcc

SEQ ID NO: 85989 - RNA, 21 nt, Artificial Sequence
  LRRK2 RNA guide
agguuguagguagccaagauc

SEQ ID NO: 85990 - RNA, 21 nt, Artificial Sequence
  LRRK2 RNA guide
aguggcgugaucuuggcuacc

SEQ ID NO: 85991 - RNA, 21 nt, Artificial Sequence
  LRRK2 RNA guide
aucuuggcuaccuacaaccuc

SEQ ID NO: 85992 - RNA, 21 nt, Artificial Sequence
  LRRK2 RNA guide
caguggcgugaucuuggcuac

SEQ ID NO: 85993 - RNA, 21 nt, Artificial Sequence
  LRRK2 RNA guide
cgugaucuuggcuaccuacaa

SEQ ID NO: 85994 - RNA, 21 nt, Artificial Sequence
  LRRK2 RNA guide
cugggagguggagguuguagg

SEQ ID NO: 85995 - RNA, 21 nt, Artificial Sequence
  LRRK2 RNA guide
cuuggcuaccuacaaccucca

SEQ ID NO: 85996 - RNA, 21 nt, Artificial Sequence
  LRRK2 RNA guide
gagguggagguuguagguagc

SEQ ID NO: 85997 - RNA, 21 nt, Artificial Sequence
  LRRK2 RNA guide
gagguuguagguagccaagau

SEQ ID NO: 85998 - RNA, 21 nt, Artificial Sequence
  LRRK2 RNA guide
gaucuuggcuaccuacaaccu

SEQ ID NO: 85999 - RNA, 21 nt, Artificial Sequence
  LRRK2 RNA guide
gcaguggcgugaucuuggcua

SEQ ID NO: 86000 - RNA, 21 nt, Artificial Sequence
  LRRK2 RNA guide
gcgugaucuuggcuaccuaca

SEQ ID NO: 86001 - RNA, 21 nt, Artificial Sequence
  LRRK2 RNA guide
ggagguggagguuguagguag

SEQ ID NO: 86002 - RNA, 21 nt, Artificial Sequence
  LRRK2 RNA guide
ggagguuguagguagccaaga

SEQ ID NO: 86003 - RNA, 21 nt, Artificial Sequence
  LRRK2 RNA guide
ggcgugaucuuggcuaccuac

SEQ ID NO: 86004 - RNA, 21 nt, Artificial Sequence
  LRRK2 RNA guide
gggagguggagguuguaggua

SEQ ID NO: 86005 - RNA, 21 nt, Artificial Sequence
  LRRK2 RNA guide
gguggagguuguagguagcca

SEQ ID NO: 86006 - RNA, 21 nt, Artificial Sequence
  LRRK2 RNA guide
gguuguagguagccaagauca

SEQ ID NO: 86007 - RNA, 21 nt, Artificial Sequence
  LRRK2 RNA guide
guagguagccaagaucacgcc

SEQ ID NO: 86008 - RNA, 21 nt, Artificial Sequence
  LRRK2 RNA guide
gugaucuuggcuaccuacaac

SEQ ID NO: 86009 - RNA, 21 nt, Artificial Sequence
  LRRK2 RNA guide
gugcaguggcgugaucuuggc

SEQ ID NO: 86010 - RNA, 21 nt, Artificial Sequence
  LRRK2 RNA guide
guggagguuguagguagccaa

SEQ ID NO: 86011 - RNA, 21 nt, Artificial Sequence
  LRRK2 RNA guide
guggcgugaucuuggcuaccu

SEQ ID NO: 86012 - RNA, 21 nt, Artificial Sequence
  LRRK2 RNA guide
guuguagguagccaagaucac

SEQ ID NO: 86013 - RNA, 21 nt, Artificial Sequence
  LRRK2 RNA guide
uagguagccaagaucacgcca

SEQ ID NO: 86014 - RNA, 21 nt, Artificial Sequence
  LRRK2 RNA guide
ucuuggcuaccuacaaccucc

SEQ ID NO: 86015 - RNA, 21 nt, Artificial Sequence
  LRRK2 RNA guide
ugaucuuggcuaccuacaacc

SEQ ID NO: 86016 - RNA, 21 nt, Artificial Sequence
  LRRK2 RNA guide
uggagguuguagguagccaag

SEQ ID NO: 86017 - RNA, 21 nt, Artificial Sequence
  LRRK2 RNA guide
uggcgugaucuuggcuaccua

SEQ ID NO: 86018 - RNA, 21 nt, Artificial Sequence
  LRRK2 RNA guide
uggcuaccuacaaccuccacc

SEQ ID NO: 86019 - RNA, 21 nt, Artificial Sequence
  LRRK2 RNA guide
ugggagguggagguuguaggu

SEQ ID NO: 86020 - RNA, 21 nt, Artificial Sequence
  LRRK2 RNA guide
uguagguagccaagaucacgc

SEQ ID NO: 86021 - RNA, 21 nt, Artificial Sequence
  LRRK2 RNA guide
uuggcuaccuacaaccuccac

SEQ ID NO: 86022 - RNA, 21 nt, Artificial Sequence
  LRRK2 RNA guide
uuguagguagccaagaucacg

SEQ ID NO: 86023 - RNA, 22 nt, Artificial Sequence
  LRRK2 RNA guide
agguagccaagaucacgccacu

SEQ ID NO: 86024 - RNA, 22 nt, Artificial Sequence
  LRRK2 RNA guide
agguggagguuguagguagcca

SEQ ID NO: 86025 - RNA, 22 nt, Artificial Sequence
  LRRK2 RNA guide
agguuguagguagccaagauca

SEQ ID NO: 86026 - RNA, 22 nt, Artificial Sequence
  LRRK2 RNA guide
agugcaguggcgugaucuuggc

SEQ ID NO: 86027 - RNA, 22 nt, Artificial Sequence
  LRRK2 RNA guide
aguggcgugaucuuggcuaccu

SEQ ID NO: 86028 - RNA, 22 nt, Artificial Sequence
  LRRK2 RNA guide
aucuuggcuaccuacaaccucc

SEQ ID NO: 86029 - RNA, 22 nt, Artificial Sequence
  LRRK2 RNA guide
caguggcgugaucuuggcuacc

SEQ ID NO: 86030 - RNA, 22 nt, Artificial Sequence
  LRRK2 RNA guide
cgugaucuuggcuaccuacaac

SEQ ID NO: 86031 - RNA, 22 nt, Artificial Sequence
  LRRK2 RNA guide
cugggagguggagguuguaggu

SEQ ID NO: 86032 - RNA, 22 nt, Artificial Sequence
  LRRK2 RNA guide
cuuggcuaccuacaaccuccac

SEQ ID NO: 86033 - RNA, 22 nt, Artificial Sequence
  LRRK2 RNA guide
gagguggagguuguagguagcc

SEQ ID NO: 86034 - RNA, 22 nt, Artificial Sequence
  LRRK2 RNA guide
gagguuguagguagccaagauc

SEQ ID NO: 86035 - RNA, 22 nt, Artificial Sequence
  LRRK2 RNA guide
gaucuuggcuaccuacaaccuc

SEQ ID NO: 86036 - RNA, 22 nt, Artificial Sequence
  LRRK2 RNA guide
gcaguggcgugaucuuggcuac

SEQ ID NO: 86037 - RNA, 22 nt, Artificial Sequence
  LRRK2 RNA guide
gcgugaucuuggcuaccuacaa

SEQ ID NO: 86038 - RNA, 22 nt, Artificial Sequence
  LRRK2 RNA guide
gcugggagguggagguuguagg

SEQ ID NO: 86039 - RNA, 22 nt, Artificial Sequence
  LRRK2 RNA guide
ggagguggagguuguagguagc

SEQ ID NO: 86040 - RNA, 22 nt, Artificial Sequence
  LRRK2 RNA guide
ggagguuguagguagccaagau

SEQ ID NO: 86041 - RNA, 22 nt, Artificial Sequence
  LRRK2 RNA guide
ggcgugaucuuggcuaccuaca

SEQ ID NO: 86042 - RNA, 22 nt, Artificial Sequence
  LRRK2 RNA guide
gggagguggagguuguagguag

SEQ ID NO: 86043 - RNA, 22 nt, Artificial Sequence
  LRRK2 RNA guide
gguggagguuguagguagccaa

SEQ ID NO: 86044 - RNA, 22 nt, Artificial Sequence
  LRRK2 RNA guide
gguuguagguagccaagaucac

SEQ ID NO: 86045 - RNA, 22 nt, Artificial Sequence
  LRRK2 RNA guide
guagguagccaagaucacgcca

SEQ ID NO: 86046 - RNA, 22 nt, Artificial Sequence
  LRRK2 RNA guide
gugaucuuggcuaccuacaacc

SEQ ID NO: 86047 - RNA, 22 nt, Artificial Sequence
  LRRK2 RNA guide
gugcaguggcgugaucuuggcu

SEQ ID NO: 86048 - RNA, 22 nt, Artificial Sequence
  LRRK2 RNA guide
guggagguuguagguagccaag

SEQ ID NO: 86049 - RNA, 22 nt, Artificial Sequence
  LRRK2 RNA guide
guggcgugaucuuggcuaccua

SEQ ID NO: 86050 - RNA, 22 nt, Artificial Sequence
  LRRK2 RNA guide
guuguagguagccaagaucacg

SEQ ID NO: 86051 - RNA, 22 nt, Artificial Sequence
  LRRK2 RNA guide
uagguagccaagaucacgccac

SEQ ID NO: 86052 - RNA, 22 nt, Artificial Sequence
  LRRK2 RNA guide
ucuuggcuaccuacaaccucca

SEQ ID NO: 86053 - RNA, 22 nt, Artificial Sequence
  LRRK2 RNA guide
ugaucuuggcuaccuacaaccu

SEQ ID NO: 86054 - RNA, 22 nt, Artificial Sequence
  LRRK2 RNA guide
ugcaguggcgugaucuuggcua

SEQ ID NO: 86055 - RNA, 22 nt, Artificial Sequence
  LRRK2 RNA guide
uggagguuguagguagccaaga

SEQ ID NO: 86056 - RNA, 22 nt, Artificial Sequence
  LRRK2 RNA guide
uggcgugaucuuggcuaccuac

SEQ ID NO: 86057 - RNA, 22 nt, Artificial Sequence
  LRRK2 RNA guide
uggcuaccuacaaccuccaccu

SEQ ID NO: 86058 - RNA, 22 nt, Artificial Sequence
  LRRK2 RNA guide
ugggagguggagguuguaggua

SEQ ID NO: 86059 - RNA, 22 nt, Artificial Sequence
  LRRK2 RNA guide
uguagguagccaagaucacgcc

SEQ ID NO: 86060 - RNA, 22 nt, Artificial Sequence
  LRRK2 RNA guide
uuggcuaccuacaaccuccacc

SEQ ID NO: 86061 - RNA, 22 nt, Artificial Sequence
  LRRK2 RNA guide
uuguagguagccaagaucacgc

SEQ ID NO: 86062 - RNA, 20 nt, Artificial Sequence
  LRRK2 RNA guide
agguagcaaagaucacgcca

SEQ ID NO: 86063 - RNA, 20 nt, Artificial Sequence
  LRRK2 RNA guide
agguuguagguagcaaagau

SEQ ID NO: 86064 - RNA, 20 nt, Artificial Sequence
  LRRK2 RNA guide
agugcaguggcgugaucuuu

SEQ ID NO: 86065 - RNA, 20 nt, Artificial Sequence
  LRRK2 RNA guide
aguggcgugaucuuugcuac

SEQ ID NO: 86066 - RNA, 20 nt, Artificial Sequence
  LRRK2 RNA guide
aucuuugcuaccuacaaccu

SEQ ID NO: 86067 - RNA, 20 nt, Artificial Sequence
  LRRK2 RNA guide
caguggcgugaucuuugcua

SEQ ID NO: 86068 - RNA, 20 nt, Artificial Sequence
  LRRK2 RNA guide
cgugaucuuugcuaccuaca

SEQ ID NO: 86069 - RNA, 20 nt, Artificial Sequence
  LRRK2 RNA guide
cuuugcuaccuacaaccucc

SEQ ID NO: 86070 - RNA, 20 nt, Artificial Sequence
  LRRK2 RNA guide
gagguuguagguagcaaaga

SEQ ID NO: 86071 - RNA, 20 nt, Artificial Sequence
  LRRK2 RNA guide
gaucuuugcuaccuacaacc

SEQ ID NO: 86072 - RNA, 20 nt, Artificial Sequence
  LRRK2 RNA guide
gcaguggcgugaucuuugcu

SEQ ID NO: 86073 - RNA, 20 nt, Artificial Sequence
  LRRK2 RNA guide
gcgugaucuuugcuaccuac

SEQ ID NO: 86074 - RNA, 20 nt, Artificial Sequence
  LRRK2 RNA guide
ggagguuguagguagcaaag

SEQ ID NO: 86075 - RNA, 20 nt, Artificial Sequence
  LRRK2 RNA guide
ggcgugaucuuugcuaccua

SEQ ID NO: 86076 - RNA, 20 nt, Artificial Sequence
  LRRK2 RNA guide
gguagcaaagaucacgccac

SEQ ID NO: 86077 - RNA, 20 nt, Artificial Sequence
  LRRK2 RNA guide
gguggagguuguagguagca

SEQ ID NO: 86078 - RNA, 20 nt, Artificial Sequence
  LRRK2 RNA guide
gguuguagguagcaaagauc

SEQ ID NO: 86079 - RNA, 20 nt, Artificial Sequence
  LRRK2 RNA guide
guagcaaagaucacgccacu

SEQ ID NO: 86080 - RNA, 20 nt, Artificial Sequence
  LRRK2 RNA guide
guagguagcaaagaucacgc

SEQ ID NO: 86081 - RNA, 20 nt, Artificial Sequence
  LRRK2 RNA guide
gugaucuuugcuaccuacaa

SEQ ID NO: 86082 - RNA, 20 nt, Artificial Sequence
  LRRK2 RNA guide
gugcaguggcgugaucuuug

SEQ ID NO: 86083 - RNA, 20 nt, Artificial Sequence
  LRRK2 RNA guide
guggagguuguagguagcaa

SEQ ID NO: 86084 - RNA, 20 nt, Artificial Sequence
  LRRK2 RNA guide
guggcgugaucuuugcuacc

SEQ ID NO: 86085 - RNA, 20 nt, Artificial Sequence
  LRRK2 RNA guide
guuguagguagcaaagauca

SEQ ID NO: 86086 - RNA, 20 nt, Artificial Sequence
  LRRK2 RNA guide
uagcaaagaucacgccacug

SEQ ID NO: 86087 - RNA, 20 nt, Artificial Sequence
  LRRK2 RNA guide
uagguagcaaagaucacgcc

SEQ ID NO: 86088 - RNA, 20 nt, Artificial Sequence
  LRRK2 RNA guide
ucuuugcuaccuacaaccuc

SEQ ID NO: 86089 - RNA, 20 nt, Artificial Sequence
  LRRK2 RNA guide
ugaucuuugcuaccuacaac

SEQ ID NO: 86090 - RNA, 20 nt, Artificial Sequence
  LRRK2 RNA guide
ugcaguggcgugaucuuugc

SEQ ID NO: 86091 - RNA, 20 nt, Artificial Sequence
  LRRK2 RNA guide
uggagguuguagguagcaaa

SEQ ID NO: 86092 - RNA, 20 nt, Artificial Sequence
  LRRK2 RNA guide
uggcgugaucuuugcuaccu

SEQ ID NO: 86093 - RNA, 20 nt, Artificial Sequence
  LRRK2 RNA guide
uguagguagcaaagaucacg

SEQ ID NO: 86094 - RNA, 20 nt, Artificial Sequence
  LRRK2 RNA guide
uugcuaccuacaaccuccac

SEQ ID NO: 86095 - RNA, 20 nt, Artificial Sequence
  LRRK2 RNA guide
uuguagguagcaaagaucac

SEQ ID NO: 86096 - RNA, 20 nt, Artificial Sequence
  LRRK2 RNA guide
uuugcuaccuacaaccucca

SEQ ID NO: 86097 - RNA, 21 nt, Artificial Sequence
  LRRK2 RNA guide
agguagcaaagaucacgccac

SEQ ID NO: 86098 - RNA, 21 nt, Artificial Sequence
  LRRK2 RNA guide
agguggagguuguagguagca

SEQ ID NO: 86099 - RNA, 21 nt, Artificial Sequence
  LRRK2 RNA guide
agguuguagguagcaaagauc

SEQ ID NO: 86100 - RNA, 21 nt, Artificial Sequence
  LRRK2 RNA guide
agugcaguggcgugaucuuug

SEQ ID NO: 86101 - RNA, 21 nt, Artificial Sequence
  LRRK2 RNA guide
aguggcgugaucuuugcuacc

SEQ ID NO: 86102 - RNA, 21 nt, Artificial Sequence
  LRRK2 RNA guide
aucuuugcuaccuacaaccuc

SEQ ID NO: 86103 - RNA, 21 nt, Artificial Sequence
  LRRK2 RNA guide
caguggcgugaucuuugcuac

SEQ ID NO: 86104 - RNA, 21 nt, Artificial Sequence
  LRRK2 RNA guide
cgugaucuuugcuaccuacaa

SEQ ID NO: 86105 - RNA, 21 nt, Artificial Sequence
  LRRK2 RNA guide
cuuugcuaccuacaaccucca

SEQ ID NO: 86106 - RNA, 21 nt, Artificial Sequence
  LRRK2 RNA guide
gagguuguagguagcaaagau

SEQ ID NO: 86107 - RNA, 21 nt, Artificial Sequence
  LRRK2 RNA guide
gaucuuugcuaccuacaaccu

SEQ ID NO: 86108 - RNA, 21 nt, Artificial Sequence
  LRRK2 RNA guide
gcaguggcgugaucuuugcua

SEQ ID NO: 86109 - RNA, 21 nt, Artificial Sequence
  LRRK2 RNA guide
gcgugaucuuugcuaccuaca

SEQ ID NO: 86110 - RNA, 21 nt, Artificial Sequence
  LRRK2 RNA guide
ggagguuguagguagcaaaga

SEQ ID NO: 86111 - RNA, 21 nt, Artificial Sequence
  LRRK2 RNA guide
ggagugcaguggcgugaucuu

SEQ ID NO: 86112 - RNA, 21 nt, Artificial Sequence
  LRRK2 RNA guide
ggcgugaucuuugcuaccuac

SEQ ID NO: 86113 - RNA, 21 nt, Artificial Sequence
  LRRK2 RNA guide
gguagcaaagaucacgccacu

SEQ ID NO: 86114 - RNA, 21 nt, Artificial Sequence
  LRRK2 RNA guide
gguggagguuguagguagcaa

SEQ ID NO: 86115 - RNA, 21 nt, Artificial Sequence
  LRRK2 RNA guide
gguuguagguagcaaagauca

SEQ ID NO: 86116 - RNA, 21 nt, Artificial Sequence
  LRRK2 RNA guide
guagcaaagaucacgccacug

SEQ ID NO: 86117 - RNA, 21 nt, Artificial Sequence
  LRRK2 RNA guide
guagguagcaaagaucacgcc

SEQ ID NO: 86118 - RNA, 21 nt, Artificial Sequence
  LRRK2 RNA guide
gugaucuuugcuaccuacaac

SEQ ID NO: 86119 - RNA, 21 nt, Artificial Sequence
  LRRK2 RNA guide
gugcaguggcgugaucuuugc

SEQ ID NO: 86120 - RNA, 21 nt, Artificial Sequence
  LRRK2 RNA guide
guggagguuguagguagcaaa

SEQ ID NO: 86121 - RNA, 21 nt, Artificial Sequence
  LRRK2 RNA guide
guggcgugaucuuugcuaccu

SEQ ID NO: 86122 - RNA, 21 nt, Artificial Sequence
  LRRK2 RNA guide
guuguagguagcaaagaucac

SEQ ID NO: 86123 - RNA, 21 nt, Artificial Sequence
  LRRK2 RNA guide
uagcaaagaucacgccacugc

SEQ ID NO: 86124 - RNA, 21 nt, Artificial Sequence
  LRRK2 RNA guide
uagguagcaaagaucacgcca

SEQ ID NO: 86125 - RNA, 21 nt, Artificial Sequence
  LRRK2 RNA guide
ucuuugcuaccuacaaccucc

SEQ ID NO: 86126 - RNA, 21 nt, Artificial Sequence
  LRRK2 RNA guide
ugaucuuugcuaccuacaacc

SEQ ID NO: 86127 - RNA, 21 nt, Artificial Sequence
  LRRK2 RNA guide
ugcaguggcgugaucuuugcu

SEQ ID NO: 86128 - RNA, 21 nt, Artificial Sequence
  LRRK2 RNA guide
uggagguuguagguagcaaag

SEQ ID NO: 86129 - RNA, 21 nt, Artificial Sequence
  LRRK2 RNA guide
uggcgugaucuuugcuaccua

SEQ ID NO: 86130 - RNA, 21 nt, Artificial Sequence
  LRRK2 RNA guide
uguagguagcaaagaucacgc

SEQ ID NO: 86131 - RNA, 21 nt, Artificial Sequence
  LRRK2 RNA guide
uugcuaccuacaaccuccacc

SEQ ID NO: 86132 - RNA, 21 nt, Artificial Sequence
  LRRK2 RNA guide
uuguagguagcaaagaucacg

SEQ ID NO: 86133 - RNA, 21 nt, Artificial Sequence
  LRRK2 RNA guide
uuugcuaccuacaaccuccac

SEQ ID NO: 86134 - RNA, 22 nt, Artificial Sequence
  LRRK2 RNA guide
agguagcaaagaucacgccacu

SEQ ID NO: 86135 - RNA, 22 nt, Artificial Sequence
  LRRK2 RNA guide
agguggagguuguagguagcaa

SEQ ID NO: 86136 - RNA, 22 nt, Artificial Sequence
  LRRK2 RNA guide
agguuguagguagcaaagauca

SEQ ID NO: 86137 - RNA, 22 nt, Artificial Sequence
  LRRK2 RNA guide
agugcaguggcgugaucuuugc

SEQ ID NO: 86138 - RNA, 22 nt, Artificial Sequence
  LRRK2 RNA guide
aguggcgugaucuuugcuaccu

SEQ ID NO: 86139 - RNA, 22 nt, Artificial Sequence
  LRRK2 RNA guide
aucuuugcuaccuacaaccucc

SEQ ID NO: 86140 - RNA, 22 nt, Artificial Sequence
  LRRK2 RNA guide
caguggcgugaucuuugcuacc

SEQ ID NO: 86141 - RNA, 22 nt, Artificial Sequence
  LRRK2 RNA guide
cgugaucuuugcuaccuacaac

SEQ ID NO: 86142 - RNA, 22 nt, Artificial Sequence
  LRRK2 RNA guide
cuuugcuaccuacaaccuccac

SEQ ID NO: 86143 - RNA, 22 nt, Artificial Sequence
  LRRK2 RNA guide
gagguggagguuguagguagca

SEQ ID NO: 86144 - RNA, 22 nt, Artificial Sequence
  LRRK2 RNA guide
gagguuguagguagcaaagauc

SEQ ID NO: 86145 - RNA, 22 nt, Artificial Sequence
  LRRK2 RNA guide
gagugcaguggcgugaucuuug

SEQ ID NO: 86146 - RNA, 22 nt, Artificial Sequence
  LRRK2 RNA guide
gaucuuugcuaccuacaaccuc

SEQ ID NO: 86147 - RNA, 22 nt, Artificial Sequence
  LRRK2 RNA guide
gcaguggcgugaucuuugcuac

SEQ ID NO: 86148 - RNA, 22 nt, Artificial Sequence
  LRRK2 RNA guide
gcgugaucuuugcuaccuacaa

SEQ ID NO: 86149 - RNA, 22 nt, Artificial Sequence
  LRRK2 RNA guide
ggagguuguagguagcaaagau

SEQ ID NO: 86150 - RNA, 22 nt, Artificial Sequence
  LRRK2 RNA guide
ggagugcaguggcgugaucuuu

SEQ ID NO: 86151 - RNA, 22 nt, Artificial Sequence
  LRRK2 RNA guide
ggcgugaucuuugcuaccuaca

SEQ ID NO: 86152 - RNA, 22 nt, Artificial Sequence
  LRRK2 RNA guide
gguagcaaagaucacgccacug

SEQ ID NO: 86153 - RNA, 22 nt, Artificial Sequence
  LRRK2 RNA guide
gguggagguuguagguagcaaa

SEQ ID NO: 86154 - RNA, 22 nt, Artificial Sequence
  LRRK2 RNA guide
gguuguagguagcaaagaucac

SEQ ID NO: 86155 - RNA, 22 nt, Artificial Sequence
  LRRK2 RNA guide
guagcaaagaucacgccacugc

SEQ ID NO: 86156 - RNA, 22 nt, Artificial Sequence
  LRRK2 RNA guide
guagguagcaaagaucacgcca

SEQ ID NO: 86157 - RNA, 22 nt, Artificial Sequence
  LRRK2 RNA guide
gugaucuuugcuaccuacaacc

SEQ ID NO: 86158 - RNA, 22 nt, Artificial Sequence
  LRRK2 RNA guide
gugcaguggcgugaucuuugcu

SEQ ID NO: 86159 - RNA, 22 nt, Artificial Sequence
  LRRK2 RNA guide
guggagguuguagguagcaaag

SEQ ID NO: 86160 - RNA, 22 nt, Artificial Sequence
  LRRK2 RNA guide
guggcgugaucuuugcuaccua

SEQ ID NO: 86161 - RNA, 22 nt, Artificial Sequence
  LRRK2 RNA guide
guuguagguagcaaagaucacg

SEQ ID NO: 86162 - RNA, 22 nt, Artificial Sequence
  LRRK2 RNA guide
uagcaaagaucacgccacugca

SEQ ID NO: 86163 - RNA, 22 nt, Artificial Sequence
  LRRK2 RNA guide
uagguagcaaagaucacgccac

SEQ ID NO: 86164 - RNA, 22 nt, Artificial Sequence
  LRRK2 RNA guide
ucuuugcuaccuacaaccucca

SEQ ID NO: 86165 - RNA, 22 nt, Artificial Sequence
  LRRK2 RNA guide
ugaucuuugcuaccuacaaccu

SEQ ID NO: 86166 - RNA, 22 nt, Artificial Sequence
  LRRK2 RNA guide
ugcaguggcgugaucuuugcua

SEQ ID NO: 86167 - RNA, 22 nt, Artificial Sequence
  LRRK2 RNA guide
uggagguuguagguagcaaaga

SEQ ID NO: 86168 - RNA, 22 nt, Artificial Sequence
  LRRK2 RNA guide
uggagugcaguggcgugaucuu

SEQ ID NO: 86169 - RNA, 22 nt, Artificial Sequence
  LRRK2 RNA guide
uggcgugaucuuugcuaccuac

SEQ ID NO: 86170 - RNA, 22 nt, Artificial Sequence
  LRRK2 RNA guide
uguagguagcaaagaucacgcc

SEQ ID NO: 86171 - RNA, 22 nt, Artificial Sequence
  LRRK2 RNA guide
uugcuaccuacaaccuccaccu

SEQ ID NO: 86172 - RNA, 22 nt, Artificial Sequence
  LRRK2 RNA guide
uuguagguagcaaagaucacgc

SEQ ID NO: 86173 - RNA, 22 nt, Artificial Sequence
  LRRK2 RNA guide
uuugcuaccuacaaccuccacc

SEQ ID NO: 86174 - RNA, 21 nt, Artificial Sequence
  LRRK2 RNA guide
ugccagccucggccucccgag

SEQ ID NO: 86175 - RNA, 22 nt, Artificial Sequence
  LRRK2 RNA guide
cugccagccucggccucccgag

SEQ ID NO: 86176 - RNA, 22 nt, Artificial Sequence
  LRRK2 RNA guide
ugccagccucggccucccgagg

SEQ ID NO: 86177 - RNA, 20 nt, Artificial Sequence
  LRRK2 RNA guide
aaaacuugucugccaauuaa

SEQ ID NO: 86178 - RNA, 20 nt, Artificial Sequence
  LRRK2 RNA guide
aaacuugucugccaauuaac

SEQ ID NO: 86179 - RNA, 20 nt, Artificial Sequence
  LRRK2 RNA guide
aaaugaguuaauuggcagac

SEQ ID NO: 86180 - RNA, 20 nt, Artificial Sequence
  LRRK2 RNA guide
aacuugucugccaauuaacu

SEQ ID NO: 86181 - RNA, 20 nt, Artificial Sequence
  LRRK2 RNA guide
aaugaguuaauuggcagaca

SEQ ID NO: 86182 - RNA, 20 nt, Artificial Sequence
  LRRK2 RNA guide
aauuggcagacaaguuuugc

SEQ ID NO: 86183 - RNA, 20 nt, Artificial Sequence
  LRRK2 RNA guide
acuugucugccaauuaacuc

SEQ ID NO: 86184 - RNA, 20 nt, Artificial Sequence
  LRRK2 RNA guide
agacaaguuuugccuaucaa

SEQ ID NO: 86185 - RNA, 20 nt, Artificial Sequence
  LRRK2 RNA guide
aggcaaaacuugucugccaa

SEQ ID NO: 86186 - RNA, 20 nt, Artificial Sequence
  LRRK2 RNA guide
aguuaauuggcagacaaguu

SEQ ID NO: 86187 - RNA, 20 nt, Artificial Sequence
  LRRK2 RNA guide
auaaaugaguuaauuggcag

SEQ ID NO: 86188 - RNA, 20 nt, Artificial Sequence
  LRRK2 RNA guide
auaggcaaaacuugucugcc

SEQ ID NO: 86189 - RNA, 20 nt, Artificial Sequence
  LRRK2 RNA guide
aucuugauaggcaaaacuug

SEQ ID NO: 86190 - RNA, 20 nt, Artificial Sequence
  LRRK2 RNA guide
augaguuaauuggcagacaa

SEQ ID NO: 86191 - RNA, 20 nt, Artificial Sequence
  LRRK2 RNA guide
auuggcagacaaguuuugcc

SEQ ID NO: 86192 - RNA, 20 nt, Artificial Sequence
  LRRK2 RNA guide
caaaacuugucugccaauua

SEQ ID NO: 86193 - RNA, 20 nt, Artificial Sequence
  LRRK2 RNA guide
caauaaaugaguuaauuggc

SEQ ID NO: 86194 - RNA, 20 nt, Artificial Sequence
  LRRK2 RNA guide
cagacaaguuuugccuauca

SEQ ID NO: 86195 - RNA, 20 nt, Artificial Sequence
  LRRK2 RNA guide
caucuugauaggcaaaacuu

SEQ ID NO: 86196 - RNA, 20 nt, Artificial Sequence
  LRRK2 RNA guide
cuugauaggcaaaacuuguc

SEQ ID NO: 86197 - RNA, 20 nt, Artificial Sequence
  LRRK2 RNA guide
cuugucugccaauuaacuca

SEQ ID NO: 86198 - RNA, 20 nt, Artificial Sequence
  LRRK2 RNA guide
gaguuaauuggcagacaagu

SEQ ID NO: 86199 - RNA, 20 nt, Artificial Sequence
  LRRK2 RNA guide
gauaggcaaaacuugucugc

SEQ ID NO: 86200 - RNA, 20 nt, Artificial Sequence
  LRRK2 RNA guide
gcaaaacuugucugccaauu

SEQ ID NO: 86201 - RNA, 20 nt, Artificial Sequence
  LRRK2 RNA guide
gcaauaaaugaguuaauugg

SEQ ID NO: 86202 - RNA, 20 nt, Artificial Sequence
  LRRK2 RNA guide
gcagacaaguuuugccuauc

SEQ ID NO: 86203 - RNA, 20 nt, Artificial Sequence
  LRRK2 RNA guide
ggcaaaacuugucugccaau

SEQ ID NO: 86204 - RNA, 20 nt, Artificial Sequence
  LRRK2 RNA guide
ggcagacaaguuuugccuau

SEQ ID NO: 86205 - RNA, 20 nt, Artificial Sequence
  LRRK2 RNA guide
gucaucuugauaggcaaaac

SEQ ID NO: 86206 - RNA, 20 nt, Artificial Sequence
  LRRK2 RNA guide
gucugccaauuaacucauuu

SEQ ID NO: 86207 - RNA, 20 nt, Artificial Sequence
  LRRK2 RNA guide
guuaauuggcagacaaguuu

SEQ ID NO: 86208 - RNA, 20 nt, Artificial Sequence
  LRRK2 RNA guide
uaaaugaguuaauuggcaga

SEQ ID NO: 86209 - RNA, 20 nt, Artificial Sequence
  LRRK2 RNA guide
uaauuggcagacaaguuuug

SEQ ID NO: 86210 - RNA, 20 nt, Artificial Sequence
  LRRK2 RNA guide
uaggcaaaacuugucugcca

SEQ ID NO: 86211 - RNA, 20 nt, Artificial Sequence
  LRRK2 RNA guide
ucaucuugauaggcaaaacu

SEQ ID NO: 86212 - RNA, 20 nt, Artificial Sequence
  LRRK2 RNA guide
ucugccaauuaacucauuua

SEQ ID NO: 86213 - RNA, 20 nt, Artificial Sequence
  LRRK2 RNA guide
ucuugauaggcaaaacuugu

SEQ ID NO: 86214 - RNA, 20 nt, Artificial Sequence
  LRRK2 RNA guide
ugaguuaauuggcagacaag

SEQ ID NO: 86215 - RNA, 20 nt, Artificial Sequence
  LRRK2 RNA guide
ugauaggcaaaacuugucug

SEQ ID NO: 86216 - RNA, 20 nt, Artificial Sequence
  LRRK2 RNA guide
uggcagacaaguuuugccua

SEQ ID NO: 86217 - RNA, 20 nt, Artificial Sequence
  LRRK2 RNA guide
ugucugccaauuaacucauu

SEQ ID NO: 86218 - RNA, 20 nt, Artificial Sequence
  LRRK2 RNA guide
uuaauuggcagacaaguuuu

SEQ ID NO: 86219 - RNA, 20 nt, Artificial Sequence
  LRRK2 RNA guide
uugauaggcaaaacuugucu

SEQ ID NO: 86220 - RNA, 20 nt, Artificial Sequence
  LRRK2 RNA guide
uuggcagacaaguuuugccu

SEQ ID NO: 86221 - RNA, 20 nt, Artificial Sequence
  LRRK2 RNA guide
uugucugccaauuaacucau

SEQ ID NO: 86222 - RNA, 21 nt, Artificial Sequence
  LRRK2 RNA guide
aaaacuugucugccaauuaac

SEQ ID NO: 86223 - RNA, 21 nt, Artificial Sequence
  LRRK2 RNA guide
aaacuugucugccaauuaacu

SEQ ID NO: 86224 - RNA, 21 nt, Artificial Sequence
  LRRK2 RNA guide
aaaugaguuaauuggcagaca

SEQ ID NO: 86225 - RNA, 21 nt, Artificial Sequence
  LRRK2 RNA guide
aacuugucugccaauuaacuc

SEQ ID NO: 86226 - RNA, 21 nt, Artificial Sequence
  LRRK2 RNA guide
aaugaguuaauuggcagacaa

SEQ ID NO: 86227 - RNA, 21 nt, Artificial Sequence
  LRRK2 RNA guide
aauuggcagacaaguuuugcc

SEQ ID NO: 86228 - RNA, 21 nt, Artificial Sequence
  LRRK2 RNA guide
acuugucugccaauuaacuca

SEQ ID NO: 86229 - RNA, 21 nt, Artificial Sequence
  LRRK2 RNA guide
agacaaguuuugccuaucaag

SEQ ID NO: 86230 - RNA, 21 nt, Artificial Sequence
  LRRK2 RNA guide
aggcaaaacuugucugccaau

SEQ ID NO: 86231 - RNA, 21 nt, Artificial Sequence
  LRRK2 RNA guide
aguuaauuggcagacaaguuu

SEQ ID NO: 86232 - RNA, 21 nt, Artificial Sequence
  LRRK2 RNA guide
auaggcaaaacuugucugcca

SEQ ID NO: 86233 - RNA, 21 nt, Artificial Sequence
  LRRK2 RNA guide
aucuugauaggcaaaacuugu

SEQ ID NO: 86234 - RNA, 21 nt, Artificial Sequence
  LRRK2 RNA guide
augaguuaauuggcagacaag

SEQ ID NO: 86235 - RNA, 21 nt, Artificial Sequence
  LRRK2 RNA guide
auuggcagacaaguuuugccu

SEQ ID NO: 86236 - RNA, 21 nt, Artificial Sequence
  LRRK2 RNA guide
caaaacuugucugccaauuaa

SEQ ID NO: 86237 - RNA, 21 nt, Artificial Sequence
  LRRK2 RNA guide
cagacaaguuuugccuaucaa

SEQ ID NO: 86238 - RNA, 21 nt, Artificial Sequence
  LRRK2 RNA guide
caucuugauaggcaaaacuug

SEQ ID NO: 86239 - RNA, 21 nt, Artificial Sequence
  LRRK2 RNA guide
cuugauaggcaaaacuugucu

SEQ ID NO: 86240 - RNA, 21 nt, Artificial Sequence
  LRRK2 RNA guide
cuugucugccaauuaacucau

SEQ ID NO: 86241 - RNA, 21 nt, Artificial Sequence
  LRRK2 RNA guide
gaguuaauuggcagacaaguu

SEQ ID NO: 86242 - RNA, 21 nt, Artificial Sequence
  LRRK2 RNA guide
gauaggcaaaacuugucugcc

SEQ ID NO: 86243 - RNA, 21 nt, Artificial Sequence
  LRRK2 RNA guide
gcaaaacuugucugccaauua

SEQ ID NO: 86244 - RNA, 21 nt, Artificial Sequence
  LRRK2 RNA guide
gcaauaaaugaguuaauuggc

SEQ ID NO: 86245 - RNA, 21 nt, Artificial Sequence
  LRRK2 RNA guide
gcagacaaguuuugccuauca

SEQ ID NO: 86246 - RNA, 21 nt, Artificial Sequence
  LRRK2 RNA guide
ggcaaaacuugucugccaauu

SEQ ID NO: 86247 - RNA, 21 nt, Artificial Sequence
  LRRK2 RNA guide
ggcagacaaguuuugccuauc

SEQ ID NO: 86248 - RNA, 21 nt, Artificial Sequence
  LRRK2 RNA guide
gucaucuugauaggcaaaacu

SEQ ID NO: 86249 - RNA, 21 nt, Artificial Sequence
  LRRK2 RNA guide
gucugccaauuaacucauuua

SEQ ID NO: 86250 - RNA, 21 nt, Artificial Sequence
  LRRK2 RNA guide
guuaauuggcagacaaguuuu

SEQ ID NO: 86251 - RNA, 21 nt, Artificial Sequence
  LRRK2 RNA guide
uaaaugaguuaauuggcagac

SEQ ID NO: 86252 - RNA, 21 nt, Artificial Sequence
  LRRK2 RNA guide
uaauuggcagacaaguuuugc

SEQ ID NO: 86253 - RNA, 21 nt, Artificial Sequence
  LRRK2 RNA guide
uaggcaaaacuugucugccaa

SEQ ID NO: 86254 - RNA, 21 nt, Artificial Sequence
  LRRK2 RNA guide
ucaucuugauaggcaaaacuu

SEQ ID NO: 86255 - RNA, 21 nt, Artificial Sequence
  LRRK2 RNA guide
ucuugauaggcaaaacuuguc

SEQ ID NO: 86256 - RNA, 21 nt, Artificial Sequence
  LRRK2 RNA guide
ugaguuaauuggcagacaagu

SEQ ID NO: 86257 - RNA, 21 nt, Artificial Sequence
  LRRK2 RNA guide
ugauaggcaaaacuugucugc

SEQ ID NO: 86258 - RNA, 21 nt, Artificial Sequence
  LRRK2 RNA guide
uggcagacaaguuuugccuau

SEQ ID NO: 86259 - RNA, 21 nt, Artificial Sequence
  LRRK2 RNA guide
ugucaucuugauaggcaaaac

SEQ ID NO: 86260 - RNA, 21 nt, Artificial Sequence
  LRRK2 RNA guide
ugucugccaauuaacucauuu

SEQ ID NO: 86261 - RNA, 21 nt, Artificial Sequence
  LRRK2 RNA guide
uuaauuggcagacaaguuuug

SEQ ID NO: 86262 - RNA, 21 nt, Artificial Sequence
  LRRK2 RNA guide
uugauaggcaaaacuugucug

SEQ ID NO: 86263 - RNA, 21 nt, Artificial Sequence
  LRRK2 RNA guide
uuggcagacaaguuuugccua

SEQ ID NO: 86264 - RNA, 21 nt, Artificial Sequence
  LRRK2 RNA guide
uugucugccaauuaacucauu

SEQ ID NO: 86265 - RNA, 22 nt, Artificial Sequence
  LRRK2 RNA guide
aaaacuugucugccaauuaacu

SEQ ID NO: 86266 - RNA, 22 nt, Artificial Sequence
  LRRK2 RNA guide
aaacuugucugccaauuaacuc

SEQ ID NO: 86267 - RNA, 22 nt, Artificial Sequence
  LRRK2 RNA guide
aaaugaguuaauuggcagacaa

SEQ ID NO: 86268 - RNA, 22 nt, Artificial Sequence
  LRRK2 RNA guide
aacuugucugccaauuaacuca

SEQ ID NO: 86269 - RNA, 22 nt, Artificial Sequence
  LRRK2 RNA guide
aaugaguuaauuggcagacaag

SEQ ID NO: 86270 - RNA, 22 nt, Artificial Sequence
  LRRK2 RNA guide
aauuggcagacaaguuuugccu

SEQ ID NO: 86271 - RNA, 22 nt, Artificial Sequence
  LRRK2 RNA guide
acuugucugccaauuaacucau

SEQ ID NO: 86272 - RNA, 22 nt, Artificial Sequence
  LRRK2 RNA guide
agacaaguuuugccuaucaaga

SEQ ID NO: 86273 - RNA, 22 nt, Artificial Sequence
  LRRK2 RNA guide
agcaauaaaugaguuaauuggc

SEQ ID NO: 86274 - RNA, 22 nt, Artificial Sequence
  LRRK2 RNA guide
aggcaaaacuugucugccaauu

SEQ ID NO: 86275 - RNA, 22 nt, Artificial Sequence
  LRRK2 RNA guide
aguuaauuggcagacaaguuuu

SEQ ID NO: 86276 - RNA, 22 nt, Artificial Sequence
  LRRK2 RNA guide
auaaaugaguuaauuggcagac

SEQ ID NO: 86277 - RNA, 22 nt, Artificial Sequence
  LRRK2 RNA guide
auaggcaaaacuugucugccaa

SEQ ID NO: 86278 - RNA, 22 nt, Artificial Sequence
  LRRK2 RNA guide
aucuugauaggcaaaacuuguc

SEQ ID NO: 86279 - RNA, 22 nt, Artificial Sequence
  LRRK2 RNA guide
augaguuaauuggcagacaagu

SEQ ID NO: 86280 - RNA, 22 nt, Artificial Sequence
  LRRK2 RNA guide
augucaucuugauaggcaaaac

SEQ ID NO: 86281 - RNA, 22 nt, Artificial Sequence
  LRRK2 RNA guide
auuggcagacaaguuuugccua

SEQ ID NO: 86282 - RNA, 22 nt, Artificial Sequence
  LRRK2 RNA guide
caaaacuugucugccaauuaac

SEQ ID NO: 86283 - RNA, 22 nt, Artificial Sequence
  LRRK2 RNA guide
caauaaaugaguuaauuggcag

SEQ ID NO: 86284 - RNA, 22 nt, Artificial Sequence
  LRRK2 RNA guide
cagacaaguuuugccuaucaag

SEQ ID NO: 86285 - RNA, 22 nt, Artificial Sequence
  LRRK2 RNA guide
cagcaauaaaugaguuaauugg

SEQ ID NO: 86286 - RNA, 22 nt, Artificial Sequence
  LRRK2 RNA guide
caucuugauaggcaaaacuugu

SEQ ID NO: 86287 - RNA, 22 nt, Artificial Sequence
  LRRK2 RNA guide
cuugauaggcaaaacuugucug

SEQ ID NO: 86288 - RNA, 22 nt, Artificial Sequence
  LRRK2 RNA guide
cuugucugccaauuaacucauu

SEQ ID NO: 86289 - RNA, 22 nt, Artificial Sequence
  LRRK2 RNA guide
gaguuaauuggcagacaaguuu

SEQ ID NO: 86290 - RNA, 22 nt, Artificial Sequence
  LRRK2 RNA guide
gauaggcaaaacuugucugcca

SEQ ID NO: 86291 - RNA, 22 nt, Artificial Sequence
  LRRK2 RNA guide
gcaaaacuugucugccaauuaa

SEQ ID NO: 86292 - RNA, 22 nt, Artificial Sequence
  LRRK2 RNA guide
gcaauaaaugaguuaauuggca

SEQ ID NO: 86293 - RNA, 22 nt, Artificial Sequence
  LRRK2 RNA guide
gcagacaaguuuugccuaucaa

SEQ ID NO: 86294 - RNA, 22 nt, Artificial Sequence
  LRRK2 RNA guide
ggcaaaacuugucugccaauua

SEQ ID NO: 86295 - RNA, 22 nt, Artificial Sequence
  LRRK2 RNA guide
ggcagacaaguuuugccuauca

SEQ ID NO: 86296 - RNA, 22 nt, Artificial Sequence
  LRRK2 RNA guide
gucaucuugauaggcaaaacuu

SEQ ID NO: 86297 - RNA, 22 nt, Artificial Sequence
  LRRK2 RNA guide
gucugccaauuaacucauuuau

SEQ ID NO: 86298 - RNA, 22 nt, Artificial Sequence
  LRRK2 RNA guide
guuaauuggcagacaaguuuug

SEQ ID NO: 86299 - RNA, 22 nt, Artificial Sequence
  LRRK2 RNA guide
uaaaugaguuaauuggcagaca

SEQ ID NO: 86300 - RNA, 22 nt, Artificial Sequence
  LRRK2 RNA guide
uaauuggcagacaaguuuugcc

SEQ ID NO: 86301 - RNA, 22 nt, Artificial Sequence
  LRRK2 RNA guide
uaggcaaaacuugucugccaau

SEQ ID NO: 86302 - RNA, 22 nt, Artificial Sequence
  LRRK2 RNA guide
ucaucuugauaggcaaaacuug

SEQ ID NO: 86303 - RNA, 22 nt, Artificial Sequence
  LRRK2 RNA guide
ucuugauaggcaaaacuugucu

SEQ ID NO: 86304 - RNA, 22 nt, Artificial Sequence
  LRRK2 RNA guide
ugaguuaauuggcagacaaguu

SEQ ID NO: 86305 - RNA, 22 nt, Artificial Sequence
  LRRK2 RNA guide
ugauaggcaaaacuugucugcc

SEQ ID NO: 86306 - RNA, 22 nt, Artificial Sequence
  LRRK2 RNA guide
uggcagacaaguuuugccuauc

SEQ ID NO: 86307 - RNA, 22 nt, Artificial Sequence
  LRRK2 RNA guide
ugucaucuugauaggcaaaacu

SEQ ID NO: 86308 - RNA, 22 nt, Artificial Sequence
  LRRK2 RNA guide
ugucugccaauuaacucauuua

SEQ ID NO: 86309 - RNA, 22 nt, Artificial Sequence
  LRRK2 RNA guide
uuaauuggcagacaaguuuugc

SEQ ID NO: 86310 - RNA, 22 nt, Artificial Sequence
  LRRK2 RNA guide
uugauaggcaaaacuugucugc

SEQ ID NO: 86311 - RNA, 22 nt, Artificial Sequence
  LRRK2 RNA guide
uuggcagacaaguuuugccuau

SEQ ID NO: 86312 - RNA, 22 nt, Artificial Sequence
  LRRK2 RNA guide
uugucugccaauuaacucauuu

SEQ ID NO: 86313 - RNA, 20 nt, Artificial Sequence
  LRRK2 RNA guide
aaacaaguuuugccuaucaa

SEQ ID NO: 86314 - RNA, 20 nt, Artificial Sequence
  LRRK2 RNA guide
aaacuuguuugccaauuaac

SEQ ID NO: 86315 - RNA, 20 nt, Artificial Sequence
  LRRK2 RNA guide
aaaugaguuaauuggcaaac

SEQ ID NO: 86316 - RNA, 20 nt, Artificial Sequence
  LRRK2 RNA guide
aacuuguuugccaauuaacu

SEQ ID NO: 86317 - RNA, 20 nt, Artificial Sequence
  LRRK2 RNA guide
aaugaguuaauuggcaaaca

SEQ ID NO: 86318 - RNA, 20 nt, Artificial Sequence
  LRRK2 RNA guide
aauuggcaaacaaguuuugc

SEQ ID NO: 86319 - RNA, 20 nt, Artificial Sequence
  LRRK2 RNA guide
acuuguuugccaauuaacuc

SEQ ID NO: 86320 - RNA, 20 nt, Artificial Sequence
  LRRK2 RNA guide
aggcaaaacuuguuugccaa

SEQ ID NO: 86321 - RNA, 20 nt, Artificial Sequence
  LRRK2 RNA guide
aguuaauuggcaaacaaguu

SEQ ID NO: 86322 - RNA, 20 nt, Artificial Sequence
  LRRK2 RNA guide
auaggcaaaacuuguuugcc

SEQ ID NO: 86323 - RNA, 20 nt, Artificial Sequence
  LRRK2 RNA guide
augaguuaauuggcaaacaa

SEQ ID NO: 86324 - RNA, 20 nt, Artificial Sequence
  LRRK2 RNA guide
auuggcaaacaaguuuugcc

SEQ ID NO: 86325 - RNA, 20 nt, Artificial Sequence
  LRRK2 RNA guide
caaaacuuguuugccaauua

SEQ ID NO: 86326 - RNA, 20 nt, Artificial Sequence
  LRRK2 RNA guide
caaacaaguuuugccuauca

SEQ ID NO: 86327 - RNA, 20 nt, Artificial Sequence
  LRRK2 RNA guide
cuugauaggcaaaacuuguu

SEQ ID NO: 86328 - RNA, 20 nt, Artificial Sequence
  LRRK2 RNA guide
cuuguuugccaauuaacuca

SEQ ID NO: 86329 - RNA, 20 nt, Artificial Sequence
  LRRK2 RNA guide
gaguuaauuggcaaacaagu

SEQ ID NO: 86330 - RNA, 20 nt, Artificial Sequence
  LRRK2 RNA guide
gauaggcaaaacuuguuugc

SEQ ID NO: 86331 - RNA, 20 nt, Artificial Sequence
  LRRK2 RNA guide
gcaaaacuuguuugccaauu

SEQ ID NO: 86332 - RNA, 20 nt, Artificial Sequence
  LRRK2 RNA guide
gcaaacaaguuuugccuauc

SEQ ID NO: 86333 - RNA, 20 nt, Artificial Sequence
  LRRK2 RNA guide
ggcaaaacuuguuugccaau

SEQ ID NO: 86334 - RNA, 20 nt, Artificial Sequence
  LRRK2 RNA guide
ggcaaacaaguuuugccuau

SEQ ID NO: 86335 - RNA, 20 nt, Artificial Sequence
  LRRK2 RNA guide
guuaauuggcaaacaaguuu

SEQ ID NO: 86336 - RNA, 20 nt, Artificial Sequence
  LRRK2 RNA guide
guuugccaauuaacucauuu

SEQ ID NO: 86337 - RNA, 20 nt, Artificial Sequence
  LRRK2 RNA guide
uaauuggcaaacaaguuuug

SEQ ID NO: 86338 - RNA, 20 nt, Artificial Sequence
  LRRK2 RNA guide
uaggcaaaacuuguuugcca

SEQ ID NO: 86339 - RNA, 20 nt, Artificial Sequence
  LRRK2 RNA guide
ugaguuaauuggcaaacaag

SEQ ID NO: 86340 - RNA, 20 nt, Artificial Sequence
  LRRK2 RNA guide
ugauaggcaaaacuuguuug

SEQ ID NO: 86341 - RNA, 20 nt, Artificial Sequence
  LRRK2 RNA guide
uggcaaacaaguuuugccua

SEQ ID NO: 86342 - RNA, 20 nt, Artificial Sequence
  LRRK2 RNA guide
uguuugccaauuaacucauu

SEQ ID NO: 86343 - RNA, 20 nt, Artificial Sequence
  LRRK2 RNA guide
uugauaggcaaaacuuguuu

SEQ ID NO: 86344 - RNA, 20 nt, Artificial Sequence
  LRRK2 RNA guide
uuggcaaacaaguuuugccu

SEQ ID NO: 86345 - RNA, 20 nt, Artificial Sequence
  LRRK2 RNA guide
uuguuugccaauuaacucau

SEQ ID NO: 86346 - RNA, 21 nt, Artificial Sequence
  LRRK2 RNA guide
aaacaaguuuugccuaucaag

SEQ ID NO: 86347 - RNA, 21 nt, Artificial Sequence
  LRRK2 RNA guide
aacuuguuugccaauuaacuc

SEQ ID NO: 86348 - RNA, 21 nt, Artificial Sequence
  LRRK2 RNA guide
aauuggcaaacaaguuuugcc

SEQ ID NO: 86349 - RNA, 21 nt, Artificial Sequence
  LRRK2 RNA guide
acuuguuugccaauuaacuca

SEQ ID NO: 86350 - RNA, 21 nt, Artificial Sequence
  LRRK2 RNA guide
aggcaaaacuuguuugccaau

SEQ ID NO: 86351 - RNA, 21 nt, Artificial Sequence
  LRRK2 RNA guide
auaggcaaaacuuguuugcca

SEQ ID NO: 86352 - RNA, 21 nt, Artificial Sequence
  LRRK2 RNA guide
augaguuaauuggcaaacaag

SEQ ID NO: 86353 - RNA, 21 nt, Artificial Sequence
  LRRK2 RNA guide
auuggcaaacaaguuuugccu

SEQ ID NO: 86354 - RNA, 21 nt, Artificial Sequence
  LRRK2 RNA guide
caaacaaguuuugccuaucaa

SEQ ID NO: 86355 - RNA, 21 nt, Artificial Sequence
  LRRK2 RNA guide
cuugauaggcaaaacuuguuu

SEQ ID NO: 86356 - RNA, 21 nt, Artificial Sequence
  LRRK2 RNA guide
cuuguuugccaauuaacucau

SEQ ID NO: 86357 - RNA, 21 nt, Artificial Sequence
  LRRK2 RNA guide
gaguuaauuggcaaacaaguu

SEQ ID NO: 86358 - RNA, 21 nt, Artificial Sequence
  LRRK2 RNA guide
gauaggcaaaacuuguuugcc

SEQ ID NO: 86359 - RNA, 21 nt, Artificial Sequence
  LRRK2 RNA guide
gcaaaacuuguuugccaauua

SEQ ID NO: 86360 - RNA, 21 nt, Artificial Sequence
  LRRK2 RNA guide
gcaaacaaguuuugccuauca

SEQ ID NO: 86361 - RNA, 21 nt, Artificial Sequence
  LRRK2 RNA guide
ggcaaaacuuguuugccaauu

SEQ ID NO: 86362 - RNA, 21 nt, Artificial Sequence
  LRRK2 RNA guide
ggcaaacaaguuuugccuauc

SEQ ID NO: 86363 - RNA, 21 nt, Artificial Sequence
  LRRK2 RNA guide
uaauuggcaaacaaguuuugc

SEQ ID NO: 86364 - RNA, 21 nt, Artificial Sequence
  LRRK2 RNA guide
uaggcaaaacuuguuugccaa

SEQ ID NO: 86365 - RNA, 21 nt, Artificial Sequence
  LRRK2 RNA guide
ucuugauaggcaaaacuuguu

SEQ ID NO: 86366 - RNA, 21 nt, Artificial Sequence
  LRRK2 RNA guide
ugaguuaauuggcaaacaagu

SEQ ID NO: 86367 - RNA, 21 nt, Artificial Sequence
  LRRK2 RNA guide
ugauaggcaaaacuuguuugc

SEQ ID NO: 86368 - RNA, 21 nt, Artificial Sequence
  LRRK2 RNA guide
uggcaaacaaguuuugccuau

SEQ ID NO: 86369 - RNA, 21 nt, Artificial Sequence
  LRRK2 RNA guide
uugauaggcaaaacuuguuug

SEQ ID NO: 86370 - RNA, 21 nt, Artificial Sequence
  LRRK2 RNA guide
uuggcaaacaaguuuugccua

SEQ ID NO: 86371 - RNA, 22 nt, Artificial Sequence
  LRRK2 RNA guide
aaacaaguuuugccuaucaaga

SEQ ID NO: 86372 - RNA, 22 nt, Artificial Sequence
  LRRK2 RNA guide
aaacuuguuugccaauuaacuc

SEQ ID NO: 86373 - RNA, 22 nt, Artificial Sequence
  LRRK2 RNA guide
aacuuguuugccaauuaacuca

SEQ ID NO: 86374 - RNA, 22 nt, Artificial Sequence
  LRRK2 RNA guide
aaugaguuaauuggcaaacaag

SEQ ID NO: 86375 - RNA, 22 nt, Artificial Sequence
  LRRK2 RNA guide
aauuggcaaacaaguuuugccu

SEQ ID NO: 86376 - RNA, 22 nt, Artificial Sequence
  LRRK2 RNA guide
acuuguuugccaauuaacucau

SEQ ID NO: 86377 - RNA, 22 nt, Artificial Sequence
  LRRK2 RNA guide
aggcaaaacuuguuugccaauu

SEQ ID NO: 86378 - RNA, 22 nt, Artificial Sequence
  LRRK2 RNA guide
auaggcaaaacuuguuugccaa

SEQ ID NO: 86379 - RNA, 22 nt, Artificial Sequence
  LRRK2 RNA guide
aucuugauaggcaaaacuuguu

SEQ ID NO: 86380 - RNA, 22 nt, Artificial Sequence
  LRRK2 RNA guide
augaguuaauuggcaaacaagu

SEQ ID NO: 86381 - RNA, 22 nt, Artificial Sequence
  LRRK2 RNA guide
auuggcaaacaaguuuugccua

SEQ ID NO: 86382 - RNA, 22 nt, Artificial Sequence
  LRRK2 RNA guide
caaaacuuguuugccaauuaac

SEQ ID NO: 86383 - RNA, 22 nt, Artificial Sequence
  LRRK2 RNA guide
caaacaaguuuugccuaucaag

SEQ ID NO: 86384 - RNA, 22 nt, Artificial Sequence
  LRRK2 RNA guide
cuugauaggcaaaacuuguuug

SEQ ID NO: 86385 - RNA, 22 nt, Artificial Sequence
  LRRK2 RNA guide
cuuguuugccaauuaacucauu

SEQ ID NO: 86386 - RNA, 22 nt, Artificial Sequence
  LRRK2 RNA guide
gaguuaauuggcaaacaaguuu

SEQ ID NO: 86387 - RNA, 22 nt, Artificial Sequence
  LRRK2 RNA guide
gauaggcaaaacuuguuugcca

SEQ ID NO: 86388 - RNA, 22 nt, Artificial Sequence
  LRRK2 RNA guide
gcaaaacuuguuugccaauuaa

SEQ ID NO: 86389 - RNA, 22 nt, Artificial Sequence
  LRRK2 RNA guide
gcaaacaaguuuugccuaucaa

SEQ ID NO: 86390 - RNA, 22 nt, Artificial Sequence
  LRRK2 RNA guide
ggcaaaacuuguuugccaauua

SEQ ID NO: 86391 - RNA, 22 nt, Artificial Sequence
  LRRK2 RNA guide
ggcaaacaaguuuugccuauca

SEQ ID NO: 86392 - RNA, 22 nt, Artificial Sequence
  LRRK2 RNA guide
guuaauuggcaaacaaguuuug

SEQ ID NO: 86393 - RNA, 22 nt, Artificial Sequence
  LRRK2 RNA guide
uaauuggcaaacaaguuuugcc

SEQ ID NO: 86394 - RNA, 22 nt, Artificial Sequence
  LRRK2 RNA guide
uaggcaaaacuuguuugccaau

SEQ ID NO: 86395 - RNA, 22 nt, Artificial Sequence
  LRRK2 RNA guide
ucuugauaggcaaaacuuguuu

SEQ ID NO: 86396 - RNA, 22 nt, Artificial Sequence
  LRRK2 RNA guide
ugaguuaauuggcaaacaaguu

SEQ ID NO: 86397 - RNA, 22 nt, Artificial Sequence
  LRRK2 RNA guide
ugauaggcaaaacuuguuugcc

SEQ ID NO: 86398 - RNA, 22 nt, Artificial Sequence
  LRRK2 RNA guide
uggcaaacaaguuuugccuauc

SEQ ID NO: 86399 - RNA, 22 nt, Artificial Sequence
  LRRK2 RNA guide
uuaauuggcaaacaaguuuugc

SEQ ID NO: 86400 - RNA, 22 nt, Artificial Sequence
  LRRK2 RNA guide
uugauaggcaaaacuuguuugc

SEQ ID NO: 86401 - RNA, 22 nt, Artificial Sequence
  LRRK2 RNA guide
uuggcaaacaaguuuugccuau

SEQ ID NO: 86402 - RNA, 20 nt, Artificial Sequence
  LRRK2 RNA guide
aaaccaaugaaaauaggcua

SEQ ID NO: 86403 - RNA, 20 nt, Artificial Sequence
  LRRK2 RNA guide
aaccaaugaaaauaggcuaa

SEQ ID NO: 86404 - RNA, 20 nt, Artificial Sequence
  LRRK2 RNA guide
aagauuguucauuuuuagcc

SEQ ID NO: 86405 - RNA, 20 nt, Artificial Sequence
  LRRK2 RNA guide
accaaugaaaauaggcuaaa

SEQ ID NO: 86406 - RNA, 20 nt, Artificial Sequence
  LRRK2 RNA guide
agauuguucauuuuuagccu

SEQ ID NO: 86407 - RNA, 20 nt, Artificial Sequence
  LRRK2 RNA guide
agccuauuuucauugguuug

SEQ ID NO: 86408 - RNA, 20 nt, Artificial Sequence
  LRRK2 RNA guide
aggcuaaaaaugaacaaucu

SEQ ID NO: 86409 - RNA, 20 nt, Artificial Sequence
  LRRK2 RNA guide
aucagcaaagauuguucauu

SEQ ID NO: 86410 - RNA, 20 nt, Artificial Sequence
  LRRK2 RNA guide
augcaaaccaaugaaaauag

SEQ ID NO: 86411 - RNA, 20 nt, Artificial Sequence
  LRRK2 RNA guide
caaaccaaugaaaauaggcu

SEQ ID NO: 86412 - RNA, 20 nt, Artificial Sequence
  LRRK2 RNA guide
cagcaaagauuguucauuuu

SEQ ID NO: 86413 - RNA, 20 nt, Artificial Sequence
  LRRK2 RNA guide
ccaaugaaaauaggcuaaaa

SEQ ID NO: 86414 - RNA, 20 nt, Artificial Sequence
  LRRK2 RNA guide
gauuguucauuuuuagccua

SEQ ID NO: 86415 - RNA, 20 nt, Artificial Sequence
  LRRK2 RNA guide
gcaaaccaaugaaaauaggc

SEQ ID NO: 86416 - RNA, 20 nt, Artificial Sequence
  LRRK2 RNA guide
ggcuaaaaaugaacaaucuu

SEQ ID NO: 86417 - RNA, 20 nt, Artificial Sequence
  LRRK2 RNA guide
uagccuauuuucauugguuu

SEQ ID NO: 86418 - RNA, 20 nt, Artificial Sequence
  LRRK2 RNA guide
uaggcuaaaaaugaacaauc

SEQ ID NO: 86419 - RNA, 20 nt, Artificial Sequence
  LRRK2 RNA guide
ucagcaaagauuguucauuu

SEQ ID NO: 86420 - RNA, 20 nt, Artificial Sequence
  LRRK2 RNA guide
ugcaaaccaaugaaaauagg

SEQ ID NO: 86421 - RNA, 20 nt, Artificial Sequence
  LRRK2 RNA guide
uuagccuauuuucauugguu

SEQ ID NO: 86422 - RNA, 20 nt, Artificial Sequence
  LRRK2 RNA guide
uuuagccuauuuucauuggu

SEQ ID NO: 86423 - RNA, 20 nt, Artificial Sequence
  LRRK2 RNA guide
uuuuagccuauuuucauugg

SEQ ID NO: 86424 - RNA, 21 nt, Artificial Sequence
  LRRK2 RNA guide
agccuauuuucauugguuugc

SEQ ID NO: 86425 - RNA, 21 nt, Artificial Sequence
  LRRK2 RNA guide
augcaaaccaaugaaaauagg

SEQ ID NO: 86426 - RNA, 21 nt, Artificial Sequence
  LRRK2 RNA guide
caaaccaaugaaaauaggcua

SEQ ID NO: 86427 - RNA, 21 nt, Artificial Sequence
  LRRK2 RNA guide
caucagcaaagauuguucauu

SEQ ID NO: 86428 - RNA, 21 nt, Artificial Sequence
  LRRK2 RNA guide
gcaaaccaaugaaaauaggcu

SEQ ID NO: 86429 - RNA, 21 nt, Artificial Sequence
  LRRK2 RNA guide
uagccuauuuucauugguuug

SEQ ID NO: 86430 - RNA, 21 nt, Artificial Sequence
  LRRK2 RNA guide
ugcaaaccaaugaaaauaggc

SEQ ID NO: 86431 - RNA, 22 nt, Artificial Sequence
  LRRK2 RNA guide
agccuauuuucauugguuugca

SEQ ID NO: 86432 - RNA, 22 nt, Artificial Sequence
  LRRK2 RNA guide
augcaaaccaaugaaaauaggc

SEQ ID NO: 86433 - RNA, 22 nt, Artificial Sequence
  LRRK2 RNA guide
caaaccaaugaaaauaggcuaa

SEQ ID NO: 86434 - RNA, 22 nt, Artificial Sequence
  LRRK2 RNA guide
caaagauuguucauuuuuagcc

SEQ ID NO: 86435 - RNA, 22 nt, Artificial Sequence
  LRRK2 RNA guide
caucagcaaagauuguucauuu

SEQ ID NO: 86436 - RNA, 22 nt, Artificial Sequence
  LRRK2 RNA guide
gcaaaccaaugaaaauaggcua

SEQ ID NO: 86437 - RNA, 22 nt, Artificial Sequence
  LRRK2 RNA guide
gcaaagauuguucauuuuuagc

SEQ ID NO: 86438 - RNA, 22 nt, Artificial Sequence
  LRRK2 RNA guide
gcaucagcaaagauuguucauu

SEQ ID NO: 86439 - RNA, 22 nt, Artificial Sequence
  LRRK2 RNA guide
gcuaaaaaugaacaaucuuugc

SEQ ID NO: 86440 - RNA, 22 nt, Artificial Sequence
  LRRK2 RNA guide
ggcuaaaaaugaacaaucuuug

SEQ ID NO: 86441 - RNA, 22 nt, Artificial Sequence
  LRRK2 RNA guide
uagccuauuuucauugguuugc

SEQ ID NO: 86442 - RNA, 22 nt, Artificial Sequence
  LRRK2 RNA guide
uaugcaaaccaaugaaaauagg

SEQ ID NO: 86443 - RNA, 22 nt, Artificial Sequence
  LRRK2 RNA guide
ugcaaaccaaugaaaauaggcu

SEQ ID NO: 86444 - RNA, 22 nt, Artificial Sequence
  LRRK2 RNA guide
uuagccuauuuucauugguuug

SEQ ID NO: 86445 - RNA, 20 nt, Artificial Sequence
  LRRK2 RNA guide
aaccuauuuucauugguuug

SEQ ID NO: 86446 - RNA, 20 nt, Artificial Sequence
  LRRK2 RNA guide
caaaccaaugaaaauagguu

SEQ ID NO: 86447 - RNA, 20 nt, Artificial Sequence
  LRRK2 RNA guide
gcaaaccaaugaaaauaggu

SEQ ID NO: 86448 - RNA, 21 nt, Artificial Sequence
  LRRK2 RNA guide
aaccuauuuucauugguuugc

SEQ ID NO: 86449 - RNA, 21 nt, Artificial Sequence
  LRRK2 RNA guide
gcaaaccaaugaaaauagguu

SEQ ID NO: 86450 - RNA, 21 nt, Artificial Sequence
  LRRK2 RNA guide
ugcaaaccaaugaaaauaggu

SEQ ID NO: 86451 - RNA, 22 nt, Artificial Sequence
  LRRK2 RNA guide
aaccuauuuucauugguuugca

SEQ ID NO: 86452 - RNA, 22 nt, Artificial Sequence
  LRRK2 RNA guide
augcaaaccaaugaaaauaggu

SEQ ID NO: 86453 - RNA, 22 nt, Artificial Sequence
  LRRK2 RNA guide
gcaaaccaaugaaaauagguua

SEQ ID NO: 86454 - RNA, 22 nt, Artificial Sequence
  LRRK2 RNA guide
uaaccuauuuucauugguuugc

SEQ ID NO: 86455 - RNA, 22 nt, Artificial Sequence
  LRRK2 RNA guide
ugcaaaccaaugaaaauagguu

SEQ ID NO: 86456 - RNA, 20 nt, Artificial Sequence
  LRRK2 RNA guide
aaagagauagagccacaguu

SEQ ID NO: 86457 - RNA, 20 nt, Artificial Sequence
  LRRK2 RNA guide
aacuguggcucuaucucuuu

SEQ ID NO: 86458 - RNA, 20 nt, Artificial Sequence
  LRRK2 RNA guide
aagagauagagccacaguug

SEQ ID NO: 86459 - RNA, 20 nt, Artificial Sequence
  LRRK2 RNA guide
aaguaaagagauagagccac

SEQ ID NO: 86460 - RNA, 20 nt, Artificial Sequence
  LRRK2 RNA guide
acaguugagguaauaccagg

SEQ ID NO: 86461 - RNA, 20 nt, Artificial Sequence
  LRRK2 RNA guide
accucaacuguggcucuauc

SEQ ID NO: 86462 - RNA, 20 nt, Artificial Sequence
  LRRK2 RNA guide
agaaguaaagagauagagcc

SEQ ID NO: 86463 - RNA, 20 nt, Artificial Sequence
  LRRK2 RNA guide
agagauagagccacaguuga

SEQ ID NO: 86464 - RNA, 20 nt, Artificial Sequence
  LRRK2 RNA guide
agagccacaguugagguaau

SEQ ID NO: 86465 - RNA, 20 nt, Artificial Sequence
  LRRK2 RNA guide
agauagagccacaguugagg

SEQ ID NO: 86466 - RNA, 20 nt, Artificial Sequence
  LRRK2 RNA guide
agccacaguugagguaauac

SEQ ID NO: 86467 - RNA, 20 nt, Artificial Sequence
  LRRK2 RNA guide
agcccugcuccugguauuac

SEQ ID NO: 86468 - RNA, 20 nt, Artificial Sequence
  LRRK2 RNA guide
aguaaagagauagagccaca

SEQ ID NO: 86469 - RNA, 20 nt, Artificial Sequence
  LRRK2 RNA guide
aguugagguaauaccaggag

SEQ ID NO: 86470 - RNA, 20 nt, Artificial Sequence
  LRRK2 RNA guide
auagagccacaguugaggua

SEQ ID NO: 86471 - RNA, 20 nt, Artificial Sequence
  LRRK2 RNA guide
auuaccucaacuguggcucu

SEQ ID NO: 86472 - RNA, 20 nt, Artificial Sequence
  LRRK2 RNA guide
caacuguggcucuaucucuu

SEQ ID NO: 86473 - RNA, 20 nt, Artificial Sequence
  LRRK2 RNA guide
cacaguugagguaauaccag

SEQ ID NO: 86474 - RNA, 20 nt, Artificial Sequence
  LRRK2 RNA guide
caguugagguaauaccagga

SEQ ID NO: 86475 - RNA, 20 nt, Artificial Sequence
  LRRK2 RNA guide
ccacaguugagguaauacca

SEQ ID NO: 86476 - RNA, 20 nt, Artificial Sequence
  LRRK2 RNA guide
cccugcuccugguauuaccu

SEQ ID NO: 86477 - RNA, 20 nt, Artificial Sequence
  LRRK2 RNA guide
ccucaacuguggcucuaucu

SEQ ID NO: 86478 - RNA, 20 nt, Artificial Sequence
  LRRK2 RNA guide
ccugcuccugguauuaccuc

SEQ ID NO: 86479 - RNA, 20 nt, Artificial Sequence
  LRRK2 RNA guide
ccugguauuaccucaacugu

SEQ ID NO: 86480 - RNA, 20 nt, Artificial Sequence
  LRRK2 RNA guide
cucaacuguggcucuaucuc

SEQ ID NO: 86481 - RNA, 20 nt, Artificial Sequence
  LRRK2 RNA guide
cuccugguauuaccucaacu

SEQ ID NO: 86482 - RNA, 20 nt, Artificial Sequence
  LRRK2 RNA guide
cugcuccugguauuaccuca

SEQ ID NO: 86483 - RNA, 20 nt, Artificial Sequence
  LRRK2 RNA guide
cugguauuaccucaacugug

SEQ ID NO: 86484 - RNA, 20 nt, Artificial Sequence
  LRRK2 RNA guide
gaaguaaagagauagagcca

SEQ ID NO: 86485 - RNA, 20 nt, Artificial Sequence
  LRRK2 RNA guide
gagauagagccacaguugag

SEQ ID NO: 86486 - RNA, 20 nt, Artificial Sequence
  LRRK2 RNA guide
gagccacaguugagguaaua

SEQ ID NO: 86487 - RNA, 20 nt, Artificial Sequence
  LRRK2 RNA guide
gauagagccacaguugaggu

SEQ ID NO: 86488 - RNA, 20 nt, Artificial Sequence
  LRRK2 RNA guide
gccacaguugagguaauacc

SEQ ID NO: 86489 - RNA, 20 nt, Artificial Sequence
  LRRK2 RNA guide
gcccugcuccugguauuacc

SEQ ID NO: 86490 - RNA, 20 nt, Artificial Sequence
  LRRK2 RNA guide
gcuccugguauuaccucaac

SEQ ID NO: 86491 - RNA, 20 nt, Artificial Sequence
  LRRK2 RNA guide
gguauuaccucaacuguggc

SEQ ID NO: 86492 - RNA, 20 nt, Artificial Sequence
  LRRK2 RNA guide
guaaagagauagagccacag

SEQ ID NO: 86493 - RNA, 20 nt, Artificial Sequence
  LRRK2 RNA guide
guauuaccucaacuguggcu

SEQ ID NO: 86494 - RNA, 20 nt, Artificial Sequence
  LRRK2 RNA guide
guugagguaauaccaggagc

SEQ ID NO: 86495 - RNA, 20 nt, Artificial Sequence
  LRRK2 RNA guide
uaaagagauagagccacagu

SEQ ID NO: 86496 - RNA, 20 nt, Artificial Sequence
  LRRK2 RNA guide
uaccucaacuguggcucuau

SEQ ID NO: 86497 - RNA, 20 nt, Artificial Sequence
  LRRK2 RNA guide
uagagccacaguugagguaa

SEQ ID NO: 86498 - RNA, 20 nt, Artificial Sequence
  LRRK2 RNA guide
uauuaccucaacuguggcuc

SEQ ID NO: 86499 - RNA, 20 nt, Artificial Sequence
  LRRK2 RNA guide
ucaacuguggcucuaucucu

SEQ ID NO: 86500 - RNA, 20 nt, Artificial Sequence
  LRRK2 RNA guide
uccugguauuaccucaacug

SEQ ID NO: 86501 - RNA, 20 nt, Artificial Sequence
  LRRK2 RNA guide
ugcuccugguauuaccucaa

SEQ ID NO: 86502 - RNA, 20 nt, Artificial Sequence
  LRRK2 RNA guide
ugguauuaccucaacugugg

SEQ ID NO: 86503 - RNA, 20 nt, Artificial Sequence
  LRRK2 RNA guide
uuaccucaacuguggcucua

SEQ ID NO: 86504 - RNA, 21 nt, Artificial Sequence
  LRRK2 RNA guide
aaagagauagagccacaguug

SEQ ID NO: 86505 - RNA, 21 nt, Artificial Sequence
  LRRK2 RNA guide
aacuguggcucuaucucuuua

SEQ ID NO: 86506 - RNA, 21 nt, Artificial Sequence
  LRRK2 RNA guide
aagagauagagccacaguuga

SEQ ID NO: 86507 - RNA, 21 nt, Artificial Sequence
  LRRK2 RNA guide
aaguaaagagauagagccaca

SEQ ID NO: 86508 - RNA, 21 nt, Artificial Sequence
  LRRK2 RNA guide
acaguugagguaauaccagga

SEQ ID NO: 86509 - RNA, 21 nt, Artificial Sequence
  LRRK2 RNA guide
accucaacuguggcucuaucu

SEQ ID NO: 86510 - RNA, 21 nt, Artificial Sequence
  LRRK2 RNA guide
agaaguaaagagauagagcca

SEQ ID NO: 86511 - RNA, 21 nt, Artificial Sequence
  LRRK2 RNA guide
agagauagagccacaguugag

SEQ ID NO: 86512 - RNA, 21 nt, Artificial Sequence
  LRRK2 RNA guide
agagccacaguugagguaaua

SEQ ID NO: 86513 - RNA, 21 nt, Artificial Sequence
  LRRK2 RNA guide
agauagagccacaguugaggu

SEQ ID NO: 86514 - RNA, 21 nt, Artificial Sequence
  LRRK2 RNA guide
agccacaguugagguaauacc

SEQ ID NO: 86515 - RNA, 21 nt, Artificial Sequence
  LRRK2 RNA guide
agcccugcuccugguauuacc

SEQ ID NO: 86516 - RNA, 21 nt, Artificial Sequence
  LRRK2 RNA guide
aguaaagagauagagccacag

SEQ ID NO: 86517 - RNA, 21 nt, Artificial Sequence
  LRRK2 RNA guide
aguugagguaauaccaggagc

SEQ ID NO: 86518 - RNA, 21 nt, Artificial Sequence
  LRRK2 RNA guide
auagagccacaguugagguaa

SEQ ID NO: 86519 - RNA, 21 nt, Artificial Sequence
  LRRK2 RNA guide
auuaccucaacuguggcucua

SEQ ID NO: 86520 - RNA, 21 nt, Artificial Sequence
  LRRK2 RNA guide
caacuguggcucuaucucuuu

SEQ ID NO: 86521 - RNA, 21 nt, Artificial Sequence
  LRRK2 RNA guide
cacaguugagguaauaccagg

SEQ ID NO: 86522 - RNA, 21 nt, Artificial Sequence
  LRRK2 RNA guide
cagcccugcuccugguauuac

SEQ ID NO: 86523 - RNA, 21 nt, Artificial Sequence
  LRRK2 RNA guide
caguugagguaauaccaggag

SEQ ID NO: 86524 - RNA, 21 nt, Artificial Sequence
  LRRK2 RNA guide
ccacaguugagguaauaccag

SEQ ID NO: 86525 - RNA, 21 nt, Artificial Sequence
  LRRK2 RNA guide
cccugcuccugguauuaccuc

SEQ ID NO: 86526 - RNA, 21 nt, Artificial Sequence
  LRRK2 RNA guide
ccucaacuguggcucuaucuc

SEQ ID NO: 86527 - RNA, 21 nt, Artificial Sequence
  LRRK2 RNA guide
ccugcuccugguauuaccuca

SEQ ID NO: 86528 - RNA, 21 nt, Artificial Sequence
  LRRK2 RNA guide
ccugguauuaccucaacugug

SEQ ID NO: 86529 - RNA, 21 nt, Artificial Sequence
  LRRK2 RNA guide
cucaacuguggcucuaucucu

SEQ ID NO: 86530 - RNA, 21 nt, Artificial Sequence
  LRRK2 RNA guide
cuccugguauuaccucaacug

SEQ ID NO: 86531 - RNA, 21 nt, Artificial Sequence
  LRRK2 RNA guide
cugcuccugguauuaccucaa

SEQ ID NO: 86532 - RNA, 21 nt, Artificial Sequence
  LRRK2 RNA guide
cugguauuaccucaacugugg

SEQ ID NO: 86533 - RNA, 21 nt, Artificial Sequence
  LRRK2 RNA guide
gaaguaaagagauagagccac

SEQ ID NO: 86534 - RNA, 21 nt, Artificial Sequence
  LRRK2 RNA guide
gagaaguaaagagauagagcc

SEQ ID NO: 86535 - RNA, 21 nt, Artificial Sequence
  LRRK2 RNA guide
gagauagagccacaguugagg

SEQ ID NO: 86536 - RNA, 21 nt, Artificial Sequence
  LRRK2 RNA guide
gagccacaguugagguaauac

SEQ ID NO: 86537 - RNA, 21 nt, Artificial Sequence
  LRRK2 RNA guide
gauagagccacaguugaggua

SEQ ID NO: 86538 - RNA, 21 nt, Artificial Sequence
  LRRK2 RNA guide
gccacaguugagguaauacca

SEQ ID NO: 86539 - RNA, 21 nt, Artificial Sequence
  LRRK2 RNA guide
gcccugcuccugguauuaccu

SEQ ID NO: 86540 - RNA, 21 nt, Artificial Sequence
  LRRK2 RNA guide
gcuccugguauuaccucaacu

SEQ ID NO: 86541 - RNA, 21 nt, Artificial Sequence
  LRRK2 RNA guide
gguauuaccucaacuguggcu

SEQ ID NO: 86542 - RNA, 21 nt, Artificial Sequence
  LRRK2 RNA guide
guaaagagauagagccacagu

SEQ ID NO: 86543 - RNA, 21 nt, Artificial Sequence
  LRRK2 RNA guide
guauuaccucaacuguggcuc

SEQ ID NO: 86544 - RNA, 21 nt, Artificial Sequence
  LRRK2 RNA guide
guugagguaauaccaggagca

SEQ ID NO: 86545 - RNA, 21 nt, Artificial Sequence
  LRRK2 RNA guide
uaaagagauagagccacaguu

SEQ ID NO: 86546 - RNA, 21 nt, Artificial Sequence
  LRRK2 RNA guide
uaccucaacuguggcucuauc

SEQ ID NO: 86547 - RNA, 21 nt, Artificial Sequence
  LRRK2 RNA guide
uagagccacaguugagguaau

SEQ ID NO: 86548 - RNA, 21 nt, Artificial Sequence
  LRRK2 RNA guide
uauuaccucaacuguggcucu

SEQ ID NO: 86549 - RNA, 21 nt, Artificial Sequence
  LRRK2 RNA guide
ucaacuguggcucuaucucuu

SEQ ID NO: 86550 - RNA, 21 nt, Artificial Sequence
  LRRK2 RNA guide
uccugguauuaccucaacugu

SEQ ID NO: 86551 - RNA, 21 nt, Artificial Sequence
  LRRK2 RNA guide
ugcuccugguauuaccucaac

SEQ ID NO: 86552 - RNA, 21 nt, Artificial Sequence
  LRRK2 RNA guide
ugguauuaccucaacuguggc

SEQ ID NO: 86553 - RNA, 21 nt, Artificial Sequence
  LRRK2 RNA guide
uuaccucaacuguggcucuau

SEQ ID NO: 86554 - RNA, 22 nt, Artificial Sequence
  LRRK2 RNA guide
aaagagauagagccacaguuga

SEQ ID NO: 86555 - RNA, 22 nt, Artificial Sequence
  LRRK2 RNA guide
aacuguggcucuaucucuuuac

SEQ ID NO: 86556 - RNA, 22 nt, Artificial Sequence
  LRRK2 RNA guide
aagagauagagccacaguugag

SEQ ID NO: 86557 - RNA, 22 nt, Artificial Sequence
  LRRK2 RNA guide
aaguaaagagauagagccacag

SEQ ID NO: 86558 - RNA, 22 nt, Artificial Sequence
  LRRK2 RNA guide
acaguugagguaauaccaggag

SEQ ID NO: 86559 - RNA, 22 nt, Artificial Sequence
  LRRK2 RNA guide
accucaacuguggcucuaucuc

SEQ ID NO: 86560 - RNA, 22 nt, Artificial Sequence
  LRRK2 RNA guide
agaaguaaagagauagagccac

SEQ ID NO: 86561 - RNA, 22 nt, Artificial Sequence
  LRRK2 RNA guide
agagauagagccacaguugagg

SEQ ID NO: 86562 - RNA, 22 nt, Artificial Sequence
  LRRK2 RNA guide
agagccacaguugagguaauac

SEQ ID NO: 86563 - RNA, 22 nt, Artificial Sequence
  LRRK2 RNA guide
agauagagccacaguugaggua

SEQ ID NO: 86564 - RNA, 22 nt, Artificial Sequence
  LRRK2 RNA guide
agccacaguugagguaauacca

SEQ ID NO: 86565 - RNA, 22 nt, Artificial Sequence
  LRRK2 RNA guide
agcccugcuccugguauuaccu

SEQ ID NO: 86566 - RNA, 22 nt, Artificial Sequence
  LRRK2 RNA guide
aguaaagagauagagccacagu

SEQ ID NO: 86567 - RNA, 22 nt, Artificial Sequence
  LRRK2 RNA guide
aguugagguaauaccaggagca

SEQ ID NO: 86568 - RNA, 22 nt, Artificial Sequence
  LRRK2 RNA guide
auagagccacaguugagguaau

SEQ ID NO: 86569 - RNA, 22 nt, Artificial Sequence
  LRRK2 RNA guide
auuaccucaacuguggcucuau

SEQ ID NO: 86570 - RNA, 22 nt, Artificial Sequence
  LRRK2 RNA guide
caacuguggcucuaucucuuua

SEQ ID NO: 86571 - RNA, 22 nt, Artificial Sequence
  LRRK2 RNA guide
cacaguugagguaauaccagga

SEQ ID NO: 86572 - RNA, 22 nt, Artificial Sequence
  LRRK2 RNA guide
cagcccugcuccugguauuacc

SEQ ID NO: 86573 - RNA, 22 nt, Artificial Sequence
  LRRK2 RNA guide
caguugagguaauaccaggagc

SEQ ID NO: 86574 - RNA, 22 nt, Artificial Sequence
  LRRK2 RNA guide
ccacaguugagguaauaccagg

SEQ ID NO: 86575 - RNA, 22 nt, Artificial Sequence
  LRRK2 RNA guide
ccagcccugcuccugguauuac

SEQ ID NO: 86576 - RNA, 22 nt, Artificial Sequence
  LRRK2 RNA guide
cccugcuccugguauuaccuca

SEQ ID NO: 86577 - RNA, 22 nt, Artificial Sequence
  LRRK2 RNA guide
ccucaacuguggcucuaucucu

SEQ ID NO: 86578 - RNA, 22 nt, Artificial Sequence
  LRRK2 RNA guide
ccugcuccugguauuaccucaa

SEQ ID NO: 86579 - RNA, 22 nt, Artificial Sequence
  LRRK2 RNA guide
ccugguauuaccucaacugugg

SEQ ID NO: 86580 - RNA, 22 nt, Artificial Sequence
  LRRK2 RNA guide
cucaacuguggcucuaucucuu

SEQ ID NO: 86581 - RNA, 22 nt, Artificial Sequence
  LRRK2 RNA guide
cuccugguauuaccucaacugu

SEQ ID NO: 86582 - RNA, 22 nt, Artificial Sequence
  LRRK2 RNA guide
cugcuccugguauuaccucaac

SEQ ID NO: 86583 - RNA, 22 nt, Artificial Sequence
  LRRK2 RNA guide
cugguauuaccucaacuguggc

SEQ ID NO: 86584 - RNA, 22 nt, Artificial Sequence
  LRRK2 RNA guide
gaaguaaagagauagagccaca

SEQ ID NO: 86585 - RNA, 22 nt, Artificial Sequence
  LRRK2 RNA guide
gagaaguaaagagauagagcca

SEQ ID NO: 86586 - RNA, 22 nt, Artificial Sequence
  LRRK2 RNA guide
gagauagagccacaguugaggu

SEQ ID NO: 86587 - RNA, 22 nt, Artificial Sequence
  LRRK2 RNA guide
gagccacaguugagguaauacc

SEQ ID NO: 86588 - RNA, 22 nt, Artificial Sequence
  LRRK2 RNA guide
gauagagccacaguugagguaa

SEQ ID NO: 86589 - RNA, 22 nt, Artificial Sequence
  LRRK2 RNA guide
gccacaguugagguaauaccag

SEQ ID NO: 86590 - RNA, 22 nt, Artificial Sequence
  LRRK2 RNA guide
gcccugcuccugguauuaccuc

SEQ ID NO: 86591 - RNA, 22 nt, Artificial Sequence
  LRRK2 RNA guide
gcuccugguauuaccucaacug

SEQ ID NO: 86592 - RNA, 22 nt, Artificial Sequence
  LRRK2 RNA guide
ggagaaguaaagagauagagcc

SEQ ID NO: 86593 - RNA, 22 nt, Artificial Sequence
  LRRK2 RNA guide
gguauuaccucaacuguggcuc

SEQ ID NO: 86594 - RNA, 22 nt, Artificial Sequence
  LRRK2 RNA guide
guaaagagauagagccacaguu

SEQ ID NO: 86595 - RNA, 22 nt, Artificial Sequence
  LRRK2 RNA guide
guauuaccucaacuguggcucu

SEQ ID NO: 86596 - RNA, 22 nt, Artificial Sequence
  LRRK2 RNA guide
guugagguaauaccaggagcag

SEQ ID NO: 86597 - RNA, 22 nt, Artificial Sequence
  LRRK2 RNA guide
uaaagagauagagccacaguug

SEQ ID NO: 86598 - RNA, 22 nt, Artificial Sequence
  LRRK2 RNA guide
uaccucaacuguggcucuaucu

SEQ ID NO: 86599 - RNA, 22 nt, Artificial Sequence
  LRRK2 RNA guide
uagagccacaguugagguaaua

SEQ ID NO: 86600 - RNA, 22 nt, Artificial Sequence
  LRRK2 RNA guide
uauuaccucaacuguggcucua

SEQ ID NO: 86601 - RNA, 22 nt, Artificial Sequence
  LRRK2 RNA guide
ucaacuguggcucuaucucuuu

SEQ ID NO: 86602 - RNA, 22 nt, Artificial Sequence
  LRRK2 RNA guide
uccugguauuaccucaacugug

SEQ ID NO: 86603 - RNA, 22 nt, Artificial Sequence
  LRRK2 RNA guide
ugcuccugguauuaccucaacu

SEQ ID NO: 86604 - RNA, 22 nt, Artificial Sequence
  LRRK2 RNA guide
ugguauuaccucaacuguggcu

SEQ ID NO: 86605 - RNA, 22 nt, Artificial Sequence
  LRRK2 RNA guide
uuaccucaacuguggcucuauc

SEQ ID NO: 86606 - RNA, 20 nt, Artificial Sequence
  LRRK2 RNA guide
aaagagauagagccacagcu

SEQ ID NO: 86607 - RNA, 20 nt, Artificial Sequence
  LRRK2 RNA guide
aagagauagagccacagcug

SEQ ID NO: 86608 - RNA, 20 nt, Artificial Sequence
  LRRK2 RNA guide
acagcugagguaauaccagg

SEQ ID NO: 86609 - RNA, 20 nt, Artificial Sequence
  LRRK2 RNA guide
accucagcuguggcucuauc

SEQ ID NO: 86610 - RNA, 20 nt, Artificial Sequence
  LRRK2 RNA guide
agagauagagccacagcuga

SEQ ID NO: 86611 - RNA, 20 nt, Artificial Sequence
  LRRK2 RNA guide
agagccacagcugagguaau

SEQ ID NO: 86612 - RNA, 20 nt, Artificial Sequence
  LRRK2 RNA guide
agauagagccacagcugagg

SEQ ID NO: 86613 - RNA, 20 nt, Artificial Sequence
  LRRK2 RNA guide
agccacagcugagguaauac

SEQ ID NO: 86614 - RNA, 20 nt, Artificial Sequence
  LRRK2 RNA guide
agcugagguaauaccaggag

SEQ ID NO: 86615 - RNA, 20 nt, Artificial Sequence
  LRRK2 RNA guide
agcuguggcucuaucucuuu

SEQ ID NO: 86616 - RNA, 20 nt, Artificial Sequence
  LRRK2 RNA guide
auagagccacagcugaggua

SEQ ID NO: 86617 - RNA, 20 nt, Artificial Sequence
  LRRK2 RNA guide
auuaccucagcuguggcucu

SEQ ID NO: 86618 - RNA, 20 nt, Artificial Sequence
  LRRK2 RNA guide
cacagcugagguaauaccag

SEQ ID NO: 86619 - RNA, 20 nt, Artificial Sequence
  LRRK2 RNA guide
cagcugagguaauaccagga

SEQ ID NO: 86620 - RNA, 20 nt, Artificial Sequence
  LRRK2 RNA guide
cagcuguggcucuaucucuu

SEQ ID NO: 86621 - RNA, 20 nt, Artificial Sequence
  LRRK2 RNA guide
ccacagcugagguaauacca

SEQ ID NO: 86622 - RNA, 20 nt, Artificial Sequence
  LRRK2 RNA guide
ccucagcuguggcucuaucu

SEQ ID NO: 86623 - RNA, 20 nt, Artificial Sequence
  LRRK2 RNA guide
ccugguauuaccucagcugu

SEQ ID NO: 86624 - RNA, 20 nt, Artificial Sequence
  LRRK2 RNA guide
cucagcuguggcucuaucuc

SEQ ID NO: 86625 - RNA, 20 nt, Artificial Sequence
  LRRK2 RNA guide
cuccugguauuaccucagcu

SEQ ID NO: 86626 - RNA, 20 nt, Artificial Sequence
  LRRK2 RNA guide
cugguauuaccucagcugug

SEQ ID NO: 86627 - RNA, 20 nt, Artificial Sequence
  LRRK2 RNA guide
gagauagagccacagcugag

SEQ ID NO: 86628 - RNA, 20 nt, Artificial Sequence
  LRRK2 RNA guide
gagccacagcugagguaaua

SEQ ID NO: 86629 - RNA, 20 nt, Artificial Sequence
  LRRK2 RNA guide
gauagagccacagcugaggu

SEQ ID NO: 86630 - RNA, 20 nt, Artificial Sequence
  LRRK2 RNA guide
gccacagcugagguaauacc

SEQ ID NO: 86631 - RNA, 20 nt, Artificial Sequence
  LRRK2 RNA guide
gcuccugguauuaccucagc

SEQ ID NO: 86632 - RNA, 20 nt, Artificial Sequence
  LRRK2 RNA guide
gcugagguaauaccaggagc

SEQ ID NO: 86633 - RNA, 20 nt, Artificial Sequence
  LRRK2 RNA guide
gguauuaccucagcuguggc

SEQ ID NO: 86634 - RNA, 20 nt, Artificial Sequence
  LRRK2 RNA guide
guauuaccucagcuguggcu

SEQ ID NO: 86635 - RNA, 20 nt, Artificial Sequence
  LRRK2 RNA guide
uaaagagauagagccacagc

SEQ ID NO: 86636 - RNA, 20 nt, Artificial Sequence
  LRRK2 RNA guide
uaccucagcuguggcucuau

SEQ ID NO: 86637 - RNA, 20 nt, Artificial Sequence
  LRRK2 RNA guide
uagagccacagcugagguaa

SEQ ID NO: 86638 - RNA, 20 nt, Artificial Sequence
  LRRK2 RNA guide
uauuaccucagcuguggcuc

SEQ ID NO: 86639 - RNA, 20 nt, Artificial Sequence
  LRRK2 RNA guide
ucagcuguggcucuaucucu

SEQ ID NO: 86640 - RNA, 20 nt, Artificial Sequence
  LRRK2 RNA guide
uccugguauuaccucagcug

SEQ ID NO: 86641 - RNA, 20 nt, Artificial Sequence
  LRRK2 RNA guide
ugcuccugguauuaccucag

SEQ ID NO: 86642 - RNA, 20 nt, Artificial Sequence
  LRRK2 RNA guide
ugguauuaccucagcugugg

SEQ ID NO: 86643 - RNA, 20 nt, Artificial Sequence
  LRRK2 RNA guide
uuaccucagcuguggcucua

SEQ ID NO: 86644 - RNA, 21 nt, Artificial Sequence
  LRRK2 RNA guide
aaagagauagagccacagcug

SEQ ID NO: 86645 - RNA, 21 nt, Artificial Sequence
  LRRK2 RNA guide
aagagauagagccacagcuga

SEQ ID NO: 86646 - RNA, 21 nt, Artificial Sequence
  LRRK2 RNA guide
acagcugagguaauaccagga

SEQ ID NO: 86647 - RNA, 21 nt, Artificial Sequence
  LRRK2 RNA guide
accucagcuguggcucuaucu

SEQ ID NO: 86648 - RNA, 21 nt, Artificial Sequence
  LRRK2 RNA guide
agagauagagccacagcugag

SEQ ID NO: 86649 - RNA, 21 nt, Artificial Sequence
  LRRK2 RNA guide
agagccacagcugagguaaua

SEQ ID NO: 86650 - RNA, 21 nt, Artificial Sequence
  LRRK2 RNA guide
agauagagccacagcugaggu

SEQ ID NO: 86651 - RNA, 21 nt, Artificial Sequence
  LRRK2 RNA guide
agccacagcugagguaauacc

SEQ ID NO: 86652 - RNA, 21 nt, Artificial Sequence
  LRRK2 RNA guide
agcugagguaauaccaggagc

SEQ ID NO: 86653 - RNA, 21 nt, Artificial Sequence
  LRRK2 RNA guide
agcuguggcucuaucucuuua

SEQ ID NO: 86654 - RNA, 21 nt, Artificial Sequence
  LRRK2 RNA guide
auagagccacagcugagguaa

SEQ ID NO: 86655 - RNA, 21 nt, Artificial Sequence
  LRRK2 RNA guide
auuaccucagcuguggcucua

SEQ ID NO: 86656 - RNA, 21 nt, Artificial Sequence
  LRRK2 RNA guide
cacagcugagguaauaccagg

SEQ ID NO: 86657 - RNA, 21 nt, Artificial Sequence
  LRRK2 RNA guide
cagcugagguaauaccaggag

SEQ ID NO: 86658 - RNA, 21 nt, Artificial Sequence
  LRRK2 RNA guide
cagcuguggcucuaucucuuu

SEQ ID NO: 86659 - RNA, 21 nt, Artificial Sequence
  LRRK2 RNA guide
ccacagcugagguaauaccag

SEQ ID NO: 86660 - RNA, 21 nt, Artificial Sequence
  LRRK2 RNA guide
ccucagcuguggcucuaucuc

SEQ ID NO: 86661 - RNA, 21 nt, Artificial Sequence
  LRRK2 RNA guide
ccugguauuaccucagcugug

SEQ ID NO: 86662 - RNA, 21 nt, Artificial Sequence
  LRRK2 RNA guide
cucagcuguggcucuaucucu

SEQ ID NO: 86663 - RNA, 21 nt, Artificial Sequence
  LRRK2 RNA guide
cuccugguauuaccucagcug

SEQ ID NO: 86664 - RNA, 21 nt, Artificial Sequence
  LRRK2 RNA guide
cugcuccugguauuaccucag

SEQ ID NO: 86665 - RNA, 21 nt, Artificial Sequence
  LRRK2 RNA guide
cugguauuaccucagcugugg

SEQ ID NO: 86666 - RNA, 21 nt, Artificial Sequence
  LRRK2 RNA guide
gagauagagccacagcugagg

SEQ ID NO: 86667 - RNA, 21 nt, Artificial Sequence
  LRRK2 RNA guide
gagccacagcugagguaauac

SEQ ID NO: 86668 - RNA, 21 nt, Artificial Sequence
  LRRK2 RNA guide
gauagagccacagcugaggua

SEQ ID NO: 86669 - RNA, 21 nt, Artificial Sequence
  LRRK2 RNA guide
gccacagcugagguaauacca

SEQ ID NO: 86670 - RNA, 21 nt, Artificial Sequence
  LRRK2 RNA guide
gcuccugguauuaccucagcu

SEQ ID NO: 86671 - RNA, 21 nt, Artificial Sequence
  LRRK2 RNA guide
gcugagguaauaccaggagca

SEQ ID NO: 86672 - RNA, 21 nt, Artificial Sequence
  LRRK2 RNA guide
gguauuaccucagcuguggcu

SEQ ID NO: 86673 - RNA, 21 nt, Artificial Sequence
  LRRK2 RNA guide
guaaagagauagagccacagc

SEQ ID NO: 86674 - RNA, 21 nt, Artificial Sequence
  LRRK2 RNA guide
guauuaccucagcuguggcuc

SEQ ID NO: 86675 - RNA, 21 nt, Artificial Sequence
  LRRK2 RNA guide
uaaagagauagagccacagcu

SEQ ID NO: 86676 - RNA, 21 nt, Artificial Sequence
  LRRK2 RNA guide
uaccucagcuguggcucuauc

SEQ ID NO: 86677 - RNA, 21 nt, Artificial Sequence
  LRRK2 RNA guide
uagagccacagcugagguaau

SEQ ID NO: 86678 - RNA, 21 nt, Artificial Sequence
  LRRK2 RNA guide
uauuaccucagcuguggcucu

SEQ ID NO: 86679 - RNA, 21 nt, Artificial Sequence
  LRRK2 RNA guide
ucagcuguggcucuaucucuu

SEQ ID NO: 86680 - RNA, 21 nt, Artificial Sequence
  LRRK2 RNA guide
uccugguauuaccucagcugu

SEQ ID NO: 86681 - RNA, 21 nt, Artificial Sequence
  LRRK2 RNA guide
ugcuccugguauuaccucagc

SEQ ID NO: 86682 - RNA, 21 nt, Artificial Sequence
  LRRK2 RNA guide
ugguauuaccucagcuguggc

SEQ ID NO: 86683 - RNA, 21 nt, Artificial Sequence
  LRRK2 RNA guide
uuaccucagcuguggcucuau

SEQ ID NO: 86684 - RNA, 22 nt, Artificial Sequence
  LRRK2 RNA guide
aaagagauagagccacagcuga

SEQ ID NO: 86685 - RNA, 22 nt, Artificial Sequence
  LRRK2 RNA guide
aagagauagagccacagcugag

SEQ ID NO: 86686 - RNA, 22 nt, Artificial Sequence
  LRRK2 RNA guide
acagcugagguaauaccaggag

SEQ ID NO: 86687 - RNA, 22 nt, Artificial Sequence
  LRRK2 RNA guide
accucagcuguggcucuaucuc

SEQ ID NO: 86688 - RNA, 22 nt, Artificial Sequence
  LRRK2 RNA guide
agagauagagccacagcugagg

SEQ ID NO: 86689 - RNA, 22 nt, Artificial Sequence
  LRRK2 RNA guide
agagccacagcugagguaauac

SEQ ID NO: 86690 - RNA, 22 nt, Artificial Sequence
  LRRK2 RNA guide
agauagagccacagcugaggua

SEQ ID NO: 86691 - RNA, 22 nt, Artificial Sequence
  LRRK2 RNA guide
agccacagcugagguaauacca

SEQ ID NO: 86692 - RNA, 22 nt, Artificial Sequence
  LRRK2 RNA guide
agcugagguaauaccaggagca

SEQ ID NO: 86693 - RNA, 22 nt, Artificial Sequence
  LRRK2 RNA guide
agcuguggcucuaucucuuuac

SEQ ID NO: 86694 - RNA, 22 nt, Artificial Sequence
  LRRK2 RNA guide
aguaaagagauagagccacagc

SEQ ID NO: 86695 - RNA, 22 nt, Artificial Sequence
  LRRK2 RNA guide
auagagccacagcugagguaau

SEQ ID NO: 86696 - RNA, 22 nt, Artificial Sequence
  LRRK2 RNA guide
auuaccucagcuguggcucuau

SEQ ID NO: 86697 - RNA, 22 nt, Artificial Sequence
  LRRK2 RNA guide
cacagcugagguaauaccagga

SEQ ID NO: 86698 - RNA, 22 nt, Artificial Sequence
  LRRK2 RNA guide
cagcugagguaauaccaggagc

SEQ ID NO: 86699 - RNA, 22 nt, Artificial Sequence
  LRRK2 RNA guide
cagcuguggcucuaucucuuua

SEQ ID NO: 86700 - RNA, 22 nt, Artificial Sequence
  LRRK2 RNA guide
ccacagcugagguaauaccagg

SEQ ID NO: 86701 - RNA, 22 nt, Artificial Sequence
  LRRK2 RNA guide
ccucagcuguggcucuaucucu

SEQ ID NO: 86702 - RNA, 22 nt, Artificial Sequence
  LRRK2 RNA guide
ccugcuccugguauuaccucag

SEQ ID NO: 86703 - RNA, 22 nt, Artificial Sequence
  LRRK2 RNA guide
ccugguauuaccucagcugugg

SEQ ID NO: 86704 - RNA, 22 nt, Artificial Sequence
  LRRK2 RNA guide
cucagcuguggcucuaucucuu

SEQ ID NO: 86705 - RNA, 22 nt, Artificial Sequence
  LRRK2 RNA guide
cuccugguauuaccucagcugu

SEQ ID NO: 86706 - RNA, 22 nt, Artificial Sequence
  LRRK2 RNA guide
cugcuccugguauuaccucagc

SEQ ID NO: 86707 - RNA, 22 nt, Artificial Sequence
  LRRK2 RNA guide
cugguauuaccucagcuguggc

SEQ ID NO: 86708 - RNA, 22 nt, Artificial Sequence
  LRRK2 RNA guide
gagauagagccacagcugaggu

SEQ ID NO: 86709 - RNA, 22 nt, Artificial Sequence
  LRRK2 RNA guide
gagccacagcugagguaauacc

SEQ ID NO: 86710 - RNA, 22 nt, Artificial Sequence
  LRRK2 RNA guide
gauagagccacagcugagguaa

SEQ ID NO: 86711 - RNA, 22 nt, Artificial Sequence
  LRRK2 RNA guide
gccacagcugagguaauaccag

SEQ ID NO: 86712 - RNA, 22 nt, Artificial Sequence
  LRRK2 RNA guide
gcuccugguauuaccucagcug

SEQ ID NO: 86713 - RNA, 22 nt, Artificial Sequence
  LRRK2 RNA guide
gcugagguaauaccaggagcag

SEQ ID NO: 86714 - RNA, 22 nt, Artificial Sequence
  LRRK2 RNA guide
gguauuaccucagcuguggcuc

SEQ ID NO: 86715 - RNA, 22 nt, Artificial Sequence
  LRRK2 RNA guide
guaaagagauagagccacagcu

SEQ ID NO: 86716 - RNA, 22 nt, Artificial Sequence
  LRRK2 RNA guide
guauuaccucagcuguggcucu

SEQ ID NO: 86717 - RNA, 22 nt, Artificial Sequence
  LRRK2 RNA guide
uaaagagauagagccacagcug

SEQ ID NO: 86718 - RNA, 22 nt, Artificial Sequence
  LRRK2 RNA guide
uaccucagcuguggcucuaucu

SEQ ID NO: 86719 - RNA, 22 nt, Artificial Sequence
  LRRK2 RNA guide
uagagccacagcugagguaaua

SEQ ID NO: 86720 - RNA, 22 nt, Artificial Sequence
  LRRK2 RNA guide
uauuaccucagcuguggcucua

SEQ ID NO: 86721 - RNA, 22 nt, Artificial Sequence
  LRRK2 RNA guide
ucagcuguggcucuaucucuuu

SEQ ID NO: 86722 - RNA, 22 nt, Artificial Sequence
  LRRK2 RNA guide
uccugguauuaccucagcugug

SEQ ID NO: 86723 - RNA, 22 nt, Artificial Sequence
  LRRK2 RNA guide
ugcuccugguauuaccucagcu

SEQ ID NO: 86724 - RNA, 22 nt, Artificial Sequence
  LRRK2 RNA guide
ugguauuaccucagcuguggcu

SEQ ID NO: 86725 - RNA, 22 nt, Artificial Sequence
  LRRK2 RNA guide
uuaccucagcuguggcucuauc

SEQ ID NO: 86726 - RNA, 20 nt, Artificial Sequence
  LRRK2 RNA guide
cucauucauucauucuuuga

SEQ ID NO: 86727 - RNA, 20 nt, Artificial Sequence
  LRRK2 RNA guide
ucucauucauucauucuuug

SEQ ID NO: 86728 - RNA, 20 nt, Artificial Sequence
  LRRK2 RNA guide
aagccuggcacacaaugggu

SEQ ID NO: 86729 - RNA, 20 nt, Artificial Sequence
  LRRK2 RNA guide
acacaauggguuucauauau

SEQ ID NO: 86730 - RNA, 20 nt, Artificial Sequence
  LRRK2 RNA guide
agccuggcacacaauggguu

SEQ ID NO: 86731 - RNA, 20 nt, Artificial Sequence
  LRRK2 RNA guide
auauaugaaacccauugugu

SEQ ID NO: 86732 - RNA, 20 nt, Artificial Sequence
  LRRK2 RNA guide
auaugaaacccauugugugc

SEQ ID NO: 86733 - RNA, 20 nt, Artificial Sequence
  LRRK2 RNA guide
cacaauggguuucauauaua

SEQ ID NO: 86734 - RNA, 20 nt, Artificial Sequence
  LRRK2 RNA guide
cacacaauggguuucauaua

SEQ ID NO: 86735 - RNA, 20 nt, Artificial Sequence
  LRRK2 RNA guide
ccuggcacacaauggguuuc

SEQ ID NO: 86736 - RNA, 20 nt, Artificial Sequence
  LRRK2 RNA guide
cuggcacacaauggguuuca

SEQ ID NO: 86737 - RNA, 20 nt, Artificial Sequence
  LRRK2 RNA guide
gcacacaauggguuucauau

SEQ ID NO: 86738 - RNA, 20 nt, Artificial Sequence
  LRRK2 RNA guide
gccuggcacacaauggguuu

SEQ ID NO: 86739 - RNA, 20 nt, Artificial Sequence
  LRRK2 RNA guide
ggcacacaauggguuucaua

SEQ ID NO: 86740 - RNA, 20 nt, Artificial Sequence
  LRRK2 RNA guide
uauauaugaaacccauugug

SEQ ID NO: 86741 - RNA, 20 nt, Artificial Sequence
  LRRK2 RNA guide
uauaugaaacccauugugug

SEQ ID NO: 86742 - RNA, 20 nt, Artificial Sequence
  LRRK2 RNA guide
uaugaaacccauugugugcc

SEQ ID NO: 86743 - RNA, 20 nt, Artificial Sequence
  LRRK2 RNA guide
uggcacacaauggguuucau

SEQ ID NO: 86744 - RNA, 21 nt, Artificial Sequence
  LRRK2 RNA guide
aagccuggcacacaauggguu

SEQ ID NO: 86745 - RNA, 21 nt, Artificial Sequence
  LRRK2 RNA guide
agccuggcacacaauggguuu

SEQ ID NO: 86746 - RNA, 21 nt, Artificial Sequence
  LRRK2 RNA guide
auauaugaaacccauugugug

SEQ ID NO: 86747 - RNA, 21 nt, Artificial Sequence
  LRRK2 RNA guide
auaugaaacccauugugugcc

SEQ ID NO: 86748 - RNA, 21 nt, Artificial Sequence
  LRRK2 RNA guide
cacacaauggguuucauauau

SEQ ID NO: 86749 - RNA, 21 nt, Artificial Sequence
  LRRK2 RNA guide
ccuggcacacaauggguuuca

SEQ ID NO: 86750 - RNA, 21 nt, Artificial Sequence
  LRRK2 RNA guide
cuggcacacaauggguuucau

SEQ ID NO: 86751 - RNA, 21 nt, Artificial Sequence
  LRRK2 RNA guide
gcacacaauggguuucauaua

SEQ ID NO: 86752 - RNA, 21 nt, Artificial Sequence
  LRRK2 RNA guide
gccuggcacacaauggguuuc

SEQ ID NO: 86753 - RNA, 21 nt, Artificial Sequence
  LRRK2 RNA guide
ggcacacaauggguuucauau

SEQ ID NO: 86754 - RNA, 21 nt, Artificial Sequence
  LRRK2 RNA guide
uaagccuggcacacaaugggu

SEQ ID NO: 86755 - RNA, 21 nt, Artificial Sequence
  LRRK2 RNA guide
uauaugaaacccauugugugc

SEQ ID NO: 86756 - RNA, 21 nt, Artificial Sequence
  LRRK2 RNA guide
uaugaaacccauugugugcca

SEQ ID NO: 86757 - RNA, 21 nt, Artificial Sequence
  LRRK2 RNA guide
uggcacacaauggguuucaua

SEQ ID NO: 86758 - RNA, 22 nt, Artificial Sequence
  LRRK2 RNA guide
aagccuggcacacaauggguuu

SEQ ID NO: 86759 - RNA, 22 nt, Artificial Sequence
  LRRK2 RNA guide
agccuggcacacaauggguuuc

SEQ ID NO: 86760 - RNA, 22 nt, Artificial Sequence
  LRRK2 RNA guide
auauaugaaacccauugugugc

SEQ ID NO: 86761 - RNA, 22 nt, Artificial Sequence
  LRRK2 RNA guide
auaugaaacccauugugugcca

SEQ ID NO: 86762 - RNA, 22 nt, Artificial Sequence
  LRRK2 RNA guide
cacacaauggguuucauauaua

SEQ ID NO: 86763 - RNA, 22 nt, Artificial Sequence
  LRRK2 RNA guide
ccuggcacacaauggguuucau

SEQ ID NO: 86764 - RNA, 22 nt, Artificial Sequence
  LRRK2 RNA guide
cuggcacacaauggguuucaua

SEQ ID NO: 86765 - RNA, 22 nt, Artificial Sequence
  LRRK2 RNA guide
gcacacaauggguuucauauau

SEQ ID NO: 86766 - RNA, 22 nt, Artificial Sequence
  LRRK2 RNA guide
gccuggcacacaauggguuuca

SEQ ID NO: 86767 - RNA, 22 nt, Artificial Sequence
  LRRK2 RNA guide
ggcacacaauggguuucauaua

SEQ ID NO: 86768 - RNA, 22 nt, Artificial Sequence
  LRRK2 RNA guide
uaagccuggcacacaauggguu

SEQ ID NO: 86769 - RNA, 22 nt, Artificial Sequence
  LRRK2 RNA guide
uauauaugaaacccauugugug

SEQ ID NO: 86770 - RNA, 22 nt, Artificial Sequence
  LRRK2 RNA guide
uauaugaaacccauugugugcc

SEQ ID NO: 86771 - RNA, 22 nt, Artificial Sequence
  LRRK2 RNA guide
uaugaaacccauugugugccag

SEQ ID NO: 86772 - RNA, 22 nt, Artificial Sequence
  LRRK2 RNA guide
uggcacacaauggguuucauau

SEQ ID NO: 86773 - RNA, 22 nt, Artificial Sequence
  LRRK2 RNA guide
uuaagccuggcacacaaugggu

SEQ ID NO: 86774 - RNA, 20 nt, Artificial Sequence
  LRRK2 RNA guide
acaauggguuucagauauau

SEQ ID NO: 86775 - RNA, 20 nt, Artificial Sequence
  LRRK2 RNA guide
acacaauggguuucagauau

SEQ ID NO: 86776 - RNA, 20 nt, Artificial Sequence
  LRRK2 RNA guide
auauaucugaaacccauugu

SEQ ID NO: 86777 - RNA, 20 nt, Artificial Sequence
  LRRK2 RNA guide
auaucugaaacccauugugu

SEQ ID NO: 86778 - RNA, 20 nt, Artificial Sequence
  LRRK2 RNA guide
aucugaaacccauugugugc

SEQ ID NO: 86779 - RNA, 20 nt, Artificial Sequence
  LRRK2 RNA guide
caauggguuucagauauaua

SEQ ID NO: 86780 - RNA, 20 nt, Artificial Sequence
  LRRK2 RNA guide
cacaauggguuucagauaua

SEQ ID NO: 86781 - RNA, 20 nt, Artificial Sequence
  LRRK2 RNA guide
cacacaauggguuucagaua

SEQ ID NO: 86782 - RNA, 20 nt, Artificial Sequence
  LRRK2 RNA guide
gcacacaauggguuucagau

SEQ ID NO: 86783 - RNA, 20 nt, Artificial Sequence
  LRRK2 RNA guide
ggcacacaauggguuucaga

SEQ ID NO: 86784 - RNA, 20 nt, Artificial Sequence
  LRRK2 RNA guide
uauauaucugaaacccauug

SEQ ID NO: 86785 - RNA, 20 nt, Artificial Sequence
  LRRK2 RNA guide
uauaucugaaacccauugug

SEQ ID NO: 86786 - RNA, 20 nt, Artificial Sequence
  LRRK2 RNA guide
uaucugaaacccauugugug

SEQ ID NO: 86787 - RNA, 20 nt, Artificial Sequence
  LRRK2 RNA guide
ucugaaacccauugugugcc

SEQ ID NO: 86788 - RNA, 20 nt, Artificial Sequence
  LRRK2 RNA guide
uggcacacaauggguuucag

SEQ ID NO: 86789 - RNA, 21 nt, Artificial Sequence
  LRRK2 RNA guide
acacaauggguuucagauaua

SEQ ID NO: 86790 - RNA, 21 nt, Artificial Sequence
  LRRK2 RNA guide
auauaucugaaacccauugug

SEQ ID NO: 86791 - RNA, 21 nt, Artificial Sequence
  LRRK2 RNA guide
auaucugaaacccauugugug

SEQ ID NO: 86792 - RNA, 21 nt, Artificial Sequence
  LRRK2 RNA guide
aucugaaacccauugugugcc

SEQ ID NO: 86793 - RNA, 21 nt, Artificial Sequence
  LRRK2 RNA guide
cacaauggguuucagauauau

SEQ ID NO: 86794 - RNA, 21 nt, Artificial Sequence
  LRRK2 RNA guide
cacacaauggguuucagauau

SEQ ID NO: 86795 - RNA, 21 nt, Artificial Sequence
  LRRK2 RNA guide
cuggcacacaauggguuucag

SEQ ID NO: 86796 - RNA, 21 nt, Artificial Sequence
  LRRK2 RNA guide
gcacacaauggguuucagaua

SEQ ID NO: 86797 - RNA, 21 nt, Artificial Sequence
  LRRK2 RNA guide
ggcacacaauggguuucagau

SEQ ID NO: 86798 - RNA, 21 nt, Artificial Sequence
  LRRK2 RNA guide
uauaucugaaacccauugugu

SEQ ID NO: 86799 - RNA, 21 nt, Artificial Sequence
  LRRK2 RNA guide
uaucugaaacccauugugugc

SEQ ID NO: 86800 - RNA, 21 nt, Artificial Sequence
  LRRK2 RNA guide
ucugaaacccauugugugcca

SEQ ID NO: 86801 - RNA, 21 nt, Artificial Sequence
  LRRK2 RNA guide
uggcacacaauggguuucaga

SEQ ID NO: 86802 - RNA, 22 nt, Artificial Sequence
  LRRK2 RNA guide
acacaauggguuucagauauau

SEQ ID NO: 86803 - RNA, 22 nt, Artificial Sequence
  LRRK2 RNA guide
auauaucugaaacccauugugu

SEQ ID NO: 86804 - RNA, 22 nt, Artificial Sequence
  LRRK2 RNA guide
auaucugaaacccauugugugc

SEQ ID NO: 86805 - RNA, 22 nt, Artificial Sequence
  LRRK2 RNA guide
aucugaaacccauugugugcca

SEQ ID NO: 86806 - RNA, 22 nt, Artificial Sequence
  LRRK2 RNA guide
cacaauggguuucagauauaua

SEQ ID NO: 86807 - RNA, 22 nt, Artificial Sequence
  LRRK2 RNA guide
cacacaauggguuucagauaua

SEQ ID NO: 86808 - RNA, 22 nt, Artificial Sequence
  LRRK2 RNA guide
ccuggcacacaauggguuucag

SEQ ID NO: 86809 - RNA, 22 nt, Artificial Sequence
  LRRK2 RNA guide
cuggcacacaauggguuucaga

SEQ ID NO: 86810 - RNA, 22 nt, Artificial Sequence
  LRRK2 RNA guide
gcacacaauggguuucagauau

SEQ ID NO: 86811 - RNA, 22 nt, Artificial Sequence
  LRRK2 RNA guide
ggcacacaauggguuucagaua

SEQ ID NO: 86812 - RNA, 22 nt, Artificial Sequence
  LRRK2 RNA guide
uauauaucugaaacccauugug

SEQ ID NO: 86813 - RNA, 22 nt, Artificial Sequence
  LRRK2 RNA guide
uauaucugaaacccauugugug

SEQ ID NO: 86814 - RNA, 22 nt, Artificial Sequence
  LRRK2 RNA guide
uaucugaaacccauugugugcc

SEQ ID NO: 86815 - RNA, 22 nt, Artificial Sequence
  LRRK2 RNA guide
ucugaaacccauugugugccag

SEQ ID NO: 86816 - RNA, 22 nt, Artificial Sequence
  LRRK2 RNA guide
uggcacacaauggguuucagau

SEQ ID NO: 86817 - RNA, 20 nt, Artificial Sequence
  LRRK2 RNA guide
aaaaggugggagaguuuuaa

SEQ ID NO: 86818 - RNA, 20 nt, Artificial Sequence
  LRRK2 RNA guide
aaaggugggagaguuuuaag

SEQ ID NO: 86819 - RNA, 20 nt, Artificial Sequence
  LRRK2 RNA guide
aagcgcaggggugagcuaau

SEQ ID NO: 86820 - RNA, 20 nt, Artificial Sequence
  LRRK2 RNA guide
aaggugggagaguuuuaagc

SEQ ID NO: 86821 - RNA, 20 nt, Artificial Sequence
  LRRK2 RNA guide
acaaaaggugggagaguuuu

SEQ ID NO: 86822 - RNA, 20 nt, Artificial Sequence
  LRRK2 RNA guide
accccugcgcuuaaaacucu

SEQ ID NO: 86823 - RNA, 20 nt, Artificial Sequence
  LRRK2 RNA guide
acguuuccauuagcucaccc

SEQ ID NO: 86824 - RNA, 20 nt, Artificial Sequence
  LRRK2 RNA guide
agaguuuuaagcgcaggggu

SEQ ID NO: 86825 - RNA, 20 nt, Artificial Sequence
  LRRK2 RNA guide
agcgcaggggugagcuaaug

SEQ ID NO: 86826 - RNA, 20 nt, Artificial Sequence
  LRRK2 RNA guide
agcucaccccugcgcuuaaa

SEQ ID NO: 86827 - RNA, 20 nt, Artificial Sequence
  LRRK2 RNA guide
aggugggagaguuuuaagcg

SEQ ID NO: 86828 - RNA, 20 nt, Artificial Sequence
  LRRK2 RNA guide
aguuuuaagcgcagggguga

SEQ ID NO: 86829 - RNA, 20 nt, Artificial Sequence
  LRRK2 RNA guide
auuagcucaccccugcgcuu

SEQ ID NO: 86830 - RNA, 20 nt, Artificial Sequence
  LRRK2 RNA guide
caaaaggugggagaguuuua

SEQ ID NO: 86831 - RNA, 20 nt, Artificial Sequence
  LRRK2 RNA guide
caccccugcgcuuaaaacuc

SEQ ID NO: 86832 - RNA, 20 nt, Artificial Sequence
  LRRK2 RNA guide
cauuagcucaccccugcgcu

SEQ ID NO: 86833 - RNA, 20 nt, Artificial Sequence
  LRRK2 RNA guide
ccauuagcucaccccugcgc

SEQ ID NO: 86834 - RNA, 20 nt, Artificial Sequence
  LRRK2 RNA guide
ccccugcgcuuaaaacucuc

SEQ ID NO: 86835 - RNA, 20 nt, Artificial Sequence
  LRRK2 RNA guide
cccugcgcuuaaaacucucc

SEQ ID NO: 86836 - RNA, 20 nt, Artificial Sequence
  LRRK2 RNA guide
ccugcgcuuaaaacucuccc

SEQ ID NO: 86837 - RNA, 20 nt, Artificial Sequence
  LRRK2 RNA guide
cgcaggggugagcuaaugga

SEQ ID NO: 86838 - RNA, 20 nt, Artificial Sequence
  LRRK2 RNA guide
cguuuccauuagcucacccc

SEQ ID NO: 86839 - RNA, 20 nt, Artificial Sequence
  LRRK2 RNA guide
cucaccccugcgcuuaaaac

SEQ ID NO: 86840 - RNA, 20 nt, Artificial Sequence
  LRRK2 RNA guide
cugcgcuuaaaacucuccca

SEQ ID NO: 86841 - RNA, 20 nt, Artificial Sequence
  LRRK2 RNA guide
gagaguuuuaagcgcagggg

SEQ ID NO: 86842 - RNA, 20 nt, Artificial Sequence
  LRRK2 RNA guide
gaguuuuaagcgcaggggug

SEQ ID NO: 86843 - RNA, 20 nt, Artificial Sequence
  LRRK2 RNA guide
gcgcaggggugagcuaaugg

SEQ ID NO: 86844 - RNA, 20 nt, Artificial Sequence
  LRRK2 RNA guide
gcgcuuaaaacucucccacc

SEQ ID NO: 86845 - RNA, 20 nt, Artificial Sequence
  LRRK2 RNA guide
gcucaccccugcgcuuaaaa

SEQ ID NO: 86846 - RNA, 20 nt, Artificial Sequence
  LRRK2 RNA guide
ggagaguuuuaagcgcaggg

SEQ ID NO: 86847 - RNA, 20 nt, Artificial Sequence
  LRRK2 RNA guide
gggagaguuuuaagcgcagg

SEQ ID NO: 86848 - RNA, 20 nt, Artificial Sequence
  LRRK2 RNA guide
ggugggagaguuuuaagcgc

SEQ ID NO: 86849 - RNA, 20 nt, Artificial Sequence
  LRRK2 RNA guide
gugggagaguuuuaagcgca

SEQ ID NO: 86850 - RNA, 20 nt, Artificial Sequence
  LRRK2 RNA guide
guuuccauuagcucaccccu

SEQ ID NO: 86851 - RNA, 20 nt, Artificial Sequence
  LRRK2 RNA guide
guuuuaagcgcaggggugag

SEQ ID NO: 86852 - RNA, 20 nt, Artificial Sequence
  LRRK2 RNA guide
uaagcgcaggggugagcuaa

SEQ ID NO: 86853 - RNA, 20 nt, Artificial Sequence
  LRRK2 RNA guide
uacguuuccauuagcucacc

SEQ ID NO: 86854 - RNA, 20 nt, Artificial Sequence
  LRRK2 RNA guide
uagcucaccccugcgcuuaa

SEQ ID NO: 86855 - RNA, 20 nt, Artificial Sequence
  LRRK2 RNA guide
ucaccccugcgcuuaaaacu

SEQ ID NO: 86856 - RNA, 20 nt, Artificial Sequence
  LRRK2 RNA guide
uccauuagcucaccccugcg

SEQ ID NO: 86857 - RNA, 20 nt, Artificial Sequence
  LRRK2 RNA guide
ugcgcuuaaaacucucccac

SEQ ID NO: 86858 - RNA, 20 nt, Artificial Sequence
  LRRK2 RNA guide
ugggagaguuuuaagcgcag

SEQ ID NO: 86859 - RNA, 20 nt, Artificial Sequence
  LRRK2 RNA guide
uuaagcgcaggggugagcua

SEQ ID NO: 86860 - RNA, 20 nt, Artificial Sequence
  LRRK2 RNA guide
uuagcucaccccugcgcuua

SEQ ID NO: 86861 - RNA, 20 nt, Artificial Sequence
  LRRK2 RNA guide
uuccauuagcucaccccugc

SEQ ID NO: 86862 - RNA, 20 nt, Artificial Sequence
  LRRK2 RNA guide
uuuaagcgcaggggugagcu

SEQ ID NO: 86863 - RNA, 20 nt, Artificial Sequence
  LRRK2 RNA guide
uuuccauuagcucaccccug

SEQ ID NO: 86864 - RNA, 20 nt, Artificial Sequence
  LRRK2 RNA guide
uuuuaagcgcaggggugagc

SEQ ID NO: 86865 - RNA, 21 nt, Artificial Sequence
  LRRK2 RNA guide
aaaaggugggagaguuuuaag

SEQ ID NO: 86866 - RNA, 21 nt, Artificial Sequence
  LRRK2 RNA guide
aaaggugggagaguuuuaagc

SEQ ID NO: 86867 - RNA, 21 nt, Artificial Sequence
  LRRK2 RNA guide
aacaaaaggugggagaguuuu

SEQ ID NO: 86868 - RNA, 21 nt, Artificial Sequence
  LRRK2 RNA guide
aagcgcaggggugagcuaaug

SEQ ID NO: 86869 - RNA, 21 nt, Artificial Sequence
  LRRK2 RNA guide
aaggugggagaguuuuaagcg

SEQ ID NO: 86870 - RNA, 21 nt, Artificial Sequence
  LRRK2 RNA guide
acaaaaggugggagaguuuua

SEQ ID NO: 86871 - RNA, 21 nt, Artificial Sequence
  LRRK2 RNA guide
accccugcgcuuaaaacucuc

SEQ ID NO: 86872 - RNA, 21 nt, Artificial Sequence
  LRRK2 RNA guide
acguuuccauuagcucacccc

SEQ ID NO: 86873 - RNA, 21 nt, Artificial Sequence
  LRRK2 RNA guide
agaguuuuaagcgcaggggug

SEQ ID NO: 86874 - RNA, 21 nt, Artificial Sequence
  LRRK2 RNA guide
agcgcaggggugagcuaaugg

SEQ ID NO: 86875 - RNA, 21 nt, Artificial Sequence
  LRRK2 RNA guide
agcucaccccugcgcuuaaaa

SEQ ID NO: 86876 - RNA, 21 nt, Artificial Sequence
  LRRK2 RNA guide
aggugggagaguuuuaagcgc

SEQ ID NO: 86877 - RNA, 21 nt, Artificial Sequence
  LRRK2 RNA guide
aguuuuaagcgcaggggugag

SEQ ID NO: 86878 - RNA, 21 nt, Artificial Sequence
  LRRK2 RNA guide
auuagcucaccccugcgcuua

SEQ ID NO: 86879 - RNA, 21 nt, Artificial Sequence
  LRRK2 RNA guide
caaaaggugggagaguuuuaa

SEQ ID NO: 86880 - RNA, 21 nt, Artificial Sequence
  LRRK2 RNA guide
caccccugcgcuuaaaacucu

SEQ ID NO: 86881 - RNA, 21 nt, Artificial Sequence
  LRRK2 RNA guide
cauuagcucaccccugcgcuu

SEQ ID NO: 86882 - RNA, 21 nt, Artificial Sequence
  LRRK2 RNA guide
ccauuagcucaccccugcgcu

SEQ ID NO: 86883 - RNA, 21 nt, Artificial Sequence
  LRRK2 RNA guide
ccccugcgcuuaaaacucucc

SEQ ID NO: 86884 - RNA, 21 nt, Artificial Sequence
  LRRK2 RNA guide
cccugcgcuuaaaacucuccc

SEQ ID NO: 86885 - RNA, 21 nt, Artificial Sequence
  LRRK2 RNA guide
ccugcgcuuaaaacucuccca

SEQ ID NO: 86886 - RNA, 21 nt, Artificial Sequence
  LRRK2 RNA guide
cgcaggggugagcuaauggaa

SEQ ID NO: 86887 - RNA, 21 nt, Artificial Sequence
  LRRK2 RNA guide
cguuuccauuagcucaccccu

SEQ ID NO: 86888 - RNA, 21 nt, Artificial Sequence
  LRRK2 RNA guide
cucaccccugcgcuuaaaacu

SEQ ID NO: 86889 - RNA, 21 nt, Artificial Sequence
  LRRK2 RNA guide
cugcgcuuaaaacucucccac

SEQ ID NO: 86890 - RNA, 21 nt, Artificial Sequence
  LRRK2 RNA guide
gagaguuuuaagcgcaggggu

SEQ ID NO: 86891 - RNA, 21 nt, Artificial Sequence
  LRRK2 RNA guide
gaguuuuaagcgcagggguga

SEQ ID NO: 86892 - RNA, 21 nt, Artificial Sequence
  LRRK2 RNA guide
gcgcaggggugagcuaaugga

SEQ ID NO: 86893 - RNA, 21 nt, Artificial Sequence
  LRRK2 RNA guide
gcgcuuaaaacucucccaccu

SEQ ID NO: 86894 - RNA, 21 nt, Artificial Sequence
  LRRK2 RNA guide
gcucaccccugcgcuuaaaac

SEQ ID NO: 86895 - RNA, 21 nt, Artificial Sequence
  LRRK2 RNA guide
ggagaguuuuaagcgcagggg

SEQ ID NO: 86896 - RNA, 21 nt, Artificial Sequence
  LRRK2 RNA guide
gggagaguuuuaagcgcaggg

SEQ ID NO: 86897 - RNA, 21 nt, Artificial Sequence
  LRRK2 RNA guide
ggugggagaguuuuaagcgca

SEQ ID NO: 86898 - RNA, 21 nt, Artificial Sequence
  LRRK2 RNA guide
guacguuuccauuagcucacc

SEQ ID NO: 86899 - RNA, 21 nt, Artificial Sequence
  LRRK2 RNA guide
gugggagaguuuuaagcgcag

SEQ ID NO: 86900 - RNA, 21 nt, Artificial Sequence
  LRRK2 RNA guide
guuuccauuagcucaccccug

SEQ ID NO: 86901 - RNA, 21 nt, Artificial Sequence
  LRRK2 RNA guide
guuuuaagcgcaggggugagc

SEQ ID NO: 86902 - RNA, 21 nt, Artificial Sequence
  LRRK2 RNA guide
uaagcgcaggggugagcuaau

SEQ ID NO: 86903 - RNA, 21 nt, Artificial Sequence
  LRRK2 RNA guide
uacguuuccauuagcucaccc

SEQ ID NO: 86904 - RNA, 21 nt, Artificial Sequence
  LRRK2 RNA guide
uagcucaccccugcgcuuaaa

SEQ ID NO: 86905 - RNA, 21 nt, Artificial Sequence
  LRRK2 RNA guide
ucaccccugcgcuuaaaacuc

SEQ ID NO: 86906 - RNA, 21 nt, Artificial Sequence
  LRRK2 RNA guide
uccauuagcucaccccugcgc

SEQ ID NO: 86907 - RNA, 21 nt, Artificial Sequence
  LRRK2 RNA guide
ugcgcuuaaaacucucccacc

SEQ ID NO: 86908 - RNA, 21 nt, Artificial Sequence
  LRRK2 RNA guide
ugggagaguuuuaagcgcagg

SEQ ID NO: 86909 - RNA, 21 nt, Artificial Sequence
  LRRK2 RNA guide
uuaagcgcaggggugagcuaa

SEQ ID NO: 86910 - RNA, 21 nt, Artificial Sequence
  LRRK2 RNA guide
uuagcucaccccugcgcuuaa

SEQ ID NO: 86911 - RNA, 21 nt, Artificial Sequence
  LRRK2 RNA guide
uuccauuagcucaccccugcg

SEQ ID NO: 86912 - RNA, 21 nt, Artificial Sequence
  LRRK2 RNA guide
uuuaagcgcaggggugagcua

SEQ ID NO: 86913 - RNA, 21 nt, Artificial Sequence
  LRRK2 RNA guide
uuuccauuagcucaccccugc

SEQ ID NO: 86914 - RNA, 21 nt, Artificial Sequence
  LRRK2 RNA guide
uuuuaagcgcaggggugagcu

SEQ ID NO: 86915 - RNA, 22 nt, Artificial Sequence
  LRRK2 RNA guide
aaaaggugggagaguuuuaagc

SEQ ID NO: 86916 - RNA, 22 nt, Artificial Sequence
  LRRK2 RNA guide
aaacaaaaggugggagaguuuu

SEQ ID NO: 86917 - RNA, 22 nt, Artificial Sequence
  LRRK2 RNA guide
aaaggugggagaguuuuaagcg

SEQ ID NO: 86918 - RNA, 22 nt, Artificial Sequence
  LRRK2 RNA guide
aacaaaaggugggagaguuuua

SEQ ID NO: 86919 - RNA, 22 nt, Artificial Sequence
  LRRK2 RNA guide
aagcgcaggggugagcuaaugg

SEQ ID NO: 86920 - RNA, 22 nt, Artificial Sequence
  LRRK2 RNA guide
aaggugggagaguuuuaagcgc

SEQ ID NO: 86921 - RNA, 22 nt, Artificial Sequence
  LRRK2 RNA guide
acaaaaggugggagaguuuuaa

SEQ ID NO: 86922 - RNA, 22 nt, Artificial Sequence
  LRRK2 RNA guide
accccugcgcuuaaaacucucc

SEQ ID NO: 86923 - RNA, 22 nt, Artificial Sequence
  LRRK2 RNA guide
acguuuccauuagcucaccccu

SEQ ID NO: 86924 - RNA, 22 nt, Artificial Sequence
  LRRK2 RNA guide
agaguuuuaagcgcagggguga

SEQ ID NO: 86925 - RNA, 22 nt, Artificial Sequence
  LRRK2 RNA guide
agcgcaggggugagcuaaugga

SEQ ID NO: 86926 - RNA, 22 nt, Artificial Sequence
  LRRK2 RNA guide
agcucaccccugcgcuuaaaac

SEQ ID NO: 86927 - RNA, 22 nt, Artificial Sequence
  LRRK2 RNA guide
aggugggagaguuuuaagcgca

SEQ ID NO: 86928 - RNA, 22 nt, Artificial Sequence
  LRRK2 RNA guide
aguacguuuccauuagcucacc

SEQ ID NO: 86929 - RNA, 22 nt, Artificial Sequence
  LRRK2 RNA guide
aguuuuaagcgcaggggugagc

SEQ ID NO: 86930 - RNA, 22 nt, Artificial Sequence
  LRRK2 RNA guide
auuagcucaccccugcgcuuaa

SEQ ID NO: 86931 - RNA, 22 nt, Artificial Sequence
  LRRK2 RNA guide
caaaaggugggagaguuuuaag

SEQ ID NO: 86932 - RNA, 22 nt, Artificial Sequence
  LRRK2 RNA guide
caccccugcgcuuaaaacucuc

SEQ ID NO: 86933 - RNA, 22 nt, Artificial Sequence
  LRRK2 RNA guide
cauuagcucaccccugcgcuua

SEQ ID NO: 86934 - RNA, 22 nt, Artificial Sequence
  LRRK2 RNA guide
ccauuagcucaccccugcgcuu

SEQ ID NO: 86935 - RNA, 22 nt, Artificial Sequence
  LRRK2 RNA guide
ccccugcgcuuaaaacucuccc

SEQ ID NO: 86936 - RNA, 22 nt, Artificial Sequence
  LRRK2 RNA guide
cccugcgcuuaaaacucuccca

SEQ ID NO: 86937 - RNA, 22 nt, Artificial Sequence
  LRRK2 RNA guide
ccugcgcuuaaaacucucccac

SEQ ID NO: 86938 - RNA, 22 nt, Artificial Sequence
  LRRK2 RNA guide
cgcaggggugagcuaauggaaa

SEQ ID NO: 86939 - RNA, 22 nt, Artificial Sequence
  LRRK2 RNA guide
cguuuccauuagcucaccccug

SEQ ID NO: 86940 - RNA, 22 nt, Artificial Sequence
  LRRK2 RNA guide
cucaccccugcgcuuaaaacuc

SEQ ID NO: 86941 - RNA, 22 nt, Artificial Sequence
  LRRK2 RNA guide
cugcgcuuaaaacucucccacc

SEQ ID NO: 86942 - RNA, 22 nt, Artificial Sequence
  LRRK2 RNA guide
gagaguuuuaagcgcaggggug

SEQ ID NO: 86943 - RNA, 22 nt, Artificial Sequence
  LRRK2 RNA guide
gaguuuuaagcgcaggggugag

SEQ ID NO: 86944 - RNA, 22 nt, Artificial Sequence
  LRRK2 RNA guide
gcgcaggggugagcuaauggaa

SEQ ID NO: 86945 - RNA, 22 nt, Artificial Sequence
  LRRK2 RNA guide
gcgcuuaaaacucucccaccuu

SEQ ID NO: 86946 - RNA, 22 nt, Artificial Sequence
  LRRK2 RNA guide
gcucaccccugcgcuuaaaacu

SEQ ID NO: 86947 - RNA, 22 nt, Artificial Sequence
  LRRK2 RNA guide
ggagaguuuuaagcgcaggggu

SEQ ID NO: 86948 - RNA, 22 nt, Artificial Sequence
  LRRK2 RNA guide
gggagaguuuuaagcgcagggg

SEQ ID NO: 86949 - RNA, 22 nt, Artificial Sequence
  LRRK2 RNA guide
ggugggagaguuuuaagcgcag

SEQ ID NO: 86950 - RNA, 22 nt, Artificial Sequence
  LRRK2 RNA guide
guacguuuccauuagcucaccc

SEQ ID NO: 86951 - RNA, 22 nt, Artificial Sequence
  LRRK2 RNA guide
gugggagaguuuuaagcgcagg

SEQ ID NO: 86952 - RNA, 22 nt, Artificial Sequence
  LRRK2 RNA guide
guuuccauuagcucaccccugc

SEQ ID NO: 86953 - RNA, 22 nt, Artificial Sequence
  LRRK2 RNA guide
guuuuaagcgcaggggugagcu

SEQ ID NO: 86954 - RNA, 22 nt, Artificial Sequence
  LRRK2 RNA guide
uaagcgcaggggugagcuaaug

SEQ ID NO: 86955 - RNA, 22 nt, Artificial Sequence
  LRRK2 RNA guide
uacguuuccauuagcucacccc

SEQ ID NO: 86956 - RNA, 22 nt, Artificial Sequence
  LRRK2 RNA guide
uagcucaccccugcgcuuaaaa

SEQ ID NO: 86957 - RNA, 22 nt, Artificial Sequence
  LRRK2 RNA guide
ucaccccugcgcuuaaaacucu

SEQ ID NO: 86958 - RNA, 22 nt, Artificial Sequence
  LRRK2 RNA guide
uccauuagcucaccccugcgcu

SEQ ID NO: 86959 - RNA, 22 nt, Artificial Sequence
  LRRK2 RNA guide
ugcgcuuaaaacucucccaccu

SEQ ID NO: 86960 - RNA, 22 nt, Artificial Sequence
  LRRK2 RNA guide
ugggagaguuuuaagcgcaggg

SEQ ID NO: 86961 - RNA, 22 nt, Artificial Sequence
  LRRK2 RNA guide
uuaagcgcaggggugagcuaau

SEQ ID NO: 86962 - RNA, 22 nt, Artificial Sequence
  LRRK2 RNA guide
uuagcucaccccugcgcuuaaa

SEQ ID NO: 86963 - RNA, 22 nt, Artificial Sequence
  LRRK2 RNA guide
uuccauuagcucaccccugcgc

SEQ ID NO: 86964 - RNA, 22 nt, Artificial Sequence
  LRRK2 RNA guide
uuuaagcgcaggggugagcuaa

SEQ ID NO: 86965 - RNA, 22 nt, Artificial Sequence
  LRRK2 RNA guide
uuuccauuagcucaccccugcg

SEQ ID NO: 86966 - RNA, 22 nt, Artificial Sequence
  LRRK2 RNA guide
uuuuaagcgcaggggugagcua

SEQ ID NO: 86967 - RNA, 20 nt, Artificial Sequence
  LRRK2 RNA guide
aagcacaggggugagcuaau

SEQ ID NO: 86968 - RNA, 20 nt, Artificial Sequence
  LRRK2 RNA guide
accccugugcuuaaaacucu

SEQ ID NO: 86969 - RNA, 20 nt, Artificial Sequence
  LRRK2 RNA guide
agaguuuuaagcacaggggu

SEQ ID NO: 86970 - RNA, 20 nt, Artificial Sequence
  LRRK2 RNA guide
agcacaggggugagcuaaug

SEQ ID NO: 86971 - RNA, 20 nt, Artificial Sequence
  LRRK2 RNA guide
agcucaccccugugcuuaaa

SEQ ID NO: 86972 - RNA, 20 nt, Artificial Sequence
  LRRK2 RNA guide
aggugggagaguuuuaagca

SEQ ID NO: 86973 - RNA, 20 nt, Artificial Sequence
  LRRK2 RNA guide
aguuuuaagcacagggguga

SEQ ID NO: 86974 - RNA, 20 nt, Artificial Sequence
  LRRK2 RNA guide
auuagcucaccccugugcuu

SEQ ID NO: 86975 - RNA, 20 nt, Artificial Sequence
  LRRK2 RNA guide
cacaggggugagcuaaugga

SEQ ID NO: 86976 - RNA, 20 nt, Artificial Sequence
  LRRK2 RNA guide
caccccugugcuuaaaacuc

SEQ ID NO: 86977 - RNA, 20 nt, Artificial Sequence
  LRRK2 RNA guide
cauuagcucaccccugugcu

SEQ ID NO: 86978 - RNA, 20 nt, Artificial Sequence
  LRRK2 RNA guide
ccauuagcucaccccugugc

SEQ ID NO: 86979 - RNA, 20 nt, Artificial Sequence
  LRRK2 RNA guide
ccccugugcuuaaaacucuc

SEQ ID NO: 86980 - RNA, 20 nt, Artificial Sequence
  LRRK2 RNA guide
cccugugcuuaaaacucucc

SEQ ID NO: 86981 - RNA, 20 nt, Artificial Sequence
  LRRK2 RNA guide
ccugugcuuaaaacucuccc

SEQ ID NO: 86982 - RNA, 20 nt, Artificial Sequence
  LRRK2 RNA guide
cucaccccugugcuuaaaac

SEQ ID NO: 86983 - RNA, 20 nt, Artificial Sequence
  LRRK2 RNA guide
cugugcuuaaaacucuccca

SEQ ID NO: 86984 - RNA, 20 nt, Artificial Sequence
  LRRK2 RNA guide
gagaguuuuaagcacagggg

SEQ ID NO: 86985 - RNA, 20 nt, Artificial Sequence
  LRRK2 RNA guide
gaguuuuaagcacaggggug

SEQ ID NO: 86986 - RNA, 20 nt, Artificial Sequence
  LRRK2 RNA guide
gcacaggggugagcuaaugg

SEQ ID NO: 86987 - RNA, 20 nt, Artificial Sequence
  LRRK2 RNA guide
gcucaccccugugcuuaaaa

SEQ ID NO: 86988 - RNA, 20 nt, Artificial Sequence
  LRRK2 RNA guide
ggagaguuuuaagcacaggg

SEQ ID NO: 86989 - RNA, 20 nt, Artificial Sequence
  LRRK2 RNA guide
gggagaguuuuaagcacagg

SEQ ID NO: 86990 - RNA, 20 nt, Artificial Sequence
  LRRK2 RNA guide
ggugggagaguuuuaagcac

SEQ ID NO: 86991 - RNA, 20 nt, Artificial Sequence
  LRRK2 RNA guide
gugcuuaaaacucucccacc

SEQ ID NO: 86992 - RNA, 20 nt, Artificial Sequence
  LRRK2 RNA guide
gugggagaguuuuaagcaca

SEQ ID NO: 86993 - RNA, 20 nt, Artificial Sequence
  LRRK2 RNA guide
guuuuaagcacaggggugag

SEQ ID NO: 86994 - RNA, 20 nt, Artificial Sequence
  LRRK2 RNA guide
uaagcacaggggugagcuaa

SEQ ID NO: 86995 - RNA, 20 nt, Artificial Sequence
  LRRK2 RNA guide
uagcucaccccugugcuuaa

SEQ ID NO: 86996 - RNA, 20 nt, Artificial Sequence
  LRRK2 RNA guide
ucaccccugugcuuaaaacu

SEQ ID NO: 86997 - RNA, 20 nt, Artificial Sequence
  LRRK2 RNA guide
uccauuagcucaccccugug

SEQ ID NO: 86998 - RNA, 20 nt, Artificial Sequence
  LRRK2 RNA guide
ugggagaguuuuaagcacag

SEQ ID NO: 86999 - RNA, 20 nt, Artificial Sequence
  LRRK2 RNA guide
ugugcuuaaaacucucccac

SEQ ID NO: 87000 - RNA, 20 nt, Artificial Sequence
  LRRK2 RNA guide
uuaagcacaggggugagcua

SEQ ID NO: 87001 - RNA, 20 nt, Artificial Sequence
  LRRK2 RNA guide
uuagcucaccccugugcuua

SEQ ID NO: 87002 - RNA, 20 nt, Artificial Sequence
  LRRK2 RNA guide
uuccauuagcucaccccugu

SEQ ID NO: 87003 - RNA, 20 nt, Artificial Sequence
  LRRK2 RNA guide
uuuaagcacaggggugagcu

SEQ ID NO: 87004 - RNA, 20 nt, Artificial Sequence
  LRRK2 RNA guide
uuuuaagcacaggggugagc

SEQ ID NO: 87005 - RNA, 21 nt, Artificial Sequence
  LRRK2 RNA guide
aagcacaggggugagcuaaug

SEQ ID NO: 87006 - RNA, 21 nt, Artificial Sequence
  LRRK2 RNA guide
aaggugggagaguuuuaagca

SEQ ID NO: 87007 - RNA, 21 nt, Artificial Sequence
  LRRK2 RNA guide
accccugugcuuaaaacucuc

SEQ ID NO: 87008 - RNA, 21 nt, Artificial Sequence
  LRRK2 RNA guide
agaguuuuaagcacaggggug

SEQ ID NO: 87009 - RNA, 21 nt, Artificial Sequence
  LRRK2 RNA guide
agcacaggggugagcuaaugg

SEQ ID NO: 87010 - RNA, 21 nt, Artificial Sequence
  LRRK2 RNA guide
agcucaccccugugcuuaaaa

SEQ ID NO: 87011 - RNA, 21 nt, Artificial Sequence
  LRRK2 RNA guide
aggugggagaguuuuaagcac

SEQ ID NO: 87012 - RNA, 21 nt, Artificial Sequence
  LRRK2 RNA guide
aguuuuaagcacaggggugag

SEQ ID NO: 87013 - RNA, 21 nt, Artificial Sequence
  LRRK2 RNA guide
auuagcucaccccugugcuua

SEQ ID NO: 87014 - RNA, 21 nt, Artificial Sequence
  LRRK2 RNA guide
cacaggggugagcuaauggaa

SEQ ID NO: 87015 - RNA, 21 nt, Artificial Sequence
  LRRK2 RNA guide
caccccugugcuuaaaacucu

SEQ ID NO: 87016 - RNA, 21 nt, Artificial Sequence
  LRRK2 RNA guide
cauuagcucaccccugugcuu

SEQ ID NO: 87017 - RNA, 21 nt, Artificial Sequence
  LRRK2 RNA guide
ccauuagcucaccccugugcu

SEQ ID NO: 87018 - RNA, 21 nt, Artificial Sequence
  LRRK2 RNA guide
ccccugugcuuaaaacucucc

SEQ ID NO: 87019 - RNA, 21 nt, Artificial Sequence
  LRRK2 RNA guide
cccugugcuuaaaacucuccc

SEQ ID NO: 87020 - RNA, 21 nt, Artificial Sequence
  LRRK2 RNA guide
ccugugcuuaaaacucuccca

SEQ ID NO: 87021 - RNA, 21 nt, Artificial Sequence
  LRRK2 RNA guide
cucaccccugugcuuaaaacu

SEQ ID NO: 87022 - RNA, 21 nt, Artificial Sequence
  LRRK2 RNA guide
cugugcuuaaaacucucccac

SEQ ID NO: 87023 - RNA, 21 nt, Artificial Sequence
  LRRK2 RNA guide
gagaguuuuaagcacaggggu

SEQ ID NO: 87024 - RNA, 21 nt, Artificial Sequence
  LRRK2 RNA guide
gaguuuuaagcacagggguga

SEQ ID NO: 87025 - RNA, 21 nt, Artificial Sequence
  LRRK2 RNA guide
gcacaggggugagcuaaugga

SEQ ID NO: 87026 - RNA, 21 nt, Artificial Sequence
  LRRK2 RNA guide
gcucaccccugugcuuaaaac

SEQ ID NO: 87027 - RNA, 21 nt, Artificial Sequence
  LRRK2 RNA guide
ggagaguuuuaagcacagggg

SEQ ID NO: 87028 - RNA, 21 nt, Artificial Sequence
  LRRK2 RNA guide
gggagaguuuuaagcacaggg

SEQ ID NO: 87029 - RNA, 21 nt, Artificial Sequence
  LRRK2 RNA guide
ggugggagaguuuuaagcaca

SEQ ID NO: 87030 - RNA, 21 nt, Artificial Sequence
  LRRK2 RNA guide
gugcuuaaaacucucccaccu

SEQ ID NO: 87031 - RNA, 21 nt, Artificial Sequence
  LRRK2 RNA guide
gugggagaguuuuaagcacag

SEQ ID NO: 87032 - RNA, 21 nt, Artificial Sequence
  LRRK2 RNA guide
guuuuaagcacaggggugagc

SEQ ID NO: 87033 - RNA, 21 nt, Artificial Sequence
  LRRK2 RNA guide
uaagcacaggggugagcuaau

SEQ ID NO: 87034 - RNA, 21 nt, Artificial Sequence
  LRRK2 RNA guide
uagcucaccccugugcuuaaa

SEQ ID NO: 87035 - RNA, 21 nt, Artificial Sequence
  LRRK2 RNA guide
ucaccccugugcuuaaaacuc

SEQ ID NO: 87036 - RNA, 21 nt, Artificial Sequence
  LRRK2 RNA guide
uccauuagcucaccccugugc

SEQ ID NO: 87037 - RNA, 21 nt, Artificial Sequence
  LRRK2 RNA guide
ugggagaguuuuaagcacagg

SEQ ID NO: 87038 - RNA, 21 nt, Artificial Sequence
  LRRK2 RNA guide
ugugcuuaaaacucucccacc

SEQ ID NO: 87039 - RNA, 21 nt, Artificial Sequence
  LRRK2 RNA guide
uuaagcacaggggugagcuaa

SEQ ID NO: 87040 - RNA, 21 nt, Artificial Sequence
  LRRK2 RNA guide
uuagcucaccccugugcuuaa

SEQ ID NO: 87041 - RNA, 21 nt, Artificial Sequence
  LRRK2 RNA guide
uuccauuagcucaccccugug

SEQ ID NO: 87042 - RNA, 21 nt, Artificial Sequence
  LRRK2 RNA guide
uuuaagcacaggggugagcua

SEQ ID NO: 87043 - RNA, 21 nt, Artificial Sequence
  LRRK2 RNA guide
uuuccauuagcucaccccugu

SEQ ID NO: 87044 - RNA, 21 nt, Artificial Sequence
  LRRK2 RNA guide
uuuuaagcacaggggugagcu

SEQ ID NO: 87045 - RNA, 22 nt, Artificial Sequence
  LRRK2 RNA guide
aaaggugggagaguuuuaagca

SEQ ID NO: 87046 - RNA, 22 nt, Artificial Sequence
  LRRK2 RNA guide
aagcacaggggugagcuaaugg

SEQ ID NO: 87047 - RNA, 22 nt, Artificial Sequence
  LRRK2 RNA guide
aaggugggagaguuuuaagcac

SEQ ID NO: 87048 - RNA, 22 nt, Artificial Sequence
  LRRK2 RNA guide
accccugugcuuaaaacucucc

SEQ ID NO: 87049 - RNA, 22 nt, Artificial Sequence
  LRRK2 RNA guide
agaguuuuaagcacagggguga

SEQ ID NO: 87050 - RNA, 22 nt, Artificial Sequence
  LRRK2 RNA guide
agcacaggggugagcuaaugga

SEQ ID NO: 87051 - RNA, 22 nt, Artificial Sequence
  LRRK2 RNA guide
agcucaccccugugcuuaaaac

SEQ ID NO: 87052 - RNA, 22 nt, Artificial Sequence
  LRRK2 RNA guide
aggugggagaguuuuaagcaca

SEQ ID NO: 87053 - RNA, 22 nt, Artificial Sequence
  LRRK2 RNA guide
aguuuuaagcacaggggugagc

SEQ ID NO: 87054 - RNA, 22 nt, Artificial Sequence
  LRRK2 RNA guide
auuagcucaccccugugcuuaa

SEQ ID NO: 87055 - RNA, 22 nt, Artificial Sequence
  LRRK2 RNA guide
cacaggggugagcuaauggaaa

SEQ ID NO: 87056 - RNA, 22 nt, Artificial Sequence
  LRRK2 RNA guide
caccccugugcuuaaaacucuc

SEQ ID NO: 87057 - RNA, 22 nt, Artificial Sequence
  LRRK2 RNA guide
cauuagcucaccccugugcuua

SEQ ID NO: 87058 - RNA, 22 nt, Artificial Sequence
  LRRK2 RNA guide
ccauuagcucaccccugugcuu

SEQ ID NO: 87059 - RNA, 22 nt, Artificial Sequence
  LRRK2 RNA guide
ccccugugcuuaaaacucuccc

SEQ ID NO: 87060 - RNA, 22 nt, Artificial Sequence
  LRRK2 RNA guide
cccugugcuuaaaacucuccca

SEQ ID NO: 87061 - RNA, 22 nt, Artificial Sequence
  LRRK2 RNA guide
ccugugcuuaaaacucucccac

SEQ ID NO: 87062 - RNA, 22 nt, Artificial Sequence
  LRRK2 RNA guide
cucaccccugugcuuaaaacuc

SEQ ID NO: 87063 - RNA, 22 nt, Artificial Sequence
  LRRK2 RNA guide
cugugcuuaaaacucucccacc

SEQ ID NO: 87064 - RNA, 22 nt, Artificial Sequence
  LRRK2 RNA guide
gagaguuuuaagcacaggggug

SEQ ID NO: 87065 - RNA, 22 nt, Artificial Sequence
  LRRK2 RNA guide
gaguuuuaagcacaggggugag

SEQ ID NO: 87066 - RNA, 22 nt, Artificial Sequence
  LRRK2 RNA guide
gcacaggggugagcuaauggaa

SEQ ID NO: 87067 - RNA, 22 nt, Artificial Sequence
  LRRK2 RNA guide
gcucaccccugugcuuaaaacu

SEQ ID NO: 87068 - RNA, 22 nt, Artificial Sequence
  LRRK2 RNA guide
ggagaguuuuaagcacaggggu

SEQ ID NO: 87069 - RNA, 22 nt, Artificial Sequence
  LRRK2 RNA guide
gggagaguuuuaagcacagggg

SEQ ID NO: 87070 - RNA, 22 nt, Artificial Sequence
  LRRK2 RNA guide
ggugggagaguuuuaagcacag

SEQ ID NO: 87071 - RNA, 22 nt, Artificial Sequence
  LRRK2 RNA guide
gugcuuaaaacucucccaccuu

SEQ ID NO: 87072 - RNA, 22 nt, Artificial Sequence
  LRRK2 RNA guide
gugggagaguuuuaagcacagg

SEQ ID NO: 87073 - RNA, 22 nt, Artificial Sequence
  LRRK2 RNA guide
guuuccauuagcucaccccugu

SEQ ID NO: 87074 - RNA, 22 nt, Artificial Sequence
  LRRK2 RNA guide
guuuuaagcacaggggugagcu

SEQ ID NO: 87075 - RNA, 22 nt, Artificial Sequence
  LRRK2 RNA guide
uaagcacaggggugagcuaaug

SEQ ID NO: 87076 - RNA, 22 nt, Artificial Sequence
  LRRK2 RNA guide
uagcucaccccugugcuuaaaa

SEQ ID NO: 87077 - RNA, 22 nt, Artificial Sequence
  LRRK2 RNA guide
ucaccccugugcuuaaaacucu

SEQ ID NO: 87078 - RNA, 22 nt, Artificial Sequence
  LRRK2 RNA guide
uccauuagcucaccccugugcu

SEQ ID NO: 87079 - RNA, 22 nt, Artificial Sequence
  LRRK2 RNA guide
ugggagaguuuuaagcacaggg

SEQ ID NO: 87080 - RNA, 22 nt, Artificial Sequence
  LRRK2 RNA guide
ugugcuuaaaacucucccaccu

SEQ ID NO: 87081 - RNA, 22 nt, Artificial Sequence
  LRRK2 RNA guide
uuaagcacaggggugagcuaau

SEQ ID NO: 87082 - RNA, 22 nt, Artificial Sequence
  LRRK2 RNA guide
uuagcucaccccugugcuuaaa

SEQ ID NO: 87083 - RNA, 22 nt, Artificial Sequence
  LRRK2 RNA guide
uuccauuagcucaccccugugc

SEQ ID NO: 87084 - RNA, 22 nt, Artificial Sequence
  LRRK2 RNA guide
uuuaagcacaggggugagcuaa

SEQ ID NO: 87085 - RNA, 22 nt, Artificial Sequence
  LRRK2 RNA guide
uuuccauuagcucaccccugug

SEQ ID NO: 87086 - RNA, 22 nt, Artificial Sequence
  LRRK2 RNA guide
uuuuaagcacaggggugagcua

SEQ ID NO: 87087 - RNA, 20 nt, Artificial Sequence
  LRRK2 RNA guide
aaacguacuggagcaccuug

SEQ ID NO: 87088 - RNA, 20 nt, Artificial Sequence
  LRRK2 RNA guide
aacaaggugcuccaguacgu

SEQ ID NO: 87089 - RNA, 20 nt, Artificial Sequence
  LRRK2 RNA guide
aacguacuggagcaccuugu

SEQ ID NO: 87090 - RNA, 20 nt, Artificial Sequence
  LRRK2 RNA guide
aaggugcuccaguacguuuc

SEQ ID NO: 87091 - RNA, 20 nt, Artificial Sequence
  LRRK2 RNA guide
aauggaaacguacuggagca

SEQ ID NO: 87092 - RNA, 20 nt, Artificial Sequence
  LRRK2 RNA guide
acaaggugcuccaguacguu

SEQ ID NO: 87093 - RNA, 20 nt, Artificial Sequence
  LRRK2 RNA guide
acguacuggagcaccuuguu

SEQ ID NO: 87094 - RNA, 20 nt, Artificial Sequence
  LRRK2 RNA guide
agcuaauggaaacguacugg

SEQ ID NO: 87095 - RNA, 20 nt, Artificial Sequence
  LRRK2 RNA guide
aggggugagcuaauggaaac

SEQ ID NO: 87096 - RNA, 20 nt, Artificial Sequence
  LRRK2 RNA guide
aggugcuccaguacguuucc

SEQ ID NO: 87097 - RNA, 20 nt, Artificial Sequence
  LRRK2 RNA guide
aguacguuuccauuagcuca

SEQ ID NO: 87098 - RNA, 20 nt, Artificial Sequence
  LRRK2 RNA guide
auggaaacguacuggagcac

SEQ ID NO: 87099 - RNA, 20 nt, Artificial Sequence
  LRRK2 RNA guide
caacaaggugcuccaguacg

SEQ ID NO: 87100 - RNA, 20 nt, Artificial Sequence
  LRRK2 RNA guide
caaggugcuccaguacguuu

SEQ ID NO: 87101 - RNA, 20 nt, Artificial Sequence
  LRRK2 RNA guide
caggggugagcuaauggaaa

SEQ ID NO: 87102 - RNA, 20 nt, Artificial Sequence
  LRRK2 RNA guide
caguacguuuccauuagcuc

SEQ ID NO: 87103 - RNA, 20 nt, Artificial Sequence
  LRRK2 RNA guide
ccaacaaggugcuccaguac

SEQ ID NO: 87104 - RNA, 20 nt, Artificial Sequence
  LRRK2 RNA guide
ccaguacguuuccauuagcu

SEQ ID NO: 87105 - RNA, 20 nt, Artificial Sequence
  LRRK2 RNA guide
ccuuccaacaaggugcucca

SEQ ID NO: 87106 - RNA, 20 nt, Artificial Sequence
  LRRK2 RNA guide
cguacuggagcaccuuguug

SEQ ID NO: 87107 - RNA, 20 nt, Artificial Sequence
  LRRK2 RNA guide
cuaauggaaacguacuggag

SEQ ID NO: 87108 - RNA, 20 nt, Artificial Sequence
  LRRK2 RNA guide
cuccaguacguuuccauuag

SEQ ID NO: 87109 - RNA, 20 nt, Artificial Sequence
  LRRK2 RNA guide
cuuccaacaaggugcuccag

SEQ ID NO: 87110 - RNA, 20 nt, Artificial Sequence
  LRRK2 RNA guide
gaaacguacuggagcaccuu

SEQ ID NO: 87111 - RNA, 20 nt, Artificial Sequence
  LRRK2 RNA guide
gagcuaauggaaacguacug

SEQ ID NO: 87112 - RNA, 20 nt, Artificial Sequence
  LRRK2 RNA guide
gcaggggugagcuaauggaa

SEQ ID NO: 87113 - RNA, 20 nt, Artificial Sequence
  LRRK2 RNA guide
gcuaauggaaacguacugga

SEQ ID NO: 87114 - RNA, 20 nt, Artificial Sequence
  LRRK2 RNA guide
gcuccaguacguuuccauua

SEQ ID NO: 87115 - RNA, 20 nt, Artificial Sequence
  LRRK2 RNA guide
ggaaacguacuggagcaccu

SEQ ID NO: 87116 - RNA, 20 nt, Artificial Sequence
  LRRK2 RNA guide
ggggugagcuaauggaaacg

SEQ ID NO: 87117 - RNA, 20 nt, Artificial Sequence
  LRRK2 RNA guide
gggugagcuaauggaaacgu

SEQ ID NO: 87118 - RNA, 20 nt, Artificial Sequence
  LRRK2 RNA guide
ggugagcuaauggaaacgua

SEQ ID NO: 87119 - RNA, 20 nt, Artificial Sequence
  LRRK2 RNA guide
ggugcuccaguacguuucca

SEQ ID NO: 87120 - RNA, 20 nt, Artificial Sequence
  LRRK2 RNA guide
guacguuuccauuagcucac

SEQ ID NO: 87121 - RNA, 20 nt, Artificial Sequence
  LRRK2 RNA guide
gugagcuaauggaaacguac

SEQ ID NO: 87122 - RNA, 20 nt, Artificial Sequence
  LRRK2 RNA guide
gugcuccaguacguuuccau

SEQ ID NO: 87123 - RNA, 20 nt, Artificial Sequence
  LRRK2 RNA guide
uaauggaaacguacuggagc

SEQ ID NO: 87124 - RNA, 20 nt, Artificial Sequence
  LRRK2 RNA guide
uccaacaaggugcuccagua

SEQ ID NO: 87125 - RNA, 20 nt, Artificial Sequence
  LRRK2 RNA guide
uccaguacguuuccauuagc

SEQ ID NO: 87126 - RNA, 20 nt, Artificial Sequence
  LRRK2 RNA guide
uccuuccaacaaggugcucc

SEQ ID NO: 87127 - RNA, 20 nt, Artificial Sequence
  LRRK2 RNA guide
ugagcuaauggaaacguacu

SEQ ID NO: 87128 - RNA, 20 nt, Artificial Sequence
  LRRK2 RNA guide
ugcuccaguacguuuccauu

SEQ ID NO: 87129 - RNA, 20 nt, Artificial Sequence
  LRRK2 RNA guide
uggaaacguacuggagcacc

SEQ ID NO: 87130 - RNA, 20 nt, Artificial Sequence
  LRRK2 RNA guide
uuccaacaaggugcuccagu

SEQ ID NO: 87131 - RNA, 21 nt, Artificial Sequence
  LRRK2 RNA guide
aaacguacuggagcaccuugu

SEQ ID NO: 87132 - RNA, 21 nt, Artificial Sequence
  LRRK2 RNA guide
aacaaggugcuccaguacguu

SEQ ID NO: 87133 - RNA, 21 nt, Artificial Sequence
  LRRK2 RNA guide
aacguacuggagcaccuuguu

SEQ ID NO: 87134 - RNA, 21 nt, Artificial Sequence
  LRRK2 RNA guide
aaggugcuccaguacguuucc

SEQ ID NO: 87135 - RNA, 21 nt, Artificial Sequence
  LRRK2 RNA guide
aauggaaacguacuggagcac

SEQ ID NO: 87136 - RNA, 21 nt, Artificial Sequence
  LRRK2 RNA guide
acaaggugcuccaguacguuu

SEQ ID NO: 87137 - RNA, 21 nt, Artificial Sequence
  LRRK2 RNA guide
acguacuggagcaccuuguug

SEQ ID NO: 87138 - RNA, 21 nt, Artificial Sequence
  LRRK2 RNA guide
agcuaauggaaacguacugga

SEQ ID NO: 87139 - RNA, 21 nt, Artificial Sequence
  LRRK2 RNA guide
aggggugagcuaauggaaacg

SEQ ID NO: 87140 - RNA, 21 nt, Artificial Sequence
  LRRK2 RNA guide
aggugcuccaguacguuucca

SEQ ID NO: 87141 - RNA, 21 nt, Artificial Sequence
  LRRK2 RNA guide
aguacguuuccauuagcucac

SEQ ID NO: 87142 - RNA, 21 nt, Artificial Sequence
  LRRK2 RNA guide
auggaaacguacuggagcacc

SEQ ID NO: 87143 - RNA, 21 nt, Artificial Sequence
  LRRK2 RNA guide
caacaaggugcuccaguacgu

SEQ ID NO: 87144 - RNA, 21 nt, Artificial Sequence
  LRRK2 RNA guide
caaggugcuccaguacguuuc

SEQ ID NO: 87145 - RNA, 21 nt, Artificial Sequence
  LRRK2 RNA guide
caggggugagcuaauggaaac

SEQ ID NO: 87146 - RNA, 21 nt, Artificial Sequence
  LRRK2 RNA guide
caguacguuuccauuagcuca

SEQ ID NO: 87147 - RNA, 21 nt, Artificial Sequence
  LRRK2 RNA guide
ccaacaaggugcuccaguacg

SEQ ID NO: 87148 - RNA, 21 nt, Artificial Sequence
  LRRK2 RNA guide
ccaguacguuuccauuagcuc

SEQ ID NO: 87149 - RNA, 21 nt, Artificial Sequence
  LRRK2 RNA guide
ccuuccaacaaggugcuccag

SEQ ID NO: 87150 - RNA, 21 nt, Artificial Sequence
  LRRK2 RNA guide
cguacuggagcaccuuguugg

SEQ ID NO: 87151 - RNA, 21 nt, Artificial Sequence
  LRRK2 RNA guide
cuaauggaaacguacuggagc

SEQ ID NO: 87152 - RNA, 21 nt, Artificial Sequence
  LRRK2 RNA guide
cuccaguacguuuccauuagc

SEQ ID NO: 87153 - RNA, 21 nt, Artificial Sequence
  LRRK2 RNA guide
cuuccaacaaggugcuccagu

SEQ ID NO: 87154 - RNA, 21 nt, Artificial Sequence
  LRRK2 RNA guide
gaaacguacuggagcaccuug

SEQ ID NO: 87155 - RNA, 21 nt, Artificial Sequence
  LRRK2 RNA guide
gagcuaauggaaacguacugg

SEQ ID NO: 87156 - RNA, 21 nt, Artificial Sequence
  LRRK2 RNA guide
gcaggggugagcuaauggaaa

SEQ ID NO: 87157 - RNA, 21 nt, Artificial Sequence
  LRRK2 RNA guide
gcuaauggaaacguacuggag

SEQ ID NO: 87158 - RNA, 21 nt, Artificial Sequence
  LRRK2 RNA guide
gcuccaguacguuuccauuag

SEQ ID NO: 87159 - RNA, 21 nt, Artificial Sequence
  LRRK2 RNA guide
ggaaacguacuggagcaccuu

SEQ ID NO: 87160 - RNA, 21 nt, Artificial Sequence
  LRRK2 RNA guide
ggggugagcuaauggaaacgu

SEQ ID NO: 87161 - RNA, 21 nt, Artificial Sequence
  LRRK2 RNA guide
gggugagcuaauggaaacgua

SEQ ID NO: 87162 - RNA, 21 nt, Artificial Sequence
  LRRK2 RNA guide
ggugagcuaauggaaacguac

SEQ ID NO: 87163 - RNA, 21 nt, Artificial Sequence
  LRRK2 RNA guide
ggugcuccaguacguuuccau

SEQ ID NO: 87164 - RNA, 21 nt, Artificial Sequence
  LRRK2 RNA guide
gugagcuaauggaaacguacu

SEQ ID NO: 87165 - RNA, 21 nt, Artificial Sequence
  LRRK2 RNA guide
gugcuccaguacguuuccauu

SEQ ID NO: 87166 - RNA, 21 nt, Artificial Sequence
  LRRK2 RNA guide
uaauggaaacguacuggagca

SEQ ID NO: 87167 - RNA, 21 nt, Artificial Sequence
  LRRK2 RNA guide
uccaacaaggugcuccaguac

SEQ ID NO: 87168 - RNA, 21 nt, Artificial Sequence
  LRRK2 RNA guide
uccaguacguuuccauuagcu

SEQ ID NO: 87169 - RNA, 21 nt, Artificial Sequence
  LRRK2 RNA guide
uccuuccaacaaggugcucca

SEQ ID NO: 87170 - RNA, 21 nt, Artificial Sequence
  LRRK2 RNA guide
ugagcuaauggaaacguacug

SEQ ID NO: 87171 - RNA, 21 nt, Artificial Sequence
  LRRK2 RNA guide
ugcuccaguacguuuccauua

SEQ ID NO: 87172 - RNA, 21 nt, Artificial Sequence
  LRRK2 RNA guide
uggaaacguacuggagcaccu

SEQ ID NO: 87173 - RNA, 21 nt, Artificial Sequence
  LRRK2 RNA guide
uuccaacaaggugcuccagua

SEQ ID NO: 87174 - RNA, 21 nt, Artificial Sequence
  LRRK2 RNA guide
uuccuuccaacaaggugcucc

SEQ ID NO: 87175 - RNA, 22 nt, Artificial Sequence
  LRRK2 RNA guide
aaacguacuggagcaccuuguu

SEQ ID NO: 87176 - RNA, 22 nt, Artificial Sequence
  LRRK2 RNA guide
aacaaggugcuccaguacguuu

SEQ ID NO: 87177 - RNA, 22 nt, Artificial Sequence
  LRRK2 RNA guide
aacguacuggagcaccuuguug

SEQ ID NO: 87178 - RNA, 22 nt, Artificial Sequence
  LRRK2 RNA guide
aaggugcuccaguacguuucca

SEQ ID NO: 87179 - RNA, 22 nt, Artificial Sequence
  LRRK2 RNA guide
aauggaaacguacuggagcacc

SEQ ID NO: 87180 - RNA, 22 nt, Artificial Sequence
  LRRK2 RNA guide
acaaggugcuccaguacguuuc

SEQ ID NO: 87181 - RNA, 22 nt, Artificial Sequence
  LRRK2 RNA guide
acguacuggagcaccuuguugg

SEQ ID NO: 87182 - RNA, 22 nt, Artificial Sequence
  LRRK2 RNA guide
agcuaauggaaacguacuggag

SEQ ID NO: 87183 - RNA, 22 nt, Artificial Sequence
  LRRK2 RNA guide
aggggugagcuaauggaaacgu

SEQ ID NO: 87184 - RNA, 22 nt, Artificial Sequence
  LRRK2 RNA guide
aggugcuccaguacguuuccau

SEQ ID NO: 87185 - RNA, 22 nt, Artificial Sequence
  LRRK2 RNA guide
auggaaacguacuggagcaccu

SEQ ID NO: 87186 - RNA, 22 nt, Artificial Sequence
  LRRK2 RNA guide
caacaaggugcuccaguacguu

SEQ ID NO: 87187 - RNA, 22 nt, Artificial Sequence
  LRRK2 RNA guide
caaggugcuccaguacguuucc

SEQ ID NO: 87188 - RNA, 22 nt, Artificial Sequence
  LRRK2 RNA guide
caggggugagcuaauggaaacg

SEQ ID NO: 87189 - RNA, 22 nt, Artificial Sequence
  LRRK2 RNA guide
caguacguuuccauuagcucac

SEQ ID NO: 87190 - RNA, 22 nt, Artificial Sequence
  LRRK2 RNA guide
ccaacaaggugcuccaguacgu

SEQ ID NO: 87191 - RNA, 22 nt, Artificial Sequence
  LRRK2 RNA guide
ccaguacguuuccauuagcuca

SEQ ID NO: 87192 - RNA, 22 nt, Artificial Sequence
  LRRK2 RNA guide
ccuuccaacaaggugcuccagu

SEQ ID NO: 87193 - RNA, 22 nt, Artificial Sequence
  LRRK2 RNA guide
cguacuggagcaccuuguugga

SEQ ID NO: 87194 - RNA, 22 nt, Artificial Sequence
  LRRK2 RNA guide
cuaauggaaacguacuggagca

SEQ ID NO: 87195 - RNA, 22 nt, Artificial Sequence
  LRRK2 RNA guide
cuccaguacguuuccauuagcu

SEQ ID NO: 87196 - RNA, 22 nt, Artificial Sequence
  LRRK2 RNA guide
cuuccaacaaggugcuccagua

SEQ ID NO: 87197 - RNA, 22 nt, Artificial Sequence
  LRRK2 RNA guide
cuuccuuccaacaaggugcucc

SEQ ID NO: 87198 - RNA, 22 nt, Artificial Sequence
  LRRK2 RNA guide
gaaacguacuggagcaccuugu

SEQ ID NO: 87199 - RNA, 22 nt, Artificial Sequence
  LRRK2 RNA guide
gagcuaauggaaacguacugga

SEQ ID NO: 87200 - RNA, 22 nt, Artificial Sequence
  LRRK2 RNA guide
gcaggggugagcuaauggaaac

SEQ ID NO: 87201 - RNA, 22 nt, Artificial Sequence
  LRRK2 RNA guide
gcuaauggaaacguacuggagc

SEQ ID NO: 87202 - RNA, 22 nt, Artificial Sequence
  LRRK2 RNA guide
gcuccaguacguuuccauuagc

SEQ ID NO: 87203 - RNA, 22 nt, Artificial Sequence
  LRRK2 RNA guide
ggaaacguacuggagcaccuug

SEQ ID NO: 87204 - RNA, 22 nt, Artificial Sequence
  LRRK2 RNA guide
ggggugagcuaauggaaacgua

SEQ ID NO: 87205 - RNA, 22 nt, Artificial Sequence
  LRRK2 RNA guide
gggugagcuaauggaaacguac

SEQ ID NO: 87206 - RNA, 22 nt, Artificial Sequence
  LRRK2 RNA guide
ggugagcuaauggaaacguacu

SEQ ID NO: 87207 - RNA, 22 nt, Artificial Sequence
  LRRK2 RNA guide
ggugcuccaguacguuuccauu

SEQ ID NO: 87208 - RNA, 22 nt, Artificial Sequence
  LRRK2 RNA guide
gugagcuaauggaaacguacug

SEQ ID NO: 87209 - RNA, 22 nt, Artificial Sequence
  LRRK2 RNA guide
gugcuccaguacguuuccauua

SEQ ID NO: 87210 - RNA, 22 nt, Artificial Sequence
  LRRK2 RNA guide
uaauggaaacguacuggagcac

SEQ ID NO: 87211 - RNA, 22 nt, Artificial Sequence
  LRRK2 RNA guide
uccaacaaggugcuccaguacg

SEQ ID NO: 87212 - RNA, 22 nt, Artificial Sequence
  LRRK2 RNA guide
uccaguacguuuccauuagcuc

SEQ ID NO: 87213 - RNA, 22 nt, Artificial Sequence
  LRRK2 RNA guide
uccuuccaacaaggugcuccag

SEQ ID NO: 87214 - RNA, 22 nt, Artificial Sequence
  LRRK2 RNA guide
ugagcuaauggaaacguacugg

SEQ ID NO: 87215 - RNA, 22 nt, Artificial Sequence
  LRRK2 RNA guide
ugcuccaguacguuuccauuag

SEQ ID NO: 87216 - RNA, 22 nt, Artificial Sequence
  LRRK2 RNA guide
uggaaacguacuggagcaccuu

SEQ ID NO: 87217 - RNA, 22 nt, Artificial Sequence
  LRRK2 RNA guide
uuccaacaaggugcuccaguac

SEQ ID NO: 87218 - RNA, 22 nt, Artificial Sequence
  LRRK2 RNA guide
uuccuuccaacaaggugcucca

SEQ ID NO: 87219 - RNA, 20 nt, Artificial Sequence
  LRRK2 RNA guide
aaacauacuggagcaccuug

SEQ ID NO: 87220 - RNA, 20 nt, Artificial Sequence
  LRRK2 RNA guide
aacaaggugcuccaguaugu

SEQ ID NO: 87221 - RNA, 20 nt, Artificial Sequence
  LRRK2 RNA guide
aacauacuggagcaccuugu

SEQ ID NO: 87222 - RNA, 20 nt, Artificial Sequence
  LRRK2 RNA guide
aaggugcuccaguauguuuc

SEQ ID NO: 87223 - RNA, 20 nt, Artificial Sequence
  LRRK2 RNA guide
aauggaaacauacuggagca

SEQ ID NO: 87224 - RNA, 20 nt, Artificial Sequence
  LRRK2 RNA guide
acaaggugcuccaguauguu

SEQ ID NO: 87225 - RNA, 20 nt, Artificial Sequence
  LRRK2 RNA guide
acauacuggagcaccuuguu

SEQ ID NO: 87226 - RNA, 20 nt, Artificial Sequence
  LRRK2 RNA guide
agcuaauggaaacauacugg

SEQ ID NO: 87227 - RNA, 20 nt, Artificial Sequence
  LRRK2 RNA guide
aggugcuccaguauguuucc

SEQ ID NO: 87228 - RNA, 20 nt, Artificial Sequence
  LRRK2 RNA guide
aguauguuuccauuagcuca

SEQ ID NO: 87229 - RNA, 20 nt, Artificial Sequence
  LRRK2 RNA guide
auggaaacauacuggagcac

SEQ ID NO: 87230 - RNA, 20 nt, Artificial Sequence
  LRRK2 RNA guide
auguuuccauuagcucaccc

SEQ ID NO: 87231 - RNA, 20 nt, Artificial Sequence
  LRRK2 RNA guide
caacaaggugcuccaguaug

SEQ ID NO: 87232 - RNA, 20 nt, Artificial Sequence
  LRRK2 RNA guide
caaggugcuccaguauguuu

SEQ ID NO: 87233 - RNA, 20 nt, Artificial Sequence
  LRRK2 RNA guide
caguauguuuccauuagcuc

SEQ ID NO: 87234 - RNA, 20 nt, Artificial Sequence
  LRRK2 RNA guide
cauacuggagcaccuuguug

SEQ ID NO: 87235 - RNA, 20 nt, Artificial Sequence
  LRRK2 RNA guide
ccaacaaggugcuccaguau

SEQ ID NO: 87236 - RNA, 20 nt, Artificial Sequence
  LRRK2 RNA guide
ccaguauguuuccauuagcu

SEQ ID NO: 87237 - RNA, 20 nt, Artificial Sequence
  LRRK2 RNA guide
cuaauggaaacauacuggag

SEQ ID NO: 87238 - RNA, 20 nt, Artificial Sequence
  LRRK2 RNA guide
cuccaguauguuuccauuag

SEQ ID NO: 87239 - RNA, 20 nt, Artificial Sequence
  LRRK2 RNA guide
gaaacauacuggagcaccuu

SEQ ID NO: 87240 - RNA, 20 nt, Artificial Sequence
  LRRK2 RNA guide
gagcuaauggaaacauacug

SEQ ID NO: 87241 - RNA, 20 nt, Artificial Sequence
  LRRK2 RNA guide
gcuaauggaaacauacugga

SEQ ID NO: 87242 - RNA, 20 nt, Artificial Sequence
  LRRK2 RNA guide
gcuccaguauguuuccauua

SEQ ID NO: 87243 - RNA, 20 nt, Artificial Sequence
  LRRK2 RNA guide
ggaaacauacuggagcaccu

SEQ ID NO: 87244 - RNA, 20 nt, Artificial Sequence
  LRRK2 RNA guide
ggggugagcuaauggaaaca

SEQ ID NO: 87245 - RNA, 20 nt, Artificial Sequence
  LRRK2 RNA guide
gggugagcuaauggaaacau

SEQ ID NO: 87246 - RNA, 20 nt, Artificial Sequence
  LRRK2 RNA guide
ggugagcuaauggaaacaua

SEQ ID NO: 87247 - RNA, 20 nt, Artificial Sequence
  LRRK2 RNA guide
ggugcuccaguauguuucca

SEQ ID NO: 87248 - RNA, 20 nt, Artificial Sequence
  LRRK2 RNA guide
guauguuuccauuagcucac

SEQ ID NO: 87249 - RNA, 20 nt, Artificial Sequence
  LRRK2 RNA guide
gugagcuaauggaaacauac

SEQ ID NO: 87250 - RNA, 20 nt, Artificial Sequence
  LRRK2 RNA guide
gugcuccaguauguuuccau

SEQ ID NO: 87251 - RNA, 20 nt, Artificial Sequence
  LRRK2 RNA guide
uaauggaaacauacuggagc

SEQ ID NO: 87252 - RNA, 20 nt, Artificial Sequence
  LRRK2 RNA guide
uauguuuccauuagcucacc

SEQ ID NO: 87253 - RNA, 20 nt, Artificial Sequence
  LRRK2 RNA guide
uccaguauguuuccauuagc

SEQ ID NO: 87254 - RNA, 20 nt, Artificial Sequence
  LRRK2 RNA guide
ugagcuaauggaaacauacu

SEQ ID NO: 87255 - RNA, 20 nt, Artificial Sequence
  LRRK2 RNA guide
ugcuccaguauguuuccauu

SEQ ID NO: 87256 - RNA, 20 nt, Artificial Sequence
  LRRK2 RNA guide
uggaaacauacuggagcacc

SEQ ID NO: 87257 - RNA, 21 nt, Artificial Sequence
  LRRK2 RNA guide
aaacauacuggagcaccuugu

SEQ ID NO: 87258 - RNA, 21 nt, Artificial Sequence
  LRRK2 RNA guide
aacaaggugcuccaguauguu

SEQ ID NO: 87259 - RNA, 21 nt, Artificial Sequence
  LRRK2 RNA guide
aacauacuggagcaccuuguu

SEQ ID NO: 87260 - RNA, 21 nt, Artificial Sequence
  LRRK2 RNA guide
aaggugcuccaguauguuucc

SEQ ID NO: 87261 - RNA, 21 nt, Artificial Sequence
  LRRK2 RNA guide
aauggaaacauacuggagcac

SEQ ID NO: 87262 - RNA, 21 nt, Artificial Sequence
  LRRK2 RNA guide
acaaggugcuccaguauguuu

SEQ ID NO: 87263 - RNA, 21 nt, Artificial Sequence
  LRRK2 RNA guide
acauacuggagcaccuuguug

SEQ ID NO: 87264 - RNA, 21 nt, Artificial Sequence
  LRRK2 RNA guide
agcuaauggaaacauacugga

SEQ ID NO: 87265 - RNA, 21 nt, Artificial Sequence
  LRRK2 RNA guide
aggggugagcuaauggaaaca

SEQ ID NO: 87266 - RNA, 21 nt, Artificial Sequence
  LRRK2 RNA guide
aggugcuccaguauguuucca

SEQ ID NO: 87267 - RNA, 21 nt, Artificial Sequence
  LRRK2 RNA guide
aguauguuuccauuagcucac

SEQ ID NO: 87268 - RNA, 21 nt, Artificial Sequence
  LRRK2 RNA guide
auggaaacauacuggagcacc

SEQ ID NO: 87269 - RNA, 21 nt, Artificial Sequence
  LRRK2 RNA guide
auguuuccauuagcucacccc

SEQ ID NO: 87270 - RNA, 21 nt, Artificial Sequence
  LRRK2 RNA guide
caacaaggugcuccaguaugu

SEQ ID NO: 87271 - RNA, 21 nt, Artificial Sequence
  LRRK2 RNA guide
caaggugcuccaguauguuuc

SEQ ID NO: 87272 - RNA, 21 nt, Artificial Sequence
  LRRK2 RNA guide
caguauguuuccauuagcuca

SEQ ID NO: 87273 - RNA, 21 nt, Artificial Sequence
  LRRK2 RNA guide
cauacuggagcaccuuguugg

SEQ ID NO: 87274 - RNA, 21 nt, Artificial Sequence
  LRRK2 RNA guide
ccaacaaggugcuccaguaug

SEQ ID NO: 87275 - RNA, 21 nt, Artificial Sequence
  LRRK2 RNA guide
ccaguauguuuccauuagcuc

SEQ ID NO: 87276 - RNA, 21 nt, Artificial Sequence
  LRRK2 RNA guide
cuaauggaaacauacuggagc

SEQ ID NO: 87277 - RNA, 21 nt, Artificial Sequence
  LRRK2 RNA guide
cuccaguauguuuccauuagc

SEQ ID NO: 87278 - RNA, 21 nt, Artificial Sequence
  LRRK2 RNA guide
gaaacauacuggagcaccuug

SEQ ID NO: 87279 - RNA, 21 nt, Artificial Sequence
  LRRK2 RNA guide
gagcuaauggaaacauacugg

SEQ ID NO: 87280 - RNA, 21 nt, Artificial Sequence
  LRRK2 RNA guide
gcuaauggaaacauacuggag

SEQ ID NO: 87281 - RNA, 21 nt, Artificial Sequence
  LRRK2 RNA guide
gcuccaguauguuuccauuag

SEQ ID NO: 87282 - RNA, 21 nt, Artificial Sequence
  LRRK2 RNA guide
ggaaacauacuggagcaccuu

SEQ ID NO: 87283 - RNA, 21 nt, Artificial Sequence
  LRRK2 RNA guide
ggggugagcuaauggaaacau

SEQ ID NO: 87284 - RNA, 21 nt, Artificial Sequence
  LRRK2 RNA guide
gggugagcuaauggaaacaua

SEQ ID NO: 87285 - RNA, 21 nt, Artificial Sequence
  LRRK2 RNA guide
ggugagcuaauggaaacauac

SEQ ID NO: 87286 - RNA, 21 nt, Artificial Sequence
  LRRK2 RNA guide
ggugcuccaguauguuuccau

SEQ ID NO: 87287 - RNA, 21 nt, Artificial Sequence
  LRRK2 RNA guide
guauguuuccauuagcucacc

SEQ ID NO: 87288 - RNA, 21 nt, Artificial Sequence
  LRRK2 RNA guide
gugagcuaauggaaacauacu

SEQ ID NO: 87289 - RNA, 21 nt, Artificial Sequence
  LRRK2 RNA guide
gugcuccaguauguuuccauu

SEQ ID NO: 87290 - RNA, 21 nt, Artificial Sequence
  LRRK2 RNA guide
uaauggaaacauacuggagca

SEQ ID NO: 87291 - RNA, 21 nt, Artificial Sequence
  LRRK2 RNA guide
uauguuuccauuagcucaccc

SEQ ID NO: 87292 - RNA, 21 nt, Artificial Sequence
  LRRK2 RNA guide
uccaacaaggugcuccaguau

SEQ ID NO: 87293 - RNA, 21 nt, Artificial Sequence
  LRRK2 RNA guide
uccaguauguuuccauuagcu

SEQ ID NO: 87294 - RNA, 21 nt, Artificial Sequence
  LRRK2 RNA guide
ugagcuaauggaaacauacug

SEQ ID NO: 87295 - RNA, 21 nt, Artificial Sequence
  LRRK2 RNA guide
ugcuccaguauguuuccauua

SEQ ID NO: 87296 - RNA, 21 nt, Artificial Sequence
  LRRK2 RNA guide
uggaaacauacuggagcaccu

SEQ ID NO: 87297 - RNA, 22 nt, Artificial Sequence
  LRRK2 RNA guide
aaacauacuggagcaccuuguu

SEQ ID NO: 87298 - RNA, 22 nt, Artificial Sequence
  LRRK2 RNA guide
aacaaggugcuccaguauguuu

SEQ ID NO: 87299 - RNA, 22 nt, Artificial Sequence
  LRRK2 RNA guide
aacauacuggagcaccuuguug

SEQ ID NO: 87300 - RNA, 22 nt, Artificial Sequence
  LRRK2 RNA guide
aaggugcuccaguauguuucca

SEQ ID NO: 87301 - RNA, 22 nt, Artificial Sequence
  LRRK2 RNA guide
aauggaaacauacuggagcacc

SEQ ID NO: 87302 - RNA, 22 nt, Artificial Sequence
  LRRK2 RNA guide
acaaggugcuccaguauguuuc

SEQ ID NO: 87303 - RNA, 22 nt, Artificial Sequence
  LRRK2 RNA guide
acauacuggagcaccuuguugg

SEQ ID NO: 87304 - RNA, 22 nt, Artificial Sequence
  LRRK2 RNA guide
agcuaauggaaacauacuggag

SEQ ID NO: 87305 - RNA, 22 nt, Artificial Sequence
  LRRK2 RNA guide
aggggugagcuaauggaaacau

SEQ ID NO: 87306 - RNA, 22 nt, Artificial Sequence
  LRRK2 RNA guide
aggugcuccaguauguuuccau

SEQ ID NO: 87307 - RNA, 22 nt, Artificial Sequence
  LRRK2 RNA guide
aguauguuuccauuagcucacc

SEQ ID NO: 87308 - RNA, 22 nt, Artificial Sequence
  LRRK2 RNA guide
auggaaacauacuggagcaccu

SEQ ID NO: 87309 - RNA, 22 nt, Artificial Sequence
  LRRK2 RNA guide
auguuuccauuagcucaccccu

SEQ ID NO: 87310 - RNA, 22 nt, Artificial Sequence
  LRRK2 RNA guide
caacaaggugcuccaguauguu

SEQ ID NO: 87311 - RNA, 22 nt, Artificial Sequence
  LRRK2 RNA guide
caaggugcuccaguauguuucc

SEQ ID NO: 87312 - RNA, 22 nt, Artificial Sequence
  LRRK2 RNA guide
caggggugagcuaauggaaaca

SEQ ID NO: 87313 - RNA, 22 nt, Artificial Sequence
  LRRK2 RNA guide
caguauguuuccauuagcucac

SEQ ID NO: 87314 - RNA, 22 nt, Artificial Sequence
  LRRK2 RNA guide
cauacuggagcaccuuguugga

SEQ ID NO: 87315 - RNA, 22 nt, Artificial Sequence
  LRRK2 RNA guide
ccaacaaggugcuccaguaugu

SEQ ID NO: 87316 - RNA, 22 nt, Artificial Sequence
  LRRK2 RNA guide
ccaguauguuuccauuagcuca

SEQ ID NO: 87317 - RNA, 22 nt, Artificial Sequence
  LRRK2 RNA guide
cuaauggaaacauacuggagca

SEQ ID NO: 87318 - RNA, 22 nt, Artificial Sequence
  LRRK2 RNA guide
cuccaguauguuuccauuagcu

SEQ ID NO: 87319 - RNA, 22 nt, Artificial Sequence
  LRRK2 RNA guide
gaaacauacuggagcaccuugu

SEQ ID NO: 87320 - RNA, 22 nt, Artificial Sequence
  LRRK2 RNA guide
gagcuaauggaaacauacugga

SEQ ID NO: 87321 - RNA, 22 nt, Artificial Sequence
  LRRK2 RNA guide
gcuaauggaaacauacuggagc

SEQ ID NO: 87322 - RNA, 22 nt, Artificial Sequence
  LRRK2 RNA guide
gcuccaguauguuuccauuagc

SEQ ID NO: 87323 - RNA, 22 nt, Artificial Sequence
  LRRK2 RNA guide
ggaaacauacuggagcaccuug

SEQ ID NO: 87324 - RNA, 22 nt, Artificial Sequence
  LRRK2 RNA guide
ggggugagcuaauggaaacaua

SEQ ID NO: 87325 - RNA, 22 nt, Artificial Sequence
  LRRK2 RNA guide
gggugagcuaauggaaacauac

SEQ ID NO: 87326 - RNA, 22 nt, Artificial Sequence
  LRRK2 RNA guide
ggugagcuaauggaaacauacu

SEQ ID NO: 87327 - RNA, 22 nt, Artificial Sequence
  LRRK2 RNA guide
ggugcuccaguauguuuccauu

SEQ ID NO: 87328 - RNA, 22 nt, Artificial Sequence
  LRRK2 RNA guide
guauguuuccauuagcucaccc

SEQ ID NO: 87329 - RNA, 22 nt, Artificial Sequence
  LRRK2 RNA guide
gugagcuaauggaaacauacug

SEQ ID NO: 87330 - RNA, 22 nt, Artificial Sequence
  LRRK2 RNA guide
gugcuccaguauguuuccauua

SEQ ID NO: 87331 - RNA, 22 nt, Artificial Sequence
  LRRK2 RNA guide
uaauggaaacauacuggagcac

SEQ ID NO: 87332 - RNA, 22 nt, Artificial Sequence
  LRRK2 RNA guide
uauguuuccauuagcucacccc

SEQ ID NO: 87333 - RNA, 22 nt, Artificial Sequence
  LRRK2 RNA guide
uccaacaaggugcuccaguaug

SEQ ID NO: 87334 - RNA, 22 nt, Artificial Sequence
  LRRK2 RNA guide
uccaguauguuuccauuagcuc

SEQ ID NO: 87335 - RNA, 22 nt, Artificial Sequence
  LRRK2 RNA guide
ugagcuaauggaaacauacugg

SEQ ID NO: 87336 - RNA, 22 nt, Artificial Sequence
  LRRK2 RNA guide
ugcuccaguauguuuccauuag

SEQ ID NO: 87337 - RNA, 22 nt, Artificial Sequence
  LRRK2 RNA guide
uggaaacauacuggagcaccuu

SEQ ID NO: 87338 - RNA, 22 nt, Artificial Sequence
  LRRK2 RNA guide
uuccaacaaggugcuccaguau

SEQ ID NO: 87339 - RNA, 20 nt, Artificial Sequence
  LRRK2 RNA guide
aacugcucccacuuccuucc

SEQ ID NO: 87340 - RNA, 20 nt, Artificial Sequence
  LRRK2 RNA guide
aaggaagugggagcaguugu

SEQ ID NO: 87341 - RNA, 20 nt, Artificial Sequence
  LRRK2 RNA guide
aagugggagcaguugucaau

SEQ ID NO: 87342 - RNA, 20 nt, Artificial Sequence
  LRRK2 RNA guide
aaucacauugacaacugcuc

SEQ ID NO: 87343 - RNA, 20 nt, Artificial Sequence
  LRRK2 RNA guide
acaacugcucccacuuccuu

SEQ ID NO: 87344 - RNA, 20 nt, Artificial Sequence
  LRRK2 RNA guide
acauugacaacugcucccac

SEQ ID NO: 87345 - RNA, 20 nt, Artificial Sequence
  LRRK2 RNA guide
accuuguuggaaggaagugg

SEQ ID NO: 87346 - RNA, 20 nt, Artificial Sequence
  LRRK2 RNA guide
acugcucccacuuccuucca

SEQ ID NO: 87347 - RNA, 20 nt, Artificial Sequence
  LRRK2 RNA guide
acuggagcaccuuguuggaa

SEQ ID NO: 87348 - RNA, 20 nt, Artificial Sequence
  LRRK2 RNA guide
acuuccuuccaacaaggugc

SEQ ID NO: 87349 - RNA, 20 nt, Artificial Sequence
  LRRK2 RNA guide
agcaccuuguuggaaggaag

SEQ ID NO: 87350 - RNA, 20 nt, Artificial Sequence
  LRRK2 RNA guide
aggaagugggagcaguuguc

SEQ ID NO: 87351 - RNA, 20 nt, Artificial Sequence
  LRRK2 RNA guide
aucacauugacaacugcucc

SEQ ID NO: 87352 - RNA, 20 nt, Artificial Sequence
  LRRK2 RNA guide
auugacaacugcucccacuu

SEQ ID NO: 87353 - RNA, 20 nt, Artificial Sequence
  LRRK2 RNA guide
caacugcucccacuuccuuc

SEQ ID NO: 87354 - RNA, 20 nt, Artificial Sequence
  LRRK2 RNA guide
cacauugacaacugcuccca

SEQ ID NO: 87355 - RNA, 20 nt, Artificial Sequence
  LRRK2 RNA guide
caccuuguuggaaggaagug

SEQ ID NO: 87356 - RNA, 20 nt, Artificial Sequence
  LRRK2 RNA guide
cacuuccuuccaacaaggug

SEQ ID NO: 87357 - RNA, 20 nt, Artificial Sequence
  LRRK2 RNA guide
cauugacaacugcucccacu

SEQ ID NO: 87358 - RNA, 20 nt, Artificial Sequence
  LRRK2 RNA guide
ccacuuccuuccaacaaggu

SEQ ID NO: 87359 - RNA, 20 nt, Artificial Sequence
  LRRK2 RNA guide
ccuuguuggaaggaaguggg

SEQ ID NO: 87360 - RNA, 20 nt, Artificial Sequence
  LRRK2 RNA guide
cucccacuuccuuccaacaa

SEQ ID NO: 87361 - RNA, 20 nt, Artificial Sequence
  LRRK2 RNA guide
cugcucccacuuccuuccaa

SEQ ID NO: 87362 - RNA, 20 nt, Artificial Sequence
  LRRK2 RNA guide
cuggagcaccuuguuggaag

SEQ ID NO: 87363 - RNA, 20 nt, Artificial Sequence
  LRRK2 RNA guide
cuuccuuccaacaaggugcu

SEQ ID NO: 87364 - RNA, 20 nt, Artificial Sequence
  LRRK2 RNA guide
cuuguuggaaggaaguggga

SEQ ID NO: 87365 - RNA, 20 nt, Artificial Sequence
  LRRK2 RNA guide
gaaggaagugggagcaguug

SEQ ID NO: 87366 - RNA, 20 nt, Artificial Sequence
  LRRK2 RNA guide
gaagugggagcaguugucaa

SEQ ID NO: 87367 - RNA, 20 nt, Artificial Sequence
  LRRK2 RNA guide
gacaacugcucccacuuccu

SEQ ID NO: 87368 - RNA, 20 nt, Artificial Sequence
  LRRK2 RNA guide
gagcaccuuguuggaaggaa

SEQ ID NO: 87369 - RNA, 20 nt, Artificial Sequence
  LRRK2 RNA guide
gcaccuuguuggaaggaagu

SEQ ID NO: 87370 - RNA, 20 nt, Artificial Sequence
  LRRK2 RNA guide
gcucccacuuccuuccaaca

SEQ ID NO: 87371 - RNA, 20 nt, Artificial Sequence
  LRRK2 RNA guide
ggaaggaagugggagcaguu

SEQ ID NO: 87372 - RNA, 20 nt, Artificial Sequence
  LRRK2 RNA guide
ggaagugggagcaguuguca

SEQ ID NO: 87373 - RNA, 20 nt, Artificial Sequence
  LRRK2 RNA guide
ggagcaccuuguuggaagga

SEQ ID NO: 87374 - RNA, 20 nt, Artificial Sequence
  LRRK2 RNA guide
guuggaaggaagugggagca

SEQ ID NO: 87375 - RNA, 20 nt, Artificial Sequence
  LRRK2 RNA guide
uacuggagcaccuuguugga

SEQ ID NO: 87376 - RNA, 20 nt, Artificial Sequence
  LRRK2 RNA guide
ucacauugacaacugcuccc

SEQ ID NO: 87377 - RNA, 20 nt, Artificial Sequence
  LRRK2 RNA guide
ucccacuuccuuccaacaag

SEQ ID NO: 87378 - RNA, 20 nt, Artificial Sequence
  LRRK2 RNA guide
ugacaacugcucccacuucc

SEQ ID NO: 87379 - RNA, 20 nt, Artificial Sequence
  LRRK2 RNA guide
ugcucccacuuccuuccaac

SEQ ID NO: 87380 - RNA, 20 nt, Artificial Sequence
  LRRK2 RNA guide
uggaaggaagugggagcagu

SEQ ID NO: 87381 - RNA, 20 nt, Artificial Sequence
  LRRK2 RNA guide
uggagcaccuuguuggaagg

SEQ ID NO: 87382 - RNA, 20 nt, Artificial Sequence
  LRRK2 RNA guide
uguuggaaggaagugggagc

SEQ ID NO: 87383 - RNA, 20 nt, Artificial Sequence
  LRRK2 RNA guide
uugacaacugcucccacuuc

SEQ ID NO: 87384 - RNA, 20 nt, Artificial Sequence
  LRRK2 RNA guide
uuggaaggaagugggagcag

SEQ ID NO: 87385 - RNA, 20 nt, Artificial Sequence
  LRRK2 RNA guide
uuguuggaaggaagugggag

SEQ ID NO: 87386 - RNA, 21 nt, Artificial Sequence
  LRRK2 RNA guide
aacugcucccacuuccuucca

SEQ ID NO: 87387 - RNA, 21 nt, Artificial Sequence
  LRRK2 RNA guide
aaggaagugggagcaguuguc

SEQ ID NO: 87388 - RNA, 21 nt, Artificial Sequence
  LRRK2 RNA guide
aagugggagcaguugucaaug

SEQ ID NO: 87389 - RNA, 21 nt, Artificial Sequence
  LRRK2 RNA guide
aaucacauugacaacugcucc

SEQ ID NO: 87390 - RNA, 21 nt, Artificial Sequence
  LRRK2 RNA guide
acaacugcucccacuuccuuc

SEQ ID NO: 87391 - RNA, 21 nt, Artificial Sequence
  LRRK2 RNA guide
acauugacaacugcucccacu

SEQ ID NO: 87392 - RNA, 21 nt, Artificial Sequence
  LRRK2 RNA guide
accuuguuggaaggaaguggg

SEQ ID NO: 87393 - RNA, 21 nt, Artificial Sequence
  LRRK2 RNA guide
acugcucccacuuccuuccaa

SEQ ID NO: 87394 - RNA, 21 nt, Artificial Sequence
  LRRK2 RNA guide
acuggagcaccuuguuggaag

SEQ ID NO: 87395 - RNA, 21 nt, Artificial Sequence
  LRRK2 RNA guide
acuuccuuccaacaaggugcu

SEQ ID NO: 87396 - RNA, 21 nt, Artificial Sequence
  LRRK2 RNA guide
agcaccuuguuggaaggaagu

SEQ ID NO: 87397 - RNA, 21 nt, Artificial Sequence
  LRRK2 RNA guide
aggaagugggagcaguuguca

SEQ ID NO: 87398 - RNA, 21 nt, Artificial Sequence
  LRRK2 RNA guide
aucacauugacaacugcuccc

SEQ ID NO: 87399 - RNA, 21 nt, Artificial Sequence
  LRRK2 RNA guide
auugacaacugcucccacuuc

SEQ ID NO: 87400 - RNA, 21 nt, Artificial Sequence
  LRRK2 RNA guide
caacugcucccacuuccuucc

SEQ ID NO: 87401 - RNA, 21 nt, Artificial Sequence
  LRRK2 RNA guide
cacauugacaacugcucccac

SEQ ID NO: 87402 - RNA, 21 nt, Artificial Sequence
  LRRK2 RNA guide
caccuuguuggaaggaagugg

SEQ ID NO: 87403 - RNA, 21 nt, Artificial Sequence
  LRRK2 RNA guide
cacuuccuuccaacaaggugc

SEQ ID NO: 87404 - RNA, 21 nt, Artificial Sequence
  LRRK2 RNA guide
cauugacaacugcucccacuu

SEQ ID NO: 87405 - RNA, 21 nt, Artificial Sequence
  LRRK2 RNA guide
ccacuuccuuccaacaaggug

SEQ ID NO: 87406 - RNA, 21 nt, Artificial Sequence
  LRRK2 RNA guide
cccacuuccuuccaacaaggu

SEQ ID NO: 87407 - RNA, 21 nt, Artificial Sequence
  LRRK2 RNA guide
ccuuguuggaaggaaguggga

SEQ ID NO: 87408 - RNA, 21 nt, Artificial Sequence
  LRRK2 RNA guide
cucccacuuccuuccaacaag

SEQ ID NO: 87409 - RNA, 21 nt, Artificial Sequence
  LRRK2 RNA guide
cugcucccacuuccuuccaac

SEQ ID NO: 87410 - RNA, 21 nt, Artificial Sequence
  LRRK2 RNA guide
cuggagcaccuuguuggaagg

SEQ ID NO: 87411 - RNA, 21 nt, Artificial Sequence
  LRRK2 RNA guide
cuuccuuccaacaaggugcuc

SEQ ID NO: 87412 - RNA, 21 nt, Artificial Sequence
  LRRK2 RNA guide
cuuguuggaaggaagugggag

SEQ ID NO: 87413 - RNA, 21 nt, Artificial Sequence
  LRRK2 RNA guide
gaaggaagugggagcaguugu

SEQ ID NO: 87414 - RNA, 21 nt, Artificial Sequence
  LRRK2 RNA guide
gaagugggagcaguugucaau

SEQ ID NO: 87415 - RNA, 21 nt, Artificial Sequence
  LRRK2 RNA guide
gacaacugcucccacuuccuu

SEQ ID NO: 87416 - RNA, 21 nt, Artificial Sequence
  LRRK2 RNA guide
gagcaccuuguuggaaggaag

SEQ ID NO: 87417 - RNA, 21 nt, Artificial Sequence
  LRRK2 RNA guide
gcaccuuguuggaaggaagug

SEQ ID NO: 87418 - RNA, 21 nt, Artificial Sequence
  LRRK2 RNA guide
gcucccacuuccuuccaacaa

SEQ ID NO: 87419 - RNA, 21 nt, Artificial Sequence
  LRRK2 RNA guide
ggaaggaagugggagcaguug

SEQ ID NO: 87420 - RNA, 21 nt, Artificial Sequence
  LRRK2 RNA guide
ggaagugggagcaguugucaa

SEQ ID NO: 87421 - RNA, 21 nt, Artificial Sequence
  LRRK2 RNA guide
ggagcaccuuguuggaaggaa

SEQ ID NO: 87422 - RNA, 21 nt, Artificial Sequence
  LRRK2 RNA guide
guacuggagcaccuuguugga

SEQ ID NO: 87423 - RNA, 21 nt, Artificial Sequence
  LRRK2 RNA guide
guuggaaggaagugggagcag

SEQ ID NO: 87424 - RNA, 21 nt, Artificial Sequence
  LRRK2 RNA guide
uaaucacauugacaacugcuc

SEQ ID NO: 87425 - RNA, 21 nt, Artificial Sequence
  LRRK2 RNA guide
uacuggagcaccuuguuggaa

SEQ ID NO: 87426 - RNA, 21 nt, Artificial Sequence
  LRRK2 RNA guide
ucacauugacaacugcuccca

SEQ ID NO: 87427 - RNA, 21 nt, Artificial Sequence
  LRRK2 RNA guide
ucccacuuccuuccaacaagg

SEQ ID NO: 87428 - RNA, 21 nt, Artificial Sequence
  LRRK2 RNA guide
ugacaacugcucccacuuccu

SEQ ID NO: 87429 - RNA, 21 nt, Artificial Sequence
  LRRK2 RNA guide
ugcucccacuuccuuccaaca

SEQ ID NO: 87430 - RNA, 21 nt, Artificial Sequence
  LRRK2 RNA guide
uggaaggaagugggagcaguu

SEQ ID NO: 87431 - RNA, 21 nt, Artificial Sequence
  LRRK2 RNA guide
uggagcaccuuguuggaagga

SEQ ID NO: 87432 - RNA, 21 nt, Artificial Sequence
  LRRK2 RNA guide
uguuggaaggaagugggagca

SEQ ID NO: 87433 - RNA, 21 nt, Artificial Sequence
  LRRK2 RNA guide
uugacaacugcucccacuucc

SEQ ID NO: 87434 - RNA, 21 nt, Artificial Sequence
  LRRK2 RNA guide
uuggaaggaagugggagcagu

SEQ ID NO: 87435 - RNA, 21 nt, Artificial Sequence
  LRRK2 RNA guide
uuguuggaaggaagugggagc

SEQ ID NO: 87436 - RNA, 22 nt, Artificial Sequence
  LRRK2 RNA guide
aacugcucccacuuccuuccaa

SEQ ID NO: 87437 - RNA, 22 nt, Artificial Sequence
  LRRK2 RNA guide
aaggaagugggagcaguuguca

SEQ ID NO: 87438 - RNA, 22 nt, Artificial Sequence
  LRRK2 RNA guide
aagugggagcaguugucaaugu

SEQ ID NO: 87439 - RNA, 22 nt, Artificial Sequence
  LRRK2 RNA guide
aaucacauugacaacugcuccc

SEQ ID NO: 87440 - RNA, 22 nt, Artificial Sequence
  LRRK2 RNA guide
acaacugcucccacuuccuucc

SEQ ID NO: 87441 - RNA, 22 nt, Artificial Sequence
  LRRK2 RNA guide
acauugacaacugcucccacuu

SEQ ID NO: 87442 - RNA, 22 nt, Artificial Sequence
  LRRK2 RNA guide
accuuguuggaaggaaguggga

SEQ ID NO: 87443 - RNA, 22 nt, Artificial Sequence
  LRRK2 RNA guide
acugcucccacuuccuuccaac

SEQ ID NO: 87444 - RNA, 22 nt, Artificial Sequence
  LRRK2 RNA guide
acuggagcaccuuguuggaagg

SEQ ID NO: 87445 - RNA, 22 nt, Artificial Sequence
  LRRK2 RNA guide
acuuccuuccaacaaggugcuc

SEQ ID NO: 87446 - RNA, 22 nt, Artificial Sequence
  LRRK2 RNA guide
agcaccuuguuggaaggaagug

SEQ ID NO: 87447 - RNA, 22 nt, Artificial Sequence
  LRRK2 RNA guide
aggaagugggagcaguugucaa

SEQ ID NO: 87448 - RNA, 22 nt, Artificial Sequence
  LRRK2 RNA guide
aucacauugacaacugcuccca

SEQ ID NO: 87449 - RNA, 22 nt, Artificial Sequence
  LRRK2 RNA guide
auugacaacugcucccacuucc

SEQ ID NO: 87450 - RNA, 22 nt, Artificial Sequence
  LRRK2 RNA guide
caacugcucccacuuccuucca

SEQ ID NO: 87451 - RNA, 22 nt, Artificial Sequence
  LRRK2 RNA guide
cacauugacaacugcucccacu

SEQ ID NO: 87452 - RNA, 22 nt, Artificial Sequence
  LRRK2 RNA guide
caccuuguuggaaggaaguggg

SEQ ID NO: 87453 - RNA, 22 nt, Artificial Sequence
  LRRK2 RNA guide
cacuuccuuccaacaaggugcu

SEQ ID NO: 87454 - RNA, 22 nt, Artificial Sequence
  LRRK2 RNA guide
cauugacaacugcucccacuuc

SEQ ID NO: 87455 - RNA, 22 nt, Artificial Sequence
  LRRK2 RNA guide
ccacuuccuuccaacaaggugc

SEQ ID NO: 87456 - RNA, 22 nt, Artificial Sequence
  LRRK2 RNA guide
cccacuuccuuccaacaaggug

SEQ ID NO: 87457 - RNA, 22 nt, Artificial Sequence
  LRRK2 RNA guide
ccuuguuggaaggaagugggag

SEQ ID NO: 87458 - RNA, 22 nt, Artificial Sequence
  LRRK2 RNA guide
cuaaucacauugacaacugcuc

SEQ ID NO: 87459 - RNA, 22 nt, Artificial Sequence
  LRRK2 RNA guide
cucccacuuccuuccaacaagg

SEQ ID NO: 87460 - RNA, 22 nt, Artificial Sequence
  LRRK2 RNA guide
cugcucccacuuccuuccaaca

SEQ ID NO: 87461 - RNA, 22 nt, Artificial Sequence
  LRRK2 RNA guide
cuggagcaccuuguuggaagga

SEQ ID NO: 87462 - RNA, 22 nt, Artificial Sequence
  LRRK2 RNA guide
cuuguuggaaggaagugggagc

SEQ ID NO: 87463 - RNA, 22 nt, Artificial Sequence
  LRRK2 RNA guide
gaaggaagugggagcaguuguc

SEQ ID NO: 87464 - RNA, 22 nt, Artificial Sequence
  LRRK2 RNA guide
gaagugggagcaguugucaaug

SEQ ID NO: 87465 - RNA, 22 nt, Artificial Sequence
  LRRK2 RNA guide
gacaacugcucccacuuccuuc

SEQ ID NO: 87466 - RNA, 22 nt, Artificial Sequence
  LRRK2 RNA guide
gagcaccuuguuggaaggaagu

SEQ ID NO: 87467 - RNA, 22 nt, Artificial Sequence
  LRRK2 RNA guide
gcaccuuguuggaaggaagugg

SEQ ID NO: 87468 - RNA, 22 nt, Artificial Sequence
  LRRK2 RNA guide
gcucccacuuccuuccaacaag

SEQ ID NO: 87469 - RNA, 22 nt, Artificial Sequence
  LRRK2 RNA guide
ggaaggaagugggagcaguugu

SEQ ID NO: 87470 - RNA, 22 nt, Artificial Sequence
  LRRK2 RNA guide
ggaagugggagcaguugucaau

SEQ ID NO: 87471 - RNA, 22 nt, Artificial Sequence
  LRRK2 RNA guide
ggagcaccuuguuggaaggaag

SEQ ID NO: 87472 - RNA, 22 nt, Artificial Sequence
  LRRK2 RNA guide
guacuggagcaccuuguuggaa

SEQ ID NO: 87473 - RNA, 22 nt, Artificial Sequence
  LRRK2 RNA guide
guuggaaggaagugggagcagu

SEQ ID NO: 87474 - RNA, 22 nt, Artificial Sequence
  LRRK2 RNA guide
uaaucacauugacaacugcucc

SEQ ID NO: 87475 - RNA, 22 nt, Artificial Sequence
  LRRK2 RNA guide
uacuggagcaccuuguuggaag

SEQ ID NO: 87476 - RNA, 22 nt, Artificial Sequence
  LRRK2 RNA guide
ucacauugacaacugcucccac

SEQ ID NO: 87477 - RNA, 22 nt, Artificial Sequence
  LRRK2 RNA guide
ucccacuuccuuccaacaaggu

SEQ ID NO: 87478 - RNA, 22 nt, Artificial Sequence
  LRRK2 RNA guide
ugacaacugcucccacuuccuu

SEQ ID NO: 87479 - RNA, 22 nt, Artificial Sequence
  LRRK2 RNA guide
ugcucccacuuccuuccaacaa

SEQ ID NO: 87480 - RNA, 22 nt, Artificial Sequence
  LRRK2 RNA guide
uggaaggaagugggagcaguug

SEQ ID NO: 87481 - RNA, 22 nt, Artificial Sequence
  LRRK2 RNA guide
uggagcaccuuguuggaaggaa

SEQ ID NO: 87482 - RNA, 22 nt, Artificial Sequence
  LRRK2 RNA guide
uguuggaaggaagugggagcag

SEQ ID NO: 87483 - RNA, 22 nt, Artificial Sequence
  LRRK2 RNA guide
uugacaacugcucccacuuccu

SEQ ID NO: 87484 - RNA, 22 nt, Artificial Sequence
  LRRK2 RNA guide
uuggaaggaagugggagcaguu

SEQ ID NO: 87485 - RNA, 22 nt, Artificial Sequence
  LRRK2 RNA guide
uuguuggaaggaagugggagca

SEQ ID NO: 87486 - RNA, 20 nt, Artificial Sequence
  LRRK2 RNA guide
aacugcucccaccuccuucc

SEQ ID NO: 87487 - RNA, 20 nt, Artificial Sequence
  LRRK2 RNA guide
aaggaggugggagcaguugu

SEQ ID NO: 87488 - RNA, 20 nt, Artificial Sequence
  LRRK2 RNA guide
acaacugcucccaccuccuu

SEQ ID NO: 87489 - RNA, 20 nt, Artificial Sequence
  LRRK2 RNA guide
accuccuuccaacaaggugc

SEQ ID NO: 87490 - RNA, 20 nt, Artificial Sequence
  LRRK2 RNA guide
accuuguuggaaggaggugg

SEQ ID NO: 87491 - RNA, 20 nt, Artificial Sequence
  LRRK2 RNA guide
acugcucccaccuccuucca

SEQ ID NO: 87492 - RNA, 20 nt, Artificial Sequence
  LRRK2 RNA guide
agcaccuuguuggaaggagg

SEQ ID NO: 87493 - RNA, 20 nt, Artificial Sequence
  LRRK2 RNA guide
aggaggugggagcaguuguc

SEQ ID NO: 87494 - RNA, 20 nt, Artificial Sequence
  LRRK2 RNA guide
aggugggagcaguugucaau

SEQ ID NO: 87495 - RNA, 20 nt, Artificial Sequence
  LRRK2 RNA guide
auugacaacugcucccaccu

SEQ ID NO: 87496 - RNA, 20 nt, Artificial Sequence
  LRRK2 RNA guide
caacugcucccaccuccuuc

SEQ ID NO: 87497 - RNA, 20 nt, Artificial Sequence
  LRRK2 RNA guide
caccuccuuccaacaaggug

SEQ ID NO: 87498 - RNA, 20 nt, Artificial Sequence
  LRRK2 RNA guide
caccuuguuggaaggaggug

SEQ ID NO: 87499 - RNA, 20 nt, Artificial Sequence
  LRRK2 RNA guide
cauugacaacugcucccacc

SEQ ID NO: 87500 - RNA, 20 nt, Artificial Sequence
  LRRK2 RNA guide
ccaccuccuuccaacaaggu

SEQ ID NO: 87501 - RNA, 20 nt, Artificial Sequence
  LRRK2 RNA guide
cccaccuccuuccaacaagg

SEQ ID NO: 87502 - RNA, 20 nt, Artificial Sequence
  LRRK2 RNA guide
ccuccuuccaacaaggugcu

SEQ ID NO: 87503 - RNA, 20 nt, Artificial Sequence
  LRRK2 RNA guide
ccuuguuggaaggagguggg

SEQ ID NO: 87504 - RNA, 20 nt, Artificial Sequence
  LRRK2 RNA guide
cucccaccuccuuccaacaa

SEQ ID NO: 87505 - RNA, 20 nt, Artificial Sequence
  LRRK2 RNA guide
cugcucccaccuccuuccaa

SEQ ID NO: 87506 - RNA, 20 nt, Artificial Sequence
  LRRK2 RNA guide
cuuguuggaaggagguggga

SEQ ID NO: 87507 - RNA, 20 nt, Artificial Sequence
  LRRK2 RNA guide
gaaggaggugggagcaguug

SEQ ID NO: 87508 - RNA, 20 nt, Artificial Sequence
  LRRK2 RNA guide
gacaacugcucccaccuccu

SEQ ID NO: 87509 - RNA, 20 nt, Artificial Sequence
  LRRK2 RNA guide
gagcaccuuguuggaaggag

SEQ ID NO: 87510 - RNA, 20 nt, Artificial Sequence
  LRRK2 RNA guide
gaggugggagcaguugucaa

SEQ ID NO: 87511 - RNA, 20 nt, Artificial Sequence
  LRRK2 RNA guide
gcaccuuguuggaaggaggu

SEQ ID NO: 87512 - RNA, 20 nt, Artificial Sequence
  LRRK2 RNA guide
gcucccaccuccuuccaaca

SEQ ID NO: 87513 - RNA, 20 nt, Artificial Sequence
  LRRK2 RNA guide
ggaaggaggugggagcaguu

SEQ ID NO: 87514 - RNA, 20 nt, Artificial Sequence
  LRRK2 RNA guide
ggaggugggagcaguuguca

SEQ ID NO: 87515 - RNA, 20 nt, Artificial Sequence
  LRRK2 RNA guide
guuggaaggaggugggagca

SEQ ID NO: 87516 - RNA, 20 nt, Artificial Sequence
  LRRK2 RNA guide
ucccaccuccuuccaacaag

SEQ ID NO: 87517 - RNA, 20 nt, Artificial Sequence
  LRRK2 RNA guide
ugacaacugcucccaccucc

SEQ ID NO: 87518 - RNA, 20 nt, Artificial Sequence
  LRRK2 RNA guide
ugcucccaccuccuuccaac

SEQ ID NO: 87519 - RNA, 20 nt, Artificial Sequence
  LRRK2 RNA guide
uggaaggaggugggagcagu

SEQ ID NO: 87520 - RNA, 20 nt, Artificial Sequence
  LRRK2 RNA guide
uguuggaaggaggugggagc

SEQ ID NO: 87521 - RNA, 20 nt, Artificial Sequence
  LRRK2 RNA guide
uugacaacugcucccaccuc

SEQ ID NO: 87522 - RNA, 20 nt, Artificial Sequence
  LRRK2 RNA guide
uuggaaggaggugggagcag

SEQ ID NO: 87523 - RNA, 20 nt, Artificial Sequence
  LRRK2 RNA guide
uuguuggaaggaggugggag

SEQ ID NO: 87524 - RNA, 21 nt, Artificial Sequence
  LRRK2 RNA guide
aacugcucccaccuccuucca

SEQ ID NO: 87525 - RNA, 21 nt, Artificial Sequence
  LRRK2 RNA guide
aaggaggugggagcaguuguc

SEQ ID NO: 87526 - RNA, 21 nt, Artificial Sequence
  LRRK2 RNA guide
acaacugcucccaccuccuuc

SEQ ID NO: 87527 - RNA, 21 nt, Artificial Sequence
  LRRK2 RNA guide
acauugacaacugcucccacc

SEQ ID NO: 87528 - RNA, 21 nt, Artificial Sequence
  LRRK2 RNA guide
accuccuuccaacaaggugcu

SEQ ID NO: 87529 - RNA, 21 nt, Artificial Sequence
  LRRK2 RNA guide
accuuguuggaaggagguggg

SEQ ID NO: 87530 - RNA, 21 nt, Artificial Sequence
  LRRK2 RNA guide
acugcucccaccuccuuccaa

SEQ ID NO: 87531 - RNA, 21 nt, Artificial Sequence
  LRRK2 RNA guide
agcaccuuguuggaaggaggu

SEQ ID NO: 87532 - RNA, 21 nt, Artificial Sequence
  LRRK2 RNA guide
aggaggugggagcaguuguca

SEQ ID NO: 87533 - RNA, 21 nt, Artificial Sequence
  LRRK2 RNA guide
aggugggagcaguugucaaug

SEQ ID NO: 87534 - RNA, 21 nt, Artificial Sequence
  LRRK2 RNA guide
auugacaacugcucccaccuc

SEQ ID NO: 87535 - RNA, 21 nt, Artificial Sequence
  LRRK2 RNA guide
caacugcucccaccuccuucc

SEQ ID NO: 87536 - RNA, 21 nt, Artificial Sequence
  LRRK2 RNA guide
caccuccuuccaacaaggugc

SEQ ID NO: 87537 - RNA, 21 nt, Artificial Sequence
  LRRK2 RNA guide
caccuuguuggaaggaggugg

SEQ ID NO: 87538 - RNA, 21 nt, Artificial Sequence
  LRRK2 RNA guide
cauugacaacugcucccaccu

SEQ ID NO: 87539 - RNA, 21 nt, Artificial Sequence
  LRRK2 RNA guide
ccaccuccuuccaacaaggug

SEQ ID NO: 87540 - RNA, 21 nt, Artificial Sequence
  LRRK2 RNA guide
cccaccuccuuccaacaaggu

SEQ ID NO: 87541 - RNA, 21 nt, Artificial Sequence
  LRRK2 RNA guide
ccuccuuccaacaaggugcuc

SEQ ID NO: 87542 - RNA, 21 nt, Artificial Sequence
  LRRK2 RNA guide
ccuuguuggaaggagguggga

SEQ ID NO: 87543 - RNA, 21 nt, Artificial Sequence
  LRRK2 RNA guide
cucccaccuccuuccaacaag

SEQ ID NO: 87544 - RNA, 21 nt, Artificial Sequence
  LRRK2 RNA guide
cugcucccaccuccuuccaac

SEQ ID NO: 87545 - RNA, 21 nt, Artificial Sequence
  LRRK2 RNA guide
cuuguuggaaggaggugggag

SEQ ID NO: 87546 - RNA, 21 nt, Artificial Sequence
  LRRK2 RNA guide
gaaggaggugggagcaguugu

SEQ ID NO: 87547 - RNA, 21 nt, Artificial Sequence
  LRRK2 RNA guide
gacaacugcucccaccuccuu

SEQ ID NO: 87548 - RNA, 21 nt, Artificial Sequence
  LRRK2 RNA guide
gagcaccuuguuggaaggagg

SEQ ID NO: 87549 - RNA, 21 nt, Artificial Sequence
  LRRK2 RNA guide
gaggugggagcaguugucaau

SEQ ID NO: 87550 - RNA, 21 nt, Artificial Sequence
  LRRK2 RNA guide
gcaccuuguuggaaggaggug

SEQ ID NO: 87551 - RNA, 21 nt, Artificial Sequence
  LRRK2 RNA guide
gcucccaccuccuuccaacaa

SEQ ID NO: 87552 - RNA, 21 nt, Artificial Sequence
  LRRK2 RNA guide
ggaaggaggugggagcaguug

SEQ ID NO: 87553 - RNA, 21 nt, Artificial Sequence
  LRRK2 RNA guide
ggagcaccuuguuggaaggag

SEQ ID NO: 87554 - RNA, 21 nt, Artificial Sequence
  LRRK2 RNA guide
ggaggugggagcaguugucaa

SEQ ID NO: 87555 - RNA, 21 nt, Artificial Sequence
  LRRK2 RNA guide
guuggaaggaggugggagcag

SEQ ID NO: 87556 - RNA, 21 nt, Artificial Sequence
  LRRK2 RNA guide
ucccaccuccuuccaacaagg

SEQ ID NO: 87557 - RNA, 21 nt, Artificial Sequence
  LRRK2 RNA guide
ugacaacugcucccaccuccu

SEQ ID NO: 87558 - RNA, 21 nt, Artificial Sequence
  LRRK2 RNA guide
ugcucccaccuccuuccaaca

SEQ ID NO: 87559 - RNA, 21 nt, Artificial Sequence
  LRRK2 RNA guide
uggaaggaggugggagcaguu

SEQ ID NO: 87560 - RNA, 21 nt, Artificial Sequence
  LRRK2 RNA guide
uguuggaaggaggugggagca

SEQ ID NO: 87561 - RNA, 21 nt, Artificial Sequence
  LRRK2 RNA guide
uugacaacugcucccaccucc

SEQ ID NO: 87562 - RNA, 21 nt, Artificial Sequence
  LRRK2 RNA guide
uuggaaggaggugggagcagu

SEQ ID NO: 87563 - RNA, 21 nt, Artificial Sequence
  LRRK2 RNA guide
uuguuggaaggaggugggagc

SEQ ID NO: 87564 - RNA, 22 nt, Artificial Sequence
  LRRK2 RNA guide
aacugcucccaccuccuuccaa

SEQ ID NO: 87565 - RNA, 22 nt, Artificial Sequence
  LRRK2 RNA guide
aaggaggugggagcaguuguca

SEQ ID NO: 87566 - RNA, 22 nt, Artificial Sequence
  LRRK2 RNA guide
acaacugcucccaccuccuucc

SEQ ID NO: 87567 - RNA, 22 nt, Artificial Sequence
  LRRK2 RNA guide
acauugacaacugcucccaccu

SEQ ID NO: 87568 - RNA, 22 nt, Artificial Sequence
  LRRK2 RNA guide
accuccuuccaacaaggugcuc

SEQ ID NO: 87569 - RNA, 22 nt, Artificial Sequence
  LRRK2 RNA guide
accuuguuggaaggagguggga

SEQ ID NO: 87570 - RNA, 22 nt, Artificial Sequence
  LRRK2 RNA guide
acugcucccaccuccuuccaac

SEQ ID NO: 87571 - RNA, 22 nt, Artificial Sequence
  LRRK2 RNA guide
agcaccuuguuggaaggaggug

SEQ ID NO: 87572 - RNA, 22 nt, Artificial Sequence
  LRRK2 RNA guide
aggaggugggagcaguugucaa

SEQ ID NO: 87573 - RNA, 22 nt, Artificial Sequence
  LRRK2 RNA guide
aggugggagcaguugucaaugu

SEQ ID NO: 87574 - RNA, 22 nt, Artificial Sequence
  LRRK2 RNA guide
auugacaacugcucccaccucc

SEQ ID NO: 87575 - RNA, 22 nt, Artificial Sequence
  LRRK2 RNA guide
caacugcucccaccuccuucca

SEQ ID NO: 87576 - RNA, 22 nt, Artificial Sequence
  LRRK2 RNA guide
cacauugacaacugcucccacc

SEQ ID NO: 87577 - RNA, 22 nt, Artificial Sequence
  LRRK2 RNA guide
caccuccuuccaacaaggugcu

SEQ ID NO: 87578 - RNA, 22 nt, Artificial Sequence
  LRRK2 RNA guide
caccuuguuggaaggagguggg

SEQ ID NO: 87579 - RNA, 22 nt, Artificial Sequence
  LRRK2 RNA guide
cauugacaacugcucccaccuc

SEQ ID NO: 87580 - RNA, 22 nt, Artificial Sequence
  LRRK2 RNA guide
ccaccuccuuccaacaaggugc

SEQ ID NO: 87581 - RNA, 22 nt, Artificial Sequence
  LRRK2 RNA guide
cccaccuccuuccaacaaggug

SEQ ID NO: 87582 - RNA, 22 nt, Artificial Sequence
  LRRK2 RNA guide
ccuccuuccaacaaggugcucc

SEQ ID NO: 87583 - RNA, 22 nt, Artificial Sequence
  LRRK2 RNA guide
ccuuguuggaaggaggugggag

SEQ ID NO: 87584 - RNA, 22 nt, Artificial Sequence
  LRRK2 RNA guide
cucccaccuccuuccaacaagg

SEQ ID NO: 87585 - RNA, 22 nt, Artificial Sequence
  LRRK2 RNA guide
cugcucccaccuccuuccaaca

SEQ ID NO: 87586 - RNA, 22 nt, Artificial Sequence
  LRRK2 RNA guide
cuuguuggaaggaggugggagc

SEQ ID NO: 87587 - RNA, 22 nt, Artificial Sequence
  LRRK2 RNA guide
gaaggaggugggagcaguuguc

SEQ ID NO: 87588 - RNA, 22 nt, Artificial Sequence
  LRRK2 RNA guide
gacaacugcucccaccuccuuc

SEQ ID NO: 87589 - RNA, 22 nt, Artificial Sequence
  LRRK2 RNA guide
gagcaccuuguuggaaggaggu

SEQ ID NO: 87590 - RNA, 22 nt, Artificial Sequence
  LRRK2 RNA guide
gaggugggagcaguugucaaug

SEQ ID NO: 87591 - RNA, 22 nt, Artificial Sequence
  LRRK2 RNA guide
gcaccuuguuggaaggaggugg

SEQ ID NO: 87592 - RNA, 22 nt, Artificial Sequence
  LRRK2 RNA guide
gcucccaccuccuuccaacaag

SEQ ID NO: 87593 - RNA, 22 nt, Artificial Sequence
  LRRK2 RNA guide
ggaaggaggugggagcaguugu

SEQ ID NO: 87594 - RNA, 22 nt, Artificial Sequence
  LRRK2 RNA guide
ggagcaccuuguuggaaggagg

SEQ ID NO: 87595 - RNA, 22 nt, Artificial Sequence
  LRRK2 RNA guide
ggaggugggagcaguugucaau

SEQ ID NO: 87596 - RNA, 22 nt, Artificial Sequence
  LRRK2 RNA guide
guuggaaggaggugggagcagu

SEQ ID NO: 87597 - RNA, 22 nt, Artificial Sequence
  LRRK2 RNA guide
ucccaccuccuuccaacaaggu

SEQ ID NO: 87598 - RNA, 22 nt, Artificial Sequence
  LRRK2 RNA guide
ugacaacugcucccaccuccuu

SEQ ID NO: 87599 - RNA, 22 nt, Artificial Sequence
  LRRK2 RNA guide
ugcucccaccuccuuccaacaa

SEQ ID NO: 87600 - RNA, 22 nt, Artificial Sequence
  LRRK2 RNA guide
uggaaggaggugggagcaguug

SEQ ID NO: 87601 - RNA, 22 nt, Artificial Sequence
  LRRK2 RNA guide
uggagcaccuuguuggaaggag

SEQ ID NO: 87602 - RNA, 22 nt, Artificial Sequence
  LRRK2 RNA guide
uguuggaaggaggugggagcag

SEQ ID NO: 87603 - RNA, 22 nt, Artificial Sequence
  LRRK2 RNA guide
uugacaacugcucccaccuccu

SEQ ID NO: 87604 - RNA, 22 nt, Artificial Sequence
  LRRK2 RNA guide
uuggaaggaggugggagcaguu

SEQ ID NO: 87605 - RNA, 22 nt, Artificial Sequence
  LRRK2 RNA guide
uuguuggaaggaggugggagca

SEQ ID NO: 87606 - RNA, 20 nt, Artificial Sequence
  LRRK2 RNA guide
acagauggccuaaucacauu

SEQ ID NO: 87607 - RNA, 20 nt, Artificial Sequence
  LRRK2 RNA guide
agauggccuaaucacauuga

SEQ ID NO: 87608 - RNA, 20 nt, Artificial Sequence
  LRRK2 RNA guide
agcaguugucaaugugauua

SEQ ID NO: 87609 - RNA, 20 nt, Artificial Sequence
  LRRK2 RNA guide
agugggagcaguugucaaug

SEQ ID NO: 87610 - RNA, 20 nt, Artificial Sequence
  LRRK2 RNA guide
aguugucaaugugauuaggc

SEQ ID NO: 87611 - RNA, 20 nt, Artificial Sequence
  LRRK2 RNA guide
auggccuaaucacauugaca

SEQ ID NO: 87612 - RNA, 20 nt, Artificial Sequence
  LRRK2 RNA guide
cacagauggccuaaucacau

SEQ ID NO: 87613 - RNA, 20 nt, Artificial Sequence
  LRRK2 RNA guide
cagauggccuaaucacauug

SEQ ID NO: 87614 - RNA, 20 nt, Artificial Sequence
  LRRK2 RNA guide
caguugucaaugugauuagg

SEQ ID NO: 87615 - RNA, 20 nt, Artificial Sequence
  LRRK2 RNA guide
cuaaucacauugacaacugc

SEQ ID NO: 87616 - RNA, 20 nt, Artificial Sequence
  LRRK2 RNA guide
gagcaguugucaaugugauu

SEQ ID NO: 87617 - RNA, 20 nt, Artificial Sequence
  LRRK2 RNA guide
gauggccuaaucacauugac

SEQ ID NO: 87618 - RNA, 20 nt, Artificial Sequence
  LRRK2 RNA guide
gcaguugucaaugugauuag

SEQ ID NO: 87619 - RNA, 20 nt, Artificial Sequence
  LRRK2 RNA guide
gccuaaucacauugacaacu

SEQ ID NO: 87620 - RNA, 20 nt, Artificial Sequence
  LRRK2 RNA guide
ggagcaguugucaaugugau

SEQ ID NO: 87621 - RNA, 20 nt, Artificial Sequence
  LRRK2 RNA guide
ggccuaaucacauugacaac

SEQ ID NO: 87622 - RNA, 20 nt, Artificial Sequence
  LRRK2 RNA guide
gggagcaguugucaauguga

SEQ ID NO: 87623 - RNA, 20 nt, Artificial Sequence
  LRRK2 RNA guide
gugggagcaguugucaaugu

SEQ ID NO: 87624 - RNA, 20 nt, Artificial Sequence
  LRRK2 RNA guide
guugucaaugugauuaggcc

SEQ ID NO: 87625 - RNA, 20 nt, Artificial Sequence
  LRRK2 RNA guide
uaaucacauugacaacugcu

SEQ ID NO: 87626 - RNA, 20 nt, Artificial Sequence
  LRRK2 RNA guide
uggccuaaucacauugacaa

SEQ ID NO: 87627 - RNA, 20 nt, Artificial Sequence
  LRRK2 RNA guide
ugggagcaguugucaaugug

SEQ ID NO: 87628 - RNA, 20 nt, Artificial Sequence
  LRRK2 RNA guide
ugucaaugugauuaggccau

SEQ ID NO: 87629 - RNA, 20 nt, Artificial Sequence
  LRRK2 RNA guide
uugucaaugugauuaggcca

SEQ ID NO: 87630 - RNA, 21 nt, Artificial Sequence
  LRRK2 RNA guide
acacagauggccuaaucacau

SEQ ID NO: 87631 - RNA, 21 nt, Artificial Sequence
  LRRK2 RNA guide
acagauggccuaaucacauug

SEQ ID NO: 87632 - RNA, 21 nt, Artificial Sequence
  LRRK2 RNA guide
agauggccuaaucacauugac

SEQ ID NO: 87633 - RNA, 21 nt, Artificial Sequence
  LRRK2 RNA guide
agcaguugucaaugugauuag

SEQ ID NO: 87634 - RNA, 21 nt, Artificial Sequence
  LRRK2 RNA guide
agugggagcaguugucaaugu

SEQ ID NO: 87635 - RNA, 21 nt, Artificial Sequence
  LRRK2 RNA guide
aguugucaaugugauuaggcc

SEQ ID NO: 87636 - RNA, 21 nt, Artificial Sequence
  LRRK2 RNA guide
auggccuaaucacauugacaa

SEQ ID NO: 87637 - RNA, 21 nt, Artificial Sequence
  LRRK2 RNA guide
cacagauggccuaaucacauu

SEQ ID NO: 87638 - RNA, 21 nt, Artificial Sequence
  LRRK2 RNA guide
cagauggccuaaucacauuga

SEQ ID NO: 87639 - RNA, 21 nt, Artificial Sequence
  LRRK2 RNA guide
caguugucaaugugauuaggc

SEQ ID NO: 87640 - RNA, 21 nt, Artificial Sequence
  LRRK2 RNA guide
ccuaaucacauugacaacugc

SEQ ID NO: 87641 - RNA, 21 nt, Artificial Sequence
  LRRK2 RNA guide
cuaaucacauugacaacugcu

SEQ ID NO: 87642 - RNA, 21 nt, Artificial Sequence
  LRRK2 RNA guide
gagcaguugucaaugugauua

SEQ ID NO: 87643 - RNA, 21 nt, Artificial Sequence
  LRRK2 RNA guide
gauggccuaaucacauugaca

SEQ ID NO: 87644 - RNA, 21 nt, Artificial Sequence
  LRRK2 RNA guide
gcaguugucaaugugauuagg

SEQ ID NO: 87645 - RNA, 21 nt, Artificial Sequence
  LRRK2 RNA guide
gccuaaucacauugacaacug

SEQ ID NO: 87646 - RNA, 21 nt, Artificial Sequence
  LRRK2 RNA guide
ggagcaguugucaaugugauu

SEQ ID NO: 87647 - RNA, 21 nt, Artificial Sequence
  LRRK2 RNA guide
ggccuaaucacauugacaacu

SEQ ID NO: 87648 - RNA, 21 nt, Artificial Sequence
  LRRK2 RNA guide
gggagcaguugucaaugugau

SEQ ID NO: 87649 - RNA, 21 nt, Artificial Sequence
  LRRK2 RNA guide
gugggagcaguugucaaugug

SEQ ID NO: 87650 - RNA, 21 nt, Artificial Sequence
  LRRK2 RNA guide
guugucaaugugauuaggcca

SEQ ID NO: 87651 - RNA, 21 nt, Artificial Sequence
  LRRK2 RNA guide
uggccuaaucacauugacaac

SEQ ID NO: 87652 - RNA, 21 nt, Artificial Sequence
  LRRK2 RNA guide
ugggagcaguugucaauguga

SEQ ID NO: 87653 - RNA, 21 nt, Artificial Sequence
  LRRK2 RNA guide
ugucaaugugauuaggccauc

SEQ ID NO: 87654 - RNA, 21 nt, Artificial Sequence
  LRRK2 RNA guide
uugucaaugugauuaggccau

SEQ ID NO: 87655 - RNA, 22 nt, Artificial Sequence
  LRRK2 RNA guide
aacacagauggccuaaucacau

SEQ ID NO: 87656 - RNA, 22 nt, Artificial Sequence
  LRRK2 RNA guide
acacagauggccuaaucacauu

SEQ ID NO: 87657 - RNA, 22 nt, Artificial Sequence
  LRRK2 RNA guide
acagauggccuaaucacauuga

SEQ ID NO: 87658 - RNA, 22 nt, Artificial Sequence
  LRRK2 RNA guide
agauggccuaaucacauugaca

SEQ ID NO: 87659 - RNA, 22 nt, Artificial Sequence
  LRRK2 RNA guide
agcaguugucaaugugauuagg

SEQ ID NO: 87660 - RNA, 22 nt, Artificial Sequence
  LRRK2 RNA guide
agugggagcaguugucaaugug

SEQ ID NO: 87661 - RNA, 22 nt, Artificial Sequence
  LRRK2 RNA guide
aguugucaaugugauuaggcca

SEQ ID NO: 87662 - RNA, 22 nt, Artificial Sequence
  LRRK2 RNA guide
auggccuaaucacauugacaac

SEQ ID NO: 87663 - RNA, 22 nt, Artificial Sequence
  LRRK2 RNA guide
cacagauggccuaaucacauug

SEQ ID NO: 87664 - RNA, 22 nt, Artificial Sequence
  LRRK2 RNA guide
cagauggccuaaucacauugac

SEQ ID NO: 87665 - RNA, 22 nt, Artificial Sequence
  LRRK2 RNA guide
caguugucaaugugauuaggcc

SEQ ID NO: 87666 - RNA, 22 nt, Artificial Sequence
  LRRK2 RNA guide
ccuaaucacauugacaacugcu

SEQ ID NO: 87667 - RNA, 22 nt, Artificial Sequence
  LRRK2 RNA guide
gagcaguugucaaugugauuag

SEQ ID NO: 87668 - RNA, 22 nt, Artificial Sequence
  LRRK2 RNA guide
gauggccuaaucacauugacaa

SEQ ID NO: 87669 - RNA, 22 nt, Artificial Sequence
  LRRK2 RNA guide
gcaguugucaaugugauuaggc

SEQ ID NO: 87670 - RNA, 22 nt, Artificial Sequence
  LRRK2 RNA guide
gccuaaucacauugacaacugc

SEQ ID NO: 87671 - RNA, 22 nt, Artificial Sequence
  LRRK2 RNA guide
ggagcaguugucaaugugauua

SEQ ID NO: 87672 - RNA, 22 nt, Artificial Sequence
  LRRK2 RNA guide
ggccuaaucacauugacaacug

SEQ ID NO: 87673 - RNA, 22 nt, Artificial Sequence
  LRRK2 RNA guide
gggagcaguugucaaugugauu

SEQ ID NO: 87674 - RNA, 22 nt, Artificial Sequence
  LRRK2 RNA guide
gugggagcaguugucaauguga

SEQ ID NO: 87675 - RNA, 22 nt, Artificial Sequence
  LRRK2 RNA guide
guugucaaugugauuaggccau

SEQ ID NO: 87676 - RNA, 22 nt, Artificial Sequence
  LRRK2 RNA guide
uggccuaaucacauugacaacu

SEQ ID NO: 87677 - RNA, 22 nt, Artificial Sequence
  LRRK2 RNA guide
ugggagcaguugucaaugugau

SEQ ID NO: 87678 - RNA, 22 nt, Artificial Sequence
  LRRK2 RNA guide
ugucaaugugauuaggccaucu

SEQ ID NO: 87679 - RNA, 22 nt, Artificial Sequence
  LRRK2 RNA guide
uugucaaugugauuaggccauc

SEQ ID NO: 87680 - RNA, 20 nt, Artificial Sequence
  LRRK2 RNA guide
aaacacagauggccuaauga

SEQ ID NO: 87681 - RNA, 20 nt, Artificial Sequence
  LRRK2 RNA guide
aacacagauggccuaaugac

SEQ ID NO: 87682 - RNA, 20 nt, Artificial Sequence
  LRRK2 RNA guide
aaugacauugacaacugcuc

SEQ ID NO: 87683 - RNA, 20 nt, Artificial Sequence
  LRRK2 RNA guide
aaugucauuaggccaucugu

SEQ ID NO: 87684 - RNA, 20 nt, Artificial Sequence
  LRRK2 RNA guide
acacagauggccuaaugaca

SEQ ID NO: 87685 - RNA, 20 nt, Artificial Sequence
  LRRK2 RNA guide
acagauggccuaaugacauu

SEQ ID NO: 87686 - RNA, 20 nt, Artificial Sequence
  LRRK2 RNA guide
agauggccuaaugacauuga

SEQ ID NO: 87687 - RNA, 20 nt, Artificial Sequence
  LRRK2 RNA guide
agcaguugucaaugucauua

SEQ ID NO: 87688 - RNA, 20 nt, Artificial Sequence
  LRRK2 RNA guide
aguugucaaugucauuaggc

SEQ ID NO: 87689 - RNA, 20 nt, Artificial Sequence
  LRRK2 RNA guide
augacauugacaacugcucc

SEQ ID NO: 87690 - RNA, 20 nt, Artificial Sequence
  LRRK2 RNA guide
auggccuaaugacauugaca

SEQ ID NO: 87691 - RNA, 20 nt, Artificial Sequence
  LRRK2 RNA guide
augucauuaggccaucugug

SEQ ID NO: 87692 - RNA, 20 nt, Artificial Sequence
  LRRK2 RNA guide
caaacacagauggccuaaug

SEQ ID NO: 87693 - RNA, 20 nt, Artificial Sequence
  LRRK2 RNA guide
caaugucauuaggccaucug

SEQ ID NO: 87694 - RNA, 20 nt, Artificial Sequence
  LRRK2 RNA guide
cacagauggccuaaugacau

SEQ ID NO: 87695 - RNA, 20 nt, Artificial Sequence
  LRRK2 RNA guide
caguugucaaugucauuagg

SEQ ID NO: 87696 - RNA, 20 nt, Artificial Sequence
  LRRK2 RNA guide
ccuaaugacauugacaacug

SEQ ID NO: 87697 - RNA, 20 nt, Artificial Sequence
  LRRK2 RNA guide
cuaaugacauugacaacugc

SEQ ID NO: 87698 - RNA, 20 nt, Artificial Sequence
  LRRK2 RNA guide
gagcaguugucaaugucauu

SEQ ID NO: 87699 - RNA, 20 nt, Artificial Sequence
  LRRK2 RNA guide
gauggccuaaugacauugac

SEQ ID NO: 87700 - RNA, 20 nt, Artificial Sequence
  LRRK2 RNA guide
gcaaacacagauggccuaau

SEQ ID NO: 87701 - RNA, 20 nt, Artificial Sequence
  LRRK2 RNA guide
gcaguugucaaugucauuag

SEQ ID NO: 87702 - RNA, 20 nt, Artificial Sequence
  LRRK2 RNA guide
gccuaaugacauugacaacu

SEQ ID NO: 87703 - RNA, 20 nt, Artificial Sequence
  LRRK2 RNA guide
ggagcaguugucaaugucau

SEQ ID NO: 87704 - RNA, 20 nt, Artificial Sequence
  LRRK2 RNA guide
ggccuaaugacauugacaac

SEQ ID NO: 87705 - RNA, 20 nt, Artificial Sequence
  LRRK2 RNA guide
gggagcaguugucaauguca

SEQ ID NO: 87706 - RNA, 20 nt, Artificial Sequence
  LRRK2 RNA guide
gucaaugucauuaggccauc

SEQ ID NO: 87707 - RNA, 20 nt, Artificial Sequence
  LRRK2 RNA guide
uaaugacauugacaacugcu

SEQ ID NO: 87708 - RNA, 20 nt, Artificial Sequence
  LRRK2 RNA guide
ucaaugucauuaggccaucu

SEQ ID NO: 87709 - RNA, 20 nt, Artificial Sequence
  LRRK2 RNA guide
ugacauugacaacugcuccc

SEQ ID NO: 87710 - RNA, 20 nt, Artificial Sequence
  LRRK2 RNA guide
uggccuaaugacauugacaa

SEQ ID NO: 87711 - RNA, 20 nt, Artificial Sequence
  LRRK2 RNA guide
ugggagcaguugucaauguc

SEQ ID NO: 87712 - RNA, 20 nt, Artificial Sequence
  LRRK2 RNA guide
ugucaaugucauuaggccau

SEQ ID NO: 87713 - RNA, 20 nt, Artificial Sequence
  LRRK2 RNA guide
uugucaaugucauuaggcca

SEQ ID NO: 87714 - RNA, 21 nt, Artificial Sequence
  LRRK2 RNA guide
aaacacagauggccuaaugac

SEQ ID NO: 87715 - RNA, 21 nt, Artificial Sequence
  LRRK2 RNA guide
aacacagauggccuaaugaca

SEQ ID NO: 87716 - RNA, 21 nt, Artificial Sequence
  LRRK2 RNA guide
aaugacauugacaacugcucc

SEQ ID NO: 87717 - RNA, 21 nt, Artificial Sequence
  LRRK2 RNA guide
aaugucauuaggccaucugug

SEQ ID NO: 87718 - RNA, 21 nt, Artificial Sequence
  LRRK2 RNA guide
acacagauggccuaaugacau

SEQ ID NO: 87719 - RNA, 21 nt, Artificial Sequence
  LRRK2 RNA guide
acagauggccuaaugacauug

SEQ ID NO: 87720 - RNA, 21 nt, Artificial Sequence
  LRRK2 RNA guide
agauggccuaaugacauugac

SEQ ID NO: 87721 - RNA, 21 nt, Artificial Sequence
  LRRK2 RNA guide
agcaaacacagauggccuaau

SEQ ID NO: 87722 - RNA, 21 nt, Artificial Sequence
  LRRK2 RNA guide
agcaguugucaaugucauuag

SEQ ID NO: 87723 - RNA, 21 nt, Artificial Sequence
  LRRK2 RNA guide
aguugucaaugucauuaggcc

SEQ ID NO: 87724 - RNA, 21 nt, Artificial Sequence
  LRRK2 RNA guide
augacauugacaacugcuccc

SEQ ID NO: 87725 - RNA, 21 nt, Artificial Sequence
  LRRK2 RNA guide
auggccuaaugacauugacaa

SEQ ID NO: 87726 - RNA, 21 nt, Artificial Sequence
  LRRK2 RNA guide
augucauuaggccaucugugu

SEQ ID NO: 87727 - RNA, 21 nt, Artificial Sequence
  LRRK2 RNA guide
caaacacagauggccuaauga

SEQ ID NO: 87728 - RNA, 21 nt, Artificial Sequence
  LRRK2 RNA guide
caaugucauuaggccaucugu

SEQ ID NO: 87729 - RNA, 21 nt, Artificial Sequence
  LRRK2 RNA guide
cacagauggccuaaugacauu

SEQ ID NO: 87730 - RNA, 21 nt, Artificial Sequence
  LRRK2 RNA guide
cagauggccuaaugacauuga

SEQ ID NO: 87731 - RNA, 21 nt, Artificial Sequence
  LRRK2 RNA guide
caguugucaaugucauuaggc

SEQ ID NO: 87732 - RNA, 21 nt, Artificial Sequence
  LRRK2 RNA guide
ccuaaugacauugacaacugc

SEQ ID NO: 87733 - RNA, 21 nt, Artificial Sequence
  LRRK2 RNA guide
cuaaugacauugacaacugcu

SEQ ID NO: 87734 - RNA, 21 nt, Artificial Sequence
  LRRK2 RNA guide
gagcaguugucaaugucauua

SEQ ID NO: 87735 - RNA, 21 nt, Artificial Sequence
  LRRK2 RNA guide
gauggccuaaugacauugaca

SEQ ID NO: 87736 - RNA, 21 nt, Artificial Sequence
  LRRK2 RNA guide
gcaaacacagauggccuaaug

SEQ ID NO: 87737 - RNA, 21 nt, Artificial Sequence
  LRRK2 RNA guide
gcaguugucaaugucauuagg

SEQ ID NO: 87738 - RNA, 21 nt, Artificial Sequence
  LRRK2 RNA guide
gccuaaugacauugacaacug

SEQ ID NO: 87739 - RNA, 21 nt, Artificial Sequence
  LRRK2 RNA guide
ggagcaguugucaaugucauu

SEQ ID NO: 87740 - RNA, 21 nt, Artificial Sequence
  LRRK2 RNA guide
ggccuaaugacauugacaacu

SEQ ID NO: 87741 - RNA, 21 nt, Artificial Sequence
  LRRK2 RNA guide
gggagcaguugucaaugucau

SEQ ID NO: 87742 - RNA, 21 nt, Artificial Sequence
  LRRK2 RNA guide
gucaaugucauuaggccaucu

SEQ ID NO: 87743 - RNA, 21 nt, Artificial Sequence
  LRRK2 RNA guide
gugggagcaguugucaauguc

SEQ ID NO: 87744 - RNA, 21 nt, Artificial Sequence
  LRRK2 RNA guide
guugucaaugucauuaggcca

SEQ ID NO: 87745 - RNA, 21 nt, Artificial Sequence
  LRRK2 RNA guide
uaaugacauugacaacugcuc

SEQ ID NO: 87746 - RNA, 21 nt, Artificial Sequence
  LRRK2 RNA guide
ucaaugucauuaggccaucug

SEQ ID NO: 87747 - RNA, 21 nt, Artificial Sequence
  LRRK2 RNA guide
ugacauugacaacugcuccca

SEQ ID NO: 87748 - RNA, 21 nt, Artificial Sequence
  LRRK2 RNA guide
uggccuaaugacauugacaac

SEQ ID NO: 87749 - RNA, 21 nt, Artificial Sequence
  LRRK2 RNA guide
ugggagcaguugucaauguca

SEQ ID NO: 87750 - RNA, 21 nt, Artificial Sequence
  LRRK2 RNA guide
ugucaaugucauuaggccauc

SEQ ID NO: 87751 - RNA, 21 nt, Artificial Sequence
  LRRK2 RNA guide
uugucaaugucauuaggccau

SEQ ID NO: 87752 - RNA, 22 nt, Artificial Sequence
  LRRK2 RNA guide
aaacacagauggccuaaugaca

SEQ ID NO: 87753 - RNA, 22 nt, Artificial Sequence
  LRRK2 RNA guide
aacacagauggccuaaugacau

SEQ ID NO: 87754 - RNA, 22 nt, Artificial Sequence
  LRRK2 RNA guide
aaugacauugacaacugcuccc

SEQ ID NO: 87755 - RNA, 22 nt, Artificial Sequence
  LRRK2 RNA guide
aaugucauuaggccaucugugu

SEQ ID NO: 87756 - RNA, 22 nt, Artificial Sequence
  LRRK2 RNA guide
acacagauggccuaaugacauu

SEQ ID NO: 87757 - RNA, 22 nt, Artificial Sequence
  LRRK2 RNA guide
acagauggccuaaugacauuga

SEQ ID NO: 87758 - RNA, 22 nt, Artificial Sequence
  LRRK2 RNA guide
agauggccuaaugacauugaca

SEQ ID NO: 87759 - RNA, 22 nt, Artificial Sequence
  LRRK2 RNA guide
agcaaacacagauggccuaaug

SEQ ID NO: 87760 - RNA, 22 nt, Artificial Sequence
  LRRK2 RNA guide
agcaguugucaaugucauuagg

SEQ ID NO: 87761 - RNA, 22 nt, Artificial Sequence
  LRRK2 RNA guide
agugggagcaguugucaauguc

SEQ ID NO: 87762 - RNA, 22 nt, Artificial Sequence
  LRRK2 RNA guide
aguugucaaugucauuaggcca

SEQ ID NO: 87763 - RNA, 22 nt, Artificial Sequence
  LRRK2 RNA guide
augacauugacaacugcuccca

SEQ ID NO: 87764 - RNA, 22 nt, Artificial Sequence
  LRRK2 RNA guide
auggccuaaugacauugacaac

SEQ ID NO: 87765 - RNA, 22 nt, Artificial Sequence
  LRRK2 RNA guide
augucauuaggccaucuguguu

SEQ ID NO: 87766 - RNA, 22 nt, Artificial Sequence
  LRRK2 RNA guide
caaacacagauggccuaaugac

SEQ ID NO: 87767 - RNA, 22 nt, Artificial Sequence
  LRRK2 RNA guide
caaugucauuaggccaucugug

SEQ ID NO: 87768 - RNA, 22 nt, Artificial Sequence
  LRRK2 RNA guide
caauuagcaaacacagauggcc

SEQ ID NO: 87769 - RNA, 22 nt, Artificial Sequence
  LRRK2 RNA guide
cacagauggccuaaugacauug

SEQ ID NO: 87770 - RNA, 22 nt, Artificial Sequence
  LRRK2 RNA guide
cagauggccuaaugacauugac

SEQ ID NO: 87771 - RNA, 22 nt, Artificial Sequence
  LRRK2 RNA guide
caguugucaaugucauuaggcc

SEQ ID NO: 87772 - RNA, 22 nt, Artificial Sequence
  LRRK2 RNA guide
ccuaaugacauugacaacugcu

SEQ ID NO: 87773 - RNA, 22 nt, Artificial Sequence
  LRRK2 RNA guide
cuaaugacauugacaacugcuc

SEQ ID NO: 87774 - RNA, 22 nt, Artificial Sequence
  LRRK2 RNA guide
gagcaguugucaaugucauuag

SEQ ID NO: 87775 - RNA, 22 nt, Artificial Sequence
  LRRK2 RNA guide
gauggccuaaugacauugacaa

SEQ ID NO: 87776 - RNA, 22 nt, Artificial Sequence
  LRRK2 RNA guide
gcaaacacagauggccuaauga

SEQ ID NO: 87777 - RNA, 22 nt, Artificial Sequence
  LRRK2 RNA guide
gcaguugucaaugucauuaggc

SEQ ID NO: 87778 - RNA, 22 nt, Artificial Sequence
  LRRK2 RNA guide
gccuaaugacauugacaacugc

SEQ ID NO: 87779 - RNA, 22 nt, Artificial Sequence
  LRRK2 RNA guide
ggagcaguugucaaugucauua

SEQ ID NO: 87780 - RNA, 22 nt, Artificial Sequence
  LRRK2 RNA guide
ggccuaaugacauugacaacug

SEQ ID NO: 87781 - RNA, 22 nt, Artificial Sequence
  LRRK2 RNA guide
gggagcaguugucaaugucauu

SEQ ID NO: 87782 - RNA, 22 nt, Artificial Sequence
  LRRK2 RNA guide
gucaaugucauuaggccaucug

SEQ ID NO: 87783 - RNA, 22 nt, Artificial Sequence
  LRRK2 RNA guide
gugggagcaguugucaauguca

SEQ ID NO: 87784 - RNA, 22 nt, Artificial Sequence
  LRRK2 RNA guide
guugucaaugucauuaggccau

SEQ ID NO: 87785 - RNA, 22 nt, Artificial Sequence
  LRRK2 RNA guide
uaaugacauugacaacugcucc

SEQ ID NO: 87786 - RNA, 22 nt, Artificial Sequence
  LRRK2 RNA guide
uagcaaacacagauggccuaau

SEQ ID NO: 87787 - RNA, 22 nt, Artificial Sequence
  LRRK2 RNA guide
ucaaugucauuaggccaucugu

SEQ ID NO: 87788 - RNA, 22 nt, Artificial Sequence
  LRRK2 RNA guide
ugacauugacaacugcucccac

SEQ ID NO: 87789 - RNA, 22 nt, Artificial Sequence
  LRRK2 RNA guide
uggccuaaugacauugacaacu

SEQ ID NO: 87790 - RNA, 22 nt, Artificial Sequence
  LRRK2 RNA guide
ugggagcaguugucaaugucau

SEQ ID NO: 87791 - RNA, 22 nt, Artificial Sequence
  LRRK2 RNA guide
ugucaaugucauuaggccaucu

SEQ ID NO: 87792 - RNA, 22 nt, Artificial Sequence
  LRRK2 RNA guide
uugucaaugucauuaggccauc

SEQ ID NO: 87793 - RNA, 20 nt, Artificial Sequence
  LRRK2 RNA guide
aauuccuuccuuccuuccau

SEQ ID NO: 87794 - RNA, 20 nt, Artificial Sequence
  LRRK2 RNA guide
agggauggaaggaaggaagg

SEQ ID NO: 87795 - RNA, 20 nt, Artificial Sequence
  LRRK2 RNA guide
auggaaggaaggaaggaauu

SEQ ID NO: 87796 - RNA, 20 nt, Artificial Sequence
  LRRK2 RNA guide
auuccuuccuuccuuccauc

SEQ ID NO: 87797 - RNA, 20 nt, Artificial Sequence
  LRRK2 RNA guide
cuggggaauuccuuccuucc

SEQ ID NO: 87798 - RNA, 20 nt, Artificial Sequence
  LRRK2 RNA guide
gaauuccuuccuuccuucca

SEQ ID NO: 87799 - RNA, 20 nt, Artificial Sequence
  LRRK2 RNA guide
gagggauggaaggaaggaag

SEQ ID NO: 87800 - RNA, 20 nt, Artificial Sequence
  LRRK2 RNA guide
gauggaaggaaggaaggaau

SEQ ID NO: 87801 - RNA, 20 nt, Artificial Sequence
  LRRK2 RNA guide
ggaauuccuuccuuccuucc

SEQ ID NO: 87802 - RNA, 20 nt, Artificial Sequence
  LRRK2 RNA guide
ggagggauggaaggaaggaa

SEQ ID NO: 87803 - RNA, 20 nt, Artificial Sequence
  LRRK2 RNA guide
ggauggaaggaaggaaggaa

SEQ ID NO: 87804 - RNA, 20 nt, Artificial Sequence
  LRRK2 RNA guide
gggaauuccuuccuuccuuc

SEQ ID NO: 87805 - RNA, 20 nt, Artificial Sequence
  LRRK2 RNA guide
gggauggaaggaaggaagga

SEQ ID NO: 87806 - RNA, 20 nt, Artificial Sequence
  LRRK2 RNA guide
ggggaauuccuuccuuccuu

SEQ ID NO: 87807 - RNA, 20 nt, Artificial Sequence
  LRRK2 RNA guide
uggggaauuccuuccuuccu

SEQ ID NO: 87808 - RNA, 21 nt, Artificial Sequence
  LRRK2 RNA guide
aauuccuuccuuccuuccauc

SEQ ID NO: 87809 - RNA, 21 nt, Artificial Sequence
  LRRK2 RNA guide
acuggggaauuccuuccuucc

SEQ ID NO: 87810 - RNA, 21 nt, Artificial Sequence
  LRRK2 RNA guide
agggauggaaggaaggaagga

SEQ ID NO: 87811 - RNA, 21 nt, Artificial Sequence
  LRRK2 RNA guide
auggaaggaaggaaggaauuc

SEQ ID NO: 87812 - RNA, 21 nt, Artificial Sequence
  LRRK2 RNA guide
auuccuuccuuccuuccaucc

SEQ ID NO: 87813 - RNA, 21 nt, Artificial Sequence
  LRRK2 RNA guide
cuggggaauuccuuccuuccu

SEQ ID NO: 87814 - RNA, 21 nt, Artificial Sequence
  LRRK2 RNA guide
gaauuccuuccuuccuuccau

SEQ ID NO: 87815 - RNA, 21 nt, Artificial Sequence
  LRRK2 RNA guide
gagggauggaaggaaggaagg

SEQ ID NO: 87816 - RNA, 21 nt, Artificial Sequence
  LRRK2 RNA guide
gauggaaggaaggaaggaauu

SEQ ID NO: 87817 - RNA, 21 nt, Artificial Sequence
  LRRK2 RNA guide
ggaauuccuuccuuccuucca

SEQ ID NO: 87818 - RNA, 21 nt, Artificial Sequence
  LRRK2 RNA guide
ggagggauggaaggaaggaag

SEQ ID NO: 87819 - RNA, 21 nt, Artificial Sequence
  LRRK2 RNA guide
ggauggaaggaaggaaggaau

SEQ ID NO: 87820 - RNA, 21 nt, Artificial Sequence
  LRRK2 RNA guide
gggaauuccuuccuuccuucc

SEQ ID NO: 87821 - RNA, 21 nt, Artificial Sequence
  LRRK2 RNA guide
gggagggauggaaggaaggaa

SEQ ID NO: 87822 - RNA, 21 nt, Artificial Sequence
  LRRK2 RNA guide
gggauggaaggaaggaaggaa

SEQ ID NO: 87823 - RNA, 21 nt, Artificial Sequence
  LRRK2 RNA guide
ggggaauuccuuccuuccuuc

SEQ ID NO: 87824 - RNA, 21 nt, Artificial Sequence
  LRRK2 RNA guide
uggggaauuccuuccuuccuu

SEQ ID NO: 87825 - RNA, 22 nt, Artificial Sequence
  LRRK2 RNA guide
aauuccuuccuuccuuccaucc

SEQ ID NO: 87826 - RNA, 22 nt, Artificial Sequence
  LRRK2 RNA guide
acuggggaauuccuuccuuccu

SEQ ID NO: 87827 - RNA, 22 nt, Artificial Sequence
  LRRK2 RNA guide
agggagggauggaaggaaggaa

SEQ ID NO: 87828 - RNA, 22 nt, Artificial Sequence
  LRRK2 RNA guide
agggauggaaggaaggaaggaa

SEQ ID NO: 87829 - RNA, 22 nt, Artificial Sequence
  LRRK2 RNA guide
auggaaggaaggaaggaauucc

SEQ ID NO: 87830 - RNA, 22 nt, Artificial Sequence
  LRRK2 RNA guide
auuccuuccuuccuuccauccc

SEQ ID NO: 87831 - RNA, 22 nt, Artificial Sequence
  LRRK2 RNA guide
cacuggggaauuccuuccuucc

SEQ ID NO: 87832 - RNA, 22 nt, Artificial Sequence
  LRRK2 RNA guide
cuggggaauuccuuccuuccuu

SEQ ID NO: 87833 - RNA, 22 nt, Artificial Sequence
  LRRK2 RNA guide
gaauuccuuccuuccuuccauc

SEQ ID NO: 87834 - RNA, 22 nt, Artificial Sequence
  LRRK2 RNA guide
gagggauggaaggaaggaagga

SEQ ID NO: 87835 - RNA, 22 nt, Artificial Sequence
  LRRK2 RNA guide
gauggaaggaaggaaggaauuc

SEQ ID NO: 87836 - RNA, 22 nt, Artificial Sequence
  LRRK2 RNA guide
ggaauuccuuccuuccuuccau

SEQ ID NO: 87837 - RNA, 22 nt, Artificial Sequence
  LRRK2 RNA guide
ggagggauggaaggaaggaagg

SEQ ID NO: 87838 - RNA, 22 nt, Artificial Sequence
  LRRK2 RNA guide
ggauggaaggaaggaaggaauu

SEQ ID NO: 87839 - RNA, 22 nt, Artificial Sequence
  LRRK2 RNA guide
gggaauuccuuccuuccuucca

SEQ ID NO: 87840 - RNA, 22 nt, Artificial Sequence
  LRRK2 RNA guide
gggagggauggaaggaaggaag

SEQ ID NO: 87841 - RNA, 22 nt, Artificial Sequence
  LRRK2 RNA guide
gggauggaaggaaggaaggaau

SEQ ID NO: 87842 - RNA, 22 nt, Artificial Sequence
  LRRK2 RNA guide
ggggaauuccuuccuuccuucc

SEQ ID NO: 87843 - RNA, 22 nt, Artificial Sequence
  LRRK2 RNA guide
uggggaauuccuuccuuccuuc

SEQ ID NO: 87844 - RNA, 20 nt, Artificial Sequence
  LRRK2 RNA guide
aaaagaagaaggaaggaagg

SEQ ID NO: 87845 - RNA, 20 nt, Artificial Sequence
  LRRK2 RNA guide
cccuuccuuccuuccuucuu

SEQ ID NO: 87846 - RNA, 21 nt, Artificial Sequence
  LRRK2 RNA guide
aaaaagaagaaggaaggaagg

SEQ ID NO: 87847 - RNA, 21 nt, Artificial Sequence
  LRRK2 RNA guide
aaaagaagaaggaaggaagga

SEQ ID NO: 87848 - RNA, 21 nt, Artificial Sequence
  LRRK2 RNA guide
cccuuccuuccuuccuucuuc

SEQ ID NO: 87849 - RNA, 21 nt, Artificial Sequence
  LRRK2 RNA guide
ucccuuccuuccuuccuucuu

SEQ ID NO: 87850 - RNA, 22 nt, Artificial Sequence
  LRRK2 RNA guide
aaaaaagaagaaggaaggaagg

SEQ ID NO: 87851 - RNA, 22 nt, Artificial Sequence
  LRRK2 RNA guide
aaaaagaagaaggaaggaagga

SEQ ID NO: 87852 - RNA, 22 nt, Artificial Sequence
  LRRK2 RNA guide
aaaagaagaaggaaggaaggaa

SEQ ID NO: 87853 - RNA, 22 nt, Artificial Sequence
  LRRK2 RNA guide
cccuuccuuccuuccuucuucu

SEQ ID NO: 87854 - RNA, 22 nt, Artificial Sequence
  LRRK2 RNA guide
cucccuuccuuccuuccuucuu

SEQ ID NO: 87855 - RNA, 22 nt, Artificial Sequence
  LRRK2 RNA guide
ucccuuccuuccuuccuucuuc

SEQ ID NO: 87856 - RNA, 20 nt, Artificial Sequence
  LRRK2 RNA guide
uccuuccuucuuccuuuuuu

SEQ ID NO: 87857 - RNA, 21 nt, Artificial Sequence
  LRRK2 RNA guide
uuccuuccuucuuccuuuuuu

SEQ ID NO: 87858 - RNA, 22 nt, Artificial Sequence
  LRRK2 RNA guide
aaaaaggaagaaggaaggaagg

SEQ ID NO: 87859 - RNA, 22 nt, Artificial Sequence
  LRRK2 RNA guide
cccuuccuuccuuccuucuucc

SEQ ID NO: 87860 - RNA, 22 nt, Artificial Sequence
  LRRK2 RNA guide
cuuccuuccuucuuccuuuuuu

SEQ ID NO: 87861 - RNA, 20 nt, Artificial Sequence
  LRRK2 RNA guide
aacggguaggaaguugagug

SEQ ID NO: 87862 - RNA, 20 nt, Artificial Sequence
  LRRK2 RNA guide
aacuuccuacccguucauuc

SEQ ID NO: 87863 - RNA, 20 nt, Artificial Sequence
  LRRK2 RNA guide
aauaggagaaugaacgggua

SEQ ID NO: 87864 - RNA, 20 nt, Artificial Sequence
  LRRK2 RNA guide
aaugaacggguaggaaguug

SEQ ID NO: 87865 - RNA, 20 nt, Artificial Sequence
  LRRK2 RNA guide
acccguucauucuccuauug

SEQ ID NO: 87866 - RNA, 20 nt, Artificial Sequence
  LRRK2 RNA guide
acggguaggaaguugaguga

SEQ ID NO: 87867 - RNA, 20 nt, Artificial Sequence
  LRRK2 RNA guide
acucaacuuccuacccguuc

SEQ ID NO: 87868 - RNA, 20 nt, Artificial Sequence
  LRRK2 RNA guide
acuuccuacccguucauucu

SEQ ID NO: 87869 - RNA, 20 nt, Artificial Sequence
  LRRK2 RNA guide
agaaugaacggguaggaagu

SEQ ID NO: 87870 - RNA, 20 nt, Artificial Sequence
  LRRK2 RNA guide
aggagaaugaacggguagga

SEQ ID NO: 87871 - RNA, 20 nt, Artificial Sequence
  LRRK2 RNA guide
auaggagaaugaacggguag

SEQ ID NO: 87872 - RNA, 20 nt, Artificial Sequence
  LRRK2 RNA guide
aucuauucacucaacuuccu

SEQ ID NO: 87873 - RNA, 20 nt, Artificial Sequence
  LRRK2 RNA guide
augaacggguaggaaguuga

SEQ ID NO: 87874 - RNA, 20 nt, Artificial Sequence
  LRRK2 RNA guide
auucacucaacuuccuaccc

SEQ ID NO: 87875 - RNA, 20 nt, Artificial Sequence
  LRRK2 RNA guide
caacuuccuacccguucauu

SEQ ID NO: 87876 - RNA, 20 nt, Artificial Sequence
  LRRK2 RNA guide
caauaggagaaugaacgggu

SEQ ID NO: 87877 - RNA, 20 nt, Artificial Sequence
  LRRK2 RNA guide
cacucaacuuccuacccguu

SEQ ID NO: 87878 - RNA, 20 nt, Artificial Sequence
  LRRK2 RNA guide
cccguucauucuccuauugc

SEQ ID NO: 87879 - RNA, 20 nt, Artificial Sequence
  LRRK2 RNA guide
ccguucauucuccuauugcc

SEQ ID NO: 87880 - RNA, 20 nt, Artificial Sequence
  LRRK2 RNA guide
ccuacccguucauucuccua

SEQ ID NO: 87881 - RNA, 20 nt, Artificial Sequence
  LRRK2 RNA guide
cguucauucuccuauugcca

SEQ ID NO: 87882 - RNA, 20 nt, Artificial Sequence
  LRRK2 RNA guide
cuacccguucauucuccuau

SEQ ID NO: 87883 - RNA, 20 nt, Artificial Sequence
  LRRK2 RNA guide
cuauucacucaacuuccuac

SEQ ID NO: 87884 - RNA, 20 nt, Artificial Sequence
  LRRK2 RNA guide
cucaacuuccuacccguuca

SEQ ID NO: 87885 - RNA, 20 nt, Artificial Sequence
  LRRK2 RNA guide
cuuccuacccguucauucuc

SEQ ID NO: 87886 - RNA, 20 nt, Artificial Sequence
  LRRK2 RNA guide
cuuuuuggcaauaggagaau

SEQ ID NO: 87887 - RNA, 20 nt, Artificial Sequence
  LRRK2 RNA guide
gaacggguaggaaguugagu

SEQ ID NO: 87888 - RNA, 20 nt, Artificial Sequence
  LRRK2 RNA guide
gaaugaacggguaggaaguu

SEQ ID NO: 87889 - RNA, 20 nt, Artificial Sequence
  LRRK2 RNA guide
gagaaugaacggguaggaag

SEQ ID NO: 87890 - RNA, 20 nt, Artificial Sequence
  LRRK2 RNA guide
gcaauaggagaaugaacggg

SEQ ID NO: 87891 - RNA, 20 nt, Artificial Sequence
  LRRK2 RNA guide
gcuuuuuggcaauaggagaa

SEQ ID NO: 87892 - RNA, 20 nt, Artificial Sequence
  LRRK2 RNA guide
ggagaaugaacggguaggaa

SEQ ID NO: 87893 - RNA, 20 nt, Artificial Sequence
  LRRK2 RNA guide
ggcaauaggagaaugaacgg

SEQ ID NO: 87894 - RNA, 20 nt, Artificial Sequence
  LRRK2 RNA guide
uacccguucauucuccuauu

SEQ ID NO: 87895 - RNA, 20 nt, Artificial Sequence
  LRRK2 RNA guide
uaggagaaugaacggguagg

SEQ ID NO: 87896 - RNA, 20 nt, Artificial Sequence
  LRRK2 RNA guide
uauucacucaacuuccuacc

SEQ ID NO: 87897 - RNA, 20 nt, Artificial Sequence
  LRRK2 RNA guide
ucaacuuccuacccguucau

SEQ ID NO: 87898 - RNA, 20 nt, Artificial Sequence
  LRRK2 RNA guide
ucacucaacuuccuacccgu

SEQ ID NO: 87899 - RNA, 20 nt, Artificial Sequence
  LRRK2 RNA guide
uccuacccguucauucuccu

SEQ ID NO: 87900 - RNA, 20 nt, Artificial Sequence
  LRRK2 RNA guide
ucuauucacucaacuuccua

SEQ ID NO: 87901 - RNA, 20 nt, Artificial Sequence
  LRRK2 RNA guide
ugaacggguaggaaguugag

SEQ ID NO: 87902 - RNA, 20 nt, Artificial Sequence
  LRRK2 RNA guide
uggcaauaggagaaugaacg

SEQ ID NO: 87903 - RNA, 20 nt, Artificial Sequence
  LRRK2 RNA guide
uucacucaacuuccuacccg

SEQ ID NO: 87904 - RNA, 20 nt, Artificial Sequence
  LRRK2 RNA guide
uuccuacccguucauucucc

SEQ ID NO: 87905 - RNA, 20 nt, Artificial Sequence
  LRRK2 RNA guide
uuggcaauaggagaaugaac

SEQ ID NO: 87906 - RNA, 20 nt, Artificial Sequence
  LRRK2 RNA guide
uuuggcaauaggagaaugaa

SEQ ID NO: 87907 - RNA, 20 nt, Artificial Sequence
  LRRK2 RNA guide
uuuuggcaauaggagaauga

SEQ ID NO: 87908 - RNA, 20 nt, Artificial Sequence
  LRRK2 RNA guide
uuuuuggcaauaggagaaug

SEQ ID NO: 87909 - RNA, 21 nt, Artificial Sequence
  LRRK2 RNA guide
aacggguaggaaguugaguga

SEQ ID NO: 87910 - RNA, 21 nt, Artificial Sequence
  LRRK2 RNA guide
aacuuccuacccguucauucu

SEQ ID NO: 87911 - RNA, 21 nt, Artificial Sequence
  LRRK2 RNA guide
aauaggagaaugaacggguag

SEQ ID NO: 87912 - RNA, 21 nt, Artificial Sequence
  LRRK2 RNA guide
aaugaacggguaggaaguuga

SEQ ID NO: 87913 - RNA, 21 nt, Artificial Sequence
  LRRK2 RNA guide
acccguucauucuccuauugc

SEQ ID NO: 87914 - RNA, 21 nt, Artificial Sequence
  LRRK2 RNA guide
acggguaggaaguugagugaa

SEQ ID NO: 87915 - RNA, 21 nt, Artificial Sequence
  LRRK2 RNA guide
acucaacuuccuacccguuca

SEQ ID NO: 87916 - RNA, 21 nt, Artificial Sequence
  LRRK2 RNA guide
acuuccuacccguucauucuc

SEQ ID NO: 87917 - RNA, 21 nt, Artificial Sequence
  LRRK2 RNA guide
agaaugaacggguaggaaguu

SEQ ID NO: 87918 - RNA, 21 nt, Artificial Sequence
  LRRK2 RNA guide
agcuuuuuggcaauaggagaa

SEQ ID NO: 87919 - RNA, 21 nt, Artificial Sequence
  LRRK2 RNA guide
aggagaaugaacggguaggaa

SEQ ID NO: 87920 - RNA, 21 nt, Artificial Sequence
  LRRK2 RNA guide
auaggagaaugaacggguagg

SEQ ID NO: 87921 - RNA, 21 nt, Artificial Sequence
  LRRK2 RNA guide
aucuauucacucaacuuccua

SEQ ID NO: 87922 - RNA, 21 nt, Artificial Sequence
  LRRK2 RNA guide
augaacggguaggaaguugag

SEQ ID NO: 87923 - RNA, 21 nt, Artificial Sequence
  LRRK2 RNA guide
auucacucaacuuccuacccg

SEQ ID NO: 87924 - RNA, 21 nt, Artificial Sequence
  LRRK2 RNA guide
caacuuccuacccguucauuc

SEQ ID NO: 87925 - RNA, 21 nt, Artificial Sequence
  LRRK2 RNA guide
caauaggagaaugaacgggua

SEQ ID NO: 87926 - RNA, 21 nt, Artificial Sequence
  LRRK2 RNA guide
cacucaacuuccuacccguuc

SEQ ID NO: 87927 - RNA, 21 nt, Artificial Sequence
  LRRK2 RNA guide
caucuauucacucaacuuccu

SEQ ID NO: 87928 - RNA, 21 nt, Artificial Sequence
  LRRK2 RNA guide
cccguucauucuccuauugcc

SEQ ID NO: 87929 - RNA, 21 nt, Artificial Sequence
  LRRK2 RNA guide
ccguucauucuccuauugcca

SEQ ID NO: 87930 - RNA, 21 nt, Artificial Sequence
  LRRK2 RNA guide
ccuacccguucauucuccuau

SEQ ID NO: 87931 - RNA, 21 nt, Artificial Sequence
  LRRK2 RNA guide
cguucauucuccuauugccaa

SEQ ID NO: 87932 - RNA, 21 nt, Artificial Sequence
  LRRK2 RNA guide
cuacccguucauucuccuauu

SEQ ID NO: 87933 - RNA, 21 nt, Artificial Sequence
  LRRK2 RNA guide
cuauucacucaacuuccuacc

SEQ ID NO: 87934 - RNA, 21 nt, Artificial Sequence
  LRRK2 RNA guide
cucaacuuccuacccguucau

SEQ ID NO: 87935 - RNA, 21 nt, Artificial Sequence
  LRRK2 RNA guide
cuuccuacccguucauucucc

SEQ ID NO: 87936 - RNA, 21 nt, Artificial Sequence
  LRRK2 RNA guide
cuuuuuggcaauaggagaaug

SEQ ID NO: 87937 - RNA, 21 nt, Artificial Sequence
  LRRK2 RNA guide
gaacggguaggaaguugagug

SEQ ID NO: 87938 - RNA, 21 nt, Artificial Sequence
  LRRK2 RNA guide
gaaugaacggguaggaaguug

SEQ ID NO: 87939 - RNA, 21 nt, Artificial Sequence
  LRRK2 RNA guide
gagaaugaacggguaggaagu

SEQ ID NO: 87940 - RNA, 21 nt, Artificial Sequence
  LRRK2 RNA guide
gcaauaggagaaugaacgggu

SEQ ID NO: 87941 - RNA, 21 nt, Artificial Sequence
  LRRK2 RNA guide
gcuuuuuggcaauaggagaau

SEQ ID NO: 87942 - RNA, 21 nt, Artificial Sequence
  LRRK2 RNA guide
ggagaaugaacggguaggaag

SEQ ID NO: 87943 - RNA, 21 nt, Artificial Sequence
  LRRK2 RNA guide
ggcaauaggagaaugaacggg

SEQ ID NO: 87944 - RNA, 21 nt, Artificial Sequence
  LRRK2 RNA guide
uacccguucauucuccuauug

SEQ ID NO: 87945 - RNA, 21 nt, Artificial Sequence
  LRRK2 RNA guide
uaggagaaugaacggguagga

SEQ ID NO: 87946 - RNA, 21 nt, Artificial Sequence
  LRRK2 RNA guide
uauucacucaacuuccuaccc

SEQ ID NO: 87947 - RNA, 21 nt, Artificial Sequence
  LRRK2 RNA guide
ucaacuuccuacccguucauu

SEQ ID NO: 87948 - RNA, 21 nt, Artificial Sequence
  LRRK2 RNA guide
ucacucaacuuccuacccguu

SEQ ID NO: 87949 - RNA, 21 nt, Artificial Sequence
  LRRK2 RNA guide
uccuacccguucauucuccua

SEQ ID NO: 87950 - RNA, 21 nt, Artificial Sequence
  LRRK2 RNA guide
ucuauucacucaacuuccuac

SEQ ID NO: 87951 - RNA, 21 nt, Artificial Sequence
  LRRK2 RNA guide
ugaacggguaggaaguugagu

SEQ ID NO: 87952 - RNA, 21 nt, Artificial Sequence
  LRRK2 RNA guide
uggcaauaggagaaugaacgg

SEQ ID NO: 87953 - RNA, 21 nt, Artificial Sequence
  LRRK2 RNA guide
uucacucaacuuccuacccgu

SEQ ID NO: 87954 - RNA, 21 nt, Artificial Sequence
  LRRK2 RNA guide
uuccuacccguucauucuccu

SEQ ID NO: 87955 - RNA, 21 nt, Artificial Sequence
  LRRK2 RNA guide
uuggcaauaggagaaugaacg

SEQ ID NO: 87956 - RNA, 21 nt, Artificial Sequence
  LRRK2 RNA guide
uuuggcaauaggagaaugaac

SEQ ID NO: 87957 - RNA, 21 nt, Artificial Sequence
  LRRK2 RNA guide
uuuuggcaauaggagaaugaa

SEQ ID NO: 87958 - RNA, 21 nt, Artificial Sequence
  LRRK2 RNA guide
uuuuuggcaauaggagaauga

SEQ ID NO: 87959 - RNA, 22 nt, Artificial Sequence
  LRRK2 RNA guide
aacggguaggaaguugagugaa

SEQ ID NO: 87960 - RNA, 22 nt, Artificial Sequence
  LRRK2 RNA guide
aacuuccuacccguucauucuc

SEQ ID NO: 87961 - RNA, 22 nt, Artificial Sequence
  LRRK2 RNA guide
aagcuuuuuggcaauaggagaa

SEQ ID NO: 87962 - RNA, 22 nt, Artificial Sequence
  LRRK2 RNA guide
aauaggagaaugaacggguagg

SEQ ID NO: 87963 - RNA, 22 nt, Artificial Sequence
  LRRK2 RNA guide
aaugaacggguaggaaguugag

SEQ ID NO: 87964 - RNA, 22 nt, Artificial Sequence
  LRRK2 RNA guide
acccguucauucuccuauugcc

SEQ ID NO: 87965 - RNA, 22 nt, Artificial Sequence
  LRRK2 RNA guide
acggguaggaaguugagugaau

SEQ ID NO: 87966 - RNA, 22 nt, Artificial Sequence
  LRRK2 RNA guide
acucaacuuccuacccguucau

SEQ ID NO: 87967 - RNA, 22 nt, Artificial Sequence
  LRRK2 RNA guide
acuuccuacccguucauucucc

SEQ ID NO: 87968 - RNA, 22 nt, Artificial Sequence
  LRRK2 RNA guide
agaaugaacggguaggaaguug

SEQ ID NO: 87969 - RNA, 22 nt, Artificial Sequence
  LRRK2 RNA guide
agcuuuuuggcaauaggagaau

SEQ ID NO: 87970 - RNA, 22 nt, Artificial Sequence
  LRRK2 RNA guide
aggagaaugaacggguaggaag

SEQ ID NO: 87971 - RNA, 22 nt, Artificial Sequence
  LRRK2 RNA guide
auaggagaaugaacggguagga

SEQ ID NO: 87972 - RNA, 22 nt, Artificial Sequence
  LRRK2 RNA guide
aucuauucacucaacuuccuac

SEQ ID NO: 87973 - RNA, 22 nt, Artificial Sequence
  LRRK2 RNA guide
augaacggguaggaaguugagu

SEQ ID NO: 87974 - RNA, 22 nt, Artificial Sequence
  LRRK2 RNA guide
auucacucaacuuccuacccgu

SEQ ID NO: 87975 - RNA, 22 nt, Artificial Sequence
  LRRK2 RNA guide
caacuuccuacccguucauucu

SEQ ID NO: 87976 - RNA, 22 nt, Artificial Sequence
  LRRK2 RNA guide
caauaggagaaugaacggguag

SEQ ID NO: 87977 - RNA, 22 nt, Artificial Sequence
  LRRK2 RNA guide
cacucaacuuccuacccguuca

SEQ ID NO: 87978 - RNA, 22 nt, Artificial Sequence
  LRRK2 RNA guide
caucuauucacucaacuuccua

SEQ ID NO: 87979 - RNA, 22 nt, Artificial Sequence
  LRRK2 RNA guide
ccaucuauucacucaacuuccu

SEQ ID NO: 87980 - RNA, 22 nt, Artificial Sequence
  LRRK2 RNA guide
cccguucauucuccuauugcca

SEQ ID NO: 87981 - RNA, 22 nt, Artificial Sequence
  LRRK2 RNA guide
ccguucauucuccuauugccaa

SEQ ID NO: 87982 - RNA, 22 nt, Artificial Sequence
  LRRK2 RNA guide
ccuacccguucauucuccuauu

SEQ ID NO: 87983 - RNA, 22 nt, Artificial Sequence
  LRRK2 RNA guide
cguucauucuccuauugccaaa

SEQ ID NO: 87984 - RNA, 22 nt, Artificial Sequence
  LRRK2 RNA guide
cuacccguucauucuccuauug

SEQ ID NO: 87985 - RNA, 22 nt, Artificial Sequence
  LRRK2 RNA guide
cuauucacucaacuuccuaccc

SEQ ID NO: 87986 - RNA, 22 nt, Artificial Sequence
  LRRK2 RNA guide
cucaacuuccuacccguucauu

SEQ ID NO: 87987 - RNA, 22 nt, Artificial Sequence
  LRRK2 RNA guide
cuuccuacccguucauucuccu

SEQ ID NO: 87988 - RNA, 22 nt, Artificial Sequence
  LRRK2 RNA guide
cuuuuuggcaauaggagaauga

SEQ ID NO: 87989 - RNA, 22 nt, Artificial Sequence
  LRRK2 RNA guide
gaacggguaggaaguugaguga

SEQ ID NO: 87990 - RNA, 22 nt, Artificial Sequence
  LRRK2 RNA guide
gaaugaacggguaggaaguuga

SEQ ID NO: 87991 - RNA, 22 nt, Artificial Sequence
  LRRK2 RNA guide
gagaaugaacggguaggaaguu

SEQ ID NO: 87992 - RNA, 22 nt, Artificial Sequence
  LRRK2 RNA guide
gcaauaggagaaugaacgggua

SEQ ID NO: 87993 - RNA, 22 nt, Artificial Sequence
  LRRK2 RNA guide
gcuuuuuggcaauaggagaaug

SEQ ID NO: 87994 - RNA, 22 nt, Artificial Sequence
  LRRK2 RNA guide
ggagaaugaacggguaggaagu

SEQ ID NO: 87995 - RNA, 22 nt, Artificial Sequence
  LRRK2 RNA guide
ggcaauaggagaaugaacgggu

SEQ ID NO: 87996 - RNA, 22 nt, Artificial Sequence
  LRRK2 RNA guide
uacccguucauucuccuauugc

SEQ ID NO: 87997 - RNA, 22 nt, Artificial Sequence
  LRRK2 RNA guide
uaggagaaugaacggguaggaa

SEQ ID NO: 87998 - RNA, 22 nt, Artificial Sequence
  LRRK2 RNA guide
uauucacucaacuuccuacccg

SEQ ID NO: 87999 - RNA, 22 nt, Artificial Sequence
  LRRK2 RNA guide
ucaacuuccuacccguucauuc

SEQ ID NO: 88000 - RNA, 22 nt, Artificial Sequence
  LRRK2 RNA guide
ucacucaacuuccuacccguuc

SEQ ID NO: 88001 - RNA, 22 nt, Artificial Sequence
  LRRK2 RNA guide
uccuacccguucauucuccuau

SEQ ID NO: 88002 - RNA, 22 nt, Artificial Sequence
  LRRK2 RNA guide
ucuauucacucaacuuccuacc

SEQ ID NO: 88003 - RNA, 22 nt, Artificial Sequence
  LRRK2 RNA guide
ugaacggguaggaaguugagug

SEQ ID NO: 88004 - RNA, 22 nt, Artificial Sequence
  LRRK2 RNA guide
uggcaauaggagaaugaacggg

SEQ ID NO: 88005 - RNA, 22 nt, Artificial Sequence
  LRRK2 RNA guide
uucacucaacuuccuacccguu

SEQ ID NO: 88006 - RNA, 22 nt, Artificial Sequence
  LRRK2 RNA guide
uuccuacccguucauucuccua

SEQ ID NO: 88007 - RNA, 22 nt, Artificial Sequence
  LRRK2 RNA guide
uuggcaauaggagaaugaacgg

SEQ ID NO: 88008 - RNA, 22 nt, Artificial Sequence
  LRRK2 RNA guide
uuuggcaauaggagaaugaacg

SEQ ID NO: 88009 - RNA, 22 nt, Artificial Sequence
  LRRK2 RNA guide
uuuuggcaauaggagaaugaac

SEQ ID NO: 88010 - RNA, 22 nt, Artificial Sequence
  LRRK2 RNA guide
uuuuuggcaauaggagaaugaa

SEQ ID NO: 88011 - RNA, 20 nt, Artificial Sequence
  LRRK2 RNA guide
aacuuccuacccauucauuc

SEQ ID NO: 88012 - RNA, 20 nt, Artificial Sequence
  LRRK2 RNA guide
aauaggagaaugaaugggua

SEQ ID NO: 88013 - RNA, 20 nt, Artificial Sequence
  LRRK2 RNA guide
aaugaauggguaggaaguug

SEQ ID NO: 88014 - RNA, 20 nt, Artificial Sequence
  LRRK2 RNA guide
aauggguaggaaguugagug

SEQ ID NO: 88015 - RNA, 20 nt, Artificial Sequence
  LRRK2 RNA guide
acccauucauucuccuauug

SEQ ID NO: 88016 - RNA, 20 nt, Artificial Sequence
  LRRK2 RNA guide
acucaacuuccuacccauuc

SEQ ID NO: 88017 - RNA, 20 nt, Artificial Sequence
  LRRK2 RNA guide
acuuccuacccauucauucu

SEQ ID NO: 88018 - RNA, 20 nt, Artificial Sequence
  LRRK2 RNA guide
agaaugaauggguaggaagu

SEQ ID NO: 88019 - RNA, 20 nt, Artificial Sequence
  LRRK2 RNA guide
aggagaaugaauggguagga

SEQ ID NO: 88020 - RNA, 20 nt, Artificial Sequence
  LRRK2 RNA guide
auaggagaaugaauggguag

SEQ ID NO: 88021 - RNA, 20 nt, Artificial Sequence
  LRRK2 RNA guide
augaauggguaggaaguuga

SEQ ID NO: 88022 - RNA, 20 nt, Artificial Sequence
  LRRK2 RNA guide
auggguaggaaguugaguga

SEQ ID NO: 88023 - RNA, 20 nt, Artificial Sequence
  LRRK2 RNA guide
caacuuccuacccauucauu

SEQ ID NO: 88024 - RNA, 20 nt, Artificial Sequence
  LRRK2 RNA guide
caauaggagaaugaaugggu

SEQ ID NO: 88025 - RNA, 20 nt, Artificial Sequence
  LRRK2 RNA guide
cacucaacuuccuacccauu

SEQ ID NO: 88026 - RNA, 20 nt, Artificial Sequence
  LRRK2 RNA guide
cauucauucuccuauugcca

SEQ ID NO: 88027 - RNA, 20 nt, Artificial Sequence
  LRRK2 RNA guide
ccauucauucuccuauugcc

SEQ ID NO: 88028 - RNA, 20 nt, Artificial Sequence
  LRRK2 RNA guide
cccauucauucuccuauugc

SEQ ID NO: 88029 - RNA, 20 nt, Artificial Sequence
  LRRK2 RNA guide
ccuacccauucauucuccua

SEQ ID NO: 88030 - RNA, 20 nt, Artificial Sequence
  LRRK2 RNA guide
cuacccauucauucuccuau

SEQ ID NO: 88031 - RNA, 20 nt, Artificial Sequence
  LRRK2 RNA guide
cucaacuuccuacccauuca

SEQ ID NO: 88032 - RNA, 20 nt, Artificial Sequence
  LRRK2 RNA guide
cuuccuacccauucauucuc

SEQ ID NO: 88033 - RNA, 20 nt, Artificial Sequence
  LRRK2 RNA guide
gaaugaauggguaggaaguu

SEQ ID NO: 88034 - RNA, 20 nt, Artificial Sequence
  LRRK2 RNA guide
gaauggguaggaaguugagu

SEQ ID NO: 88035 - RNA, 20 nt, Artificial Sequence
  LRRK2 RNA guide
gagaaugaauggguaggaag

SEQ ID NO: 88036 - RNA, 20 nt, Artificial Sequence
  LRRK2 RNA guide
gcaauaggagaaugaauggg

SEQ ID NO: 88037 - RNA, 20 nt, Artificial Sequence
  LRRK2 RNA guide
ggagaaugaauggguaggaa

SEQ ID NO: 88038 - RNA, 20 nt, Artificial Sequence
  LRRK2 RNA guide
ggcaauaggagaaugaaugg

SEQ ID NO: 88039 - RNA, 20 nt, Artificial Sequence
  LRRK2 RNA guide
uacccauucauucuccuauu

SEQ ID NO: 88040 - RNA, 20 nt, Artificial Sequence
  LRRK2 RNA guide
uaggagaaugaauggguagg

SEQ ID NO: 88041 - RNA, 20 nt, Artificial Sequence
  LRRK2 RNA guide
ucaacuuccuacccauucau

SEQ ID NO: 88042 - RNA, 20 nt, Artificial Sequence
  LRRK2 RNA guide
ucacucaacuuccuacccau

SEQ ID NO: 88043 - RNA, 20 nt, Artificial Sequence
  LRRK2 RNA guide
uccuacccauucauucuccu

SEQ ID NO: 88044 - RNA, 20 nt, Artificial Sequence
  LRRK2 RNA guide
ugaauggguaggaaguugag

SEQ ID NO: 88045 - RNA, 20 nt, Artificial Sequence
  LRRK2 RNA guide
uggcaauaggagaaugaaug

SEQ ID NO: 88046 - RNA, 20 nt, Artificial Sequence
  LRRK2 RNA guide
uucacucaacuuccuaccca

SEQ ID NO: 88047 - RNA, 20 nt, Artificial Sequence
  LRRK2 RNA guide
uuccuacccauucauucucc

SEQ ID NO: 88048 - RNA, 20 nt, Artificial Sequence
  LRRK2 RNA guide
uuggcaauaggagaaugaau

SEQ ID NO: 88049 - RNA, 21 nt, Artificial Sequence
  LRRK2 RNA guide
aacuuccuacccauucauucu

SEQ ID NO: 88050 - RNA, 21 nt, Artificial Sequence
  LRRK2 RNA guide
aauaggagaaugaauggguag

SEQ ID NO: 88051 - RNA, 21 nt, Artificial Sequence
  LRRK2 RNA guide
aaugaauggguaggaaguuga

SEQ ID NO: 88052 - RNA, 21 nt, Artificial Sequence
  LRRK2 RNA guide
aauggguaggaaguugaguga

SEQ ID NO: 88053 - RNA, 21 nt, Artificial Sequence
  LRRK2 RNA guide
acccauucauucuccuauugc

SEQ ID NO: 88054 - RNA, 21 nt, Artificial Sequence
  LRRK2 RNA guide
acucaacuuccuacccauuca

SEQ ID NO: 88055 - RNA, 21 nt, Artificial Sequence
  LRRK2 RNA guide
acuuccuacccauucauucuc

SEQ ID NO: 88056 - RNA, 21 nt, Artificial Sequence
  LRRK2 RNA guide
agaaugaauggguaggaaguu

SEQ ID NO: 88057 - RNA, 21 nt, Artificial Sequence
  LRRK2 RNA guide
aggagaaugaauggguaggaa

SEQ ID NO: 88058 - RNA, 21 nt, Artificial Sequence
  LRRK2 RNA guide
auaggagaaugaauggguagg

SEQ ID NO: 88059 - RNA, 21 nt, Artificial Sequence
  LRRK2 RNA guide
augaauggguaggaaguugag

SEQ ID NO: 88060 - RNA, 21 nt, Artificial Sequence
  LRRK2 RNA guide
auggguaggaaguugagugaa

SEQ ID NO: 88061 - RNA, 21 nt, Artificial Sequence
  LRRK2 RNA guide
auucacucaacuuccuaccca

SEQ ID NO: 88062 - RNA, 21 nt, Artificial Sequence
  LRRK2 RNA guide
caacuuccuacccauucauuc

SEQ ID NO: 88063 - RNA, 21 nt, Artificial Sequence
  LRRK2 RNA guide
caauaggagaaugaaugggua

SEQ ID NO: 88064 - RNA, 21 nt, Artificial Sequence
  LRRK2 RNA guide
cacucaacuuccuacccauuc

SEQ ID NO: 88065 - RNA, 21 nt, Artificial Sequence
  LRRK2 RNA guide
cauucauucuccuauugccaa

SEQ ID NO: 88066 - RNA, 21 nt, Artificial Sequence
  LRRK2 RNA guide
ccauucauucuccuauugcca

SEQ ID NO: 88067 - RNA, 21 nt, Artificial Sequence
  LRRK2 RNA guide
cccauucauucuccuauugcc

SEQ ID NO: 88068 - RNA, 21 nt, Artificial Sequence
  LRRK2 RNA guide
ccuacccauucauucuccuau

SEQ ID NO: 88069 - RNA, 21 nt, Artificial Sequence
  LRRK2 RNA guide
cuacccauucauucuccuauu

SEQ ID NO: 88070 - RNA, 21 nt, Artificial Sequence
  LRRK2 RNA guide
cucaacuuccuacccauucau

SEQ ID NO: 88071 - RNA, 21 nt, Artificial Sequence
  LRRK2 RNA guide
cuuccuacccauucauucucc

SEQ ID NO: 88072 - RNA, 21 nt, Artificial Sequence
  LRRK2 RNA guide
gaaugaauggguaggaaguug

SEQ ID NO: 88073 - RNA, 21 nt, Artificial Sequence
  LRRK2 RNA guide
gaauggguaggaaguugagug

SEQ ID NO: 88074 - RNA, 21 nt, Artificial Sequence
  LRRK2 RNA guide
gagaaugaauggguaggaagu

SEQ ID NO: 88075 - RNA, 21 nt, Artificial Sequence
  LRRK2 RNA guide
gcaauaggagaaugaaugggu

SEQ ID NO: 88076 - RNA, 21 nt, Artificial Sequence
  LRRK2 RNA guide
ggagaaugaauggguaggaag

SEQ ID NO: 88077 - RNA, 21 nt, Artificial Sequence
  LRRK2 RNA guide
ggcaauaggagaaugaauggg

SEQ ID NO: 88078 - RNA, 21 nt, Artificial Sequence
  LRRK2 RNA guide
uacccauucauucuccuauug

SEQ ID NO: 88079 - RNA, 21 nt, Artificial Sequence
  LRRK2 RNA guide
uaggagaaugaauggguagga

SEQ ID NO: 88080 - RNA, 21 nt, Artificial Sequence
  LRRK2 RNA guide
ucaacuuccuacccauucauu

SEQ ID NO: 88081 - RNA, 21 nt, Artificial Sequence
  LRRK2 RNA guide
ucacucaacuuccuacccauu

SEQ ID NO: 88082 - RNA, 21 nt, Artificial Sequence
  LRRK2 RNA guide
uccuacccauucauucuccua

SEQ ID NO: 88083 - RNA, 21 nt, Artificial Sequence
  LRRK2 RNA guide
ugaauggguaggaaguugagu

SEQ ID NO: 88084 - RNA, 21 nt, Artificial Sequence
  LRRK2 RNA guide
uggcaauaggagaaugaaugg

SEQ ID NO: 88085 - RNA, 21 nt, Artificial Sequence
  LRRK2 RNA guide
uucacucaacuuccuacccau

SEQ ID NO: 88086 - RNA, 21 nt, Artificial Sequence
  LRRK2 RNA guide
uuccuacccauucauucuccu

SEQ ID NO: 88087 - RNA, 21 nt, Artificial Sequence
  LRRK2 RNA guide
uuggcaauaggagaaugaaug

SEQ ID NO: 88088 - RNA, 21 nt, Artificial Sequence
  LRRK2 RNA guide
uuuggcaauaggagaaugaau

SEQ ID NO: 88089 - RNA, 22 nt, Artificial Sequence
  LRRK2 RNA guide
aacuuccuacccauucauucuc

SEQ ID NO: 88090 - RNA, 22 nt, Artificial Sequence
  LRRK2 RNA guide
aauaggagaaugaauggguagg

SEQ ID NO: 88091 - RNA, 22 nt, Artificial Sequence
  LRRK2 RNA guide
aaugaauggguaggaaguugag

SEQ ID NO: 88092 - RNA, 22 nt, Artificial Sequence
  LRRK2 RNA guide
aauggguaggaaguugagugaa

SEQ ID NO: 88093 - RNA, 22 nt, Artificial Sequence
  LRRK2 RNA guide
acccauucauucuccuauugcc

SEQ ID NO: 88094 - RNA, 22 nt, Artificial Sequence
  LRRK2 RNA guide
acucaacuuccuacccauucau

SEQ ID NO: 88095 - RNA, 22 nt, Artificial Sequence
  LRRK2 RNA guide
acuuccuacccauucauucucc

SEQ ID NO: 88096 - RNA, 22 nt, Artificial Sequence
  LRRK2 RNA guide
agaaugaauggguaggaaguug

SEQ ID NO: 88097 - RNA, 22 nt, Artificial Sequence
  LRRK2 RNA guide
aggagaaugaauggguaggaag

SEQ ID NO: 88098 - RNA, 22 nt, Artificial Sequence
  LRRK2 RNA guide
auaggagaaugaauggguagga

SEQ ID NO: 88099 - RNA, 22 nt, Artificial Sequence
  LRRK2 RNA guide
augaauggguaggaaguugagu

SEQ ID NO: 88100 - RNA, 22 nt, Artificial Sequence
  LRRK2 RNA guide
auggguaggaaguugagugaau

SEQ ID NO: 88101 - RNA, 22 nt, Artificial Sequence
  LRRK2 RNA guide
auucacucaacuuccuacccau

SEQ ID NO: 88102 - RNA, 22 nt, Artificial Sequence
  LRRK2 RNA guide
caacuuccuacccauucauucu

SEQ ID NO: 88103 - RNA, 22 nt, Artificial Sequence
  LRRK2 RNA guide
caauaggagaaugaauggguag

SEQ ID NO: 88104 - RNA, 22 nt, Artificial Sequence
  LRRK2 RNA guide
cacucaacuuccuacccauuca

SEQ ID NO: 88105 - RNA, 22 nt, Artificial Sequence
  LRRK2 RNA guide
cauucauucuccuauugccaaa

SEQ ID NO: 88106 - RNA, 22 nt, Artificial Sequence
  LRRK2 RNA guide
ccauucauucuccuauugccaa

SEQ ID NO: 88107 - RNA, 22 nt, Artificial Sequence
  LRRK2 RNA guide
cccauucauucuccuauugcca

SEQ ID NO: 88108 - RNA, 22 nt, Artificial Sequence
  LRRK2 RNA guide
ccuacccauucauucuccuauu

SEQ ID NO: 88109 - RNA, 22 nt, Artificial Sequence
  LRRK2 RNA guide
cuacccauucauucuccuauug

SEQ ID NO: 88110 - RNA, 22 nt, Artificial Sequence
  LRRK2 RNA guide
cucaacuuccuacccauucauu

SEQ ID NO: 88111 - RNA, 22 nt, Artificial Sequence
  LRRK2 RNA guide
cuuccuacccauucauucuccu

SEQ ID NO: 88112 - RNA, 22 nt, Artificial Sequence
  LRRK2 RNA guide
gaaugaauggguaggaaguuga

SEQ ID NO: 88113 - RNA, 22 nt, Artificial Sequence
  LRRK2 RNA guide
gaauggguaggaaguugaguga

SEQ ID NO: 88114 - RNA, 22 nt, Artificial Sequence
  LRRK2 RNA guide
gagaaugaauggguaggaaguu

SEQ ID NO: 88115 - RNA, 22 nt, Artificial Sequence
  LRRK2 RNA guide
gcaauaggagaaugaaugggua

SEQ ID NO: 88116 - RNA, 22 nt, Artificial Sequence
  LRRK2 RNA guide
ggagaaugaauggguaggaagu

SEQ ID NO: 88117 - RNA, 22 nt, Artificial Sequence
  LRRK2 RNA guide
ggcaauaggagaaugaaugggu

SEQ ID NO: 88118 - RNA, 22 nt, Artificial Sequence
  LRRK2 RNA guide
uacccauucauucuccuauugc

SEQ ID NO: 88119 - RNA, 22 nt, Artificial Sequence
  LRRK2 RNA guide
uaggagaaugaauggguaggaa

SEQ ID NO: 88120 - RNA, 22 nt, Artificial Sequence
  LRRK2 RNA guide
uauucacucaacuuccuaccca

SEQ ID NO: 88121 - RNA, 22 nt, Artificial Sequence
  LRRK2 RNA guide
ucaacuuccuacccauucauuc

SEQ ID NO: 88122 - RNA, 22 nt, Artificial Sequence
  LRRK2 RNA guide
ucacucaacuuccuacccauuc

SEQ ID NO: 88123 - RNA, 22 nt, Artificial Sequence
  LRRK2 RNA guide
uccuacccauucauucuccuau

SEQ ID NO: 88124 - RNA, 22 nt, Artificial Sequence
  LRRK2 RNA guide
ugaauggguaggaaguugagug

SEQ ID NO: 88125 - RNA, 22 nt, Artificial Sequence
  LRRK2 RNA guide
uggcaauaggagaaugaauggg

SEQ ID NO: 88126 - RNA, 22 nt, Artificial Sequence
  LRRK2 RNA guide
uucacucaacuuccuacccauu

SEQ ID NO: 88127 - RNA, 22 nt, Artificial Sequence
  LRRK2 RNA guide
uuccuacccauucauucuccua

SEQ ID NO: 88128 - RNA, 22 nt, Artificial Sequence
  LRRK2 RNA guide
uuggcaauaggagaaugaaugg

SEQ ID NO: 88129 - RNA, 22 nt, Artificial Sequence
  LRRK2 RNA guide
uuuggcaauaggagaaugaaug

SEQ ID NO: 88130 - RNA, 22 nt, Artificial Sequence
  LRRK2 RNA guide
uuuuggcaauaggagaaugaau

SEQ ID NO: 88131 - RNA, 20 nt, Artificial Sequence
  LRRK2 RNA guide
aaaagaaauaaccuaagggu

SEQ ID NO: 88132 - RNA, 20 nt, Artificial Sequence
  LRRK2 RNA guide
aacccuuagguuauuucuuu

SEQ ID NO: 88133 - RNA, 20 nt, Artificial Sequence
  LRRK2 RNA guide
acaaaagaaauaaccuaagg

SEQ ID NO: 88134 - RNA, 20 nt, Artificial Sequence
  LRRK2 RNA guide
acccuuagguuauuucuuuu

SEQ ID NO: 88135 - RNA, 20 nt, Artificial Sequence
  LRRK2 RNA guide
aguauaacccuuagguuauu

SEQ ID NO: 88136 - RNA, 20 nt, Artificial Sequence
  LRRK2 RNA guide
auaacccuuagguuauuucu

SEQ ID NO: 88137 - RNA, 20 nt, Artificial Sequence
  LRRK2 RNA guide
caaaagaaauaaccuaaggg

SEQ ID NO: 88138 - RNA, 20 nt, Artificial Sequence
  LRRK2 RNA guide
cccuuagguuauuucuuuug

SEQ ID NO: 88139 - RNA, 20 nt, Artificial Sequence
  LRRK2 RNA guide
ccuuagguuauuucuuuugu

SEQ ID NO: 88140 - RNA, 20 nt, Artificial Sequence
  LRRK2 RNA guide
guauaacccuuagguuauuu

SEQ ID NO: 88141 - RNA, 20 nt, Artificial Sequence
  LRRK2 RNA guide
uaacccuuagguuauuucuu

SEQ ID NO: 88142 - RNA, 20 nt, Artificial Sequence
  LRRK2 RNA guide
uauaacccuuagguuauuuc

SEQ ID NO: 88143 - RNA, 21 nt, Artificial Sequence
  LRRK2 RNA guide
acaaaagaaauaaccuaaggg

SEQ ID NO: 88144 - RNA, 21 nt, Artificial Sequence
  LRRK2 RNA guide
acccuuagguuauuucuuuug

SEQ ID NO: 88145 - RNA, 21 nt, Artificial Sequence
  LRRK2 RNA guide
caaaagaaauaaccuaagggu

SEQ ID NO: 88146 - RNA, 21 nt, Artificial Sequence
  LRRK2 RNA guide
cccuuagguuauuucuuuugu

SEQ ID NO: 88147 - RNA, 21 nt, Artificial Sequence
  LRRK2 RNA guide
gaguauaacccuuagguuauu

SEQ ID NO: 88148 - RNA, 21 nt, Artificial Sequence
  LRRK2 RNA guide
guauaacccuuagguuauuuc

SEQ ID NO: 88149 - RNA, 22 nt, Artificial Sequence
  LRRK2 RNA guide
aacccuuagguuauuucuuuug

SEQ ID NO: 88150 - RNA, 22 nt, Artificial Sequence
  LRRK2 RNA guide
acaaaagaaauaaccuaagggu

SEQ ID NO: 88151 - RNA, 22 nt, Artificial Sequence
  LRRK2 RNA guide
acccuuagguuauuucuuuugu

SEQ ID NO: 88152 - RNA, 22 nt, Artificial Sequence
  LRRK2 RNA guide
agaguauaacccuuagguuauu

SEQ ID NO: 88153 - RNA, 22 nt, Artificial Sequence
  LRRK2 RNA guide
aguauaacccuuagguuauuuc

SEQ ID NO: 88154 - RNA, 22 nt, Artificial Sequence
  LRRK2 RNA guide
caaaagaaauaaccuaaggguu

SEQ ID NO: 88155 - RNA, 22 nt, Artificial Sequence
  LRRK2 RNA guide
cccuuagguuauuucuuuugua

SEQ ID NO: 88156 - RNA, 22 nt, Artificial Sequence
  LRRK2 RNA guide
gaguauaacccuuagguuauuu

SEQ ID NO: 88157 - RNA, 22 nt, Artificial Sequence
  LRRK2 RNA guide
guauaacccuuagguuauuucu

SEQ ID NO: 88158 - RNA, 22 nt, Artificial Sequence
  LRRK2 RNA guide
uacaaaagaaauaaccuaaggg

SEQ ID NO: 88159 - RNA, 20 nt, Artificial Sequence
  LRRK2 RNA guide
aacccuuagguuauuucuua

SEQ ID NO: 88160 - RNA, 20 nt, Artificial Sequence
  LRRK2 RNA guide
acauaagaaauaaccuaagg

SEQ ID NO: 88161 - RNA, 20 nt, Artificial Sequence
  LRRK2 RNA guide
acccuuagguuauuucuuau

SEQ ID NO: 88162 - RNA, 20 nt, Artificial Sequence
  LRRK2 RNA guide
auaagaaauaaccuaagggu

SEQ ID NO: 88163 - RNA, 20 nt, Artificial Sequence
  LRRK2 RNA guide
cauaagaaauaaccuaaggg

SEQ ID NO: 88164 - RNA, 20 nt, Artificial Sequence
  LRRK2 RNA guide
cccuuagguuauuucuuaug

SEQ ID NO: 88165 - RNA, 20 nt, Artificial Sequence
  LRRK2 RNA guide
ccuuagguuauuucuuaugu

SEQ ID NO: 88166 - RNA, 21 nt, Artificial Sequence
  LRRK2 RNA guide
acauaagaaauaaccuaaggg

SEQ ID NO: 88167 - RNA, 21 nt, Artificial Sequence
  LRRK2 RNA guide
acccuuagguuauuucuuaug

SEQ ID NO: 88168 - RNA, 21 nt, Artificial Sequence
  LRRK2 RNA guide
cauaagaaauaaccuaagggu

SEQ ID NO: 88169 - RNA, 21 nt, Artificial Sequence
  LRRK2 RNA guide
cccuuagguuauuucuuaugu

SEQ ID NO: 88170 - RNA, 22 nt, Artificial Sequence
  LRRK2 RNA guide
aacccuuagguuauuucuuaug

SEQ ID NO: 88171 - RNA, 22 nt, Artificial Sequence
  LRRK2 RNA guide
acauaagaaauaaccuaagggu

SEQ ID NO: 88172 - RNA, 22 nt, Artificial Sequence
  LRRK2 RNA guide
acccuuagguuauuucuuaugu

SEQ ID NO: 88173 - RNA, 22 nt, Artificial Sequence
  LRRK2 RNA guide
cauaagaaauaaccuaaggguu

SEQ ID NO: 88174 - RNA, 22 nt, Artificial Sequence
  LRRK2 RNA guide
cccuuagguuauuucuuaugua

SEQ ID NO: 88175 - RNA, 22 nt, Artificial Sequence
  LRRK2 RNA guide
uacauaagaaauaaccuaaggg

SEQ ID NO: 88176 - RNA, 20 nt, Artificial Sequence
  LRRK2 RNA guide
guucuaauguucaauaguac

SEQ ID NO: 88177 - RNA, 22 nt, Artificial Sequence
  LRRK2 RNA guide
gaggaauaaguucuaauguuca

SEQ ID NO: 88178 - RNA, 20 nt, Artificial Sequence
  LRRK2 RNA guide
aacauuaggacuuauuccuc

SEQ ID NO: 88179 - RNA, 20 nt, Artificial Sequence
  LRRK2 RNA guide
aaguccuaauguucaauagu

SEQ ID NO: 88180 - RNA, 20 nt, Artificial Sequence
  LRRK2 RNA guide
acaguuagauaggaggaaua

SEQ ID NO: 88181 - RNA, 20 nt, Artificial Sequence
  LRRK2 RNA guide
acauuaggacuuauuccucc

SEQ ID NO: 88182 - RNA, 20 nt, Artificial Sequence
  LRRK2 RNA guide
acuauugaacauuaggacuu

SEQ ID NO: 88183 - RNA, 20 nt, Artificial Sequence
  LRRK2 RNA guide
agauaggaggaauaaguccu

SEQ ID NO: 88184 - RNA, 20 nt, Artificial Sequence
  LRRK2 RNA guide
aggaauaaguccuaauguuc

SEQ ID NO: 88185 - RNA, 20 nt, Artificial Sequence
  LRRK2 RNA guide
aggacuuauuccuccuaucu

SEQ ID NO: 88186 - RNA, 20 nt, Artificial Sequence
  LRRK2 RNA guide
aggaggaauaaguccuaaug

SEQ ID NO: 88187 - RNA, 20 nt, Artificial Sequence
  LRRK2 RNA guide
aguccuaauguucaauagua

SEQ ID NO: 88188 - RNA, 20 nt, Artificial Sequence
  LRRK2 RNA guide
aguuagauaggaggaauaag

SEQ ID NO: 88189 - RNA, 20 nt, Artificial Sequence
  LRRK2 RNA guide
auaggaggaauaaguccuaa

SEQ ID NO: 88190 - RNA, 20 nt, Artificial Sequence
  LRRK2 RNA guide
auuaggacuuauuccuccua

SEQ ID NO: 88191 - RNA, 20 nt, Artificial Sequence
  LRRK2 RNA guide
caguuagauaggaggaauaa

SEQ ID NO: 88192 - RNA, 20 nt, Artificial Sequence
  LRRK2 RNA guide
cauuaggacuuauuccuccu

SEQ ID NO: 88193 - RNA, 20 nt, Artificial Sequence
  LRRK2 RNA guide
cuauugaacauuaggacuua

SEQ ID NO: 88194 - RNA, 20 nt, Artificial Sequence
  LRRK2 RNA guide
gaacauuaggacuuauuccu

SEQ ID NO: 88195 - RNA, 20 nt, Artificial Sequence
  LRRK2 RNA guide
gaauaaguccuaauguucaa

SEQ ID NO: 88196 - RNA, 20 nt, Artificial Sequence
  LRRK2 RNA guide
gaggaauaaguccuaauguu

SEQ ID NO: 88197 - RNA, 20 nt, Artificial Sequence
  LRRK2 RNA guide
gauaggaggaauaaguccua

SEQ ID NO: 88198 - RNA, 20 nt, Artificial Sequence
  LRRK2 RNA guide
ggaauaaguccuaauguuca

SEQ ID NO: 88199 - RNA, 20 nt, Artificial Sequence
  LRRK2 RNA guide
ggacuuauuccuccuaucua

SEQ ID NO: 88200 - RNA, 20 nt, Artificial Sequence
  LRRK2 RNA guide
ggaggaauaaguccuaaugu

SEQ ID NO: 88201 - RNA, 20 nt, Artificial Sequence
  LRRK2 RNA guide
guacuauugaacauuaggac

SEQ ID NO: 88202 - RNA, 20 nt, Artificial Sequence
  LRRK2 RNA guide
guccuaauguucaauaguac

SEQ ID NO: 88203 - RNA, 20 nt, Artificial Sequence
  LRRK2 RNA guide
guuagauaggaggaauaagu

SEQ ID NO: 88204 - RNA, 20 nt, Artificial Sequence
  LRRK2 RNA guide
uaaguccuaauguucaauag

SEQ ID NO: 88205 - RNA, 20 nt, Artificial Sequence
  LRRK2 RNA guide
uacaguuagauaggaggaau

SEQ ID NO: 88206 - RNA, 20 nt, Artificial Sequence
  LRRK2 RNA guide
uacuauugaacauuaggacu

SEQ ID NO: 88207 - RNA, 20 nt, Artificial Sequence
  LRRK2 RNA guide
uagauaggaggaauaagucc

SEQ ID NO: 88208 - RNA, 20 nt, Artificial Sequence
  LRRK2 RNA guide
uaggacuuauuccuccuauc

SEQ ID NO: 88209 - RNA, 20 nt, Artificial Sequence
  LRRK2 RNA guide
uaggaggaauaaguccuaau

SEQ ID NO: 88210 - RNA, 20 nt, Artificial Sequence
  LRRK2 RNA guide
uccuaauguucaauaguaca

SEQ ID NO: 88211 - RNA, 20 nt, Artificial Sequence
  LRRK2 RNA guide
ugaacauuaggacuuauucc

SEQ ID NO: 88212 - RNA, 20 nt, Artificial Sequence
  LRRK2 RNA guide
uguacuauugaacauuagga

SEQ ID NO: 88213 - RNA, 20 nt, Artificial Sequence
  LRRK2 RNA guide
uuagauaggaggaauaaguc

SEQ ID NO: 88214 - RNA, 20 nt, Artificial Sequence
  LRRK2 RNA guide
uuaggacuuauuccuccuau

SEQ ID NO: 88215 - RNA, 20 nt, Artificial Sequence
  LRRK2 RNA guide
uugaacauuaggacuuauuc

SEQ ID NO: 88216 - RNA, 20 nt, Artificial Sequence
  LRRK2 RNA guide
uuguacuauugaacauuagg

SEQ ID NO: 88217 - RNA, 21 nt, Artificial Sequence
  LRRK2 RNA guide
aacauuaggacuuauuccucc

SEQ ID NO: 88218 - RNA, 21 nt, Artificial Sequence
  LRRK2 RNA guide
acaguuagauaggaggaauaa

SEQ ID NO: 88219 - RNA, 21 nt, Artificial Sequence
  LRRK2 RNA guide
acauuaggacuuauuccuccu

SEQ ID NO: 88220 - RNA, 21 nt, Artificial Sequence
  LRRK2 RNA guide
agauaggaggaauaaguccua

SEQ ID NO: 88221 - RNA, 21 nt, Artificial Sequence
  LRRK2 RNA guide
aggaauaaguccuaauguuca

SEQ ID NO: 88222 - RNA, 21 nt, Artificial Sequence
  LRRK2 RNA guide
aggacuuauuccuccuaucua

SEQ ID NO: 88223 - RNA, 21 nt, Artificial Sequence
  LRRK2 RNA guide
aggaggaauaaguccuaaugu

SEQ ID NO: 88224 - RNA, 21 nt, Artificial Sequence
  LRRK2 RNA guide
aguccuaauguucaauaguac

SEQ ID NO: 88225 - RNA, 21 nt, Artificial Sequence
  LRRK2 RNA guide
aguuagauaggaggaauaagu

SEQ ID NO: 88226 - RNA, 21 nt, Artificial Sequence
  LRRK2 RNA guide
auacaguuagauaggaggaau

SEQ ID NO: 88227 - RNA, 21 nt, Artificial Sequence
  LRRK2 RNA guide
auaggaggaauaaguccuaau

SEQ ID NO: 88228 - RNA, 21 nt, Artificial Sequence
  LRRK2 RNA guide
auuaggacuuauuccuccuau

SEQ ID NO: 88229 - RNA, 21 nt, Artificial Sequence
  LRRK2 RNA guide
caguuagauaggaggaauaag

SEQ ID NO: 88230 - RNA, 21 nt, Artificial Sequence
  LRRK2 RNA guide
cauuaggacuuauuccuccua

SEQ ID NO: 88231 - RNA, 21 nt, Artificial Sequence
  LRRK2 RNA guide
gaacauuaggacuuauuccuc

SEQ ID NO: 88232 - RNA, 21 nt, Artificial Sequence
  LRRK2 RNA guide
gaggaauaaguccuaauguuc

SEQ ID NO: 88233 - RNA, 21 nt, Artificial Sequence
  LRRK2 RNA guide
gauaggaggaauaaguccuaa

SEQ ID NO: 88234 - RNA, 21 nt, Artificial Sequence
  LRRK2 RNA guide
ggaauaaguccuaauguucaa

SEQ ID NO: 88235 - RNA, 21 nt, Artificial Sequence
  LRRK2 RNA guide
ggacuuauuccuccuaucuaa

SEQ ID NO: 88236 - RNA, 21 nt, Artificial Sequence
  LRRK2 RNA guide
ggaggaauaaguccuaauguu

SEQ ID NO: 88237 - RNA, 21 nt, Artificial Sequence
  LRRK2 RNA guide
guacuauugaacauuaggacu

SEQ ID NO: 88238 - RNA, 21 nt, Artificial Sequence
  LRRK2 RNA guide
guccuaauguucaauaguaca

SEQ ID NO: 88239 - RNA, 21 nt, Artificial Sequence
  LRRK2 RNA guide
guuagauaggaggaauaaguc

SEQ ID NO: 88240 - RNA, 21 nt, Artificial Sequence
  LRRK2 RNA guide
uacaguuagauaggaggaaua

SEQ ID NO: 88241 - RNA, 21 nt, Artificial Sequence
  LRRK2 RNA guide
uagauaggaggaauaaguccu

SEQ ID NO: 88242 - RNA, 21 nt, Artificial Sequence
  LRRK2 RNA guide
uaggacuuauuccuccuaucu

SEQ ID NO: 88243 - RNA, 21 nt, Artificial Sequence
  LRRK2 RNA guide
uaggaggaauaaguccuaaug

SEQ ID NO: 88244 - RNA, 21 nt, Artificial Sequence
  LRRK2 RNA guide
ugaacauuaggacuuauuccu

SEQ ID NO: 88245 - RNA, 21 nt, Artificial Sequence
  LRRK2 RNA guide
uguacuauugaacauuaggac

SEQ ID NO: 88246 - RNA, 21 nt, Artificial Sequence
  LRRK2 RNA guide
uuagauaggaggaauaagucc

SEQ ID NO: 88247 - RNA, 21 nt, Artificial Sequence
  LRRK2 RNA guide
uuaggacuuauuccuccuauc

SEQ ID NO: 88248 - RNA, 21 nt, Artificial Sequence
  LRRK2 RNA guide
uugaacauuaggacuuauucc

SEQ ID NO: 88249 - RNA, 22 nt, Artificial Sequence
  LRRK2 RNA guide
aacauuaggacuuauuccuccu

SEQ ID NO: 88250 - RNA, 22 nt, Artificial Sequence
  LRRK2 RNA guide
aaguccuaauguucaauaguac

SEQ ID NO: 88251 - RNA, 22 nt, Artificial Sequence
  LRRK2 RNA guide
acaguuagauaggaggaauaag

SEQ ID NO: 88252 - RNA, 22 nt, Artificial Sequence
  LRRK2 RNA guide
acauuaggacuuauuccuccua

SEQ ID NO: 88253 - RNA, 22 nt, Artificial Sequence
  LRRK2 RNA guide
agauaggaggaauaaguccuaa

SEQ ID NO: 88254 - RNA, 22 nt, Artificial Sequence
  LRRK2 RNA guide
aggaauaaguccuaauguucaa

SEQ ID NO: 88255 - RNA, 22 nt, Artificial Sequence
  LRRK2 RNA guide
aggacuuauuccuccuaucuaa

SEQ ID NO: 88256 - RNA, 22 nt, Artificial Sequence
  LRRK2 RNA guide
aggaggaauaaguccuaauguu

SEQ ID NO: 88257 - RNA, 22 nt, Artificial Sequence
  LRRK2 RNA guide
aguccuaauguucaauaguaca

SEQ ID NO: 88258 - RNA, 22 nt, Artificial Sequence
  LRRK2 RNA guide
aguuagauaggaggaauaaguc

SEQ ID NO: 88259 - RNA, 22 nt, Artificial Sequence
  LRRK2 RNA guide
auacaguuagauaggaggaaua

SEQ ID NO: 88260 - RNA, 22 nt, Artificial Sequence
  LRRK2 RNA guide
auaggaggaauaaguccuaaug

SEQ ID NO: 88261 - RNA, 22 nt, Artificial Sequence
  LRRK2 RNA guide
auuaggacuuauuccuccuauc

SEQ ID NO: 88262 - RNA, 22 nt, Artificial Sequence
  LRRK2 RNA guide
auugaacauuaggacuuauucc

SEQ ID NO: 88263 - RNA, 22 nt, Artificial Sequence
  LRRK2 RNA guide
caguuagauaggaggaauaagu

SEQ ID NO: 88264 - RNA, 22 nt, Artificial Sequence
  LRRK2 RNA guide
cauacaguuagauaggaggaau

SEQ ID NO: 88265 - RNA, 22 nt, Artificial Sequence
  LRRK2 RNA guide
cauuaggacuuauuccuccuau

SEQ ID NO: 88266 - RNA, 22 nt, Artificial Sequence
  LRRK2 RNA guide
gaacauuaggacuuauuccucc

SEQ ID NO: 88267 - RNA, 22 nt, Artificial Sequence
  LRRK2 RNA guide
gaggaauaaguccuaauguuca

SEQ ID NO: 88268 - RNA, 22 nt, Artificial Sequence
  LRRK2 RNA guide
gauaggaggaauaaguccuaau

SEQ ID NO: 88269 - RNA, 22 nt, Artificial Sequence
  LRRK2 RNA guide
ggaauaaguccuaauguucaau

SEQ ID NO: 88270 - RNA, 22 nt, Artificial Sequence
  LRRK2 RNA guide
ggacuuauuccuccuaucuaac

SEQ ID NO: 88271 - RNA, 22 nt, Artificial Sequence
  LRRK2 RNA guide
ggaggaauaaguccuaauguuc

SEQ ID NO: 88272 - RNA, 22 nt, Artificial Sequence
  LRRK2 RNA guide
guacuauugaacauuaggacuu

SEQ ID NO: 88273 - RNA, 22 nt, Artificial Sequence
  LRRK2 RNA guide
guccuaauguucaauaguacaa

SEQ ID NO: 88274 - RNA, 22 nt, Artificial Sequence
  LRRK2 RNA guide
guuagauaggaggaauaagucc

SEQ ID NO: 88275 - RNA, 22 nt, Artificial Sequence
  LRRK2 RNA guide
uacaguuagauaggaggaauaa

SEQ ID NO: 88276 - RNA, 22 nt, Artificial Sequence
  LRRK2 RNA guide
uagauaggaggaauaaguccua

SEQ ID NO: 88277 - RNA, 22 nt, Artificial Sequence
  LRRK2 RNA guide
uaggacuuauuccuccuaucua

SEQ ID NO: 88278 - RNA, 22 nt, Artificial Sequence
  LRRK2 RNA guide
uaggaggaauaaguccuaaugu

SEQ ID NO: 88279 - RNA, 22 nt, Artificial Sequence
  LRRK2 RNA guide
ugaacauuaggacuuauuccuc

SEQ ID NO: 88280 - RNA, 22 nt, Artificial Sequence
  LRRK2 RNA guide
uguacuauugaacauuaggacu

SEQ ID NO: 88281 - RNA, 22 nt, Artificial Sequence
  LRRK2 RNA guide
uuagauaggaggaauaaguccu

SEQ ID NO: 88282 - RNA, 22 nt, Artificial Sequence
  LRRK2 RNA guide
uuaggacuuauuccuccuaucu

SEQ ID NO: 88283 - RNA, 22 nt, Artificial Sequence
  LRRK2 RNA guide
uugaacauuaggacuuauuccu

SEQ ID NO: 88284 - RNA, 22 nt, Artificial Sequence
  LRRK2 RNA guide
uuguacuauugaacauuaggac

SEQ ID NO: 88285 - RNA, 22 nt, Artificial Sequence
  LRRK2 RNA guide
auaucacauguacucacucaua

SEQ ID NO: 88286 - RNA, 20 nt, Artificial Sequence
  LRRK2 RNA guide
acauguacucacucauaugu

SEQ ID NO: 88287 - RNA, 20 nt, Artificial Sequence
  LRRK2 RNA guide
acucacucauaugugagagc

SEQ ID NO: 88288 - RNA, 20 nt, Artificial Sequence
  LRRK2 RNA guide
aucacauguacucacucaua

SEQ ID NO: 88289 - RNA, 20 nt, Artificial Sequence
  LRRK2 RNA guide
cacauguacucacucauaug

SEQ ID NO: 88290 - RNA, 20 nt, Artificial Sequence
  LRRK2 RNA guide
cucacauaugagugaguaca

SEQ ID NO: 88291 - RNA, 20 nt, Artificial Sequence
  LRRK2 RNA guide
cucucacauaugagugagua

SEQ ID NO: 88292 - RNA, 20 nt, Artificial Sequence
  LRRK2 RNA guide
guacucacucauaugugaga

SEQ ID NO: 88293 - RNA, 20 nt, Artificial Sequence
  LRRK2 RNA guide
uacucacucauaugugagag

SEQ ID NO: 88294 - RNA, 20 nt, Artificial Sequence
  LRRK2 RNA guide
uagcucucacauaugaguga

SEQ ID NO: 88295 - RNA, 20 nt, Artificial Sequence
  LRRK2 RNA guide
ucacauguacucacucauau

SEQ ID NO: 88296 - RNA, 20 nt, Artificial Sequence
  LRRK2 RNA guide
ucucacauaugagugaguac

SEQ ID NO: 88297 - RNA, 20 nt, Artificial Sequence
  LRRK2 RNA guide
uguacucacucauaugugag

SEQ ID NO: 88298 - RNA, 20 nt, Artificial Sequence
  LRRK2 RNA guide
uuagcucucacauaugagug

SEQ ID NO: 88299 - RNA, 20 nt, Artificial Sequence
  LRRK2 RNA guide
uuuagcucucacauaugagu

SEQ ID NO: 88300 - RNA, 20 nt, Artificial Sequence
  LRRK2 RNA guide
uuuuagcucucacauaugag

SEQ ID NO: 88301 - RNA, 21 nt, Artificial Sequence
  LRRK2 RNA guide
acauguacucacucauaugug

SEQ ID NO: 88302 - RNA, 21 nt, Artificial Sequence
  LRRK2 RNA guide
acucacucauaugugagagcu

SEQ ID NO: 88303 - RNA, 21 nt, Artificial Sequence
  LRRK2 RNA guide
aucacauguacucacucauau

SEQ ID NO: 88304 - RNA, 21 nt, Artificial Sequence
  LRRK2 RNA guide
auguacucacucauaugugag

SEQ ID NO: 88305 - RNA, 21 nt, Artificial Sequence
  LRRK2 RNA guide
cacauguacucacucauaugu

SEQ ID NO: 88306 - RNA, 21 nt, Artificial Sequence
  LRRK2 RNA guide
cucacauaugagugaguacau

SEQ ID NO: 88307 - RNA, 21 nt, Artificial Sequence
  LRRK2 RNA guide
cucucacauaugagugaguac

SEQ ID NO: 88308 - RNA, 21 nt, Artificial Sequence
  LRRK2 RNA guide
gcucucacauaugagugagua

SEQ ID NO: 88309 - RNA, 21 nt, Artificial Sequence
  LRRK2 RNA guide
guacucacucauaugugagag

SEQ ID NO: 88310 - RNA, 21 nt, Artificial Sequence
  LRRK2 RNA guide
uacucacucauaugugagagc

SEQ ID NO: 88311 - RNA, 21 nt, Artificial Sequence
  LRRK2 RNA guide
uagcucucacauaugagugag

SEQ ID NO: 88312 - RNA, 21 nt, Artificial Sequence
  LRRK2 RNA guide
uaucacauguacucacucaua

SEQ ID NO: 88313 - RNA, 21 nt, Artificial Sequence
  LRRK2 RNA guide
ucacauguacucacucauaug

SEQ ID NO: 88314 - RNA, 21 nt, Artificial Sequence
  LRRK2 RNA guide
ucucacauaugagugaguaca

SEQ ID NO: 88315 - RNA, 21 nt, Artificial Sequence
  LRRK2 RNA guide
uguacucacucauaugugaga

SEQ ID NO: 88316 - RNA, 21 nt, Artificial Sequence
  LRRK2 RNA guide
uuagcucucacauaugaguga

SEQ ID NO: 88317 - RNA, 21 nt, Artificial Sequence
  LRRK2 RNA guide
uuuagcucucacauaugagug

SEQ ID NO: 88318 - RNA, 21 nt, Artificial Sequence
  LRRK2 RNA guide
uuuuagcucucacauaugagu

SEQ ID NO: 88319 - RNA, 21 nt, Artificial Sequence
  LRRK2 RNA guide
uuuuuagcucucacauaugag

SEQ ID NO: 88320 - RNA, 22 nt, Artificial Sequence
  LRRK2 RNA guide
acauguacucacucauauguga

SEQ ID NO: 88321 - RNA, 22 nt, Artificial Sequence
  LRRK2 RNA guide
acucacucauaugugagagcua

SEQ ID NO: 88322 - RNA, 22 nt, Artificial Sequence
  LRRK2 RNA guide
agcucucacauaugagugagua

SEQ ID NO: 88323 - RNA, 22 nt, Artificial Sequence
  LRRK2 RNA guide
aucacauguacucacucauaug

SEQ ID NO: 88324 - RNA, 22 nt, Artificial Sequence
  LRRK2 RNA guide
auguacucacucauaugugaga

SEQ ID NO: 88325 - RNA, 22 nt, Artificial Sequence
  LRRK2 RNA guide
cacauguacucacucauaugug

SEQ ID NO: 88326 - RNA, 22 nt, Artificial Sequence
  LRRK2 RNA guide
cauguacucacucauaugugag

SEQ ID NO: 88327 - RNA, 22 nt, Artificial Sequence
  LRRK2 RNA guide
cucacauaugagugaguacaug

SEQ ID NO: 88328 - RNA, 22 nt, Artificial Sequence
  LRRK2 RNA guide
cucucacauaugagugaguaca

SEQ ID NO: 88329 - RNA, 22 nt, Artificial Sequence
  LRRK2 RNA guide
gcucucacauaugagugaguac

SEQ ID NO: 88330 - RNA, 22 nt, Artificial Sequence
  LRRK2 RNA guide
guacucacucauaugugagagc

SEQ ID NO: 88331 - RNA, 22 nt, Artificial Sequence
  LRRK2 RNA guide
uacucacucauaugugagagcu

SEQ ID NO: 88332 - RNA, 22 nt, Artificial Sequence
  LRRK2 RNA guide
uagcucucacauaugagugagu

SEQ ID NO: 88333 - RNA, 22 nt, Artificial Sequence
  LRRK2 RNA guide
uaucacauguacucacucauau

SEQ ID NO: 88334 - RNA, 22 nt, Artificial Sequence
  LRRK2 RNA guide
ucacauguacucacucauaugu

SEQ ID NO: 88335 - RNA, 22 nt, Artificial Sequence
  LRRK2 RNA guide
ucucacauaugagugaguacau

SEQ ID NO: 88336 - RNA, 22 nt, Artificial Sequence
  LRRK2 RNA guide
uguacucacucauaugugagag

SEQ ID NO: 88337 - RNA, 22 nt, Artificial Sequence
  LRRK2 RNA guide
uuagcucucacauaugagugag

SEQ ID NO: 88338 - RNA, 22 nt, Artificial Sequence
  LRRK2 RNA guide
uuuagcucucacauaugaguga

SEQ ID NO: 88339 - RNA, 22 nt, Artificial Sequence
  LRRK2 RNA guide
uuuuagcucucacauaugagug

SEQ ID NO: 88340 - RNA, 22 nt, Artificial Sequence
  LRRK2 RNA guide
uuuuuagcucucacauaugagu

SEQ ID NO: 88341 - RNA, 22 nt, Artificial Sequence
  LRRK2 RNA guide
uuuuuuagcucucacauaugag

SEQ ID NO: 88342 - RNA, 20 nt, Artificial Sequence
  LRRK2 RNA guide
aaauaucacauguacucacu

SEQ ID NO: 88343 - RNA, 20 nt, Artificial Sequence
  LRRK2 RNA guide
aagacaaauaucacauguac

SEQ ID NO: 88344 - RNA, 20 nt, Artificial Sequence
  LRRK2 RNA guide
aauaucacauguacucacuc

SEQ ID NO: 88345 - RNA, 20 nt, Artificial Sequence
  LRRK2 RNA guide
acaaauaucacauguacuca

SEQ ID NO: 88346 - RNA, 20 nt, Artificial Sequence
  LRRK2 RNA guide
acauaugagugaguacaugu

SEQ ID NO: 88347 - RNA, 20 nt, Artificial Sequence
  LRRK2 RNA guide
agacaaauaucacauguacu

SEQ ID NO: 88348 - RNA, 20 nt, Artificial Sequence
  LRRK2 RNA guide
agugaguacaugugauauuu

SEQ ID NO: 88349 - RNA, 20 nt, Artificial Sequence
  LRRK2 RNA guide
auaucacauguacucacuca

SEQ ID NO: 88350 - RNA, 20 nt, Artificial Sequence
  LRRK2 RNA guide
auaugagugaguacauguga

SEQ ID NO: 88351 - RNA, 20 nt, Artificial Sequence
  LRRK2 RNA guide
augagugaguacaugugaua

SEQ ID NO: 88352 - RNA, 20 nt, Artificial Sequence
  LRRK2 RNA guide
caaauaucacauguacucac

SEQ ID NO: 88353 - RNA, 20 nt, Artificial Sequence
  LRRK2 RNA guide
cauaugagugaguacaugug

SEQ ID NO: 88354 - RNA, 20 nt, Artificial Sequence
  LRRK2 RNA guide
gacaaauaucacauguacuc

SEQ ID NO: 88355 - RNA, 20 nt, Artificial Sequence
  LRRK2 RNA guide
gagugaguacaugugauauu

SEQ ID NO: 88356 - RNA, 20 nt, Artificial Sequence
  LRRK2 RNA guide
gugaguacaugugauauuug

SEQ ID NO: 88357 - RNA, 20 nt, Artificial Sequence
  LRRK2 RNA guide
uaugagugaguacaugugau

SEQ ID NO: 88358 - RNA, 20 nt, Artificial Sequence
  LRRK2 RNA guide
ugagugaguacaugugauau

SEQ ID NO: 88359 - RNA, 21 nt, Artificial Sequence
  LRRK2 RNA guide
aaauaucacauguacucacuc

SEQ ID NO: 88360 - RNA, 21 nt, Artificial Sequence
  LRRK2 RNA guide
aauaucacauguacucacuca

SEQ ID NO: 88361 - RNA, 21 nt, Artificial Sequence
  LRRK2 RNA guide
acaaauaucacauguacucac

SEQ ID NO: 88362 - RNA, 21 nt, Artificial Sequence
  LRRK2 RNA guide
acauaugagugaguacaugug

SEQ ID NO: 88363 - RNA, 21 nt, Artificial Sequence
  LRRK2 RNA guide
agacaaauaucacauguacuc

SEQ ID NO: 88364 - RNA, 21 nt, Artificial Sequence
  LRRK2 RNA guide
agugaguacaugugauauuug

SEQ ID NO: 88365 - RNA, 21 nt, Artificial Sequence
  LRRK2 RNA guide
auaucacauguacucacucau

SEQ ID NO: 88366 - RNA, 21 nt, Artificial Sequence
  LRRK2 RNA guide
auaugagugaguacaugugau

SEQ ID NO: 88367 - RNA, 21 nt, Artificial Sequence
  LRRK2 RNA guide
augagugaguacaugugauau

SEQ ID NO: 88368 - RNA, 21 nt, Artificial Sequence
  LRRK2 RNA guide
caaauaucacauguacucacu

SEQ ID NO: 88369 - RNA, 21 nt, Artificial Sequence
  LRRK2 RNA guide
cacauaugagugaguacaugu

SEQ ID NO: 88370 - RNA, 21 nt, Artificial Sequence
  LRRK2 RNA guide
cauaugagugaguacauguga

SEQ ID NO: 88371 - RNA, 21 nt, Artificial Sequence
  LRRK2 RNA guide
gacaaauaucacauguacuca

SEQ ID NO: 88372 - RNA, 21 nt, Artificial Sequence
  LRRK2 RNA guide
gagugaguacaugugauauuu

SEQ ID NO: 88373 - RNA, 21 nt, Artificial Sequence
  LRRK2 RNA guide
gugaguacaugugauauuugu

SEQ ID NO: 88374 - RNA, 21 nt, Artificial Sequence
  LRRK2 RNA guide
uaugagugaguacaugugaua

SEQ ID NO: 88375 - RNA, 21 nt, Artificial Sequence
  LRRK2 RNA guide
ugagugaguacaugugauauu

SEQ ID NO: 88376 - RNA, 22 nt, Artificial Sequence
  LRRK2 RNA guide
aaauaucacauguacucacuca

SEQ ID NO: 88377 - RNA, 22 nt, Artificial Sequence
  LRRK2 RNA guide
aagacaaauaucacauguacuc

SEQ ID NO: 88378 - RNA, 22 nt, Artificial Sequence
  LRRK2 RNA guide
aauaucacauguacucacucau

SEQ ID NO: 88379 - RNA, 22 nt, Artificial Sequence
  LRRK2 RNA guide
acaaauaucacauguacucacu

SEQ ID NO: 88380 - RNA, 22 nt, Artificial Sequence
  LRRK2 RNA guide
acagaaagacaaauaucacaug

SEQ ID NO: 88381 - RNA, 22 nt, Artificial Sequence
  LRRK2 RNA guide
acauaugagugaguacauguga

SEQ ID NO: 88382 - RNA, 22 nt, Artificial Sequence
  LRRK2 RNA guide
agacaaauaucacauguacuca

SEQ ID NO: 88383 - RNA, 22 nt, Artificial Sequence
  LRRK2 RNA guide
agcacagaaagacaaauaucac

SEQ ID NO: 88384 - RNA, 22 nt, Artificial Sequence
  LRRK2 RNA guide
agugaguacaugugauauuugu

SEQ ID NO: 88385 - RNA, 22 nt, Artificial Sequence
  LRRK2 RNA guide
auaugagugaguacaugugaua

SEQ ID NO: 88386 - RNA, 22 nt, Artificial Sequence
  LRRK2 RNA guide
augagugaguacaugugauauu

SEQ ID NO: 88387 - RNA, 22 nt, Artificial Sequence
  LRRK2 RNA guide
caaauaucacauguacucacuc

SEQ ID NO: 88388 - RNA, 22 nt, Artificial Sequence
  LRRK2 RNA guide
cacauaugagugaguacaugug

SEQ ID NO: 88389 - RNA, 22 nt, Artificial Sequence
  LRRK2 RNA guide
cagaaagacaaauaucacaugu

SEQ ID NO: 88390 - RNA, 22 nt, Artificial Sequence
  LRRK2 RNA guide
cauaugagugaguacaugugau

SEQ ID NO: 88391 - RNA, 22 nt, Artificial Sequence
  LRRK2 RNA guide
ccacauaugagugaguacaugu

SEQ ID NO: 88392 - RNA, 22 nt, Artificial Sequence
  LRRK2 RNA guide
gaaagacaaauaucacauguac

SEQ ID NO: 88393 - RNA, 22 nt, Artificial Sequence
  LRRK2 RNA guide
gacaaauaucacauguacucac

SEQ ID NO: 88394 - RNA, 22 nt, Artificial Sequence
  LRRK2 RNA guide
gaguacaugugauauuugucuu

SEQ ID NO: 88395 - RNA, 22 nt, Artificial Sequence
  LRRK2 RNA guide
gagugaguacaugugauauuug

SEQ ID NO: 88396 - RNA, 22 nt, Artificial Sequence
  LRRK2 RNA guide
gugaguacaugugauauuuguc

SEQ ID NO: 88397 - RNA, 22 nt, Artificial Sequence
  LRRK2 RNA guide
uaugagugaguacaugugauau

SEQ ID NO: 88398 - RNA, 22 nt, Artificial Sequence
  LRRK2 RNA guide
ugaguacaugugauauuugucu

SEQ ID NO: 88399 - RNA, 22 nt, Artificial Sequence
  LRRK2 RNA guide
ugagugaguacaugugauauuu

SEQ ID NO: 88400 - RNA, 20 nt, Artificial Sequence
  LRRK2 RNA guide
aaagacaaauaucacacgua

SEQ ID NO: 88401 - RNA, 20 nt, Artificial Sequence
  LRRK2 RNA guide
aaauaucacacguacucacu

SEQ ID NO: 88402 - RNA, 20 nt, Artificial Sequence
  LRRK2 RNA guide
aagacaaauaucacacguac

SEQ ID NO: 88403 - RNA, 20 nt, Artificial Sequence
  LRRK2 RNA guide
aauaucacacguacucacuc

SEQ ID NO: 88404 - RNA, 20 nt, Artificial Sequence
  LRRK2 RNA guide
acaaauaucacacguacuca

SEQ ID NO: 88405 - RNA, 20 nt, Artificial Sequence
  LRRK2 RNA guide
acacguacucacucauaugu

SEQ ID NO: 88406 - RNA, 20 nt, Artificial Sequence
  LRRK2 RNA guide
acauaugagugaguacgugu

SEQ ID NO: 88407 - RNA, 20 nt, Artificial Sequence
  LRRK2 RNA guide
acguacucacucauaugugg

SEQ ID NO: 88408 - RNA, 20 nt, Artificial Sequence
  LRRK2 RNA guide
agaaagacaaauaucacacg

SEQ ID NO: 88409 - RNA, 20 nt, Artificial Sequence
  LRRK2 RNA guide
agacaaauaucacacguacu

SEQ ID NO: 88410 - RNA, 20 nt, Artificial Sequence
  LRRK2 RNA guide
agcucccacauaugagugag

SEQ ID NO: 88411 - RNA, 20 nt, Artificial Sequence
  LRRK2 RNA guide
agugaguacgugugauauuu

SEQ ID NO: 88412 - RNA, 20 nt, Artificial Sequence
  LRRK2 RNA guide
auaucacacguacucacuca

SEQ ID NO: 88413 - RNA, 20 nt, Artificial Sequence
  LRRK2 RNA guide
auaugagugaguacguguga

SEQ ID NO: 88414 - RNA, 20 nt, Artificial Sequence
  LRRK2 RNA guide
aucacacguacucacucaua

SEQ ID NO: 88415 - RNA, 20 nt, Artificial Sequence
  LRRK2 RNA guide
augagugaguacgugugaua

SEQ ID NO: 88416 - RNA, 20 nt, Artificial Sequence
  LRRK2 RNA guide
caaauaucacacguacucac

SEQ ID NO: 88417 - RNA, 20 nt, Artificial Sequence
  LRRK2 RNA guide
cacacguacucacucauaug

SEQ ID NO: 88418 - RNA, 20 nt, Artificial Sequence
  LRRK2 RNA guide
cacauaugagugaguacgug

SEQ ID NO: 88419 - RNA, 20 nt, Artificial Sequence
  LRRK2 RNA guide
cacguacucacucauaugug

SEQ ID NO: 88420 - RNA, 20 nt, Artificial Sequence
  LRRK2 RNA guide
cauaugagugaguacgugug

SEQ ID NO: 88421 - RNA, 20 nt, Artificial Sequence
  LRRK2 RNA guide
ccacauaugagugaguacgu

SEQ ID NO: 88422 - RNA, 20 nt, Artificial Sequence
  LRRK2 RNA guide
cccacauaugagugaguacg

SEQ ID NO: 88423 - RNA, 20 nt, Artificial Sequence
  LRRK2 RNA guide
cucccacauaugagugagua

SEQ ID NO: 88424 - RNA, 20 nt, Artificial Sequence
  LRRK2 RNA guide
gaaagacaaauaucacacgu

SEQ ID NO: 88425 - RNA, 20 nt, Artificial Sequence
  LRRK2 RNA guide
gacaaauaucacacguacuc

SEQ ID NO: 88426 - RNA, 20 nt, Artificial Sequence
  LRRK2 RNA guide
gaguacgugugauauuuguc

SEQ ID NO: 88427 - RNA, 20 nt, Artificial Sequence
  LRRK2 RNA guide
gagugaguacgugugauauu

SEQ ID NO: 88428 - RNA, 20 nt, Artificial Sequence
  LRRK2 RNA guide
gcucccacauaugagugagu

SEQ ID NO: 88429 - RNA, 20 nt, Artificial Sequence
  LRRK2 RNA guide
gugaguacgugugauauuug

SEQ ID NO: 88430 - RNA, 20 nt, Artificial Sequence
  LRRK2 RNA guide
uagcucccacauaugaguga

SEQ ID NO: 88431 - RNA, 20 nt, Artificial Sequence
  LRRK2 RNA guide
uaucacacguacucacucau

SEQ ID NO: 88432 - RNA, 20 nt, Artificial Sequence
  LRRK2 RNA guide
uaugagugaguacgugugau

SEQ ID NO: 88433 - RNA, 20 nt, Artificial Sequence
  LRRK2 RNA guide
ucacacguacucacucauau

SEQ ID NO: 88434 - RNA, 20 nt, Artificial Sequence
  LRRK2 RNA guide
ucccacauaugagugaguac

SEQ ID NO: 88435 - RNA, 20 nt, Artificial Sequence
  LRRK2 RNA guide
ugaguacgugugauauuugu

SEQ ID NO: 88436 - RNA, 20 nt, Artificial Sequence
  LRRK2 RNA guide
ugagugaguacgugugauau

SEQ ID NO: 88437 - RNA, 21 nt, Artificial Sequence
  LRRK2 RNA guide
aaagacaaauaucacacguac

SEQ ID NO: 88438 - RNA, 21 nt, Artificial Sequence
  LRRK2 RNA guide
aaauaucacacguacucacuc

SEQ ID NO: 88439 - RNA, 21 nt, Artificial Sequence
  LRRK2 RNA guide
aagacaaauaucacacguacu

SEQ ID NO: 88440 - RNA, 21 nt, Artificial Sequence
  LRRK2 RNA guide
aauaucacacguacucacuca

SEQ ID NO: 88441 - RNA, 21 nt, Artificial Sequence
  LRRK2 RNA guide
acaaauaucacacguacucac

SEQ ID NO: 88442 - RNA, 21 nt, Artificial Sequence
  LRRK2 RNA guide
acacguacucacucauaugug

SEQ ID NO: 88443 - RNA, 21 nt, Artificial Sequence
  LRRK2 RNA guide
acauaugagugaguacgugug

SEQ ID NO: 88444 - RNA, 21 nt, Artificial Sequence
  LRRK2 RNA guide
acguacucacucauauguggg

SEQ ID NO: 88445 - RNA, 21 nt, Artificial Sequence
  LRRK2 RNA guide
agaaagacaaauaucacacgu

SEQ ID NO: 88446 - RNA, 21 nt, Artificial Sequence
  LRRK2 RNA guide
agacaaauaucacacguacuc

SEQ ID NO: 88447 - RNA, 21 nt, Artificial Sequence
  LRRK2 RNA guide
agcucccacauaugagugagu

SEQ ID NO: 88448 - RNA, 21 nt, Artificial Sequence
  LRRK2 RNA guide
agugaguacgugugauauuug

SEQ ID NO: 88449 - RNA, 21 nt, Artificial Sequence
  LRRK2 RNA guide
auaucacacguacucacucau

SEQ ID NO: 88450 - RNA, 21 nt, Artificial Sequence
  LRRK2 RNA guide
auaugagugaguacgugugau

SEQ ID NO: 88451 - RNA, 21 nt, Artificial Sequence
  LRRK2 RNA guide
aucacacguacucacucauau

SEQ ID NO: 88452 - RNA, 21 nt, Artificial Sequence
  LRRK2 RNA guide
augagugaguacgugugauau

SEQ ID NO: 88453 - RNA, 21 nt, Artificial Sequence
  LRRK2 RNA guide
caaauaucacacguacucacu

SEQ ID NO: 88454 - RNA, 21 nt, Artificial Sequence
  LRRK2 RNA guide
cacacguacucacucauaugu

SEQ ID NO: 88455 - RNA, 21 nt, Artificial Sequence
  LRRK2 RNA guide
cacauaugagugaguacgugu

SEQ ID NO: 88456 - RNA, 21 nt, Artificial Sequence
  LRRK2 RNA guide
cacguacucacucauaugugg

SEQ ID NO: 88457 - RNA, 21 nt, Artificial Sequence
  LRRK2 RNA guide
cagaaagacaaauaucacacg

SEQ ID NO: 88458 - RNA, 21 nt, Artificial Sequence
  LRRK2 RNA guide
cauaugagugaguacguguga

SEQ ID NO: 88459 - RNA, 21 nt, Artificial Sequence
  LRRK2 RNA guide
ccacauaugagugaguacgug

SEQ ID NO: 88460 - RNA, 21 nt, Artificial Sequence
  LRRK2 RNA guide
cccacauaugagugaguacgu

SEQ ID NO: 88461 - RNA, 21 nt, Artificial Sequence
  LRRK2 RNA guide
cucccacauaugagugaguac

SEQ ID NO: 88462 - RNA, 21 nt, Artificial Sequence
  LRRK2 RNA guide
gaaagacaaauaucacacgua

SEQ ID NO: 88463 - RNA, 21 nt, Artificial Sequence
  LRRK2 RNA guide
gacaaauaucacacguacuca

SEQ ID NO: 88464 - RNA, 21 nt, Artificial Sequence
  LRRK2 RNA guide
gaguacgugugauauuugucu

SEQ ID NO: 88465 - RNA, 21 nt, Artificial Sequence
  LRRK2 RNA guide
gagugaguacgugugauauuu

SEQ ID NO: 88466 - RNA, 21 nt, Artificial Sequence
  LRRK2 RNA guide
gcucccacauaugagugagua

SEQ ID NO: 88467 - RNA, 21 nt, Artificial Sequence
  LRRK2 RNA guide
gugaguacgugugauauuugu

SEQ ID NO: 88468 - RNA, 21 nt, Artificial Sequence
  LRRK2 RNA guide
uagcucccacauaugagugag

SEQ ID NO: 88469 - RNA, 21 nt, Artificial Sequence
  LRRK2 RNA guide
uaucacacguacucacucaua

SEQ ID NO: 88470 - RNA, 21 nt, Artificial Sequence
  LRRK2 RNA guide
uaugagugaguacgugugaua

SEQ ID NO: 88471 - RNA, 21 nt, Artificial Sequence
  LRRK2 RNA guide
ucacacguacucacucauaug

SEQ ID NO: 88472 - RNA, 21 nt, Artificial Sequence
  LRRK2 RNA guide
ucccacauaugagugaguacg

SEQ ID NO: 88473 - RNA, 21 nt, Artificial Sequence
  LRRK2 RNA guide
ugaguacgugugauauuuguc

SEQ ID NO: 88474 - RNA, 21 nt, Artificial Sequence
  LRRK2 RNA guide
ugagugaguacgugugauauu

SEQ ID NO: 88475 - RNA, 21 nt, Artificial Sequence
  LRRK2 RNA guide
uuagcucccacauaugaguga

SEQ ID NO: 88476 - RNA, 22 nt, Artificial Sequence
  LRRK2 RNA guide
aaagacaaauaucacacguacu

SEQ ID NO: 88477 - RNA, 22 nt, Artificial Sequence
  LRRK2 RNA guide
aaauaucacacguacucacuca

SEQ ID NO: 88478 - RNA, 22 nt, Artificial Sequence
  LRRK2 RNA guide
aagacaaauaucacacguacuc

SEQ ID NO: 88479 - RNA, 22 nt, Artificial Sequence
  LRRK2 RNA guide
aauaucacacguacucacucau

SEQ ID NO: 88480 - RNA, 22 nt, Artificial Sequence
  LRRK2 RNA guide
acaaauaucacacguacucacu

SEQ ID NO: 88481 - RNA, 22 nt, Artificial Sequence
  LRRK2 RNA guide
acacguacucacucauaugugg

SEQ ID NO: 88482 - RNA, 22 nt, Artificial Sequence
  LRRK2 RNA guide
acagaaagacaaauaucacacg

SEQ ID NO: 88483 - RNA, 22 nt, Artificial Sequence
  LRRK2 RNA guide
acauaugagugaguacguguga

SEQ ID NO: 88484 - RNA, 22 nt, Artificial Sequence
  LRRK2 RNA guide
acguacucacucauauguggga

SEQ ID NO: 88485 - RNA, 22 nt, Artificial Sequence
  LRRK2 RNA guide
agaaagacaaauaucacacgua

SEQ ID NO: 88486 - RNA, 22 nt, Artificial Sequence
  LRRK2 RNA guide
agacaaauaucacacguacuca

SEQ ID NO: 88487 - RNA, 22 nt, Artificial Sequence
  LRRK2 RNA guide
agcucccacauaugagugagua

SEQ ID NO: 88488 - RNA, 22 nt, Artificial Sequence
  LRRK2 RNA guide
agugaguacgugugauauuugu

SEQ ID NO: 88489 - RNA, 22 nt, Artificial Sequence
  LRRK2 RNA guide
auaucacacguacucacucaua

SEQ ID NO: 88490 - RNA, 22 nt, Artificial Sequence
  LRRK2 RNA guide
auaugagugaguacgugugaua

SEQ ID NO: 88491 - RNA, 22 nt, Artificial Sequence
  LRRK2 RNA guide
aucacacguacucacucauaug

SEQ ID NO: 88492 - RNA, 22 nt, Artificial Sequence
  LRRK2 RNA guide
augagugaguacgugugauauu

SEQ ID NO: 88493 - RNA, 22 nt, Artificial Sequence
  LRRK2 RNA guide
caaauaucacacguacucacuc

SEQ ID NO: 88494 - RNA, 22 nt, Artificial Sequence
  LRRK2 RNA guide
cacacguacucacucauaugug

SEQ ID NO: 88495 - RNA, 22 nt, Artificial Sequence
  LRRK2 RNA guide
cacauaugagugaguacgugug

SEQ ID NO: 88496 - RNA, 22 nt, Artificial Sequence
  LRRK2 RNA guide
cacguacucacucauauguggg

SEQ ID NO: 88497 - RNA, 22 nt, Artificial Sequence
  LRRK2 RNA guide
cagaaagacaaauaucacacgu

SEQ ID NO: 88498 - RNA, 22 nt, Artificial Sequence
  LRRK2 RNA guide
cauaugagugaguacgugugau

SEQ ID NO: 88499 - RNA, 22 nt, Artificial Sequence
  LRRK2 RNA guide
ccacauaugagugaguacgugu

SEQ ID NO: 88500 - RNA, 22 nt, Artificial Sequence
  LRRK2 RNA guide
cccacauaugagugaguacgug

SEQ ID NO: 88501 - RNA, 22 nt, Artificial Sequence
  LRRK2 RNA guide
cucccacauaugagugaguacg

SEQ ID NO: 88502 - RNA, 22 nt, Artificial Sequence
  LRRK2 RNA guide
gaaagacaaauaucacacguac

SEQ ID NO: 88503 - RNA, 22 nt, Artificial Sequence
  LRRK2 RNA guide
gacaaauaucacacguacucac

SEQ ID NO: 88504 - RNA, 22 nt, Artificial Sequence
  LRRK2 RNA guide
gaguacgugugauauuugucuu

SEQ ID NO: 88505 - RNA, 22 nt, Artificial Sequence
  LRRK2 RNA guide
gagugaguacgugugauauuug

SEQ ID NO: 88506 - RNA, 22 nt, Artificial Sequence
  LRRK2 RNA guide
gcucccacauaugagugaguac

SEQ ID NO: 88507 - RNA, 22 nt, Artificial Sequence
  LRRK2 RNA guide
gugaguacgugugauauuuguc

SEQ ID NO: 88508 - RNA, 22 nt, Artificial Sequence
  LRRK2 RNA guide
uacgugugauauuugucuuucu

SEQ ID NO: 88509 - RNA, 22 nt, Artificial Sequence
  LRRK2 RNA guide
uagcucccacauaugagugagu

SEQ ID NO: 88510 - RNA, 22 nt, Artificial Sequence
  LRRK2 RNA guide
uaucacacguacucacucauau

SEQ ID NO: 88511 - RNA, 22 nt, Artificial Sequence
  LRRK2 RNA guide
uaugagugaguacgugugauau

SEQ ID NO: 88512 - RNA, 22 nt, Artificial Sequence
  LRRK2 RNA guide
ucacacguacucacucauaugu

SEQ ID NO: 88513 - RNA, 22 nt, Artificial Sequence
  LRRK2 RNA guide
ucccacauaugagugaguacgu

SEQ ID NO: 88514 - RNA, 22 nt, Artificial Sequence
  LRRK2 RNA guide
ugaguacgugugauauuugucu

SEQ ID NO: 88515 - RNA, 22 nt, Artificial Sequence
  LRRK2 RNA guide
ugagugaguacgugugauauuu

SEQ ID NO: 88516 - RNA, 22 nt, Artificial Sequence
  LRRK2 RNA guide
uuagcucccacauaugagugag

SEQ ID NO: 88517 - RNA, 22 nt, Artificial Sequence
  LRRK2 RNA guide
uuuagcucccacauaugaguga

SEQ ID NO: 88518 - RNA, 20 nt, Artificial Sequence
  LRRK2 RNA guide
aaaaaaguggaaucaaccua

SEQ ID NO: 88519 - RNA, 20 nt, Artificial Sequence
  LRRK2 RNA guide
aaaaaguggaaucaaccuaa

SEQ ID NO: 88520 - RNA, 20 nt, Artificial Sequence
  LRRK2 RNA guide
aaaaguggaaucaaccuaag

SEQ ID NO: 88521 - RNA, 20 nt, Artificial Sequence
  LRRK2 RNA guide
aaaguggaaucaaccuaagc

SEQ ID NO: 88522 - RNA, 20 nt, Artificial Sequence
  LRRK2 RNA guide
aaguggaaucaaccuaagca

SEQ ID NO: 88523 - RNA, 20 nt, Artificial Sequence
  LRRK2 RNA guide
aguggaaucaaccuaagcac

SEQ ID NO: 88524 - RNA, 20 nt, Artificial Sequence
  LRRK2 RNA guide
augggugcuuagguugauuc

SEQ ID NO: 88525 - RNA, 20 nt, Artificial Sequence
  LRRK2 RNA guide
caugggugcuuagguugauu

SEQ ID NO: 88526 - RNA, 20 nt, Artificial Sequence
  LRRK2 RNA guide
cuuagguugauuccacuuuu

SEQ ID NO: 88527 - RNA, 20 nt, Artificial Sequence
  LRRK2 RNA guide
gcuuagguugauuccacuuu

SEQ ID NO: 88528 - RNA, 20 nt, Artificial Sequence
  LRRK2 RNA guide
gggugcuuagguugauucca

SEQ ID NO: 88529 - RNA, 20 nt, Artificial Sequence
  LRRK2 RNA guide
ggugcuuagguugauuccac

SEQ ID NO: 88530 - RNA, 20 nt, Artificial Sequence
  LRRK2 RNA guide
gugcuuagguugauuccacu

SEQ ID NO: 88531 - RNA, 20 nt, Artificial Sequence
  LRRK2 RNA guide
uagguugauuccacuuuuuu

SEQ ID NO: 88532 - RNA, 20 nt, Artificial Sequence
  LRRK2 RNA guide
ucaugggugcuuagguugau

SEQ ID NO: 88533 - RNA, 20 nt, Artificial Sequence
  LRRK2 RNA guide
ugcuuagguugauuccacuu

SEQ ID NO: 88534 - RNA, 20 nt, Artificial Sequence
  LRRK2 RNA guide
ugggugcuuagguugauucc

SEQ ID NO: 88535 - RNA, 21 nt, Artificial Sequence
  LRRK2 RNA guide
aaaaaguggaaucaaccuaag

SEQ ID NO: 88536 - RNA, 21 nt, Artificial Sequence
  LRRK2 RNA guide
aaaaguggaaucaaccuaagc

SEQ ID NO: 88537 - RNA, 21 nt, Artificial Sequence
  LRRK2 RNA guide
aaaguggaaucaaccuaagca

SEQ ID NO: 88538 - RNA, 21 nt, Artificial Sequence
  LRRK2 RNA guide
aaguggaaucaaccuaagcac

SEQ ID NO: 88539 - RNA, 21 nt, Artificial Sequence
  LRRK2 RNA guide
aguggaaucaaccuaagcacc

SEQ ID NO: 88540 - RNA, 21 nt, Artificial Sequence
  LRRK2 RNA guide
augggugcuuagguugauucc

SEQ ID NO: 88541 - RNA, 21 nt, Artificial Sequence
  LRRK2 RNA guide
caugggugcuuagguugauuc

SEQ ID NO: 88542 - RNA, 21 nt, Artificial Sequence
  LRRK2 RNA guide
cuuagguugauuccacuuuuu

SEQ ID NO: 88543 - RNA, 21 nt, Artificial Sequence
  LRRK2 RNA guide
gcuuagguugauuccacuuuu

SEQ ID NO: 88544 - RNA, 21 nt, Artificial Sequence
  LRRK2 RNA guide
gggugcuuagguugauuccac

SEQ ID NO: 88545 - RNA, 21 nt, Artificial Sequence
  LRRK2 RNA guide
ggugcuuagguugauuccacu

SEQ ID NO: 88546 - RNA, 21 nt, Artificial Sequence
  LRRK2 RNA guide
gugcuuagguugauuccacuu

SEQ ID NO: 88547 - RNA, 21 nt, Artificial Sequence
  LRRK2 RNA guide
ucaugggugcuuagguugauu

SEQ ID NO: 88548 - RNA, 21 nt, Artificial Sequence
  LRRK2 RNA guide
ugcuuagguugauuccacuuu

SEQ ID NO: 88549 - RNA, 21 nt, Artificial Sequence
  LRRK2 RNA guide
ugggugcuuagguugauucca

SEQ ID NO: 88550 - RNA, 21 nt, Artificial Sequence
  LRRK2 RNA guide
uucaugggugcuuagguugau

SEQ ID NO: 88551 - RNA, 22 nt, Artificial Sequence
  LRRK2 RNA guide
aaaaaaguggaaucaaccuaag

SEQ ID NO: 88552 - RNA, 22 nt, Artificial Sequence
  LRRK2 RNA guide
aaaaaguggaaucaaccuaagc

SEQ ID NO: 88553 - RNA, 22 nt, Artificial Sequence
  LRRK2 RNA guide
aaaaguggaaucaaccuaagca

SEQ ID NO: 88554 - RNA, 22 nt, Artificial Sequence
  LRRK2 RNA guide
aaaguggaaucaaccuaagcac

SEQ ID NO: 88555 - RNA, 22 nt, Artificial Sequence
  LRRK2 RNA guide
aaguggaaucaaccuaagcacc

SEQ ID NO: 88556 - RNA, 22 nt, Artificial Sequence
  LRRK2 RNA guide
aguggaaucaaccuaagcaccc

SEQ ID NO: 88557 - RNA, 22 nt, Artificial Sequence
  LRRK2 RNA guide
augggugcuuagguugauucca

SEQ ID NO: 88558 - RNA, 22 nt, Artificial Sequence
  LRRK2 RNA guide
auucaugggugcuuagguugau

SEQ ID NO: 88559 - RNA, 22 nt, Artificial Sequence
  LRRK2 RNA guide
caugggugcuuagguugauucc

SEQ ID NO: 88560 - RNA, 22 nt, Artificial Sequence
  LRRK2 RNA guide
cuuagguugauuccacuuuuuu

SEQ ID NO: 88561 - RNA, 22 nt, Artificial Sequence
  LRRK2 RNA guide
gcuuagguugauuccacuuuuu

SEQ ID NO: 88562 - RNA, 22 nt, Artificial Sequence
  LRRK2 RNA guide
gggugcuuagguugauuccacu

SEQ ID NO: 88563 - RNA, 22 nt, Artificial Sequence
  LRRK2 RNA guide
ggugcuuagguugauuccacuu

SEQ ID NO: 88564 - RNA, 22 nt, Artificial Sequence
  LRRK2 RNA guide
gugcuuagguugauuccacuuu

SEQ ID NO: 88565 - RNA, 22 nt, Artificial Sequence
  LRRK2 RNA guide
ucaugggugcuuagguugauuc

SEQ ID NO: 88566 - RNA, 22 nt, Artificial Sequence
  LRRK2 RNA guide
ugcuuagguugauuccacuuuu

SEQ ID NO: 88567 - RNA, 22 nt, Artificial Sequence
  LRRK2 RNA guide
ugggugcuuagguugauuccac

SEQ ID NO: 88568 - RNA, 22 nt, Artificial Sequence
  LRRK2 RNA guide
uucaugggugcuuagguugauu

SEQ ID NO: 88569 - RNA, 20 nt, Artificial Sequence
  LRRK2 RNA guide
uuagguugauuccacuuuuu

SEQ ID NO: 88570 - RNA, 22 nt, Artificial Sequence
  LRRK2 RNA guide
gcacuauucacaauagcuaaaa

SEQ ID NO: 88571 - RNA, 20 nt, Artificial Sequence
  LRRK2 RNA guide
aaaagaagacauaguaaugg

SEQ ID NO: 88572 - RNA, 20 nt, Artificial Sequence
  LRRK2 RNA guide
aaagaagacauaguaauggc

SEQ ID NO: 88573 - RNA, 20 nt, Artificial Sequence
  LRRK2 RNA guide
aagaagacauaguaauggcc

SEQ ID NO: 88574 - RNA, 20 nt, Artificial Sequence
  LRRK2 RNA guide
aagacauaguaauggccaau

SEQ ID NO: 88575 - RNA, 20 nt, Artificial Sequence
  LRRK2 RNA guide
acauaguaauggccaaugga

SEQ ID NO: 88576 - RNA, 20 nt, Artificial Sequence
  LRRK2 RNA guide
agaagacauaguaauggcca

SEQ ID NO: 88577 - RNA, 20 nt, Artificial Sequence
  LRRK2 RNA guide
agacauaguaauggccaaug

SEQ ID NO: 88578 - RNA, 20 nt, Artificial Sequence
  LRRK2 RNA guide
aguaauggccaauggauaua

SEQ ID NO: 88579 - RNA, 20 nt, Artificial Sequence
  LRRK2 RNA guide
auaguaauggccaauggaua

SEQ ID NO: 88580 - RNA, 20 nt, Artificial Sequence
  LRRK2 RNA guide
auauauccauuggccauuac

SEQ ID NO: 88581 - RNA, 20 nt, Artificial Sequence
  LRRK2 RNA guide
auauccauuggccauuacua

SEQ ID NO: 88582 - RNA, 20 nt, Artificial Sequence
  LRRK2 RNA guide
auccauuggccauuacuaug

SEQ ID NO: 88583 - RNA, 20 nt, Artificial Sequence
  LRRK2 RNA guide
auuggccauuacuaugucuu

SEQ ID NO: 88584 - RNA, 20 nt, Artificial Sequence
  LRRK2 RNA guide
cauaguaauggccaauggau

SEQ ID NO: 88585 - RNA, 20 nt, Artificial Sequence
  LRRK2 RNA guide
cauauauccauuggccauua

SEQ ID NO: 88586 - RNA, 20 nt, Artificial Sequence
  LRRK2 RNA guide
cauuggccauuacuaugucu

SEQ ID NO: 88587 - RNA, 20 nt, Artificial Sequence
  LRRK2 RNA guide
ccauuggccauuacuauguc

SEQ ID NO: 88588 - RNA, 20 nt, Artificial Sequence
  LRRK2 RNA guide
gaagacauaguaauggccaa

SEQ ID NO: 88589 - RNA, 20 nt, Artificial Sequence
  LRRK2 RNA guide
gacauaguaauggccaaugg

SEQ ID NO: 88590 - RNA, 20 nt, Artificial Sequence
  LRRK2 RNA guide
gcaaaagaagacauaguaau

SEQ ID NO: 88591 - RNA, 20 nt, Artificial Sequence
  LRRK2 RNA guide
gccaauggauauaugaaaaa

SEQ ID NO: 88592 - RNA, 20 nt, Artificial Sequence
  LRRK2 RNA guide
ggccaauggauauaugaaaa

SEQ ID NO: 88593 - RNA, 20 nt, Artificial Sequence
  LRRK2 RNA guide
guaauggccaauggauauau

SEQ ID NO: 88594 - RNA, 20 nt, Artificial Sequence
  LRRK2 RNA guide
uaauggccaauggauauaug

SEQ ID NO: 88595 - RNA, 20 nt, Artificial Sequence
  LRRK2 RNA guide
uaguaauggccaauggauau

SEQ ID NO: 88596 - RNA, 20 nt, Artificial Sequence
  LRRK2 RNA guide
uauauccauuggccauuacu

SEQ ID NO: 88597 - RNA, 20 nt, Artificial Sequence
  LRRK2 RNA guide
uauccauuggccauuacuau

SEQ ID NO: 88598 - RNA, 20 nt, Artificial Sequence
  LRRK2 RNA guide
ucauauauccauuggccauu

SEQ ID NO: 88599 - RNA, 20 nt, Artificial Sequence
  LRRK2 RNA guide
uccauuggccauuacuaugu

SEQ ID NO: 88600 - RNA, 20 nt, Artificial Sequence
  LRRK2 RNA guide
ugcaaaagaagacauaguaa

SEQ ID NO: 88601 - RNA, 20 nt, Artificial Sequence
  LRRK2 RNA guide
uggccaauggauauaugaaa

SEQ ID NO: 88602 - RNA, 20 nt, Artificial Sequence
  LRRK2 RNA guide
uggccauuacuaugucuucu

SEQ ID NO: 88603 - RNA, 20 nt, Artificial Sequence
  LRRK2 RNA guide
uucauauauccauuggccau

SEQ ID NO: 88604 - RNA, 20 nt, Artificial Sequence
  LRRK2 RNA guide
uuucauauauccauuggcca

SEQ ID NO: 88605 - RNA, 20 nt, Artificial Sequence
  LRRK2 RNA guide
uuuucauauauccauuggcc

SEQ ID NO: 88606 - RNA, 20 nt, Artificial Sequence
  LRRK2 RNA guide
uuuuucauauauccauuggc

SEQ ID NO: 88607 - RNA, 21 nt, Artificial Sequence
  LRRK2 RNA guide
aaaagaagacauaguaauggc

SEQ ID NO: 88608 - RNA, 21 nt, Artificial Sequence
  LRRK2 RNA guide
aaagaagacauaguaauggcc

SEQ ID NO: 88609 - RNA, 21 nt, Artificial Sequence
  LRRK2 RNA guide
aagaagacauaguaauggcca

SEQ ID NO: 88610 - RNA, 21 nt, Artificial Sequence
  LRRK2 RNA guide
aagacauaguaauggccaaug

SEQ ID NO: 88611 - RNA, 21 nt, Artificial Sequence
  LRRK2 RNA guide
acauaguaauggccaauggau

SEQ ID NO: 88612 - RNA, 21 nt, Artificial Sequence
  LRRK2 RNA guide
agaagacauaguaauggccaa

SEQ ID NO: 88613 - RNA, 21 nt, Artificial Sequence
  LRRK2 RNA guide
agacauaguaauggccaaugg

SEQ ID NO: 88614 - RNA, 21 nt, Artificial Sequence
  LRRK2 RNA guide
aguaauggccaauggauauau

SEQ ID NO: 88615 - RNA, 21 nt, Artificial Sequence
  LRRK2 RNA guide
auaguaauggccaauggauau

SEQ ID NO: 88616 - RNA, 21 nt, Artificial Sequence
  LRRK2 RNA guide
auauauccauuggccauuacu

SEQ ID NO: 88617 - RNA, 21 nt, Artificial Sequence
  LRRK2 RNA guide
auauccauuggccauuacuau

SEQ ID NO: 88618 - RNA, 21 nt, Artificial Sequence
  LRRK2 RNA guide
auccauuggccauuacuaugu

SEQ ID NO: 88619 - RNA, 21 nt, Artificial Sequence
  LRRK2 RNA guide
auggccaauggauauaugaaa

SEQ ID NO: 88620 - RNA, 21 nt, Artificial Sequence
  LRRK2 RNA guide
auuggccauuacuaugucuuc

SEQ ID NO: 88621 - RNA, 21 nt, Artificial Sequence
  LRRK2 RNA guide
caaaagaagacauaguaaugg

SEQ ID NO: 88622 - RNA, 21 nt, Artificial Sequence
  LRRK2 RNA guide
cauaguaauggccaauggaua

SEQ ID NO: 88623 - RNA, 21 nt, Artificial Sequence
  LRRK2 RNA guide
cauauauccauuggccauuac

SEQ ID NO: 88624 - RNA, 21 nt, Artificial Sequence
  LRRK2 RNA guide
cauuggccauuacuaugucuu

SEQ ID NO: 88625 - RNA, 21 nt, Artificial Sequence
  LRRK2 RNA guide
ccauuggccauuacuaugucu

SEQ ID NO: 88626 - RNA, 21 nt, Artificial Sequence
  LRRK2 RNA guide
gaagacauaguaauggccaau

SEQ ID NO: 88627 - RNA, 21 nt, Artificial Sequence
  LRRK2 RNA guide
gacauaguaauggccaaugga

SEQ ID NO: 88628 - RNA, 21 nt, Artificial Sequence
  LRRK2 RNA guide
gcaaaagaagacauaguaaug

SEQ ID NO: 88629 - RNA, 21 nt, Artificial Sequence
  LRRK2 RNA guide
ggccaauggauauaugaaaaa

SEQ ID NO: 88630 - RNA, 21 nt, Artificial Sequence
  LRRK2 RNA guide
guaauggccaauggauauaug

SEQ ID NO: 88631 - RNA, 21 nt, Artificial Sequence
  LRRK2 RNA guide
uaauggccaauggauauauga

SEQ ID NO: 88632 - RNA, 21 nt, Artificial Sequence
  LRRK2 RNA guide
uaguaauggccaauggauaua

SEQ ID NO: 88633 - RNA, 21 nt, Artificial Sequence
  LRRK2 RNA guide
uauauccauuggccauuacua

SEQ ID NO: 88634 - RNA, 21 nt, Artificial Sequence
  LRRK2 RNA guide
uauccauuggccauuacuaug

SEQ ID NO: 88635 - RNA, 21 nt, Artificial Sequence
  LRRK2 RNA guide
ucauauauccauuggccauua

SEQ ID NO: 88636 - RNA, 21 nt, Artificial Sequence
  LRRK2 RNA guide
uccauuggccauuacuauguc

SEQ ID NO: 88637 - RNA, 21 nt, Artificial Sequence
  LRRK2 RNA guide
uggccaauggauauaugaaaa

SEQ ID NO: 88638 - RNA, 21 nt, Artificial Sequence
  LRRK2 RNA guide
uggccauuacuaugucuucuu

SEQ ID NO: 88639 - RNA, 21 nt, Artificial Sequence
  LRRK2 RNA guide
uucauauauccauuggccauu

SEQ ID NO: 88640 - RNA, 21 nt, Artificial Sequence
  LRRK2 RNA guide
uuggccauuacuaugucuucu

SEQ ID NO: 88641 - RNA, 21 nt, Artificial Sequence
  LRRK2 RNA guide
uuucauauauccauuggccau

SEQ ID NO: 88642 - RNA, 21 nt, Artificial Sequence
  LRRK2 RNA guide
uuuucauauauccauuggcca

SEQ ID NO: 88643 - RNA, 21 nt, Artificial Sequence
  LRRK2 RNA guide
uuuuucauauauccauuggcc

SEQ ID NO: 88644 - RNA, 22 nt, Artificial Sequence
  LRRK2 RNA guide
aaaagaagacauaguaauggcc

SEQ ID NO: 88645 - RNA, 22 nt, Artificial Sequence
  LRRK2 RNA guide
aaagaagacauaguaauggcca

SEQ ID NO: 88646 - RNA, 22 nt, Artificial Sequence
  LRRK2 RNA guide
aagaagacauaguaauggccaa

SEQ ID NO: 88647 - RNA, 22 nt, Artificial Sequence
  LRRK2 RNA guide
aagacauaguaauggccaaugg

SEQ ID NO: 88648 - RNA, 22 nt, Artificial Sequence
  LRRK2 RNA guide
aauggccaauggauauaugaaa

SEQ ID NO: 88649 - RNA, 22 nt, Artificial Sequence
  LRRK2 RNA guide
acauaguaauggccaauggaua

SEQ ID NO: 88650 - RNA, 22 nt, Artificial Sequence
  LRRK2 RNA guide
agaagacauaguaauggccaau

SEQ ID NO: 88651 - RNA, 22 nt, Artificial Sequence
  LRRK2 RNA guide
agacauaguaauggccaaugga

SEQ ID NO: 88652 - RNA, 22 nt, Artificial Sequence
  LRRK2 RNA guide
aguaauggccaauggauauaug

SEQ ID NO: 88653 - RNA, 22 nt, Artificial Sequence
  LRRK2 RNA guide
auaguaauggccaauggauaua

SEQ ID NO: 88654 - RNA, 22 nt, Artificial Sequence
  LRRK2 RNA guide
auauauccauuggccauuacua

SEQ ID NO: 88655 - RNA, 22 nt, Artificial Sequence
  LRRK2 RNA guide
auauccauuggccauuacuaug

SEQ ID NO: 88656 - RNA, 22 nt, Artificial Sequence
  LRRK2 RNA guide
auccauuggccauuacuauguc

SEQ ID NO: 88657 - RNA, 22 nt, Artificial Sequence
  LRRK2 RNA guide
auggccaauggauauaugaaaa

SEQ ID NO: 88658 - RNA, 22 nt, Artificial Sequence
  LRRK2 RNA guide
auuggccauuacuaugucuucu

SEQ ID NO: 88659 - RNA, 22 nt, Artificial Sequence
  LRRK2 RNA guide
caaaagaagacauaguaauggc

SEQ ID NO: 88660 - RNA, 22 nt, Artificial Sequence
  LRRK2 RNA guide
cauaguaauggccaauggauau

SEQ ID NO: 88661 - RNA, 22 nt, Artificial Sequence
  LRRK2 RNA guide
cauauauccauuggccauuacu

SEQ ID NO: 88662 - RNA, 22 nt, Artificial Sequence
  LRRK2 RNA guide
cauuggccauuacuaugucuuc

SEQ ID NO: 88663 - RNA, 22 nt, Artificial Sequence
  LRRK2 RNA guide
ccauuggccauuacuaugucuu

SEQ ID NO: 88664 - RNA, 22 nt, Artificial Sequence
  LRRK2 RNA guide
gaagacauaguaauggccaaug

SEQ ID NO: 88665 - RNA, 22 nt, Artificial Sequence
  LRRK2 RNA guide
gacauaguaauggccaauggau

SEQ ID NO: 88666 - RNA, 22 nt, Artificial Sequence
  LRRK2 RNA guide
gcaaaagaagacauaguaaugg

SEQ ID NO: 88667 - RNA, 22 nt, Artificial Sequence
  LRRK2 RNA guide
ggccaauggauauaugaaaaaa

SEQ ID NO: 88668 - RNA, 22 nt, Artificial Sequence
  LRRK2 RNA guide
guaauggccaauggauauauga

SEQ ID NO: 88669 - RNA, 22 nt, Artificial Sequence
  LRRK2 RNA guide
uaauggccaauggauauaugaa

SEQ ID NO: 88670 - RNA, 22 nt, Artificial Sequence
  LRRK2 RNA guide
uaguaauggccaauggauauau

SEQ ID NO: 88671 - RNA, 22 nt, Artificial Sequence
  LRRK2 RNA guide
uauauccauuggccauuacuau

SEQ ID NO: 88672 - RNA, 22 nt, Artificial Sequence
  LRRK2 RNA guide
uauccauuggccauuacuaugu

SEQ ID NO: 88673 - RNA, 22 nt, Artificial Sequence
  LRRK2 RNA guide
ucauauauccauuggccauuac

SEQ ID NO: 88674 - RNA, 22 nt, Artificial Sequence
  LRRK2 RNA guide
uccauuggccauuacuaugucu

SEQ ID NO: 88675 - RNA, 22 nt, Artificial Sequence
  LRRK2 RNA guide
ugcaaaagaagacauaguaaug

SEQ ID NO: 88676 - RNA, 22 nt, Artificial Sequence
  LRRK2 RNA guide
uggccaauggauauaugaaaaa

SEQ ID NO: 88677 - RNA, 22 nt, Artificial Sequence
  LRRK2 RNA guide
uggccauuacuaugucuucuuu

SEQ ID NO: 88678 - RNA, 22 nt, Artificial Sequence
  LRRK2 RNA guide
uucauauauccauuggccauua

SEQ ID NO: 88679 - RNA, 22 nt, Artificial Sequence
  LRRK2 RNA guide
uuggccauuacuaugucuucuu

SEQ ID NO: 88680 - RNA, 22 nt, Artificial Sequence
  LRRK2 RNA guide
uuucauauauccauuggccauu

SEQ ID NO: 88681 - RNA, 22 nt, Artificial Sequence
  LRRK2 RNA guide
uuuucauauauccauuggccau

SEQ ID NO: 88682 - RNA, 22 nt, Artificial Sequence
  LRRK2 RNA guide
uuuuucauauauccauuggcca

SEQ ID NO: 88683 - RNA, 22 nt, Artificial Sequence
  LRRK2 RNA guide
uuuuuucauauauccauuggcc

SEQ ID NO: 88684 - RNA, 20 nt, Artificial Sequence
  LRRK2 RNA guide
aagaagacauaguaauggcu

SEQ ID NO: 88685 - RNA, 20 nt, Artificial Sequence
  LRRK2 RNA guide
aagacauaguaauggcuaau

SEQ ID NO: 88686 - RNA, 20 nt, Artificial Sequence
  LRRK2 RNA guide
aauggcuaauggauauauga

SEQ ID NO: 88687 - RNA, 20 nt, Artificial Sequence
  LRRK2 RNA guide
acauaguaauggcuaaugga

SEQ ID NO: 88688 - RNA, 20 nt, Artificial Sequence
  LRRK2 RNA guide
agaagacauaguaauggcua

SEQ ID NO: 88689 - RNA, 20 nt, Artificial Sequence
  LRRK2 RNA guide
agacauaguaauggcuaaug

SEQ ID NO: 88690 - RNA, 20 nt, Artificial Sequence
  LRRK2 RNA guide
aguaauggcuaauggauaua

SEQ ID NO: 88691 - RNA, 20 nt, Artificial Sequence
  LRRK2 RNA guide
auaguaauggcuaauggaua

SEQ ID NO: 88692 - RNA, 20 nt, Artificial Sequence
  LRRK2 RNA guide
auauauccauuagccauuac

SEQ ID NO: 88693 - RNA, 20 nt, Artificial Sequence
  LRRK2 RNA guide
auauccauuagccauuacua

SEQ ID NO: 88694 - RNA, 20 nt, Artificial Sequence
  LRRK2 RNA guide
auccauuagccauuacuaug

SEQ ID NO: 88695 - RNA, 20 nt, Artificial Sequence
  LRRK2 RNA guide
auggcuaauggauauaugaa

SEQ ID NO: 88696 - RNA, 20 nt, Artificial Sequence
  LRRK2 RNA guide
auuagccauuacuaugucuu

SEQ ID NO: 88697 - RNA, 20 nt, Artificial Sequence
  LRRK2 RNA guide
caaaagaagacauaguaaug

SEQ ID NO: 88698 - RNA, 20 nt, Artificial Sequence
  LRRK2 RNA guide
cauaguaauggcuaauggau

SEQ ID NO: 88699 - RNA, 20 nt, Artificial Sequence
  LRRK2 RNA guide
cauauauccauuagccauua

SEQ ID NO: 88700 - RNA, 20 nt, Artificial Sequence
  LRRK2 RNA guide
cauuagccauuacuaugucu

SEQ ID NO: 88701 - RNA, 20 nt, Artificial Sequence
  LRRK2 RNA guide
ccauuagccauuacuauguc

SEQ ID NO: 88702 - RNA, 20 nt, Artificial Sequence
  LRRK2 RNA guide
gaagacauaguaauggcuaa

SEQ ID NO: 88703 - RNA, 20 nt, Artificial Sequence
  LRRK2 RNA guide
gacauaguaauggcuaaugg

SEQ ID NO: 88704 - RNA, 20 nt, Artificial Sequence
  LRRK2 RNA guide
ggcuaauggauauaugaaaa

SEQ ID NO: 88705 - RNA, 20 nt, Artificial Sequence
  LRRK2 RNA guide
guaauggcuaauggauauau

SEQ ID NO: 88706 - RNA, 20 nt, Artificial Sequence
  LRRK2 RNA guide
uaauggcuaauggauauaug

SEQ ID NO: 88707 - RNA, 20 nt, Artificial Sequence
  LRRK2 RNA guide
uagccauuacuaugucuucu

SEQ ID NO: 88708 - RNA, 20 nt, Artificial Sequence
  LRRK2 RNA guide
uaguaauggcuaauggauau

SEQ ID NO: 88709 - RNA, 20 nt, Artificial Sequence
  LRRK2 RNA guide
uauauccauuagccauuacu

SEQ ID NO: 88710 - RNA, 20 nt, Artificial Sequence
  LRRK2 RNA guide
uauccauuagccauuacuau

SEQ ID NO: 88711 - RNA, 20 nt, Artificial Sequence
  LRRK2 RNA guide
ucauauauccauuagccauu

SEQ ID NO: 88712 - RNA, 20 nt, Artificial Sequence
  LRRK2 RNA guide
uccauuagccauuacuaugu

SEQ ID NO: 88713 - RNA, 20 nt, Artificial Sequence
  LRRK2 RNA guide
uggcuaauggauauaugaaa

SEQ ID NO: 88714 - RNA, 20 nt, Artificial Sequence
  LRRK2 RNA guide
uuagccauuacuaugucuuc

SEQ ID NO: 88715 - RNA, 20 nt, Artificial Sequence
  LRRK2 RNA guide
uucauauauccauuagccau

SEQ ID NO: 88716 - RNA, 20 nt, Artificial Sequence
  LRRK2 RNA guide
uuucauauauccauuagcca

SEQ ID NO: 88717 - RNA, 20 nt, Artificial Sequence
  LRRK2 RNA guide
uuuucauauauccauuagcc

SEQ ID NO: 88718 - RNA, 21 nt, Artificial Sequence
  LRRK2 RNA guide
aaagaagacauaguaauggcu

SEQ ID NO: 88719 - RNA, 21 nt, Artificial Sequence
  LRRK2 RNA guide
aagaagacauaguaauggcua

SEQ ID NO: 88720 - RNA, 21 nt, Artificial Sequence
  LRRK2 RNA guide
aagacauaguaauggcuaaug

SEQ ID NO: 88721 - RNA, 21 nt, Artificial Sequence
  LRRK2 RNA guide
acauaguaauggcuaauggau

SEQ ID NO: 88722 - RNA, 21 nt, Artificial Sequence
  LRRK2 RNA guide
agaagacauaguaauggcuaa

SEQ ID NO: 88723 - RNA, 21 nt, Artificial Sequence
  LRRK2 RNA guide
agacauaguaauggcuaaugg

SEQ ID NO: 88724 - RNA, 21 nt, Artificial Sequence
  LRRK2 RNA guide
auccauuagccauuacuaugu

SEQ ID NO: 88725 - RNA, 21 nt, Artificial Sequence
  LRRK2 RNA guide
auuagccauuacuaugucuuc

SEQ ID NO: 88726 - RNA, 21 nt, Artificial Sequence
  LRRK2 RNA guide
cauaguaauggcuaauggaua

SEQ ID NO: 88727 - RNA, 21 nt, Artificial Sequence
  LRRK2 RNA guide
cauauauccauuagccauuac

SEQ ID NO: 88728 - RNA, 21 nt, Artificial Sequence
  LRRK2 RNA guide
cauuagccauuacuaugucuu

SEQ ID NO: 88729 - RNA, 21 nt, Artificial Sequence
  LRRK2 RNA guide
ccauuagccauuacuaugucu

SEQ ID NO: 88730 - RNA, 21 nt, Artificial Sequence
  LRRK2 RNA guide
gaagacauaguaauggcuaau

SEQ ID NO: 88731 - RNA, 21 nt, Artificial Sequence
  LRRK2 RNA guide
gacauaguaauggcuaaugga

SEQ ID NO: 88732 - RNA, 21 nt, Artificial Sequence
  LRRK2 RNA guide
guaauggcuaauggauauaug

SEQ ID NO: 88733 - RNA, 21 nt, Artificial Sequence
  LRRK2 RNA guide
uagccauuacuaugucuucuu

SEQ ID NO: 88734 - RNA, 21 nt, Artificial Sequence
  LRRK2 RNA guide
uauccauuagccauuacuaug

SEQ ID NO: 88735 - RNA, 21 nt, Artificial Sequence
  LRRK2 RNA guide
uccauuagccauuacuauguc

SEQ ID NO: 88736 - RNA, 21 nt, Artificial Sequence
  LRRK2 RNA guide
uuagccauuacuaugucuucu

SEQ ID NO: 88737 - RNA, 22 nt, Artificial Sequence
  LRRK2 RNA guide
aaaagaagacauaguaauggcu

SEQ ID NO: 88738 - RNA, 22 nt, Artificial Sequence
  LRRK2 RNA guide
aaagaagacauaguaauggcua

SEQ ID NO: 88739 - RNA, 22 nt, Artificial Sequence
  LRRK2 RNA guide
aagaagacauaguaauggcuaa

SEQ ID NO: 88740 - RNA, 22 nt, Artificial Sequence
  LRRK2 RNA guide
aagacauaguaauggcuaaugg

SEQ ID NO: 88741 - RNA, 22 nt, Artificial Sequence
  LRRK2 RNA guide
acauaguaauggcuaauggaua

SEQ ID NO: 88742 - RNA, 22 nt, Artificial Sequence
  LRRK2 RNA guide
agaagacauaguaauggcuaau

SEQ ID NO: 88743 - RNA, 22 nt, Artificial Sequence
  LRRK2 RNA guide
agacauaguaauggcuaaugga

SEQ ID NO: 88744 - RNA, 22 nt, Artificial Sequence
  LRRK2 RNA guide
aguaauggcuaauggauauaug

SEQ ID NO: 88745 - RNA, 22 nt, Artificial Sequence
  LRRK2 RNA guide
auauccauuagccauuacuaug

SEQ ID NO: 88746 - RNA, 22 nt, Artificial Sequence
  LRRK2 RNA guide
auccauuagccauuacuauguc

SEQ ID NO: 88747 - RNA, 22 nt, Artificial Sequence
  LRRK2 RNA guide
auuagccauuacuaugucuucu

SEQ ID NO: 88748 - RNA, 22 nt, Artificial Sequence
  LRRK2 RNA guide
cauaguaauggcuaauggauau

SEQ ID NO: 88749 - RNA, 22 nt, Artificial Sequence
  LRRK2 RNA guide
cauauauccauuagccauuacu

SEQ ID NO: 88750 - RNA, 22 nt, Artificial Sequence
  LRRK2 RNA guide
cauuagccauuacuaugucuuc

SEQ ID NO: 88751 - RNA, 22 nt, Artificial Sequence
  LRRK2 RNA guide
ccauuagccauuacuaugucuu

SEQ ID NO: 88752 - RNA, 22 nt, Artificial Sequence
  LRRK2 RNA guide
gaagacauaguaauggcuaaug

SEQ ID NO: 88753 - RNA, 22 nt, Artificial Sequence
  LRRK2 RNA guide
gacauaguaauggcuaauggau

SEQ ID NO: 88754 - RNA, 22 nt, Artificial Sequence
  LRRK2 RNA guide
guaauggcuaauggauauauga

SEQ ID NO: 88755 - RNA, 22 nt, Artificial Sequence
  LRRK2 RNA guide
uagccauuacuaugucuucuuu

SEQ ID NO: 88756 - RNA, 22 nt, Artificial Sequence
  LRRK2 RNA guide
uauccauuagccauuacuaugu

SEQ ID NO: 88757 - RNA, 22 nt, Artificial Sequence
  LRRK2 RNA guide
ucauauauccauuagccauuac

SEQ ID NO: 88758 - RNA, 22 nt, Artificial Sequence
  LRRK2 RNA guide
uccauuagccauuacuaugucu

SEQ ID NO: 88759 - RNA, 22 nt, Artificial Sequence
  LRRK2 RNA guide
uuagccauuacuaugucuucuu

SEQ ID NO: 88760 - RNA, 20 nt, Artificial Sequence
  LRRK2 RNA guide
aacauaguggagccgcaucu

SEQ ID NO: 88761 - RNA, 20 nt, Artificial Sequence
  LRRK2 RNA guide
acaacauaguggagccgcau

SEQ ID NO: 88762 - RNA, 20 nt, Artificial Sequence
  LRRK2 RNA guide
acauaguggagccgcaucuc

SEQ ID NO: 88763 - RNA, 20 nt, Artificial Sequence
  LRRK2 RNA guide
agagaugcggcuccacuaug

SEQ ID NO: 88764 - RNA, 20 nt, Artificial Sequence
  LRRK2 RNA guide
agaucagucuggacaacaua

SEQ ID NO: 88765 - RNA, 20 nt, Artificial Sequence
  LRRK2 RNA guide
agaugcggcuccacuauguu

SEQ ID NO: 88766 - RNA, 20 nt, Artificial Sequence
  LRRK2 RNA guide
agucuggacaacauagugga

SEQ ID NO: 88767 - RNA, 20 nt, Artificial Sequence
  LRRK2 RNA guide
auaguggagccgcaucucua

SEQ ID NO: 88768 - RNA, 20 nt, Artificial Sequence
  LRRK2 RNA guide
aucagucuggacaacauagu

SEQ ID NO: 88769 - RNA, 20 nt, Artificial Sequence
  LRRK2 RNA guide
augcggcuccacuauguugu

SEQ ID NO: 88770 - RNA, 20 nt, Artificial Sequence
  LRRK2 RNA guide
caacauaguggagccgcauc

SEQ ID NO: 88771 - RNA, 20 nt, Artificial Sequence
  LRRK2 RNA guide
cagucuggacaacauagugg

SEQ ID NO: 88772 - RNA, 20 nt, Artificial Sequence
  LRRK2 RNA guide
cauaguggagccgcaucucu

SEQ ID NO: 88773 - RNA, 20 nt, Artificial Sequence
  LRRK2 RNA guide
ccacuauguuguccagacug

SEQ ID NO: 88774 - RNA, 20 nt, Artificial Sequence
  LRRK2 RNA guide
cggcuccacuauguugucca

SEQ ID NO: 88775 - RNA, 20 nt, Artificial Sequence
  LRRK2 RNA guide
cuccacuauguuguccagac

SEQ ID NO: 88776 - RNA, 20 nt, Artificial Sequence
  LRRK2 RNA guide
cuggacaacauaguggagcc

SEQ ID NO: 88777 - RNA, 20 nt, Artificial Sequence
  LRRK2 RNA guide
gacaacauaguggagccgca

SEQ ID NO: 88778 - RNA, 20 nt, Artificial Sequence
  LRRK2 RNA guide
gagaucagucuggacaacau

SEQ ID NO: 88779 - RNA, 20 nt, Artificial Sequence
  LRRK2 RNA guide
gagaugcggcuccacuaugu

SEQ ID NO: 88780 - RNA, 20 nt, Artificial Sequence
  LRRK2 RNA guide
gaucagucuggacaacauag

SEQ ID NO: 88781 - RNA, 20 nt, Artificial Sequence
  LRRK2 RNA guide
gaugcggcuccacuauguug

SEQ ID NO: 88782 - RNA, 20 nt, Artificial Sequence
  LRRK2 RNA guide
gcggcuccacuauguugucc

SEQ ID NO: 88783 - RNA, 20 nt, Artificial Sequence
  LRRK2 RNA guide
gcuccacuauguuguccaga

SEQ ID NO: 88784 - RNA, 20 nt, Artificial Sequence
  LRRK2 RNA guide
ggacaacauaguggagccgc

SEQ ID NO: 88785 - RNA, 20 nt, Artificial Sequence
  LRRK2 RNA guide
ggcuccacuauguuguccag

SEQ ID NO: 88786 - RNA, 20 nt, Artificial Sequence
  LRRK2 RNA guide
guagagaugcggcuccacua

SEQ ID NO: 88787 - RNA, 20 nt, Artificial Sequence
  LRRK2 RNA guide
gucuggacaacauaguggag

SEQ ID NO: 88788 - RNA, 20 nt, Artificial Sequence
  LRRK2 RNA guide
uagagaugcggcuccacuau

SEQ ID NO: 88789 - RNA, 20 nt, Artificial Sequence
  LRRK2 RNA guide
ucagucuggacaacauagug

SEQ ID NO: 88790 - RNA, 20 nt, Artificial Sequence
  LRRK2 RNA guide
uccacuauguuguccagacu

SEQ ID NO: 88791 - RNA, 20 nt, Artificial Sequence
  LRRK2 RNA guide
ucuggacaacauaguggagc

SEQ ID NO: 88792 - RNA, 20 nt, Artificial Sequence
  LRRK2 RNA guide
ugcggcuccacuauguuguc

SEQ ID NO: 88793 - RNA, 20 nt, Artificial Sequence
  LRRK2 RNA guide
uggacaacauaguggagccg

SEQ ID NO: 88794 - RNA, 20 nt, Artificial Sequence
  LRRK2 RNA guide
uguagagaugcggcuccacu

SEQ ID NO: 88795 - RNA, 20 nt, Artificial Sequence
  LRRK2 RNA guide
uuguagagaugcggcuccac

SEQ ID NO: 88796 - RNA, 20 nt, Artificial Sequence
  LRRK2 RNA guide
uuuguagagaugcggcucca

SEQ ID NO: 88797 - RNA, 20 nt, Artificial Sequence
  LRRK2 RNA guide
uuuuguagagaugcggcucc

SEQ ID NO: 88798 - RNA, 20 nt, Artificial Sequence
  LRRK2 RNA guide
uuuuuguagagaugcggcuc

SEQ ID NO: 88799 - RNA, 21 nt, Artificial Sequence
  LRRK2 RNA guide
aacauaguggagccgcaucuc

SEQ ID NO: 88800 - RNA, 21 nt, Artificial Sequence
  LRRK2 RNA guide
acaacauaguggagccgcauc

SEQ ID NO: 88801 - RNA, 21 nt, Artificial Sequence
  LRRK2 RNA guide
acauaguggagccgcaucucu

SEQ ID NO: 88802 - RNA, 21 nt, Artificial Sequence
  LRRK2 RNA guide
agagaugcggcuccacuaugu

SEQ ID NO: 88803 - RNA, 21 nt, Artificial Sequence
  LRRK2 RNA guide
agaucagucuggacaacauag

SEQ ID NO: 88804 - RNA, 21 nt, Artificial Sequence
  LRRK2 RNA guide
agaugcggcuccacuauguug

SEQ ID NO: 88805 - RNA, 21 nt, Artificial Sequence
  LRRK2 RNA guide
agucuggacaacauaguggag

SEQ ID NO: 88806 - RNA, 21 nt, Artificial Sequence
  LRRK2 RNA guide
auaguggagccgcaucucuac

SEQ ID NO: 88807 - RNA, 21 nt, Artificial Sequence
  LRRK2 RNA guide
aucagucuggacaacauagug

SEQ ID NO: 88808 - RNA, 21 nt, Artificial Sequence
  LRRK2 RNA guide
augcggcuccacuauguuguc

SEQ ID NO: 88809 - RNA, 21 nt, Artificial Sequence
  LRRK2 RNA guide
caacauaguggagccgcaucu

SEQ ID NO: 88810 - RNA, 21 nt, Artificial Sequence
  LRRK2 RNA guide
cagucuggacaacauagugga

SEQ ID NO: 88811 - RNA, 21 nt, Artificial Sequence
  LRRK2 RNA guide
cauaguggagccgcaucucua

SEQ ID NO: 88812 - RNA, 21 nt, Artificial Sequence
  LRRK2 RNA guide
ccacuauguuguccagacuga

SEQ ID NO: 88813 - RNA, 21 nt, Artificial Sequence
  LRRK2 RNA guide
cggcuccacuauguuguccag

SEQ ID NO: 88814 - RNA, 21 nt, Artificial Sequence
  LRRK2 RNA guide
cuccacuauguuguccagacu

SEQ ID NO: 88815 - RNA, 21 nt, Artificial Sequence
  LRRK2 RNA guide
cuggacaacauaguggagccg

SEQ ID NO: 88816 - RNA, 21 nt, Artificial Sequence
  LRRK2 RNA guide
gacaacauaguggagccgcau

SEQ ID NO: 88817 - RNA, 21 nt, Artificial Sequence
  LRRK2 RNA guide
gagaucagucuggacaacaua

SEQ ID NO: 88818 - RNA, 21 nt, Artificial Sequence
  LRRK2 RNA guide
gagaugcggcuccacuauguu

SEQ ID NO: 88819 - RNA, 21 nt, Artificial Sequence
  LRRK2 RNA guide
gaucagucuggacaacauagu

SEQ ID NO: 88820 - RNA, 21 nt, Artificial Sequence
  LRRK2 RNA guide
gaugcggcuccacuauguugu

SEQ ID NO: 88821 - RNA, 21 nt, Artificial Sequence
  LRRK2 RNA guide
gcggcuccacuauguugucca

SEQ ID NO: 88822 - RNA, 21 nt, Artificial Sequence
  LRRK2 RNA guide
gcuccacuauguuguccagac

SEQ ID NO: 88823 - RNA, 21 nt, Artificial Sequence
  LRRK2 RNA guide
ggacaacauaguggagccgca

SEQ ID NO: 88824 - RNA, 21 nt, Artificial Sequence
  LRRK2 RNA guide
ggcuccacuauguuguccaga

SEQ ID NO: 88825 - RNA, 21 nt, Artificial Sequence
  LRRK2 RNA guide
guagagaugcggcuccacuau

SEQ ID NO: 88826 - RNA, 21 nt, Artificial Sequence
  LRRK2 RNA guide
gucuggacaacauaguggagc

SEQ ID NO: 88827 - RNA, 21 nt, Artificial Sequence
  LRRK2 RNA guide
uagagaugcggcuccacuaug

SEQ ID NO: 88828 - RNA, 21 nt, Artificial Sequence
  LRRK2 RNA guide
ucagucuggacaacauagugg

SEQ ID NO: 88829 - RNA, 21 nt, Artificial Sequence
  LRRK2 RNA guide
uccacuauguuguccagacug

SEQ ID NO: 88830 - RNA, 21 nt, Artificial Sequence
  LRRK2 RNA guide
ucuggacaacauaguggagcc

SEQ ID NO: 88831 - RNA, 21 nt, Artificial Sequence
  LRRK2 RNA guide
ugagaucagucuggacaacau

SEQ ID NO: 88832 - RNA, 21 nt, Artificial Sequence
  LRRK2 RNA guide
ugcggcuccacuauguugucc

SEQ ID NO: 88833 - RNA, 21 nt, Artificial Sequence
  LRRK2 RNA guide
uggacaacauaguggagccgc

SEQ ID NO: 88834 - RNA, 21 nt, Artificial Sequence
  LRRK2 RNA guide
uguagagaugcggcuccacua

SEQ ID NO: 88835 - RNA, 21 nt, Artificial Sequence
  LRRK2 RNA guide
uuguagagaugcggcuccacu

SEQ ID NO: 88836 - RNA, 21 nt, Artificial Sequence
  LRRK2 RNA guide
uuuguagagaugcggcuccac

SEQ ID NO: 88837 - RNA, 21 nt, Artificial Sequence
  LRRK2 RNA guide
uuuuguagagaugcggcucca

SEQ ID NO: 88838 - RNA, 21 nt, Artificial Sequence
  LRRK2 RNA guide
uuuuuguagagaugcggcucc

SEQ ID NO: 88839 - RNA, 21 nt, Artificial Sequence
  LRRK2 RNA guide
uuuuuuguagagaugcggcuc

SEQ ID NO: 88840 - RNA, 22 nt, Artificial Sequence
  LRRK2 RNA guide
aacauaguggagccgcaucucu

SEQ ID NO: 88841 - RNA, 22 nt, Artificial Sequence
  LRRK2 RNA guide
acaacauaguggagccgcaucu

SEQ ID NO: 88842 - RNA, 22 nt, Artificial Sequence
  LRRK2 RNA guide
acauaguggagccgcaucucua

SEQ ID NO: 88843 - RNA, 22 nt, Artificial Sequence
  LRRK2 RNA guide
agagaugcggcuccacuauguu

SEQ ID NO: 88844 - RNA, 22 nt, Artificial Sequence
  LRRK2 RNA guide
agaucagucuggacaacauagu

SEQ ID NO: 88845 - RNA, 22 nt, Artificial Sequence
  LRRK2 RNA guide
agaugcggcuccacuauguugu

SEQ ID NO: 88846 - RNA, 22 nt, Artificial Sequence
  LRRK2 RNA guide
agucuggacaacauaguggagc

SEQ ID NO: 88847 - RNA, 22 nt, Artificial Sequence
  LRRK2 RNA guide
auaguggagccgcaucucuaca

SEQ ID NO: 88848 - RNA, 22 nt, Artificial Sequence
  LRRK2 RNA guide
aucagucuggacaacauagugg

SEQ ID NO: 88849 - RNA, 22 nt, Artificial Sequence
  LRRK2 RNA guide
augcggcuccacuauguugucc

SEQ ID NO: 88850 - RNA, 22 nt, Artificial Sequence
  LRRK2 RNA guide
auuuuuuguagagaugcggcuc

SEQ ID NO: 88851 - RNA, 22 nt, Artificial Sequence
  LRRK2 RNA guide
caacauaguggagccgcaucuc

SEQ ID NO: 88852 - RNA, 22 nt, Artificial Sequence
  LRRK2 RNA guide
cagucuggacaacauaguggag

SEQ ID NO: 88853 - RNA, 22 nt, Artificial Sequence
  LRRK2 RNA guide
cauaguggagccgcaucucuac

SEQ ID NO: 88854 - RNA, 22 nt, Artificial Sequence
  LRRK2 RNA guide
ccacuauguuguccagacugau

SEQ ID NO: 88855 - RNA, 22 nt, Artificial Sequence
  LRRK2 RNA guide
cggcuccacuauguuguccaga

SEQ ID NO: 88856 - RNA, 22 nt, Artificial Sequence
  LRRK2 RNA guide
cuccacuauguuguccagacug

SEQ ID NO: 88857 - RNA, 22 nt, Artificial Sequence
  LRRK2 RNA guide
cuggacaacauaguggagccgc

SEQ ID NO: 88858 - RNA, 22 nt, Artificial Sequence
  LRRK2 RNA guide
gacaacauaguggagccgcauc

SEQ ID NO: 88859 - RNA, 22 nt, Artificial Sequence
  LRRK2 RNA guide
gagaucagucuggacaacauag

SEQ ID NO: 88860 - RNA, 22 nt, Artificial Sequence
  LRRK2 RNA guide
gagaugcggcuccacuauguug

SEQ ID NO: 88861 - RNA, 22 nt, Artificial Sequence
  LRRK2 RNA guide
gaucagucuggacaacauagug

SEQ ID NO: 88862 - RNA, 22 nt, Artificial Sequence
  LRRK2 RNA guide
gaugcggcuccacuauguuguc

SEQ ID NO: 88863 - RNA, 22 nt, Artificial Sequence
  LRRK2 RNA guide
gcggcuccacuauguuguccag

SEQ ID NO: 88864 - RNA, 22 nt, Artificial Sequence
  LRRK2 RNA guide
gcuccacuauguuguccagacu

SEQ ID NO: 88865 - RNA, 22 nt, Artificial Sequence
  LRRK2 RNA guide
ggacaacauaguggagccgcau

SEQ ID NO: 88866 - RNA, 22 nt, Artificial Sequence
  LRRK2 RNA guide
ggcuccacuauguuguccagac

SEQ ID NO: 88867 - RNA, 22 nt, Artificial Sequence
  LRRK2 RNA guide
guagagaugcggcuccacuaug

SEQ ID NO: 88868 - RNA, 22 nt, Artificial Sequence
  LRRK2 RNA guide
gucuggacaacauaguggagcc

SEQ ID NO: 88869 - RNA, 22 nt, Artificial Sequence
  LRRK2 RNA guide
uagagaugcggcuccacuaugu

SEQ ID NO: 88870 - RNA, 22 nt, Artificial Sequence
  LRRK2 RNA guide
ucagucuggacaacauagugga

SEQ ID NO: 88871 - RNA, 22 nt, Artificial Sequence
  LRRK2 RNA guide
uccacuauguuguccagacuga

SEQ ID NO: 88872 - RNA, 22 nt, Artificial Sequence
  LRRK2 RNA guide
ucuggacaacauaguggagccg

SEQ ID NO: 88873 - RNA, 22 nt, Artificial Sequence
  LRRK2 RNA guide
ugagaucagucuggacaacaua

SEQ ID NO: 88874 - RNA, 22 nt, Artificial Sequence
  LRRK2 RNA guide
ugcggcuccacuauguugucca

SEQ ID NO: 88875 - RNA, 22 nt, Artificial Sequence
  LRRK2 RNA guide
uggacaacauaguggagccgca

SEQ ID NO: 88876 - RNA, 22 nt, Artificial Sequence
  LRRK2 RNA guide
uguagagaugcggcuccacuau

SEQ ID NO: 88877 - RNA, 22 nt, Artificial Sequence
  LRRK2 RNA guide
uugagaucagucuggacaacau

SEQ ID NO: 88878 - RNA, 22 nt, Artificial Sequence
  LRRK2 RNA guide
uuguagagaugcggcuccacua

SEQ ID NO: 88879 - RNA, 22 nt, Artificial Sequence
  LRRK2 RNA guide
uuuguagagaugcggcuccacu

SEQ ID NO: 88880 - RNA, 22 nt, Artificial Sequence
  LRRK2 RNA guide
uuuuguagagaugcggcuccac

SEQ ID NO: 88881 - RNA, 22 nt, Artificial Sequence
  LRRK2 RNA guide
uuuuuguagagaugcggcucca

SEQ ID NO: 88882 - RNA, 22 nt, Artificial Sequence
  LRRK2 RNA guide
uuuuuuguagagaugcggcucc

SEQ ID NO: 88883 - RNA, 20 nt, Artificial Sequence
  LRRK2 RNA guide
aacacaguggagccgcaucu

SEQ ID NO: 88884 - RNA, 20 nt, Artificial Sequence
  LRRK2 RNA guide
acaacacaguggagccgcau

SEQ ID NO: 88885 - RNA, 20 nt, Artificial Sequence
  LRRK2 RNA guide
acacaguggagccgcaucuc

SEQ ID NO: 88886 - RNA, 20 nt, Artificial Sequence
  LRRK2 RNA guide
acaguggagccgcaucucua

SEQ ID NO: 88887 - RNA, 20 nt, Artificial Sequence
  LRRK2 RNA guide
agagaugcggcuccacugug

SEQ ID NO: 88888 - RNA, 20 nt, Artificial Sequence
  LRRK2 RNA guide
agaucagucuggacaacaca

SEQ ID NO: 88889 - RNA, 20 nt, Artificial Sequence
  LRRK2 RNA guide
agaugcggcuccacuguguu

SEQ ID NO: 88890 - RNA, 20 nt, Artificial Sequence
  LRRK2 RNA guide
agucuggacaacacagugga

SEQ ID NO: 88891 - RNA, 20 nt, Artificial Sequence
  LRRK2 RNA guide
aguuugagaucagucuggac

SEQ ID NO: 88892 - RNA, 20 nt, Artificial Sequence
  LRRK2 RNA guide
aucagucuggacaacacagu

SEQ ID NO: 88893 - RNA, 20 nt, Artificial Sequence
  LRRK2 RNA guide
augcggcuccacuguguugu

SEQ ID NO: 88894 - RNA, 20 nt, Artificial Sequence
  LRRK2 RNA guide
caacacaguggagccgcauc

SEQ ID NO: 88895 - RNA, 20 nt, Artificial Sequence
  LRRK2 RNA guide
cacaguggagccgcaucucu

SEQ ID NO: 88896 - RNA, 20 nt, Artificial Sequence
  LRRK2 RNA guide
cagucuggacaacacagugg

SEQ ID NO: 88897 - RNA, 20 nt, Artificial Sequence
  LRRK2 RNA guide
ccacuguguuguccagacug

SEQ ID NO: 88898 - RNA, 20 nt, Artificial Sequence
  LRRK2 RNA guide
cggcuccacuguguugucca

SEQ ID NO: 88899 - RNA, 20 nt, Artificial Sequence
  LRRK2 RNA guide
cuccacuguguuguccagac

SEQ ID NO: 88900 - RNA, 20 nt, Artificial Sequence
  LRRK2 RNA guide
cuggacaacacaguggagcc

SEQ ID NO: 88901 - RNA, 20 nt, Artificial Sequence
  LRRK2 RNA guide
gacaacacaguggagccgca

SEQ ID NO: 88902 - RNA, 20 nt, Artificial Sequence
  LRRK2 RNA guide
gagaucagucuggacaacac

SEQ ID NO: 88903 - RNA, 20 nt, Artificial Sequence
  LRRK2 RNA guide
gagaugcggcuccacugugu

SEQ ID NO: 88904 - RNA, 20 nt, Artificial Sequence
  LRRK2 RNA guide
gaucagucuggacaacacag

SEQ ID NO: 88905 - RNA, 20 nt, Artificial Sequence
  LRRK2 RNA guide
gaugcggcuccacuguguug

SEQ ID NO: 88906 - RNA, 20 nt, Artificial Sequence
  LRRK2 RNA guide
gcggcuccacuguguugucc

SEQ ID NO: 88907 - RNA, 20 nt, Artificial Sequence
  LRRK2 RNA guide
gcuccacuguguuguccaga

SEQ ID NO: 88908 - RNA, 20 nt, Artificial Sequence
  LRRK2 RNA guide
ggacaacacaguggagccgc

SEQ ID NO: 88909 - RNA, 20 nt, Artificial Sequence
  LRRK2 RNA guide
ggcuccacuguguuguccag

SEQ ID NO: 88910 - RNA, 20 nt, Artificial Sequence
  LRRK2 RNA guide
guagagaugcggcuccacug

SEQ ID NO: 88911 - RNA, 20 nt, Artificial Sequence
  LRRK2 RNA guide
gucuggacaacacaguggag

SEQ ID NO: 88912 - RNA, 20 nt, Artificial Sequence
  LRRK2 RNA guide
guuugagaucagucuggaca

SEQ ID NO: 88913 - RNA, 20 nt, Artificial Sequence
  LRRK2 RNA guide
uagagaugcggcuccacugu

SEQ ID NO: 88914 - RNA, 20 nt, Artificial Sequence
  LRRK2 RNA guide
ucagucuggacaacacagug

SEQ ID NO: 88915 - RNA, 20 nt, Artificial Sequence
  LRRK2 RNA guide
uccacuguguuguccagacu

SEQ ID NO: 88916 - RNA, 20 nt, Artificial Sequence
  LRRK2 RNA guide
ucuggacaacacaguggagc

SEQ ID NO: 88917 - RNA, 20 nt, Artificial Sequence
  LRRK2 RNA guide
ugcggcuccacuguguuguc

SEQ ID NO: 88918 - RNA, 20 nt, Artificial Sequence
  LRRK2 RNA guide
uggacaacacaguggagccg

SEQ ID NO: 88919 - RNA, 20 nt, Artificial Sequence
  LRRK2 RNA guide
uguguuguccagacugaucu

SEQ ID NO: 88920 - RNA, 21 nt, Artificial Sequence
  LRRK2 RNA guide
aacacaguggagccgcaucuc

SEQ ID NO: 88921 - RNA, 21 nt, Artificial Sequence
  LRRK2 RNA guide
acaacacaguggagccgcauc

SEQ ID NO: 88922 - RNA, 21 nt, Artificial Sequence
  LRRK2 RNA guide
acacaguggagccgcaucucu

SEQ ID NO: 88923 - RNA, 21 nt, Artificial Sequence
  LRRK2 RNA guide
acaguggagccgcaucucuac

SEQ ID NO: 88924 - RNA, 21 nt, Artificial Sequence
  LRRK2 RNA guide
agagaugcggcuccacugugu

SEQ ID NO: 88925 - RNA, 21 nt, Artificial Sequence
  LRRK2 RNA guide
agaucagucuggacaacacag

SEQ ID NO: 88926 - RNA, 21 nt, Artificial Sequence
  LRRK2 RNA guide
agaugcggcuccacuguguug

SEQ ID NO: 88927 - RNA, 21 nt, Artificial Sequence
  LRRK2 RNA guide
agucuggacaacacaguggag

SEQ ID NO: 88928 - RNA, 21 nt, Artificial Sequence
  LRRK2 RNA guide
aguuugagaucagucuggaca

SEQ ID NO: 88929 - RNA, 21 nt, Artificial Sequence
  LRRK2 RNA guide
aucagucuggacaacacagug

SEQ ID NO: 88930 - RNA, 21 nt, Artificial Sequence
  LRRK2 RNA guide
augcggcuccacuguguuguc

SEQ ID NO: 88931 - RNA, 21 nt, Artificial Sequence
  LRRK2 RNA guide
caacacaguggagccgcaucu

SEQ ID NO: 88932 - RNA, 21 nt, Artificial Sequence
  LRRK2 RNA guide
cacaguggagccgcaucucua

SEQ ID NO: 88933 - RNA, 21 nt, Artificial Sequence
  LRRK2 RNA guide
cagucuggacaacacagugga

SEQ ID NO: 88934 - RNA, 21 nt, Artificial Sequence
  LRRK2 RNA guide
ccacuguguuguccagacuga

SEQ ID NO: 88935 - RNA, 21 nt, Artificial Sequence
  LRRK2 RNA guide
cggcuccacuguguuguccag

SEQ ID NO: 88936 - RNA, 21 nt, Artificial Sequence
  LRRK2 RNA guide
cuccacuguguuguccagacu

SEQ ID NO: 88937 - RNA, 21 nt, Artificial Sequence
  LRRK2 RNA guide
cuggacaacacaguggagccg

SEQ ID NO: 88938 - RNA, 21 nt, Artificial Sequence
  LRRK2 RNA guide
cuguguuguccagacugaucu

SEQ ID NO: 88939 - RNA, 21 nt, Artificial Sequence
  LRRK2 RNA guide
gacaacacaguggagccgcau

SEQ ID NO: 88940 - RNA, 21 nt, Artificial Sequence
  LRRK2 RNA guide
gagaucagucuggacaacaca

SEQ ID NO: 88941 - RNA, 21 nt, Artificial Sequence
  LRRK2 RNA guide
gagaugcggcuccacuguguu

SEQ ID NO: 88942 - RNA, 21 nt, Artificial Sequence
  LRRK2 RNA guide
gaguuugagaucagucuggac

SEQ ID NO: 88943 - RNA, 21 nt, Artificial Sequence
  LRRK2 RNA guide
gaucagucuggacaacacagu

SEQ ID NO: 88944 - RNA, 21 nt, Artificial Sequence
  LRRK2 RNA guide
gaugcggcuccacuguguugu

SEQ ID NO: 88945 - RNA, 21 nt, Artificial Sequence
  LRRK2 RNA guide
gcggcuccacuguguugucca

SEQ ID NO: 88946 - RNA, 21 nt, Artificial Sequence
  LRRK2 RNA guide
gcuccacuguguuguccagac

SEQ ID NO: 88947 - RNA, 21 nt, Artificial Sequence
  LRRK2 RNA guide
ggacaacacaguggagccgca

SEQ ID NO: 88948 - RNA, 21 nt, Artificial Sequence
  LRRK2 RNA guide
ggcuccacuguguuguccaga

SEQ ID NO: 88949 - RNA, 21 nt, Artificial Sequence
  LRRK2 RNA guide
guagagaugcggcuccacugu

SEQ ID NO: 88950 - RNA, 21 nt, Artificial Sequence
  LRRK2 RNA guide
gucuggacaacacaguggagc

SEQ ID NO: 88951 - RNA, 21 nt, Artificial Sequence
  LRRK2 RNA guide
guuugagaucagucuggacaa

SEQ ID NO: 88952 - RNA, 21 nt, Artificial Sequence
  LRRK2 RNA guide
uagagaugcggcuccacugug

SEQ ID NO: 88953 - RNA, 21 nt, Artificial Sequence
  LRRK2 RNA guide
ucagucuggacaacacagugg

SEQ ID NO: 88954 - RNA, 21 nt, Artificial Sequence
  LRRK2 RNA guide
uccacuguguuguccagacug

SEQ ID NO: 88955 - RNA, 21 nt, Artificial Sequence
  LRRK2 RNA guide
ucuggacaacacaguggagcc

SEQ ID NO: 88956 - RNA, 21 nt, Artificial Sequence
  LRRK2 RNA guide
ugagaucagucuggacaacac

SEQ ID NO: 88957 - RNA, 21 nt, Artificial Sequence
  LRRK2 RNA guide
ugcggcuccacuguguugucc

SEQ ID NO: 88958 - RNA, 21 nt, Artificial Sequence
  LRRK2 RNA guide
uggacaacacaguggagccgc

SEQ ID NO: 88959 - RNA, 21 nt, Artificial Sequence
  LRRK2 RNA guide
uguagagaugcggcuccacug

SEQ ID NO: 88960 - RNA, 21 nt, Artificial Sequence
  LRRK2 RNA guide
uguguuguccagacugaucuc

SEQ ID NO: 88961 - RNA, 22 nt, Artificial Sequence
  LRRK2 RNA guide
aacacaguggagccgcaucucu

SEQ ID NO: 88962 - RNA, 22 nt, Artificial Sequence
  LRRK2 RNA guide
acaacacaguggagccgcaucu

SEQ ID NO: 88963 - RNA, 22 nt, Artificial Sequence
  LRRK2 RNA guide
acacaguggagccgcaucucua

SEQ ID NO: 88964 - RNA, 22 nt, Artificial Sequence
  LRRK2 RNA guide
acaguggagccgcaucucuaca

SEQ ID NO: 88965 - RNA, 22 nt, Artificial Sequence
  LRRK2 RNA guide
acuguguuguccagacugaucu

SEQ ID NO: 88966 - RNA, 22 nt, Artificial Sequence
  LRRK2 RNA guide
agagaugcggcuccacuguguu

SEQ ID NO: 88967 - RNA, 22 nt, Artificial Sequence
  LRRK2 RNA guide
agaucagucuggacaacacagu

SEQ ID NO: 88968 - RNA, 22 nt, Artificial Sequence
  LRRK2 RNA guide
agaugcggcuccacuguguugu

SEQ ID NO: 88969 - RNA, 22 nt, Artificial Sequence
  LRRK2 RNA guide
agucuggacaacacaguggagc

SEQ ID NO: 88970 - RNA, 22 nt, Artificial Sequence
  LRRK2 RNA guide
aguuugagaucagucuggacaa

SEQ ID NO: 88971 - RNA, 22 nt, Artificial Sequence
  LRRK2 RNA guide
aucagucuggacaacacagugg

SEQ ID NO: 88972 - RNA, 22 nt, Artificial Sequence
  LRRK2 RNA guide
augcggcuccacuguguugucc

SEQ ID NO: 88973 - RNA, 22 nt, Artificial Sequence
  LRRK2 RNA guide
caacacaguggagccgcaucuc

SEQ ID NO: 88974 - RNA, 22 nt, Artificial Sequence
  LRRK2 RNA guide
cacaguggagccgcaucucuac

SEQ ID NO: 88975 - RNA, 22 nt, Artificial Sequence
  LRRK2 RNA guide
cagucuggacaacacaguggag

SEQ ID NO: 88976 - RNA, 22 nt, Artificial Sequence
  LRRK2 RNA guide
ccacuguguuguccagacugau

SEQ ID NO: 88977 - RNA, 22 nt, Artificial Sequence
  LRRK2 RNA guide
cggcuccacuguguuguccaga

SEQ ID NO: 88978 - RNA, 22 nt, Artificial Sequence
  LRRK2 RNA guide
cuccacuguguuguccagacug

SEQ ID NO: 88979 - RNA, 22 nt, Artificial Sequence
  LRRK2 RNA guide
cuggacaacacaguggagccgc

SEQ ID NO: 88980 - RNA, 22 nt, Artificial Sequence
  LRRK2 RNA guide
cuguguuguccagacugaucuc

SEQ ID NO: 88981 - RNA, 22 nt, Artificial Sequence
  LRRK2 RNA guide
gacaacacaguggagccgcauc

SEQ ID NO: 88982 - RNA, 22 nt, Artificial Sequence
  LRRK2 RNA guide
gagaucagucuggacaacacag

SEQ ID NO: 88983 - RNA, 22 nt, Artificial Sequence
  LRRK2 RNA guide
gagaugcggcuccacuguguug

SEQ ID NO: 88984 - RNA, 22 nt, Artificial Sequence
  LRRK2 RNA guide
gaguuugagaucagucuggaca

SEQ ID NO: 88985 - RNA, 22 nt, Artificial Sequence
  LRRK2 RNA guide
gaucagucuggacaacacagug

SEQ ID NO: 88986 - RNA, 22 nt, Artificial Sequence
  LRRK2 RNA guide
gaugcggcuccacuguguuguc

SEQ ID NO: 88987 - RNA, 22 nt, Artificial Sequence
  LRRK2 RNA guide
gcggcuccacuguguuguccag

SEQ ID NO: 88988 - RNA, 22 nt, Artificial Sequence
  LRRK2 RNA guide
gcuccacuguguuguccagacu

SEQ ID NO: 88989 - RNA, 22 nt, Artificial Sequence
  LRRK2 RNA guide
ggacaacacaguggagccgcau

SEQ ID NO: 88990 - RNA, 22 nt, Artificial Sequence
  LRRK2 RNA guide
ggaguuugagaucagucuggac

SEQ ID NO: 88991 - RNA, 22 nt, Artificial Sequence
  LRRK2 RNA guide
ggcuccacuguguuguccagac

SEQ ID NO: 88992 - RNA, 22 nt, Artificial Sequence
  LRRK2 RNA guide
guagagaugcggcuccacugug

SEQ ID NO: 88993 - RNA, 22 nt, Artificial Sequence
  LRRK2 RNA guide
gucuggacaacacaguggagcc

SEQ ID NO: 88994 - RNA, 22 nt, Artificial Sequence
  LRRK2 RNA guide
guuugagaucagucuggacaac

SEQ ID NO: 88995 - RNA, 22 nt, Artificial Sequence
  LRRK2 RNA guide
uagagaugcggcuccacugugu

SEQ ID NO: 88996 - RNA, 22 nt, Artificial Sequence
  LRRK2 RNA guide
ucagucuggacaacacagugga

SEQ ID NO: 88997 - RNA, 22 nt, Artificial Sequence
  LRRK2 RNA guide
uccacuguguuguccagacuga

SEQ ID NO: 88998 - RNA, 22 nt, Artificial Sequence
  LRRK2 RNA guide
ucuggacaacacaguggagccg

SEQ ID NO: 88999 - RNA, 22 nt, Artificial Sequence
  LRRK2 RNA guide
ugagaucagucuggacaacaca

SEQ ID NO: 89000 - RNA, 22 nt, Artificial Sequence
  LRRK2 RNA guide
ugcggcuccacuguguugucca

SEQ ID NO: 89001 - RNA, 22 nt, Artificial Sequence
  LRRK2 RNA guide
uggacaacacaguggagccgca

SEQ ID NO: 89002 - RNA, 22 nt, Artificial Sequence
  LRRK2 RNA guide
uguagagaugcggcuccacugu

SEQ ID NO: 89003 - RNA, 22 nt, Artificial Sequence
  LRRK2 RNA guide
uguguuguccagacugaucuca

SEQ ID NO: 89004 - RNA, 22 nt, Artificial Sequence
  LRRK2 RNA guide
uugagaucagucuggacaacac

SEQ ID NO: 89005 - RNA, 22 nt, Artificial Sequence
  LRRK2 RNA guide
uuguagagaugcggcuccacug

SEQ ID NO: 89006 - RNA, 20 nt, Artificial Sequence
  LRRK2 RNA guide
agaacuccauuuaaaaguag

SEQ ID NO: 89007 - RNA, 20 nt, Artificial Sequence
  LRRK2 RNA guide
ccuacuuuuaaauggaguuc

SEQ ID NO: 89008 - RNA, 20 nt, Artificial Sequence
  LRRK2 RNA guide
cuacuuuuaaauggaguucu

SEQ ID NO: 89009 - RNA, 20 nt, Artificial Sequence
  LRRK2 RNA guide
cuuugccuacuuuuaaaugg

SEQ ID NO: 89010 - RNA, 20 nt, Artificial Sequence
  LRRK2 RNA guide
gccuacuuuuaaauggaguu

SEQ ID NO: 89011 - RNA, 20 nt, Artificial Sequence
  LRRK2 RNA guide
ugccuacuuuuaaauggagu

SEQ ID NO: 89012 - RNA, 20 nt, Artificial Sequence
  LRRK2 RNA guide
uugccuacuuuuaaauggag

SEQ ID NO: 89013 - RNA, 20 nt, Artificial Sequence
  LRRK2 RNA guide
uuugccuacuuuuaaaugga

SEQ ID NO: 89014 - RNA, 21 nt, Artificial Sequence
  LRRK2 RNA guide
agaacuccauuuaaaaguagg

SEQ ID NO: 89015 - RNA, 21 nt, Artificial Sequence
  LRRK2 RNA guide
ccuacuuuuaaauggaguucu

SEQ ID NO: 89016 - RNA, 21 nt, Artificial Sequence
  LRRK2 RNA guide
ccuuugccuacuuuuaaaugg

SEQ ID NO: 89017 - RNA, 21 nt, Artificial Sequence
  LRRK2 RNA guide
cuuugccuacuuuuaaaugga

SEQ ID NO: 89018 - RNA, 21 nt, Artificial Sequence
  LRRK2 RNA guide
gccuacuuuuaaauggaguuc

SEQ ID NO: 89019 - RNA, 21 nt, Artificial Sequence
  LRRK2 RNA guide
ugccuacuuuuaaauggaguu

SEQ ID NO: 89020 - RNA, 21 nt, Artificial Sequence
  LRRK2 RNA guide
uugccuacuuuuaaauggagu

SEQ ID NO: 89021 - RNA, 21 nt, Artificial Sequence
  LRRK2 RNA guide
uuugccuacuuuuaaauggag

SEQ ID NO: 89022 - RNA, 22 nt, Artificial Sequence
  LRRK2 RNA guide
aagaacuccauuuaaaaguagg

SEQ ID NO: 89023 - RNA, 22 nt, Artificial Sequence
  LRRK2 RNA guide
agaacuccauuuaaaaguaggc

SEQ ID NO: 89024 - RNA, 22 nt, Artificial Sequence
  LRRK2 RNA guide
cccuuugccuacuuuuaaaugg

SEQ ID NO: 89025 - RNA, 22 nt, Artificial Sequence
  LRRK2 RNA guide
ccuacuuuuaaauggaguucuu

SEQ ID NO: 89026 - RNA, 22 nt, Artificial Sequence
  LRRK2 RNA guide
ccuuugccuacuuuuaaaugga

SEQ ID NO: 89027 - RNA, 22 nt, Artificial Sequence
  LRRK2 RNA guide
cuuugccuacuuuuaaauggag

SEQ ID NO: 89028 - RNA, 22 nt, Artificial Sequence
  LRRK2 RNA guide
gccuacuuuuaaauggaguucu

SEQ ID NO: 89029 - RNA, 22 nt, Artificial Sequence
  LRRK2 RNA guide
ugccuacuuuuaaauggaguuc

SEQ ID NO: 89030 - RNA, 22 nt, Artificial Sequence
  LRRK2 RNA guide
uugccuacuuuuaaauggaguu

SEQ ID NO: 89031 - RNA, 22 nt, Artificial Sequence
  LRRK2 RNA guide
uuugccuacuuuuaaauggagu

SEQ ID NO: 89032 - RNA, 20 nt, Artificial Sequence
  LRRK2 RNA guide
aacaauauagagaggaucca

SEQ ID NO: 89033 - RNA, 20 nt, Artificial Sequence
  LRRK2 RNA guide
aauauagagaggauccauua

SEQ ID NO: 89034 - RNA, 20 nt, Artificial Sequence
  LRRK2 RNA guide
aauggauccucucuauauug

SEQ ID NO: 89035 - RNA, 20 nt, Artificial Sequence
  LRRK2 RNA guide
acaauauagagaggauccau

SEQ ID NO: 89036 - RNA, 20 nt, Artificial Sequence
  LRRK2 RNA guide
acauuuaauggauccucucu

SEQ ID NO: 89037 - RNA, 20 nt, Artificial Sequence
  LRRK2 RNA guide
agagaggauccauuaaaugu

SEQ ID NO: 89038 - RNA, 20 nt, Artificial Sequence
  LRRK2 RNA guide
agaggauccauuaaauguga

SEQ ID NO: 89039 - RNA, 20 nt, Artificial Sequence
  LRRK2 RNA guide
aggauccauuaaaugugagg

SEQ ID NO: 89040 - RNA, 20 nt, Artificial Sequence
  LRRK2 RNA guide
auagagaggauccauuaaau

SEQ ID NO: 89041 - RNA, 20 nt, Artificial Sequence
  LRRK2 RNA guide
auauagagaggauccauuaa

SEQ ID NO: 89042 - RNA, 20 nt, Artificial Sequence
  LRRK2 RNA guide
aucaacaauauagagaggau

SEQ ID NO: 89043 - RNA, 20 nt, Artificial Sequence
  LRRK2 RNA guide
auccauuaaaugugaggaaa

SEQ ID NO: 89044 - RNA, 20 nt, Artificial Sequence
  LRRK2 RNA guide
auggauccucucuauauugu

SEQ ID NO: 89045 - RNA, 20 nt, Artificial Sequence
  LRRK2 RNA guide
auuuaauggauccucucuau

SEQ ID NO: 89046 - RNA, 20 nt, Artificial Sequence
  LRRK2 RNA guide
auuuccucacauuuaaugga

SEQ ID NO: 89047 - RNA, 20 nt, Artificial Sequence
  LRRK2 RNA guide
caacaauauagagaggaucc

SEQ ID NO: 89048 - RNA, 20 nt, Artificial Sequence
  LRRK2 RNA guide
caauauagagaggauccauu

SEQ ID NO: 89049 - RNA, 20 nt, Artificial Sequence
  LRRK2 RNA guide
cacauuuaauggauccucuc

SEQ ID NO: 89050 - RNA, 20 nt, Artificial Sequence
  LRRK2 RNA guide
cauuuaauggauccucucua

SEQ ID NO: 89051 - RNA, 20 nt, Artificial Sequence
  LRRK2 RNA guide
ccauuaaaugugaggaaaua

SEQ ID NO: 89052 - RNA, 20 nt, Artificial Sequence
  LRRK2 RNA guide
ccucacauuuaauggauccu

SEQ ID NO: 89053 - RNA, 20 nt, Artificial Sequence
  LRRK2 RNA guide
cuaucaacaauauagagagg

SEQ ID NO: 89054 - RNA, 20 nt, Artificial Sequence
  LRRK2 RNA guide
cucacauuuaauggauccuc

SEQ ID NO: 89055 - RNA, 20 nt, Artificial Sequence
  LRRK2 RNA guide
gagaggauccauuaaaugug

SEQ ID NO: 89056 - RNA, 20 nt, Artificial Sequence
  LRRK2 RNA guide
gaggauccauuaaaugugag

SEQ ID NO: 89057 - RNA, 20 nt, Artificial Sequence
  LRRK2 RNA guide
gauccauuaaaugugaggaa

SEQ ID NO: 89058 - RNA, 20 nt, Artificial Sequence
  LRRK2 RNA guide
gcaaauauuuccucacauuu

SEQ ID NO: 89059 - RNA, 20 nt, Artificial Sequence
  LRRK2 RNA guide
ggauccauuaaaugugagga

SEQ ID NO: 89060 - RNA, 20 nt, Artificial Sequence
  LRRK2 RNA guide
uaauggauccucucuauauu

SEQ ID NO: 89061 - RNA, 20 nt, Artificial Sequence
  LRRK2 RNA guide
uagagaggauccauuaaaug

SEQ ID NO: 89062 - RNA, 20 nt, Artificial Sequence
  LRRK2 RNA guide
uauagagaggauccauuaaa

SEQ ID NO: 89063 - RNA, 20 nt, Artificial Sequence
  LRRK2 RNA guide
uaucaacaauauagagagga

SEQ ID NO: 89064 - RNA, 20 nt, Artificial Sequence
  LRRK2 RNA guide
uauuuccucacauuuaaugg

SEQ ID NO: 89065 - RNA, 20 nt, Artificial Sequence
  LRRK2 RNA guide
ucacauuuaauggauccucu

SEQ ID NO: 89066 - RNA, 20 nt, Artificial Sequence
  LRRK2 RNA guide
uccauuaaaugugaggaaau

SEQ ID NO: 89067 - RNA, 20 nt, Artificial Sequence
  LRRK2 RNA guide
uccucacauuuaauggaucc

SEQ ID NO: 89068 - RNA, 20 nt, Artificial Sequence
  LRRK2 RNA guide
ugcaaauauuuccucacauu

SEQ ID NO: 89069 - RNA, 20 nt, Artificial Sequence
  LRRK2 RNA guide
uuaauggauccucucuauau

SEQ ID NO: 89070 - RNA, 20 nt, Artificial Sequence
  LRRK2 RNA guide
uuccucacauuuaauggauc

SEQ ID NO: 89071 - RNA, 20 nt, Artificial Sequence
  LRRK2 RNA guide
uugcaaauauuuccucacau

SEQ ID NO: 89072 - RNA, 20 nt, Artificial Sequence
  LRRK2 RNA guide
uuuaauggauccucucuaua

SEQ ID NO: 89073 - RNA, 20 nt, Artificial Sequence
  LRRK2 RNA guide
uuuccucacauuuaauggau

SEQ ID NO: 89074 - RNA, 21 nt, Artificial Sequence
  LRRK2 RNA guide
aacaauauagagaggauccau

SEQ ID NO: 89075 - RNA, 21 nt, Artificial Sequence
  LRRK2 RNA guide
aauggauccucucuauauugu

SEQ ID NO: 89076 - RNA, 21 nt, Artificial Sequence
  LRRK2 RNA guide
acaauauagagaggauccauu

SEQ ID NO: 89077 - RNA, 21 nt, Artificial Sequence
  LRRK2 RNA guide
acauuuaauggauccucucua

SEQ ID NO: 89078 - RNA, 21 nt, Artificial Sequence
  LRRK2 RNA guide
acuaucaacaauauagagagg

SEQ ID NO: 89079 - RNA, 21 nt, Artificial Sequence
  LRRK2 RNA guide
agagaggauccauuaaaugug

SEQ ID NO: 89080 - RNA, 21 nt, Artificial Sequence
  LRRK2 RNA guide
agaggauccauuaaaugugag

SEQ ID NO: 89081 - RNA, 21 nt, Artificial Sequence
  LRRK2 RNA guide
aggauccauuaaaugugagga

SEQ ID NO: 89082 - RNA, 21 nt, Artificial Sequence
  LRRK2 RNA guide
auagagaggauccauuaaaug

SEQ ID NO: 89083 - RNA, 21 nt, Artificial Sequence
  LRRK2 RNA guide
aucaacaauauagagaggauc

SEQ ID NO: 89084 - RNA, 21 nt, Artificial Sequence
  LRRK2 RNA guide
auggauccucucuauauuguu

SEQ ID NO: 89085 - RNA, 21 nt, Artificial Sequence
  LRRK2 RNA guide
caacaauauagagaggaucca

SEQ ID NO: 89086 - RNA, 21 nt, Artificial Sequence
  LRRK2 RNA guide
caauauagagaggauccauua

SEQ ID NO: 89087 - RNA, 21 nt, Artificial Sequence
  LRRK2 RNA guide
cacauuuaauggauccucucu

SEQ ID NO: 89088 - RNA, 21 nt, Artificial Sequence
  LRRK2 RNA guide
cauuuaauggauccucucuau

SEQ ID NO: 89089 - RNA, 21 nt, Artificial Sequence
  LRRK2 RNA guide
ccucacauuuaauggauccuc

SEQ ID NO: 89090 - RNA, 21 nt, Artificial Sequence
  LRRK2 RNA guide
cuaucaacaauauagagagga

SEQ ID NO: 89091 - RNA, 21 nt, Artificial Sequence
  LRRK2 RNA guide
cucacauuuaauggauccucu

SEQ ID NO: 89092 - RNA, 21 nt, Artificial Sequence
  LRRK2 RNA guide
gagaggauccauuaaauguga

SEQ ID NO: 89093 - RNA, 21 nt, Artificial Sequence
  LRRK2 RNA guide
gaggauccauuaaaugugagg

SEQ ID NO: 89094 - RNA, 21 nt, Artificial Sequence
  LRRK2 RNA guide
gauccauuaaaugugaggaaa

SEQ ID NO: 89095 - RNA, 21 nt, Artificial Sequence
  LRRK2 RNA guide
ggauccauuaaaugugaggaa

SEQ ID NO: 89096 - RNA, 21 nt, Artificial Sequence
  LRRK2 RNA guide
uaauggauccucucuauauug

SEQ ID NO: 89097 - RNA, 21 nt, Artificial Sequence
  LRRK2 RNA guide
uagagaggauccauuaaaugu

SEQ ID NO: 89098 - RNA, 21 nt, Artificial Sequence
  LRRK2 RNA guide
ucaacaauauagagaggaucc

SEQ ID NO: 89099 - RNA, 21 nt, Artificial Sequence
  LRRK2 RNA guide
ucacauuuaauggauccucuc

SEQ ID NO: 89100 - RNA, 21 nt, Artificial Sequence
  LRRK2 RNA guide
uccucacauuuaauggauccu

SEQ ID NO: 89101 - RNA, 21 nt, Artificial Sequence
  LRRK2 RNA guide
uuccucacauuuaauggaucc

SEQ ID NO: 89102 - RNA, 21 nt, Artificial Sequence
  LRRK2 RNA guide
uuuccucacauuuaauggauc

SEQ ID NO: 89103 - RNA, 22 nt, Artificial Sequence
  LRRK2 RNA guide
aacaauauagagaggauccauu

SEQ ID NO: 89104 - RNA, 22 nt, Artificial Sequence
  LRRK2 RNA guide
aacuaucaacaauauagagagg

SEQ ID NO: 89105 - RNA, 22 nt, Artificial Sequence
  LRRK2 RNA guide
aauggauccucucuauauuguu

SEQ ID NO: 89106 - RNA, 22 nt, Artificial Sequence
  LRRK2 RNA guide
acaauauagagaggauccauua

SEQ ID NO: 89107 - RNA, 22 nt, Artificial Sequence
  LRRK2 RNA guide
acauuuaauggauccucucuau

SEQ ID NO: 89108 - RNA, 22 nt, Artificial Sequence
  LRRK2 RNA guide
acuaucaacaauauagagagga

SEQ ID NO: 89109 - RNA, 22 nt, Artificial Sequence
  LRRK2 RNA guide
agagaggauccauuaaauguga

SEQ ID NO: 89110 - RNA, 22 nt, Artificial Sequence
  LRRK2 RNA guide
agaggauccauuaaaugugagg

SEQ ID NO: 89111 - RNA, 22 nt, Artificial Sequence
  LRRK2 RNA guide
aggauccauuaaaugugaggaa

SEQ ID NO: 89112 - RNA, 22 nt, Artificial Sequence
  LRRK2 RNA guide
auagagaggauccauuaaaugu

SEQ ID NO: 89113 - RNA, 22 nt, Artificial Sequence
  LRRK2 RNA guide
aucaacaauauagagaggaucc

SEQ ID NO: 89114 - RNA, 22 nt, Artificial Sequence
  LRRK2 RNA guide
auggauccucucuauauuguug

SEQ ID NO: 89115 - RNA, 22 nt, Artificial Sequence
  LRRK2 RNA guide
auuuccucacauuuaauggauc

SEQ ID NO: 89116 - RNA, 22 nt, Artificial Sequence
  LRRK2 RNA guide
caacaauauagagaggauccau

SEQ ID NO: 89117 - RNA, 22 nt, Artificial Sequence
  LRRK2 RNA guide
caauauagagaggauccauuaa

SEQ ID NO: 89118 - RNA, 22 nt, Artificial Sequence
  LRRK2 RNA guide
cacauuuaauggauccucucua

SEQ ID NO: 89119 - RNA, 22 nt, Artificial Sequence
  LRRK2 RNA guide
cauuuaauggauccucucuaua

SEQ ID NO: 89120 - RNA, 22 nt, Artificial Sequence
  LRRK2 RNA guide
ccucacauuuaauggauccucu

SEQ ID NO: 89121 - RNA, 22 nt, Artificial Sequence
  LRRK2 RNA guide
cuaucaacaauauagagaggau

SEQ ID NO: 89122 - RNA, 22 nt, Artificial Sequence
  LRRK2 RNA guide
cucacauuuaauggauccucuc

SEQ ID NO: 89123 - RNA, 22 nt, Artificial Sequence
  LRRK2 RNA guide
gagaggauccauuaaaugugag

SEQ ID NO: 89124 - RNA, 22 nt, Artificial Sequence
  LRRK2 RNA guide
gaggauccauuaaaugugagga

SEQ ID NO: 89125 - RNA, 22 nt, Artificial Sequence
  LRRK2 RNA guide
gauccauuaaaugugaggaaau

SEQ ID NO: 89126 - RNA, 22 nt, Artificial Sequence
  LRRK2 RNA guide
ggauccauuaaaugugaggaaa

SEQ ID NO: 89127 - RNA, 22 nt, Artificial Sequence
  LRRK2 RNA guide
guuugcaaauauuuccucacau

SEQ ID NO: 89128 - RNA, 22 nt, Artificial Sequence
  LRRK2 RNA guide
uaauggauccucucuauauugu

SEQ ID NO: 89129 - RNA, 22 nt, Artificial Sequence
  LRRK2 RNA guide
uagagaggauccauuaaaugug

SEQ ID NO: 89130 - RNA, 22 nt, Artificial Sequence
  LRRK2 RNA guide
uauagagaggauccauuaaaug

SEQ ID NO: 89131 - RNA, 22 nt, Artificial Sequence
  LRRK2 RNA guide
uaucaacaauauagagaggauc

SEQ ID NO: 89132 - RNA, 22 nt, Artificial Sequence
  LRRK2 RNA guide
ucaacaauauagagaggaucca

SEQ ID NO: 89133 - RNA, 22 nt, Artificial Sequence
  LRRK2 RNA guide
ucacauuuaauggauccucucu

SEQ ID NO: 89134 - RNA, 22 nt, Artificial Sequence
  LRRK2 RNA guide
uccucacauuuaauggauccuc

SEQ ID NO: 89135 - RNA, 22 nt, Artificial Sequence
  LRRK2 RNA guide
uuaauggauccucucuauauug

SEQ ID NO: 89136 - RNA, 22 nt, Artificial Sequence
  LRRK2 RNA guide
uuccucacauuuaauggauccu

SEQ ID NO: 89137 - RNA, 22 nt, Artificial Sequence
  LRRK2 RNA guide
uuuccucacauuuaauggaucc

SEQ ID NO: 89138 - RNA, 20 nt, Artificial Sequence
  LRRK2 RNA guide
aacaauauagagaggauccg

SEQ ID NO: 89139 - RNA, 20 nt, Artificial Sequence
  LRRK2 RNA guide
aacggauccucucuauauug

SEQ ID NO: 89140 - RNA, 20 nt, Artificial Sequence
  LRRK2 RNA guide
aauauagagaggauccguua

SEQ ID NO: 89141 - RNA, 20 nt, Artificial Sequence
  LRRK2 RNA guide
acaauauagagaggauccgu

SEQ ID NO: 89142 - RNA, 20 nt, Artificial Sequence
  LRRK2 RNA guide
acauuuaacggauccucucu

SEQ ID NO: 89143 - RNA, 20 nt, Artificial Sequence
  LRRK2 RNA guide
acggauccucucuauauugu

SEQ ID NO: 89144 - RNA, 20 nt, Artificial Sequence
  LRRK2 RNA guide
agagaggauccguuaaaugu

SEQ ID NO: 89145 - RNA, 20 nt, Artificial Sequence
  LRRK2 RNA guide
agaggauccguuaaauguga

SEQ ID NO: 89146 - RNA, 20 nt, Artificial Sequence
  LRRK2 RNA guide
aggauccguuaaaugugagg

SEQ ID NO: 89147 - RNA, 20 nt, Artificial Sequence
  LRRK2 RNA guide
auagagaggauccguuaaau

SEQ ID NO: 89148 - RNA, 20 nt, Artificial Sequence
  LRRK2 RNA guide
auauagagaggauccguuaa

SEQ ID NO: 89149 - RNA, 20 nt, Artificial Sequence
  LRRK2 RNA guide
auauuuccucacauuuaacg

SEQ ID NO: 89150 - RNA, 20 nt, Artificial Sequence
  LRRK2 RNA guide
auccguuaaaugugaggaaa

SEQ ID NO: 89151 - RNA, 20 nt, Artificial Sequence
  LRRK2 RNA guide
auuuaacggauccucucuau

SEQ ID NO: 89152 - RNA, 20 nt, Artificial Sequence
  LRRK2 RNA guide
auuuccucacauuuaacgga

SEQ ID NO: 89153 - RNA, 20 nt, Artificial Sequence
  LRRK2 RNA guide
caauauagagaggauccguu

SEQ ID NO: 89154 - RNA, 20 nt, Artificial Sequence
  LRRK2 RNA guide
cacauuuaacggauccucuc

SEQ ID NO: 89155 - RNA, 20 nt, Artificial Sequence
  LRRK2 RNA guide
cauuuaacggauccucucua

SEQ ID NO: 89156 - RNA, 20 nt, Artificial Sequence
  LRRK2 RNA guide
ccguuaaaugugaggaaaua

SEQ ID NO: 89157 - RNA, 20 nt, Artificial Sequence
  LRRK2 RNA guide
ccucacauuuaacggauccu

SEQ ID NO: 89158 - RNA, 20 nt, Artificial Sequence
  LRRK2 RNA guide
cguuaaaugugaggaaauau

SEQ ID NO: 89159 - RNA, 20 nt, Artificial Sequence
  LRRK2 RNA guide
cucacauuuaacggauccuc

SEQ ID NO: 89160 - RNA, 20 nt, Artificial Sequence
  LRRK2 RNA guide
gagaggauccguuaaaugug

SEQ ID NO: 89161 - RNA, 20 nt, Artificial Sequence
  LRRK2 RNA guide
gaggauccguuaaaugugag

SEQ ID NO: 89162 - RNA, 20 nt, Artificial Sequence
  LRRK2 RNA guide
gauccguuaaaugugaggaa

SEQ ID NO: 89163 - RNA, 20 nt, Artificial Sequence
  LRRK2 RNA guide
ggauccguuaaaugugagga

SEQ ID NO: 89164 - RNA, 20 nt, Artificial Sequence
  LRRK2 RNA guide
uaacggauccucucuauauu

SEQ ID NO: 89165 - RNA, 20 nt, Artificial Sequence
  LRRK2 RNA guide
uagagaggauccguuaaaug

SEQ ID NO: 89166 - RNA, 20 nt, Artificial Sequence
  LRRK2 RNA guide
uauagagaggauccguuaaa

SEQ ID NO: 89167 - RNA, 20 nt, Artificial Sequence
  LRRK2 RNA guide
uauuuccucacauuuaacgg

SEQ ID NO: 89168 - RNA, 20 nt, Artificial Sequence
  LRRK2 RNA guide
ucacauuuaacggauccucu

SEQ ID NO: 89169 - RNA, 20 nt, Artificial Sequence
  LRRK2 RNA guide
uccguuaaaugugaggaaau

SEQ ID NO: 89170 - RNA, 20 nt, Artificial Sequence
  LRRK2 RNA guide
uccucacauuuaacggaucc

SEQ ID NO: 89171 - RNA, 20 nt, Artificial Sequence
  LRRK2 RNA guide
uuaacggauccucucuauau

SEQ ID NO: 89172 - RNA, 20 nt, Artificial Sequence
  LRRK2 RNA guide
uuccucacauuuaacggauc

SEQ ID NO: 89173 - RNA, 20 nt, Artificial Sequence
  LRRK2 RNA guide
uuuaacggauccucucuaua

SEQ ID NO: 89174 - RNA, 20 nt, Artificial Sequence
  LRRK2 RNA guide
uuuccucacauuuaacggau

SEQ ID NO: 89175 - RNA, 21 nt, Artificial Sequence
  LRRK2 RNA guide
aacaauauagagaggauccgu

SEQ ID NO: 89176 - RNA, 21 nt, Artificial Sequence
  LRRK2 RNA guide
aacggauccucucuauauugu

SEQ ID NO: 89177 - RNA, 21 nt, Artificial Sequence
  LRRK2 RNA guide
aauauagagaggauccguuaa

SEQ ID NO: 89178 - RNA, 21 nt, Artificial Sequence
  LRRK2 RNA guide
acaauauagagaggauccguu

SEQ ID NO: 89179 - RNA, 21 nt, Artificial Sequence
  LRRK2 RNA guide
acauuuaacggauccucucua

SEQ ID NO: 89180 - RNA, 21 nt, Artificial Sequence
  LRRK2 RNA guide
acggauccucucuauauuguu

SEQ ID NO: 89181 - RNA, 21 nt, Artificial Sequence
  LRRK2 RNA guide
agagaggauccguuaaaugug

SEQ ID NO: 89182 - RNA, 21 nt, Artificial Sequence
  LRRK2 RNA guide
agaggauccguuaaaugugag

SEQ ID NO: 89183 - RNA, 21 nt, Artificial Sequence
  LRRK2 RNA guide
aggauccguuaaaugugagga

SEQ ID NO: 89184 - RNA, 21 nt, Artificial Sequence
  LRRK2 RNA guide
auagagaggauccguuaaaug

SEQ ID NO: 89185 - RNA, 21 nt, Artificial Sequence
  LRRK2 RNA guide
auauagagaggauccguuaaa

SEQ ID NO: 89186 - RNA, 21 nt, Artificial Sequence
  LRRK2 RNA guide
auauuuccucacauuuaacgg

SEQ ID NO: 89187 - RNA, 21 nt, Artificial Sequence
  LRRK2 RNA guide
auccguuaaaugugaggaaau

SEQ ID NO: 89188 - RNA, 21 nt, Artificial Sequence
  LRRK2 RNA guide
auuuaacggauccucucuaua

SEQ ID NO: 89189 - RNA, 21 nt, Artificial Sequence
  LRRK2 RNA guide
auuuccucacauuuaacggau

SEQ ID NO: 89190 - RNA, 21 nt, Artificial Sequence
  LRRK2 RNA guide
caacaauauagagaggauccg

SEQ ID NO: 89191 - RNA, 21 nt, Artificial Sequence
  LRRK2 RNA guide
caauauagagaggauccguua

SEQ ID NO: 89192 - RNA, 21 nt, Artificial Sequence
  LRRK2 RNA guide
cacauuuaacggauccucucu

SEQ ID NO: 89193 - RNA, 21 nt, Artificial Sequence
  LRRK2 RNA guide
cauuuaacggauccucucuau

SEQ ID NO: 89194 - RNA, 21 nt, Artificial Sequence
  LRRK2 RNA guide
ccguuaaaugugaggaaauau

SEQ ID NO: 89195 - RNA, 21 nt, Artificial Sequence
  LRRK2 RNA guide
ccucacauuuaacggauccuc

SEQ ID NO: 89196 - RNA, 21 nt, Artificial Sequence
  LRRK2 RNA guide
cucacauuuaacggauccucu

SEQ ID NO: 89197 - RNA, 21 nt, Artificial Sequence
  LRRK2 RNA guide
gagaggauccguuaaauguga

SEQ ID NO: 89198 - RNA, 21 nt, Artificial Sequence
  LRRK2 RNA guide
gaggauccguuaaaugugagg

SEQ ID NO: 89199 - RNA, 21 nt, Artificial Sequence
  LRRK2 RNA guide
gauccguuaaaugugaggaaa

SEQ ID NO: 89200 - RNA, 21 nt, Artificial Sequence
  LRRK2 RNA guide
ggauccguuaaaugugaggaa

SEQ ID NO: 89201 - RNA, 21 nt, Artificial Sequence
  LRRK2 RNA guide
uaacggauccucucuauauug

SEQ ID NO: 89202 - RNA, 21 nt, Artificial Sequence
  LRRK2 RNA guide
uagagaggauccguuaaaugu

SEQ ID NO: 89203 - RNA, 21 nt, Artificial Sequence
  LRRK2 RNA guide
uauagagaggauccguuaaau

SEQ ID NO: 89204 - RNA, 21 nt, Artificial Sequence
  LRRK2 RNA guide
uauuuccucacauuuaacgga

SEQ ID NO: 89205 - RNA, 21 nt, Artificial Sequence
  LRRK2 RNA guide
ucacauuuaacggauccucuc

SEQ ID NO: 89206 - RNA, 21 nt, Artificial Sequence
  LRRK2 RNA guide
uccguuaaaugugaggaaaua

SEQ ID NO: 89207 - RNA, 21 nt, Artificial Sequence
  LRRK2 RNA guide
uccucacauuuaacggauccu

SEQ ID NO: 89208 - RNA, 21 nt, Artificial Sequence
  LRRK2 RNA guide
uuaacggauccucucuauauu

SEQ ID NO: 89209 - RNA, 21 nt, Artificial Sequence
  LRRK2 RNA guide
uuccucacauuuaacggaucc

SEQ ID NO: 89210 - RNA, 21 nt, Artificial Sequence
  LRRK2 RNA guide
uuuaacggauccucucuauau

SEQ ID NO: 89211 - RNA, 21 nt, Artificial Sequence
  LRRK2 RNA guide
uuuccucacauuuaacggauc

SEQ ID NO: 89212 - RNA, 22 nt, Artificial Sequence
  LRRK2 RNA guide
aacaauauagagaggauccguu

SEQ ID NO: 89213 - RNA, 22 nt, Artificial Sequence
  LRRK2 RNA guide
aacggauccucucuauauuguu

SEQ ID NO: 89214 - RNA, 22 nt, Artificial Sequence
  LRRK2 RNA guide
aauauagagaggauccguuaaa

SEQ ID NO: 89215 - RNA, 22 nt, Artificial Sequence
  LRRK2 RNA guide
aauauuuccucacauuuaacgg

SEQ ID NO: 89216 - RNA, 22 nt, Artificial Sequence
  LRRK2 RNA guide
acaauauagagaggauccguua

SEQ ID NO: 89217 - RNA, 22 nt, Artificial Sequence
  LRRK2 RNA guide
acauuuaacggauccucucuau

SEQ ID NO: 89218 - RNA, 22 nt, Artificial Sequence
  LRRK2 RNA guide
acggauccucucuauauuguug

SEQ ID NO: 89219 - RNA, 22 nt, Artificial Sequence
  LRRK2 RNA guide
agagaggauccguuaaauguga

SEQ ID NO: 89220 - RNA, 22 nt, Artificial Sequence
  LRRK2 RNA guide
agaggauccguuaaaugugagg

SEQ ID NO: 89221 - RNA, 22 nt, Artificial Sequence
  LRRK2 RNA guide
aggauccguuaaaugugaggaa

SEQ ID NO: 89222 - RNA, 22 nt, Artificial Sequence
  LRRK2 RNA guide
auagagaggauccguuaaaugu

SEQ ID NO: 89223 - RNA, 22 nt, Artificial Sequence
  LRRK2 RNA guide
auauagagaggauccguuaaau

SEQ ID NO: 89224 - RNA, 22 nt, Artificial Sequence
  LRRK2 RNA guide
auauuuccucacauuuaacgga

SEQ ID NO: 89225 - RNA, 22 nt, Artificial Sequence
  LRRK2 RNA guide
auccguuaaaugugaggaaaua

SEQ ID NO: 89226 - RNA, 22 nt, Artificial Sequence
  LRRK2 RNA guide
auuuaacggauccucucuauau

SEQ ID NO: 89227 - RNA, 22 nt, Artificial Sequence
  LRRK2 RNA guide
auuuccucacauuuaacggauc

SEQ ID NO: 89228 - RNA, 22 nt, Artificial Sequence
  LRRK2 RNA guide
caacaauauagagaggauccgu

SEQ ID NO: 89229 - RNA, 22 nt, Artificial Sequence
  LRRK2 RNA guide
caauauagagaggauccguuaa

SEQ ID NO: 89230 - RNA, 22 nt, Artificial Sequence
  LRRK2 RNA guide
cacauuuaacggauccucucua

SEQ ID NO: 89231 - RNA, 22 nt, Artificial Sequence
  LRRK2 RNA guide
cauuuaacggauccucucuaua

SEQ ID NO: 89232 - RNA, 22 nt, Artificial Sequence
  LRRK2 RNA guide
ccguuaaaugugaggaaauauu

SEQ ID NO: 89233 - RNA, 22 nt, Artificial Sequence
  LRRK2 RNA guide
ccucacauuuaacggauccucu

SEQ ID NO: 89234 - RNA, 22 nt, Artificial Sequence
  LRRK2 RNA guide
cucacauuuaacggauccucuc

SEQ ID NO: 89235 - RNA, 22 nt, Artificial Sequence
  LRRK2 RNA guide
gagaggauccguuaaaugugag

SEQ ID NO: 89236 - RNA, 22 nt, Artificial Sequence
  LRRK2 RNA guide
gaggauccguuaaaugugagga

SEQ ID NO: 89237 - RNA, 22 nt, Artificial Sequence
  LRRK2 RNA guide
gauccguuaaaugugaggaaau

SEQ ID NO: 89238 - RNA, 22 nt, Artificial Sequence
  LRRK2 RNA guide
ggauccguuaaaugugaggaaa

SEQ ID NO: 89239 - RNA, 22 nt, Artificial Sequence
  LRRK2 RNA guide
uaacggauccucucuauauugu

SEQ ID NO: 89240 - RNA, 22 nt, Artificial Sequence
  LRRK2 RNA guide
uagagaggauccguuaaaugug

SEQ ID NO: 89241 - RNA, 22 nt, Artificial Sequence
  LRRK2 RNA guide
uauagagaggauccguuaaaug

SEQ ID NO: 89242 - RNA, 22 nt, Artificial Sequence
  LRRK2 RNA guide
uauuuccucacauuuaacggau

SEQ ID NO: 89243 - RNA, 22 nt, Artificial Sequence
  LRRK2 RNA guide
ucaacaauauagagaggauccg

SEQ ID NO: 89244 - RNA, 22 nt, Artificial Sequence
  LRRK2 RNA guide
ucacauuuaacggauccucucu

SEQ ID NO: 89245 - RNA, 22 nt, Artificial Sequence
  LRRK2 RNA guide
uccguuaaaugugaggaaauau

SEQ ID NO: 89246 - RNA, 22 nt, Artificial Sequence
  LRRK2 RNA guide
uccucacauuuaacggauccuc

SEQ ID NO: 89247 - RNA, 22 nt, Artificial Sequence
  LRRK2 RNA guide
uuaacggauccucucuauauug

SEQ ID NO: 89248 - RNA, 22 nt, Artificial Sequence
  LRRK2 RNA guide
uuccucacauuuaacggauccu

SEQ ID NO: 89249 - RNA, 22 nt, Artificial Sequence
  LRRK2 RNA guide
uuuaacggauccucucuauauu

SEQ ID NO: 89250 - RNA, 22 nt, Artificial Sequence
  LRRK2 RNA guide
uuuccucacauuuaacggaucc

SEQ ID NO: 89251 - RNA, 20 nt, Artificial Sequence
  LRRK2 RNA guide
aauuucuaaaacuugagugg

SEQ ID NO: 89252 - RNA, 20 nt, Artificial Sequence
  LRRK2 RNA guide
auuucuaaaacuugagugga

SEQ ID NO: 89253 - RNA, 20 nt, Artificial Sequence
  LRRK2 RNA guide
ccacucaaguuuuagaaauu

SEQ ID NO: 89254 - RNA, 20 nt, Artificial Sequence
  LRRK2 RNA guide
cgguuccacucaaguuuuag

SEQ ID NO: 89255 - RNA, 20 nt, Artificial Sequence
  LRRK2 RNA guide
gguuccacucaaguuuuaga

SEQ ID NO: 89256 - RNA, 20 nt, Artificial Sequence
  LRRK2 RNA guide
guuccacucaaguuuuagaa

SEQ ID NO: 89257 - RNA, 20 nt, Artificial Sequence
  LRRK2 RNA guide
uccacucaaguuuuagaaau

SEQ ID NO: 89258 - RNA, 20 nt, Artificial Sequence
  LRRK2 RNA guide
ucgguuccacucaaguuuua

SEQ ID NO: 89259 - RNA, 20 nt, Artificial Sequence
  LRRK2 RNA guide
uuccacucaaguuuuagaaa

SEQ ID NO: 89260 - RNA, 20 nt, Artificial Sequence
  LRRK2 RNA guide
uucgguuccacucaaguuuu

SEQ ID NO: 89261 - RNA, 21 nt, Artificial Sequence
  LRRK2 RNA guide
cgguuccacucaaguuuuaga

SEQ ID NO: 89262 - RNA, 21 nt, Artificial Sequence
  LRRK2 RNA guide
gguuccacucaaguuuuagaa

SEQ ID NO: 89263 - RNA, 21 nt, Artificial Sequence
  LRRK2 RNA guide
guuccacucaaguuuuagaaa

SEQ ID NO: 89264 - RNA, 21 nt, Artificial Sequence
  LRRK2 RNA guide
ucgguuccacucaaguuuuag

SEQ ID NO: 89265 - RNA, 21 nt, Artificial Sequence
  LRRK2 RNA guide
uucgguuccacucaaguuuua

SEQ ID NO: 89266 - RNA, 21 nt, Artificial Sequence
  LRRK2 RNA guide
uuucgguuccacucaaguuuu

SEQ ID NO: 89267 - RNA, 22 nt, Artificial Sequence
  LRRK2 RNA guide
auuucuaaaacuugaguggaac

SEQ ID NO: 89268 - RNA, 22 nt, Artificial Sequence
  LRRK2 RNA guide
cgguuccacucaaguuuuagaa

SEQ ID NO: 89269 - RNA, 22 nt, Artificial Sequence
  LRRK2 RNA guide
gguuccacucaaguuuuagaaa

SEQ ID NO: 89270 - RNA, 22 nt, Artificial Sequence
  LRRK2 RNA guide
guuccacucaaguuuuagaaau

SEQ ID NO: 89271 - RNA, 22 nt, Artificial Sequence
  LRRK2 RNA guide
ucgguuccacucaaguuuuaga

SEQ ID NO: 89272 - RNA, 22 nt, Artificial Sequence
  LRRK2 RNA guide
uucgguuccacucaaguuuuag

SEQ ID NO: 89273 - RNA, 22 nt, Artificial Sequence
  LRRK2 RNA guide
uuucgguuccacucaaguuuua

SEQ ID NO: 89274 - RNA, 22 nt, Artificial Sequence
  LRRK2 RNA guide
uuuucgguuccacucaaguuuu

SEQ ID NO: 89275 - RNA, 21 nt, Artificial Sequence
  LRRK2 RNA guide
caugggaauuucauugaaucu

SEQ ID NO: 89276 - RNA, 22 nt, Artificial Sequence
  LRRK2 RNA guide
caugggaauuucauugaaucug

SEQ ID NO: 89277 - RNA, 22 nt, Artificial Sequence
  LRRK2 RNA guide
ucaugggaauuucauugaaucu

SEQ ID NO: 89278 - RNA, 20 nt, Artificial Sequence
  LRRK2 RNA guide
agcaaacuacagauucaaug

SEQ ID NO: 89279 - RNA, 20 nt, Artificial Sequence
  LRRK2 RNA guide
augggaauuucauugaaucu

SEQ ID NO: 89280 - RNA, 20 nt, Artificial Sequence
  LRRK2 RNA guide
caaacuacagauucaaugaa

SEQ ID NO: 89281 - RNA, 20 nt, Artificial Sequence
  LRRK2 RNA guide
gaauuucauugaaucuguag

SEQ ID NO: 89282 - RNA, 20 nt, Artificial Sequence
  LRRK2 RNA guide
gcaaacuacagauucaauga

SEQ ID NO: 89283 - RNA, 20 nt, Artificial Sequence
  LRRK2 RNA guide
ggaauuucauugaaucugua

SEQ ID NO: 89284 - RNA, 20 nt, Artificial Sequence
  LRRK2 RNA guide
gggaauuucauugaaucugu

SEQ ID NO: 89285 - RNA, 20 nt, Artificial Sequence
  LRRK2 RNA guide
ugggaauuucauugaaucug

SEQ ID NO: 89286 - RNA, 21 nt, Artificial Sequence
  LRRK2 RNA guide
aagcaaacuacagauucaaug

SEQ ID NO: 89287 - RNA, 21 nt, Artificial Sequence
  LRRK2 RNA guide
agcaaacuacagauucaauga

SEQ ID NO: 89288 - RNA, 21 nt, Artificial Sequence
  LRRK2 RNA guide
augggaauuucauugaaucug

SEQ ID NO: 89289 - RNA, 21 nt, Artificial Sequence
  LRRK2 RNA guide
gcaaacuacagauucaaugaa

SEQ ID NO: 89290 - RNA, 21 nt, Artificial Sequence
  LRRK2 RNA guide
ggaauuucauugaaucuguag

SEQ ID NO: 89291 - RNA, 21 nt, Artificial Sequence
  LRRK2 RNA guide
gggaauuucauugaaucugua

SEQ ID NO: 89292 - RNA, 21 nt, Artificial Sequence
  LRRK2 RNA guide
ugggaauuucauugaaucugu

SEQ ID NO: 89293 - RNA, 22 nt, Artificial Sequence
  LRRK2 RNA guide
aaagcaaacuacagauucaaug

SEQ ID NO: 89294 - RNA, 22 nt, Artificial Sequence
  LRRK2 RNA guide
aagcaaacuacagauucaauga

SEQ ID NO: 89295 - RNA, 22 nt, Artificial Sequence
  LRRK2 RNA guide
acccaaagcaaacuacagauuc

SEQ ID NO: 89296 - RNA, 22 nt, Artificial Sequence
  LRRK2 RNA guide
agcaaacuacagauucaaugaa

SEQ ID NO: 89297 - RNA, 22 nt, Artificial Sequence
  LRRK2 RNA guide
augggaauuucauugaaucugu

SEQ ID NO: 89298 - RNA, 22 nt, Artificial Sequence
  LRRK2 RNA guide
gcaaacuacagauucaaugaaa

SEQ ID NO: 89299 - RNA, 22 nt, Artificial Sequence
  LRRK2 RNA guide
ggaauuucauugaaucuguagu

SEQ ID NO: 89300 - RNA, 22 nt, Artificial Sequence
  LRRK2 RNA guide
gggaauuucauugaaucuguag

SEQ ID NO: 89301 - RNA, 22 nt, Artificial Sequence
  LRRK2 RNA guide
uaaaaugaccauacuacccaaa

SEQ ID NO: 89302 - RNA, 22 nt, Artificial Sequence
  LRRK2 RNA guide
ucauugaaucuguaguuugcuu

SEQ ID NO: 89303 - RNA, 22 nt, Artificial Sequence
  LRRK2 RNA guide
ugggaauuucauugaaucugua

SEQ ID NO: 89304 - RNA, 20 nt, Artificial Sequence
  LRRK2 RNA guide
aaaguagcugaaaaaucaag

SEQ ID NO: 89305 - RNA, 20 nt, Artificial Sequence
  LRRK2 RNA guide
aacaaaguagcugaaaaauc

SEQ ID NO: 89306 - RNA, 20 nt, Artificial Sequence
  LRRK2 RNA guide
aacaacaaaguagcugaaaa

SEQ ID NO: 89307 - RNA, 20 nt, Artificial Sequence
  LRRK2 RNA guide
aacaacaacaaaguagcuga

SEQ ID NO: 89308 - RNA, 20 nt, Artificial Sequence
  LRRK2 RNA guide
aaguagcugaaaaaucaaga

SEQ ID NO: 89309 - RNA, 20 nt, Artificial Sequence
  LRRK2 RNA guide
acaaaguagcugaaaaauca

SEQ ID NO: 89310 - RNA, 20 nt, Artificial Sequence
  LRRK2 RNA guide
acaacaaaguagcugaaaaa

SEQ ID NO: 89311 - RNA, 20 nt, Artificial Sequence
  LRRK2 RNA guide
acaacaacaaaguagcugaa

SEQ ID NO: 89312 - RNA, 20 nt, Artificial Sequence
  LRRK2 RNA guide
auuuuucagcuacuuuguug

SEQ ID NO: 89313 - RNA, 20 nt, Artificial Sequence
  LRRK2 RNA guide
caaaguagcugaaaaaucaa

SEQ ID NO: 89314 - RNA, 20 nt, Artificial Sequence
  LRRK2 RNA guide
caacaaaguagcugaaaaau

SEQ ID NO: 89315 - RNA, 20 nt, Artificial Sequence
  LRRK2 RNA guide
caacaacaaaguagcugaaa

SEQ ID NO: 89316 - RNA, 20 nt, Artificial Sequence
  LRRK2 RNA guide
caacaacaacaaaguagcug

SEQ ID NO: 89317 - RNA, 20 nt, Artificial Sequence
  LRRK2 RNA guide
cagcuacuuuguuguuguug

SEQ ID NO: 89318 - RNA, 20 nt, Artificial Sequence
  LRRK2 RNA guide
cuugauuuuucagcuacuuu

SEQ ID NO: 89319 - RNA, 20 nt, Artificial Sequence
  LRRK2 RNA guide
cuuucuugauuuuucagcua

SEQ ID NO: 89320 - RNA, 20 nt, Artificial Sequence
  LRRK2 RNA guide
gauuuuucagcuacuuuguu

SEQ ID NO: 89321 - RNA, 20 nt, Artificial Sequence
  LRRK2 RNA guide
gcuuucuugauuuuucagcu

SEQ ID NO: 89322 - RNA, 20 nt, Artificial Sequence
  LRRK2 RNA guide
ucagcuacuuuguuguuguu

SEQ ID NO: 89323 - RNA, 20 nt, Artificial Sequence
  LRRK2 RNA guide
ucuugauuuuucagcuacuu

SEQ ID NO: 89324 - RNA, 20 nt, Artificial Sequence
  LRRK2 RNA guide
ugauuuuucagcuacuuugu

SEQ ID NO: 89325 - RNA, 20 nt, Artificial Sequence
  LRRK2 RNA guide
ugcuuucuugauuuuucagc

SEQ ID NO: 89326 - RNA, 20 nt, Artificial Sequence
  LRRK2 RNA guide
uucagcuacuuuguuguugu

SEQ ID NO: 89327 - RNA, 20 nt, Artificial Sequence
  LRRK2 RNA guide
uucuugauuuuucagcuacu

SEQ ID NO: 89328 - RNA, 20 nt, Artificial Sequence
  LRRK2 RNA guide
uugauuuuucagcuacuuug

SEQ ID NO: 89329 - RNA, 20 nt, Artificial Sequence
  LRRK2 RNA guide
uugcuuucuugauuuuucag

SEQ ID NO: 89330 - RNA, 20 nt, Artificial Sequence
  LRRK2 RNA guide
uuucagcuacuuuguuguug

SEQ ID NO: 89331 - RNA, 20 nt, Artificial Sequence
  LRRK2 RNA guide
uuucuugauuuuucagcuac

SEQ ID NO: 89332 - RNA, 20 nt, Artificial Sequence
  LRRK2 RNA guide
uuuucagcuacuuuguuguu

SEQ ID NO: 89333 - RNA, 20 nt, Artificial Sequence
  LRRK2 RNA guide
uuuuucagcuacuuuguugu

SEQ ID NO: 89334 - RNA, 21 nt, Artificial Sequence
  LRRK2 RNA guide
aacaacaacaaaguagcugaa

SEQ ID NO: 89335 - RNA, 21 nt, Artificial Sequence
  LRRK2 RNA guide
acaacaacaaaguagcugaaa

SEQ ID NO: 89336 - RNA, 21 nt, Artificial Sequence
  LRRK2 RNA guide
caaaguagcugaaaaaucaag

SEQ ID NO: 89337 - RNA, 21 nt, Artificial Sequence
  LRRK2 RNA guide
caacaaaguagcugaaaaauc

SEQ ID NO: 89338 - RNA, 21 nt, Artificial Sequence
  LRRK2 RNA guide
caacaacaaaguagcugaaaa

SEQ ID NO: 89339 - RNA, 21 nt, Artificial Sequence
  LRRK2 RNA guide
caacaacaacaaaguagcuga

SEQ ID NO: 89340 - RNA, 21 nt, Artificial Sequence
  LRRK2 RNA guide
cuugauuuuucagcuacuuug

SEQ ID NO: 89341 - RNA, 21 nt, Artificial Sequence
  LRRK2 RNA guide
cuuucuugauuuuucagcuac

SEQ ID NO: 89342 - RNA, 21 nt, Artificial Sequence
  LRRK2 RNA guide
gauuuuucagcuacuuuguug

SEQ ID NO: 89343 - RNA, 21 nt, Artificial Sequence
  LRRK2 RNA guide
gcuuucuugauuuuucagcua

SEQ ID NO: 89344 - RNA, 21 nt, Artificial Sequence
  LRRK2 RNA guide
ucagcuacuuuguuguuguug

SEQ ID NO: 89345 - RNA, 21 nt, Artificial Sequence
  LRRK2 RNA guide
ugcuuucuugauuuuucagcu

SEQ ID NO: 89346 - RNA, 21 nt, Artificial Sequence
  LRRK2 RNA guide
uucagcuacuuuguuguuguu

SEQ ID NO: 89347 - RNA, 21 nt, Artificial Sequence
  LRRK2 RNA guide
uugcuuucuugauuuuucagc

SEQ ID NO: 89348 - RNA, 21 nt, Artificial Sequence
  LRRK2 RNA guide
uuucagcuacuuuguuguugu

SEQ ID NO: 89349 - RNA, 21 nt, Artificial Sequence
  LRRK2 RNA guide
uuuucagcuacuuuguuguug

SEQ ID NO: 89350 - RNA, 22 nt, Artificial Sequence
  LRRK2 RNA guide
aacaacaacaaaguagcugaaa

SEQ ID NO: 89351 - RNA, 22 nt, Artificial Sequence
  LRRK2 RNA guide
acaaaguagcugaaaaaucaag

SEQ ID NO: 89352 - RNA, 22 nt, Artificial Sequence
  LRRK2 RNA guide
acaacaaaguagcugaaaaauc

SEQ ID NO: 89353 - RNA, 22 nt, Artificial Sequence
  LRRK2 RNA guide
acaacaacaaaguagcugaaaa

SEQ ID NO: 89354 - RNA, 22 nt, Artificial Sequence
  LRRK2 RNA guide
auugcuuucuugauuuuucagc

SEQ ID NO: 89355 - RNA, 22 nt, Artificial Sequence
  LRRK2 RNA guide
caaaguagcugaaaaaucaaga

SEQ ID NO: 89356 - RNA, 22 nt, Artificial Sequence
  LRRK2 RNA guide
caacaaaguagcugaaaaauca

SEQ ID NO: 89357 - RNA, 22 nt, Artificial Sequence
  LRRK2 RNA guide
caacaacaaaguagcugaaaaa

SEQ ID NO: 89358 - RNA, 22 nt, Artificial Sequence
  LRRK2 RNA guide
caacaacaacaaaguagcugaa

SEQ ID NO: 89359 - RNA, 22 nt, Artificial Sequence
  LRRK2 RNA guide
cuugauuuuucagcuacuuugu

SEQ ID NO: 89360 - RNA, 22 nt, Artificial Sequence
  LRRK2 RNA guide
cuuucuugauuuuucagcuacu

SEQ ID NO: 89361 - RNA, 22 nt, Artificial Sequence
  LRRK2 RNA guide
gauugcuuucuugauuuuucag

SEQ ID NO: 89362 - RNA, 22 nt, Artificial Sequence
  LRRK2 RNA guide
gauuuuucagcuacuuuguugu

SEQ ID NO: 89363 - RNA, 22 nt, Artificial Sequence
  LRRK2 RNA guide
gcuuucuugauuuuucagcuac

SEQ ID NO: 89364 - RNA, 22 nt, Artificial Sequence
  LRRK2 RNA guide
ucuugauuuuucagcuacuuug

SEQ ID NO: 89365 - RNA, 22 nt, Artificial Sequence
  LRRK2 RNA guide
ugauuuuucagcuacuuuguug

SEQ ID NO: 89366 - RNA, 22 nt, Artificial Sequence
  LRRK2 RNA guide
ugcuuucuugauuuuucagcua

SEQ ID NO: 89367 - RNA, 22 nt, Artificial Sequence
  LRRK2 RNA guide
uucagcuacuuuguuguuguug

SEQ ID NO: 89368 - RNA, 22 nt, Artificial Sequence
  LRRK2 RNA guide
uugcuuucuugauuuuucagcu

SEQ ID NO: 89369 - RNA, 22 nt, Artificial Sequence
  LRRK2 RNA guide
uuucagcuacuuuguuguuguu

SEQ ID NO: 89370 - RNA, 22 nt, Artificial Sequence
  LRRK2 RNA guide
uuuucagcuacuuuguuguugu

SEQ ID NO: 89371 - RNA, 22 nt, Artificial Sequence
  LRRK2 RNA guide
uuuuucagcuacuuuguuguug

SEQ ID NO: 89372 - RNA, 20 nt, Artificial Sequence
  LRRK2 RNA guide
agcauaucuauacaacaaca

SEQ ID NO: 89373 - RNA, 20 nt, Artificial Sequence
  LRRK2 RNA guide
cauaucuauacaacaacaac

SEQ ID NO: 89374 - RNA, 20 nt, Artificial Sequence
  LRRK2 RNA guide
gcauaucuauacaacaacaa

SEQ ID NO: 89375 - RNA, 21 nt, Artificial Sequence
  LRRK2 RNA guide
gcauaucuauacaacaacaac

SEQ ID NO: 89376 - RNA, 22 nt, Artificial Sequence
  LRRK2 RNA guide
agcauaucuauacaacaacaac

SEQ ID NO: 89377 - RNA, 22 nt, Artificial Sequence
  LRRK2 RNA guide
guagcauaucuauacaacaaca

SEQ ID NO: 89378 - RNA, 20 nt, Artificial Sequence
  LRRK2 RNA guide
aaaaaagaaaacacacucag

SEQ ID NO: 89379 - RNA, 20 nt, Artificial Sequence
  LRRK2 RNA guide
aaaaagaaaacacacucagc

SEQ ID NO: 89380 - RNA, 20 nt, Artificial Sequence
  LRRK2 RNA guide
aaaagaaaacacacucagca

SEQ ID NO: 89381 - RNA, 20 nt, Artificial Sequence
  LRRK2 RNA guide
aaagaaaacacacucagcaa

SEQ ID NO: 89382 - RNA, 20 nt, Artificial Sequence
  LRRK2 RNA guide
aagaaaacacacucagcaaa

SEQ ID NO: 89383 - RNA, 20 nt, Artificial Sequence
  LRRK2 RNA guide
aauuugcugaguguguuuuc

SEQ ID NO: 89384 - RNA, 20 nt, Artificial Sequence
  LRRK2 RNA guide
acucaauuugcugagugugu

SEQ ID NO: 89385 - RNA, 20 nt, Artificial Sequence
  LRRK2 RNA guide
agaaaacacacucagcaaau

SEQ ID NO: 89386 - RNA, 20 nt, Artificial Sequence
  LRRK2 RNA guide
auuugcugaguguguuuucu

SEQ ID NO: 89387 - RNA, 20 nt, Artificial Sequence
  LRRK2 RNA guide
caauuugcugaguguguuuu

SEQ ID NO: 89388 - RNA, 20 nt, Artificial Sequence
  LRRK2 RNA guide
cucaauuugcugaguguguu

SEQ ID NO: 89389 - RNA, 20 nt, Artificial Sequence
  LRRK2 RNA guide
cugaguguguuuucuuuuuu

SEQ ID NO: 89390 - RNA, 20 nt, Artificial Sequence
  LRRK2 RNA guide
cuuuaagcuuugccaaaaaa

SEQ ID NO: 89391 - RNA, 20 nt, Artificial Sequence
  LRRK2 RNA guide
gcugaguguguuuucuuuuu

SEQ ID NO: 89392 - RNA, 20 nt, Artificial Sequence
  LRRK2 RNA guide
uacucaauuugcugagugug

SEQ ID NO: 89393 - RNA, 20 nt, Artificial Sequence
  LRRK2 RNA guide
ucaauuugcugaguguguuu

SEQ ID NO: 89394 - RNA, 20 nt, Artificial Sequence
  LRRK2 RNA guide
ugcugaguguguuuucuuuu

SEQ ID NO: 89395 - RNA, 20 nt, Artificial Sequence
  LRRK2 RNA guide
uugcugaguguguuuucuuu

SEQ ID NO: 89396 - RNA, 20 nt, Artificial Sequence
  LRRK2 RNA guide
uuugcugaguguguuuucuu

SEQ ID NO: 89397 - RNA, 21 nt, Artificial Sequence
  LRRK2 RNA guide
aaaaaagaaaacacacucagc

SEQ ID NO: 89398 - RNA, 21 nt, Artificial Sequence
  LRRK2 RNA guide
aaaaagaaaacacacucagca

SEQ ID NO: 89399 - RNA, 21 nt, Artificial Sequence
  LRRK2 RNA guide
aaaagaaaacacacucagcaa

SEQ ID NO: 89400 - RNA, 21 nt, Artificial Sequence
  LRRK2 RNA guide
aaagaaaacacacucagcaaa

SEQ ID NO: 89401 - RNA, 21 nt, Artificial Sequence
  LRRK2 RNA guide
aagaaaacacacucagcaaau

SEQ ID NO: 89402 - RNA, 21 nt, Artificial Sequence
  LRRK2 RNA guide
aauuugcugaguguguuuucu

SEQ ID NO: 89403 - RNA, 21 nt, Artificial Sequence
  LRRK2 RNA guide
acucaauuugcugaguguguu

SEQ ID NO: 89404 - RNA, 21 nt, Artificial Sequence
  LRRK2 RNA guide
agaaaacacacucagcaaauu

SEQ ID NO: 89405 - RNA, 21 nt, Artificial Sequence
  LRRK2 RNA guide
auacucaauuugcugagugug

SEQ ID NO: 89406 - RNA, 21 nt, Artificial Sequence
  LRRK2 RNA guide
auuugcugaguguguuuucuu

SEQ ID NO: 89407 - RNA, 21 nt, Artificial Sequence
  LRRK2 RNA guide
caauuugcugaguguguuuuc

SEQ ID NO: 89408 - RNA, 21 nt, Artificial Sequence
  LRRK2 RNA guide
ccuuuaagcuuugccaaaaaa

SEQ ID NO: 89409 - RNA, 21 nt, Artificial Sequence
  LRRK2 RNA guide
cucaauuugcugaguguguuu

SEQ ID NO: 89410 - RNA, 21 nt, Artificial Sequence
  LRRK2 RNA guide
gcugaguguguuuucuuuuuu

SEQ ID NO: 89411 - RNA, 21 nt, Artificial Sequence
  LRRK2 RNA guide
uacucaauuugcugagugugu

SEQ ID NO: 89412 - RNA, 21 nt, Artificial Sequence
  LRRK2 RNA guide
ucaauuugcugaguguguuuu

SEQ ID NO: 89413 - RNA, 21 nt, Artificial Sequence
  LRRK2 RNA guide
ugcugaguguguuuucuuuuu

SEQ ID NO: 89414 - RNA, 21 nt, Artificial Sequence
  LRRK2 RNA guide
uugcugaguguguuuucuuuu

SEQ ID NO: 89415 - RNA, 21 nt, Artificial Sequence
  LRRK2 RNA guide
uuugcugaguguguuuucuuu

SEQ ID NO: 89416 - RNA, 22 nt, Artificial Sequence
  LRRK2 RNA guide
aaaaaagaaaacacacucagca

SEQ ID NO: 89417 - RNA, 22 nt, Artificial Sequence
  LRRK2 RNA guide
aaaaagaaaacacacucagcaa

SEQ ID NO: 89418 - RNA, 22 nt, Artificial Sequence
  LRRK2 RNA guide
aaaagaaaacacacucagcaaa

SEQ ID NO: 89419 - RNA, 22 nt, Artificial Sequence
  LRRK2 RNA guide
aaagaaaacacacucagcaaau

SEQ ID NO: 89420 - RNA, 22 nt, Artificial Sequence
  LRRK2 RNA guide
aagaaaacacacucagcaaauu

SEQ ID NO: 89421 - RNA, 22 nt, Artificial Sequence
  LRRK2 RNA guide
aauuugcugaguguguuuucuu

SEQ ID NO: 89422 - RNA, 22 nt, Artificial Sequence
  LRRK2 RNA guide
acucaauuugcugaguguguuu

SEQ ID NO: 89423 - RNA, 22 nt, Artificial Sequence
  LRRK2 RNA guide
agaaaacacacucagcaaauug

SEQ ID NO: 89424 - RNA, 22 nt, Artificial Sequence
  LRRK2 RNA guide
auacucaauuugcugagugugu

SEQ ID NO: 89425 - RNA, 22 nt, Artificial Sequence
  LRRK2 RNA guide
auuugcugaguguguuuucuuu

SEQ ID NO: 89426 - RNA, 22 nt, Artificial Sequence
  LRRK2 RNA guide
caauuugcugaguguguuuucu

SEQ ID NO: 89427 - RNA, 22 nt, Artificial Sequence
  LRRK2 RNA guide
cucaauuugcugaguguguuuu

SEQ ID NO: 89428 - RNA, 22 nt, Artificial Sequence
  LRRK2 RNA guide
gauacucaauuugcugagugug

SEQ ID NO: 89429 - RNA, 22 nt, Artificial Sequence
  LRRK2 RNA guide
uacucaauuugcugaguguguu

SEQ ID NO: 89430 - RNA, 22 nt, Artificial Sequence
  LRRK2 RNA guide
ucaauuugcugaguguguuuuc

SEQ ID NO: 89431 - RNA, 22 nt, Artificial Sequence
  LRRK2 RNA guide
uccuuuaagcuuugccaaaaaa

SEQ ID NO: 89432 - RNA, 22 nt, Artificial Sequence
  LRRK2 RNA guide
ugcugaguguguuuucuuuuuu

SEQ ID NO: 89433 - RNA, 22 nt, Artificial Sequence
  LRRK2 RNA guide
uugcugaguguguuuucuuuuu

SEQ ID NO: 89434 - RNA, 22 nt, Artificial Sequence
  LRRK2 RNA guide
uuugcugaguguguuuucuuuu

SEQ ID NO: 89435 - RNA, 20 nt, Artificial Sequence
  LRRK2 RNA guide
aaaaagcaaacuugaaagag

SEQ ID NO: 89436 - RNA, 20 nt, Artificial Sequence
  LRRK2 RNA guide
aaaagcaaacuugaaagagg

SEQ ID NO: 89437 - RNA, 20 nt, Artificial Sequence
  LRRK2 RNA guide
aaaccucuuucaaguuugcu

SEQ ID NO: 89438 - RNA, 20 nt, Artificial Sequence
  LRRK2 RNA guide
aaagcaaacuugaaagaggu

SEQ ID NO: 89439 - RNA, 20 nt, Artificial Sequence
  LRRK2 RNA guide
aaccucuuucaaguuugcuu

SEQ ID NO: 89440 - RNA, 20 nt, Artificial Sequence
  LRRK2 RNA guide
aagcaaacuugaaagagguu

SEQ ID NO: 89441 - RNA, 20 nt, Artificial Sequence
  LRRK2 RNA guide
accucuuucaaguuugcuuu

SEQ ID NO: 89442 - RNA, 20 nt, Artificial Sequence
  LRRK2 RNA guide
agcaaacuugaaagagguuu

SEQ ID NO: 89443 - RNA, 20 nt, Artificial Sequence
  LRRK2 RNA guide
auaaaccucuuucaaguuug

SEQ ID NO: 89444 - RNA, 20 nt, Artificial Sequence
  LRRK2 RNA guide
caaacuugaaagagguuuau

SEQ ID NO: 89445 - RNA, 20 nt, Artificial Sequence
  LRRK2 RNA guide
gcaaacuugaaagagguuua

SEQ ID NO: 89446 - RNA, 20 nt, Artificial Sequence
  LRRK2 RNA guide
uaaaccucuuucaaguuugc

SEQ ID NO: 89447 - RNA, 21 nt, Artificial Sequence
  LRRK2 RNA guide
aaaaagcaaacuugaaagagg

SEQ ID NO: 89448 - RNA, 21 nt, Artificial Sequence
  LRRK2 RNA guide
aaaagcaaacuugaaagaggu

SEQ ID NO: 89449 - RNA, 21 nt, Artificial Sequence
  LRRK2 RNA guide
aaaccucuuucaaguuugcuu

SEQ ID NO: 89450 - RNA, 21 nt, Artificial Sequence
  LRRK2 RNA guide
aaagcaaacuugaaagagguu

SEQ ID NO: 89451 - RNA, 21 nt, Artificial Sequence
  LRRK2 RNA guide
aaccucuuucaaguuugcuuu

SEQ ID NO: 89452 - RNA, 21 nt, Artificial Sequence
  LRRK2 RNA guide
aagcaaacuugaaagagguuu

SEQ ID NO: 89453 - RNA, 21 nt, Artificial Sequence
  LRRK2 RNA guide
accucuuucaaguuugcuuuu

SEQ ID NO: 89454 - RNA, 21 nt, Artificial Sequence
  LRRK2 RNA guide
agcaaacuugaaagagguuua

SEQ ID NO: 89455 - RNA, 21 nt, Artificial Sequence
  LRRK2 RNA guide
auaaaccucuuucaaguuugc

SEQ ID NO: 89456 - RNA, 21 nt, Artificial Sequence
  LRRK2 RNA guide
gcaaacuugaaagagguuuau

SEQ ID NO: 89457 - RNA, 21 nt, Artificial Sequence
  LRRK2 RNA guide
uaaaccucuuucaaguuugcu

SEQ ID NO: 89458 - RNA, 22 nt, Artificial Sequence
  LRRK2 RNA guide
aaaaaagcaaacuugaaagagg

SEQ ID NO: 89459 - RNA, 22 nt, Artificial Sequence
  LRRK2 RNA guide
aaaaagcaaacuugaaagaggu

SEQ ID NO: 89460 - RNA, 22 nt, Artificial Sequence
  LRRK2 RNA guide
aaaagcaaacuugaaagagguu

SEQ ID NO: 89461 - RNA, 22 nt, Artificial Sequence
  LRRK2 RNA guide
aaaccucuuucaaguuugcuuu

SEQ ID NO: 89462 - RNA, 22 nt, Artificial Sequence
  LRRK2 RNA guide
aaagcaaacuugaaagagguuu

SEQ ID NO: 89463 - RNA, 22 nt, Artificial Sequence
  LRRK2 RNA guide
aaccucuuucaaguuugcuuuu

SEQ ID NO: 89464 - RNA, 22 nt, Artificial Sequence
  LRRK2 RNA guide
aagcaaacuugaaagagguuua

SEQ ID NO: 89465 - RNA, 22 nt, Artificial Sequence
  LRRK2 RNA guide
accucuuucaaguuugcuuuuu

SEQ ID NO: 89466 - RNA, 22 nt, Artificial Sequence
  LRRK2 RNA guide
agcaaacuugaaagagguuuau

SEQ ID NO: 89467 - RNA, 22 nt, Artificial Sequence
  LRRK2 RNA guide
auaaaccucuuucaaguuugcu

SEQ ID NO: 89468 - RNA, 22 nt, Artificial Sequence
  LRRK2 RNA guide
gcaaacuugaaagagguuuaua

SEQ ID NO: 89469 - RNA, 22 nt, Artificial Sequence
  LRRK2 RNA guide
uaaaccucuuucaaguuugcuu

SEQ ID NO: 89470 - RNA, 22 nt, Artificial Sequence
  LRRK2 RNA guide
uauaaaccucuuucaaguuugc

SEQ ID NO: 89471 - RNA, 20 nt, Artificial Sequence
  LRRK2 RNA guide
aaaagcaaacuugaaagaga

SEQ ID NO: 89472 - RNA, 20 nt, Artificial Sequence
  LRRK2 RNA guide
aaagcaaacuugaaagagau

SEQ ID NO: 89473 - RNA, 20 nt, Artificial Sequence
  LRRK2 RNA guide
aaaucucuuucaaguuugcu

SEQ ID NO: 89474 - RNA, 20 nt, Artificial Sequence
  LRRK2 RNA guide
aagcaaacuugaaagagauu

SEQ ID NO: 89475 - RNA, 20 nt, Artificial Sequence
  LRRK2 RNA guide
aaucucuuucaaguuugcuu

SEQ ID NO: 89476 - RNA, 20 nt, Artificial Sequence
  LRRK2 RNA guide
agcaaacuugaaagagauuu

SEQ ID NO: 89477 - RNA, 20 nt, Artificial Sequence
  LRRK2 RNA guide
aucucuuucaaguuugcuuu

SEQ ID NO: 89478 - RNA, 20 nt, Artificial Sequence
  LRRK2 RNA guide
gcaaacuugaaagagauuua

SEQ ID NO: 89479 - RNA, 20 nt, Artificial Sequence
  LRRK2 RNA guide
uaaaucucuuucaaguuugc

SEQ ID NO: 89480 - RNA, 20 nt, Artificial Sequence
  LRRK2 RNA guide
aauguggccacagauaaugg

SEQ ID NO: 89481 - RNA, 20 nt, Artificial Sequence
  LRRK2 RNA guide
acagauaauggauggcaguc

SEQ ID NO: 89482 - RNA, 20 nt, Artificial Sequence
  LRRK2 RNA guide
accaugggccagacugccau

SEQ ID NO: 89483 - RNA, 20 nt, Artificial Sequence
  LRRK2 RNA guide
acugccauccauuaucugug

SEQ ID NO: 89484 - RNA, 20 nt, Artificial Sequence
  LRRK2 RNA guide
agacugccauccauuaucug

SEQ ID NO: 89485 - RNA, 20 nt, Artificial Sequence
  LRRK2 RNA guide
agauaauggauggcagucug

SEQ ID NO: 89486 - RNA, 20 nt, Artificial Sequence
  LRRK2 RNA guide
auaauggauggcagucuggc

SEQ ID NO: 89487 - RNA, 20 nt, Artificial Sequence
  LRRK2 RNA guide
auccauuaucuguggccaca

SEQ ID NO: 89488 - RNA, 20 nt, Artificial Sequence
  LRRK2 RNA guide
augggccagacugccaucca

SEQ ID NO: 89489 - RNA, 20 nt, Artificial Sequence
  LRRK2 RNA guide
auguggccacagauaaugga

SEQ ID NO: 89490 - RNA, 20 nt, Artificial Sequence
  LRRK2 RNA guide
auuaucuguggccacauuaa

SEQ ID NO: 89491 - RNA, 20 nt, Artificial Sequence
  LRRK2 RNA guide
cacagauaauggauggcagu

SEQ ID NO: 89492 - RNA, 20 nt, Artificial Sequence
  LRRK2 RNA guide
cagacugccauccauuaucu

SEQ ID NO: 89493 - RNA, 20 nt, Artificial Sequence
  LRRK2 RNA guide
cagauaauggauggcagucu

SEQ ID NO: 89494 - RNA, 20 nt, Artificial Sequence
  LRRK2 RNA guide
cauccauuaucuguggccac

SEQ ID NO: 89495 - RNA, 20 nt, Artificial Sequence
  LRRK2 RNA guide
caugggccagacugccaucc

SEQ ID NO: 89496 - RNA, 20 nt, Artificial Sequence
  LRRK2 RNA guide
cauuaucuguggccacauua

SEQ ID NO: 89497 - RNA, 20 nt, Artificial Sequence
  LRRK2 RNA guide
ccacagauaauggauggcag

SEQ ID NO: 89498 - RNA, 20 nt, Artificial Sequence
  LRRK2 RNA guide
ccagacugccauccauuauc

SEQ ID NO: 89499 - RNA, 20 nt, Artificial Sequence
  LRRK2 RNA guide
ccauccauuaucuguggcca

SEQ ID NO: 89500 - RNA, 20 nt, Artificial Sequence
  LRRK2 RNA guide
ccaugggccagacugccauc

SEQ ID NO: 89501 - RNA, 20 nt, Artificial Sequence
  LRRK2 RNA guide
ccauuaucuguggccacauu

SEQ ID NO: 89502 - RNA, 20 nt, Artificial Sequence
  LRRK2 RNA guide
cucuuguuaauguggccaca

SEQ ID NO: 89503 - RNA, 20 nt, Artificial Sequence
  LRRK2 RNA guide
cugccauccauuaucugugg

SEQ ID NO: 89504 - RNA, 20 nt, Artificial Sequence
  LRRK2 RNA guide
cuuguuaauguggccacaga

SEQ ID NO: 89505 - RNA, 20 nt, Artificial Sequence
  LRRK2 RNA guide
gacugccauccauuaucugu

SEQ ID NO: 89506 - RNA, 20 nt, Artificial Sequence
  LRRK2 RNA guide
gauaauggauggcagucugg

SEQ ID NO: 89507 - RNA, 20 nt, Artificial Sequence
  LRRK2 RNA guide
gccacagauaauggauggca

SEQ ID NO: 89508 - RNA, 20 nt, Artificial Sequence
  LRRK2 RNA guide
gccagacugccauccauuau

SEQ ID NO: 89509 - RNA, 20 nt, Artificial Sequence
  LRRK2 RNA guide
gccauccauuaucuguggcc

SEQ ID NO: 89510 - RNA, 20 nt, Artificial Sequence
  LRRK2 RNA guide
gcucuuguuaauguggccac

SEQ ID NO: 89511 - RNA, 20 nt, Artificial Sequence
  LRRK2 RNA guide
ggccacagauaauggauggc

SEQ ID NO: 89512 - RNA, 20 nt, Artificial Sequence
  LRRK2 RNA guide
ggccagacugccauccauua

SEQ ID NO: 89513 - RNA, 20 nt, Artificial Sequence
  LRRK2 RNA guide
gggccagacugccauccauu

SEQ ID NO: 89514 - RNA, 20 nt, Artificial Sequence
  LRRK2 RNA guide
guggccacagauaauggaug

SEQ ID NO: 89515 - RNA, 20 nt, Artificial Sequence
  LRRK2 RNA guide
guuaauguggccacagauaa

SEQ ID NO: 89516 - RNA, 20 nt, Artificial Sequence
  LRRK2 RNA guide
uaauggauggcagucuggcc

SEQ ID NO: 89517 - RNA, 20 nt, Artificial Sequence
  LRRK2 RNA guide
uaauguggccacagauaaug

SEQ ID NO: 89518 - RNA, 20 nt, Artificial Sequence
  LRRK2 RNA guide
uccauuaucuguggccacau

SEQ ID NO: 89519 - RNA, 20 nt, Artificial Sequence
  LRRK2 RNA guide
ucuuguuaauguggccacag

SEQ ID NO: 89520 - RNA, 20 nt, Artificial Sequence
  LRRK2 RNA guide
ugccauccauuaucuguggc

SEQ ID NO: 89521 - RNA, 20 nt, Artificial Sequence
  LRRK2 RNA guide
uggccacagauaauggaugg

SEQ ID NO: 89522 - RNA, 20 nt, Artificial Sequence
  LRRK2 RNA guide
ugggccagacugccauccau

SEQ ID NO: 89523 - RNA, 20 nt, Artificial Sequence
  LRRK2 RNA guide
uguggccacagauaauggau

SEQ ID NO: 89524 - RNA, 20 nt, Artificial Sequence
  LRRK2 RNA guide
uguuaauguggccacagaua

SEQ ID NO: 89525 - RNA, 20 nt, Artificial Sequence
  LRRK2 RNA guide
uuaauguggccacagauaau

SEQ ID NO: 89526 - RNA, 20 nt, Artificial Sequence
  LRRK2 RNA guide
uuaucuguggccacauuaac

SEQ ID NO: 89527 - RNA, 20 nt, Artificial Sequence
  LRRK2 RNA guide
uuguuaauguggccacagau

SEQ ID NO: 89528 - RNA, 21 nt, Artificial Sequence
  LRRK2 RNA guide
aauguggccacagauaaugga

SEQ ID NO: 89529 - RNA, 21 nt, Artificial Sequence
  LRRK2 RNA guide
acagauaauggauggcagucu

SEQ ID NO: 89530 - RNA, 21 nt, Artificial Sequence
  LRRK2 RNA guide
accaugggccagacugccauc

SEQ ID NO: 89531 - RNA, 21 nt, Artificial Sequence
  LRRK2 RNA guide
acugccauccauuaucugugg

SEQ ID NO: 89532 - RNA, 21 nt, Artificial Sequence
  LRRK2 RNA guide
agacugccauccauuaucugu

SEQ ID NO: 89533 - RNA, 21 nt, Artificial Sequence
  LRRK2 RNA guide
agauaauggauggcagucugg

SEQ ID NO: 89534 - RNA, 21 nt, Artificial Sequence
  LRRK2 RNA guide
auaauggauggcagucuggcc

SEQ ID NO: 89535 - RNA, 21 nt, Artificial Sequence
  LRRK2 RNA guide
auccauuaucuguggccacau

SEQ ID NO: 89536 - RNA, 21 nt, Artificial Sequence
  LRRK2 RNA guide
augggccagacugccauccau

SEQ ID NO: 89537 - RNA, 21 nt, Artificial Sequence
  LRRK2 RNA guide
auguggccacagauaauggau

SEQ ID NO: 89538 - RNA, 21 nt, Artificial Sequence
  LRRK2 RNA guide
auuaucuguggccacauuaac

SEQ ID NO: 89539 - RNA, 21 nt, Artificial Sequence
  LRRK2 RNA guide
cacagauaauggauggcaguc

SEQ ID NO: 89540 - RNA, 21 nt, Artificial Sequence
  LRRK2 RNA guide
cagacugccauccauuaucug

SEQ ID NO: 89541 - RNA, 21 nt, Artificial Sequence
  LRRK2 RNA guide
cagauaauggauggcagucug

SEQ ID NO: 89542 - RNA, 21 nt, Artificial Sequence
  LRRK2 RNA guide
cauccauuaucuguggccaca

SEQ ID NO: 89543 - RNA, 21 nt, Artificial Sequence
  LRRK2 RNA guide
caugggccagacugccaucca

SEQ ID NO: 89544 - RNA, 21 nt, Artificial Sequence
  LRRK2 RNA guide
cauuaucuguggccacauuaa

SEQ ID NO: 89545 - RNA, 21 nt, Artificial Sequence
  LRRK2 RNA guide
ccacagauaauggauggcagu

SEQ ID NO: 89546 - RNA, 21 nt, Artificial Sequence
  LRRK2 RNA guide
ccagacugccauccauuaucu

SEQ ID NO: 89547 - RNA, 21 nt, Artificial Sequence
  LRRK2 RNA guide
ccauccauuaucuguggccac

SEQ ID NO: 89548 - RNA, 21 nt, Artificial Sequence
  LRRK2 RNA guide
ccaugggccagacugccaucc

SEQ ID NO: 89549 - RNA, 21 nt, Artificial Sequence
  LRRK2 RNA guide
ccauuaucuguggccacauua

SEQ ID NO: 89550 - RNA, 21 nt, Artificial Sequence
  LRRK2 RNA guide
cucuuguuaauguggccacag

SEQ ID NO: 89551 - RNA, 21 nt, Artificial Sequence
  LRRK2 RNA guide
cugccauccauuaucuguggc

SEQ ID NO: 89552 - RNA, 21 nt, Artificial Sequence
  LRRK2 RNA guide
cuuguuaauguggccacagau

SEQ ID NO: 89553 - RNA, 21 nt, Artificial Sequence
  LRRK2 RNA guide
gacugccauccauuaucugug

SEQ ID NO: 89554 - RNA, 21 nt, Artificial Sequence
  LRRK2 RNA guide
gauaauggauggcagucuggc

SEQ ID NO: 89555 - RNA, 21 nt, Artificial Sequence
  LRRK2 RNA guide
gccacagauaauggauggcag

SEQ ID NO: 89556 - RNA, 21 nt, Artificial Sequence
  LRRK2 RNA guide
gccagacugccauccauuauc

SEQ ID NO: 89557 - RNA, 21 nt, Artificial Sequence
  LRRK2 RNA guide
gccauccauuaucuguggcca

SEQ ID NO: 89558 - RNA, 21 nt, Artificial Sequence
  LRRK2 RNA guide
gcucuuguuaauguggccaca

SEQ ID NO: 89559 - RNA, 21 nt, Artificial Sequence
  LRRK2 RNA guide
ggccacagauaauggauggca

SEQ ID NO: 89560 - RNA, 21 nt, Artificial Sequence
  LRRK2 RNA guide
ggccagacugccauccauuau

SEQ ID NO: 89561 - RNA, 21 nt, Artificial Sequence
  LRRK2 RNA guide
gggccagacugccauccauua

SEQ ID NO: 89562 - RNA, 21 nt, Artificial Sequence
  LRRK2 RNA guide
guggccacagauaauggaugg

SEQ ID NO: 89563 - RNA, 21 nt, Artificial Sequence
  LRRK2 RNA guide
guuaauguggccacagauaau

SEQ ID NO: 89564 - RNA, 21 nt, Artificial Sequence
  LRRK2 RNA guide
uaauggauggcagucuggccc

SEQ ID NO: 89565 - RNA, 21 nt, Artificial Sequence
  LRRK2 RNA guide
uaauguggccacagauaaugg

SEQ ID NO: 89566 - RNA, 21 nt, Artificial Sequence
  LRRK2 RNA guide
uaccaugggccagacugccau

SEQ ID NO: 89567 - RNA, 21 nt, Artificial Sequence
  LRRK2 RNA guide
uccauuaucuguggccacauu

SEQ ID NO: 89568 - RNA, 21 nt, Artificial Sequence
  LRRK2 RNA guide
ucuuguuaauguggccacaga

SEQ ID NO: 89569 - RNA, 21 nt, Artificial Sequence
  LRRK2 RNA guide
ugccauccauuaucuguggcc

SEQ ID NO: 89570 - RNA, 21 nt, Artificial Sequence
  LRRK2 RNA guide
ugcucuuguuaauguggccac

SEQ ID NO: 89571 - RNA, 21 nt, Artificial Sequence
  LRRK2 RNA guide
uggccacagauaauggauggc

SEQ ID NO: 89572 - RNA, 21 nt, Artificial Sequence
  LRRK2 RNA guide
ugggccagacugccauccauu

SEQ ID NO: 89573 - RNA, 21 nt, Artificial Sequence
  LRRK2 RNA guide
uguggccacagauaauggaug

SEQ ID NO: 89574 - RNA, 21 nt, Artificial Sequence
  LRRK2 RNA guide
uguuaauguggccacagauaa

SEQ ID NO: 89575 - RNA, 21 nt, Artificial Sequence
  LRRK2 RNA guide
uuaauguggccacagauaaug

SEQ ID NO: 89576 - RNA, 21 nt, Artificial Sequence
  LRRK2 RNA guide
uuaucuguggccacauuaaca

SEQ ID NO: 89577 - RNA, 21 nt, Artificial Sequence
  LRRK2 RNA guide
uuguuaauguggccacagaua

SEQ ID NO: 89578 - RNA, 22 nt, Artificial Sequence
  LRRK2 RNA guide
aauguggccacagauaauggau

SEQ ID NO: 89579 - RNA, 22 nt, Artificial Sequence
  LRRK2 RNA guide
acagauaauggauggcagucug

SEQ ID NO: 89580 - RNA, 22 nt, Artificial Sequence
  LRRK2 RNA guide
accaugggccagacugccaucc

SEQ ID NO: 89581 - RNA, 22 nt, Artificial Sequence
  LRRK2 RNA guide
acugccauccauuaucuguggc

SEQ ID NO: 89582 - RNA, 22 nt, Artificial Sequence
  LRRK2 RNA guide
agacugccauccauuaucugug

SEQ ID NO: 89583 - RNA, 22 nt, Artificial Sequence
  LRRK2 RNA guide
agauaauggauggcagucuggc

SEQ ID NO: 89584 - RNA, 22 nt, Artificial Sequence
  LRRK2 RNA guide
auaauggauggcagucuggccc

SEQ ID NO: 89585 - RNA, 22 nt, Artificial Sequence
  LRRK2 RNA guide
auccauuaucuguggccacauu

SEQ ID NO: 89586 - RNA, 22 nt, Artificial Sequence
  LRRK2 RNA guide
augcucuuguuaauguggccac

SEQ ID NO: 89587 - RNA, 22 nt, Artificial Sequence
  LRRK2 RNA guide
augggccagacugccauccauu

SEQ ID NO: 89588 - RNA, 22 nt, Artificial Sequence
  LRRK2 RNA guide
auguggccacagauaauggaug

SEQ ID NO: 89589 - RNA, 22 nt, Artificial Sequence
  LRRK2 RNA guide
auuaucuguggccacauuaaca

SEQ ID NO: 89590 - RNA, 22 nt, Artificial Sequence
  LRRK2 RNA guide
cacagauaauggauggcagucu

SEQ ID NO: 89591 - RNA, 22 nt, Artificial Sequence
  LRRK2 RNA guide
cagacugccauccauuaucugu

SEQ ID NO: 89592 - RNA, 22 nt, Artificial Sequence
  LRRK2 RNA guide
cagauaauggauggcagucugg

SEQ ID NO: 89593 - RNA, 22 nt, Artificial Sequence
  LRRK2 RNA guide
cauccauuaucuguggccacau

SEQ ID NO: 89594 - RNA, 22 nt, Artificial Sequence
  LRRK2 RNA guide
caugggccagacugccauccau

SEQ ID NO: 89595 - RNA, 22 nt, Artificial Sequence
  LRRK2 RNA guide
cauuaucuguggccacauuaac

SEQ ID NO: 89596 - RNA, 22 nt, Artificial Sequence
  LRRK2 RNA guide
ccacagauaauggauggcaguc

SEQ ID NO: 89597 - RNA, 22 nt, Artificial Sequence
  LRRK2 RNA guide
ccagacugccauccauuaucug

SEQ ID NO: 89598 - RNA, 22 nt, Artificial Sequence
  LRRK2 RNA guide
ccauccauuaucuguggccaca

SEQ ID NO: 89599 - RNA, 22 nt, Artificial Sequence
  LRRK2 RNA guide
ccaugggccagacugccaucca

SEQ ID NO: 89600 - RNA, 22 nt, Artificial Sequence
  LRRK2 RNA guide
ccauuaucuguggccacauuaa

SEQ ID NO: 89601 - RNA, 22 nt, Artificial Sequence
  LRRK2 RNA guide
cucuuguuaauguggccacaga

SEQ ID NO: 89602 - RNA, 22 nt, Artificial Sequence
  LRRK2 RNA guide
cugccauccauuaucuguggcc

SEQ ID NO: 89603 - RNA, 22 nt, Artificial Sequence
  LRRK2 RNA guide
cuuguuaauguggccacagaua

SEQ ID NO: 89604 - RNA, 22 nt, Artificial Sequence
  LRRK2 RNA guide
gacugccauccauuaucugugg

SEQ ID NO: 89605 - RNA, 22 nt, Artificial Sequence
  LRRK2 RNA guide
gauaauggauggcagucuggcc

SEQ ID NO: 89606 - RNA, 22 nt, Artificial Sequence
  LRRK2 RNA guide
gccacagauaauggauggcagu

SEQ ID NO: 89607 - RNA, 22 nt, Artificial Sequence
  LRRK2 RNA guide
gccagacugccauccauuaucu

SEQ ID NO: 89608 - RNA, 22 nt, Artificial Sequence
  LRRK2 RNA guide
gccauccauuaucuguggccac

SEQ ID NO: 89609 - RNA, 22 nt, Artificial Sequence
  LRRK2 RNA guide
gcucuuguuaauguggccacag

SEQ ID NO: 89610 - RNA, 22 nt, Artificial Sequence
  LRRK2 RNA guide
ggccacagauaauggauggcag

SEQ ID NO: 89611 - RNA, 22 nt, Artificial Sequence
  LRRK2 RNA guide
ggccagacugccauccauuauc

SEQ ID NO: 89612 - RNA, 22 nt, Artificial Sequence
  LRRK2 RNA guide
gggccagacugccauccauuau

SEQ ID NO: 89613 - RNA, 22 nt, Artificial Sequence
  LRRK2 RNA guide
guaccaugggccagacugccau

SEQ ID NO: 89614 - RNA, 22 nt, Artificial Sequence
  LRRK2 RNA guide
guggccacagauaauggauggc

SEQ ID NO: 89615 - RNA, 22 nt, Artificial Sequence
  LRRK2 RNA guide
guuaauguggccacagauaaug

SEQ ID NO: 89616 - RNA, 22 nt, Artificial Sequence
  LRRK2 RNA guide
uaauggauggcagucuggccca

SEQ ID NO: 89617 - RNA, 22 nt, Artificial Sequence
  LRRK2 RNA guide
uaauguggccacagauaaugga

SEQ ID NO: 89618 - RNA, 22 nt, Artificial Sequence
  LRRK2 RNA guide
uaccaugggccagacugccauc

SEQ ID NO: 89619 - RNA, 22 nt, Artificial Sequence
  LRRK2 RNA guide
uccauuaucuguggccacauua

SEQ ID NO: 89620 - RNA, 22 nt, Artificial Sequence
  LRRK2 RNA guide
ucuuguuaauguggccacagau

SEQ ID NO: 89621 - RNA, 22 nt, Artificial Sequence
  LRRK2 RNA guide
ugccauccauuaucuguggcca

SEQ ID NO: 89622 - RNA, 22 nt, Artificial Sequence
  LRRK2 RNA guide
ugcucuuguuaauguggccaca

SEQ ID NO: 89623 - RNA, 22 nt, Artificial Sequence
  LRRK2 RNA guide
uggccacagauaauggauggca

SEQ ID NO: 89624 - RNA, 22 nt, Artificial Sequence
  LRRK2 RNA guide
ugggccagacugccauccauua

SEQ ID NO: 89625 - RNA, 22 nt, Artificial Sequence
  LRRK2 RNA guide
uguggccacagauaauggaugg

SEQ ID NO: 89626 - RNA, 22 nt, Artificial Sequence
  LRRK2 RNA guide
uguuaauguggccacagauaau

SEQ ID NO: 89627 - RNA, 22 nt, Artificial Sequence
  LRRK2 RNA guide
uuaauguggccacagauaaugg

SEQ ID NO: 89628 - RNA, 22 nt, Artificial Sequence
  LRRK2 RNA guide
uuaucuguggccacauuaacaa

SEQ ID NO: 89629 - RNA, 22 nt, Artificial Sequence
  LRRK2 RNA guide
uuguuaauguggccacagauaa

SEQ ID NO: 89630 - RNA, 20 nt, Artificial Sequence
  LRRK2 RNA guide
aauguggccacagaugaugg

SEQ ID NO: 89631 - RNA, 20 nt, Artificial Sequence
  LRRK2 RNA guide
acagaugauggauggcaguc

SEQ ID NO: 89632 - RNA, 20 nt, Artificial Sequence
  LRRK2 RNA guide
acugccauccaucaucugug

SEQ ID NO: 89633 - RNA, 20 nt, Artificial Sequence
  LRRK2 RNA guide
agacugccauccaucaucug

SEQ ID NO: 89634 - RNA, 20 nt, Artificial Sequence
  LRRK2 RNA guide
agaugauggauggcagucug

SEQ ID NO: 89635 - RNA, 20 nt, Artificial Sequence
  LRRK2 RNA guide
aucaucuguggccacauuaa

SEQ ID NO: 89636 - RNA, 20 nt, Artificial Sequence
  LRRK2 RNA guide
auccaucaucuguggccaca

SEQ ID NO: 89637 - RNA, 20 nt, Artificial Sequence
  LRRK2 RNA guide
augauggauggcagucuggc

SEQ ID NO: 89638 - RNA, 20 nt, Artificial Sequence
  LRRK2 RNA guide
auguggccacagaugaugga

SEQ ID NO: 89639 - RNA, 20 nt, Artificial Sequence
  LRRK2 RNA guide
cacagaugauggauggcagu

SEQ ID NO: 89640 - RNA, 20 nt, Artificial Sequence
  LRRK2 RNA guide
cagacugccauccaucaucu

SEQ ID NO: 89641 - RNA, 20 nt, Artificial Sequence
  LRRK2 RNA guide
cagaugauggauggcagucu

SEQ ID NO: 89642 - RNA, 20 nt, Artificial Sequence
  LRRK2 RNA guide
caucaucuguggccacauua

SEQ ID NO: 89643 - RNA, 20 nt, Artificial Sequence
  LRRK2 RNA guide
cauccaucaucuguggccac

SEQ ID NO: 89644 - RNA, 20 nt, Artificial Sequence
  LRRK2 RNA guide
ccacagaugauggauggcag

SEQ ID NO: 89645 - RNA, 20 nt, Artificial Sequence
  LRRK2 RNA guide
ccagacugccauccaucauc

SEQ ID NO: 89646 - RNA, 20 nt, Artificial Sequence
  LRRK2 RNA guide
ccaucaucuguggccacauu

SEQ ID NO: 89647 - RNA, 20 nt, Artificial Sequence
  LRRK2 RNA guide
ccauccaucaucuguggcca

SEQ ID NO: 89648 - RNA, 20 nt, Artificial Sequence
  LRRK2 RNA guide
cugccauccaucaucugugg

SEQ ID NO: 89649 - RNA, 20 nt, Artificial Sequence
  LRRK2 RNA guide
gacugccauccaucaucugu

SEQ ID NO: 89650 - RNA, 20 nt, Artificial Sequence
  LRRK2 RNA guide
gaugauggauggcagucugg

SEQ ID NO: 89651 - RNA, 20 nt, Artificial Sequence
  LRRK2 RNA guide
gccacagaugauggauggca

SEQ ID NO: 89652 - RNA, 20 nt, Artificial Sequence
  LRRK2 RNA guide
gccagacugccauccaucau

SEQ ID NO: 89653 - RNA, 20 nt, Artificial Sequence
  LRRK2 RNA guide
gccauccaucaucuguggcc

SEQ ID NO: 89654 - RNA, 20 nt, Artificial Sequence
  LRRK2 RNA guide
ggccacagaugauggauggc

SEQ ID NO: 89655 - RNA, 20 nt, Artificial Sequence
  LRRK2 RNA guide
ggccagacugccauccauca

SEQ ID NO: 89656 - RNA, 20 nt, Artificial Sequence
  LRRK2 RNA guide
gggccagacugccauccauc

SEQ ID NO: 89657 - RNA, 20 nt, Artificial Sequence
  LRRK2 RNA guide
guggccacagaugauggaug

SEQ ID NO: 89658 - RNA, 20 nt, Artificial Sequence
  LRRK2 RNA guide
guuaauguggccacagauga

SEQ ID NO: 89659 - RNA, 20 nt, Artificial Sequence
  LRRK2 RNA guide
uaauguggccacagaugaug

SEQ ID NO: 89660 - RNA, 20 nt, Artificial Sequence
  LRRK2 RNA guide
ucaucuguggccacauuaac

SEQ ID NO: 89661 - RNA, 20 nt, Artificial Sequence
  LRRK2 RNA guide
uccaucaucuguggccacau

SEQ ID NO: 89662 - RNA, 20 nt, Artificial Sequence
  LRRK2 RNA guide
ugauggauggcagucuggcc

SEQ ID NO: 89663 - RNA, 20 nt, Artificial Sequence
  LRRK2 RNA guide
ugccauccaucaucuguggc

SEQ ID NO: 89664 - RNA, 20 nt, Artificial Sequence
  LRRK2 RNA guide
uggccacagaugauggaugg

SEQ ID NO: 89665 - RNA, 20 nt, Artificial Sequence
  LRRK2 RNA guide
uguggccacagaugauggau

SEQ ID NO: 89666 - RNA, 20 nt, Artificial Sequence
  LRRK2 RNA guide
uguuaauguggccacagaug

SEQ ID NO: 89667 - RNA, 20 nt, Artificial Sequence
  LRRK2 RNA guide
uuaauguggccacagaugau

SEQ ID NO: 89668 - RNA, 21 nt, Artificial Sequence
  LRRK2 RNA guide
aauguggccacagaugaugga

SEQ ID NO: 89669 - RNA, 21 nt, Artificial Sequence
  LRRK2 RNA guide
acagaugauggauggcagucu

SEQ ID NO: 89670 - RNA, 21 nt, Artificial Sequence
  LRRK2 RNA guide
acugccauccaucaucugugg

SEQ ID NO: 89671 - RNA, 21 nt, Artificial Sequence
  LRRK2 RNA guide
agacugccauccaucaucugu

SEQ ID NO: 89672 - RNA, 21 nt, Artificial Sequence
  LRRK2 RNA guide
agaugauggauggcagucugg

SEQ ID NO: 89673 - RNA, 21 nt, Artificial Sequence
  LRRK2 RNA guide
aucaucuguggccacauuaac

SEQ ID NO: 89674 - RNA, 21 nt, Artificial Sequence
  LRRK2 RNA guide
auccaucaucuguggccacau

SEQ ID NO: 89675 - RNA, 21 nt, Artificial Sequence
  LRRK2 RNA guide
augauggauggcagucuggcc

SEQ ID NO: 89676 - RNA, 21 nt, Artificial Sequence
  LRRK2 RNA guide
auguggccacagaugauggau

SEQ ID NO: 89677 - RNA, 21 nt, Artificial Sequence
  LRRK2 RNA guide
cacagaugauggauggcaguc

SEQ ID NO: 89678 - RNA, 21 nt, Artificial Sequence
  LRRK2 RNA guide
cagacugccauccaucaucug

SEQ ID NO: 89679 - RNA, 21 nt, Artificial Sequence
  LRRK2 RNA guide
cagaugauggauggcagucug

SEQ ID NO: 89680 - RNA, 21 nt, Artificial Sequence
  LRRK2 RNA guide
caucaucuguggccacauuaa

SEQ ID NO: 89681 - RNA, 21 nt, Artificial Sequence
  LRRK2 RNA guide
cauccaucaucuguggccaca

SEQ ID NO: 89682 - RNA, 21 nt, Artificial Sequence
  LRRK2 RNA guide
ccacagaugauggauggcagu

SEQ ID NO: 89683 - RNA, 21 nt, Artificial Sequence
  LRRK2 RNA guide
ccagacugccauccaucaucu

SEQ ID NO: 89684 - RNA, 21 nt, Artificial Sequence
  LRRK2 RNA guide
ccaucaucuguggccacauua

SEQ ID NO: 89685 - RNA, 21 nt, Artificial Sequence
  LRRK2 RNA guide
ccauccaucaucuguggccac

SEQ ID NO: 89686 - RNA, 21 nt, Artificial Sequence
  LRRK2 RNA guide
cugccauccaucaucuguggc

SEQ ID NO: 89687 - RNA, 21 nt, Artificial Sequence
  LRRK2 RNA guide
gacugccauccaucaucugug

SEQ ID NO: 89688 - RNA, 21 nt, Artificial Sequence
  LRRK2 RNA guide
gaugauggauggcagucuggc

SEQ ID NO: 89689 - RNA, 21 nt, Artificial Sequence
  LRRK2 RNA guide
gccacagaugauggauggcag

SEQ ID NO: 89690 - RNA, 21 nt, Artificial Sequence
  LRRK2 RNA guide
gccagacugccauccaucauc

SEQ ID NO: 89691 - RNA, 21 nt, Artificial Sequence
  LRRK2 RNA guide
gccauccaucaucuguggcca

SEQ ID NO: 89692 - RNA, 21 nt, Artificial Sequence
  LRRK2 RNA guide
ggccacagaugauggauggca

SEQ ID NO: 89693 - RNA, 21 nt, Artificial Sequence
  LRRK2 RNA guide
ggccagacugccauccaucau

SEQ ID NO: 89694 - RNA, 21 nt, Artificial Sequence
  LRRK2 RNA guide
gggccagacugccauccauca

SEQ ID NO: 89695 - RNA, 21 nt, Artificial Sequence
  LRRK2 RNA guide
guggccacagaugauggaugg

SEQ ID NO: 89696 - RNA, 21 nt, Artificial Sequence
  LRRK2 RNA guide
guuaauguggccacagaugau

SEQ ID NO: 89697 - RNA, 21 nt, Artificial Sequence
  LRRK2 RNA guide
uaauguggccacagaugaugg

SEQ ID NO: 89698 - RNA, 21 nt, Artificial Sequence
  LRRK2 RNA guide
ucaucuguggccacauuaaca

SEQ ID NO: 89699 - RNA, 21 nt, Artificial Sequence
  LRRK2 RNA guide
uccaucaucuguggccacauu

SEQ ID NO: 89700 - RNA, 21 nt, Artificial Sequence
  LRRK2 RNA guide
ugauggauggcagucuggccc

SEQ ID NO: 89701 - RNA, 21 nt, Artificial Sequence
  LRRK2 RNA guide
ugccauccaucaucuguggcc

SEQ ID NO: 89702 - RNA, 21 nt, Artificial Sequence
  LRRK2 RNA guide
uggccacagaugauggauggc

SEQ ID NO: 89703 - RNA, 21 nt, Artificial Sequence
  LRRK2 RNA guide
ugggccagacugccauccauc

SEQ ID NO: 89704 - RNA, 21 nt, Artificial Sequence
  LRRK2 RNA guide
uguggccacagaugauggaug

SEQ ID NO: 89705 - RNA, 21 nt, Artificial Sequence
  LRRK2 RNA guide
uguuaauguggccacagauga

SEQ ID NO: 89706 - RNA, 21 nt, Artificial Sequence
  LRRK2 RNA guide
uuaauguggccacagaugaug

SEQ ID NO: 89707 - RNA, 21 nt, Artificial Sequence
  LRRK2 RNA guide
uuguuaauguggccacagaug

SEQ ID NO: 89708 - RNA, 22 nt, Artificial Sequence
  LRRK2 RNA guide
aauguggccacagaugauggau

SEQ ID NO: 89709 - RNA, 22 nt, Artificial Sequence
  LRRK2 RNA guide
acagaugauggauggcagucug

SEQ ID NO: 89710 - RNA, 22 nt, Artificial Sequence
  LRRK2 RNA guide
acugccauccaucaucuguggc

SEQ ID NO: 89711 - RNA, 22 nt, Artificial Sequence
  LRRK2 RNA guide
agacugccauccaucaucugug

SEQ ID NO: 89712 - RNA, 22 nt, Artificial Sequence
  LRRK2 RNA guide
agaugauggauggcagucuggc

SEQ ID NO: 89713 - RNA, 22 nt, Artificial Sequence
  LRRK2 RNA guide
aucaucuguggccacauuaaca

SEQ ID NO: 89714 - RNA, 22 nt, Artificial Sequence
  LRRK2 RNA guide
auccaucaucuguggccacauu

SEQ ID NO: 89715 - RNA, 22 nt, Artificial Sequence
  LRRK2 RNA guide
augauggauggcagucuggccc

SEQ ID NO: 89716 - RNA, 22 nt, Artificial Sequence
  LRRK2 RNA guide
augggccagacugccauccauc

SEQ ID NO: 89717 - RNA, 22 nt, Artificial Sequence
  LRRK2 RNA guide
auguggccacagaugauggaug

SEQ ID NO: 89718 - RNA, 22 nt, Artificial Sequence
  LRRK2 RNA guide
cacagaugauggauggcagucu

SEQ ID NO: 89719 - RNA, 22 nt, Artificial Sequence
  LRRK2 RNA guide
cagacugccauccaucaucugu

SEQ ID NO: 89720 - RNA, 22 nt, Artificial Sequence
  LRRK2 RNA guide
cagaugauggauggcagucugg

SEQ ID NO: 89721 - RNA, 22 nt, Artificial Sequence
  LRRK2 RNA guide
caucaucuguggccacauuaac

SEQ ID NO: 89722 - RNA, 22 nt, Artificial Sequence
  LRRK2 RNA guide
cauccaucaucuguggccacau

SEQ ID NO: 89723 - RNA, 22 nt, Artificial Sequence
  LRRK2 RNA guide
ccacagaugauggauggcaguc

SEQ ID NO: 89724 - RNA, 22 nt, Artificial Sequence
  LRRK2 RNA guide
ccagacugccauccaucaucug

SEQ ID NO: 89725 - RNA, 22 nt, Artificial Sequence
  LRRK2 RNA guide
ccaucaucuguggccacauuaa

SEQ ID NO: 89726 - RNA, 22 nt, Artificial Sequence
  LRRK2 RNA guide
ccauccaucaucuguggccaca

SEQ ID NO: 89727 - RNA, 22 nt, Artificial Sequence
  LRRK2 RNA guide
cugccauccaucaucuguggcc

SEQ ID NO: 89728 - RNA, 22 nt, Artificial Sequence
  LRRK2 RNA guide
cuuguuaauguggccacagaug

SEQ ID NO: 89729 - RNA, 22 nt, Artificial Sequence
  LRRK2 RNA guide
gacugccauccaucaucugugg

SEQ ID NO: 89730 - RNA, 22 nt, Artificial Sequence
  LRRK2 RNA guide
gaugauggauggcagucuggcc

SEQ ID NO: 89731 - RNA, 22 nt, Artificial Sequence
  LRRK2 RNA guide
gccacagaugauggauggcagu

SEQ ID NO: 89732 - RNA, 22 nt, Artificial Sequence
  LRRK2 RNA guide
gccagacugccauccaucaucu

SEQ ID NO: 89733 - RNA, 22 nt, Artificial Sequence
  LRRK2 RNA guide
gccauccaucaucuguggccac

SEQ ID NO: 89734 - RNA, 22 nt, Artificial Sequence
  LRRK2 RNA guide
ggccacagaugauggauggcag

SEQ ID NO: 89735 - RNA, 22 nt, Artificial Sequence
  LRRK2 RNA guide
ggccagacugccauccaucauc

SEQ ID NO: 89736 - RNA, 22 nt, Artificial Sequence
  LRRK2 RNA guide
gggccagacugccauccaucau

SEQ ID NO: 89737 - RNA, 22 nt, Artificial Sequence
  LRRK2 RNA guide
guggccacagaugauggauggc

SEQ ID NO: 89738 - RNA, 22 nt, Artificial Sequence
  LRRK2 RNA guide
guuaauguggccacagaugaug

SEQ ID NO: 89739 - RNA, 22 nt, Artificial Sequence
  LRRK2 RNA guide
uaauguggccacagaugaugga

SEQ ID NO: 89740 - RNA, 22 nt, Artificial Sequence
  LRRK2 RNA guide
ucaucuguggccacauuaacaa

SEQ ID NO: 89741 - RNA, 22 nt, Artificial Sequence
  LRRK2 RNA guide
uccaucaucuguggccacauua

SEQ ID NO: 89742 - RNA, 22 nt, Artificial Sequence
  LRRK2 RNA guide
ugauggauggcagucuggccca

SEQ ID NO: 89743 - RNA, 22 nt, Artificial Sequence
  LRRK2 RNA guide
ugccauccaucaucuguggcca

SEQ ID NO: 89744 - RNA, 22 nt, Artificial Sequence
  LRRK2 RNA guide
uggccacagaugauggauggca

SEQ ID NO: 89745 - RNA, 22 nt, Artificial Sequence
  LRRK2 RNA guide
ugggccagacugccauccauca

SEQ ID NO: 89746 - RNA, 22 nt, Artificial Sequence
  LRRK2 RNA guide
uguggccacagaugauggaugg

SEQ ID NO: 89747 - RNA, 22 nt, Artificial Sequence
  LRRK2 RNA guide
uguuaauguggccacagaugau

SEQ ID NO: 89748 - RNA, 22 nt, Artificial Sequence
  LRRK2 RNA guide
uuaauguggccacagaugaugg

SEQ ID NO: 89749 - RNA, 22 nt, Artificial Sequence
  LRRK2 RNA guide
uuguuaauguggccacagauga

SEQ ID NO: 89750 - RNA, 20 nt, Artificial Sequence
  LRRK2 RNA guide
aaaauugcaucagauugaug

SEQ ID NO: 89751 - RNA, 20 nt, Artificial Sequence
  LRRK2 RNA guide
aaauguacaucaaucugaug

SEQ ID NO: 89752 - RNA, 20 nt, Artificial Sequence
  LRRK2 RNA guide
aaauugcaucagauugaugu

SEQ ID NO: 89753 - RNA, 20 nt, Artificial Sequence
  LRRK2 RNA guide
aauguacaucaaucugaugc

SEQ ID NO: 89754 - RNA, 20 nt, Artificial Sequence
  LRRK2 RNA guide
aauugcaucagauugaugua

SEQ ID NO: 89755 - RNA, 20 nt, Artificial Sequence
  LRRK2 RNA guide
acaucaaucugaugcaauuu

SEQ ID NO: 89756 - RNA, 20 nt, Artificial Sequence
  LRRK2 RNA guide
accuuucuaaaauguacauc

SEQ ID NO: 89757 - RNA, 20 nt, Artificial Sequence
  LRRK2 RNA guide
agagggaccuuucuaaaaug

SEQ ID NO: 89758 - RNA, 20 nt, Artificial Sequence
  LRRK2 RNA guide
agcaggaaaauugcaucaga

SEQ ID NO: 89759 - RNA, 20 nt, Artificial Sequence
  LRRK2 RNA guide
aggaaaauugcaucagauug

SEQ ID NO: 89760 - RNA, 20 nt, Artificial Sequence
  LRRK2 RNA guide
agggaccuuucuaaaaugua

SEQ ID NO: 89761 - RNA, 20 nt, Artificial Sequence
  LRRK2 RNA guide
auguacaucaaucugaugca

SEQ ID NO: 89762 - RNA, 20 nt, Artificial Sequence
  LRRK2 RNA guide
auguacauuuuagaaagguc

SEQ ID NO: 89763 - RNA, 20 nt, Artificial Sequence
  LRRK2 RNA guide
cagagggaccuuucuaaaau

SEQ ID NO: 89764 - RNA, 20 nt, Artificial Sequence
  LRRK2 RNA guide
cagauugauguacauuuuag

SEQ ID NO: 89765 - RNA, 20 nt, Artificial Sequence
  LRRK2 RNA guide
caggaaaauugcaucagauu

SEQ ID NO: 89766 - RNA, 20 nt, Artificial Sequence
  LRRK2 RNA guide
caucaaucugaugcaauuuu

SEQ ID NO: 89767 - RNA, 20 nt, Artificial Sequence
  LRRK2 RNA guide
caucagauugauguacauuu

SEQ ID NO: 89768 - RNA, 20 nt, Artificial Sequence
  LRRK2 RNA guide
ccuuucuaaaauguacauca

SEQ ID NO: 89769 - RNA, 20 nt, Artificial Sequence
  LRRK2 RNA guide
cuaaaauguacaucaaucug

SEQ ID NO: 89770 - RNA, 20 nt, Artificial Sequence
  LRRK2 RNA guide
gaaaauugcaucagauugau

SEQ ID NO: 89771 - RNA, 20 nt, Artificial Sequence
  LRRK2 RNA guide
gaccuuucuaaaauguacau

SEQ ID NO: 89772 - RNA, 20 nt, Artificial Sequence
  LRRK2 RNA guide
gagggaccuuucuaaaaugu

SEQ ID NO: 89773 - RNA, 20 nt, Artificial Sequence
  LRRK2 RNA guide
gauguacauuuuagaaaggu

SEQ ID NO: 89774 - RNA, 20 nt, Artificial Sequence
  LRRK2 RNA guide
gcaggaaaauugcaucagau

SEQ ID NO: 89775 - RNA, 20 nt, Artificial Sequence
  LRRK2 RNA guide
gcaucagauugauguacauu

SEQ ID NO: 89776 - RNA, 20 nt, Artificial Sequence
  LRRK2 RNA guide
ggaaaauugcaucagauuga

SEQ ID NO: 89777 - RNA, 20 nt, Artificial Sequence
  LRRK2 RNA guide
ggaccuuucuaaaauguaca

SEQ ID NO: 89778 - RNA, 20 nt, Artificial Sequence
  LRRK2 RNA guide
gggaccuuucuaaaauguac

SEQ ID NO: 89779 - RNA, 20 nt, Artificial Sequence
  LRRK2 RNA guide
guacaucaaucugaugcaau

SEQ ID NO: 89780 - RNA, 20 nt, Artificial Sequence
  LRRK2 RNA guide
uacaucaaucugaugcaauu

SEQ ID NO: 89781 - RNA, 20 nt, Artificial Sequence
  LRRK2 RNA guide
ugauguacauuuuagaaagg

SEQ ID NO: 89782 - RNA, 20 nt, Artificial Sequence
  LRRK2 RNA guide
ugcaucagauugauguacau

SEQ ID NO: 89783 - RNA, 20 nt, Artificial Sequence
  LRRK2 RNA guide
uguacaucaaucugaugcaa

SEQ ID NO: 89784 - RNA, 20 nt, Artificial Sequence
  LRRK2 RNA guide
uugcaucagauugauguaca

SEQ ID NO: 89785 - RNA, 21 nt, Artificial Sequence
  LRRK2 RNA guide
aaauguacaucaaucugaugc

SEQ ID NO: 89786 - RNA, 21 nt, Artificial Sequence
  LRRK2 RNA guide
aagcaggaaaauugcaucaga

SEQ ID NO: 89787 - RNA, 21 nt, Artificial Sequence
  LRRK2 RNA guide
aauguacaucaaucugaugca

SEQ ID NO: 89788 - RNA, 21 nt, Artificial Sequence
  LRRK2 RNA guide
aauugcaucagauugauguac

SEQ ID NO: 89789 - RNA, 21 nt, Artificial Sequence
  LRRK2 RNA guide
acagagggaccuuucuaaaau

SEQ ID NO: 89790 - RNA, 21 nt, Artificial Sequence
  LRRK2 RNA guide
agagggaccuuucuaaaaugu

SEQ ID NO: 89791 - RNA, 21 nt, Artificial Sequence
  LRRK2 RNA guide
agcaggaaaauugcaucagau

SEQ ID NO: 89792 - RNA, 21 nt, Artificial Sequence
  LRRK2 RNA guide
aggaaaauugcaucagauuga

SEQ ID NO: 89793 - RNA, 21 nt, Artificial Sequence
  LRRK2 RNA guide
agggaccuuucuaaaauguac

SEQ ID NO: 89794 - RNA, 21 nt, Artificial Sequence
  LRRK2 RNA guide
auguacaucaaucugaugcaa

SEQ ID NO: 89795 - RNA, 21 nt, Artificial Sequence
  LRRK2 RNA guide
auguacauuuuagaaaggucc

SEQ ID NO: 89796 - RNA, 21 nt, Artificial Sequence
  LRRK2 RNA guide
auugcaucagauugauguaca

SEQ ID NO: 89797 - RNA, 21 nt, Artificial Sequence
  LRRK2 RNA guide
cagagggaccuuucuaaaaug

SEQ ID NO: 89798 - RNA, 21 nt, Artificial Sequence
  LRRK2 RNA guide
caggaaaauugcaucagauug

SEQ ID NO: 89799 - RNA, 21 nt, Artificial Sequence
  LRRK2 RNA guide
caucaaucugaugcaauuuuc

SEQ ID NO: 89800 - RNA, 21 nt, Artificial Sequence
  LRRK2 RNA guide
gaaaauugcaucagauugaug

SEQ ID NO: 89801 - RNA, 21 nt, Artificial Sequence
  LRRK2 RNA guide
gaccuuucuaaaauguacauc

SEQ ID NO: 89802 - RNA, 21 nt, Artificial Sequence
  LRRK2 RNA guide
gagggaccuuucuaaaaugua

SEQ ID NO: 89803 - RNA, 21 nt, Artificial Sequence
  LRRK2 RNA guide
gauguacauuuuagaaagguc

SEQ ID NO: 89804 - RNA, 21 nt, Artificial Sequence
  LRRK2 RNA guide
gcaggaaaauugcaucagauu

SEQ ID NO: 89805 - RNA, 21 nt, Artificial Sequence
  LRRK2 RNA guide
gcaucagauugauguacauuu

SEQ ID NO: 89806 - RNA, 21 nt, Artificial Sequence
  LRRK2 RNA guide
ggaaaauugcaucagauugau

SEQ ID NO: 89807 - RNA, 21 nt, Artificial Sequence
  LRRK2 RNA guide
ggaccuuucuaaaauguacau

SEQ ID NO: 89808 - RNA, 21 nt, Artificial Sequence
  LRRK2 RNA guide
gggaccuuucuaaaauguaca

SEQ ID NO: 89809 - RNA, 21 nt, Artificial Sequence
  LRRK2 RNA guide
guacaucaaucugaugcaauu

SEQ ID NO: 89810 - RNA, 21 nt, Artificial Sequence
  LRRK2 RNA guide
ugcaucagauugauguacauu

SEQ ID NO: 89811 - RNA, 21 nt, Artificial Sequence
  LRRK2 RNA guide
uguacaucaaucugaugcaau

SEQ ID NO: 89812 - RNA, 21 nt, Artificial Sequence
  LRRK2 RNA guide
uugcaucagauugauguacau

SEQ ID NO: 89813 - RNA, 22 nt, Artificial Sequence
  LRRK2 RNA guide
aaaauguacaucaaucugaugc

SEQ ID NO: 89814 - RNA, 22 nt, Artificial Sequence
  LRRK2 RNA guide
aaauguacaucaaucugaugca

SEQ ID NO: 89815 - RNA, 22 nt, Artificial Sequence
  LRRK2 RNA guide
aaauugcaucagauugauguac

SEQ ID NO: 89816 - RNA, 22 nt, Artificial Sequence
  LRRK2 RNA guide
aagcaggaaaauugcaucagau

SEQ ID NO: 89817 - RNA, 22 nt, Artificial Sequence
  LRRK2 RNA guide
aauguacaucaaucugaugcaa

SEQ ID NO: 89818 - RNA, 22 nt, Artificial Sequence
  LRRK2 RNA guide
aauugcaucagauugauguaca

SEQ ID NO: 89819 - RNA, 22 nt, Artificial Sequence
  LRRK2 RNA guide
acagagggaccuuucuaaaaug

SEQ ID NO: 89820 - RNA, 22 nt, Artificial Sequence
  LRRK2 RNA guide
acaucaaucugaugcaauuuuc

SEQ ID NO: 89821 - RNA, 22 nt, Artificial Sequence
  LRRK2 RNA guide
agagggaccuuucuaaaaugua

SEQ ID NO: 89822 - RNA, 22 nt, Artificial Sequence
  LRRK2 RNA guide
agcaggaaaauugcaucagauu

SEQ ID NO: 89823 - RNA, 22 nt, Artificial Sequence
  LRRK2 RNA guide
aggaaaauugcaucagauugau

SEQ ID NO: 89824 - RNA, 22 nt, Artificial Sequence
  LRRK2 RNA guide
agggaccuuucuaaaauguaca

SEQ ID NO: 89825 - RNA, 22 nt, Artificial Sequence
  LRRK2 RNA guide
auguacaucaaucugaugcaau

SEQ ID NO: 89826 - RNA, 22 nt, Artificial Sequence
  LRRK2 RNA guide
auguacauuuuagaaagguccc

SEQ ID NO: 89827 - RNA, 22 nt, Artificial Sequence
  LRRK2 RNA guide
auugcaucagauugauguacau

SEQ ID NO: 89828 - RNA, 22 nt, Artificial Sequence
  LRRK2 RNA guide
cagagggaccuuucuaaaaugu

SEQ ID NO: 89829 - RNA, 22 nt, Artificial Sequence
  LRRK2 RNA guide
caggaaaauugcaucagauuga

SEQ ID NO: 89830 - RNA, 22 nt, Artificial Sequence
  LRRK2 RNA guide
caucaaucugaugcaauuuucc

SEQ ID NO: 89831 - RNA, 22 nt, Artificial Sequence
  LRRK2 RNA guide
gaaaauugcaucagauugaugu

SEQ ID NO: 89832 - RNA, 22 nt, Artificial Sequence
  LRRK2 RNA guide
gacagagggaccuuucuaaaau

SEQ ID NO: 89833 - RNA, 22 nt, Artificial Sequence
  LRRK2 RNA guide
gaccuuucuaaaauguacauca

SEQ ID NO: 89834 - RNA, 22 nt, Artificial Sequence
  LRRK2 RNA guide
gagggaccuuucuaaaauguac

SEQ ID NO: 89835 - RNA, 22 nt, Artificial Sequence
  LRRK2 RNA guide
gauguacauuuuagaaaggucc

SEQ ID NO: 89836 - RNA, 22 nt, Artificial Sequence
  LRRK2 RNA guide
gcaggaaaauugcaucagauug

SEQ ID NO: 89837 - RNA, 22 nt, Artificial Sequence
  LRRK2 RNA guide
gcaucagauugauguacauuuu

SEQ ID NO: 89838 - RNA, 22 nt, Artificial Sequence
  LRRK2 RNA guide
ggaaaauugcaucagauugaug

SEQ ID NO: 89839 - RNA, 22 nt, Artificial Sequence
  LRRK2 RNA guide
ggaccuuucuaaaauguacauc

SEQ ID NO: 89840 - RNA, 22 nt, Artificial Sequence
  LRRK2 RNA guide
gggaccuuucuaaaauguacau

SEQ ID NO: 89841 - RNA, 22 nt, Artificial Sequence
  LRRK2 RNA guide
guacaucaaucugaugcaauuu

SEQ ID NO: 89842 - RNA, 22 nt, Artificial Sequence
  LRRK2 RNA guide
uaagcaggaaaauugcaucaga

SEQ ID NO: 89843 - RNA, 22 nt, Artificial Sequence
  LRRK2 RNA guide
ugauguacauuuuagaaagguc

SEQ ID NO: 89844 - RNA, 22 nt, Artificial Sequence
  LRRK2 RNA guide
ugcaucagauugauguacauuu

SEQ ID NO: 89845 - RNA, 22 nt, Artificial Sequence
  LRRK2 RNA guide
uguacaucaaucugaugcaauu

SEQ ID NO: 89846 - RNA, 22 nt, Artificial Sequence
  LRRK2 RNA guide
uugcaucagauugauguacauu

SEQ ID NO: 89847 - RNA, 20 nt, Artificial Sequence
  LRRK2 RNA guide
aaaauguacgucaaucugau

SEQ ID NO: 89848 - RNA, 20 nt, Artificial Sequence
  LRRK2 RNA guide
aaaauugcaucagauugacg

SEQ ID NO: 89849 - RNA, 20 nt, Artificial Sequence
  LRRK2 RNA guide
aaauguacgucaaucugaug

SEQ ID NO: 89850 - RNA, 20 nt, Artificial Sequence
  LRRK2 RNA guide
aaauugcaucagauugacgu

SEQ ID NO: 89851 - RNA, 20 nt, Artificial Sequence
  LRRK2 RNA guide
aauguacgucaaucugaugc

SEQ ID NO: 89852 - RNA, 20 nt, Artificial Sequence
  LRRK2 RNA guide
aauugcaucagauugacgua

SEQ ID NO: 89853 - RNA, 20 nt, Artificial Sequence
  LRRK2 RNA guide
accuuucuaaaauguacguc

SEQ ID NO: 89854 - RNA, 20 nt, Artificial Sequence
  LRRK2 RNA guide
acguacauuuuagaaagguc

SEQ ID NO: 89855 - RNA, 20 nt, Artificial Sequence
  LRRK2 RNA guide
acgucaaucugaugcaauuu

SEQ ID NO: 89856 - RNA, 20 nt, Artificial Sequence
  LRRK2 RNA guide
agauugacguacauuuuaga

SEQ ID NO: 89857 - RNA, 20 nt, Artificial Sequence
  LRRK2 RNA guide
aucagauugacguacauuuu

SEQ ID NO: 89858 - RNA, 20 nt, Artificial Sequence
  LRRK2 RNA guide
auguacgucaaucugaugca

SEQ ID NO: 89859 - RNA, 20 nt, Artificial Sequence
  LRRK2 RNA guide
auugcaucagauugacguac

SEQ ID NO: 89860 - RNA, 20 nt, Artificial Sequence
  LRRK2 RNA guide
cagauugacguacauuuuag

SEQ ID NO: 89861 - RNA, 20 nt, Artificial Sequence
  LRRK2 RNA guide
caucagauugacguacauuu

SEQ ID NO: 89862 - RNA, 20 nt, Artificial Sequence
  LRRK2 RNA guide
ccuuucuaaaauguacguca

SEQ ID NO: 89863 - RNA, 20 nt, Artificial Sequence
  LRRK2 RNA guide
cgucaaucugaugcaauuuu

SEQ ID NO: 89864 - RNA, 20 nt, Artificial Sequence
  LRRK2 RNA guide
cuaaaauguacgucaaucug

SEQ ID NO: 89865 - RNA, 20 nt, Artificial Sequence
  LRRK2 RNA guide
cuuucuaaaauguacgucaa

SEQ ID NO: 89866 - RNA, 20 nt, Artificial Sequence
  LRRK2 RNA guide
gaaaauugcaucagauugac

SEQ ID NO: 89867 - RNA, 20 nt, Artificial Sequence
  LRRK2 RNA guide
gaccuuucuaaaauguacgu

SEQ ID NO: 89868 - RNA, 20 nt, Artificial Sequence
  LRRK2 RNA guide
gacguacauuuuagaaaggu

SEQ ID NO: 89869 - RNA, 20 nt, Artificial Sequence
  LRRK2 RNA guide
gauugacguacauuuuagaa

SEQ ID NO: 89870 - RNA, 20 nt, Artificial Sequence
  LRRK2 RNA guide
gcaucagauugacguacauu

SEQ ID NO: 89871 - RNA, 20 nt, Artificial Sequence
  LRRK2 RNA guide
ggaccuuucuaaaauguacg

SEQ ID NO: 89872 - RNA, 20 nt, Artificial Sequence
  LRRK2 RNA guide
guacgucaaucugaugcaau

SEQ ID NO: 89873 - RNA, 20 nt, Artificial Sequence
  LRRK2 RNA guide
uaaaauguacgucaaucuga

SEQ ID NO: 89874 - RNA, 20 nt, Artificial Sequence
  LRRK2 RNA guide
uacgucaaucugaugcaauu

SEQ ID NO: 89875 - RNA, 20 nt, Artificial Sequence
  LRRK2 RNA guide
ucagauugacguacauuuua

SEQ ID NO: 89876 - RNA, 20 nt, Artificial Sequence
  LRRK2 RNA guide
ucuaaaauguacgucaaucu

SEQ ID NO: 89877 - RNA, 20 nt, Artificial Sequence
  LRRK2 RNA guide
ugacguacauuuuagaaagg

SEQ ID NO: 89878 - RNA, 20 nt, Artificial Sequence
  LRRK2 RNA guide
ugcaucagauugacguacau

SEQ ID NO: 89879 - RNA, 20 nt, Artificial Sequence
  LRRK2 RNA guide
uguacgucaaucugaugcaa

SEQ ID NO: 89880 - RNA, 20 nt, Artificial Sequence
  LRRK2 RNA guide
uucuaaaauguacgucaauc

SEQ ID NO: 89881 - RNA, 20 nt, Artificial Sequence
  LRRK2 RNA guide
uugacguacauuuuagaaag

SEQ ID NO: 89882 - RNA, 20 nt, Artificial Sequence
  LRRK2 RNA guide
uugcaucagauugacguaca

SEQ ID NO: 89883 - RNA, 21 nt, Artificial Sequence
  LRRK2 RNA guide
aaaauguacgucaaucugaug

SEQ ID NO: 89884 - RNA, 21 nt, Artificial Sequence
  LRRK2 RNA guide
aaaauugcaucagauugacgu

SEQ ID NO: 89885 - RNA, 21 nt, Artificial Sequence
  LRRK2 RNA guide
aaauguacgucaaucugaugc

SEQ ID NO: 89886 - RNA, 21 nt, Artificial Sequence
  LRRK2 RNA guide
aaauugcaucagauugacgua

SEQ ID NO: 89887 - RNA, 21 nt, Artificial Sequence
  LRRK2 RNA guide
aauguacgucaaucugaugca

SEQ ID NO: 89888 - RNA, 21 nt, Artificial Sequence
  LRRK2 RNA guide
aauugcaucagauugacguac

SEQ ID NO: 89889 - RNA, 21 nt, Artificial Sequence
  LRRK2 RNA guide
accuuucuaaaauguacguca

SEQ ID NO: 89890 - RNA, 21 nt, Artificial Sequence
  LRRK2 RNA guide
acguacauuuuagaaaggucc

SEQ ID NO: 89891 - RNA, 21 nt, Artificial Sequence
  LRRK2 RNA guide
acgucaaucugaugcaauuuu

SEQ ID NO: 89892 - RNA, 21 nt, Artificial Sequence
  LRRK2 RNA guide
auguacgucaaucugaugcaa

SEQ ID NO: 89893 - RNA, 21 nt, Artificial Sequence
  LRRK2 RNA guide
auugcaucagauugacguaca

SEQ ID NO: 89894 - RNA, 21 nt, Artificial Sequence
  LRRK2 RNA guide
cagauugacguacauuuuaga

SEQ ID NO: 89895 - RNA, 21 nt, Artificial Sequence
  LRRK2 RNA guide
caucagauugacguacauuuu

SEQ ID NO: 89896 - RNA, 21 nt, Artificial Sequence
  LRRK2 RNA guide
ccuuucuaaaauguacgucaa

SEQ ID NO: 89897 - RNA, 21 nt, Artificial Sequence
  LRRK2 RNA guide
cgucaaucugaugcaauuuuc

SEQ ID NO: 89898 - RNA, 21 nt, Artificial Sequence
  LRRK2 RNA guide
cuaaaauguacgucaaucuga

SEQ ID NO: 89899 - RNA, 21 nt, Artificial Sequence
  LRRK2 RNA guide
gaaaauugcaucagauugacg

SEQ ID NO: 89900 - RNA, 21 nt, Artificial Sequence
  LRRK2 RNA guide
gaccuuucuaaaauguacguc

SEQ ID NO: 89901 - RNA, 21 nt, Artificial Sequence
  LRRK2 RNA guide
gacguacauuuuagaaagguc

SEQ ID NO: 89902 - RNA, 21 nt, Artificial Sequence
  LRRK2 RNA guide
gcaucagauugacguacauuu

SEQ ID NO: 89903 - RNA, 21 nt, Artificial Sequence
  LRRK2 RNA guide
ggaaaauugcaucagauugac

SEQ ID NO: 89904 - RNA, 21 nt, Artificial Sequence
  LRRK2 RNA guide
ggaccuuucuaaaauguacgu

SEQ ID NO: 89905 - RNA, 21 nt, Artificial Sequence
  LRRK2 RNA guide
gggaccuuucuaaaauguacg

SEQ ID NO: 89906 - RNA, 21 nt, Artificial Sequence
  LRRK2 RNA guide
guacgucaaucugaugcaauu

SEQ ID NO: 89907 - RNA, 21 nt, Artificial Sequence
  LRRK2 RNA guide
uacgucaaucugaugcaauuu

SEQ ID NO: 89908 - RNA, 21 nt, Artificial Sequence
  LRRK2 RNA guide
ucagauugacguacauuuuag

SEQ ID NO: 89909 - RNA, 21 nt, Artificial Sequence
  LRRK2 RNA guide
ucuaaaauguacgucaaucug

SEQ ID NO: 89910 - RNA, 21 nt, Artificial Sequence
  LRRK2 RNA guide
ugacguacauuuuagaaaggu

SEQ ID NO: 89911 - RNA, 21 nt, Artificial Sequence
  LRRK2 RNA guide
ugcaucagauugacguacauu

SEQ ID NO: 89912 - RNA, 21 nt, Artificial Sequence
  LRRK2 RNA guide
uguacgucaaucugaugcaau

SEQ ID NO: 89913 - RNA, 21 nt, Artificial Sequence
  LRRK2 RNA guide
uugacguacauuuuagaaagg

SEQ ID NO: 89914 - RNA, 21 nt, Artificial Sequence
  LRRK2 RNA guide
uugcaucagauugacguacau

SEQ ID NO: 89915 - RNA, 22 nt, Artificial Sequence
  LRRK2 RNA guide
aaaauguacgucaaucugaugc

SEQ ID NO: 89916 - RNA, 22 nt, Artificial Sequence
  LRRK2 RNA guide
aaaauugcaucagauugacgua

SEQ ID NO: 89917 - RNA, 22 nt, Artificial Sequence
  LRRK2 RNA guide
aaauguacgucaaucugaugca

SEQ ID NO: 89918 - RNA, 22 nt, Artificial Sequence
  LRRK2 RNA guide
aaauugcaucagauugacguac

SEQ ID NO: 89919 - RNA, 22 nt, Artificial Sequence
  LRRK2 RNA guide
aauguacgucaaucugaugcaa

SEQ ID NO: 89920 - RNA, 22 nt, Artificial Sequence
  LRRK2 RNA guide
aauugcaucagauugacguaca

SEQ ID NO: 89921 - RNA, 22 nt, Artificial Sequence
  LRRK2 RNA guide
accuuucuaaaauguacgucaa

SEQ ID NO: 89922 - RNA, 22 nt, Artificial Sequence
  LRRK2 RNA guide
acguacauuuuagaaagguccc

SEQ ID NO: 89923 - RNA, 22 nt, Artificial Sequence
  LRRK2 RNA guide
acgucaaucugaugcaauuuuc

SEQ ID NO: 89924 - RNA, 22 nt, Artificial Sequence
  LRRK2 RNA guide
aggaaaauugcaucagauugac

SEQ ID NO: 89925 - RNA, 22 nt, Artificial Sequence
  LRRK2 RNA guide
agggaccuuucuaaaauguacg

SEQ ID NO: 89926 - RNA, 22 nt, Artificial Sequence
  LRRK2 RNA guide
aucagauugacguacauuuuag

SEQ ID NO: 89927 - RNA, 22 nt, Artificial Sequence
  LRRK2 RNA guide
auguacgucaaucugaugcaau

SEQ ID NO: 89928 - RNA, 22 nt, Artificial Sequence
  LRRK2 RNA guide
auugacguacauuuuagaaagg

SEQ ID NO: 89929 - RNA, 22 nt, Artificial Sequence
  LRRK2 RNA guide
auugcaucagauugacguacau

SEQ ID NO: 89930 - RNA, 22 nt, Artificial Sequence
  LRRK2 RNA guide
cagauugacguacauuuuagaa

SEQ ID NO: 89931 - RNA, 22 nt, Artificial Sequence
  LRRK2 RNA guide
caucagauugacguacauuuua

SEQ ID NO: 89932 - RNA, 22 nt, Artificial Sequence
  LRRK2 RNA guide
ccuuucuaaaauguacgucaau

SEQ ID NO: 89933 - RNA, 22 nt, Artificial Sequence
  LRRK2 RNA guide
cgucaaucugaugcaauuuucc

SEQ ID NO: 89934 - RNA, 22 nt, Artificial Sequence
  LRRK2 RNA guide
cuaaaauguacgucaaucugau

SEQ ID NO: 89935 - RNA, 22 nt, Artificial Sequence
  LRRK2 RNA guide
cuuucuaaaauguacgucaauc

SEQ ID NO: 89936 - RNA, 22 nt, Artificial Sequence
  LRRK2 RNA guide
gaaaauugcaucagauugacgu

SEQ ID NO: 89937 - RNA, 22 nt, Artificial Sequence
  LRRK2 RNA guide
gaccuuucuaaaauguacguca

SEQ ID NO: 89938 - RNA, 22 nt, Artificial Sequence
  LRRK2 RNA guide
gacguacauuuuagaaaggucc

SEQ ID NO: 89939 - RNA, 22 nt, Artificial Sequence
  LRRK2 RNA guide
gauugacguacauuuuagaaag

SEQ ID NO: 89940 - RNA, 22 nt, Artificial Sequence
  LRRK2 RNA guide
gcaucagauugacguacauuuu

SEQ ID NO: 89941 - RNA, 22 nt, Artificial Sequence
  LRRK2 RNA guide
ggaaaauugcaucagauugacg

SEQ ID NO: 89942 - RNA, 22 nt, Artificial Sequence
  LRRK2 RNA guide
ggaccuuucuaaaauguacguc

SEQ ID NO: 89943 - RNA, 22 nt, Artificial Sequence
  LRRK2 RNA guide
gggaccuuucuaaaauguacgu

SEQ ID NO: 89944 - RNA, 22 nt, Artificial Sequence
  LRRK2 RNA guide
guacgucaaucugaugcaauuu

SEQ ID NO: 89945 - RNA, 22 nt, Artificial Sequence
  LRRK2 RNA guide
uaaaauguacgucaaucugaug

SEQ ID NO: 89946 - RNA, 22 nt, Artificial Sequence
  LRRK2 RNA guide
uacgucaaucugaugcaauuuu

SEQ ID NO: 89947 - RNA, 22 nt, Artificial Sequence
  LRRK2 RNA guide
ucagauugacguacauuuuaga

SEQ ID NO: 89948 - RNA, 22 nt, Artificial Sequence
  LRRK2 RNA guide
ucuaaaauguacgucaaucuga

SEQ ID NO: 89949 - RNA, 22 nt, Artificial Sequence
  LRRK2 RNA guide
ugacguacauuuuagaaagguc

SEQ ID NO: 89950 - RNA, 22 nt, Artificial Sequence
  LRRK2 RNA guide
ugcaucagauugacguacauuu

SEQ ID NO: 89951 - RNA, 22 nt, Artificial Sequence
  LRRK2 RNA guide
uguacgucaaucugaugcaauu

SEQ ID NO: 89952 - RNA, 22 nt, Artificial Sequence
  LRRK2 RNA guide
uucuaaaauguacgucaaucug

SEQ ID NO: 89953 - RNA, 22 nt, Artificial Sequence
  LRRK2 RNA guide
uugacguacauuuuagaaaggu

SEQ ID NO: 89954 - RNA, 22 nt, Artificial Sequence
  LRRK2 RNA guide
uugcaucagauugacguacauu

SEQ ID NO: 89955 - RNA, 20 nt, Artificial Sequence
  LRRK2 RNA guide
aaauaggcagggggcauaau

SEQ ID NO: 89956 - RNA, 20 nt, Artificial Sequence
  LRRK2 RNA guide
aauaggcagggggcauaaua

SEQ ID NO: 89957 - RNA, 20 nt, Artificial Sequence
  LRRK2 RNA guide
accuggaugacuauuaugcc

SEQ ID NO: 89958 - RNA, 20 nt, Artificial Sequence
  LRRK2 RNA guide
acuauuaugcccccugccua

SEQ ID NO: 89959 - RNA, 20 nt, Artificial Sequence
  LRRK2 RNA guide
acugaaauaggcagggggca

SEQ ID NO: 89960 - RNA, 20 nt, Artificial Sequence
  LRRK2 RNA guide
aggcagggggcauaauaguc

SEQ ID NO: 89961 - RNA, 20 nt, Artificial Sequence
  LRRK2 RNA guide
agggggcauaauagucaucc

SEQ ID NO: 89962 - RNA, 20 nt, Artificial Sequence
  LRRK2 RNA guide
auaggcagggggcauaauag

SEQ ID NO: 89963 - RNA, 20 nt, Artificial Sequence
  LRRK2 RNA guide
augacuauuaugcccccugc

SEQ ID NO: 89964 - RNA, 20 nt, Artificial Sequence
  LRRK2 RNA guide
augcccccugccuauuucag

SEQ ID NO: 89965 - RNA, 20 nt, Artificial Sequence
  LRRK2 RNA guide
auuaugcccccugccuauuu

SEQ ID NO: 89966 - RNA, 20 nt, Artificial Sequence
  LRRK2 RNA guide
cagggggcauaauagucauc

SEQ ID NO: 89967 - RNA, 20 nt, Artificial Sequence
  LRRK2 RNA guide
cccccugccuauuucagucc

SEQ ID NO: 89968 - RNA, 20 nt, Artificial Sequence
  LRRK2 RNA guide
ccccugccuauuucagucca

SEQ ID NO: 89969 - RNA, 20 nt, Artificial Sequence
  LRRK2 RNA guide
cccugccuauuucaguccaa

SEQ ID NO: 89970 - RNA, 20 nt, Artificial Sequence
  LRRK2 RNA guide
ccugccuauuucaguccaag

SEQ ID NO: 89971 - RNA, 20 nt, Artificial Sequence
  LRRK2 RNA guide
ccuggaugacuauuaugccc

SEQ ID NO: 89972 - RNA, 20 nt, Artificial Sequence
  LRRK2 RNA guide
cuauuaugcccccugccuau

SEQ ID NO: 89973 - RNA, 20 nt, Artificial Sequence
  LRRK2 RNA guide
cugaaauaggcagggggcau

SEQ ID NO: 89974 - RNA, 20 nt, Artificial Sequence
  LRRK2 RNA guide
cuggaugacuauuaugcccc

SEQ ID NO: 89975 - RNA, 20 nt, Artificial Sequence
  LRRK2 RNA guide
cuuggacugaaauaggcagg

SEQ ID NO: 89976 - RNA, 20 nt, Artificial Sequence
  LRRK2 RNA guide
gaaauaggcagggggcauaa

SEQ ID NO: 89977 - RNA, 20 nt, Artificial Sequence
  LRRK2 RNA guide
gacuauuaugcccccugccu

SEQ ID NO: 89978 - RNA, 20 nt, Artificial Sequence
  LRRK2 RNA guide
gacugaaauaggcagggggc

SEQ ID NO: 89979 - RNA, 20 nt, Artificial Sequence
  LRRK2 RNA guide
gaugacuauuaugcccccug

SEQ ID NO: 89980 - RNA, 20 nt, Artificial Sequence
  LRRK2 RNA guide
gcagggggcauaauagucau

SEQ ID NO: 89981 - RNA, 20 nt, Artificial Sequence
  LRRK2 RNA guide
gcccccugccuauuucaguc

SEQ ID NO: 89982 - RNA, 20 nt, Artificial Sequence
  LRRK2 RNA guide
gcuuggacugaaauaggcag

SEQ ID NO: 89983 - RNA, 20 nt, Artificial Sequence
  LRRK2 RNA guide
ggacugaaauaggcaggggg

SEQ ID NO: 89984 - RNA, 20 nt, Artificial Sequence
  LRRK2 RNA guide
ggaugacuauuaugcccccu

SEQ ID NO: 89985 - RNA, 20 nt, Artificial Sequence
  LRRK2 RNA guide
ggcagggggcauaauaguca

SEQ ID NO: 89986 - RNA, 20 nt, Artificial Sequence
  LRRK2 RNA guide
ggugcuuggacugaaauagg

SEQ ID NO: 89987 - RNA, 20 nt, Artificial Sequence
  LRRK2 RNA guide
gugcuuggacugaaauaggc

SEQ ID NO: 89988 - RNA, 20 nt, Artificial Sequence
  LRRK2 RNA guide
uaccuggaugacuauuaugc

SEQ ID NO: 89989 - RNA, 20 nt, Artificial Sequence
  LRRK2 RNA guide
uaggcagggggcauaauagu

SEQ ID NO: 89990 - RNA, 20 nt, Artificial Sequence
  LRRK2 RNA guide
uaugcccccugccuauuuca

SEQ ID NO: 89991 - RNA, 20 nt, Artificial Sequence
  LRRK2 RNA guide
uauuaugcccccugccuauu

SEQ ID NO: 89992 - RNA, 20 nt, Artificial Sequence
  LRRK2 RNA guide
ugaaauaggcagggggcaua

SEQ ID NO: 89993 - RNA, 20 nt, Artificial Sequence
  LRRK2 RNA guide
ugacuauuaugcccccugcc

SEQ ID NO: 89994 - RNA, 20 nt, Artificial Sequence
  LRRK2 RNA guide
ugcccccugccuauuucagu

SEQ ID NO: 89995 - RNA, 20 nt, Artificial Sequence
  LRRK2 RNA guide
ugcuuggacugaaauaggca

SEQ ID NO: 89996 - RNA, 20 nt, Artificial Sequence
  LRRK2 RNA guide
uggacugaaauaggcagggg

SEQ ID NO: 89997 - RNA, 20 nt, Artificial Sequence
  LRRK2 RNA guide
uggaugacuauuaugccccc

SEQ ID NO: 89998 - RNA, 20 nt, Artificial Sequence
  LRRK2 RNA guide
uggugcuuggacugaaauag

SEQ ID NO: 89999 - RNA, 20 nt, Artificial Sequence
  LRRK2 RNA guide
uuaccuggaugacuauuaug

SEQ ID NO: 90000 - RNA, 20 nt, Artificial Sequence
  LRRK2 RNA guide
uuaugcccccugccuauuuc

SEQ ID NO: 90001 - RNA, 20 nt, Artificial Sequence
  LRRK2 RNA guide
uuggacugaaauaggcaggg

SEQ ID NO: 90002 - RNA, 21 nt, Artificial Sequence
  LRRK2 RNA guide
aaauaggcagggggcauaaua

SEQ ID NO: 90003 - RNA, 21 nt, Artificial Sequence
  LRRK2 RNA guide
aauaggcagggggcauaauag

SEQ ID NO: 90004 - RNA, 21 nt, Artificial Sequence
  LRRK2 RNA guide
accuggaugacuauuaugccc

SEQ ID NO: 90005 - RNA, 21 nt, Artificial Sequence
  LRRK2 RNA guide
acuauuaugcccccugccuau

SEQ ID NO: 90006 - RNA, 21 nt, Artificial Sequence
  LRRK2 RNA guide
acugaaauaggcagggggcau

SEQ ID NO: 90007 - RNA, 21 nt, Artificial Sequence
  LRRK2 RNA guide
aggcagggggcauaauaguca

SEQ ID NO: 90008 - RNA, 21 nt, Artificial Sequence
  LRRK2 RNA guide
agggggcauaauagucaucca

SEQ ID NO: 90009 - RNA, 21 nt, Artificial Sequence
  LRRK2 RNA guide
aguggugcuuggacugaaaua

SEQ ID NO: 90010 - RNA, 21 nt, Artificial Sequence
  LRRK2 RNA guide
auaggcagggggcauaauagu

SEQ ID NO: 90011 - RNA, 21 nt, Artificial Sequence
  LRRK2 RNA guide
augacuauuaugcccccugcc

SEQ ID NO: 90012 - RNA, 21 nt, Artificial Sequence
  LRRK2 RNA guide
augcccccugccuauuucagu

SEQ ID NO: 90013 - RNA, 21 nt, Artificial Sequence
  LRRK2 RNA guide
auuaugcccccugccuauuuc

SEQ ID NO: 90014 - RNA, 21 nt, Artificial Sequence
  LRRK2 RNA guide
cagggggcauaauagucaucc

SEQ ID NO: 90015 - RNA, 21 nt, Artificial Sequence
  LRRK2 RNA guide
cccccugccuauuucagucca

SEQ ID NO: 90016 - RNA, 21 nt, Artificial Sequence
  LRRK2 RNA guide
ccccugccuauuucaguccaa

SEQ ID NO: 90017 - RNA, 21 nt, Artificial Sequence
  LRRK2 RNA guide
cccugccuauuucaguccaag

SEQ ID NO: 90018 - RNA, 21 nt, Artificial Sequence
  LRRK2 RNA guide
ccugccuauuucaguccaagc

SEQ ID NO: 90019 - RNA, 21 nt, Artificial Sequence
  LRRK2 RNA guide
ccuggaugacuauuaugcccc

SEQ ID NO: 90020 - RNA, 21 nt, Artificial Sequence
  LRRK2 RNA guide
cuauuaugcccccugccuauu

SEQ ID NO: 90021 - RNA, 21 nt, Artificial Sequence
  LRRK2 RNA guide
cugaaauaggcagggggcaua

SEQ ID NO: 90022 - RNA, 21 nt, Artificial Sequence
  LRRK2 RNA guide
cuggaugacuauuaugccccc

SEQ ID NO: 90023 - RNA, 21 nt, Artificial Sequence
  LRRK2 RNA guide
cuuaccuggaugacuauuaug

SEQ ID NO: 90024 - RNA, 21 nt, Artificial Sequence
  LRRK2 RNA guide
cuuggacugaaauaggcaggg

SEQ ID NO: 90025 - RNA, 21 nt, Artificial Sequence
  LRRK2 RNA guide
gaaauaggcagggggcauaau

SEQ ID NO: 90026 - RNA, 21 nt, Artificial Sequence
  LRRK2 RNA guide
gacuauuaugcccccugccua

SEQ ID NO: 90027 - RNA, 21 nt, Artificial Sequence
  LRRK2 RNA guide
gacugaaauaggcagggggca

SEQ ID NO: 90028 - RNA, 21 nt, Artificial Sequence
  LRRK2 RNA guide
gaugacuauuaugcccccugc

SEQ ID NO: 90029 - RNA, 21 nt, Artificial Sequence
  LRRK2 RNA guide
gcagggggcauaauagucauc

SEQ ID NO: 90030 - RNA, 21 nt, Artificial Sequence
  LRRK2 RNA guide
gcccccugccuauuucagucc

SEQ ID NO: 90031 - RNA, 21 nt, Artificial Sequence
  LRRK2 RNA guide
gcuuggacugaaauaggcagg

SEQ ID NO: 90032 - RNA, 21 nt, Artificial Sequence
  LRRK2 RNA guide
ggacugaaauaggcagggggc

SEQ ID NO: 90033 - RNA, 21 nt, Artificial Sequence
  LRRK2 RNA guide
ggaugacuauuaugcccccug

SEQ ID NO: 90034 - RNA, 21 nt, Artificial Sequence
  LRRK2 RNA guide
ggcagggggcauaauagucau

SEQ ID NO: 90035 - RNA, 21 nt, Artificial Sequence
  LRRK2 RNA guide
ggugcuuggacugaaauaggc

SEQ ID NO: 90036 - RNA, 21 nt, Artificial Sequence
  LRRK2 RNA guide
gugcuuggacugaaauaggca

SEQ ID NO: 90037 - RNA, 21 nt, Artificial Sequence
  LRRK2 RNA guide
guggugcuuggacugaaauag

SEQ ID NO: 90038 - RNA, 21 nt, Artificial Sequence
  LRRK2 RNA guide
uaccuggaugacuauuaugcc

SEQ ID NO: 90039 - RNA, 21 nt, Artificial Sequence
  LRRK2 RNA guide
uaggcagggggcauaauaguc

SEQ ID NO: 90040 - RNA, 21 nt, Artificial Sequence
  LRRK2 RNA guide
uaugcccccugccuauuucag

SEQ ID NO: 90041 - RNA, 21 nt, Artificial Sequence
  LRRK2 RNA guide
uauuaugcccccugccuauuu

SEQ ID NO: 90042 - RNA, 21 nt, Artificial Sequence
  LRRK2 RNA guide
ugaaauaggcagggggcauaa

SEQ ID NO: 90043 - RNA, 21 nt, Artificial Sequence
  LRRK2 RNA guide
ugacuauuaugcccccugccu

SEQ ID NO: 90044 - RNA, 21 nt, Artificial Sequence
  LRRK2 RNA guide
ugcccccugccuauuucaguc

SEQ ID NO: 90045 - RNA, 21 nt, Artificial Sequence
  LRRK2 RNA guide
ugcuuggacugaaauaggcag

SEQ ID NO: 90046 - RNA, 21 nt, Artificial Sequence
  LRRK2 RNA guide
uggacugaaauaggcaggggg

SEQ ID NO: 90047 - RNA, 21 nt, Artificial Sequence
  LRRK2 RNA guide
uggaugacuauuaugcccccu

SEQ ID NO: 90048 - RNA, 21 nt, Artificial Sequence
  LRRK2 RNA guide
uggugcuuggacugaaauagg

SEQ ID NO: 90049 - RNA, 21 nt, Artificial Sequence
  LRRK2 RNA guide
uuaccuggaugacuauuaugc

SEQ ID NO: 90050 - RNA, 21 nt, Artificial Sequence
  LRRK2 RNA guide
uuaugcccccugccuauuuca

SEQ ID NO: 90051 - RNA, 21 nt, Artificial Sequence
  LRRK2 RNA guide
uuggacugaaauaggcagggg

SEQ ID NO: 90052 - RNA, 22 nt, Artificial Sequence
  LRRK2 RNA guide
aaauaggcagggggcauaauag

SEQ ID NO: 90053 - RNA, 22 nt, Artificial Sequence
  LRRK2 RNA guide
aaguggugcuuggacugaaaua

SEQ ID NO: 90054 - RNA, 22 nt, Artificial Sequence
  LRRK2 RNA guide
aauaggcagggggcauaauagu

SEQ ID NO: 90055 - RNA, 22 nt, Artificial Sequence
  LRRK2 RNA guide
accuggaugacuauuaugcccc

SEQ ID NO: 90056 - RNA, 22 nt, Artificial Sequence
  LRRK2 RNA guide
acuauuaugcccccugccuauu

SEQ ID NO: 90057 - RNA, 22 nt, Artificial Sequence
  LRRK2 RNA guide
acugaaauaggcagggggcaua

SEQ ID NO: 90058 - RNA, 22 nt, Artificial Sequence
  LRRK2 RNA guide
aggcagggggcauaauagucau

SEQ ID NO: 90059 - RNA, 22 nt, Artificial Sequence
  LRRK2 RNA guide
agggggcauaauagucauccag

SEQ ID NO: 90060 - RNA, 22 nt, Artificial Sequence
  LRRK2 RNA guide
aguggugcuuggacugaaauag

SEQ ID NO: 90061 - RNA, 22 nt, Artificial Sequence
  LRRK2 RNA guide
auaggcagggggcauaauaguc

SEQ ID NO: 90062 - RNA, 22 nt, Artificial Sequence
  LRRK2 RNA guide
augacuauuaugcccccugccu

SEQ ID NO: 90063 - RNA, 22 nt, Artificial Sequence
  LRRK2 RNA guide
augcccccugccuauuucaguc

SEQ ID NO: 90064 - RNA, 22 nt, Artificial Sequence
  LRRK2 RNA guide
auuaugcccccugccuauuuca

SEQ ID NO: 90065 - RNA, 22 nt, Artificial Sequence
  LRRK2 RNA guide
cagggggcauaauagucaucca

SEQ ID NO: 90066 - RNA, 22 nt, Artificial Sequence
  LRRK2 RNA guide
cccccugccuauuucaguccaa

SEQ ID NO: 90067 - RNA, 22 nt, Artificial Sequence
  LRRK2 RNA guide
ccccugccuauuucaguccaag

SEQ ID NO: 90068 - RNA, 22 nt, Artificial Sequence
  LRRK2 RNA guide
cccugccuauuucaguccaagc

SEQ ID NO: 90069 - RNA, 22 nt, Artificial Sequence
  LRRK2 RNA guide
ccugccuauuucaguccaagca

SEQ ID NO: 90070 - RNA, 22 nt, Artificial Sequence
  LRRK2 RNA guide
ccuggaugacuauuaugccccc

SEQ ID NO: 90071 - RNA, 22 nt, Artificial Sequence
  LRRK2 RNA guide
ccuuaccuggaugacuauuaug

SEQ ID NO: 90072 - RNA, 22 nt, Artificial Sequence
  LRRK2 RNA guide
cuauuaugcccccugccuauuu

SEQ ID NO: 90073 - RNA, 22 nt, Artificial Sequence
  LRRK2 RNA guide
cugaaauaggcagggggcauaa

SEQ ID NO: 90074 - RNA, 22 nt, Artificial Sequence
  LRRK2 RNA guide
cuggaugacuauuaugcccccu

SEQ ID NO: 90075 - RNA, 22 nt, Artificial Sequence
  LRRK2 RNA guide
cuuaccuggaugacuauuaugc

SEQ ID NO: 90076 - RNA, 22 nt, Artificial Sequence
  LRRK2 RNA guide
cuuggacugaaauaggcagggg

SEQ ID NO: 90077 - RNA, 22 nt, Artificial Sequence
  LRRK2 RNA guide
gaaauaggcagggggcauaaua

SEQ ID NO: 90078 - RNA, 22 nt, Artificial Sequence
  LRRK2 RNA guide
gacuauuaugcccccugccuau

SEQ ID NO: 90079 - RNA, 22 nt, Artificial Sequence
  LRRK2 RNA guide
gacugaaauaggcagggggcau

SEQ ID NO: 90080 - RNA, 22 nt, Artificial Sequence
  LRRK2 RNA guide
gaugacuauuaugcccccugcc

SEQ ID NO: 90081 - RNA, 22 nt, Artificial Sequence
  LRRK2 RNA guide
gcagggggcauaauagucaucc

SEQ ID NO: 90082 - RNA, 22 nt, Artificial Sequence
  LRRK2 RNA guide
gcccccugccuauuucagucca

SEQ ID NO: 90083 - RNA, 22 nt, Artificial Sequence
  LRRK2 RNA guide
gcuuggacugaaauaggcaggg

SEQ ID NO: 90084 - RNA, 22 nt, Artificial Sequence
  LRRK2 RNA guide
ggacugaaauaggcagggggca

SEQ ID NO: 90085 - RNA, 22 nt, Artificial Sequence
  LRRK2 RNA guide
ggaugacuauuaugcccccugc

SEQ ID NO: 90086 - RNA, 22 nt, Artificial Sequence
  LRRK2 RNA guide
ggcagggggcauaauagucauc

SEQ ID NO: 90087 - RNA, 22 nt, Artificial Sequence
  LRRK2 RNA guide
ggugcuuggacugaaauaggca

SEQ ID NO: 90088 - RNA, 22 nt, Artificial Sequence
  LRRK2 RNA guide
gugcuuggacugaaauaggcag

SEQ ID NO: 90089 - RNA, 22 nt, Artificial Sequence
  LRRK2 RNA guide
guggugcuuggacugaaauagg

SEQ ID NO: 90090 - RNA, 22 nt, Artificial Sequence
  LRRK2 RNA guide
uaccuggaugacuauuaugccc

SEQ ID NO: 90091 - RNA, 22 nt, Artificial Sequence
  LRRK2 RNA guide
uaggcagggggcauaauaguca

SEQ ID NO: 90092 - RNA, 22 nt, Artificial Sequence
  LRRK2 RNA guide
uaugcccccugccuauuucagu

SEQ ID NO: 90093 - RNA, 22 nt, Artificial Sequence
  LRRK2 RNA guide
uauuaugcccccugccuauuuc

SEQ ID NO: 90094 - RNA, 22 nt, Artificial Sequence
  LRRK2 RNA guide
ugaaauaggcagggggcauaau

SEQ ID NO: 90095 - RNA, 22 nt, Artificial Sequence
  LRRK2 RNA guide
ugacuauuaugcccccugccua

SEQ ID NO: 90096 - RNA, 22 nt, Artificial Sequence
  LRRK2 RNA guide
ugcccccugccuauuucagucc

SEQ ID NO: 90097 - RNA, 22 nt, Artificial Sequence
  LRRK2 RNA guide
ugcuuggacugaaauaggcagg

SEQ ID NO: 90098 - RNA, 22 nt, Artificial Sequence
  LRRK2 RNA guide
uggacugaaauaggcagggggc

SEQ ID NO: 90099 - RNA, 22 nt, Artificial Sequence
  LRRK2 RNA guide
uggaugacuauuaugcccccug

SEQ ID NO: 90100 - RNA, 22 nt, Artificial Sequence
  LRRK2 RNA guide
uggugcuuggacugaaauaggc

SEQ ID NO: 90101 - RNA, 22 nt, Artificial Sequence
  LRRK2 RNA guide
uuaccuggaugacuauuaugcc

SEQ ID NO: 90102 - RNA, 22 nt, Artificial Sequence
  LRRK2 RNA guide
uuaugcccccugccuauuucag

SEQ ID NO: 90103 - RNA, 22 nt, Artificial Sequence
  LRRK2 RNA guide
uuggacugaaauaggcaggggg

SEQ ID NO: 90104 - RNA, 20 nt, Artificial Sequence
  LRRK2 RNA guide
aagggggcauaauagucauc

SEQ ID NO: 90105 - RNA, 20 nt, Artificial Sequence
  LRRK2 RNA guide
aaguggugcuuggacugaag

SEQ ID NO: 90106 - RNA, 20 nt, Artificial Sequence
  LRRK2 RNA guide
acuauuaugcccccuucagu

SEQ ID NO: 90107 - RNA, 20 nt, Artificial Sequence
  LRRK2 RNA guide
acugaagggggcauaauagu

SEQ ID NO: 90108 - RNA, 20 nt, Artificial Sequence
  LRRK2 RNA guide
agagcaaguggugcuuggac

SEQ ID NO: 90109 - RNA, 20 nt, Artificial Sequence
  LRRK2 RNA guide
agcaaguggugcuuggacug

SEQ ID NO: 90110 - RNA, 20 nt, Artificial Sequence
  LRRK2 RNA guide
aguggugcuuggacugaagg

SEQ ID NO: 90111 - RNA, 20 nt, Artificial Sequence
  LRRK2 RNA guide
augacuauuaugcccccuuc

SEQ ID NO: 90112 - RNA, 20 nt, Artificial Sequence
  LRRK2 RNA guide
augcccccuucaguccaagc

SEQ ID NO: 90113 - RNA, 20 nt, Artificial Sequence
  LRRK2 RNA guide
auuaugcccccuucagucca

SEQ ID NO: 90114 - RNA, 20 nt, Artificial Sequence
  LRRK2 RNA guide
caaguggugcuuggacugaa

SEQ ID NO: 90115 - RNA, 20 nt, Artificial Sequence
  LRRK2 RNA guide
cccccuucaguccaagcacc

SEQ ID NO: 90116 - RNA, 20 nt, Artificial Sequence
  LRRK2 RNA guide
ccccuucaguccaagcacca

SEQ ID NO: 90117 - RNA, 20 nt, Artificial Sequence
  LRRK2 RNA guide
cccuucaguccaagcaccac

SEQ ID NO: 90118 - RNA, 20 nt, Artificial Sequence
  LRRK2 RNA guide
ccuucaguccaagcaccacu

SEQ ID NO: 90119 - RNA, 20 nt, Artificial Sequence
  LRRK2 RNA guide
cuauuaugcccccuucaguc

SEQ ID NO: 90120 - RNA, 20 nt, Artificial Sequence
  LRRK2 RNA guide
cugaagggggcauaauaguc

SEQ ID NO: 90121 - RNA, 20 nt, Artificial Sequence
  LRRK2 RNA guide
cuuggacugaagggggcaua

SEQ ID NO: 90122 - RNA, 20 nt, Artificial Sequence
  LRRK2 RNA guide
gaagggggcauaauagucau

SEQ ID NO: 90123 - RNA, 20 nt, Artificial Sequence
  LRRK2 RNA guide
gacuauuaugcccccuucag

SEQ ID NO: 90124 - RNA, 20 nt, Artificial Sequence
  LRRK2 RNA guide
gacugaagggggcauaauag

SEQ ID NO: 90125 - RNA, 20 nt, Artificial Sequence
  LRRK2 RNA guide
gagcaaguggugcuuggacu

SEQ ID NO: 90126 - RNA, 20 nt, Artificial Sequence
  LRRK2 RNA guide
gaugacuauuaugcccccuu

SEQ ID NO: 90127 - RNA, 20 nt, Artificial Sequence
  LRRK2 RNA guide
gcaaguggugcuuggacuga

SEQ ID NO: 90128 - RNA, 20 nt, Artificial Sequence
  LRRK2 RNA guide
gcccccuucaguccaagcac

SEQ ID NO: 90129 - RNA, 20 nt, Artificial Sequence
  LRRK2 RNA guide
gcuuggacugaagggggcau

SEQ ID NO: 90130 - RNA, 20 nt, Artificial Sequence
  LRRK2 RNA guide
ggacugaagggggcauaaua

SEQ ID NO: 90131 - RNA, 20 nt, Artificial Sequence
  LRRK2 RNA guide
ggugcuuggacugaaggggg

SEQ ID NO: 90132 - RNA, 20 nt, Artificial Sequence
  LRRK2 RNA guide
gugcuuggacugaagggggc

SEQ ID NO: 90133 - RNA, 20 nt, Artificial Sequence
  LRRK2 RNA guide
guggugcuuggacugaaggg

SEQ ID NO: 90134 - RNA, 20 nt, Artificial Sequence
  LRRK2 RNA guide
uaugcccccuucaguccaag

SEQ ID NO: 90135 - RNA, 20 nt, Artificial Sequence
  LRRK2 RNA guide
uauuaugcccccuucagucc

SEQ ID NO: 90136 - RNA, 20 nt, Artificial Sequence
  LRRK2 RNA guide
ugaagggggcauaauaguca

SEQ ID NO: 90137 - RNA, 20 nt, Artificial Sequence
  LRRK2 RNA guide
ugacuauuaugcccccuuca

SEQ ID NO: 90138 - RNA, 20 nt, Artificial Sequence
  LRRK2 RNA guide
ugcccccuucaguccaagca

SEQ ID NO: 90139 - RNA, 20 nt, Artificial Sequence
  LRRK2 RNA guide
ugcuuggacugaagggggca

SEQ ID NO: 90140 - RNA, 20 nt, Artificial Sequence
  LRRK2 RNA guide
uggacugaagggggcauaau

SEQ ID NO: 90141 - RNA, 20 nt, Artificial Sequence
  LRRK2 RNA guide
uggugcuuggacugaagggg

SEQ ID NO: 90142 - RNA, 20 nt, Artificial Sequence
  LRRK2 RNA guide
uuaugcccccuucaguccaa

SEQ ID NO: 90143 - RNA, 20 nt, Artificial Sequence
  LRRK2 RNA guide
uuggacugaagggggcauaa

SEQ ID NO: 90144 - RNA, 21 nt, Artificial Sequence
  LRRK2 RNA guide
aagggggcauaauagucaucc

SEQ ID NO: 90145 - RNA, 21 nt, Artificial Sequence
  LRRK2 RNA guide
aaguggugcuuggacugaagg

SEQ ID NO: 90146 - RNA, 21 nt, Artificial Sequence
  LRRK2 RNA guide
acuauuaugcccccuucaguc

SEQ ID NO: 90147 - RNA, 21 nt, Artificial Sequence
  LRRK2 RNA guide
acugaagggggcauaauaguc

SEQ ID NO: 90148 - RNA, 21 nt, Artificial Sequence
  LRRK2 RNA guide
agagcaaguggugcuuggacu

SEQ ID NO: 90149 - RNA, 21 nt, Artificial Sequence
  LRRK2 RNA guide
agcaaguggugcuuggacuga

SEQ ID NO: 90150 - RNA, 21 nt, Artificial Sequence
  LRRK2 RNA guide
aguggugcuuggacugaaggg

SEQ ID NO: 90151 - RNA, 21 nt, Artificial Sequence
  LRRK2 RNA guide
augacuauuaugcccccuuca

SEQ ID NO: 90152 - RNA, 21 nt, Artificial Sequence
  LRRK2 RNA guide
augcccccuucaguccaagca

SEQ ID NO: 90153 - RNA, 21 nt, Artificial Sequence
  LRRK2 RNA guide
auuaugcccccuucaguccaa

SEQ ID NO: 90154 - RNA, 21 nt, Artificial Sequence
  LRRK2 RNA guide
caaguggugcuuggacugaag

SEQ ID NO: 90155 - RNA, 21 nt, Artificial Sequence
  LRRK2 RNA guide
cagagcaaguggugcuuggac

SEQ ID NO: 90156 - RNA, 21 nt, Artificial Sequence
  LRRK2 RNA guide
cccccuucaguccaagcacca

SEQ ID NO: 90157 - RNA, 21 nt, Artificial Sequence
  LRRK2 RNA guide
ccccuucaguccaagcaccac

SEQ ID NO: 90158 - RNA, 21 nt, Artificial Sequence
  LRRK2 RNA guide
cccuucaguccaagcaccacu

SEQ ID NO: 90159 - RNA, 21 nt, Artificial Sequence
  LRRK2 RNA guide
ccuucaguccaagcaccacuu

SEQ ID NO: 90160 - RNA, 21 nt, Artificial Sequence
  LRRK2 RNA guide
cuauuaugcccccuucagucc

SEQ ID NO: 90161 - RNA, 21 nt, Artificial Sequence
  LRRK2 RNA guide
cugaagggggcauaauaguca

SEQ ID NO: 90162 - RNA, 21 nt, Artificial Sequence
  LRRK2 RNA guide
cuuggacugaagggggcauaa

SEQ ID NO: 90163 - RNA, 21 nt, Artificial Sequence
  LRRK2 RNA guide
gaagggggcauaauagucauc

SEQ ID NO: 90164 - RNA, 21 nt, Artificial Sequence
  LRRK2 RNA guide
gacuauuaugcccccuucagu

SEQ ID NO: 90165 - RNA, 21 nt, Artificial Sequence
  LRRK2 RNA guide
gacugaagggggcauaauagu

SEQ ID NO: 90166 - RNA, 21 nt, Artificial Sequence
  LRRK2 RNA guide
gagcaaguggugcuuggacug

SEQ ID NO: 90167 - RNA, 21 nt, Artificial Sequence
  LRRK2 RNA guide
gaugacuauuaugcccccuuc

SEQ ID NO: 90168 - RNA, 21 nt, Artificial Sequence
  LRRK2 RNA guide
gcaaguggugcuuggacugaa

SEQ ID NO: 90169 - RNA, 21 nt, Artificial Sequence
  LRRK2 RNA guide
gcccccuucaguccaagcacc

SEQ ID NO: 90170 - RNA, 21 nt, Artificial Sequence
  LRRK2 RNA guide
gcuuggacugaagggggcaua

SEQ ID NO: 90171 - RNA, 21 nt, Artificial Sequence
  LRRK2 RNA guide
ggacugaagggggcauaauag

SEQ ID NO: 90172 - RNA, 21 nt, Artificial Sequence
  LRRK2 RNA guide
ggaugacuauuaugcccccuu

SEQ ID NO: 90173 - RNA, 21 nt, Artificial Sequence
  LRRK2 RNA guide
ggugcuuggacugaagggggc

SEQ ID NO: 90174 - RNA, 21 nt, Artificial Sequence
  LRRK2 RNA guide
gugcuuggacugaagggggca

SEQ ID NO: 90175 - RNA, 21 nt, Artificial Sequence
  LRRK2 RNA guide
guggugcuuggacugaagggg

SEQ ID NO: 90176 - RNA, 21 nt, Artificial Sequence
  LRRK2 RNA guide
uaugcccccuucaguccaagc

SEQ ID NO: 90177 - RNA, 21 nt, Artificial Sequence
  LRRK2 RNA guide
uauuaugcccccuucagucca

SEQ ID NO: 90178 - RNA, 21 nt, Artificial Sequence
  LRRK2 RNA guide
ugaagggggcauaauagucau

SEQ ID NO: 90179 - RNA, 21 nt, Artificial Sequence
  LRRK2 RNA guide
ugacuauuaugcccccuucag

SEQ ID NO: 90180 - RNA, 21 nt, Artificial Sequence
  LRRK2 RNA guide
ugcccccuucaguccaagcac

SEQ ID NO: 90181 - RNA, 21 nt, Artificial Sequence
  LRRK2 RNA guide
ugcuuggacugaagggggcau

SEQ ID NO: 90182 - RNA, 21 nt, Artificial Sequence
  LRRK2 RNA guide
uggacugaagggggcauaaua

SEQ ID NO: 90183 - RNA, 21 nt, Artificial Sequence
  LRRK2 RNA guide
uggugcuuggacugaaggggg

SEQ ID NO: 90184 - RNA, 21 nt, Artificial Sequence
  LRRK2 RNA guide
uuaugcccccuucaguccaag

SEQ ID NO: 90185 - RNA, 21 nt, Artificial Sequence
  LRRK2 RNA guide
uuggacugaagggggcauaau

SEQ ID NO: 90186 - RNA, 22 nt, Artificial Sequence
  LRRK2 RNA guide
aagggggcauaauagucaucca

SEQ ID NO: 90187 - RNA, 22 nt, Artificial Sequence
  LRRK2 RNA guide
aaguggugcuuggacugaaggg

SEQ ID NO: 90188 - RNA, 22 nt, Artificial Sequence
  LRRK2 RNA guide
acuauuaugcccccuucagucc

SEQ ID NO: 90189 - RNA, 22 nt, Artificial Sequence
  LRRK2 RNA guide
acugaagggggcauaauaguca

SEQ ID NO: 90190 - RNA, 22 nt, Artificial Sequence
  LRRK2 RNA guide
agagcaaguggugcuuggacug

SEQ ID NO: 90191 - RNA, 22 nt, Artificial Sequence
  LRRK2 RNA guide
agcaaguggugcuuggacugaa

SEQ ID NO: 90192 - RNA, 22 nt, Artificial Sequence
  LRRK2 RNA guide
aguggugcuuggacugaagggg

SEQ ID NO: 90193 - RNA, 22 nt, Artificial Sequence
  LRRK2 RNA guide
augacuauuaugcccccuucag

SEQ ID NO: 90194 - RNA, 22 nt, Artificial Sequence
  LRRK2 RNA guide
augcccccuucaguccaagcac

SEQ ID NO: 90195 - RNA, 22 nt, Artificial Sequence
  LRRK2 RNA guide
auuaugcccccuucaguccaag

SEQ ID NO: 90196 - RNA, 22 nt, Artificial Sequence
  LRRK2 RNA guide
caaguggugcuuggacugaagg

SEQ ID NO: 90197 - RNA, 22 nt, Artificial Sequence
  LRRK2 RNA guide
cagagcaaguggugcuuggacu

SEQ ID NO: 90198 - RNA, 22 nt, Artificial Sequence
  LRRK2 RNA guide
cccccuucaguccaagcaccac

SEQ ID NO: 90199 - RNA, 22 nt, Artificial Sequence
  LRRK2 RNA guide
ccccuucaguccaagcaccacu

SEQ ID NO: 90200 - RNA, 22 nt, Artificial Sequence
  LRRK2 RNA guide
cccuucaguccaagcaccacuu

SEQ ID NO: 90201 - RNA, 22 nt, Artificial Sequence
  LRRK2 RNA guide
ccuucaguccaagcaccacuug

SEQ ID NO: 90202 - RNA, 22 nt, Artificial Sequence
  LRRK2 RNA guide
cuauuaugcccccuucagucca

SEQ ID NO: 90203 - RNA, 22 nt, Artificial Sequence
  LRRK2 RNA guide
cugaagggggcauaauagucau

SEQ ID NO: 90204 - RNA, 22 nt, Artificial Sequence
  LRRK2 RNA guide
cuuggacugaagggggcauaau

SEQ ID NO: 90205 - RNA, 22 nt, Artificial Sequence
  LRRK2 RNA guide
gaagggggcauaauagucaucc

SEQ ID NO: 90206 - RNA, 22 nt, Artificial Sequence
  LRRK2 RNA guide
gacuauuaugcccccuucaguc

SEQ ID NO: 90207 - RNA, 22 nt, Artificial Sequence
  LRRK2 RNA guide
gacugaagggggcauaauaguc

SEQ ID NO: 90208 - RNA, 22 nt, Artificial Sequence
  LRRK2 RNA guide
gagcaaguggugcuuggacuga

SEQ ID NO: 90209 - RNA, 22 nt, Artificial Sequence
  LRRK2 RNA guide
gaugacuauuaugcccccuuca

SEQ ID NO: 90210 - RNA, 22 nt, Artificial Sequence
  LRRK2 RNA guide
gcaaguggugcuuggacugaag

SEQ ID NO: 90211 - RNA, 22 nt, Artificial Sequence
  LRRK2 RNA guide
gcccccuucaguccaagcacca

SEQ ID NO: 90212 - RNA, 22 nt, Artificial Sequence
  LRRK2 RNA guide
gcuuggacugaagggggcauaa

SEQ ID NO: 90213 - RNA, 22 nt, Artificial Sequence
  LRRK2 RNA guide
ggacugaagggggcauaauagu

SEQ ID NO: 90214 - RNA, 22 nt, Artificial Sequence
  LRRK2 RNA guide
ggaugacuauuaugcccccuuc

SEQ ID NO: 90215 - RNA, 22 nt, Artificial Sequence
  LRRK2 RNA guide
ggugcuuggacugaagggggca

SEQ ID NO: 90216 - RNA, 22 nt, Artificial Sequence
  LRRK2 RNA guide
gugcuuggacugaagggggcau

SEQ ID NO: 90217 - RNA, 22 nt, Artificial Sequence
  LRRK2 RNA guide
guggugcuuggacugaaggggg

SEQ ID NO: 90218 - RNA, 22 nt, Artificial Sequence
  LRRK2 RNA guide
uaugcccccuucaguccaagca

SEQ ID NO: 90219 - RNA, 22 nt, Artificial Sequence
  LRRK2 RNA guide
uauuaugcccccuucaguccaa

SEQ ID NO: 90220 - RNA, 22 nt, Artificial Sequence
  LRRK2 RNA guide
ucagagcaaguggugcuuggac

SEQ ID NO: 90221 - RNA, 22 nt, Artificial Sequence
  LRRK2 RNA guide
ugaagggggcauaauagucauc

SEQ ID NO: 90222 - RNA, 22 nt, Artificial Sequence
  LRRK2 RNA guide
ugacuauuaugcccccuucagu

SEQ ID NO: 90223 - RNA, 22 nt, Artificial Sequence
  LRRK2 RNA guide
ugcccccuucaguccaagcacc

SEQ ID NO: 90224 - RNA, 22 nt, Artificial Sequence
  LRRK2 RNA guide
ugcuuggacugaagggggcaua

SEQ ID NO: 90225 - RNA, 22 nt, Artificial Sequence
  LRRK2 RNA guide
uggacugaagggggcauaauag

SEQ ID NO: 90226 - RNA, 22 nt, Artificial Sequence
  LRRK2 RNA guide
uggaugacuauuaugcccccuu

SEQ ID NO: 90227 - RNA, 22 nt, Artificial Sequence
  LRRK2 RNA guide
uggugcuuggacugaagggggc

SEQ ID NO: 90228 - RNA, 22 nt, Artificial Sequence
  LRRK2 RNA guide
uuaugcccccuucaguccaagc

SEQ ID NO: 90229 - RNA, 22 nt, Artificial Sequence
  LRRK2 RNA guide
uuggacugaagggggcauaaua

SEQ ID NO: 90230 - RNA, 20 nt, Artificial Sequence
  LRRK2 RNA guide
aagcaccacuugcucugagu

SEQ ID NO: 90231 - RNA, 20 nt, Artificial Sequence
  LRRK2 RNA guide
aaguggugcuuggacugaaa

SEQ ID NO: 90232 - RNA, 20 nt, Artificial Sequence
  LRRK2 RNA guide
accugccacucagagcaagu

SEQ ID NO: 90233 - RNA, 20 nt, Artificial Sequence
  LRRK2 RNA guide
acucagagcaaguggugcuu

SEQ ID NO: 90234 - RNA, 20 nt, Artificial Sequence
  LRRK2 RNA guide
agcaccacuugcucugagug

SEQ ID NO: 90235 - RNA, 20 nt, Artificial Sequence
  LRRK2 RNA guide
aguccaagcaccacuugcuc

SEQ ID NO: 90236 - RNA, 20 nt, Artificial Sequence
  LRRK2 RNA guide
aguggugcuuggacugaaau

SEQ ID NO: 90237 - RNA, 20 nt, Artificial Sequence
  LRRK2 RNA guide
auuucaguccaagcaccacu

SEQ ID NO: 90238 - RNA, 20 nt, Artificial Sequence
  LRRK2 RNA guide
caagcaccacuugcucugag

SEQ ID NO: 90239 - RNA, 20 nt, Artificial Sequence
  LRRK2 RNA guide
cacucagagcaaguggugcu

SEQ ID NO: 90240 - RNA, 20 nt, Artificial Sequence
  LRRK2 RNA guide
cagagcaaguggugcuugga

SEQ ID NO: 90241 - RNA, 20 nt, Artificial Sequence
  LRRK2 RNA guide
caguccaagcaccacuugcu

SEQ ID NO: 90242 - RNA, 20 nt, Artificial Sequence
  LRRK2 RNA guide
ccaagcaccacuugcucuga

SEQ ID NO: 90243 - RNA, 20 nt, Artificial Sequence
  LRRK2 RNA guide
ccacucagagcaaguggugc

SEQ ID NO: 90244 - RNA, 20 nt, Artificial Sequence
  LRRK2 RNA guide
ccuauuucaguccaagcacc

SEQ ID NO: 90245 - RNA, 20 nt, Artificial Sequence
  LRRK2 RNA guide
ccugccacucagagcaagug

SEQ ID NO: 90246 - RNA, 20 nt, Artificial Sequence
  LRRK2 RNA guide
cuauuucaguccaagcacca

SEQ ID NO: 90247 - RNA, 20 nt, Artificial Sequence
  LRRK2 RNA guide
cucagagcaaguggugcuug

SEQ ID NO: 90248 - RNA, 20 nt, Artificial Sequence
  LRRK2 RNA guide
cugccacucagagcaagugg

SEQ ID NO: 90249 - RNA, 20 nt, Artificial Sequence
  LRRK2 RNA guide
cugccuauuucaguccaagc

SEQ ID NO: 90250 - RNA, 20 nt, Artificial Sequence
  LRRK2 RNA guide
gccacucagagcaaguggug

SEQ ID NO: 90251 - RNA, 20 nt, Artificial Sequence
  LRRK2 RNA guide
gccuauuucaguccaagcac

SEQ ID NO: 90252 - RNA, 20 nt, Artificial Sequence
  LRRK2 RNA guide
guccaagcaccacuugcucu

SEQ ID NO: 90253 - RNA, 20 nt, Artificial Sequence
  LRRK2 RNA guide
uauuucaguccaagcaccac

SEQ ID NO: 90254 - RNA, 20 nt, Artificial Sequence
  LRRK2 RNA guide
ucagagcaaguggugcuugg

SEQ ID NO: 90255 - RNA, 20 nt, Artificial Sequence
  LRRK2 RNA guide
ucaguccaagcaccacuugc

SEQ ID NO: 90256 - RNA, 20 nt, Artificial Sequence
  LRRK2 RNA guide
uccaagcaccacuugcucug

SEQ ID NO: 90257 - RNA, 20 nt, Artificial Sequence
  LRRK2 RNA guide
ugccacucagagcaaguggu

SEQ ID NO: 90258 - RNA, 20 nt, Artificial Sequence
  LRRK2 RNA guide
ugccuauuucaguccaagca

SEQ ID NO: 90259 - RNA, 20 nt, Artificial Sequence
  LRRK2 RNA guide
uucaguccaagcaccacuug

SEQ ID NO: 90260 - RNA, 20 nt, Artificial Sequence
  LRRK2 RNA guide
uuucaguccaagcaccacuu

SEQ ID NO: 90261 - RNA, 21 nt, Artificial Sequence
  LRRK2 RNA guide
aaccugccacucagagcaagu

SEQ ID NO: 90262 - RNA, 21 nt, Artificial Sequence
  LRRK2 RNA guide
aagcaccacuugcucugagug

SEQ ID NO: 90263 - RNA, 21 nt, Artificial Sequence
  LRRK2 RNA guide
aaguggugcuuggacugaaau

SEQ ID NO: 90264 - RNA, 21 nt, Artificial Sequence
  LRRK2 RNA guide
accugccacucagagcaagug

SEQ ID NO: 90265 - RNA, 21 nt, Artificial Sequence
  LRRK2 RNA guide
acucagagcaaguggugcuug

SEQ ID NO: 90266 - RNA, 21 nt, Artificial Sequence
  LRRK2 RNA guide
agcaccacuugcucugagugg

SEQ ID NO: 90267 - RNA, 21 nt, Artificial Sequence
  LRRK2 RNA guide
aguccaagcaccacuugcucu

SEQ ID NO: 90268 - RNA, 21 nt, Artificial Sequence
  LRRK2 RNA guide
auuucaguccaagcaccacuu

SEQ ID NO: 90269 - RNA, 21 nt, Artificial Sequence
  LRRK2 RNA guide
caagcaccacuugcucugagu

SEQ ID NO: 90270 - RNA, 21 nt, Artificial Sequence
  LRRK2 RNA guide
caaguggugcuuggacugaaa

SEQ ID NO: 90271 - RNA, 21 nt, Artificial Sequence
  LRRK2 RNA guide
cacucagagcaaguggugcuu

SEQ ID NO: 90272 - RNA, 21 nt, Artificial Sequence
  LRRK2 RNA guide
caguccaagcaccacuugcuc

SEQ ID NO: 90273 - RNA, 21 nt, Artificial Sequence
  LRRK2 RNA guide
ccaagcaccacuugcucugag

SEQ ID NO: 90274 - RNA, 21 nt, Artificial Sequence
  LRRK2 RNA guide
ccacucagagcaaguggugcu

SEQ ID NO: 90275 - RNA, 21 nt, Artificial Sequence
  LRRK2 RNA guide
ccuauuucaguccaagcacca

SEQ ID NO: 90276 - RNA, 21 nt, Artificial Sequence
  LRRK2 RNA guide
ccugccacucagagcaagugg

SEQ ID NO: 90277 - RNA, 21 nt, Artificial Sequence
  LRRK2 RNA guide
cuauuucaguccaagcaccac

SEQ ID NO: 90278 - RNA, 21 nt, Artificial Sequence
  LRRK2 RNA guide
cucagagcaaguggugcuugg

SEQ ID NO: 90279 - RNA, 21 nt, Artificial Sequence
  LRRK2 RNA guide
cugccacucagagcaaguggu

SEQ ID NO: 90280 - RNA, 21 nt, Artificial Sequence
  LRRK2 RNA guide
cugccuauuucaguccaagca

SEQ ID NO: 90281 - RNA, 21 nt, Artificial Sequence
  LRRK2 RNA guide
gccacucagagcaaguggugc

SEQ ID NO: 90282 - RNA, 21 nt, Artificial Sequence
  LRRK2 RNA guide
gccuauuucaguccaagcacc

SEQ ID NO: 90283 - RNA, 21 nt, Artificial Sequence
  LRRK2 RNA guide
guccaagcaccacuugcucug

SEQ ID NO: 90284 - RNA, 21 nt, Artificial Sequence
  LRRK2 RNA guide
uauuucaguccaagcaccacu

SEQ ID NO: 90285 - RNA, 21 nt, Artificial Sequence
  LRRK2 RNA guide
ucagagcaaguggugcuugga

SEQ ID NO: 90286 - RNA, 21 nt, Artificial Sequence
  LRRK2 RNA guide
ucaguccaagcaccacuugcu

SEQ ID NO: 90287 - RNA, 21 nt, Artificial Sequence
  LRRK2 RNA guide
uccaagcaccacuugcucuga

SEQ ID NO: 90288 - RNA, 21 nt, Artificial Sequence
  LRRK2 RNA guide
ugccacucagagcaaguggug

SEQ ID NO: 90289 - RNA, 21 nt, Artificial Sequence
  LRRK2 RNA guide
ugccuauuucaguccaagcac

SEQ ID NO: 90290 - RNA, 21 nt, Artificial Sequence
  LRRK2 RNA guide
uucaguccaagcaccacuugc

SEQ ID NO: 90291 - RNA, 21 nt, Artificial Sequence
  LRRK2 RNA guide
uuucaguccaagcaccacuug

SEQ ID NO: 90292 - RNA, 22 nt, Artificial Sequence
  LRRK2 RNA guide
aaccugccacucagagcaagug

SEQ ID NO: 90293 - RNA, 22 nt, Artificial Sequence
  LRRK2 RNA guide
aagcaccacuugcucugagugg

SEQ ID NO: 90294 - RNA, 22 nt, Artificial Sequence
  LRRK2 RNA guide
accugccacucagagcaagugg

SEQ ID NO: 90295 - RNA, 22 nt, Artificial Sequence
  LRRK2 RNA guide
acucagagcaaguggugcuugg

SEQ ID NO: 90296 - RNA, 22 nt, Artificial Sequence
  LRRK2 RNA guide
agcaccacuugcucugaguggc

SEQ ID NO: 90297 - RNA, 22 nt, Artificial Sequence
  LRRK2 RNA guide
aguccaagcaccacuugcucug

SEQ ID NO: 90298 - RNA, 22 nt, Artificial Sequence
  LRRK2 RNA guide
auuucaguccaagcaccacuug

SEQ ID NO: 90299 - RNA, 22 nt, Artificial Sequence
  LRRK2 RNA guide
caagcaccacuugcucugagug

SEQ ID NO: 90300 - RNA, 22 nt, Artificial Sequence
  LRRK2 RNA guide
caaguggugcuuggacugaaau

SEQ ID NO: 90301 - RNA, 22 nt, Artificial Sequence
  LRRK2 RNA guide
cacucagagcaaguggugcuug

SEQ ID NO: 90302 - RNA, 22 nt, Artificial Sequence
  LRRK2 RNA guide
caguccaagcaccacuugcucu

SEQ ID NO: 90303 - RNA, 22 nt, Artificial Sequence
  LRRK2 RNA guide
ccaagcaccacuugcucugagu

SEQ ID NO: 90304 - RNA, 22 nt, Artificial Sequence
  LRRK2 RNA guide
ccacucagagcaaguggugcuu

SEQ ID NO: 90305 - RNA, 22 nt, Artificial Sequence
  LRRK2 RNA guide
ccuauuucaguccaagcaccac

SEQ ID NO: 90306 - RNA, 22 nt, Artificial Sequence
  LRRK2 RNA guide
ccugccacucagagcaaguggu

SEQ ID NO: 90307 - RNA, 22 nt, Artificial Sequence
  LRRK2 RNA guide
cuauuucaguccaagcaccacu

SEQ ID NO: 90308 - RNA, 22 nt, Artificial Sequence
  LRRK2 RNA guide
cucagagcaaguggugcuugga

SEQ ID NO: 90309 - RNA, 22 nt, Artificial Sequence
  LRRK2 RNA guide
cugccacucagagcaaguggug

SEQ ID NO: 90310 - RNA, 22 nt, Artificial Sequence
  LRRK2 RNA guide
cugccuauuucaguccaagcac

SEQ ID NO: 90311 - RNA, 22 nt, Artificial Sequence
  LRRK2 RNA guide
gcaaguggugcuuggacugaaa

SEQ ID NO: 90312 - RNA, 22 nt, Artificial Sequence
  LRRK2 RNA guide
gccacucagagcaaguggugcu

SEQ ID NO: 90313 - RNA, 22 nt, Artificial Sequence
  LRRK2 RNA guide
gccuauuucaguccaagcacca

SEQ ID NO: 90314 - RNA, 22 nt, Artificial Sequence
  LRRK2 RNA guide
guccaagcaccacuugcucuga

SEQ ID NO: 90315 - RNA, 22 nt, Artificial Sequence
  LRRK2 RNA guide
uaaccugccacucagagcaagu

SEQ ID NO: 90316 - RNA, 22 nt, Artificial Sequence
  LRRK2 RNA guide
uauuucaguccaagcaccacuu

SEQ ID NO: 90317 - RNA, 22 nt, Artificial Sequence
  LRRK2 RNA guide
ucaguccaagcaccacuugcuc

SEQ ID NO: 90318 - RNA, 22 nt, Artificial Sequence
  LRRK2 RNA guide
uccaagcaccacuugcucugag

SEQ ID NO: 90319 - RNA, 22 nt, Artificial Sequence
  LRRK2 RNA guide
ugccacucagagcaaguggugc

SEQ ID NO: 90320 - RNA, 22 nt, Artificial Sequence
  LRRK2 RNA guide
ugccuauuucaguccaagcacc

SEQ ID NO: 90321 - RNA, 22 nt, Artificial Sequence
  LRRK2 RNA guide
uucaguccaagcaccacuugcu

SEQ ID NO: 90322 - RNA, 22 nt, Artificial Sequence
  LRRK2 RNA guide
uuucaguccaagcaccacuugc

SEQ ID NO: 90323 - RNA, 20 nt, Artificial Sequence
  LRRK2 RNA guide
aaacaccacuugcucugagu

SEQ ID NO: 90324 - RNA, 20 nt, Artificial Sequence
  LRRK2 RNA guide
aacaccacuugcucugagug

SEQ ID NO: 90325 - RNA, 20 nt, Artificial Sequence
  LRRK2 RNA guide
aagugguguuuggacugaaa

SEQ ID NO: 90326 - RNA, 20 nt, Artificial Sequence
  LRRK2 RNA guide
acucagagcaagugguguuu

SEQ ID NO: 90327 - RNA, 20 nt, Artificial Sequence
  LRRK2 RNA guide
agagcaagugguguuuggac

SEQ ID NO: 90328 - RNA, 20 nt, Artificial Sequence
  LRRK2 RNA guide
agcaagugguguuuggacug

SEQ ID NO: 90329 - RNA, 20 nt, Artificial Sequence
  LRRK2 RNA guide
aguccaaacaccacuugcuc

SEQ ID NO: 90330 - RNA, 20 nt, Artificial Sequence
  LRRK2 RNA guide
agugguguuuggacugaaau

SEQ ID NO: 90331 - RNA, 20 nt, Artificial Sequence
  LRRK2 RNA guide
auuucaguccaaacaccacu

SEQ ID NO: 90332 - RNA, 20 nt, Artificial Sequence
  LRRK2 RNA guide
caaacaccacuugcucugag

SEQ ID NO: 90333 - RNA, 20 nt, Artificial Sequence
  LRRK2 RNA guide
caagugguguuuggacugaa

SEQ ID NO: 90334 - RNA, 20 nt, Artificial Sequence
  LRRK2 RNA guide
cacucagagcaagugguguu

SEQ ID NO: 90335 - RNA, 20 nt, Artificial Sequence
  LRRK2 RNA guide
cagagcaagugguguuugga

SEQ ID NO: 90336 - RNA, 20 nt, Artificial Sequence
  LRRK2 RNA guide
caguccaaacaccacuugcu

SEQ ID NO: 90337 - RNA, 20 nt, Artificial Sequence
  LRRK2 RNA guide
ccaaacaccacuugcucuga

SEQ ID NO: 90338 - RNA, 20 nt, Artificial Sequence
  LRRK2 RNA guide
ccacucagagcaaguggugu

SEQ ID NO: 90339 - RNA, 20 nt, Artificial Sequence
  LRRK2 RNA guide
ccuauuucaguccaaacacc

SEQ ID NO: 90340 - RNA, 20 nt, Artificial Sequence
  LRRK2 RNA guide
ccugccuauuucaguccaaa

SEQ ID NO: 90341 - RNA, 20 nt, Artificial Sequence
  LRRK2 RNA guide
cuauuucaguccaaacacca

SEQ ID NO: 90342 - RNA, 20 nt, Artificial Sequence
  LRRK2 RNA guide
cucagagcaagugguguuug

SEQ ID NO: 90343 - RNA, 20 nt, Artificial Sequence
  LRRK2 RNA guide
cugccuauuucaguccaaac

SEQ ID NO: 90344 - RNA, 20 nt, Artificial Sequence
  LRRK2 RNA guide
gagcaagugguguuuggacu

SEQ ID NO: 90345 - RNA, 20 nt, Artificial Sequence
  LRRK2 RNA guide
gcaagugguguuuggacuga

SEQ ID NO: 90346 - RNA, 20 nt, Artificial Sequence
  LRRK2 RNA guide
gccuauuucaguccaaacac

SEQ ID NO: 90347 - RNA, 20 nt, Artificial Sequence
  LRRK2 RNA guide
gguguuuggacugaaauagg

SEQ ID NO: 90348 - RNA, 20 nt, Artificial Sequence
  LRRK2 RNA guide
guccaaacaccacuugcucu

SEQ ID NO: 90349 - RNA, 20 nt, Artificial Sequence
  LRRK2 RNA guide
gugguguuuggacugaaaua

SEQ ID NO: 90350 - RNA, 20 nt, Artificial Sequence
  LRRK2 RNA guide
guguuuggacugaaauaggc

SEQ ID NO: 90351 - RNA, 20 nt, Artificial Sequence
  LRRK2 RNA guide
guuuggacugaaauaggcag

SEQ ID NO: 90352 - RNA, 20 nt, Artificial Sequence
  LRRK2 RNA guide
uauuucaguccaaacaccac

SEQ ID NO: 90353 - RNA, 20 nt, Artificial Sequence
  LRRK2 RNA guide
ucagagcaagugguguuugg

SEQ ID NO: 90354 - RNA, 20 nt, Artificial Sequence
  LRRK2 RNA guide
ucaguccaaacaccacuugc

SEQ ID NO: 90355 - RNA, 20 nt, Artificial Sequence
  LRRK2 RNA guide
uccaaacaccacuugcucug

SEQ ID NO: 90356 - RNA, 20 nt, Artificial Sequence
  LRRK2 RNA guide
ugccuauuucaguccaaaca

SEQ ID NO: 90357 - RNA, 20 nt, Artificial Sequence
  LRRK2 RNA guide
ugguguuuggacugaaauag

SEQ ID NO: 90358 - RNA, 20 nt, Artificial Sequence
  LRRK2 RNA guide
uguuuggacugaaauaggca

SEQ ID NO: 90359 - RNA, 20 nt, Artificial Sequence
  LRRK2 RNA guide
uucaguccaaacaccacuug

SEQ ID NO: 90360 - RNA, 20 nt, Artificial Sequence
  LRRK2 RNA guide
uuucaguccaaacaccacuu

SEQ ID NO: 90361 - RNA, 21 nt, Artificial Sequence
  LRRK2 RNA guide
aaacaccacuugcucugagug

SEQ ID NO: 90362 - RNA, 21 nt, Artificial Sequence
  LRRK2 RNA guide
aacaccacuugcucugagugg

SEQ ID NO: 90363 - RNA, 21 nt, Artificial Sequence
  LRRK2 RNA guide
aagugguguuuggacugaaau

SEQ ID NO: 90364 - RNA, 21 nt, Artificial Sequence
  LRRK2 RNA guide
acucagagcaagugguguuug

SEQ ID NO: 90365 - RNA, 21 nt, Artificial Sequence
  LRRK2 RNA guide
agagcaagugguguuuggacu

SEQ ID NO: 90366 - RNA, 21 nt, Artificial Sequence
  LRRK2 RNA guide
agcaagugguguuuggacuga

SEQ ID NO: 90367 - RNA, 21 nt, Artificial Sequence
  LRRK2 RNA guide
aguccaaacaccacuugcucu

SEQ ID NO: 90368 - RNA, 21 nt, Artificial Sequence
  LRRK2 RNA guide
agugguguuuggacugaaaua

SEQ ID NO: 90369 - RNA, 21 nt, Artificial Sequence
  LRRK2 RNA guide
auuucaguccaaacaccacuu

SEQ ID NO: 90370 - RNA, 21 nt, Artificial Sequence
  LRRK2 RNA guide
caaacaccacuugcucugagu

SEQ ID NO: 90371 - RNA, 21 nt, Artificial Sequence
  LRRK2 RNA guide
caagugguguuuggacugaaa

SEQ ID NO: 90372 - RNA, 21 nt, Artificial Sequence
  LRRK2 RNA guide
cacucagagcaagugguguuu

SEQ ID NO: 90373 - RNA, 21 nt, Artificial Sequence
  LRRK2 RNA guide
cagagcaagugguguuuggac

SEQ ID NO: 90374 - RNA, 21 nt, Artificial Sequence
  LRRK2 RNA guide
caguccaaacaccacuugcuc

SEQ ID NO: 90375 - RNA, 21 nt, Artificial Sequence
  LRRK2 RNA guide
ccaaacaccacuugcucugag

SEQ ID NO: 90376 - RNA, 21 nt, Artificial Sequence
  LRRK2 RNA guide
ccacucagagcaagugguguu

SEQ ID NO: 90377 - RNA, 21 nt, Artificial Sequence
  LRRK2 RNA guide
cccugccuauuucaguccaaa

SEQ ID NO: 90378 - RNA, 21 nt, Artificial Sequence
  LRRK2 RNA guide
ccuauuucaguccaaacacca

SEQ ID NO: 90379 - RNA, 21 nt, Artificial Sequence
  LRRK2 RNA guide
ccugccuauuucaguccaaac

SEQ ID NO: 90380 - RNA, 21 nt, Artificial Sequence
  LRRK2 RNA guide
cuauuucaguccaaacaccac

SEQ ID NO: 90381 - RNA, 21 nt, Artificial Sequence
  LRRK2 RNA guide
cucagagcaagugguguuugg

SEQ ID NO: 90382 - RNA, 21 nt, Artificial Sequence
  LRRK2 RNA guide
cugccuauuucaguccaaaca

SEQ ID NO: 90383 - RNA, 21 nt, Artificial Sequence
  LRRK2 RNA guide
gagcaagugguguuuggacug

SEQ ID NO: 90384 - RNA, 21 nt, Artificial Sequence
  LRRK2 RNA guide
gcaagugguguuuggacugaa

SEQ ID NO: 90385 - RNA, 21 nt, Artificial Sequence
  LRRK2 RNA guide
gccacucagagcaaguggugu

SEQ ID NO: 90386 - RNA, 21 nt, Artificial Sequence
  LRRK2 RNA guide
gccuauuucaguccaaacacc

SEQ ID NO: 90387 - RNA, 21 nt, Artificial Sequence
  LRRK2 RNA guide
gguguuuggacugaaauaggc

SEQ ID NO: 90388 - RNA, 21 nt, Artificial Sequence
  LRRK2 RNA guide
guccaaacaccacuugcucug

SEQ ID NO: 90389 - RNA, 21 nt, Artificial Sequence
  LRRK2 RNA guide
gugguguuuggacugaaauag

SEQ ID NO: 90390 - RNA, 21 nt, Artificial Sequence
  LRRK2 RNA guide
guguuuggacugaaauaggca

SEQ ID NO: 90391 - RNA, 21 nt, Artificial Sequence
  LRRK2 RNA guide
guuuggacugaaauaggcagg

SEQ ID NO: 90392 - RNA, 21 nt, Artificial Sequence
  LRRK2 RNA guide
uauuucaguccaaacaccacu

SEQ ID NO: 90393 - RNA, 21 nt, Artificial Sequence
  LRRK2 RNA guide
ucagagcaagugguguuugga

SEQ ID NO: 90394 - RNA, 21 nt, Artificial Sequence
  LRRK2 RNA guide
ucaguccaaacaccacuugcu

SEQ ID NO: 90395 - RNA, 21 nt, Artificial Sequence
  LRRK2 RNA guide
uccaaacaccacuugcucuga

SEQ ID NO: 90396 - RNA, 21 nt, Artificial Sequence
  LRRK2 RNA guide
ugccuauuucaguccaaacac

SEQ ID NO: 90397 - RNA, 21 nt, Artificial Sequence
  LRRK2 RNA guide
ugguguuuggacugaaauagg

SEQ ID NO: 90398 - RNA, 21 nt, Artificial Sequence
  LRRK2 RNA guide
uguuuggacugaaauaggcag

SEQ ID NO: 90399 - RNA, 21 nt, Artificial Sequence
  LRRK2 RNA guide
uucaguccaaacaccacuugc

SEQ ID NO: 90400 - RNA, 21 nt, Artificial Sequence
  LRRK2 RNA guide
uuucaguccaaacaccacuug

SEQ ID NO: 90401 - RNA, 22 nt, Artificial Sequence
  LRRK2 RNA guide
aaacaccacuugcucugagugg

SEQ ID NO: 90402 - RNA, 22 nt, Artificial Sequence
  LRRK2 RNA guide
aacaccacuugcucugaguggc

SEQ ID NO: 90403 - RNA, 22 nt, Artificial Sequence
  LRRK2 RNA guide
aagugguguuuggacugaaaua

SEQ ID NO: 90404 - RNA, 22 nt, Artificial Sequence
  LRRK2 RNA guide
acucagagcaagugguguuugg

SEQ ID NO: 90405 - RNA, 22 nt, Artificial Sequence
  LRRK2 RNA guide
agagcaagugguguuuggacug

SEQ ID NO: 90406 - RNA, 22 nt, Artificial Sequence
  LRRK2 RNA guide
agcaagugguguuuggacugaa

SEQ ID NO: 90407 - RNA, 22 nt, Artificial Sequence
  LRRK2 RNA guide
aguccaaacaccacuugcucug

SEQ ID NO: 90408 - RNA, 22 nt, Artificial Sequence
  LRRK2 RNA guide
agugguguuuggacugaaauag

SEQ ID NO: 90409 - RNA, 22 nt, Artificial Sequence
  LRRK2 RNA guide
auuucaguccaaacaccacuug

SEQ ID NO: 90410 - RNA, 22 nt, Artificial Sequence
  LRRK2 RNA guide
caaacaccacuugcucugagug

SEQ ID NO: 90411 - RNA, 22 nt, Artificial Sequence
  LRRK2 RNA guide
caagugguguuuggacugaaau

SEQ ID NO: 90412 - RNA, 22 nt, Artificial Sequence
  LRRK2 RNA guide
cacucagagcaagugguguuug

SEQ ID NO: 90413 - RNA, 22 nt, Artificial Sequence
  LRRK2 RNA guide
cagagcaagugguguuuggacu

SEQ ID NO: 90414 - RNA, 22 nt, Artificial Sequence
  LRRK2 RNA guide
caguccaaacaccacuugcucu

SEQ ID NO: 90415 - RNA, 22 nt, Artificial Sequence
  LRRK2 RNA guide
ccaaacaccacuugcucugagu

SEQ ID NO: 90416 - RNA, 22 nt, Artificial Sequence
  LRRK2 RNA guide
ccacucagagcaagugguguuu

SEQ ID NO: 90417 - RNA, 22 nt, Artificial Sequence
  LRRK2 RNA guide
ccccugccuauuucaguccaaa

SEQ ID NO: 90418 - RNA, 22 nt, Artificial Sequence
  LRRK2 RNA guide
cccugccuauuucaguccaaac

SEQ ID NO: 90419 - RNA, 22 nt, Artificial Sequence
  LRRK2 RNA guide
ccuauuucaguccaaacaccac

SEQ ID NO: 90420 - RNA, 22 nt, Artificial Sequence
  LRRK2 RNA guide
ccugccuauuucaguccaaaca

SEQ ID NO: 90421 - RNA, 22 nt, Artificial Sequence
  LRRK2 RNA guide
cuauuucaguccaaacaccacu

SEQ ID NO: 90422 - RNA, 22 nt, Artificial Sequence
  LRRK2 RNA guide
cucagagcaagugguguuugga

SEQ ID NO: 90423 - RNA, 22 nt, Artificial Sequence
  LRRK2 RNA guide
cugccuauuucaguccaaacac

SEQ ID NO: 90424 - RNA, 22 nt, Artificial Sequence
  LRRK2 RNA guide
gagcaagugguguuuggacuga

SEQ ID NO: 90425 - RNA, 22 nt, Artificial Sequence
  LRRK2 RNA guide
gcaagugguguuuggacugaaa

SEQ ID NO: 90426 - RNA, 22 nt, Artificial Sequence
  LRRK2 RNA guide
gccacucagagcaagugguguu

SEQ ID NO: 90427 - RNA, 22 nt, Artificial Sequence
  LRRK2 RNA guide
gccuauuucaguccaaacacca

SEQ ID NO: 90428 - RNA, 22 nt, Artificial Sequence
  LRRK2 RNA guide
gguguuuggacugaaauaggca

SEQ ID NO: 90429 - RNA, 22 nt, Artificial Sequence
  LRRK2 RNA guide
guccaaacaccacuugcucuga

SEQ ID NO: 90430 - RNA, 22 nt, Artificial Sequence
  LRRK2 RNA guide
gugguguuuggacugaaauagg

SEQ ID NO: 90431 - RNA, 22 nt, Artificial Sequence
  LRRK2 RNA guide
guguuuggacugaaauaggcag

SEQ ID NO: 90432 - RNA, 22 nt, Artificial Sequence
  LRRK2 RNA guide
guuuggacugaaauaggcaggg

SEQ ID NO: 90433 - RNA, 22 nt, Artificial Sequence
  LRRK2 RNA guide
uauuucaguccaaacaccacuu

SEQ ID NO: 90434 - RNA, 22 nt, Artificial Sequence
  LRRK2 RNA guide
ucagagcaagugguguuuggac

SEQ ID NO: 90435 - RNA, 22 nt, Artificial Sequence
  LRRK2 RNA guide
ucaguccaaacaccacuugcuc

SEQ ID NO: 90436 - RNA, 22 nt, Artificial Sequence
  LRRK2 RNA guide
uccaaacaccacuugcucugag

SEQ ID NO: 90437 - RNA, 22 nt, Artificial Sequence
  LRRK2 RNA guide
ugccacucagagcaaguggugu

SEQ ID NO: 90438 - RNA, 22 nt, Artificial Sequence
  LRRK2 RNA guide
ugccuauuucaguccaaacacc

SEQ ID NO: 90439 - RNA, 22 nt, Artificial Sequence
  LRRK2 RNA guide
ugguguuuggacugaaauaggc

SEQ ID NO: 90440 - RNA, 22 nt, Artificial Sequence
  LRRK2 RNA guide
uguuuggacugaaauaggcagg

SEQ ID NO: 90441 - RNA, 22 nt, Artificial Sequence
  LRRK2 RNA guide
uucaguccaaacaccacuugcu

SEQ ID NO: 90442 - RNA, 22 nt, Artificial Sequence
  LRRK2 RNA guide
uuucaguccaaacaccacuugc

SEQ ID NO: 90443 - RNA, 20 nt, Artificial Sequence
  LRRK2 RNA guide
cacaguagcuauaauuguau

SEQ ID NO: 90444 - RNA, 20 nt, Artificial Sequence
  LRRK2 RNA guide
ccuucacaguagcuauaauu

SEQ ID NO: 90445 - RNA, 20 nt, Artificial Sequence
  LRRK2 RNA guide
cuucacaguagcuauaauug

SEQ ID NO: 90446 - RNA, 20 nt, Artificial Sequence
  LRRK2 RNA guide
gguauugagaaacuacuuua

SEQ ID NO: 90447 - RNA, 20 nt, Artificial Sequence
  LRRK2 RNA guide
ucacaguagcuauaauugua

SEQ ID NO: 90448 - RNA, 20 nt, Artificial Sequence
  LRRK2 RNA guide
ugguauugagaaacuacuuu

SEQ ID NO: 90449 - RNA, 20 nt, Artificial Sequence
  LRRK2 RNA guide
uucacaguagcuauaauugu

SEQ ID NO: 90450 - RNA, 21 nt, Artificial Sequence
  LRRK2 RNA guide
ccuucacaguagcuauaauug

SEQ ID NO: 90451 - RNA, 21 nt, Artificial Sequence
  LRRK2 RNA guide
cuucacaguagcuauaauugu

SEQ ID NO: 90452 - RNA, 21 nt, Artificial Sequence
  LRRK2 RNA guide
gugguauugagaaacuacuuu

SEQ ID NO: 90453 - RNA, 21 nt, Artificial Sequence
  LRRK2 RNA guide
uccuucacaguagcuauaauu

SEQ ID NO: 90454 - RNA, 22 nt, Artificial Sequence
  LRRK2 RNA guide
agugguauugagaaacuacuuu

SEQ ID NO: 90455 - RNA, 22 nt, Artificial Sequence
  LRRK2 RNA guide
ccuucacaguagcuauaauugu

SEQ ID NO: 90456 - RNA, 22 nt, Artificial Sequence
  LRRK2 RNA guide
cuucacaguagcuauaauugua

SEQ ID NO: 90457 - RNA, 22 nt, Artificial Sequence
  LRRK2 RNA guide
gguauugagaaacuacuuuaac

SEQ ID NO: 90458 - RNA, 22 nt, Artificial Sequence
  LRRK2 RNA guide
gugguauugagaaacuacuuua

SEQ ID NO: 90459 - RNA, 22 nt, Artificial Sequence
  LRRK2 RNA guide
uccuucacaguagcuauaauug

SEQ ID NO: 90460 - RNA, 22 nt, Artificial Sequence
  LRRK2 RNA guide
uuccuucacaguagcuauaauu

SEQ ID NO: 90461 - RNA, 20 nt, Artificial Sequence
  LRRK2 RNA guide
acacauacaauuauagcuac

SEQ ID NO: 90462 - RNA, 20 nt, Artificial Sequence
  LRRK2 RNA guide
acaguagcuauaauuguaug

SEQ ID NO: 90463 - RNA, 20 nt, Artificial Sequence
  LRRK2 RNA guide
acauacaauuauagcuacug

SEQ ID NO: 90464 - RNA, 20 nt, Artificial Sequence
  LRRK2 RNA guide
aguagcuauaauuguaugug

SEQ ID NO: 90465 - RNA, 20 nt, Artificial Sequence
  LRRK2 RNA guide
auguguuaaaguaguuucuc

SEQ ID NO: 90466 - RNA, 20 nt, Artificial Sequence
  LRRK2 RNA guide
cacauacaauuauagcuacu

SEQ ID NO: 90467 - RNA, 20 nt, Artificial Sequence
  LRRK2 RNA guide
caguagcuauaauuguaugu

SEQ ID NO: 90468 - RNA, 20 nt, Artificial Sequence
  LRRK2 RNA guide
gaaacuacuuuaacacauac

SEQ ID NO: 90469 - RNA, 20 nt, Artificial Sequence
  LRRK2 RNA guide
gagaaacuacuuuaacacau

SEQ ID NO: 90470 - RNA, 20 nt, Artificial Sequence
  LRRK2 RNA guide
guagcuauaauuguaugugu

SEQ ID NO: 90471 - RNA, 20 nt, Artificial Sequence
  LRRK2 RNA guide
guauguguuaaaguaguuuc

SEQ ID NO: 90472 - RNA, 20 nt, Artificial Sequence
  LRRK2 RNA guide
ugagaaacuacuuuaacaca

SEQ ID NO: 90473 - RNA, 20 nt, Artificial Sequence
  LRRK2 RNA guide
uguguuaaaguaguuucuca

SEQ ID NO: 90474 - RNA, 20 nt, Artificial Sequence
  LRRK2 RNA guide
uugagaaacuacuuuaacac

SEQ ID NO: 90475 - RNA, 21 nt, Artificial Sequence
  LRRK2 RNA guide
cacaguagcuauaauuguaug

SEQ ID NO: 90476 - RNA, 21 nt, Artificial Sequence
  LRRK2 RNA guide
cacauacaauuauagcuacug

SEQ ID NO: 90477 - RNA, 21 nt, Artificial Sequence
  LRRK2 RNA guide
caguagcuauaauuguaugug

SEQ ID NO: 90478 - RNA, 22 nt, Artificial Sequence
  LRRK2 RNA guide
acacauacaauuauagcuacug

SEQ ID NO: 90479 - RNA, 22 nt, Artificial Sequence
  LRRK2 RNA guide
acaguagcuauaauuguaugug

SEQ ID NO: 90480 - RNA, 22 nt, Artificial Sequence
  LRRK2 RNA guide
acauacaauuauagcuacugug

SEQ ID NO: 90481 - RNA, 22 nt, Artificial Sequence
  LRRK2 RNA guide
cacaguagcuauaauuguaugu

SEQ ID NO: 90482 - RNA, 22 nt, Artificial Sequence
  LRRK2 RNA guide
cacauacaauuauagcuacugu

SEQ ID NO: 90483 - RNA, 22 nt, Artificial Sequence
  LRRK2 RNA guide
caguagcuauaauuguaugugu

SEQ ID NO: 90484 - RNA, 22 nt, Artificial Sequence
  LRRK2 RNA guide
gagaaacuacuuuaacacauac

SEQ ID NO: 90485 - RNA, 22 nt, Artificial Sequence
  LRRK2 RNA guide
guauguguuaaaguaguuucuc

SEQ ID NO: 90486 - RNA, 22 nt, Artificial Sequence
  LRRK2 RNA guide
ucacaguagcuauaauuguaug

SEQ ID NO: 90487 - RNA, 20 nt, Artificial Sequence
  LRRK2 RNA guide
gaggauuuuuauuucugucu

SEQ ID NO: 90488 - RNA, 20 nt, Artificial Sequence
  LRRK2 RNA guide
ugaggauuuuuauuucuguc

SEQ ID NO: 90489 - RNA, 20 nt, Artificial Sequence
  LRRK2 RNA guide
aaagaguuaacugauaucca

SEQ ID NO: 90490 - RNA, 20 nt, Artificial Sequence
  LRRK2 RNA guide
aacugauauccauaauccca

SEQ ID NO: 90491 - RNA, 20 nt, Artificial Sequence
  LRRK2 RNA guide
aagaguuaacugauauccau

SEQ ID NO: 90492 - RNA, 20 nt, Artificial Sequence
  LRRK2 RNA guide
acugauauccauaaucccau

SEQ ID NO: 90493 - RNA, 20 nt, Artificial Sequence
  LRRK2 RNA guide
agaguuaacugauauccaua

SEQ ID NO: 90494 - RNA, 20 nt, Artificial Sequence
  LRRK2 RNA guide
aguuaacucuuuaaaguucc

SEQ ID NO: 90495 - RNA, 20 nt, Artificial Sequence
  LRRK2 RNA guide
auggauaucaguuaacucuu

SEQ ID NO: 90496 - RNA, 20 nt, Artificial Sequence
  LRRK2 RNA guide
augggauuauggauaucagu

SEQ ID NO: 90497 - RNA, 20 nt, Artificial Sequence
  LRRK2 RNA guide
caguuaacucuuuaaaguuc

SEQ ID NO: 90498 - RNA, 20 nt, Artificial Sequence
  LRRK2 RNA guide
cauuuuaugggauuauggau

SEQ ID NO: 90499 - RNA, 20 nt, Artificial Sequence
  LRRK2 RNA guide
gaacuuuaaagaguuaacug

SEQ ID NO: 90500 - RNA, 20 nt, Artificial Sequence
  LRRK2 RNA guide
gaguuaacugauauccauaa

SEQ ID NO: 90501 - RNA, 20 nt, Artificial Sequence
  LRRK2 RNA guide
gauuauggauaucaguuaac

SEQ ID NO: 90502 - RNA, 20 nt, Artificial Sequence
  LRRK2 RNA guide
ggaacuuuaaagaguuaacu

SEQ ID NO: 90503 - RNA, 20 nt, Artificial Sequence
  LRRK2 RNA guide
ggauaucaguuaacucuuua

SEQ ID NO: 90504 - RNA, 20 nt, Artificial Sequence
  LRRK2 RNA guide
ggauuauggauaucaguuaa

SEQ ID NO: 90505 - RNA, 20 nt, Artificial Sequence
  LRRK2 RNA guide
gggauuauggauaucaguua

SEQ ID NO: 90506 - RNA, 20 nt, Artificial Sequence
  LRRK2 RNA guide
guuaacugauauccauaauc

SEQ ID NO: 90507 - RNA, 20 nt, Artificial Sequence
  LRRK2 RNA guide
uaaagaguuaacugauaucc

SEQ ID NO: 90508 - RNA, 20 nt, Artificial Sequence
  LRRK2 RNA guide
uaacugauauccauaauccc

SEQ ID NO: 90509 - RNA, 20 nt, Artificial Sequence
  LRRK2 RNA guide
uauggauaucaguuaacucu

SEQ ID NO: 90510 - RNA, 20 nt, Artificial Sequence
  LRRK2 RNA guide
uaugggauuauggauaucag

SEQ ID NO: 90511 - RNA, 20 nt, Artificial Sequence
  LRRK2 RNA guide
uggaacuuuaaagaguuaac

SEQ ID NO: 90512 - RNA, 20 nt, Artificial Sequence
  LRRK2 RNA guide
uggauaucaguuaacucuuu

SEQ ID NO: 90513 - RNA, 20 nt, Artificial Sequence
  LRRK2 RNA guide
ugggauuauggauaucaguu

SEQ ID NO: 90514 - RNA, 20 nt, Artificial Sequence
  LRRK2 RNA guide
uuaacugauauccauaaucc

SEQ ID NO: 90515 - RNA, 20 nt, Artificial Sequence
  LRRK2 RNA guide
uuauggauaucaguuaacuc

SEQ ID NO: 90516 - RNA, 20 nt, Artificial Sequence
  LRRK2 RNA guide
uuaugggauuauggauauca

SEQ ID NO: 90517 - RNA, 20 nt, Artificial Sequence
  LRRK2 RNA guide
uuuaugggauuauggauauc

SEQ ID NO: 90518 - RNA, 21 nt, Artificial Sequence
  LRRK2 RNA guide
aacugauauccauaaucccau

SEQ ID NO: 90519 - RNA, 21 nt, Artificial Sequence
  LRRK2 RNA guide
acugauauccauaaucccaua

SEQ ID NO: 90520 - RNA, 21 nt, Artificial Sequence
  LRRK2 RNA guide
augggauuauggauaucaguu

SEQ ID NO: 90521 - RNA, 21 nt, Artificial Sequence
  LRRK2 RNA guide
caguuaacucuuuaaaguucc

SEQ ID NO: 90522 - RNA, 21 nt, Artificial Sequence
  LRRK2 RNA guide
ggaacuuuaaagaguuaacug

SEQ ID NO: 90523 - RNA, 21 nt, Artificial Sequence
  LRRK2 RNA guide
ggauuauggauaucaguuaac

SEQ ID NO: 90524 - RNA, 21 nt, Artificial Sequence
  LRRK2 RNA guide
gggauuauggauaucaguuaa

SEQ ID NO: 90525 - RNA, 21 nt, Artificial Sequence
  LRRK2 RNA guide
guuaacugauauccauaaucc

SEQ ID NO: 90526 - RNA, 21 nt, Artificial Sequence
  LRRK2 RNA guide
uaacugauauccauaauccca

SEQ ID NO: 90527 - RNA, 21 nt, Artificial Sequence
  LRRK2 RNA guide
uaugggauuauggauaucagu

SEQ ID NO: 90528 - RNA, 21 nt, Artificial Sequence
  LRRK2 RNA guide
ugggauuauggauaucaguua

SEQ ID NO: 90529 - RNA, 21 nt, Artificial Sequence
  LRRK2 RNA guide
uuaacugauauccauaauccc

SEQ ID NO: 90530 - RNA, 21 nt, Artificial Sequence
  LRRK2 RNA guide
uuaugggauuauggauaucag

SEQ ID NO: 90531 - RNA, 22 nt, Artificial Sequence
  LRRK2 RNA guide
aacugauauccauaaucccaua

SEQ ID NO: 90532 - RNA, 22 nt, Artificial Sequence
  LRRK2 RNA guide
acugauauccauaaucccauaa

SEQ ID NO: 90533 - RNA, 22 nt, Artificial Sequence
  LRRK2 RNA guide
aguuaacugauauccauaaucc

SEQ ID NO: 90534 - RNA, 22 nt, Artificial Sequence
  LRRK2 RNA guide
augggauuauggauaucaguua

SEQ ID NO: 90535 - RNA, 22 nt, Artificial Sequence
  LRRK2 RNA guide
cacauuuuaugggauuauggau

SEQ ID NO: 90536 - RNA, 22 nt, Artificial Sequence
  LRRK2 RNA guide
caguuaacucuuuaaaguucca

SEQ ID NO: 90537 - RNA, 22 nt, Artificial Sequence
  LRRK2 RNA guide
gaguuaacugauauccauaauc

SEQ ID NO: 90538 - RNA, 22 nt, Artificial Sequence
  LRRK2 RNA guide
gauuauggauaucaguuaacuc

SEQ ID NO: 90539 - RNA, 22 nt, Artificial Sequence
  LRRK2 RNA guide
ggaacuuuaaagaguuaacuga

SEQ ID NO: 90540 - RNA, 22 nt, Artificial Sequence
  LRRK2 RNA guide
ggauuauggauaucaguuaacu

SEQ ID NO: 90541 - RNA, 22 nt, Artificial Sequence
  LRRK2 RNA guide
gggauuauggauaucaguuaac

SEQ ID NO: 90542 - RNA, 22 nt, Artificial Sequence
  LRRK2 RNA guide
guuaacugauauccauaauccc

SEQ ID NO: 90543 - RNA, 22 nt, Artificial Sequence
  LRRK2 RNA guide
uaacugauauccauaaucccau

SEQ ID NO: 90544 - RNA, 22 nt, Artificial Sequence
  LRRK2 RNA guide
uaugggauuauggauaucaguu

SEQ ID NO: 90545 - RNA, 22 nt, Artificial Sequence
  LRRK2 RNA guide
ucaguuaacucuuuaaaguucc

SEQ ID NO: 90546 - RNA, 22 nt, Artificial Sequence
  LRRK2 RNA guide
uggaacuuuaaagaguuaacug

SEQ ID NO: 90547 - RNA, 22 nt, Artificial Sequence
  LRRK2 RNA guide
ugggauuauggauaucaguuaa

SEQ ID NO: 90548 - RNA, 22 nt, Artificial Sequence
  LRRK2 RNA guide
uuaacugauauccauaauccca

SEQ ID NO: 90549 - RNA, 22 nt, Artificial Sequence
  LRRK2 RNA guide
uuaugggauuauggauaucagu

SEQ ID NO: 90550 - RNA, 22 nt, Artificial Sequence
  LRRK2 RNA guide
uuuaugggauuauggauaucag

SEQ ID NO: 90551 - RNA, 20 nt, Artificial Sequence
  LRRK2 RNA guide
aauugauauccauaauccca

SEQ ID NO: 90552 - RNA, 20 nt, Artificial Sequence
  LRRK2 RNA guide
augggauuauggauaucaau

SEQ ID NO: 90553 - RNA, 20 nt, Artificial Sequence
  LRRK2 RNA guide
auugauauccauaaucccau

SEQ ID NO: 90554 - RNA, 20 nt, Artificial Sequence
  LRRK2 RNA guide
gggauuauggauaucaauua

SEQ ID NO: 90555 - RNA, 20 nt, Artificial Sequence
  LRRK2 RNA guide
uaauugauauccauaauccc

SEQ ID NO: 90556 - RNA, 20 nt, Artificial Sequence
  LRRK2 RNA guide
uaugggauuauggauaucaa

SEQ ID NO: 90557 - RNA, 20 nt, Artificial Sequence
  LRRK2 RNA guide
ugggauuauggauaucaauu

SEQ ID NO: 90558 - RNA, 22 nt, Artificial Sequence
  LRRK2 RNA guide
gggauuauggauaucaauuaac

SEQ ID NO: 90559 - RNA, 22 nt, Artificial Sequence
  LRRK2 RNA guide
guuaauugauauccauaauccc

SEQ ID NO: 90560 - RNA, 20 nt, Artificial Sequence
  LRRK2 RNA guide
acuagagagcauccauaaag

SEQ ID NO: 90561 - RNA, 20 nt, Artificial Sequence
  LRRK2 RNA guide
agagagcauccauaaagauc

SEQ ID NO: 90562 - RNA, 20 nt, Artificial Sequence
  LRRK2 RNA guide
agagcauccauaaagaucaa

SEQ ID NO: 90563 - RNA, 20 nt, Artificial Sequence
  LRRK2 RNA guide
agagcuugaucuuuauggau

SEQ ID NO: 90564 - RNA, 20 nt, Artificial Sequence
  LRRK2 RNA guide
agaugcuuuacuagagagca

SEQ ID NO: 90565 - RNA, 20 nt, Artificial Sequence
  LRRK2 RNA guide
agcauccauaaagaucaagc

SEQ ID NO: 90566 - RNA, 20 nt, Artificial Sequence
  LRRK2 RNA guide
agcuugaucuuuauggaugc

SEQ ID NO: 90567 - RNA, 20 nt, Artificial Sequence
  LRRK2 RNA guide
auccauaaagaucaagcucu

SEQ ID NO: 90568 - RNA, 20 nt, Artificial Sequence
  LRRK2 RNA guide
aucuuuauggaugcucucua

SEQ ID NO: 90569 - RNA, 20 nt, Artificial Sequence
  LRRK2 RNA guide
aucuuugagagcuugaucuu

SEQ ID NO: 90570 - RNA, 20 nt, Artificial Sequence
  LRRK2 RNA guide
augcuuuacuagagagcauc

SEQ ID NO: 90571 - RNA, 20 nt, Artificial Sequence
  LRRK2 RNA guide
auggaugcucucuaguaaag

SEQ ID NO: 90572 - RNA, 20 nt, Artificial Sequence
  LRRK2 RNA guide
cauaaagaucaagcucucaa

SEQ ID NO: 90573 - RNA, 20 nt, Artificial Sequence
  LRRK2 RNA guide
cauccauaaagaucaagcuc

SEQ ID NO: 90574 - RNA, 20 nt, Artificial Sequence
  LRRK2 RNA guide
caucuuugagagcuugaucu

SEQ ID NO: 90575 - RNA, 20 nt, Artificial Sequence
  LRRK2 RNA guide
ccauaaagaucaagcucuca

SEQ ID NO: 90576 - RNA, 20 nt, Artificial Sequence
  LRRK2 RNA guide
cuagagagcauccauaaaga

SEQ ID NO: 90577 - RNA, 20 nt, Artificial Sequence
  LRRK2 RNA guide
cuugaucuuuauggaugcuc

SEQ ID NO: 90578 - RNA, 20 nt, Artificial Sequence
  LRRK2 RNA guide
cuuuacuagagagcauccau

SEQ ID NO: 90579 - RNA, 20 nt, Artificial Sequence
  LRRK2 RNA guide
cuuuauggaugcucucuagu

SEQ ID NO: 90580 - RNA, 20 nt, Artificial Sequence
  LRRK2 RNA guide
cuuugagagcuugaucuuua

SEQ ID NO: 90581 - RNA, 20 nt, Artificial Sequence
  LRRK2 RNA guide
gagagcauccauaaagauca

SEQ ID NO: 90582 - RNA, 20 nt, Artificial Sequence
  LRRK2 RNA guide
gagagcuugaucuuuaugga

SEQ ID NO: 90583 - RNA, 20 nt, Artificial Sequence
  LRRK2 RNA guide
gagcauccauaaagaucaag

SEQ ID NO: 90584 - RNA, 20 nt, Artificial Sequence
  LRRK2 RNA guide
gagcuugaucuuuauggaug

SEQ ID NO: 90585 - RNA, 20 nt, Artificial Sequence
  LRRK2 RNA guide
gaucuuuauggaugcucucu

SEQ ID NO: 90586 - RNA, 20 nt, Artificial Sequence
  LRRK2 RNA guide
gaugcuuuacuagagagcau

SEQ ID NO: 90587 - RNA, 20 nt, Artificial Sequence
  LRRK2 RNA guide
gcauccauaaagaucaagcu

SEQ ID NO: 90588 - RNA, 20 nt, Artificial Sequence
  LRRK2 RNA guide
gcaucuuugagagcuugauc

SEQ ID NO: 90589 - RNA, 20 nt, Artificial Sequence
  LRRK2 RNA guide
gcuugaucuuuauggaugcu

SEQ ID NO: 90590 - RNA, 20 nt, Artificial Sequence
  LRRK2 RNA guide
gcuuuacuagagagcaucca

SEQ ID NO: 90591 - RNA, 20 nt, Artificial Sequence
  LRRK2 RNA guide
uacuagagagcauccauaaa

SEQ ID NO: 90592 - RNA, 20 nt, Artificial Sequence
  LRRK2 RNA guide
uagagagcauccauaaagau

SEQ ID NO: 90593 - RNA, 20 nt, Artificial Sequence
  LRRK2 RNA guide
uagaugcuuuacuagagagc

SEQ ID NO: 90594 - RNA, 20 nt, Artificial Sequence
  LRRK2 RNA guide
uauggaugcucucuaguaaa

SEQ ID NO: 90595 - RNA, 20 nt, Artificial Sequence
  LRRK2 RNA guide
uccauaaagaucaagcucuc

SEQ ID NO: 90596 - RNA, 20 nt, Artificial Sequence
  LRRK2 RNA guide
ucuuuauggaugcucucuag

SEQ ID NO: 90597 - RNA, 20 nt, Artificial Sequence
  LRRK2 RNA guide
ucuuugagagcuugaucuuu

SEQ ID NO: 90598 - RNA, 20 nt, Artificial Sequence
  LRRK2 RNA guide
ugagagcuugaucuuuaugg

SEQ ID NO: 90599 - RNA, 20 nt, Artificial Sequence
  LRRK2 RNA guide
ugaucuuuauggaugcucuc

SEQ ID NO: 90600 - RNA, 20 nt, Artificial Sequence
  LRRK2 RNA guide
ugcuuuacuagagagcaucc

SEQ ID NO: 90601 - RNA, 20 nt, Artificial Sequence
  LRRK2 RNA guide
uuacuagagagcauccauaa

SEQ ID NO: 90602 - RNA, 20 nt, Artificial Sequence
  LRRK2 RNA guide
uuauggaugcucucuaguaa

SEQ ID NO: 90603 - RNA, 20 nt, Artificial Sequence
  LRRK2 RNA guide
uugagagcuugaucuuuaug

SEQ ID NO: 90604 - RNA, 20 nt, Artificial Sequence
  LRRK2 RNA guide
uugaucuuuauggaugcucu

SEQ ID NO: 90605 - RNA, 20 nt, Artificial Sequence
  LRRK2 RNA guide
uuuacuagagagcauccaua

SEQ ID NO: 90606 - RNA, 20 nt, Artificial Sequence
  LRRK2 RNA guide
uuuauggaugcucucuagua

SEQ ID NO: 90607 - RNA, 20 nt, Artificial Sequence
  LRRK2 RNA guide
uuugagagcuugaucuuuau

SEQ ID NO: 90608 - RNA, 21 nt, Artificial Sequence
  LRRK2 RNA guide
acuagagagcauccauaaaga

SEQ ID NO: 90609 - RNA, 21 nt, Artificial Sequence
  LRRK2 RNA guide
agagagcauccauaaagauca

SEQ ID NO: 90610 - RNA, 21 nt, Artificial Sequence
  LRRK2 RNA guide
agagcauccauaaagaucaag

SEQ ID NO: 90611 - RNA, 21 nt, Artificial Sequence
  LRRK2 RNA guide
agagcuugaucuuuauggaug

SEQ ID NO: 90612 - RNA, 21 nt, Artificial Sequence
  LRRK2 RNA guide
agaugcuuuacuagagagcau

SEQ ID NO: 90613 - RNA, 21 nt, Artificial Sequence
  LRRK2 RNA guide
agcauccauaaagaucaagcu

SEQ ID NO: 90614 - RNA, 21 nt, Artificial Sequence
  LRRK2 RNA guide
agcaucuuugagagcuugauc

SEQ ID NO: 90615 - RNA, 21 nt, Artificial Sequence
  LRRK2 RNA guide
agcuugaucuuuauggaugcu

SEQ ID NO: 90616 - RNA, 21 nt, Artificial Sequence
  LRRK2 RNA guide
auagaugcuuuacuagagagc

SEQ ID NO: 90617 - RNA, 21 nt, Artificial Sequence
  LRRK2 RNA guide
auccauaaagaucaagcucuc

SEQ ID NO: 90618 - RNA, 21 nt, Artificial Sequence
  LRRK2 RNA guide
aucuuuauggaugcucucuag

SEQ ID NO: 90619 - RNA, 21 nt, Artificial Sequence
  LRRK2 RNA guide
aucuuugagagcuugaucuuu

SEQ ID NO: 90620 - RNA, 21 nt, Artificial Sequence
  LRRK2 RNA guide
augcuuuacuagagagcaucc

SEQ ID NO: 90621 - RNA, 21 nt, Artificial Sequence
  LRRK2 RNA guide
auggaugcucucuaguaaagc

SEQ ID NO: 90622 - RNA, 21 nt, Artificial Sequence
  LRRK2 RNA guide
cauaaagaucaagcucucaaa

SEQ ID NO: 90623 - RNA, 21 nt, Artificial Sequence
  LRRK2 RNA guide
cauccauaaagaucaagcucu

SEQ ID NO: 90624 - RNA, 21 nt, Artificial Sequence
  LRRK2 RNA guide
caucuuugagagcuugaucuu

SEQ ID NO: 90625 - RNA, 21 nt, Artificial Sequence
  LRRK2 RNA guide
ccauaaagaucaagcucucaa

SEQ ID NO: 90626 - RNA, 21 nt, Artificial Sequence
  LRRK2 RNA guide
cuagagagcauccauaaagau

SEQ ID NO: 90627 - RNA, 21 nt, Artificial Sequence
  LRRK2 RNA guide
cuugaucuuuauggaugcucu

SEQ ID NO: 90628 - RNA, 21 nt, Artificial Sequence
  LRRK2 RNA guide
cuuuacuagagagcauccaua

SEQ ID NO: 90629 - RNA, 21 nt, Artificial Sequence
  LRRK2 RNA guide
cuuuauggaugcucucuagua

SEQ ID NO: 90630 - RNA, 21 nt, Artificial Sequence
  LRRK2 RNA guide
cuuugagagcuugaucuuuau

SEQ ID NO: 90631 - RNA, 21 nt, Artificial Sequence
  LRRK2 RNA guide
gagagcauccauaaagaucaa

SEQ ID NO: 90632 - RNA, 21 nt, Artificial Sequence
  LRRK2 RNA guide
gagagcuugaucuuuauggau

SEQ ID NO: 90633 - RNA, 21 nt, Artificial Sequence
  LRRK2 RNA guide
gagcauccauaaagaucaagc

SEQ ID NO: 90634 - RNA, 21 nt, Artificial Sequence
  LRRK2 RNA guide
gagcuugaucuuuauggaugc

SEQ ID NO: 90635 - RNA, 21 nt, Artificial Sequence
  LRRK2 RNA guide
gaucuuuauggaugcucucua

SEQ ID NO: 90636 - RNA, 21 nt, Artificial Sequence
  LRRK2 RNA guide
gaugcuuuacuagagagcauc

SEQ ID NO: 90637 - RNA, 21 nt, Artificial Sequence
  LRRK2 RNA guide
gcauccauaaagaucaagcuc

SEQ ID NO: 90638 - RNA, 21 nt, Artificial Sequence
  LRRK2 RNA guide
gcaucuuugagagcuugaucu

SEQ ID NO: 90639 - RNA, 21 nt, Artificial Sequence
  LRRK2 RNA guide
gcuugaucuuuauggaugcuc

SEQ ID NO: 90640 - RNA, 21 nt, Artificial Sequence
  LRRK2 RNA guide
gcuuuacuagagagcauccau

SEQ ID NO: 90641 - RNA, 21 nt, Artificial Sequence
  LRRK2 RNA guide
uacuagagagcauccauaaag

SEQ ID NO: 90642 - RNA, 21 nt, Artificial Sequence
  LRRK2 RNA guide
uagagagcauccauaaagauc

SEQ ID NO: 90643 - RNA, 21 nt, Artificial Sequence
  LRRK2 RNA guide
uagaugcuuuacuagagagca

SEQ ID NO: 90644 - RNA, 21 nt, Artificial Sequence
  LRRK2 RNA guide
uauggaugcucucuaguaaag

SEQ ID NO: 90645 - RNA, 21 nt, Artificial Sequence
  LRRK2 RNA guide
uccauaaagaucaagcucuca

SEQ ID NO: 90646 - RNA, 21 nt, Artificial Sequence
  LRRK2 RNA guide
ucuuuauggaugcucucuagu

SEQ ID NO: 90647 - RNA, 21 nt, Artificial Sequence
  LRRK2 RNA guide
ucuuugagagcuugaucuuua

SEQ ID NO: 90648 - RNA, 21 nt, Artificial Sequence
  LRRK2 RNA guide
ugagagcuugaucuuuaugga

SEQ ID NO: 90649 - RNA, 21 nt, Artificial Sequence
  LRRK2 RNA guide
ugaucuuuauggaugcucucu

SEQ ID NO: 90650 - RNA, 21 nt, Artificial Sequence
  LRRK2 RNA guide
ugcuuuacuagagagcaucca

SEQ ID NO: 90651 - RNA, 21 nt, Artificial Sequence
  LRRK2 RNA guide
uuacuagagagcauccauaaa

SEQ ID NO: 90652 - RNA, 21 nt, Artificial Sequence
  LRRK2 RNA guide
uuauggaugcucucuaguaaa

SEQ ID NO: 90653 - RNA, 21 nt, Artificial Sequence
  LRRK2 RNA guide
uugagagcuugaucuuuaugg

SEQ ID NO: 90654 - RNA, 21 nt, Artificial Sequence
  LRRK2 RNA guide
uugaucuuuauggaugcucuc

SEQ ID NO: 90655 - RNA, 21 nt, Artificial Sequence
  LRRK2 RNA guide
uuuacuagagagcauccauaa

SEQ ID NO: 90656 - RNA, 21 nt, Artificial Sequence
  LRRK2 RNA guide
uuuauggaugcucucuaguaa

SEQ ID NO: 90657 - RNA, 21 nt, Artificial Sequence
  LRRK2 RNA guide
uuugagagcuugaucuuuaug

SEQ ID NO: 90658 - RNA, 22 nt, Artificial Sequence
  LRRK2 RNA guide
acuagagagcauccauaaagau

SEQ ID NO: 90659 - RNA, 22 nt, Artificial Sequence
  LRRK2 RNA guide
agagagcauccauaaagaucaa

SEQ ID NO: 90660 - RNA, 22 nt, Artificial Sequence
  LRRK2 RNA guide
agagcauccauaaagaucaagc

SEQ ID NO: 90661 - RNA, 22 nt, Artificial Sequence
  LRRK2 RNA guide
agagcuugaucuuuauggaugc

SEQ ID NO: 90662 - RNA, 22 nt, Artificial Sequence
  LRRK2 RNA guide
agaugcuuuacuagagagcauc

SEQ ID NO: 90663 - RNA, 22 nt, Artificial Sequence
  LRRK2 RNA guide
agcauccauaaagaucaagcuc

SEQ ID NO: 90664 - RNA, 22 nt, Artificial Sequence
  LRRK2 RNA guide
agcaucuuugagagcuugaucu

SEQ ID NO: 90665 - RNA, 22 nt, Artificial Sequence
  LRRK2 RNA guide
agcuugaucuuuauggaugcuc

SEQ ID NO: 90666 - RNA, 22 nt, Artificial Sequence
  LRRK2 RNA guide
auagaugcuuuacuagagagca

SEQ ID NO: 90667 - RNA, 22 nt, Artificial Sequence
  LRRK2 RNA guide
auccauaaagaucaagcucuca

SEQ ID NO: 90668 - RNA, 22 nt, Artificial Sequence
  LRRK2 RNA guide
aucuuuauggaugcucucuagu

SEQ ID NO: 90669 - RNA, 22 nt, Artificial Sequence
  LRRK2 RNA guide
aucuuugagagcuugaucuuua

SEQ ID NO: 90670 - RNA, 22 nt, Artificial Sequence
  LRRK2 RNA guide
augcuuuacuagagagcaucca

SEQ ID NO: 90671 - RNA, 22 nt, Artificial Sequence
  LRRK2 RNA guide
auggaugcucucuaguaaagca

SEQ ID NO: 90672 - RNA, 22 nt, Artificial Sequence
  LRRK2 RNA guide
cauaaagaucaagcucucaaag

SEQ ID NO: 90673 - RNA, 22 nt, Artificial Sequence
  LRRK2 RNA guide
cauagaugcuuuacuagagagc

SEQ ID NO: 90674 - RNA, 22 nt, Artificial Sequence
  LRRK2 RNA guide
cauccauaaagaucaagcucuc

SEQ ID NO: 90675 - RNA, 22 nt, Artificial Sequence
  LRRK2 RNA guide
caucuuugagagcuugaucuuu

SEQ ID NO: 90676 - RNA, 22 nt, Artificial Sequence
  LRRK2 RNA guide
ccauaaagaucaagcucucaaa

SEQ ID NO: 90677 - RNA, 22 nt, Artificial Sequence
  LRRK2 RNA guide
cuagagagcauccauaaagauc

SEQ ID NO: 90678 - RNA, 22 nt, Artificial Sequence
  LRRK2 RNA guide
cuugaucuuuauggaugcucuc

SEQ ID NO: 90679 - RNA, 22 nt, Artificial Sequence
  LRRK2 RNA guide
cuuuacuagagagcauccauaa

SEQ ID NO: 90680 - RNA, 22 nt, Artificial Sequence
  LRRK2 RNA guide
cuuuauggaugcucucuaguaa

SEQ ID NO: 90681 - RNA, 22 nt, Artificial Sequence
  LRRK2 RNA guide
cuuugagagcuugaucuuuaug

SEQ ID NO: 90682 - RNA, 22 nt, Artificial Sequence
  LRRK2 RNA guide
gagagcauccauaaagaucaag

SEQ ID NO: 90683 - RNA, 22 nt, Artificial Sequence
  LRRK2 RNA guide
gagagcuugaucuuuauggaug

SEQ ID NO: 90684 - RNA, 22 nt, Artificial Sequence
  LRRK2 RNA guide
gagcauccauaaagaucaagcu

SEQ ID NO: 90685 - RNA, 22 nt, Artificial Sequence
  LRRK2 RNA guide
gagcaucuuugagagcuugauc

SEQ ID NO: 90686 - RNA, 22 nt, Artificial Sequence
  LRRK2 RNA guide
gagcuugaucuuuauggaugcu

SEQ ID NO: 90687 - RNA, 22 nt, Artificial Sequence
  LRRK2 RNA guide
gaucuuuauggaugcucucuag

SEQ ID NO: 90688 - RNA, 22 nt, Artificial Sequence
  LRRK2 RNA guide
gaugcuuuacuagagagcaucc

SEQ ID NO: 90689 - RNA, 22 nt, Artificial Sequence
  LRRK2 RNA guide
gcauccauaaagaucaagcucu

SEQ ID NO: 90690 - RNA, 22 nt, Artificial Sequence
  LRRK2 RNA guide
gcaucuuugagagcuugaucuu

SEQ ID NO: 90691 - RNA, 22 nt, Artificial Sequence
  LRRK2 RNA guide
gcuugaucuuuauggaugcucu

SEQ ID NO: 90692 - RNA, 22 nt, Artificial Sequence
  LRRK2 RNA guide
gcuuuacuagagagcauccaua

SEQ ID NO: 90693 - RNA, 22 nt, Artificial Sequence
  LRRK2 RNA guide
uacuagagagcauccauaaaga

SEQ ID NO: 90694 - RNA, 22 nt, Artificial Sequence
  LRRK2 RNA guide
uagagagcauccauaaagauca

SEQ ID NO: 90695 - RNA, 22 nt, Artificial Sequence
  LRRK2 RNA guide
uagaugcuuuacuagagagcau

SEQ ID NO: 90696 - RNA, 22 nt, Artificial Sequence
  LRRK2 RNA guide
uauggaugcucucuaguaaagc

SEQ ID NO: 90697 - RNA, 22 nt, Artificial Sequence
  LRRK2 RNA guide
uccauaaagaucaagcucucaa

SEQ ID NO: 90698 - RNA, 22 nt, Artificial Sequence
  LRRK2 RNA guide
ucuuuauggaugcucucuagua

SEQ ID NO: 90699 - RNA, 22 nt, Artificial Sequence
  LRRK2 RNA guide
ucuuugagagcuugaucuuuau

SEQ ID NO: 90700 - RNA, 22 nt, Artificial Sequence
  LRRK2 RNA guide
ugagagcuugaucuuuauggau

SEQ ID NO: 90701 - RNA, 22 nt, Artificial Sequence
  LRRK2 RNA guide
ugaucuuuauggaugcucucua

SEQ ID NO: 90702 - RNA, 22 nt, Artificial Sequence
  LRRK2 RNA guide
ugcuuuacuagagagcauccau

SEQ ID NO: 90703 - RNA, 22 nt, Artificial Sequence
  LRRK2 RNA guide
uuacuagagagcauccauaaag

SEQ ID NO: 90704 - RNA, 22 nt, Artificial Sequence
  LRRK2 RNA guide
uuauggaugcucucuaguaaag

SEQ ID NO: 90705 - RNA, 22 nt, Artificial Sequence
  LRRK2 RNA guide
uugagagcuugaucuuuaugga

SEQ ID NO: 90706 - RNA, 22 nt, Artificial Sequence
  LRRK2 RNA guide
uugaucuuuauggaugcucucu

SEQ ID NO: 90707 - RNA, 22 nt, Artificial Sequence
  LRRK2 RNA guide
uuuacuagagagcauccauaaa

SEQ ID NO: 90708 - RNA, 22 nt, Artificial Sequence
  LRRK2 RNA guide
uuuauggaugcucucuaguaaa

SEQ ID NO: 90709 - RNA, 22 nt, Artificial Sequence
  LRRK2 RNA guide
uuugagagcuugaucuuuaugg

SEQ ID NO: 90710 - RNA, 20 nt, Artificial Sequence
  LRRK2 RNA guide
aaggaugcucucuaguaaag

SEQ ID NO: 90711 - RNA, 20 nt, Artificial Sequence
  LRRK2 RNA guide
acuagagagcauccuuaaag

SEQ ID NO: 90712 - RNA, 20 nt, Artificial Sequence
  LRRK2 RNA guide
agagagcauccuuaaagauc

SEQ ID NO: 90713 - RNA, 20 nt, Artificial Sequence
  LRRK2 RNA guide
agagcauccuuaaagaucaa

SEQ ID NO: 90714 - RNA, 20 nt, Artificial Sequence
  LRRK2 RNA guide
agagcuugaucuuuaaggau

SEQ ID NO: 90715 - RNA, 20 nt, Artificial Sequence
  LRRK2 RNA guide
agcauccuuaaagaucaagc

SEQ ID NO: 90716 - RNA, 20 nt, Artificial Sequence
  LRRK2 RNA guide
agcuugaucuuuaaggaugc

SEQ ID NO: 90717 - RNA, 20 nt, Artificial Sequence
  LRRK2 RNA guide
auccuuaaagaucaagcucu

SEQ ID NO: 90718 - RNA, 20 nt, Artificial Sequence
  LRRK2 RNA guide
aucuuuaaggaugcucucua

SEQ ID NO: 90719 - RNA, 20 nt, Artificial Sequence
  LRRK2 RNA guide
cauccuuaaagaucaagcuc

SEQ ID NO: 90720 - RNA, 20 nt, Artificial Sequence
  LRRK2 RNA guide
ccuuaaagaucaagcucuca

SEQ ID NO: 90721 - RNA, 20 nt, Artificial Sequence
  LRRK2 RNA guide
cuagagagcauccuuaaaga

SEQ ID NO: 90722 - RNA, 20 nt, Artificial Sequence
  LRRK2 RNA guide
cuuaaagaucaagcucucaa

SEQ ID NO: 90723 - RNA, 20 nt, Artificial Sequence
  LRRK2 RNA guide
cuugaucuuuaaggaugcuc

SEQ ID NO: 90724 - RNA, 20 nt, Artificial Sequence
  LRRK2 RNA guide
cuuuaaggaugcucucuagu

SEQ ID NO: 90725 - RNA, 20 nt, Artificial Sequence
  LRRK2 RNA guide
cuuuacuagagagcauccuu

SEQ ID NO: 90726 - RNA, 20 nt, Artificial Sequence
  LRRK2 RNA guide
gagagcauccuuaaagauca

SEQ ID NO: 90727 - RNA, 20 nt, Artificial Sequence
  LRRK2 RNA guide
gagagcuugaucuuuaagga

SEQ ID NO: 90728 - RNA, 20 nt, Artificial Sequence
  LRRK2 RNA guide
gagcauccuuaaagaucaag

SEQ ID NO: 90729 - RNA, 20 nt, Artificial Sequence
  LRRK2 RNA guide
gagcuugaucuuuaaggaug

SEQ ID NO: 90730 - RNA, 20 nt, Artificial Sequence
  LRRK2 RNA guide
gaucuuuaaggaugcucucu

SEQ ID NO: 90731 - RNA, 20 nt, Artificial Sequence
  LRRK2 RNA guide
gcauccuuaaagaucaagcu

SEQ ID NO: 90732 - RNA, 20 nt, Artificial Sequence
  LRRK2 RNA guide
gcuugaucuuuaaggaugcu

SEQ ID NO: 90733 - RNA, 20 nt, Artificial Sequence
  LRRK2 RNA guide
gcuuuacuagagagcauccu

SEQ ID NO: 90734 - RNA, 20 nt, Artificial Sequence
  LRRK2 RNA guide
uaaggaugcucucuaguaaa

SEQ ID NO: 90735 - RNA, 20 nt, Artificial Sequence
  LRRK2 RNA guide
uacuagagagcauccuuaaa

SEQ ID NO: 90736 - RNA, 20 nt, Artificial Sequence
  LRRK2 RNA guide
uagagagcauccuuaaagau

SEQ ID NO: 90737 - RNA, 20 nt, Artificial Sequence
  LRRK2 RNA guide
uccuuaaagaucaagcucuc

SEQ ID NO: 90738 - RNA, 20 nt, Artificial Sequence
  LRRK2 RNA guide
ucuuuaaggaugcucucuag

SEQ ID NO: 90739 - RNA, 20 nt, Artificial Sequence
  LRRK2 RNA guide
ugagagcuugaucuuuaagg

SEQ ID NO: 90740 - RNA, 20 nt, Artificial Sequence
  LRRK2 RNA guide
ugaucuuuaaggaugcucuc

SEQ ID NO: 90741 - RNA, 20 nt, Artificial Sequence
  LRRK2 RNA guide
uuaaggaugcucucuaguaa

SEQ ID NO: 90742 - RNA, 20 nt, Artificial Sequence
  LRRK2 RNA guide
uuacuagagagcauccuuaa

SEQ ID NO: 90743 - RNA, 20 nt, Artificial Sequence
  LRRK2 RNA guide
uugagagcuugaucuuuaag

SEQ ID NO: 90744 - RNA, 20 nt, Artificial Sequence
  LRRK2 RNA guide
uugaucuuuaaggaugcucu

SEQ ID NO: 90745 - RNA, 20 nt, Artificial Sequence
  LRRK2 RNA guide
uuuaaggaugcucucuagua

SEQ ID NO: 90746 - RNA, 20 nt, Artificial Sequence
  LRRK2 RNA guide
uuuacuagagagcauccuua

SEQ ID NO: 90747 - RNA, 20 nt, Artificial Sequence
  LRRK2 RNA guide
uuugagagcuugaucuuuaa

SEQ ID NO: 90748 - RNA, 21 nt, Artificial Sequence
  LRRK2 RNA guide
aaggaugcucucuaguaaagc

SEQ ID NO: 90749 - RNA, 21 nt, Artificial Sequence
  LRRK2 RNA guide
acuagagagcauccuuaaaga

SEQ ID NO: 90750 - RNA, 21 nt, Artificial Sequence
  LRRK2 RNA guide
agagagcauccuuaaagauca

SEQ ID NO: 90751 - RNA, 21 nt, Artificial Sequence
  LRRK2 RNA guide
agagcauccuuaaagaucaag

SEQ ID NO: 90752 - RNA, 21 nt, Artificial Sequence
  LRRK2 RNA guide
agagcuugaucuuuaaggaug

SEQ ID NO: 90753 - RNA, 21 nt, Artificial Sequence
  LRRK2 RNA guide
agcauccuuaaagaucaagcu

SEQ ID NO: 90754 - RNA, 21 nt, Artificial Sequence
  LRRK2 RNA guide
agcuugaucuuuaaggaugcu

SEQ ID NO: 90755 - RNA, 21 nt, Artificial Sequence
  LRRK2 RNA guide
auccuuaaagaucaagcucuc

SEQ ID NO: 90756 - RNA, 21 nt, Artificial Sequence
  LRRK2 RNA guide
aucuuuaaggaugcucucuag

SEQ ID NO: 90757 - RNA, 21 nt, Artificial Sequence
  LRRK2 RNA guide
cauccuuaaagaucaagcucu

SEQ ID NO: 90758 - RNA, 21 nt, Artificial Sequence
  LRRK2 RNA guide
ccuuaaagaucaagcucucaa

SEQ ID NO: 90759 - RNA, 21 nt, Artificial Sequence
  LRRK2 RNA guide
cuagagagcauccuuaaagau

SEQ ID NO: 90760 - RNA, 21 nt, Artificial Sequence
  LRRK2 RNA guide
cuuaaagaucaagcucucaaa

SEQ ID NO: 90761 - RNA, 21 nt, Artificial Sequence
  LRRK2 RNA guide
cuugaucuuuaaggaugcucu

SEQ ID NO: 90762 - RNA, 21 nt, Artificial Sequence
  LRRK2 RNA guide
cuuuaaggaugcucucuagua

SEQ ID NO: 90763 - RNA, 21 nt, Artificial Sequence
  LRRK2 RNA guide
cuuuacuagagagcauccuua

SEQ ID NO: 90764 - RNA, 21 nt, Artificial Sequence
  LRRK2 RNA guide
cuuugagagcuugaucuuuaa

SEQ ID NO: 90765 - RNA, 21 nt, Artificial Sequence
  LRRK2 RNA guide
gagagcauccuuaaagaucaa

SEQ ID NO: 90766 - RNA, 21 nt, Artificial Sequence
  LRRK2 RNA guide
gagagcuugaucuuuaaggau

SEQ ID NO: 90767 - RNA, 21 nt, Artificial Sequence
  LRRK2 RNA guide
gagcauccuuaaagaucaagc

SEQ ID NO: 90768 - RNA, 21 nt, Artificial Sequence
  LRRK2 RNA guide
gagcuugaucuuuaaggaugc

SEQ ID NO: 90769 - RNA, 21 nt, Artificial Sequence
  LRRK2 RNA guide
gaucuuuaaggaugcucucua

SEQ ID NO: 90770 - RNA, 21 nt, Artificial Sequence
  LRRK2 RNA guide
gcauccuuaaagaucaagcuc

SEQ ID NO: 90771 - RNA, 21 nt, Artificial Sequence
  LRRK2 RNA guide
gcuugaucuuuaaggaugcuc

SEQ ID NO: 90772 - RNA, 21 nt, Artificial Sequence
  LRRK2 RNA guide
gcuuuacuagagagcauccuu

SEQ ID NO: 90773 - RNA, 21 nt, Artificial Sequence
  LRRK2 RNA guide
uaaggaugcucucuaguaaag

SEQ ID NO: 90774 - RNA, 21 nt, Artificial Sequence
  LRRK2 RNA guide
uacuagagagcauccuuaaag

SEQ ID NO: 90775 - RNA, 21 nt, Artificial Sequence
  LRRK2 RNA guide
uagagagcauccuuaaagauc

SEQ ID NO: 90776 - RNA, 21 nt, Artificial Sequence
  LRRK2 RNA guide
uccuuaaagaucaagcucuca

SEQ ID NO: 90777 - RNA, 21 nt, Artificial Sequence
  LRRK2 RNA guide
ucuuuaaggaugcucucuagu

SEQ ID NO: 90778 - RNA, 21 nt, Artificial Sequence
  LRRK2 RNA guide
ugagagcuugaucuuuaagga

SEQ ID NO: 90779 - RNA, 21 nt, Artificial Sequence
  LRRK2 RNA guide
ugaucuuuaaggaugcucucu

SEQ ID NO: 90780 - RNA, 21 nt, Artificial Sequence
  LRRK2 RNA guide
ugcuuuacuagagagcauccu

SEQ ID NO: 90781 - RNA, 21 nt, Artificial Sequence
  LRRK2 RNA guide
uuaaggaugcucucuaguaaa

SEQ ID NO: 90782 - RNA, 21 nt, Artificial Sequence
  LRRK2 RNA guide
uuacuagagagcauccuuaaa

SEQ ID NO: 90783 - RNA, 21 nt, Artificial Sequence
  LRRK2 RNA guide
uugagagcuugaucuuuaagg

SEQ ID NO: 90784 - RNA, 21 nt, Artificial Sequence
  LRRK2 RNA guide
uugaucuuuaaggaugcucuc

SEQ ID NO: 90785 - RNA, 21 nt, Artificial Sequence
  LRRK2 RNA guide
uuuaaggaugcucucuaguaa

SEQ ID NO: 90786 - RNA, 21 nt, Artificial Sequence
  LRRK2 RNA guide
uuuacuagagagcauccuuaa

SEQ ID NO: 90787 - RNA, 21 nt, Artificial Sequence
  LRRK2 RNA guide
uuugagagcuugaucuuuaag

SEQ ID NO: 90788 - RNA, 22 nt, Artificial Sequence
  LRRK2 RNA guide
aaggaugcucucuaguaaagca

SEQ ID NO: 90789 - RNA, 22 nt, Artificial Sequence
  LRRK2 RNA guide
acuagagagcauccuuaaagau

SEQ ID NO: 90790 - RNA, 22 nt, Artificial Sequence
  LRRK2 RNA guide
agagagcauccuuaaagaucaa

SEQ ID NO: 90791 - RNA, 22 nt, Artificial Sequence
  LRRK2 RNA guide
agagcauccuuaaagaucaagc

SEQ ID NO: 90792 - RNA, 22 nt, Artificial Sequence
  LRRK2 RNA guide
agagcuugaucuuuaaggaugc

SEQ ID NO: 90793 - RNA, 22 nt, Artificial Sequence
  LRRK2 RNA guide
agcauccuuaaagaucaagcuc

SEQ ID NO: 90794 - RNA, 22 nt, Artificial Sequence
  LRRK2 RNA guide
agcuugaucuuuaaggaugcuc

SEQ ID NO: 90795 - RNA, 22 nt, Artificial Sequence
  LRRK2 RNA guide
auccuuaaagaucaagcucuca

SEQ ID NO: 90796 - RNA, 22 nt, Artificial Sequence
  LRRK2 RNA guide
aucuuuaaggaugcucucuagu

SEQ ID NO: 90797 - RNA, 22 nt, Artificial Sequence
  LRRK2 RNA guide
augcuuuacuagagagcauccu

SEQ ID NO: 90798 - RNA, 22 nt, Artificial Sequence
  LRRK2 RNA guide
cauccuuaaagaucaagcucuc

SEQ ID NO: 90799 - RNA, 22 nt, Artificial Sequence
  LRRK2 RNA guide
ccuuaaagaucaagcucucaaa

SEQ ID NO: 90800 - RNA, 22 nt, Artificial Sequence
  LRRK2 RNA guide
cuagagagcauccuuaaagauc

SEQ ID NO: 90801 - RNA, 22 nt, Artificial Sequence
  LRRK2 RNA guide
cuuaaagaucaagcucucaaag

SEQ ID NO: 90802 - RNA, 22 nt, Artificial Sequence
  LRRK2 RNA guide
cuugaucuuuaaggaugcucuc

SEQ ID NO: 90803 - RNA, 22 nt, Artificial Sequence
  LRRK2 RNA guide
cuuuaaggaugcucucuaguaa

SEQ ID NO: 90804 - RNA, 22 nt, Artificial Sequence
  LRRK2 RNA guide
cuuuacuagagagcauccuuaa

SEQ ID NO: 90805 - RNA, 22 nt, Artificial Sequence
  LRRK2 RNA guide
cuuugagagcuugaucuuuaag

SEQ ID NO: 90806 - RNA, 22 nt, Artificial Sequence
  LRRK2 RNA guide
gagagcauccuuaaagaucaag

SEQ ID NO: 90807 - RNA, 22 nt, Artificial Sequence
  LRRK2 RNA guide
gagagcuugaucuuuaaggaug

SEQ ID NO: 90808 - RNA, 22 nt, Artificial Sequence
  LRRK2 RNA guide
gagcauccuuaaagaucaagcu

SEQ ID NO: 90809 - RNA, 22 nt, Artificial Sequence
  LRRK2 RNA guide
gagcuugaucuuuaaggaugcu

SEQ ID NO: 90810 - RNA, 22 nt, Artificial Sequence
  LRRK2 RNA guide
gaucuuuaaggaugcucucuag

SEQ ID NO: 90811 - RNA, 22 nt, Artificial Sequence
  LRRK2 RNA guide
gcauccuuaaagaucaagcucu

SEQ ID NO: 90812 - RNA, 22 nt, Artificial Sequence
  LRRK2 RNA guide
gcuugaucuuuaaggaugcucu

SEQ ID NO: 90813 - RNA, 22 nt, Artificial Sequence
  LRRK2 RNA guide
gcuuuacuagagagcauccuua

SEQ ID NO: 90814 - RNA, 22 nt, Artificial Sequence
  LRRK2 RNA guide
uaaggaugcucucuaguaaagc

SEQ ID NO: 90815 - RNA, 22 nt, Artificial Sequence
  LRRK2 RNA guide
uacuagagagcauccuuaaaga

SEQ ID NO: 90816 - RNA, 22 nt, Artificial Sequence
  LRRK2 RNA guide
uagagagcauccuuaaagauca

SEQ ID NO: 90817 - RNA, 22 nt, Artificial Sequence
  LRRK2 RNA guide
uccuuaaagaucaagcucucaa

SEQ ID NO: 90818 - RNA, 22 nt, Artificial Sequence
  LRRK2 RNA guide
ucuuuaaggaugcucucuagua

SEQ ID NO: 90819 - RNA, 22 nt, Artificial Sequence
  LRRK2 RNA guide
ucuuugagagcuugaucuuuaa

SEQ ID NO: 90820 - RNA, 22 nt, Artificial Sequence
  LRRK2 RNA guide
ugagagcuugaucuuuaaggau

SEQ ID NO: 90821 - RNA, 22 nt, Artificial Sequence
  LRRK2 RNA guide
ugaucuuuaaggaugcucucua

SEQ ID NO: 90822 - RNA, 22 nt, Artificial Sequence
  LRRK2 RNA guide
ugcuuuacuagagagcauccuu

SEQ ID NO: 90823 - RNA, 22 nt, Artificial Sequence
  LRRK2 RNA guide
uuaaggaugcucucuaguaaag

SEQ ID NO: 90824 - RNA, 22 nt, Artificial Sequence
  LRRK2 RNA guide
uuacuagagagcauccuuaaag

SEQ ID NO: 90825 - RNA, 22 nt, Artificial Sequence
  LRRK2 RNA guide
uugagagcuugaucuuuaagga

SEQ ID NO: 90826 - RNA, 22 nt, Artificial Sequence
  LRRK2 RNA guide
uugaucuuuaaggaugcucucu

SEQ ID NO: 90827 - RNA, 22 nt, Artificial Sequence
  LRRK2 RNA guide
uuuaaggaugcucucuaguaaa

SEQ ID NO: 90828 - RNA, 22 nt, Artificial Sequence
  LRRK2 RNA guide
uuuacuagagagcauccuuaaa

SEQ ID NO: 90829 - RNA, 22 nt, Artificial Sequence
  LRRK2 RNA guide
uuugagagcuugaucuuuaagg

SEQ ID NO: 90830 - RNA, 20 nt, Artificial Sequence
  LRRK2 RNA guide
aagaaggcacuacaguauga

SEQ ID NO: 90831 - RNA, 20 nt, Artificial Sequence
  LRRK2 RNA guide
aaggcacuacaguaugaaug

SEQ ID NO: 90832 - RNA, 20 nt, Artificial Sequence
  LRRK2 RNA guide
acaguaugaaugaacaacga

SEQ ID NO: 90833 - RNA, 20 nt, Artificial Sequence
  LRRK2 RNA guide
acuacaguaugaaugaacaa

SEQ ID NO: 90834 - RNA, 20 nt, Artificial Sequence
  LRRK2 RNA guide
acuguagugccuucuucuau

SEQ ID NO: 90835 - RNA, 20 nt, Artificial Sequence
  LRRK2 RNA guide
agaagaaggcacuacaguau

SEQ ID NO: 90836 - RNA, 20 nt, Artificial Sequence
  LRRK2 RNA guide
agaaggcacuacaguaugaa

SEQ ID NO: 90837 - RNA, 20 nt, Artificial Sequence
  LRRK2 RNA guide
aggcacuacaguaugaauga

SEQ ID NO: 90838 - RNA, 20 nt, Artificial Sequence
  LRRK2 RNA guide
auacuguagugccuucuucu

SEQ ID NO: 90839 - RNA, 20 nt, Artificial Sequence
  LRRK2 RNA guide
auagaagaaggcacuacagu

SEQ ID NO: 90840 - RNA, 20 nt, Artificial Sequence
  LRRK2 RNA guide
auauuccucguuguucauuc

SEQ ID NO: 90841 - RNA, 20 nt, Artificial Sequence
  LRRK2 RNA guide
auucauacuguagugccuuc

SEQ ID NO: 90842 - RNA, 20 nt, Artificial Sequence
  LRRK2 RNA guide
auuccucguuguucauucau

SEQ ID NO: 90843 - RNA, 20 nt, Artificial Sequence
  LRRK2 RNA guide
cacuacaguaugaaugaaca

SEQ ID NO: 90844 - RNA, 20 nt, Artificial Sequence
  LRRK2 RNA guide
caguaugaaugaacaacgag

SEQ ID NO: 90845 - RNA, 20 nt, Artificial Sequence
  LRRK2 RNA guide
cauacuguagugccuucuuc

SEQ ID NO: 90846 - RNA, 20 nt, Artificial Sequence
  LRRK2 RNA guide
cauucauacuguagugccuu

SEQ ID NO: 90847 - RNA, 20 nt, Artificial Sequence
  LRRK2 RNA guide
ccucguuguucauucauacu

SEQ ID NO: 90848 - RNA, 20 nt, Artificial Sequence
  LRRK2 RNA guide
cguuguucauucauacugua

SEQ ID NO: 90849 - RNA, 20 nt, Artificial Sequence
  LRRK2 RNA guide
cuacaguaugaaugaacaac

SEQ ID NO: 90850 - RNA, 20 nt, Artificial Sequence
  LRRK2 RNA guide
cucguuguucauucauacug

SEQ ID NO: 90851 - RNA, 20 nt, Artificial Sequence
  LRRK2 RNA guide
cuguagugccuucuucuauu

SEQ ID NO: 90852 - RNA, 20 nt, Artificial Sequence
  LRRK2 RNA guide
gaagaaggcacuacaguaug

SEQ ID NO: 90853 - RNA, 20 nt, Artificial Sequence
  LRRK2 RNA guide
gaaggcacuacaguaugaau

SEQ ID NO: 90854 - RNA, 20 nt, Artificial Sequence
  LRRK2 RNA guide
gaauagaagaaggcacuaca

SEQ ID NO: 90855 - RNA, 20 nt, Artificial Sequence
  LRRK2 RNA guide
gcacuacaguaugaaugaac

SEQ ID NO: 90856 - RNA, 20 nt, Artificial Sequence
  LRRK2 RNA guide
ggaauagaagaaggcacuac

SEQ ID NO: 90857 - RNA, 20 nt, Artificial Sequence
  LRRK2 RNA guide
ggcacuacaguaugaaugaa

SEQ ID NO: 90858 - RNA, 20 nt, Artificial Sequence
  LRRK2 RNA guide
gggaauagaagaaggcacua

SEQ ID NO: 90859 - RNA, 20 nt, Artificial Sequence
  LRRK2 RNA guide
ggggaauagaagaaggcacu

SEQ ID NO: 90860 - RNA, 20 nt, Artificial Sequence
  LRRK2 RNA guide
gggggaauagaagaaggcac

SEQ ID NO: 90861 - RNA, 20 nt, Artificial Sequence
  LRRK2 RNA guide
guucauucauacuguagugc

SEQ ID NO: 90862 - RNA, 20 nt, Artificial Sequence
  LRRK2 RNA guide
guuguucauucauacuguag

SEQ ID NO: 90863 - RNA, 20 nt, Artificial Sequence
  LRRK2 RNA guide
uacaguaugaaugaacaacg

SEQ ID NO: 90864 - RNA, 20 nt, Artificial Sequence
  LRRK2 RNA guide
uacuguagugccuucuucua

SEQ ID NO: 90865 - RNA, 20 nt, Artificial Sequence
  LRRK2 RNA guide
uagaagaaggcacuacagua

SEQ ID NO: 90866 - RNA, 20 nt, Artificial Sequence
  LRRK2 RNA guide
uauuccucguuguucauuca

SEQ ID NO: 90867 - RNA, 20 nt, Artificial Sequence
  LRRK2 RNA guide
ucauacuguagugccuucuu

SEQ ID NO: 90868 - RNA, 20 nt, Artificial Sequence
  LRRK2 RNA guide
ucauucauacuguagugccu

SEQ ID NO: 90869 - RNA, 20 nt, Artificial Sequence
  LRRK2 RNA guide
uccucguuguucauucauac

SEQ ID NO: 90870 - RNA, 20 nt, Artificial Sequence
  LRRK2 RNA guide
ucguuguucauucauacugu

SEQ ID NO: 90871 - RNA, 20 nt, Artificial Sequence
  LRRK2 RNA guide
ugggggaauagaagaaggca

SEQ ID NO: 90872 - RNA, 20 nt, Artificial Sequence
  LRRK2 RNA guide
uguucauucauacuguagug

SEQ ID NO: 90873 - RNA, 20 nt, Artificial Sequence
  LRRK2 RNA guide
uucauacuguagugccuucu

SEQ ID NO: 90874 - RNA, 20 nt, Artificial Sequence
  LRRK2 RNA guide
uucauucauacuguagugcc

SEQ ID NO: 90875 - RNA, 20 nt, Artificial Sequence
  LRRK2 RNA guide
uuccucguuguucauucaua

SEQ ID NO: 90876 - RNA, 20 nt, Artificial Sequence
  LRRK2 RNA guide
uuguucauucauacuguagu

SEQ ID NO: 90877 - RNA, 21 nt, Artificial Sequence
  LRRK2 RNA guide
aagaaggcacuacaguaugaa

SEQ ID NO: 90878 - RNA, 21 nt, Artificial Sequence
  LRRK2 RNA guide
aaggcacuacaguaugaauga

SEQ ID NO: 90879 - RNA, 21 nt, Artificial Sequence
  LRRK2 RNA guide
aauagaagaaggcacuacagu

SEQ ID NO: 90880 - RNA, 21 nt, Artificial Sequence
  LRRK2 RNA guide
acaguaugaaugaacaacgag

SEQ ID NO: 90881 - RNA, 21 nt, Artificial Sequence
  LRRK2 RNA guide
acuacaguaugaaugaacaac

SEQ ID NO: 90882 - RNA, 21 nt, Artificial Sequence
  LRRK2 RNA guide
acuguagugccuucuucuauu

SEQ ID NO: 90883 - RNA, 21 nt, Artificial Sequence
  LRRK2 RNA guide
agaagaaggcacuacaguaug

SEQ ID NO: 90884 - RNA, 21 nt, Artificial Sequence
  LRRK2 RNA guide
agaaggcacuacaguaugaau

SEQ ID NO: 90885 - RNA, 21 nt, Artificial Sequence
  LRRK2 RNA guide
aggcacuacaguaugaaugaa

SEQ ID NO: 90886 - RNA, 21 nt, Artificial Sequence
  LRRK2 RNA guide
auacuguagugccuucuucua

SEQ ID NO: 90887 - RNA, 21 nt, Artificial Sequence
  LRRK2 RNA guide
auagaagaaggcacuacagua

SEQ ID NO: 90888 - RNA, 21 nt, Artificial Sequence
  LRRK2 RNA guide
auauuccucguuguucauuca

SEQ ID NO: 90889 - RNA, 21 nt, Artificial Sequence
  LRRK2 RNA guide
auucauacuguagugccuucu

SEQ ID NO: 90890 - RNA, 21 nt, Artificial Sequence
  LRRK2 RNA guide
auuccucguuguucauucaua

SEQ ID NO: 90891 - RNA, 21 nt, Artificial Sequence
  LRRK2 RNA guide
cacuacaguaugaaugaacaa

SEQ ID NO: 90892 - RNA, 21 nt, Artificial Sequence
  LRRK2 RNA guide
caguaugaaugaacaacgagg

SEQ ID NO: 90893 - RNA, 21 nt, Artificial Sequence
  LRRK2 RNA guide
cauacuguagugccuucuucu

SEQ ID NO: 90894 - RNA, 21 nt, Artificial Sequence
  LRRK2 RNA guide
cauauuccucguuguucauuc

SEQ ID NO: 90895 - RNA, 21 nt, Artificial Sequence
  LRRK2 RNA guide
cauucauacuguagugccuuc

SEQ ID NO: 90896 - RNA, 21 nt, Artificial Sequence
  LRRK2 RNA guide
ccucguuguucauucauacug

SEQ ID NO: 90897 - RNA, 21 nt, Artificial Sequence
  LRRK2 RNA guide
cguuguucauucauacuguag

SEQ ID NO: 90898 - RNA, 21 nt, Artificial Sequence
  LRRK2 RNA guide
cuacaguaugaaugaacaacg

SEQ ID NO: 90899 - RNA, 21 nt, Artificial Sequence
  LRRK2 RNA guide
cucguuguucauucauacugu

SEQ ID NO: 90900 - RNA, 21 nt, Artificial Sequence
  LRRK2 RNA guide
cuguagugccuucuucuauuc

SEQ ID NO: 90901 - RNA, 21 nt, Artificial Sequence
  LRRK2 RNA guide
gaagaaggcacuacaguauga

SEQ ID NO: 90902 - RNA, 21 nt, Artificial Sequence
  LRRK2 RNA guide
gaaggcacuacaguaugaaug

SEQ ID NO: 90903 - RNA, 21 nt, Artificial Sequence
  LRRK2 RNA guide
gaauagaagaaggcacuacag

SEQ ID NO: 90904 - RNA, 21 nt, Artificial Sequence
  LRRK2 RNA guide
gcacuacaguaugaaugaaca

SEQ ID NO: 90905 - RNA, 21 nt, Artificial Sequence
  LRRK2 RNA guide
ggaauagaagaaggcacuaca

SEQ ID NO: 90906 - RNA, 21 nt, Artificial Sequence
  LRRK2 RNA guide
ggcacuacaguaugaaugaac

SEQ ID NO: 90907 - RNA, 21 nt, Artificial Sequence
  LRRK2 RNA guide
gggaauagaagaaggcacuac

SEQ ID NO: 90908 - RNA, 21 nt, Artificial Sequence
  LRRK2 RNA guide
ggggaauagaagaaggcacua

SEQ ID NO: 90909 - RNA, 21 nt, Artificial Sequence
  LRRK2 RNA guide
gggggaauagaagaaggcacu

SEQ ID NO: 90910 - RNA, 21 nt, Artificial Sequence
  LRRK2 RNA guide
gugggggaauagaagaaggca

SEQ ID NO: 90911 - RNA, 21 nt, Artificial Sequence
  LRRK2 RNA guide
guucauucauacuguagugcc

SEQ ID NO: 90912 - RNA, 21 nt, Artificial Sequence
  LRRK2 RNA guide
guuguucauucauacuguagu

SEQ ID NO: 90913 - RNA, 21 nt, Artificial Sequence
  LRRK2 RNA guide
uacaguaugaaugaacaacga

SEQ ID NO: 90914 - RNA, 21 nt, Artificial Sequence
  LRRK2 RNA guide
uacuguagugccuucuucuau

SEQ ID NO: 90915 - RNA, 21 nt, Artificial Sequence
  LRRK2 RNA guide
uagaagaaggcacuacaguau

SEQ ID NO: 90916 - RNA, 21 nt, Artificial Sequence
  LRRK2 RNA guide
uauuccucguuguucauucau

SEQ ID NO: 90917 - RNA, 21 nt, Artificial Sequence
  LRRK2 RNA guide
ucauacuguagugccuucuuc

SEQ ID NO: 90918 - RNA, 21 nt, Artificial Sequence
  LRRK2 RNA guide
ucauucauacuguagugccuu

SEQ ID NO: 90919 - RNA, 21 nt, Artificial Sequence
  LRRK2 RNA guide
uccucguuguucauucauacu

SEQ ID NO: 90920 - RNA, 21 nt, Artificial Sequence
  LRRK2 RNA guide
ucguuguucauucauacugua

SEQ ID NO: 90921 - RNA, 21 nt, Artificial Sequence
  LRRK2 RNA guide
ugggggaauagaagaaggcac

SEQ ID NO: 90922 - RNA, 21 nt, Artificial Sequence
  LRRK2 RNA guide
uguucauucauacuguagugc

SEQ ID NO: 90923 - RNA, 21 nt, Artificial Sequence
  LRRK2 RNA guide
uucauacuguagugccuucuu

SEQ ID NO: 90924 - RNA, 21 nt, Artificial Sequence
  LRRK2 RNA guide
uucauucauacuguagugccu

SEQ ID NO: 90925 - RNA, 21 nt, Artificial Sequence
  LRRK2 RNA guide
uuccucguuguucauucauac

SEQ ID NO: 90926 - RNA, 21 nt, Artificial Sequence
  LRRK2 RNA guide
uuguucauucauacuguagug

SEQ ID NO: 90927 - RNA, 22 nt, Artificial Sequence
  LRRK2 RNA guide
aagaaggcacuacaguaugaau

SEQ ID NO: 90928 - RNA, 22 nt, Artificial Sequence
  LRRK2 RNA guide
aaggcacuacaguaugaaugaa

SEQ ID NO: 90929 - RNA, 22 nt, Artificial Sequence
  LRRK2 RNA guide
aauagaagaaggcacuacagua

SEQ ID NO: 90930 - RNA, 22 nt, Artificial Sequence
  LRRK2 RNA guide
acaguaugaaugaacaacgagg

SEQ ID NO: 90931 - RNA, 22 nt, Artificial Sequence
  LRRK2 RNA guide
acauauuccucguuguucauuc

SEQ ID NO: 90932 - RNA, 22 nt, Artificial Sequence
  LRRK2 RNA guide
acuacaguaugaaugaacaacg

SEQ ID NO: 90933 - RNA, 22 nt, Artificial Sequence
  LRRK2 RNA guide
acuguagugccuucuucuauuc

SEQ ID NO: 90934 - RNA, 22 nt, Artificial Sequence
  LRRK2 RNA guide
agaagaaggcacuacaguauga

SEQ ID NO: 90935 - RNA, 22 nt, Artificial Sequence
  LRRK2 RNA guide
agaaggcacuacaguaugaaug

SEQ ID NO: 90936 - RNA, 22 nt, Artificial Sequence
  LRRK2 RNA guide
aggcacuacaguaugaaugaac

SEQ ID NO: 90937 - RNA, 22 nt, Artificial Sequence
  LRRK2 RNA guide
agugggggaauagaagaaggca

SEQ ID NO: 90938 - RNA, 22 nt, Artificial Sequence
  LRRK2 RNA guide
auacuguagugccuucuucuau

SEQ ID NO: 90939 - RNA, 22 nt, Artificial Sequence
  LRRK2 RNA guide
auagaagaaggcacuacaguau

SEQ ID NO: 90940 - RNA, 22 nt, Artificial Sequence
  LRRK2 RNA guide
auauuccucguuguucauucau

SEQ ID NO: 90941 - RNA, 22 nt, Artificial Sequence
  LRRK2 RNA guide
auucauacuguagugccuucuu

SEQ ID NO: 90942 - RNA, 22 nt, Artificial Sequence
  LRRK2 RNA guide
auuccucguuguucauucauac

SEQ ID NO: 90943 - RNA, 22 nt, Artificial Sequence
  LRRK2 RNA guide
cacuacaguaugaaugaacaac

SEQ ID NO: 90944 - RNA, 22 nt, Artificial Sequence
  LRRK2 RNA guide
caguaugaaugaacaacgagga

SEQ ID NO: 90945 - RNA, 22 nt, Artificial Sequence
  LRRK2 RNA guide
cauacuguagugccuucuucua

SEQ ID NO: 90946 - RNA, 22 nt, Artificial Sequence
  LRRK2 RNA guide
cauauuccucguuguucauuca

SEQ ID NO: 90947 - RNA, 22 nt, Artificial Sequence
  LRRK2 RNA guide
cauucauacuguagugccuucu

SEQ ID NO: 90948 - RNA, 22 nt, Artificial Sequence
  LRRK2 RNA guide
ccucguuguucauucauacugu

SEQ ID NO: 90949 - RNA, 22 nt, Artificial Sequence
  LRRK2 RNA guide
cguuguucauucauacuguagu

SEQ ID NO: 90950 - RNA, 22 nt, Artificial Sequence
  LRRK2 RNA guide
cuacaguaugaaugaacaacga

SEQ ID NO: 90951 - RNA, 22 nt, Artificial Sequence
  LRRK2 RNA guide
cucguuguucauucauacugua

SEQ ID NO: 90952 - RNA, 22 nt, Artificial Sequence
  LRRK2 RNA guide
cuguagugccuucuucuauucc

SEQ ID NO: 90953 - RNA, 22 nt, Artificial Sequence
  LRRK2 RNA guide
gaagaaggcacuacaguaugaa

SEQ ID NO: 90954 - RNA, 22 nt, Artificial Sequence
  LRRK2 RNA guide
gaaggcacuacaguaugaauga

SEQ ID NO: 90955 - RNA, 22 nt, Artificial Sequence
  LRRK2 RNA guide
gaauagaagaaggcacuacagu

SEQ ID NO: 90956 - RNA, 22 nt, Artificial Sequence
  LRRK2 RNA guide
gcacuacaguaugaaugaacaa

SEQ ID NO: 90957 - RNA, 22 nt, Artificial Sequence
  LRRK2 RNA guide
ggaauagaagaaggcacuacag

SEQ ID NO: 90958 - RNA, 22 nt, Artificial Sequence
  LRRK2 RNA guide
ggcacuacaguaugaaugaaca

SEQ ID NO: 90959 - RNA, 22 nt, Artificial Sequence
  LRRK2 RNA guide
gggaauagaagaaggcacuaca

SEQ ID NO: 90960 - RNA, 22 nt, Artificial Sequence
  LRRK2 RNA guide
ggggaauagaagaaggcacuac

SEQ ID NO: 90961 - RNA, 22 nt, Artificial Sequence
  LRRK2 RNA guide
gggggaauagaagaaggcacua

SEQ ID NO: 90962 - RNA, 22 nt, Artificial Sequence
  LRRK2 RNA guide
gugggggaauagaagaaggcac

SEQ ID NO: 90963 - RNA, 22 nt, Artificial Sequence
  LRRK2 RNA guide
guucauucauacuguagugccu

SEQ ID NO: 90964 - RNA, 22 nt, Artificial Sequence
  LRRK2 RNA guide
guuguucauucauacuguagug

SEQ ID NO: 90965 - RNA, 22 nt, Artificial Sequence
  LRRK2 RNA guide
uacaguaugaaugaacaacgag

SEQ ID NO: 90966 - RNA, 22 nt, Artificial Sequence
  LRRK2 RNA guide
uacuguagugccuucuucuauu

SEQ ID NO: 90967 - RNA, 22 nt, Artificial Sequence
  LRRK2 RNA guide
uagaagaaggcacuacaguaug

SEQ ID NO: 90968 - RNA, 22 nt, Artificial Sequence
  LRRK2 RNA guide
uauuccucguuguucauucaua

SEQ ID NO: 90969 - RNA, 22 nt, Artificial Sequence
  LRRK2 RNA guide
ucauacuguagugccuucuucu

SEQ ID NO: 90970 - RNA, 22 nt, Artificial Sequence
  LRRK2 RNA guide
ucauucauacuguagugccuuc

SEQ ID NO: 90971 - RNA, 22 nt, Artificial Sequence
  LRRK2 RNA guide
uccucguuguucauucauacug

SEQ ID NO: 90972 - RNA, 22 nt, Artificial Sequence
  LRRK2 RNA guide
ucguuguucauucauacuguag

SEQ ID NO: 90973 - RNA, 22 nt, Artificial Sequence
  LRRK2 RNA guide
ugggggaauagaagaaggcacu

SEQ ID NO: 90974 - RNA, 22 nt, Artificial Sequence
  LRRK2 RNA guide
uguucauucauacuguagugcc

SEQ ID NO: 90975 - RNA, 22 nt, Artificial Sequence
  LRRK2 RNA guide
uucauacuguagugccuucuuc

SEQ ID NO: 90976 - RNA, 22 nt, Artificial Sequence
  LRRK2 RNA guide
uucauucauacuguagugccuu

SEQ ID NO: 90977 - RNA, 22 nt, Artificial Sequence
  LRRK2 RNA guide
uuccucguuguucauucauacu

SEQ ID NO: 90978 - RNA, 22 nt, Artificial Sequence
  LRRK2 RNA guide
uuguucauucauacuguagugc

SEQ ID NO: 90979 - RNA, 20 nt, Artificial Sequence
  LRRK2 RNA guide
aagaaggcacuacgguauga

SEQ ID NO: 90980 - RNA, 20 nt, Artificial Sequence
  LRRK2 RNA guide
aaggcacuacgguaugaaug

SEQ ID NO: 90981 - RNA, 20 nt, Artificial Sequence
  LRRK2 RNA guide
aauagaagaaggcacuacgg

SEQ ID NO: 90982 - RNA, 20 nt, Artificial Sequence
  LRRK2 RNA guide
accguagugccuucuucuau

SEQ ID NO: 90983 - RNA, 20 nt, Artificial Sequence
  LRRK2 RNA guide
acgguaugaaugaacaacga

SEQ ID NO: 90984 - RNA, 20 nt, Artificial Sequence
  LRRK2 RNA guide
acuacgguaugaaugaacaa

SEQ ID NO: 90985 - RNA, 20 nt, Artificial Sequence
  LRRK2 RNA guide
agaagaaggcacuacgguau

SEQ ID NO: 90986 - RNA, 20 nt, Artificial Sequence
  LRRK2 RNA guide
agaaggcacuacgguaugaa

SEQ ID NO: 90987 - RNA, 20 nt, Artificial Sequence
  LRRK2 RNA guide
aggcacuacgguaugaauga

SEQ ID NO: 90988 - RNA, 20 nt, Artificial Sequence
  LRRK2 RNA guide
auaccguagugccuucuucu

SEQ ID NO: 90989 - RNA, 20 nt, Artificial Sequence
  LRRK2 RNA guide
auagaagaaggcacuacggu

SEQ ID NO: 90990 - RNA, 20 nt, Artificial Sequence
  LRRK2 RNA guide
auucauaccguagugccuuc

SEQ ID NO: 90991 - RNA, 20 nt, Artificial Sequence
  LRRK2 RNA guide
cacuacgguaugaaugaaca

SEQ ID NO: 90992 - RNA, 20 nt, Artificial Sequence
  LRRK2 RNA guide
cauaccguagugccuucuuc

SEQ ID NO: 90993 - RNA, 20 nt, Artificial Sequence
  LRRK2 RNA guide
cauucauaccguagugccuu

SEQ ID NO: 90994 - RNA, 20 nt, Artificial Sequence
  LRRK2 RNA guide
ccguagugccuucuucuauu

SEQ ID NO: 90995 - RNA, 20 nt, Artificial Sequence
  LRRK2 RNA guide
ccucguuguucauucauacc

SEQ ID NO: 90996 - RNA, 20 nt, Artificial Sequence
  LRRK2 RNA guide
cgguaugaaugaacaacgag

SEQ ID NO: 90997 - RNA, 20 nt, Artificial Sequence
  LRRK2 RNA guide
cguuguucauucauaccgua

SEQ ID NO: 90998 - RNA, 20 nt, Artificial Sequence
  LRRK2 RNA guide
cuacgguaugaaugaacaac

SEQ ID NO: 90999 - RNA, 20 nt, Artificial Sequence
  LRRK2 RNA guide
cucguuguucauucauaccg

SEQ ID NO: 91000 - RNA, 20 nt, Artificial Sequence
  LRRK2 RNA guide
gaagaaggcacuacgguaug

SEQ ID NO: 91001 - RNA, 20 nt, Artificial Sequence
  LRRK2 RNA guide
gaaggcacuacgguaugaau

SEQ ID NO: 91002 - RNA, 20 nt, Artificial Sequence
  LRRK2 RNA guide
gaauagaagaaggcacuacg

SEQ ID NO: 91003 - RNA, 20 nt, Artificial Sequence
  LRRK2 RNA guide
gcacuacgguaugaaugaac

SEQ ID NO: 91004 - RNA, 20 nt, Artificial Sequence
  LRRK2 RNA guide
ggcacuacgguaugaaugaa

SEQ ID NO: 91005 - RNA, 20 nt, Artificial Sequence
  LRRK2 RNA guide
guucauucauaccguagugc

SEQ ID NO: 91006 - RNA, 20 nt, Artificial Sequence
  LRRK2 RNA guide
guuguucauucauaccguag

SEQ ID NO: 91007 - RNA, 20 nt, Artificial Sequence
  LRRK2 RNA guide
uaccguagugccuucuucua

SEQ ID NO: 91008 - RNA, 20 nt, Artificial Sequence
  LRRK2 RNA guide
uacgguaugaaugaacaacg

SEQ ID NO: 91009 - RNA, 20 nt, Artificial Sequence
  LRRK2 RNA guide
uagaagaaggcacuacggua

SEQ ID NO: 91010 - RNA, 20 nt, Artificial Sequence
  LRRK2 RNA guide
ucauaccguagugccuucuu

SEQ ID NO: 91011 - RNA, 20 nt, Artificial Sequence
  LRRK2 RNA guide
ucauucauaccguagugccu

SEQ ID NO: 91012 - RNA, 20 nt, Artificial Sequence
  LRRK2 RNA guide
ucguuguucauucauaccgu

SEQ ID NO: 91013 - RNA, 20 nt, Artificial Sequence
  LRRK2 RNA guide
uguucauucauaccguagug

SEQ ID NO: 91014 - RNA, 20 nt, Artificial Sequence
  LRRK2 RNA guide
uucauaccguagugccuucu

SEQ ID NO: 91015 - RNA, 20 nt, Artificial Sequence
  LRRK2 RNA guide
uucauucauaccguagugcc

SEQ ID NO: 91016 - RNA, 20 nt, Artificial Sequence
  LRRK2 RNA guide
uuguucauucauaccguagu

SEQ ID NO: 91017 - RNA, 21 nt, Artificial Sequence
  LRRK2 RNA guide
aagaaggcacuacgguaugaa

SEQ ID NO: 91018 - RNA, 21 nt, Artificial Sequence
  LRRK2 RNA guide
aaggcacuacgguaugaauga

SEQ ID NO: 91019 - RNA, 21 nt, Artificial Sequence
  LRRK2 RNA guide
aauagaagaaggcacuacggu

SEQ ID NO: 91020 - RNA, 21 nt, Artificial Sequence
  LRRK2 RNA guide
accguagugccuucuucuauu

SEQ ID NO: 91021 - RNA, 21 nt, Artificial Sequence
  LRRK2 RNA guide
acgguaugaaugaacaacgag

SEQ ID NO: 91022 - RNA, 21 nt, Artificial Sequence
  LRRK2 RNA guide
acuacgguaugaaugaacaac

SEQ ID NO: 91023 - RNA, 21 nt, Artificial Sequence
  LRRK2 RNA guide
agaagaaggcacuacgguaug

SEQ ID NO: 91024 - RNA, 21 nt, Artificial Sequence
  LRRK2 RNA guide
agaaggcacuacgguaugaau

SEQ ID NO: 91025 - RNA, 21 nt, Artificial Sequence
  LRRK2 RNA guide
aggcacuacgguaugaaugaa

SEQ ID NO: 91026 - RNA, 21 nt, Artificial Sequence
  LRRK2 RNA guide
auaccguagugccuucuucua

SEQ ID NO: 91027 - RNA, 21 nt, Artificial Sequence
  LRRK2 RNA guide
auagaagaaggcacuacggua

SEQ ID NO: 91028 - RNA, 21 nt, Artificial Sequence
  LRRK2 RNA guide
auucauaccguagugccuucu

SEQ ID NO: 91029 - RNA, 21 nt, Artificial Sequence
  LRRK2 RNA guide
cacuacgguaugaaugaacaa

SEQ ID NO: 91030 - RNA, 21 nt, Artificial Sequence
  LRRK2 RNA guide
cauaccguagugccuucuucu

SEQ ID NO: 91031 - RNA, 21 nt, Artificial Sequence
  LRRK2 RNA guide
cauucauaccguagugccuuc

SEQ ID NO: 91032 - RNA, 21 nt, Artificial Sequence
  LRRK2 RNA guide
ccguagugccuucuucuauuc

SEQ ID NO: 91033 - RNA, 21 nt, Artificial Sequence
  LRRK2 RNA guide
ccucguuguucauucauaccg

SEQ ID NO: 91034 - RNA, 21 nt, Artificial Sequence
  LRRK2 RNA guide
cgguaugaaugaacaacgagg

SEQ ID NO: 91035 - RNA, 21 nt, Artificial Sequence
  LRRK2 RNA guide
cguuguucauucauaccguag

SEQ ID NO: 91036 - RNA, 21 nt, Artificial Sequence
  LRRK2 RNA guide
cuacgguaugaaugaacaacg

SEQ ID NO: 91037 - RNA, 21 nt, Artificial Sequence
  LRRK2 RNA guide
cucguuguucauucauaccgu

SEQ ID NO: 91038 - RNA, 21 nt, Artificial Sequence
  LRRK2 RNA guide
gaagaaggcacuacgguauga

SEQ ID NO: 91039 - RNA, 21 nt, Artificial Sequence
  LRRK2 RNA guide
gaaggcacuacgguaugaaug

SEQ ID NO: 91040 - RNA, 21 nt, Artificial Sequence
  LRRK2 RNA guide
gaauagaagaaggcacuacgg

SEQ ID NO: 91041 - RNA, 21 nt, Artificial Sequence
  LRRK2 RNA guide
gcacuacgguaugaaugaaca

SEQ ID NO: 91042 - RNA, 21 nt, Artificial Sequence
  LRRK2 RNA guide
ggaauagaagaaggcacuacg

SEQ ID NO: 91043 - RNA, 21 nt, Artificial Sequence
  LRRK2 RNA guide
ggcacuacgguaugaaugaac

SEQ ID NO: 91044 - RNA, 21 nt, Artificial Sequence
  LRRK2 RNA guide
guucauucauaccguagugcc

SEQ ID NO: 91045 - RNA, 21 nt, Artificial Sequence
  LRRK2 RNA guide
guuguucauucauaccguagu

SEQ ID NO: 91046 - RNA, 21 nt, Artificial Sequence
  LRRK2 RNA guide
uaccguagugccuucuucuau

SEQ ID NO: 91047 - RNA, 21 nt, Artificial Sequence
  LRRK2 RNA guide
uacgguaugaaugaacaacga

SEQ ID NO: 91048 - RNA, 21 nt, Artificial Sequence
  LRRK2 RNA guide
uagaagaaggcacuacgguau

SEQ ID NO: 91049 - RNA, 21 nt, Artificial Sequence
  LRRK2 RNA guide
ucauaccguagugccuucuuc

SEQ ID NO: 91050 - RNA, 21 nt, Artificial Sequence
  LRRK2 RNA guide
ucauucauaccguagugccuu

SEQ ID NO: 91051 - RNA, 21 nt, Artificial Sequence
  LRRK2 RNA guide
uccucguuguucauucauacc

SEQ ID NO: 91052 - RNA, 21 nt, Artificial Sequence
  LRRK2 RNA guide
ucguuguucauucauaccgua

SEQ ID NO: 91053 - RNA, 21 nt, Artificial Sequence
  LRRK2 RNA guide
uguucauucauaccguagugc

SEQ ID NO: 91054 - RNA, 21 nt, Artificial Sequence
  LRRK2 RNA guide
uucauaccguagugccuucuu

SEQ ID NO: 91055 - RNA, 21 nt, Artificial Sequence
  LRRK2 RNA guide
uucauucauaccguagugccu

SEQ ID NO: 91056 - RNA, 21 nt, Artificial Sequence
  LRRK2 RNA guide
uuguucauucauaccguagug

SEQ ID NO: 91057 - RNA, 22 nt, Artificial Sequence
  LRRK2 RNA guide
aagaaggcacuacgguaugaau

SEQ ID NO: 91058 - RNA, 22 nt, Artificial Sequence
  LRRK2 RNA guide
aaggcacuacgguaugaaugaa

SEQ ID NO: 91059 - RNA, 22 nt, Artificial Sequence
  LRRK2 RNA guide
aauagaagaaggcacuacggua

SEQ ID NO: 91060 - RNA, 22 nt, Artificial Sequence
  LRRK2 RNA guide
accguagugccuucuucuauuc

SEQ ID NO: 91061 - RNA, 22 nt, Artificial Sequence
  LRRK2 RNA guide
acgguaugaaugaacaacgagg

SEQ ID NO: 91062 - RNA, 22 nt, Artificial Sequence
  LRRK2 RNA guide
acuacgguaugaaugaacaacg

SEQ ID NO: 91063 - RNA, 22 nt, Artificial Sequence
  LRRK2 RNA guide
agaagaaggcacuacgguauga

SEQ ID NO: 91064 - RNA, 22 nt, Artificial Sequence
  LRRK2 RNA guide
agaaggcacuacgguaugaaug

SEQ ID NO: 91065 - RNA, 22 nt, Artificial Sequence
  LRRK2 RNA guide
aggcacuacgguaugaaugaac

SEQ ID NO: 91066 - RNA, 22 nt, Artificial Sequence
  LRRK2 RNA guide
auaccguagugccuucuucuau

SEQ ID NO: 91067 - RNA, 22 nt, Artificial Sequence
  LRRK2 RNA guide
auagaagaaggcacuacgguau

SEQ ID NO: 91068 - RNA, 22 nt, Artificial Sequence
  LRRK2 RNA guide
auucauaccguagugccuucuu

SEQ ID NO: 91069 - RNA, 22 nt, Artificial Sequence
  LRRK2 RNA guide
cacuacgguaugaaugaacaac

SEQ ID NO: 91070 - RNA, 22 nt, Artificial Sequence
  LRRK2 RNA guide
cauaccguagugccuucuucua

SEQ ID NO: 91071 - RNA, 22 nt, Artificial Sequence
  LRRK2 RNA guide
cauucauaccguagugccuucu

SEQ ID NO: 91072 - RNA, 22 nt, Artificial Sequence
  LRRK2 RNA guide
ccguagugccuucuucuauucc

SEQ ID NO: 91073 - RNA, 22 nt, Artificial Sequence
  LRRK2 RNA guide
ccucguuguucauucauaccgu

SEQ ID NO: 91074 - RNA, 22 nt, Artificial Sequence
  LRRK2 RNA guide
cgguaugaaugaacaacgagga

SEQ ID NO: 91075 - RNA, 22 nt, Artificial Sequence
  LRRK2 RNA guide
cguuguucauucauaccguagu

SEQ ID NO: 91076 - RNA, 22 nt, Artificial Sequence
  LRRK2 RNA guide
cuacgguaugaaugaacaacga

SEQ ID NO: 91077 - RNA, 22 nt, Artificial Sequence
  LRRK2 RNA guide
cucguuguucauucauaccgua

SEQ ID NO: 91078 - RNA, 22 nt, Artificial Sequence
  LRRK2 RNA guide
gaagaaggcacuacgguaugaa

SEQ ID NO: 91079 - RNA, 22 nt, Artificial Sequence
  LRRK2 RNA guide
gaaggcacuacgguaugaauga

SEQ ID NO: 91080 - RNA, 22 nt, Artificial Sequence
  LRRK2 RNA guide
gaauagaagaaggcacuacggu

SEQ ID NO: 91081 - RNA, 22 nt, Artificial Sequence
  LRRK2 RNA guide
gcacuacgguaugaaugaacaa

SEQ ID NO: 91082 - RNA, 22 nt, Artificial Sequence
  LRRK2 RNA guide
ggaauagaagaaggcacuacgg

SEQ ID NO: 91083 - RNA, 22 nt, Artificial Sequence
  LRRK2 RNA guide
ggcacuacgguaugaaugaaca

SEQ ID NO: 91084 - RNA, 22 nt, Artificial Sequence
  LRRK2 RNA guide
gggaauagaagaaggcacuacg

SEQ ID NO: 91085 - RNA, 22 nt, Artificial Sequence
  LRRK2 RNA guide
guucauucauaccguagugccu

SEQ ID NO: 91086 - RNA, 22 nt, Artificial Sequence
  LRRK2 RNA guide
guuguucauucauaccguagug

SEQ ID NO: 91087 - RNA, 22 nt, Artificial Sequence
  LRRK2 RNA guide
uaccguagugccuucuucuauu

SEQ ID NO: 91088 - RNA, 22 nt, Artificial Sequence
  LRRK2 RNA guide
uacgguaugaaugaacaacgag

SEQ ID NO: 91089 - RNA, 22 nt, Artificial Sequence
  LRRK2 RNA guide
uagaagaaggcacuacgguaug

SEQ ID NO: 91090 - RNA, 22 nt, Artificial Sequence
  LRRK2 RNA guide
ucauaccguagugccuucuucu

SEQ ID NO: 91091 - RNA, 22 nt, Artificial Sequence
  LRRK2 RNA guide
ucauucauaccguagugccuuc

SEQ ID NO: 91092 - RNA, 22 nt, Artificial Sequence
  LRRK2 RNA guide
uccucguuguucauucauaccg

SEQ ID NO: 91093 - RNA, 22 nt, Artificial Sequence
  LRRK2 RNA guide
ucguuguucauucauaccguag

SEQ ID NO: 91094 - RNA, 22 nt, Artificial Sequence
  LRRK2 RNA guide
uguucauucauaccguagugcc

SEQ ID NO: 91095 - RNA, 22 nt, Artificial Sequence
  LRRK2 RNA guide
uucauaccguagugccuucuuc

SEQ ID NO: 91096 - RNA, 22 nt, Artificial Sequence
  LRRK2 RNA guide
uucauucauaccguagugccuu

SEQ ID NO: 91097 - RNA, 22 nt, Artificial Sequence
  LRRK2 RNA guide
uuccucguuguucauucauacc

SEQ ID NO: 91098 - RNA, 22 nt, Artificial Sequence
  LRRK2 RNA guide
uuguucauucauaccguagugc

SEQ ID NO: 91099 - RNA, 20 nt, Artificial Sequence
  LRRK2 RNA guide
aacagacugcuugauuauau

SEQ ID NO: 91100 - RNA, 20 nt, Artificial Sequence
  LRRK2 RNA guide
aagcaccucugauauaauca

SEQ ID NO: 91101 - RNA, 20 nt, Artificial Sequence
  LRRK2 RNA guide
aaucaagcagucuguuaagu

SEQ ID NO: 91102 - RNA, 20 nt, Artificial Sequence
  LRRK2 RNA guide
acagacugcuugauuauauc

SEQ ID NO: 91103 - RNA, 20 nt, Artificial Sequence
  LRRK2 RNA guide
acagauaagcaccucugaua

SEQ ID NO: 91104 - RNA, 20 nt, Artificial Sequence
  LRRK2 RNA guide
accucugauauaaucaagca

SEQ ID NO: 91105 - RNA, 20 nt, Artificial Sequence
  LRRK2 RNA guide
acugcuugauuauaucagag

SEQ ID NO: 91106 - RNA, 20 nt, Artificial Sequence
  LRRK2 RNA guide
acuuaacagacugcuugauu

SEQ ID NO: 91107 - RNA, 20 nt, Artificial Sequence
  LRRK2 RNA guide
agacugcuugauuauaucag

SEQ ID NO: 91108 - RNA, 20 nt, Artificial Sequence
  LRRK2 RNA guide
agauaagcaccucugauaua

SEQ ID NO: 91109 - RNA, 20 nt, Artificial Sequence
  LRRK2 RNA guide
agcaccucugauauaaucaa

SEQ ID NO: 91110 - RNA, 20 nt, Artificial Sequence
  LRRK2 RNA guide
auaagcaccucugauauaau

SEQ ID NO: 91111 - RNA, 20 nt, Artificial Sequence
  LRRK2 RNA guide
auaaucaagcagucuguuaa

SEQ ID NO: 91112 - RNA, 20 nt, Artificial Sequence
  LRRK2 RNA guide
auauaaucaagcagucuguu

SEQ ID NO: 91113 - RNA, 20 nt, Artificial Sequence
  LRRK2 RNA guide
aucaagcagucuguuaagug

SEQ ID NO: 91114 - RNA, 20 nt, Artificial Sequence
  LRRK2 RNA guide
cacagauaagcaccucugau

SEQ ID NO: 91115 - RNA, 20 nt, Artificial Sequence
  LRRK2 RNA guide
caccucugauauaaucaagc

SEQ ID NO: 91116 - RNA, 20 nt, Artificial Sequence
  LRRK2 RNA guide
cacuuaacagacugcuugau

SEQ ID NO: 91117 - RNA, 20 nt, Artificial Sequence
  LRRK2 RNA guide
cagacugcuugauuauauca

SEQ ID NO: 91118 - RNA, 20 nt, Artificial Sequence
  LRRK2 RNA guide
cagauaagcaccucugauau

SEQ ID NO: 91119 - RNA, 20 nt, Artificial Sequence
  LRRK2 RNA guide
ccacuuaacagacugcuuga

SEQ ID NO: 91120 - RNA, 20 nt, Artificial Sequence
  LRRK2 RNA guide
cccacuuaacagacugcuug

SEQ ID NO: 91121 - RNA, 20 nt, Artificial Sequence
  LRRK2 RNA guide
ccccacuuaacagacugcuu

SEQ ID NO: 91122 - RNA, 20 nt, Artificial Sequence
  LRRK2 RNA guide
cccccacuuaacagacugcu

SEQ ID NO: 91123 - RNA, 20 nt, Artificial Sequence
  LRRK2 RNA guide
ccucugauauaaucaagcag

SEQ ID NO: 91124 - RNA, 20 nt, Artificial Sequence
  LRRK2 RNA guide
cucugauauaaucaagcagu

SEQ ID NO: 91125 - RNA, 20 nt, Artificial Sequence
  LRRK2 RNA guide
cugauauaaucaagcagucu

SEQ ID NO: 91126 - RNA, 20 nt, Artificial Sequence
  LRRK2 RNA guide
cugcuugauuauaucagagg

SEQ ID NO: 91127 - RNA, 20 nt, Artificial Sequence
  LRRK2 RNA guide
cuuaacagacugcuugauua

SEQ ID NO: 91128 - RNA, 20 nt, Artificial Sequence
  LRRK2 RNA guide
cuugauuauaucagaggugc

SEQ ID NO: 91129 - RNA, 20 nt, Artificial Sequence
  LRRK2 RNA guide
gacugcuugauuauaucaga

SEQ ID NO: 91130 - RNA, 20 nt, Artificial Sequence
  LRRK2 RNA guide
gauaagcaccucugauauaa

SEQ ID NO: 91131 - RNA, 20 nt, Artificial Sequence
  LRRK2 RNA guide
gauauaaucaagcagucugu

SEQ ID NO: 91132 - RNA, 20 nt, Artificial Sequence
  LRRK2 RNA guide
gauuauaucagaggugcuua

SEQ ID NO: 91133 - RNA, 20 nt, Artificial Sequence
  LRRK2 RNA guide
gcaccucugauauaaucaag

SEQ ID NO: 91134 - RNA, 20 nt, Artificial Sequence
  LRRK2 RNA guide
gcuugauuauaucagaggug

SEQ ID NO: 91135 - RNA, 20 nt, Artificial Sequence
  LRRK2 RNA guide
uaacagacugcuugauuaua

SEQ ID NO: 91136 - RNA, 20 nt, Artificial Sequence
  LRRK2 RNA guide
uaagcaccucugauauaauc

SEQ ID NO: 91137 - RNA, 20 nt, Artificial Sequence
  LRRK2 RNA guide
uaaucaagcagucuguuaag

SEQ ID NO: 91138 - RNA, 20 nt, Artificial Sequence
  LRRK2 RNA guide
uauaaucaagcagucuguua

SEQ ID NO: 91139 - RNA, 20 nt, Artificial Sequence
  LRRK2 RNA guide
ucccccacuuaacagacugc

SEQ ID NO: 91140 - RNA, 20 nt, Artificial Sequence
  LRRK2 RNA guide
ucugauauaaucaagcaguc

SEQ ID NO: 91141 - RNA, 20 nt, Artificial Sequence
  LRRK2 RNA guide
ugauauaaucaagcagucug

SEQ ID NO: 91142 - RNA, 20 nt, Artificial Sequence
  LRRK2 RNA guide
ugauuauaucagaggugcuu

SEQ ID NO: 91143 - RNA, 20 nt, Artificial Sequence
  LRRK2 RNA guide
ugcuugauuauaucagaggu

SEQ ID NO: 91144 - RNA, 20 nt, Artificial Sequence
  LRRK2 RNA guide
uuaacagacugcuugauuau

SEQ ID NO: 91145 - RNA, 20 nt, Artificial Sequence
  LRRK2 RNA guide
uucccccacuuaacagacug

SEQ ID NO: 91146 - RNA, 20 nt, Artificial Sequence
  LRRK2 RNA guide
uugauuauaucagaggugcu

SEQ ID NO: 91147 - RNA, 21 nt, Artificial Sequence
  LRRK2 RNA guide
aacagacugcuugauuauauc

SEQ ID NO: 91148 - RNA, 21 nt, Artificial Sequence
  LRRK2 RNA guide
aagcaccucugauauaaucaa

SEQ ID NO: 91149 - RNA, 21 nt, Artificial Sequence
  LRRK2 RNA guide
aaucaagcagucuguuaagug

SEQ ID NO: 91150 - RNA, 21 nt, Artificial Sequence
  LRRK2 RNA guide
acagacugcuugauuauauca

SEQ ID NO: 91151 - RNA, 21 nt, Artificial Sequence
  LRRK2 RNA guide
acagauaagcaccucugauau

SEQ ID NO: 91152 - RNA, 21 nt, Artificial Sequence
  LRRK2 RNA guide
accucugauauaaucaagcag

SEQ ID NO: 91153 - RNA, 21 nt, Artificial Sequence
  LRRK2 RNA guide
acugcuugauuauaucagagg

SEQ ID NO: 91154 - RNA, 21 nt, Artificial Sequence
  LRRK2 RNA guide
acuuaacagacugcuugauua

SEQ ID NO: 91155 - RNA, 21 nt, Artificial Sequence
  LRRK2 RNA guide
agacugcuugauuauaucaga

SEQ ID NO: 91156 - RNA, 21 nt, Artificial Sequence
  LRRK2 RNA guide
agauaagcaccucugauauaa

SEQ ID NO: 91157 - RNA, 21 nt, Artificial Sequence
  LRRK2 RNA guide
agcaccucugauauaaucaag

SEQ ID NO: 91158 - RNA, 21 nt, Artificial Sequence
  LRRK2 RNA guide
auaagcaccucugauauaauc

SEQ ID NO: 91159 - RNA, 21 nt, Artificial Sequence
  LRRK2 RNA guide
auaaucaagcagucuguuaag

SEQ ID NO: 91160 - RNA, 21 nt, Artificial Sequence
  LRRK2 RNA guide
aucaagcagucuguuaagugg

SEQ ID NO: 91161 - RNA, 21 nt, Artificial Sequence
  LRRK2 RNA guide
auucccccacuuaacagacug

SEQ ID NO: 91162 - RNA, 21 nt, Artificial Sequence
  LRRK2 RNA guide
cacagauaagcaccucugaua

SEQ ID NO: 91163 - RNA, 21 nt, Artificial Sequence
  LRRK2 RNA guide
caccucugauauaaucaagca

SEQ ID NO: 91164 - RNA, 21 nt, Artificial Sequence
  LRRK2 RNA guide
cacuuaacagacugcuugauu

SEQ ID NO: 91165 - RNA, 21 nt, Artificial Sequence
  LRRK2 RNA guide
cagacugcuugauuauaucag

SEQ ID NO: 91166 - RNA, 21 nt, Artificial Sequence
  LRRK2 RNA guide
cagauaagcaccucugauaua

SEQ ID NO: 91167 - RNA, 21 nt, Artificial Sequence
  LRRK2 RNA guide
ccacuuaacagacugcuugau

SEQ ID NO: 91168 - RNA, 21 nt, Artificial Sequence
  LRRK2 RNA guide
cccacuuaacagacugcuuga

SEQ ID NO: 91169 - RNA, 21 nt, Artificial Sequence
  LRRK2 RNA guide
ccccacuuaacagacugcuug

SEQ ID NO: 91170 - RNA, 21 nt, Artificial Sequence
  LRRK2 RNA guide
cccccacuuaacagacugcuu

SEQ ID NO: 91171 - RNA, 21 nt, Artificial Sequence
  LRRK2 RNA guide
ccucugauauaaucaagcagu

SEQ ID NO: 91172 - RNA, 21 nt, Artificial Sequence
  LRRK2 RNA guide
cucugauauaaucaagcaguc

SEQ ID NO: 91173 - RNA, 21 nt, Artificial Sequence
  LRRK2 RNA guide
cugauauaaucaagcagucug

SEQ ID NO: 91174 - RNA, 21 nt, Artificial Sequence
  LRRK2 RNA guide
cugcuugauuauaucagaggu

SEQ ID NO: 91175 - RNA, 21 nt, Artificial Sequence
  LRRK2 RNA guide
cuuaacagacugcuugauuau

SEQ ID NO: 91176 - RNA, 21 nt, Artificial Sequence
  LRRK2 RNA guide
cuugauuauaucagaggugcu

SEQ ID NO: 91177 - RNA, 21 nt, Artificial Sequence
  LRRK2 RNA guide
gacugcuugauuauaucagag

SEQ ID NO: 91178 - RNA, 21 nt, Artificial Sequence
  LRRK2 RNA guide
gauaagcaccucugauauaau

SEQ ID NO: 91179 - RNA, 21 nt, Artificial Sequence
  LRRK2 RNA guide
gauauaaucaagcagucuguu

SEQ ID NO: 91180 - RNA, 21 nt, Artificial Sequence
  LRRK2 RNA guide
gauuauaucagaggugcuuau

SEQ ID NO: 91181 - RNA, 21 nt, Artificial Sequence
  LRRK2 RNA guide
gcacagauaagcaccucugau

SEQ ID NO: 91182 - RNA, 21 nt, Artificial Sequence
  LRRK2 RNA guide
gcaccucugauauaaucaagc

SEQ ID NO: 91183 - RNA, 21 nt, Artificial Sequence
  LRRK2 RNA guide
gcuugauuauaucagaggugc

SEQ ID NO: 91184 - RNA, 21 nt, Artificial Sequence
  LRRK2 RNA guide
uaagcaccucugauauaauca

SEQ ID NO: 91185 - RNA, 21 nt, Artificial Sequence
  LRRK2 RNA guide
uaaucaagcagucuguuaagu

SEQ ID NO: 91186 - RNA, 21 nt, Artificial Sequence
  LRRK2 RNA guide
ucccccacuuaacagacugcu

SEQ ID NO: 91187 - RNA, 21 nt, Artificial Sequence
  LRRK2 RNA guide
ucugauauaaucaagcagucu

SEQ ID NO: 91188 - RNA, 21 nt, Artificial Sequence
  LRRK2 RNA guide
ugauauaaucaagcagucugu

SEQ ID NO: 91189 - RNA, 21 nt, Artificial Sequence
  LRRK2 RNA guide
ugauuauaucagaggugcuua

SEQ ID NO: 91190 - RNA, 21 nt, Artificial Sequence
  LRRK2 RNA guide
ugcuugauuauaucagaggug

SEQ ID NO: 91191 - RNA, 21 nt, Artificial Sequence
  LRRK2 RNA guide
uucccccacuuaacagacugc

SEQ ID NO: 91192 - RNA, 21 nt, Artificial Sequence
  LRRK2 RNA guide
uugauuauaucagaggugcuu

SEQ ID NO: 91193 - RNA, 22 nt, Artificial Sequence
  LRRK2 RNA guide
aacagacugcuugauuauauca

SEQ ID NO: 91194 - RNA, 22 nt, Artificial Sequence
  LRRK2 RNA guide
aagcaccucugauauaaucaag

SEQ ID NO: 91195 - RNA, 22 nt, Artificial Sequence
  LRRK2 RNA guide
aaucaagcagucuguuaagugg

SEQ ID NO: 91196 - RNA, 22 nt, Artificial Sequence
  LRRK2 RNA guide
acagacugcuugauuauaucag

SEQ ID NO: 91197 - RNA, 22 nt, Artificial Sequence
  LRRK2 RNA guide
acagauaagcaccucugauaua

SEQ ID NO: 91198 - RNA, 22 nt, Artificial Sequence
  LRRK2 RNA guide
accucugauauaaucaagcagu

SEQ ID NO: 91199 - RNA, 22 nt, Artificial Sequence
  LRRK2 RNA guide
acugcuugauuauaucagaggu

SEQ ID NO: 91200 - RNA, 22 nt, Artificial Sequence
  LRRK2 RNA guide
acuuaacagacugcuugauuau

SEQ ID NO: 91201 - RNA, 22 nt, Artificial Sequence
  LRRK2 RNA guide
agacugcuugauuauaucagag

SEQ ID NO: 91202 - RNA, 22 nt, Artificial Sequence
  LRRK2 RNA guide
agauaagcaccucugauauaau

SEQ ID NO: 91203 - RNA, 22 nt, Artificial Sequence
  LRRK2 RNA guide
agcaccucugauauaaucaagc

SEQ ID NO: 91204 - RNA, 22 nt, Artificial Sequence
  LRRK2 RNA guide
auaagcaccucugauauaauca

SEQ ID NO: 91205 - RNA, 22 nt, Artificial Sequence
  LRRK2 RNA guide
auaaucaagcagucuguuaagu

SEQ ID NO: 91206 - RNA, 22 nt, Artificial Sequence
  LRRK2 RNA guide
aucaagcagucuguuaaguggg

SEQ ID NO: 91207 - RNA, 22 nt, Artificial Sequence
  LRRK2 RNA guide
auucccccacuuaacagacugc

SEQ ID NO: 91208 - RNA, 22 nt, Artificial Sequence
  LRRK2 RNA guide
cacagauaagcaccucugauau

SEQ ID NO: 91209 - RNA, 22 nt, Artificial Sequence
  LRRK2 RNA guide
caccucugauauaaucaagcag

SEQ ID NO: 91210 - RNA, 22 nt, Artificial Sequence
  LRRK2 RNA guide
cacuuaacagacugcuugauua

SEQ ID NO: 91211 - RNA, 22 nt, Artificial Sequence
  LRRK2 RNA guide
cagacugcuugauuauaucaga

SEQ ID NO: 91212 - RNA, 22 nt, Artificial Sequence
  LRRK2 RNA guide
cagauaagcaccucugauauaa

SEQ ID NO: 91213 - RNA, 22 nt, Artificial Sequence
  LRRK2 RNA guide
ccacuuaacagacugcuugauu

SEQ ID NO: 91214 - RNA, 22 nt, Artificial Sequence
  LRRK2 RNA guide
cccacuuaacagacugcuugau

SEQ ID NO: 91215 - RNA, 22 nt, Artificial Sequence
  LRRK2 RNA guide
ccccacuuaacagacugcuuga

SEQ ID NO: 91216 - RNA, 22 nt, Artificial Sequence
  LRRK2 RNA guide
cccccacuuaacagacugcuug

SEQ ID NO: 91217 - RNA, 22 nt, Artificial Sequence
  LRRK2 RNA guide
ccucugauauaaucaagcaguc

SEQ ID NO: 91218 - RNA, 22 nt, Artificial Sequence
  LRRK2 RNA guide
cucugauauaaucaagcagucu

SEQ ID NO: 91219 - RNA, 22 nt, Artificial Sequence
  LRRK2 RNA guide
cugauauaaucaagcagucugu

SEQ ID NO: 91220 - RNA, 22 nt, Artificial Sequence
  LRRK2 RNA guide
cugcuugauuauaucagaggug

SEQ ID NO: 91221 - RNA, 22 nt, Artificial Sequence
  LRRK2 RNA guide
cuuaacagacugcuugauuaua

SEQ ID NO: 91222 - RNA, 22 nt, Artificial Sequence
  LRRK2 RNA guide
cuugauuauaucagaggugcuu

SEQ ID NO: 91223 - RNA, 22 nt, Artificial Sequence
  LRRK2 RNA guide
gacugcuugauuauaucagagg

SEQ ID NO: 91224 - RNA, 22 nt, Artificial Sequence
  LRRK2 RNA guide
gauaagcaccucugauauaauc

SEQ ID NO: 91225 - RNA, 22 nt, Artificial Sequence
  LRRK2 RNA guide
gauauaaucaagcagucuguua

SEQ ID NO: 91226 - RNA, 22 nt, Artificial Sequence
  LRRK2 RNA guide
gauuauaucagaggugcuuauc

SEQ ID NO: 91227 - RNA, 22 nt, Artificial Sequence
  LRRK2 RNA guide
gcacagauaagcaccucugaua

SEQ ID NO: 91228 - RNA, 22 nt, Artificial Sequence
  LRRK2 RNA guide
gcaccucugauauaaucaagca

SEQ ID NO: 91229 - RNA, 22 nt, Artificial Sequence
  LRRK2 RNA guide
gcuugauuauaucagaggugcu

SEQ ID NO: 91230 - RNA, 22 nt, Artificial Sequence
  LRRK2 RNA guide
uaacagacugcuugauuauauc

SEQ ID NO: 91231 - RNA, 22 nt, Artificial Sequence
  LRRK2 RNA guide
uaagcaccucugauauaaucaa

SEQ ID NO: 91232 - RNA, 22 nt, Artificial Sequence
  LRRK2 RNA guide
uaaucaagcagucuguuaagug

SEQ ID NO: 91233 - RNA, 22 nt, Artificial Sequence
  LRRK2 RNA guide
uauaaucaagcagucuguuaag

SEQ ID NO: 91234 - RNA, 22 nt, Artificial Sequence
  LRRK2 RNA guide
uauucccccacuuaacagacug

SEQ ID NO: 91235 - RNA, 22 nt, Artificial Sequence
  LRRK2 RNA guide
ucccccacuuaacagacugcuu

SEQ ID NO: 91236 - RNA, 22 nt, Artificial Sequence
  LRRK2 RNA guide
ucugauauaaucaagcagucug

SEQ ID NO: 91237 - RNA, 22 nt, Artificial Sequence
  LRRK2 RNA guide
ugauauaaucaagcagucuguu

SEQ ID NO: 91238 - RNA, 22 nt, Artificial Sequence
  LRRK2 RNA guide
ugauuauaucagaggugcuuau

SEQ ID NO: 91239 - RNA, 22 nt, Artificial Sequence
  LRRK2 RNA guide
ugcacagauaagcaccucugau

SEQ ID NO: 91240 - RNA, 22 nt, Artificial Sequence
  LRRK2 RNA guide
ugcuugauuauaucagaggugc

SEQ ID NO: 91241 - RNA, 22 nt, Artificial Sequence
  LRRK2 RNA guide
uucccccacuuaacagacugcu

SEQ ID NO: 91242 - RNA, 22 nt, Artificial Sequence
  LRRK2 RNA guide
uugauuauaucagaggugcuua

SEQ ID NO: 91243 - RNA, 20 nt, Artificial Sequence
  LRRK2 RNA guide
aacagacugcuugguuauau

SEQ ID NO: 91244 - RNA, 20 nt, Artificial Sequence
  LRRK2 RNA guide
aaccaagcagucuguuaagu

SEQ ID NO: 91245 - RNA, 20 nt, Artificial Sequence
  LRRK2 RNA guide
aagcaccucugauauaacca

SEQ ID NO: 91246 - RNA, 20 nt, Artificial Sequence
  LRRK2 RNA guide
acagacugcuugguuauauc

SEQ ID NO: 91247 - RNA, 20 nt, Artificial Sequence
  LRRK2 RNA guide
accaagcagucuguuaagug

SEQ ID NO: 91248 - RNA, 20 nt, Artificial Sequence
  LRRK2 RNA guide
accucugauauaaccaagca

SEQ ID NO: 91249 - RNA, 20 nt, Artificial Sequence
  LRRK2 RNA guide
acugcuugguuauaucagag

SEQ ID NO: 91250 - RNA, 20 nt, Artificial Sequence
  LRRK2 RNA guide
acuuaacagacugcuugguu

SEQ ID NO: 91251 - RNA, 20 nt, Artificial Sequence
  LRRK2 RNA guide
agacugcuugguuauaucag

SEQ ID NO: 91252 - RNA, 20 nt, Artificial Sequence
  LRRK2 RNA guide
agcaccucugauauaaccaa

SEQ ID NO: 91253 - RNA, 20 nt, Artificial Sequence
  LRRK2 RNA guide
auaaccaagcagucuguuaa

SEQ ID NO: 91254 - RNA, 20 nt, Artificial Sequence
  LRRK2 RNA guide
auaagcaccucugauauaac

SEQ ID NO: 91255 - RNA, 20 nt, Artificial Sequence
  LRRK2 RNA guide
auauaaccaagcagucuguu

SEQ ID NO: 91256 - RNA, 20 nt, Artificial Sequence
  LRRK2 RNA guide
caccucugauauaaccaagc

SEQ ID NO: 91257 - RNA, 20 nt, Artificial Sequence
  LRRK2 RNA guide
cacuuaacagacugcuuggu

SEQ ID NO: 91258 - RNA, 20 nt, Artificial Sequence
  LRRK2 RNA guide
cagacugcuugguuauauca

SEQ ID NO: 91259 - RNA, 20 nt, Artificial Sequence
  LRRK2 RNA guide
ccacuuaacagacugcuugg

SEQ ID NO: 91260 - RNA, 20 nt, Artificial Sequence
  LRRK2 RNA guide
ccucugauauaaccaagcag

SEQ ID NO: 91261 - RNA, 20 nt, Artificial Sequence
  LRRK2 RNA guide
cucugauauaaccaagcagu

SEQ ID NO: 91262 - RNA, 20 nt, Artificial Sequence
  LRRK2 RNA guide
cugauauaaccaagcagucu

SEQ ID NO: 91263 - RNA, 20 nt, Artificial Sequence
  LRRK2 RNA guide
cugcuugguuauaucagagg

SEQ ID NO: 91264 - RNA, 20 nt, Artificial Sequence
  LRRK2 RNA guide
cuuaacagacugcuugguua

SEQ ID NO: 91265 - RNA, 20 nt, Artificial Sequence
  LRRK2 RNA guide
cuugguuauaucagaggugc

SEQ ID NO: 91266 - RNA, 20 nt, Artificial Sequence
  LRRK2 RNA guide
gacugcuugguuauaucaga

SEQ ID NO: 91267 - RNA, 20 nt, Artificial Sequence
  LRRK2 RNA guide
gauauaaccaagcagucugu

SEQ ID NO: 91268 - RNA, 20 nt, Artificial Sequence
  LRRK2 RNA guide
gcaccucugauauaaccaag

SEQ ID NO: 91269 - RNA, 20 nt, Artificial Sequence
  LRRK2 RNA guide
gcuugguuauaucagaggug

SEQ ID NO: 91270 - RNA, 20 nt, Artificial Sequence
  LRRK2 RNA guide
gguuauaucagaggugcuua

SEQ ID NO: 91271 - RNA, 20 nt, Artificial Sequence
  LRRK2 RNA guide
uaacagacugcuugguuaua

SEQ ID NO: 91272 - RNA, 20 nt, Artificial Sequence
  LRRK2 RNA guide
uaaccaagcagucuguuaag

SEQ ID NO: 91273 - RNA, 20 nt, Artificial Sequence
  LRRK2 RNA guide
uaagcaccucugauauaacc

SEQ ID NO: 91274 - RNA, 20 nt, Artificial Sequence
  LRRK2 RNA guide
uauaaccaagcagucuguua

SEQ ID NO: 91275 - RNA, 20 nt, Artificial Sequence
  LRRK2 RNA guide
ucugauauaaccaagcaguc

SEQ ID NO: 91276 - RNA, 20 nt, Artificial Sequence
  LRRK2 RNA guide
ugauauaaccaagcagucug

SEQ ID NO: 91277 - RNA, 20 nt, Artificial Sequence
  LRRK2 RNA guide
ugcuugguuauaucagaggu

SEQ ID NO: 91278 - RNA, 20 nt, Artificial Sequence
  LRRK2 RNA guide
ugguuauaucagaggugcuu

SEQ ID NO: 91279 - RNA, 20 nt, Artificial Sequence
  LRRK2 RNA guide
uuaacagacugcuugguuau

SEQ ID NO: 91280 - RNA, 20 nt, Artificial Sequence
  LRRK2 RNA guide
uugguuauaucagaggugcu

SEQ ID NO: 91281 - RNA, 21 nt, Artificial Sequence
  LRRK2 RNA guide
aacagacugcuugguuauauc

SEQ ID NO: 91282 - RNA, 21 nt, Artificial Sequence
  LRRK2 RNA guide
aaccaagcagucuguuaagug

SEQ ID NO: 91283 - RNA, 21 nt, Artificial Sequence
  LRRK2 RNA guide
aagcaccucugauauaaccaa

SEQ ID NO: 91284 - RNA, 21 nt, Artificial Sequence
  LRRK2 RNA guide
acagacugcuugguuauauca

SEQ ID NO: 91285 - RNA, 21 nt, Artificial Sequence
  LRRK2 RNA guide
accaagcagucuguuaagugg

SEQ ID NO: 91286 - RNA, 21 nt, Artificial Sequence
  LRRK2 RNA guide
accucugauauaaccaagcag

SEQ ID NO: 91287 - RNA, 21 nt, Artificial Sequence
  LRRK2 RNA guide
acugcuugguuauaucagagg

SEQ ID NO: 91288 - RNA, 21 nt, Artificial Sequence
  LRRK2 RNA guide
acuuaacagacugcuugguua

SEQ ID NO: 91289 - RNA, 21 nt, Artificial Sequence
  LRRK2 RNA guide
agacugcuugguuauaucaga

SEQ ID NO: 91290 - RNA, 21 nt, Artificial Sequence
  LRRK2 RNA guide
agcaccucugauauaaccaag

SEQ ID NO: 91291 - RNA, 21 nt, Artificial Sequence
  LRRK2 RNA guide
auaaccaagcagucuguuaag

SEQ ID NO: 91292 - RNA, 21 nt, Artificial Sequence
  LRRK2 RNA guide
auaagcaccucugauauaacc

SEQ ID NO: 91293 - RNA, 21 nt, Artificial Sequence
  LRRK2 RNA guide
auauaaccaagcagucuguua

SEQ ID NO: 91294 - RNA, 21 nt, Artificial Sequence
  LRRK2 RNA guide
caccucugauauaaccaagca

SEQ ID NO: 91295 - RNA, 21 nt, Artificial Sequence
  LRRK2 RNA guide
cacuuaacagacugcuugguu

SEQ ID NO: 91296 - RNA, 21 nt, Artificial Sequence
  LRRK2 RNA guide
cagacugcuugguuauaucag

SEQ ID NO: 91297 - RNA, 21 nt, Artificial Sequence
  LRRK2 RNA guide
ccacuuaacagacugcuuggu

SEQ ID NO: 91298 - RNA, 21 nt, Artificial Sequence
  LRRK2 RNA guide
cccacuuaacagacugcuugg

SEQ ID NO: 91299 - RNA, 21 nt, Artificial Sequence
  LRRK2 RNA guide
ccucugauauaaccaagcagu

SEQ ID NO: 91300 - RNA, 21 nt, Artificial Sequence
  LRRK2 RNA guide
cucugauauaaccaagcaguc

SEQ ID NO: 91301 - RNA, 21 nt, Artificial Sequence
  LRRK2 RNA guide
cugauauaaccaagcagucug

SEQ ID NO: 91302 - RNA, 21 nt, Artificial Sequence
  LRRK2 RNA guide
cugcuugguuauaucagaggu

SEQ ID NO: 91303 - RNA, 21 nt, Artificial Sequence
  LRRK2 RNA guide
cuuaacagacugcuugguuau

SEQ ID NO: 91304 - RNA, 21 nt, Artificial Sequence
  LRRK2 RNA guide
cuugguuauaucagaggugcu

SEQ ID NO: 91305 - RNA, 21 nt, Artificial Sequence
  LRRK2 RNA guide
gacugcuugguuauaucagag

SEQ ID NO: 91306 - RNA, 21 nt, Artificial Sequence
  LRRK2 RNA guide
gauaagcaccucugauauaac

SEQ ID NO: 91307 - RNA, 21 nt, Artificial Sequence
  LRRK2 RNA guide
gauauaaccaagcagucuguu

SEQ ID NO: 91308 - RNA, 21 nt, Artificial Sequence
  LRRK2 RNA guide
gcaccucugauauaaccaagc

SEQ ID NO: 91309 - RNA, 21 nt, Artificial Sequence
  LRRK2 RNA guide
gcuugguuauaucagaggugc

SEQ ID NO: 91310 - RNA, 21 nt, Artificial Sequence
  LRRK2 RNA guide
gguuauaucagaggugcuuau

SEQ ID NO: 91311 - RNA, 21 nt, Artificial Sequence
  LRRK2 RNA guide
uaacagacugcuugguuauau

SEQ ID NO: 91312 - RNA, 21 nt, Artificial Sequence
  LRRK2 RNA guide
uaaccaagcagucuguuaagu

SEQ ID NO: 91313 - RNA, 21 nt, Artificial Sequence
  LRRK2 RNA guide
uaagcaccucugauauaacca

SEQ ID NO: 91314 - RNA, 21 nt, Artificial Sequence
  LRRK2 RNA guide
uauaaccaagcagucuguuaa

SEQ ID NO: 91315 - RNA, 21 nt, Artificial Sequence
  LRRK2 RNA guide
ucugauauaaccaagcagucu

SEQ ID NO: 91316 - RNA, 21 nt, Artificial Sequence
  LRRK2 RNA guide
ugauauaaccaagcagucugu

SEQ ID NO: 91317 - RNA, 21 nt, Artificial Sequence
  LRRK2 RNA guide
ugcuugguuauaucagaggug

SEQ ID NO: 91318 - RNA, 21 nt, Artificial Sequence
  LRRK2 RNA guide
ugguuauaucagaggugcuua

SEQ ID NO: 91319 - RNA, 21 nt, Artificial Sequence
  LRRK2 RNA guide
uuaacagacugcuugguuaua

SEQ ID NO: 91320 - RNA, 21 nt, Artificial Sequence
  LRRK2 RNA guide
uugguuauaucagaggugcuu

SEQ ID NO: 91321 - RNA, 22 nt, Artificial Sequence
  LRRK2 RNA guide
aacagacugcuugguuauauca

SEQ ID NO: 91322 - RNA, 22 nt, Artificial Sequence
  LRRK2 RNA guide
aaccaagcagucuguuaagugg

SEQ ID NO: 91323 - RNA, 22 nt, Artificial Sequence
  LRRK2 RNA guide
aagcaccucugauauaaccaag

SEQ ID NO: 91324 - RNA, 22 nt, Artificial Sequence
  LRRK2 RNA guide
acagacugcuugguuauaucag

SEQ ID NO: 91325 - RNA, 22 nt, Artificial Sequence
  LRRK2 RNA guide
accaagcagucuguuaaguggg

SEQ ID NO: 91326 - RNA, 22 nt, Artificial Sequence
  LRRK2 RNA guide
accucugauauaaccaagcagu

SEQ ID NO: 91327 - RNA, 22 nt, Artificial Sequence
  LRRK2 RNA guide
acugcuugguuauaucagaggu

SEQ ID NO: 91328 - RNA, 22 nt, Artificial Sequence
  LRRK2 RNA guide
acuuaacagacugcuugguuau

SEQ ID NO: 91329 - RNA, 22 nt, Artificial Sequence
  LRRK2 RNA guide
agacugcuugguuauaucagag

SEQ ID NO: 91330 - RNA, 22 nt, Artificial Sequence
  LRRK2 RNA guide
agauaagcaccucugauauaac

SEQ ID NO: 91331 - RNA, 22 nt, Artificial Sequence
  LRRK2 RNA guide
agcaccucugauauaaccaagc

SEQ ID NO: 91332 - RNA, 22 nt, Artificial Sequence
  LRRK2 RNA guide
auaaccaagcagucuguuaagu

SEQ ID NO: 91333 - RNA, 22 nt, Artificial Sequence
  LRRK2 RNA guide
auaagcaccucugauauaacca

SEQ ID NO: 91334 - RNA, 22 nt, Artificial Sequence
  LRRK2 RNA guide
auauaaccaagcagucuguuaa

SEQ ID NO: 91335 - RNA, 22 nt, Artificial Sequence
  LRRK2 RNA guide
caccucugauauaaccaagcag

SEQ ID NO: 91336 - RNA, 22 nt, Artificial Sequence
  LRRK2 RNA guide
cacuuaacagacugcuugguua

SEQ ID NO: 91337 - RNA, 22 nt, Artificial Sequence
  LRRK2 RNA guide
cagacugcuugguuauaucaga

SEQ ID NO: 91338 - RNA, 22 nt, Artificial Sequence
  LRRK2 RNA guide
ccacuuaacagacugcuugguu

SEQ ID NO: 91339 - RNA, 22 nt, Artificial Sequence
  LRRK2 RNA guide
cccacuuaacagacugcuuggu

SEQ ID NO: 91340 - RNA, 22 nt, Artificial Sequence
  LRRK2 RNA guide
ccccacuuaacagacugcuugg

SEQ ID NO: 91341 - RNA, 22 nt, Artificial Sequence
  LRRK2 RNA guide
ccucugauauaaccaagcaguc

SEQ ID NO: 91342 - RNA, 22 nt, Artificial Sequence
  LRRK2 RNA guide
cucugauauaaccaagcagucu

SEQ ID NO: 91343 - RNA, 22 nt, Artificial Sequence
  LRRK2 RNA guide
cugauauaaccaagcagucugu

SEQ ID NO: 91344 - RNA, 22 nt, Artificial Sequence
  LRRK2 RNA guide
cugcuugguuauaucagaggug

SEQ ID NO: 91345 - RNA, 22 nt, Artificial Sequence
  LRRK2 RNA guide
cuuaacagacugcuugguuaua

SEQ ID NO: 91346 - RNA, 22 nt, Artificial Sequence
  LRRK2 RNA guide
cuugguuauaucagaggugcuu

SEQ ID NO: 91347 - RNA, 22 nt, Artificial Sequence
  LRRK2 RNA guide
gacugcuugguuauaucagagg

SEQ ID NO: 91348 - RNA, 22 nt, Artificial Sequence
  LRRK2 RNA guide
gauaagcaccucugauauaacc

SEQ ID NO: 91349 - RNA, 22 nt, Artificial Sequence
  LRRK2 RNA guide
gauauaaccaagcagucuguua

SEQ ID NO: 91350 - RNA, 22 nt, Artificial Sequence
  LRRK2 RNA guide
gcaccucugauauaaccaagca

SEQ ID NO: 91351 - RNA, 22 nt, Artificial Sequence
  LRRK2 RNA guide
gcuugguuauaucagaggugcu

SEQ ID NO: 91352 - RNA, 22 nt, Artificial Sequence
  LRRK2 RNA guide
gguuauaucagaggugcuuauc

SEQ ID NO: 91353 - RNA, 22 nt, Artificial Sequence
  LRRK2 RNA guide
uaacagacugcuugguuauauc

SEQ ID NO: 91354 - RNA, 22 nt, Artificial Sequence
  LRRK2 RNA guide
uaaccaagcagucuguuaagug

SEQ ID NO: 91355 - RNA, 22 nt, Artificial Sequence
  LRRK2 RNA guide
uaagcaccucugauauaaccaa

SEQ ID NO: 91356 - RNA, 22 nt, Artificial Sequence
  LRRK2 RNA guide
uauaaccaagcagucuguuaag

SEQ ID NO: 91357 - RNA, 22 nt, Artificial Sequence
  LRRK2 RNA guide
ucugauauaaccaagcagucug

SEQ ID NO: 91358 - RNA, 22 nt, Artificial Sequence
  LRRK2 RNA guide
ugauauaaccaagcagucuguu

SEQ ID NO: 91359 - RNA, 22 nt, Artificial Sequence
  LRRK2 RNA guide
ugcuugguuauaucagaggugc

SEQ ID NO: 91360 - RNA, 22 nt, Artificial Sequence
  LRRK2 RNA guide
ugguuauaucagaggugcuuau

SEQ ID NO: 91361 - RNA, 22 nt, Artificial Sequence
  LRRK2 RNA guide
uuaacagacugcuugguuauau

SEQ ID NO: 91362 - RNA, 22 nt, Artificial Sequence
  LRRK2 RNA guide
uugguuauaucagaggugcuua

SEQ ID NO: 91363 - RNA, 20 nt, Artificial Sequence
  LRRK2 RNA guide
aaaauacauuguccucaucc

SEQ ID NO: 91364 - RNA, 20 nt, Artificial Sequence
  LRRK2 RNA guide
aaauacauuguccucauccu

SEQ ID NO: 91365 - RNA, 20 nt, Artificial Sequence
  LRRK2 RNA guide
aaggaugaggacaauguauu

SEQ ID NO: 91366 - RNA, 20 nt, Artificial Sequence
  LRRK2 RNA guide
aauacauuguccucauccuu

SEQ ID NO: 91367 - RNA, 20 nt, Artificial Sequence
  LRRK2 RNA guide
aauuucauaaggaugaggac

SEQ ID NO: 91368 - RNA, 20 nt, Artificial Sequence
  LRRK2 RNA guide
acauuguccucauccuuaug

SEQ ID NO: 91369 - RNA, 20 nt, Artificial Sequence
  LRRK2 RNA guide
agaaaauacauuguccucau

SEQ ID NO: 91370 - RNA, 20 nt, Artificial Sequence
  LRRK2 RNA guide
aggaugaggacaauguauuu

SEQ ID NO: 91371 - RNA, 20 nt, Artificial Sequence
  LRRK2 RNA guide
aguguaauuucauaaggaug

SEQ ID NO: 91372 - RNA, 20 nt, Artificial Sequence
  LRRK2 RNA guide
auaaggaugaggacaaugua

SEQ ID NO: 91373 - RNA, 20 nt, Artificial Sequence
  LRRK2 RNA guide
auacauuguccucauccuua

SEQ ID NO: 91374 - RNA, 20 nt, Artificial Sequence
  LRRK2 RNA guide
auccuuaugaaauuacacuc

SEQ ID NO: 91375 - RNA, 20 nt, Artificial Sequence
  LRRK2 RNA guide
augaguguaauuucauaagg

SEQ ID NO: 91376 - RNA, 20 nt, Artificial Sequence
  LRRK2 RNA guide
auuguccucauccuuaugaa

SEQ ID NO: 91377 - RNA, 20 nt, Artificial Sequence
  LRRK2 RNA guide
auuucauaaggaugaggaca

SEQ ID NO: 91378 - RNA, 20 nt, Artificial Sequence
  LRRK2 RNA guide
cauaaggaugaggacaaugu

SEQ ID NO: 91379 - RNA, 20 nt, Artificial Sequence
  LRRK2 RNA guide
cauccuuaugaaauuacacu

SEQ ID NO: 91380 - RNA, 20 nt, Artificial Sequence
  LRRK2 RNA guide
cauuguccucauccuuauga

SEQ ID NO: 91381 - RNA, 20 nt, Artificial Sequence
  LRRK2 RNA guide
ccucauccuuaugaaauuac

SEQ ID NO: 91382 - RNA, 20 nt, Artificial Sequence
  LRRK2 RNA guide
ccuuaugaaauuacacucau

SEQ ID NO: 91383 - RNA, 20 nt, Artificial Sequence
  LRRK2 RNA guide
cucauccuuaugaaauuaca

SEQ ID NO: 91384 - RNA, 20 nt, Artificial Sequence
  LRRK2 RNA guide
gaaaauacauuguccucauc

SEQ ID NO: 91385 - RNA, 20 nt, Artificial Sequence
  LRRK2 RNA guide
gaguguaauuucauaaggau

SEQ ID NO: 91386 - RNA, 20 nt, Artificial Sequence
  LRRK2 RNA guide
guaauuucauaaggaugagg

SEQ ID NO: 91387 - RNA, 20 nt, Artificial Sequence
  LRRK2 RNA guide
guagaaaauacauuguccuc

SEQ ID NO: 91388 - RNA, 20 nt, Artificial Sequence
  LRRK2 RNA guide
guccucauccuuaugaaauu

SEQ ID NO: 91389 - RNA, 20 nt, Artificial Sequence
  LRRK2 RNA guide
guguaauuucauaaggauga

SEQ ID NO: 91390 - RNA, 20 nt, Artificial Sequence
  LRRK2 RNA guide
uaaggaugaggacaauguau

SEQ ID NO: 91391 - RNA, 20 nt, Artificial Sequence
  LRRK2 RNA guide
uaauuucauaaggaugagga

SEQ ID NO: 91392 - RNA, 20 nt, Artificial Sequence
  LRRK2 RNA guide
uacauuguccucauccuuau

SEQ ID NO: 91393 - RNA, 20 nt, Artificial Sequence
  LRRK2 RNA guide
uagaaaauacauuguccuca

SEQ ID NO: 91394 - RNA, 20 nt, Artificial Sequence
  LRRK2 RNA guide
ucauaaggaugaggacaaug

SEQ ID NO: 91395 - RNA, 20 nt, Artificial Sequence
  LRRK2 RNA guide
ucauccuuaugaaauuacac

SEQ ID NO: 91396 - RNA, 20 nt, Artificial Sequence
  LRRK2 RNA guide
uccucauccuuaugaaauua

SEQ ID NO: 91397 - RNA, 20 nt, Artificial Sequence
  LRRK2 RNA guide
uccuuaugaaauuacacuca

SEQ ID NO: 91398 - RNA, 20 nt, Artificial Sequence
  LRRK2 RNA guide
ugaguguaauuucauaagga

SEQ ID NO: 91399 - RNA, 20 nt, Artificial Sequence
  LRRK2 RNA guide
uguaauuucauaaggaugag

SEQ ID NO: 91400 - RNA, 20 nt, Artificial Sequence
  LRRK2 RNA guide
uguagaaaauacauuguccu

SEQ ID NO: 91401 - RNA, 20 nt, Artificial Sequence
  LRRK2 RNA guide
uguccucauccuuaugaaau

SEQ ID NO: 91402 - RNA, 20 nt, Artificial Sequence
  LRRK2 RNA guide
uucauaaggaugaggacaau

SEQ ID NO: 91403 - RNA, 20 nt, Artificial Sequence
  LRRK2 RNA guide
uuguccucauccuuaugaaa

SEQ ID NO: 91404 - RNA, 20 nt, Artificial Sequence
  LRRK2 RNA guide
uuucauaaggaugaggacaa

SEQ ID NO: 91405 - RNA, 21 nt, Artificial Sequence
  LRRK2 RNA guide
aaaauacauuguccucauccu

SEQ ID NO: 91406 - RNA, 21 nt, Artificial Sequence
  LRRK2 RNA guide
aaauacauuguccucauccuu

SEQ ID NO: 91407 - RNA, 21 nt, Artificial Sequence
  LRRK2 RNA guide
aaggaugaggacaauguauuu

SEQ ID NO: 91408 - RNA, 21 nt, Artificial Sequence
  LRRK2 RNA guide
aauacauuguccucauccuua

SEQ ID NO: 91409 - RNA, 21 nt, Artificial Sequence
  LRRK2 RNA guide
aauuucauaaggaugaggaca

SEQ ID NO: 91410 - RNA, 21 nt, Artificial Sequence
  LRRK2 RNA guide
acauuguccucauccuuauga

SEQ ID NO: 91411 - RNA, 21 nt, Artificial Sequence
  LRRK2 RNA guide
agaaaauacauuguccucauc

SEQ ID NO: 91412 - RNA, 21 nt, Artificial Sequence
  LRRK2 RNA guide
aggaugaggacaauguauuuu

SEQ ID NO: 91413 - RNA, 21 nt, Artificial Sequence
  LRRK2 RNA guide
auaaggaugaggacaauguau

SEQ ID NO: 91414 - RNA, 21 nt, Artificial Sequence
  LRRK2 RNA guide
auacauuguccucauccuuau

SEQ ID NO: 91415 - RNA, 21 nt, Artificial Sequence
  LRRK2 RNA guide
auuguccucauccuuaugaaa

SEQ ID NO: 91416 - RNA, 21 nt, Artificial Sequence
  LRRK2 RNA guide
auuucauaaggaugaggacaa

SEQ ID NO: 91417 - RNA, 21 nt, Artificial Sequence
  LRRK2 RNA guide
cauaaggaugaggacaaugua

SEQ ID NO: 91418 - RNA, 21 nt, Artificial Sequence
  LRRK2 RNA guide
cauccuuaugaaauuacacuc

SEQ ID NO: 91419 - RNA, 21 nt, Artificial Sequence
  LRRK2 RNA guide
cauuguccucauccuuaugaa

SEQ ID NO: 91420 - RNA, 21 nt, Artificial Sequence
  LRRK2 RNA guide
ccucauccuuaugaaauuaca

SEQ ID NO: 91421 - RNA, 21 nt, Artificial Sequence
  LRRK2 RNA guide
cucauccuuaugaaauuacac

SEQ ID NO: 91422 - RNA, 21 nt, Artificial Sequence
  LRRK2 RNA guide
gaaaauacauuguccucaucc

SEQ ID NO: 91423 - RNA, 21 nt, Artificial Sequence
  LRRK2 RNA guide
gaguguaauuucauaaggaug

SEQ ID NO: 91424 - RNA, 21 nt, Artificial Sequence
  LRRK2 RNA guide
guaauuucauaaggaugagga

SEQ ID NO: 91425 - RNA, 21 nt, Artificial Sequence
  LRRK2 RNA guide
guagaaaauacauuguccuca

SEQ ID NO: 91426 - RNA, 21 nt, Artificial Sequence
  LRRK2 RNA guide
guccucauccuuaugaaauua

SEQ ID NO: 91427 - RNA, 21 nt, Artificial Sequence
  LRRK2 RNA guide
guguaauuucauaaggaugag

SEQ ID NO: 91428 - RNA, 21 nt, Artificial Sequence
  LRRK2 RNA guide
uaaggaugaggacaauguauu

SEQ ID NO: 91429 - RNA, 21 nt, Artificial Sequence
  LRRK2 RNA guide
uaauuucauaaggaugaggac

SEQ ID NO: 91430 - RNA, 21 nt, Artificial Sequence
  LRRK2 RNA guide
uacauuguccucauccuuaug

SEQ ID NO: 91431 - RNA, 21 nt, Artificial Sequence
  LRRK2 RNA guide
ucauaaggaugaggacaaugu

SEQ ID NO: 91432 - RNA, 21 nt, Artificial Sequence
  LRRK2 RNA guide
uccucauccuuaugaaauuac

SEQ ID NO: 91433 - RNA, 21 nt, Artificial Sequence
  LRRK2 RNA guide
uguaauuucauaaggaugagg

SEQ ID NO: 91434 - RNA, 21 nt, Artificial Sequence
  LRRK2 RNA guide
uguagaaaauacauuguccuc

SEQ ID NO: 91435 - RNA, 21 nt, Artificial Sequence
  LRRK2 RNA guide
uguccucauccuuaugaaauu

SEQ ID NO: 91436 - RNA, 21 nt, Artificial Sequence
  LRRK2 RNA guide
uucauaaggaugaggacaaug

SEQ ID NO: 91437 - RNA, 21 nt, Artificial Sequence
  LRRK2 RNA guide
uuguccucauccuuaugaaau

SEQ ID NO: 91438 - RNA, 21 nt, Artificial Sequence
  LRRK2 RNA guide
uuucauaaggaugaggacaau

SEQ ID NO: 91439 - RNA, 22 nt, Artificial Sequence
  LRRK2 RNA guide
aaaauacauuguccucauccuu

SEQ ID NO: 91440 - RNA, 22 nt, Artificial Sequence
  LRRK2 RNA guide
aaauacauuguccucauccuua

SEQ ID NO: 91441 - RNA, 22 nt, Artificial Sequence
  LRRK2 RNA guide
aaggaugaggacaauguauuuu

SEQ ID NO: 91442 - RNA, 22 nt, Artificial Sequence
  LRRK2 RNA guide
aauacauuguccucauccuuau

SEQ ID NO: 91443 - RNA, 22 nt, Artificial Sequence
  LRRK2 RNA guide
aauuucauaaggaugaggacaa

SEQ ID NO: 91444 - RNA, 22 nt, Artificial Sequence
  LRRK2 RNA guide
acauuguccucauccuuaugaa

SEQ ID NO: 91445 - RNA, 22 nt, Artificial Sequence
  LRRK2 RNA guide
agaaaauacauuguccucaucc

SEQ ID NO: 91446 - RNA, 22 nt, Artificial Sequence
  LRRK2 RNA guide
aggaugaggacaauguauuuuc

SEQ ID NO: 91447 - RNA, 22 nt, Artificial Sequence
  LRRK2 RNA guide
aguguaauuucauaaggaugag

SEQ ID NO: 91448 - RNA, 22 nt, Artificial Sequence
  LRRK2 RNA guide
auaaggaugaggacaauguauu

SEQ ID NO: 91449 - RNA, 22 nt, Artificial Sequence
  LRRK2 RNA guide
auacauuguccucauccuuaug

SEQ ID NO: 91450 - RNA, 22 nt, Artificial Sequence
  LRRK2 RNA guide
auguagaaaauacauuguccuc

SEQ ID NO: 91451 - RNA, 22 nt, Artificial Sequence
  LRRK2 RNA guide
auuguccucauccuuaugaaau

SEQ ID NO: 91452 - RNA, 22 nt, Artificial Sequence
  LRRK2 RNA guide
auuucauaaggaugaggacaau

SEQ ID NO: 91453 - RNA, 22 nt, Artificial Sequence
  LRRK2 RNA guide
cauaaggaugaggacaauguau

SEQ ID NO: 91454 - RNA, 22 nt, Artificial Sequence
  LRRK2 RNA guide
cauccuuaugaaauuacacuca

SEQ ID NO: 91455 - RNA, 22 nt, Artificial Sequence
  LRRK2 RNA guide
cauuguccucauccuuaugaaa

SEQ ID NO: 91456 - RNA, 22 nt, Artificial Sequence
  LRRK2 RNA guide
ccucauccuuaugaaauuacac

SEQ ID NO: 91457 - RNA, 22 nt, Artificial Sequence
  LRRK2 RNA guide
cucauccuuaugaaauuacacu

SEQ ID NO: 91458 - RNA, 22 nt, Artificial Sequence
  LRRK2 RNA guide
gaaaauacauuguccucauccu

SEQ ID NO: 91459 - RNA, 22 nt, Artificial Sequence
  LRRK2 RNA guide
gaguguaauuucauaaggauga

SEQ ID NO: 91460 - RNA, 22 nt, Artificial Sequence
  LRRK2 RNA guide
guaauuucauaaggaugaggac

SEQ ID NO: 91461 - RNA, 22 nt, Artificial Sequence
  LRRK2 RNA guide
guagaaaauacauuguccucau

SEQ ID NO: 91462 - RNA, 22 nt, Artificial Sequence
  LRRK2 RNA guide
guccucauccuuaugaaauuac

SEQ ID NO: 91463 - RNA, 22 nt, Artificial Sequence
  LRRK2 RNA guide
guguaauuucauaaggaugagg

SEQ ID NO: 91464 - RNA, 22 nt, Artificial Sequence
  LRRK2 RNA guide
uaaggaugaggacaauguauuu

SEQ ID NO: 91465 - RNA, 22 nt, Artificial Sequence
  LRRK2 RNA guide
uaauuucauaaggaugaggaca

SEQ ID NO: 91466 - RNA, 22 nt, Artificial Sequence
  LRRK2 RNA guide
uacauuguccucauccuuauga

SEQ ID NO: 91467 - RNA, 22 nt, Artificial Sequence
  LRRK2 RNA guide
uagaaaauacauuguccucauc

SEQ ID NO: 91468 - RNA, 22 nt, Artificial Sequence
  LRRK2 RNA guide
ucauaaggaugaggacaaugua

SEQ ID NO: 91469 - RNA, 22 nt, Artificial Sequence
  LRRK2 RNA guide
ucauccuuaugaaauuacacuc

SEQ ID NO: 91470 - RNA, 22 nt, Artificial Sequence
  LRRK2 RNA guide
uccucauccuuaugaaauuaca

SEQ ID NO: 91471 - RNA, 22 nt, Artificial Sequence
  LRRK2 RNA guide
ugaguguaauuucauaaggaug

SEQ ID NO: 91472 - RNA, 22 nt, Artificial Sequence
  LRRK2 RNA guide
uguaauuucauaaggaugagga

SEQ ID NO: 91473 - RNA, 22 nt, Artificial Sequence
  LRRK2 RNA guide
uguagaaaauacauuguccuca

SEQ ID NO: 91474 - RNA, 22 nt, Artificial Sequence
  LRRK2 RNA guide
uguccucauccuuaugaaauua

SEQ ID NO: 91475 - RNA, 22 nt, Artificial Sequence
  LRRK2 RNA guide
uucauaaggaugaggacaaugu

SEQ ID NO: 91476 - RNA, 22 nt, Artificial Sequence
  LRRK2 RNA guide
uuguccucauccuuaugaaauu

SEQ ID NO: 91477 - RNA, 22 nt, Artificial Sequence
  LRRK2 RNA guide
uuucauaaggaugaggacaaug

SEQ ID NO: 91478 - RNA, 20 nt, Artificial Sequence
  LRRK2 RNA guide
aaaauacauuguccucaucu

SEQ ID NO: 91479 - RNA, 20 nt, Artificial Sequence
  LRRK2 RNA guide
aaagaugaggacaauguauu

SEQ ID NO: 91480 - RNA, 20 nt, Artificial Sequence
  LRRK2 RNA guide
aaauacauuguccucaucuu

SEQ ID NO: 91481 - RNA, 20 nt, Artificial Sequence
  LRRK2 RNA guide
aagaugaggacaauguauuu

SEQ ID NO: 91482 - RNA, 20 nt, Artificial Sequence
  LRRK2 RNA guide
aauacauuguccucaucuuu

SEQ ID NO: 91483 - RNA, 20 nt, Artificial Sequence
  LRRK2 RNA guide
aauuucauaaagaugaggac

SEQ ID NO: 91484 - RNA, 20 nt, Artificial Sequence
  LRRK2 RNA guide
acauuguccucaucuuuaug

SEQ ID NO: 91485 - RNA, 20 nt, Artificial Sequence
  LRRK2 RNA guide
auaaagaugaggacaaugua

SEQ ID NO: 91486 - RNA, 20 nt, Artificial Sequence
  LRRK2 RNA guide
auacauuguccucaucuuua

SEQ ID NO: 91487 - RNA, 20 nt, Artificial Sequence
  LRRK2 RNA guide
auuguccucaucuuuaugaa

SEQ ID NO: 91488 - RNA, 20 nt, Artificial Sequence
  LRRK2 RNA guide
auuucauaaagaugaggaca

SEQ ID NO: 91489 - RNA, 20 nt, Artificial Sequence
  LRRK2 RNA guide
cauaaagaugaggacaaugu

SEQ ID NO: 91490 - RNA, 20 nt, Artificial Sequence
  LRRK2 RNA guide
cauuguccucaucuuuauga

SEQ ID NO: 91491 - RNA, 20 nt, Artificial Sequence
  LRRK2 RNA guide
ccucaucuuuaugaaauuac

SEQ ID NO: 91492 - RNA, 20 nt, Artificial Sequence
  LRRK2 RNA guide
guaauuucauaaagaugagg

SEQ ID NO: 91493 - RNA, 20 nt, Artificial Sequence
  LRRK2 RNA guide
guccucaucuuuaugaaauu

SEQ ID NO: 91494 - RNA, 20 nt, Artificial Sequence
  LRRK2 RNA guide
uaaagaugaggacaauguau

SEQ ID NO: 91495 - RNA, 20 nt, Artificial Sequence
  LRRK2 RNA guide
uacauuguccucaucuuuau

SEQ ID NO: 91496 - RNA, 20 nt, Artificial Sequence
  LRRK2 RNA guide
ucauaaagaugaggacaaug

SEQ ID NO: 91497 - RNA, 20 nt, Artificial Sequence
  LRRK2 RNA guide
uguccucaucuuuaugaaau

SEQ ID NO: 91498 - RNA, 20 nt, Artificial Sequence
  LRRK2 RNA guide
uucauaaagaugaggacaau

SEQ ID NO: 91499 - RNA, 20 nt, Artificial Sequence
  LRRK2 RNA guide
uuguccucaucuuuaugaaa

SEQ ID NO: 91500 - RNA, 20 nt, Artificial Sequence
  LRRK2 RNA guide
uuucauaaagaugaggacaa

SEQ ID NO: 91501 - RNA, 21 nt, Artificial Sequence
  LRRK2 RNA guide
acauuguccucaucuuuauga

SEQ ID NO: 91502 - RNA, 21 nt, Artificial Sequence
  LRRK2 RNA guide
cauaaagaugaggacaaugua

SEQ ID NO: 91503 - RNA, 21 nt, Artificial Sequence
  LRRK2 RNA guide
cauuguccucaucuuuaugaa

SEQ ID NO: 91504 - RNA, 21 nt, Artificial Sequence
  LRRK2 RNA guide
gaaaauacauuguccucaucu

SEQ ID NO: 91505 - RNA, 21 nt, Artificial Sequence
  LRRK2 RNA guide
uacauuguccucaucuuuaug

SEQ ID NO: 91506 - RNA, 21 nt, Artificial Sequence
  LRRK2 RNA guide
ucauaaagaugaggacaaugu

SEQ ID NO: 91507 - RNA, 21 nt, Artificial Sequence
  LRRK2 RNA guide
uucauaaagaugaggacaaug

SEQ ID NO: 91508 - RNA, 22 nt, Artificial Sequence
  LRRK2 RNA guide
aagaugaggacaauguauuuuc

SEQ ID NO: 91509 - RNA, 22 nt, Artificial Sequence
  LRRK2 RNA guide
acauuguccucaucuuuaugaa

SEQ ID NO: 91510 - RNA, 22 nt, Artificial Sequence
  LRRK2 RNA guide
agaaaauacauuguccucaucu

SEQ ID NO: 91511 - RNA, 22 nt, Artificial Sequence
  LRRK2 RNA guide
auacauuguccucaucuuuaug

SEQ ID NO: 91512 - RNA, 22 nt, Artificial Sequence
  LRRK2 RNA guide
cauaaagaugaggacaauguau

SEQ ID NO: 91513 - RNA, 22 nt, Artificial Sequence
  LRRK2 RNA guide
cauuguccucaucuuuaugaaa

SEQ ID NO: 91514 - RNA, 22 nt, Artificial Sequence
  LRRK2 RNA guide
ccucaucuuuaugaaauuacac

SEQ ID NO: 91515 - RNA, 22 nt, Artificial Sequence
  LRRK2 RNA guide
gaaaauacauuguccucaucuu

SEQ ID NO: 91516 - RNA, 22 nt, Artificial Sequence
  LRRK2 RNA guide
guaauuucauaaagaugaggac

SEQ ID NO: 91517 - RNA, 22 nt, Artificial Sequence
  LRRK2 RNA guide
guccucaucuuuaugaaauuac

SEQ ID NO: 91518 - RNA, 22 nt, Artificial Sequence
  LRRK2 RNA guide
guguaauuucauaaagaugagg

SEQ ID NO: 91519 - RNA, 22 nt, Artificial Sequence
  LRRK2 RNA guide
uacauuguccucaucuuuauga

SEQ ID NO: 91520 - RNA, 22 nt, Artificial Sequence
  LRRK2 RNA guide
ucauaaagaugaggacaaugua

SEQ ID NO: 91521 - RNA, 22 nt, Artificial Sequence
  LRRK2 RNA guide
uucauaaagaugaggacaaugu

SEQ ID NO: 91522 - RNA, 22 nt, Artificial Sequence
  LRRK2 RNA guide
uuucauaaagaugaggacaaug

SEQ ID NO: 91523 - RNA, 20 nt, Artificial Sequence
  LRRK2 RNA guide
aaauccagaggagccgacau

SEQ ID NO: 91524 - RNA, 20 nt, Artificial Sequence
  LRRK2 RNA guide
aaaugucggcuccucuggau

SEQ ID NO: 91525 - RNA, 20 nt, Artificial Sequence
  LRRK2 RNA guide
aacuuaaaugucggcuccuc

SEQ ID NO: 91526 - RNA, 20 nt, Artificial Sequence
  LRRK2 RNA guide
aagaaauccagaggagccga

SEQ ID NO: 91527 - RNA, 20 nt, Artificial Sequence
  LRRK2 RNA guide
aauccagaggagccgacauu

SEQ ID NO: 91528 - RNA, 20 nt, Artificial Sequence
  LRRK2 RNA guide
aaugucggcuccucuggauu

SEQ ID NO: 91529 - RNA, 20 nt, Artificial Sequence
  LRRK2 RNA guide
acuuaaaugucggcuccucu

SEQ ID NO: 91530 - RNA, 20 nt, Artificial Sequence
  LRRK2 RNA guide
agaaauccagaggagccgac

SEQ ID NO: 91531 - RNA, 20 nt, Artificial Sequence
  LRRK2 RNA guide
agaggagccgacauuuaagu

SEQ ID NO: 91532 - RNA, 20 nt, Artificial Sequence
  LRRK2 RNA guide
agccgacauuuaaguucauc

SEQ ID NO: 91533 - RNA, 20 nt, Artificial Sequence
  LRRK2 RNA guide
aggagccgacauuuaaguuc

SEQ ID NO: 91534 - RNA, 20 nt, Artificial Sequence
  LRRK2 RNA guide
aggaugaacuuaaaugucgg

SEQ ID NO: 91535 - RNA, 20 nt, Artificial Sequence
  LRRK2 RNA guide
agggaagaaauccagaggag

SEQ ID NO: 91536 - RNA, 20 nt, Artificial Sequence
  LRRK2 RNA guide
auccagaggagccgacauuu

SEQ ID NO: 91537 - RNA, 20 nt, Artificial Sequence
  LRRK2 RNA guide
augaacuuaaaugucggcuc

SEQ ID NO: 91538 - RNA, 20 nt, Artificial Sequence
  LRRK2 RNA guide
augucggcuccucuggauuu

SEQ ID NO: 91539 - RNA, 20 nt, Artificial Sequence
  LRRK2 RNA guide
cagaggagccgacauuuaag

SEQ ID NO: 91540 - RNA, 20 nt, Artificial Sequence
  LRRK2 RNA guide
cagggaagaaauccagagga

SEQ ID NO: 91541 - RNA, 20 nt, Artificial Sequence
  LRRK2 RNA guide
ccagaggagccgacauuuaa

SEQ ID NO: 91542 - RNA, 20 nt, Artificial Sequence
  LRRK2 RNA guide
ccgacauuuaaguucauccu

SEQ ID NO: 91543 - RNA, 20 nt, Artificial Sequence
  LRRK2 RNA guide
ccuuugaggaugaacuuaaa

SEQ ID NO: 91544 - RNA, 20 nt, Artificial Sequence
  LRRK2 RNA guide
cggcuccucuggauuucuuc

SEQ ID NO: 91545 - RNA, 20 nt, Artificial Sequence
  LRRK2 RNA guide
cuuaaaugucggcuccucug

SEQ ID NO: 91546 - RNA, 20 nt, Artificial Sequence
  LRRK2 RNA guide
cuuugaggaugaacuuaaau

SEQ ID NO: 91547 - RNA, 20 nt, Artificial Sequence
  LRRK2 RNA guide
gaaauccagaggagccgaca

SEQ ID NO: 91548 - RNA, 20 nt, Artificial Sequence
  LRRK2 RNA guide
gaacuuaaaugucggcuccu

SEQ ID NO: 91549 - RNA, 20 nt, Artificial Sequence
  LRRK2 RNA guide
gaagaaauccagaggagccg

SEQ ID NO: 91550 - RNA, 20 nt, Artificial Sequence
  LRRK2 RNA guide
gagccgacauuuaaguucau

SEQ ID NO: 91551 - RNA, 20 nt, Artificial Sequence
  LRRK2 RNA guide
gaggagccgacauuuaaguu

SEQ ID NO: 91552 - RNA, 20 nt, Artificial Sequence
  LRRK2 RNA guide
gaggaugaacuuaaaugucg

SEQ ID NO: 91553 - RNA, 20 nt, Artificial Sequence
  LRRK2 RNA guide
gaugaacuuaaaugucggcu

SEQ ID NO: 91554 - RNA, 20 nt, Artificial Sequence
  LRRK2 RNA guide
gccgacauuuaaguucaucc

SEQ ID NO: 91555 - RNA, 20 nt, Artificial Sequence
  LRRK2 RNA guide
ggaagaaauccagaggagcc

SEQ ID NO: 91556 - RNA, 20 nt, Artificial Sequence
  LRRK2 RNA guide
ggagccgacauuuaaguuca

SEQ ID NO: 91557 - RNA, 20 nt, Artificial Sequence
  LRRK2 RNA guide
ggaugaacuuaaaugucggc

SEQ ID NO: 91558 - RNA, 20 nt, Artificial Sequence
  LRRK2 RNA guide
gggaagaaauccagaggagc

SEQ ID NO: 91559 - RNA, 20 nt, Artificial Sequence
  LRRK2 RNA guide
gucagggaagaaauccagag

SEQ ID NO: 91560 - RNA, 20 nt, Artificial Sequence
  LRRK2 RNA guide
gucggcuccucuggauuucu

SEQ ID NO: 91561 - RNA, 20 nt, Artificial Sequence
  LRRK2 RNA guide
uaaaugucggcuccucugga

SEQ ID NO: 91562 - RNA, 20 nt, Artificial Sequence
  LRRK2 RNA guide
ucagggaagaaauccagagg

SEQ ID NO: 91563 - RNA, 20 nt, Artificial Sequence
  LRRK2 RNA guide
uccagaggagccgacauuua

SEQ ID NO: 91564 - RNA, 20 nt, Artificial Sequence
  LRRK2 RNA guide
ucggcuccucuggauuucuu

SEQ ID NO: 91565 - RNA, 20 nt, Artificial Sequence
  LRRK2 RNA guide
ugaacuuaaaugucggcucc

SEQ ID NO: 91566 - RNA, 20 nt, Artificial Sequence
  LRRK2 RNA guide
ugaggaugaacuuaaauguc

SEQ ID NO: 91567 - RNA, 20 nt, Artificial Sequence
  LRRK2 RNA guide
ugucggcuccucuggauuuc

SEQ ID NO: 91568 - RNA, 20 nt, Artificial Sequence
  LRRK2 RNA guide
uuaaaugucggcuccucugg

SEQ ID NO: 91569 - RNA, 20 nt, Artificial Sequence
  LRRK2 RNA guide
uugaggaugaacuuaaaugu

SEQ ID NO: 91570 - RNA, 20 nt, Artificial Sequence
  LRRK2 RNA guide
uuugaggaugaacuuaaaug

SEQ ID NO: 91571 - RNA, 21 nt, Artificial Sequence
  LRRK2 RNA guide
aaauccagaggagccgacauu

SEQ ID NO: 91572 - RNA, 21 nt, Artificial Sequence
  LRRK2 RNA guide
aaaugucggcuccucuggauu

SEQ ID NO: 91573 - RNA, 21 nt, Artificial Sequence
  LRRK2 RNA guide
aacuuaaaugucggcuccucu

SEQ ID NO: 91574 - RNA, 21 nt, Artificial Sequence
  LRRK2 RNA guide
aagaaauccagaggagccgac

SEQ ID NO: 91575 - RNA, 21 nt, Artificial Sequence
  LRRK2 RNA guide
aauccagaggagccgacauuu

SEQ ID NO: 91576 - RNA, 21 nt, Artificial Sequence
  LRRK2 RNA guide
aaugucggcuccucuggauuu

SEQ ID NO: 91577 - RNA, 21 nt, Artificial Sequence
  LRRK2 RNA guide
acuuaaaugucggcuccucug

SEQ ID NO: 91578 - RNA, 21 nt, Artificial Sequence
  LRRK2 RNA guide
agaaauccagaggagccgaca

SEQ ID NO: 91579 - RNA, 21 nt, Artificial Sequence
  LRRK2 RNA guide
agaggagccgacauuuaaguu

SEQ ID NO: 91580 - RNA, 21 nt, Artificial Sequence
  LRRK2 RNA guide
agccgacauuuaaguucaucc

SEQ ID NO: 91581 - RNA, 21 nt, Artificial Sequence
  LRRK2 RNA guide
aggagccgacauuuaaguuca

SEQ ID NO: 91582 - RNA, 21 nt, Artificial Sequence
  LRRK2 RNA guide
aggaugaacuuaaaugucggc

SEQ ID NO: 91583 - RNA, 21 nt, Artificial Sequence
  LRRK2 RNA guide
agggaagaaauccagaggagc

SEQ ID NO: 91584 - RNA, 21 nt, Artificial Sequence
  LRRK2 RNA guide
auccagaggagccgacauuua

SEQ ID NO: 91585 - RNA, 21 nt, Artificial Sequence
  LRRK2 RNA guide
augaacuuaaaugucggcucc

SEQ ID NO: 91586 - RNA, 21 nt, Artificial Sequence
  LRRK2 RNA guide
augucggcuccucuggauuuc

SEQ ID NO: 91587 - RNA, 21 nt, Artificial Sequence
  LRRK2 RNA guide
cagaggagccgacauuuaagu

SEQ ID NO: 91588 - RNA, 21 nt, Artificial Sequence
  LRRK2 RNA guide
cagggaagaaauccagaggag

SEQ ID NO: 91589 - RNA, 21 nt, Artificial Sequence
  LRRK2 RNA guide
ccagaggagccgacauuuaag

SEQ ID NO: 91590 - RNA, 21 nt, Artificial Sequence
  LRRK2 RNA guide
ccgacauuuaaguucauccuc

SEQ ID NO: 91591 - RNA, 21 nt, Artificial Sequence
  LRRK2 RNA guide
ccuuugaggaugaacuuaaau

SEQ ID NO: 91592 - RNA, 21 nt, Artificial Sequence
  LRRK2 RNA guide
cggcuccucuggauuucuucc

SEQ ID NO: 91593 - RNA, 21 nt, Artificial Sequence
  LRRK2 RNA guide
cuuaaaugucggcuccucugg

SEQ ID NO: 91594 - RNA, 21 nt, Artificial Sequence
  LRRK2 RNA guide
cuuugaggaugaacuuaaaug

SEQ ID NO: 91595 - RNA, 21 nt, Artificial Sequence
  LRRK2 RNA guide
gaaauccagaggagccgacau

SEQ ID NO: 91596 - RNA, 21 nt, Artificial Sequence
  LRRK2 RNA guide
gaacuuaaaugucggcuccuc

SEQ ID NO: 91597 - RNA, 21 nt, Artificial Sequence
  LRRK2 RNA guide
gaagaaauccagaggagccga

SEQ ID NO: 91598 - RNA, 21 nt, Artificial Sequence
  LRRK2 RNA guide
gagccgacauuuaaguucauc

SEQ ID NO: 91599 - RNA, 21 nt, Artificial Sequence
  LRRK2 RNA guide
gaggagccgacauuuaaguuc

SEQ ID NO: 91600 - RNA, 21 nt, Artificial Sequence
  LRRK2 RNA guide
gaggaugaacuuaaaugucgg

SEQ ID NO: 91601 - RNA, 21 nt, Artificial Sequence
  LRRK2 RNA guide
gaugaacuuaaaugucggcuc

SEQ ID NO: 91602 - RNA, 21 nt, Artificial Sequence
  LRRK2 RNA guide
gccgacauuuaaguucauccu

SEQ ID NO: 91603 - RNA, 21 nt, Artificial Sequence
  LRRK2 RNA guide
gccuuugaggaugaacuuaaa

SEQ ID NO: 91604 - RNA, 21 nt, Artificial Sequence
  LRRK2 RNA guide
ggaagaaauccagaggagccg

SEQ ID NO: 91605 - RNA, 21 nt, Artificial Sequence
  LRRK2 RNA guide
ggagccgacauuuaaguucau

SEQ ID NO: 91606 - RNA, 21 nt, Artificial Sequence
  LRRK2 RNA guide
ggaugaacuuaaaugucggcu

SEQ ID NO: 91607 - RNA, 21 nt, Artificial Sequence
  LRRK2 RNA guide
gggaagaaauccagaggagcc

SEQ ID NO: 91608 - RNA, 21 nt, Artificial Sequence
  LRRK2 RNA guide
ggucagggaagaaauccagag

SEQ ID NO: 91609 - RNA, 21 nt, Artificial Sequence
  LRRK2 RNA guide
gucagggaagaaauccagagg

SEQ ID NO: 91610 - RNA, 21 nt, Artificial Sequence
  LRRK2 RNA guide
gucggcuccucuggauuucuu

SEQ ID NO: 91611 - RNA, 21 nt, Artificial Sequence
  LRRK2 RNA guide
uaaaugucggcuccucuggau

SEQ ID NO: 91612 - RNA, 21 nt, Artificial Sequence
  LRRK2 RNA guide
ucagggaagaaauccagagga

SEQ ID NO: 91613 - RNA, 21 nt, Artificial Sequence
  LRRK2 RNA guide
uccagaggagccgacauuuaa

SEQ ID NO: 91614 - RNA, 21 nt, Artificial Sequence
  LRRK2 RNA guide
ucggcuccucuggauuucuuc

SEQ ID NO: 91615 - RNA, 21 nt, Artificial Sequence
  LRRK2 RNA guide
ugaacuuaaaugucggcuccu

SEQ ID NO: 91616 - RNA, 21 nt, Artificial Sequence
  LRRK2 RNA guide
ugaggaugaacuuaaaugucg

SEQ ID NO: 91617 - RNA, 21 nt, Artificial Sequence
  LRRK2 RNA guide
ugucggcuccucuggauuucu

SEQ ID NO: 91618 - RNA, 21 nt, Artificial Sequence
  LRRK2 RNA guide
uuaaaugucggcuccucugga

SEQ ID NO: 91619 - RNA, 21 nt, Artificial Sequence
  LRRK2 RNA guide
uugaggaugaacuuaaauguc

SEQ ID NO: 91620 - RNA, 22 nt, Artificial Sequence
  LRRK2 RNA guide
aaauccagaggagccgacauuu

SEQ ID NO: 91621 - RNA, 22 nt, Artificial Sequence
  LRRK2 RNA guide
aaaugucggcuccucuggauuu

SEQ ID NO: 91622 - RNA, 22 nt, Artificial Sequence
  LRRK2 RNA guide
aacuuaaaugucggcuccucug

SEQ ID NO: 91623 - RNA, 22 nt, Artificial Sequence
  LRRK2 RNA guide
aagaaauccagaggagccgaca

SEQ ID NO: 91624 - RNA, 22 nt, Artificial Sequence
  LRRK2 RNA guide
aauccagaggagccgacauuua

SEQ ID NO: 91625 - RNA, 22 nt, Artificial Sequence
  LRRK2 RNA guide
aaugucggcuccucuggauuuc

SEQ ID NO: 91626 - RNA, 22 nt, Artificial Sequence
  LRRK2 RNA guide
acuuaaaugucggcuccucugg

SEQ ID NO: 91627 - RNA, 22 nt, Artificial Sequence
  LRRK2 RNA guide
agaaauccagaggagccgacau

SEQ ID NO: 91628 - RNA, 22 nt, Artificial Sequence
  LRRK2 RNA guide
agaggagccgacauuuaaguuc

SEQ ID NO: 91629 - RNA, 22 nt, Artificial Sequence
  LRRK2 RNA guide
agccgacauuuaaguucauccu

SEQ ID NO: 91630 - RNA, 22 nt, Artificial Sequence
  LRRK2 RNA guide
aggagccgacauuuaaguucau

SEQ ID NO: 91631 - RNA, 22 nt, Artificial Sequence
  LRRK2 RNA guide
aggaugaacuuaaaugucggcu

SEQ ID NO: 91632 - RNA, 22 nt, Artificial Sequence
  LRRK2 RNA guide
agggaagaaauccagaggagcc

SEQ ID NO: 91633 - RNA, 22 nt, Artificial Sequence
  LRRK2 RNA guide
aggucagggaagaaauccagag

SEQ ID NO: 91634 - RNA, 22 nt, Artificial Sequence
  LRRK2 RNA guide
auccagaggagccgacauuuaa

SEQ ID NO: 91635 - RNA, 22 nt, Artificial Sequence
  LRRK2 RNA guide
augaacuuaaaugucggcuccu

SEQ ID NO: 91636 - RNA, 22 nt, Artificial Sequence
  LRRK2 RNA guide
augucggcuccucuggauuucu

SEQ ID NO: 91637 - RNA, 22 nt, Artificial Sequence
  LRRK2 RNA guide
cagaggagccgacauuuaaguu

SEQ ID NO: 91638 - RNA, 22 nt, Artificial Sequence
  LRRK2 RNA guide
cagggaagaaauccagaggagc

SEQ ID NO: 91639 - RNA, 22 nt, Artificial Sequence
  LRRK2 RNA guide
ccagaggagccgacauuuaagu

SEQ ID NO: 91640 - RNA, 22 nt, Artificial Sequence
  LRRK2 RNA guide
ccgacauuuaaguucauccuca

SEQ ID NO: 91641 - RNA, 22 nt, Artificial Sequence
  LRRK2 RNA guide
ccuuugaggaugaacuuaaaug

SEQ ID NO: 91642 - RNA, 22 nt, Artificial Sequence
  LRRK2 RNA guide
cggcuccucuggauuucuuccc

SEQ ID NO: 91643 - RNA, 22 nt, Artificial Sequence
  LRRK2 RNA guide
cuuaaaugucggcuccucugga

SEQ ID NO: 91644 - RNA, 22 nt, Artificial Sequence
  LRRK2 RNA guide
cuuugaggaugaacuuaaaugu

SEQ ID NO: 91645 - RNA, 22 nt, Artificial Sequence
  LRRK2 RNA guide
gaaauccagaggagccgacauu

SEQ ID NO: 91646 - RNA, 22 nt, Artificial Sequence
  LRRK2 RNA guide
gaacuuaaaugucggcuccucu

SEQ ID NO: 91647 - RNA, 22 nt, Artificial Sequence
  LRRK2 RNA guide
gaagaaauccagaggagccgac

SEQ ID NO: 91648 - RNA, 22 nt, Artificial Sequence
  LRRK2 RNA guide
gagccgacauuuaaguucaucc

SEQ ID NO: 91649 - RNA, 22 nt, Artificial Sequence
  LRRK2 RNA guide
gaggagccgacauuuaaguuca

SEQ ID NO: 91650 - RNA, 22 nt, Artificial Sequence
  LRRK2 RNA guide
gaggaugaacuuaaaugucggc

SEQ ID NO: 91651 - RNA, 22 nt, Artificial Sequence
  LRRK2 RNA guide
gaugaacuuaaaugucggcucc

SEQ ID NO: 91652 - RNA, 22 nt, Artificial Sequence
  LRRK2 RNA guide
gccgacauuuaaguucauccuc

SEQ ID NO: 91653 - RNA, 22 nt, Artificial Sequence
  LRRK2 RNA guide
gccuuugaggaugaacuuaaau

SEQ ID NO: 91654 - RNA, 22 nt, Artificial Sequence
  LRRK2 RNA guide
ggaagaaauccagaggagccga

SEQ ID NO: 91655 - RNA, 22 nt, Artificial Sequence
  LRRK2 RNA guide
ggagccgacauuuaaguucauc

SEQ ID NO: 91656 - RNA, 22 nt, Artificial Sequence
  LRRK2 RNA guide
ggaugaacuuaaaugucggcuc

SEQ ID NO: 91657 - RNA, 22 nt, Artificial Sequence
  LRRK2 RNA guide
ggccuuugaggaugaacuuaaa

SEQ ID NO: 91658 - RNA, 22 nt, Artificial Sequence
  LRRK2 RNA guide
gggaagaaauccagaggagccg

SEQ ID NO: 91659 - RNA, 22 nt, Artificial Sequence
  LRRK2 RNA guide
ggucagggaagaaauccagagg

SEQ ID NO: 91660 - RNA, 22 nt, Artificial Sequence
  LRRK2 RNA guide
gucagggaagaaauccagagga

SEQ ID NO: 91661 - RNA, 22 nt, Artificial Sequence
  LRRK2 RNA guide
gucggcuccucuggauuucuuc

SEQ ID NO: 91662 - RNA, 22 nt, Artificial Sequence
  LRRK2 RNA guide
uaaaugucggcuccucuggauu

SEQ ID NO: 91663 - RNA, 22 nt, Artificial Sequence
  LRRK2 RNA guide
ucagggaagaaauccagaggag

SEQ ID NO: 91664 - RNA, 22 nt, Artificial Sequence
  LRRK2 RNA guide
uccagaggagccgacauuuaag

SEQ ID NO: 91665 - RNA, 22 nt, Artificial Sequence
  LRRK2 RNA guide
ucggcuccucuggauuucuucc

SEQ ID NO: 91666 - RNA, 22 nt, Artificial Sequence
  LRRK2 RNA guide
ugaacuuaaaugucggcuccuc

SEQ ID NO: 91667 - RNA, 22 nt, Artificial Sequence
  LRRK2 RNA guide
ugaggaugaacuuaaaugucgg

SEQ ID NO: 91668 - RNA, 22 nt, Artificial Sequence
  LRRK2 RNA guide
ugucggcuccucuggauuucuu

SEQ ID NO: 91669 - RNA, 22 nt, Artificial Sequence
  LRRK2 RNA guide
uuaaaugucggcuccucuggau

SEQ ID NO: 91670 - RNA, 22 nt, Artificial Sequence
  LRRK2 RNA guide
uugaggaugaacuuaaaugucg

SEQ ID NO: 91671 - RNA, 22 nt, Artificial Sequence
  LRRK2 RNA guide
uuugaggaugaacuuaaauguc

SEQ ID NO: 91672 - RNA, 20 nt, Artificial Sequence
  LRRK2 RNA guide
aaauccagaggagcagacau

SEQ ID NO: 91673 - RNA, 20 nt, Artificial Sequence
  LRRK2 RNA guide
aaaugucugcuccucuggau

SEQ ID NO: 91674 - RNA, 20 nt, Artificial Sequence
  LRRK2 RNA guide
aacuuaaaugucugcuccuc

SEQ ID NO: 91675 - RNA, 20 nt, Artificial Sequence
  LRRK2 RNA guide
aagaaauccagaggagcaga

SEQ ID NO: 91676 - RNA, 20 nt, Artificial Sequence
  LRRK2 RNA guide
aauccagaggagcagacauu

SEQ ID NO: 91677 - RNA, 20 nt, Artificial Sequence
  LRRK2 RNA guide
aaugucugcuccucuggauu

SEQ ID NO: 91678 - RNA, 20 nt, Artificial Sequence
  LRRK2 RNA guide
acuuaaaugucugcuccucu

SEQ ID NO: 91679 - RNA, 20 nt, Artificial Sequence
  LRRK2 RNA guide
agaaauccagaggagcagac

SEQ ID NO: 91680 - RNA, 20 nt, Artificial Sequence
  LRRK2 RNA guide
agaggagcagacauuuaagu

SEQ ID NO: 91681 - RNA, 20 nt, Artificial Sequence
  LRRK2 RNA guide
agcagacauuuaaguucauc

SEQ ID NO: 91682 - RNA, 20 nt, Artificial Sequence
  LRRK2 RNA guide
aggagcagacauuuaaguuc

SEQ ID NO: 91683 - RNA, 20 nt, Artificial Sequence
  LRRK2 RNA guide
aggaugaacuuaaaugucug

SEQ ID NO: 91684 - RNA, 20 nt, Artificial Sequence
  LRRK2 RNA guide
auccagaggagcagacauuu

SEQ ID NO: 91685 - RNA, 20 nt, Artificial Sequence
  LRRK2 RNA guide
augaacuuaaaugucugcuc

SEQ ID NO: 91686 - RNA, 20 nt, Artificial Sequence
  LRRK2 RNA guide
augucugcuccucuggauuu

SEQ ID NO: 91687 - RNA, 20 nt, Artificial Sequence
  LRRK2 RNA guide
cagacauuuaaguucauccu

SEQ ID NO: 91688 - RNA, 20 nt, Artificial Sequence
  LRRK2 RNA guide
cagaggagcagacauuuaag

SEQ ID NO: 91689 - RNA, 20 nt, Artificial Sequence
  LRRK2 RNA guide
ccagaggagcagacauuuaa

SEQ ID NO: 91690 - RNA, 20 nt, Artificial Sequence
  LRRK2 RNA guide
cugcuccucuggauuucuuc

SEQ ID NO: 91691 - RNA, 20 nt, Artificial Sequence
  LRRK2 RNA guide
cuuaaaugucugcuccucug

SEQ ID NO: 91692 - RNA, 20 nt, Artificial Sequence
  LRRK2 RNA guide
gaaauccagaggagcagaca

SEQ ID NO: 91693 - RNA, 20 nt, Artificial Sequence
  LRRK2 RNA guide
gaacuuaaaugucugcuccu

SEQ ID NO: 91694 - RNA, 20 nt, Artificial Sequence
  LRRK2 RNA guide
gaagaaauccagaggagcag

SEQ ID NO: 91695 - RNA, 20 nt, Artificial Sequence
  LRRK2 RNA guide
gagcagacauuuaaguucau

SEQ ID NO: 91696 - RNA, 20 nt, Artificial Sequence
  LRRK2 RNA guide
gaggagcagacauuuaaguu

SEQ ID NO: 91697 - RNA, 20 nt, Artificial Sequence
  LRRK2 RNA guide
gaggaugaacuuaaaugucu

SEQ ID NO: 91698 - RNA, 20 nt, Artificial Sequence
  LRRK2 RNA guide
gaugaacuuaaaugucugcu

SEQ ID NO: 91699 - RNA, 20 nt, Artificial Sequence
  LRRK2 RNA guide
gcagacauuuaaguucaucc

SEQ ID NO: 91700 - RNA, 20 nt, Artificial Sequence
  LRRK2 RNA guide
ggaagaaauccagaggagca

SEQ ID NO: 91701 - RNA, 20 nt, Artificial Sequence
  LRRK2 RNA guide
ggagcagacauuuaaguuca

SEQ ID NO: 91702 - RNA, 20 nt, Artificial Sequence
  LRRK2 RNA guide
ggaugaacuuaaaugucugc

SEQ ID NO: 91703 - RNA, 20 nt, Artificial Sequence
  LRRK2 RNA guide
gucugcuccucuggauuucu

SEQ ID NO: 91704 - RNA, 20 nt, Artificial Sequence
  LRRK2 RNA guide
uaaaugucugcuccucugga

SEQ ID NO: 91705 - RNA, 20 nt, Artificial Sequence
  LRRK2 RNA guide
uccagaggagcagacauuua

SEQ ID NO: 91706 - RNA, 20 nt, Artificial Sequence
  LRRK2 RNA guide
ucugcuccucuggauuucuu

SEQ ID NO: 91707 - RNA, 20 nt, Artificial Sequence
  LRRK2 RNA guide
ugaacuuaaaugucugcucc

SEQ ID NO: 91708 - RNA, 20 nt, Artificial Sequence
  LRRK2 RNA guide
ugucugcuccucuggauuuc

SEQ ID NO: 91709 - RNA, 20 nt, Artificial Sequence
  LRRK2 RNA guide
uuaaaugucugcuccucugg

SEQ ID NO: 91710 - RNA, 21 nt, Artificial Sequence
  LRRK2 RNA guide
aaauccagaggagcagacauu

SEQ ID NO: 91711 - RNA, 21 nt, Artificial Sequence
  LRRK2 RNA guide
aaaugucugcuccucuggauu

SEQ ID NO: 91712 - RNA, 21 nt, Artificial Sequence
  LRRK2 RNA guide
aacuuaaaugucugcuccucu

SEQ ID NO: 91713 - RNA, 21 nt, Artificial Sequence
  LRRK2 RNA guide
aagaaauccagaggagcagac

SEQ ID NO: 91714 - RNA, 21 nt, Artificial Sequence
  LRRK2 RNA guide
aauccagaggagcagacauuu

SEQ ID NO: 91715 - RNA, 21 nt, Artificial Sequence
  LRRK2 RNA guide
aaugucugcuccucuggauuu

SEQ ID NO: 91716 - RNA, 21 nt, Artificial Sequence
  LRRK2 RNA guide
acuuaaaugucugcuccucug

SEQ ID NO: 91717 - RNA, 21 nt, Artificial Sequence
  LRRK2 RNA guide
agaaauccagaggagcagaca

SEQ ID NO: 91718 - RNA, 21 nt, Artificial Sequence
  LRRK2 RNA guide
agaggagcagacauuuaaguu

SEQ ID NO: 91719 - RNA, 21 nt, Artificial Sequence
  LRRK2 RNA guide
agcagacauuuaaguucaucc

SEQ ID NO: 91720 - RNA, 21 nt, Artificial Sequence
  LRRK2 RNA guide
aggagcagacauuuaaguuca

SEQ ID NO: 91721 - RNA, 21 nt, Artificial Sequence
  LRRK2 RNA guide
aggaugaacuuaaaugucugc

SEQ ID NO: 91722 - RNA, 21 nt, Artificial Sequence
  LRRK2 RNA guide
auccagaggagcagacauuua

SEQ ID NO: 91723 - RNA, 21 nt, Artificial Sequence
  LRRK2 RNA guide
augaacuuaaaugucugcucc

SEQ ID NO: 91724 - RNA, 21 nt, Artificial Sequence
  LRRK2 RNA guide
augucugcuccucuggauuuc

SEQ ID NO: 91725 - RNA, 21 nt, Artificial Sequence
  LRRK2 RNA guide
cagacauuuaaguucauccuc

SEQ ID NO: 91726 - RNA, 21 nt, Artificial Sequence
  LRRK2 RNA guide
cagaggagcagacauuuaagu

SEQ ID NO: 91727 - RNA, 21 nt, Artificial Sequence
  LRRK2 RNA guide
ccagaggagcagacauuuaag

SEQ ID NO: 91728 - RNA, 21 nt, Artificial Sequence
  LRRK2 RNA guide
cugcuccucuggauuucuucc

SEQ ID NO: 91729 - RNA, 21 nt, Artificial Sequence
  LRRK2 RNA guide
cuuaaaugucugcuccucugg

SEQ ID NO: 91730 - RNA, 21 nt, Artificial Sequence
  LRRK2 RNA guide
gaaauccagaggagcagacau

SEQ ID NO: 91731 - RNA, 21 nt, Artificial Sequence
  LRRK2 RNA guide
gaacuuaaaugucugcuccuc

SEQ ID NO: 91732 - RNA, 21 nt, Artificial Sequence
  LRRK2 RNA guide
gaagaaauccagaggagcaga

SEQ ID NO: 91733 - RNA, 21 nt, Artificial Sequence
  LRRK2 RNA guide
gagcagacauuuaaguucauc

SEQ ID NO: 91734 - RNA, 21 nt, Artificial Sequence
  LRRK2 RNA guide
gaggagcagacauuuaaguuc

SEQ ID NO: 91735 - RNA, 21 nt, Artificial Sequence
  LRRK2 RNA guide
gaggaugaacuuaaaugucug

SEQ ID NO: 91736 - RNA, 21 nt, Artificial Sequence
  LRRK2 RNA guide
gaugaacuuaaaugucugcuc

SEQ ID NO: 91737 - RNA, 21 nt, Artificial Sequence
  LRRK2 RNA guide
gcagacauuuaaguucauccu

SEQ ID NO: 91738 - RNA, 21 nt, Artificial Sequence
  LRRK2 RNA guide
ggaagaaauccagaggagcag

SEQ ID NO: 91739 - RNA, 21 nt, Artificial Sequence
  LRRK2 RNA guide
ggagcagacauuuaaguucau

SEQ ID NO: 91740 - RNA, 21 nt, Artificial Sequence
  LRRK2 RNA guide
ggaugaacuuaaaugucugcu

SEQ ID NO: 91741 - RNA, 21 nt, Artificial Sequence
  LRRK2 RNA guide
gggaagaaauccagaggagca

SEQ ID NO: 91742 - RNA, 21 nt, Artificial Sequence
  LRRK2 RNA guide
gucugcuccucuggauuucuu

SEQ ID NO: 91743 - RNA, 21 nt, Artificial Sequence
  LRRK2 RNA guide
uaaaugucugcuccucuggau

SEQ ID NO: 91744 - RNA, 21 nt, Artificial Sequence
  LRRK2 RNA guide
uccagaggagcagacauuuaa

SEQ ID NO: 91745 - RNA, 21 nt, Artificial Sequence
  LRRK2 RNA guide
ucugcuccucuggauuucuuc

SEQ ID NO: 91746 - RNA, 21 nt, Artificial Sequence
  LRRK2 RNA guide
ugaacuuaaaugucugcuccu

SEQ ID NO: 91747 - RNA, 21 nt, Artificial Sequence
  LRRK2 RNA guide
ugaggaugaacuuaaaugucu

SEQ ID NO: 91748 - RNA, 21 nt, Artificial Sequence
  LRRK2 RNA guide
ugucugcuccucuggauuucu

SEQ ID NO: 91749 - RNA, 21 nt, Artificial Sequence
  LRRK2 RNA guide
uuaaaugucugcuccucugga

SEQ ID NO: 91750 - RNA, 22 nt, Artificial Sequence
  LRRK2 RNA guide
aaauccagaggagcagacauuu

SEQ ID NO: 91751 - RNA, 22 nt, Artificial Sequence
  LRRK2 RNA guide
aaaugucugcuccucuggauuu

SEQ ID NO: 91752 - RNA, 22 nt, Artificial Sequence
  LRRK2 RNA guide
aacuuaaaugucugcuccucug

SEQ ID NO: 91753 - RNA, 22 nt, Artificial Sequence
  LRRK2 RNA guide
aagaaauccagaggagcagaca

SEQ ID NO: 91754 - RNA, 22 nt, Artificial Sequence
  LRRK2 RNA guide
aauccagaggagcagacauuua

SEQ ID NO: 91755 - RNA, 22 nt, Artificial Sequence
  LRRK2 RNA guide
aaugucugcuccucuggauuuc

SEQ ID NO: 91756 - RNA, 22 nt, Artificial Sequence
  LRRK2 RNA guide
acuuaaaugucugcuccucugg

SEQ ID NO: 91757 - RNA, 22 nt, Artificial Sequence
  LRRK2 RNA guide
agaaauccagaggagcagacau

SEQ ID NO: 91758 - RNA, 22 nt, Artificial Sequence
  LRRK2 RNA guide
agaggagcagacauuuaaguuc

SEQ ID NO: 91759 - RNA, 22 nt, Artificial Sequence
  LRRK2 RNA guide
agcagacauuuaaguucauccu

SEQ ID NO: 91760 - RNA, 22 nt, Artificial Sequence
  LRRK2 RNA guide
aggagcagacauuuaaguucau

SEQ ID NO: 91761 - RNA, 22 nt, Artificial Sequence
  LRRK2 RNA guide
aggaugaacuuaaaugucugcu

SEQ ID NO: 91762 - RNA, 22 nt, Artificial Sequence
  LRRK2 RNA guide
agggaagaaauccagaggagca

SEQ ID NO: 91763 - RNA, 22 nt, Artificial Sequence
  LRRK2 RNA guide
auccagaggagcagacauuuaa

SEQ ID NO: 91764 - RNA, 22 nt, Artificial Sequence
  LRRK2 RNA guide
augaacuuaaaugucugcuccu

SEQ ID NO: 91765 - RNA, 22 nt, Artificial Sequence
  LRRK2 RNA guide
augucugcuccucuggauuucu

SEQ ID NO: 91766 - RNA, 22 nt, Artificial Sequence
  LRRK2 RNA guide
cagacauuuaaguucauccuca

SEQ ID NO: 91767 - RNA, 22 nt, Artificial Sequence
  LRRK2 RNA guide
cagaggagcagacauuuaaguu

SEQ ID NO: 91768 - RNA, 22 nt, Artificial Sequence
  LRRK2 RNA guide
ccagaggagcagacauuuaagu

SEQ ID NO: 91769 - RNA, 22 nt, Artificial Sequence
  LRRK2 RNA guide
cugcuccucuggauuucuuccc

SEQ ID NO: 91770 - RNA, 22 nt, Artificial Sequence
  LRRK2 RNA guide
cuuaaaugucugcuccucugga

SEQ ID NO: 91771 - RNA, 22 nt, Artificial Sequence
  LRRK2 RNA guide
gaaauccagaggagcagacauu

SEQ ID NO: 91772 - RNA, 22 nt, Artificial Sequence
  LRRK2 RNA guide
gaacuuaaaugucugcuccucu

SEQ ID NO: 91773 - RNA, 22 nt, Artificial Sequence
  LRRK2 RNA guide
gaagaaauccagaggagcagac

SEQ ID NO: 91774 - RNA, 22 nt, Artificial Sequence
  LRRK2 RNA guide
gagcagacauuuaaguucaucc

SEQ ID NO: 91775 - RNA, 22 nt, Artificial Sequence
  LRRK2 RNA guide
gaggagcagacauuuaaguuca

SEQ ID NO: 91776 - RNA, 22 nt, Artificial Sequence
  LRRK2 RNA guide
gaggaugaacuuaaaugucugc

SEQ ID NO: 91777 - RNA, 22 nt, Artificial Sequence
  LRRK2 RNA guide
gaugaacuuaaaugucugcucc

SEQ ID NO: 91778 - RNA, 22 nt, Artificial Sequence
  LRRK2 RNA guide
gcagacauuuaaguucauccuc

SEQ ID NO: 91779 - RNA, 22 nt, Artificial Sequence
  LRRK2 RNA guide
ggaagaaauccagaggagcaga

SEQ ID NO: 91780 - RNA, 22 nt, Artificial Sequence
  LRRK2 RNA guide
ggagcagacauuuaaguucauc

SEQ ID NO: 91781 - RNA, 22 nt, Artificial Sequence
  LRRK2 RNA guide
ggaugaacuuaaaugucugcuc

SEQ ID NO: 91782 - RNA, 22 nt, Artificial Sequence
  LRRK2 RNA guide
gggaagaaauccagaggagcag

SEQ ID NO: 91783 - RNA, 22 nt, Artificial Sequence
  LRRK2 RNA guide
gucugcuccucuggauuucuuc

SEQ ID NO: 91784 - RNA, 22 nt, Artificial Sequence
  LRRK2 RNA guide
uaaaugucugcuccucuggauu

SEQ ID NO: 91785 - RNA, 22 nt, Artificial Sequence
  LRRK2 RNA guide
uccagaggagcagacauuuaag

SEQ ID NO: 91786 - RNA, 22 nt, Artificial Sequence
  LRRK2 RNA guide
ucugcuccucuggauuucuucc

SEQ ID NO: 91787 - RNA, 22 nt, Artificial Sequence
  LRRK2 RNA guide
ugaacuuaaaugucugcuccuc

SEQ ID NO: 91788 - RNA, 22 nt, Artificial Sequence
  LRRK2 RNA guide
ugaggaugaacuuaaaugucug

SEQ ID NO: 91789 - RNA, 22 nt, Artificial Sequence
  LRRK2 RNA guide
ugucugcuccucuggauuucuu

SEQ ID NO: 91790 - RNA, 22 nt, Artificial Sequence
  LRRK2 RNA guide
uuaaaugucugcuccucuggau

SEQ ID NO: 91791 - RNA, 22 nt, Artificial Sequence
  LRRK2 RNA guide
uugaggaugaacuuaaaugucu

SEQ ID NO: 91792 - RNA, 20 nt, Artificial Sequence
  LRRK2 RNA guide
aagccagucaaauuauagaa

SEQ ID NO: 91793 - RNA, 20 nt, Artificial Sequence
  LRRK2 RNA guide
agaaaacaaaaauccacauc

SEQ ID NO: 91794 - RNA, 20 nt, Artificial Sequence
  LRRK2 RNA guide
agccagucaaauuauagaaa

SEQ ID NO: 91795 - RNA, 20 nt, Artificial Sequence
  LRRK2 RNA guide
aguuaagccagucaaauuau

SEQ ID NO: 91796 - RNA, 20 nt, Artificial Sequence
  LRRK2 RNA guide
caguuaagccagucaaauua

SEQ ID NO: 91797 - RNA, 20 nt, Artificial Sequence
  LRRK2 RNA guide
ccagucaaauuauagaaaac

SEQ ID NO: 91798 - RNA, 20 nt, Artificial Sequence
  LRRK2 RNA guide
gaaaacaaaaauccacauca

SEQ ID NO: 91799 - RNA, 20 nt, Artificial Sequence
  LRRK2 RNA guide
gaugauguggauuuuuguuu

SEQ ID NO: 91800 - RNA, 20 nt, Artificial Sequence
  LRRK2 RNA guide
gauguggauuuuuguuuucu

SEQ ID NO: 91801 - RNA, 20 nt, Artificial Sequence
  LRRK2 RNA guide
gcaguuaagccagucaaauu

SEQ ID NO: 91802 - RNA, 20 nt, Artificial Sequence
  LRRK2 RNA guide
gccagucaaauuauagaaaa

SEQ ID NO: 91803 - RNA, 20 nt, Artificial Sequence
  LRRK2 RNA guide
ggaugauguggauuuuuguu

SEQ ID NO: 91804 - RNA, 20 nt, Artificial Sequence
  LRRK2 RNA guide
guuaagccagucaaauuaua

SEQ ID NO: 91805 - RNA, 20 nt, Artificial Sequence
  LRRK2 RNA guide
guuuucuauaauuugacugg

SEQ ID NO: 91806 - RNA, 20 nt, Artificial Sequence
  LRRK2 RNA guide
uaagccagucaaauuauaga

SEQ ID NO: 91807 - RNA, 20 nt, Artificial Sequence
  LRRK2 RNA guide
ugauguggauuuuuguuuuc

SEQ ID NO: 91808 - RNA, 20 nt, Artificial Sequence
  LRRK2 RNA guide
uggaugauguggauuuuugu

SEQ ID NO: 91809 - RNA, 20 nt, Artificial Sequence
  LRRK2 RNA guide
uuaagccagucaaauuauag

SEQ ID NO: 91810 - RNA, 20 nt, Artificial Sequence
  LRRK2 RNA guide
uucuauaauuugacuggcuu

SEQ ID NO: 91811 - RNA, 20 nt, Artificial Sequence
  LRRK2 RNA guide
uuggaugauguggauuuuug

SEQ ID NO: 91812 - RNA, 20 nt, Artificial Sequence
  LRRK2 RNA guide
uuucuauaauuugacuggcu

SEQ ID NO: 91813 - RNA, 20 nt, Artificial Sequence
  LRRK2 RNA guide
uuuggaugauguggauuuuu

SEQ ID NO: 91814 - RNA, 20 nt, Artificial Sequence
  LRRK2 RNA guide
uuuucuauaauuugacuggc

SEQ ID NO: 91815 - RNA, 21 nt, Artificial Sequence
  LRRK2 RNA guide
caguuaagccagucaaauuau

SEQ ID NO: 91816 - RNA, 21 nt, Artificial Sequence
  LRRK2 RNA guide
gcaguuaagccagucaaauua

SEQ ID NO: 91817 - RNA, 21 nt, Artificial Sequence
  LRRK2 RNA guide
gccagucaaauuauagaaaac

SEQ ID NO: 91818 - RNA, 21 nt, Artificial Sequence
  LRRK2 RNA guide
ggaugauguggauuuuuguuu

SEQ ID NO: 91819 - RNA, 21 nt, Artificial Sequence
  LRRK2 RNA guide
guuaagccagucaaauuauag

SEQ ID NO: 91820 - RNA, 21 nt, Artificial Sequence
  LRRK2 RNA guide
guuuggaugauguggauuuuu

SEQ ID NO: 91821 - RNA, 21 nt, Artificial Sequence
  LRRK2 RNA guide
guuuucuauaauuugacuggc

SEQ ID NO: 91822 - RNA, 21 nt, Artificial Sequence
  LRRK2 RNA guide
ugcaguuaagccagucaaauu

SEQ ID NO: 91823 - RNA, 21 nt, Artificial Sequence
  LRRK2 RNA guide
uggaugauguggauuuuuguu

SEQ ID NO: 91824 - RNA, 21 nt, Artificial Sequence
  LRRK2 RNA guide
uuggaugauguggauuuuugu

SEQ ID NO: 91825 - RNA, 21 nt, Artificial Sequence
  LRRK2 RNA guide
uuuggaugauguggauuuuug

SEQ ID NO: 91826 - RNA, 22 nt, Artificial Sequence
  LRRK2 RNA guide
agccagucaaauuauagaaaac

SEQ ID NO: 91827 - RNA, 22 nt, Artificial Sequence
  LRRK2 RNA guide
aguuaagccagucaaauuauag

SEQ ID NO: 91828 - RNA, 22 nt, Artificial Sequence
  LRRK2 RNA guide
caguuaagccagucaaauuaua

SEQ ID NO: 91829 - RNA, 22 nt, Artificial Sequence
  LRRK2 RNA guide
gaaaacaaaaauccacaucauc

SEQ ID NO: 91830 - RNA, 22 nt, Artificial Sequence
  LRRK2 RNA guide
gaugauguggauuuuuguuuuc

SEQ ID NO: 91831 - RNA, 22 nt, Artificial Sequence
  LRRK2 RNA guide
gcaguuaagccagucaaauuau

SEQ ID NO: 91832 - RNA, 22 nt, Artificial Sequence
  LRRK2 RNA guide
gccagucaaauuauagaaaaca

SEQ ID NO: 91833 - RNA, 22 nt, Artificial Sequence
  LRRK2 RNA guide
ggaugauguggauuuuuguuuu

SEQ ID NO: 91834 - RNA, 22 nt, Artificial Sequence
  LRRK2 RNA guide
guuaagccagucaaauuauaga

SEQ ID NO: 91835 - RNA, 22 nt, Artificial Sequence
  LRRK2 RNA guide
guuuggaugauguggauuuuug

SEQ ID NO: 91836 - RNA, 22 nt, Artificial Sequence
  LRRK2 RNA guide
guuuucuauaauuugacuggcu

SEQ ID NO: 91837 - RNA, 22 nt, Artificial Sequence
  LRRK2 RNA guide
ugcaguuaagccagucaaauua

SEQ ID NO: 91838 - RNA, 22 nt, Artificial Sequence
  LRRK2 RNA guide
uggaugauguggauuuuuguuu

SEQ ID NO: 91839 - RNA, 22 nt, Artificial Sequence
  LRRK2 RNA guide
uguuuggaugauguggauuuuu

SEQ ID NO: 91840 - RNA, 22 nt, Artificial Sequence
  LRRK2 RNA guide
uguuuucuauaauuugacuggc

SEQ ID NO: 91841 - RNA, 22 nt, Artificial Sequence
  LRRK2 RNA guide
uugcaguuaagccagucaaauu

SEQ ID NO: 91842 - RNA, 22 nt, Artificial Sequence
  LRRK2 RNA guide
uuggaugauguggauuuuuguu

SEQ ID NO: 91843 - RNA, 22 nt, Artificial Sequence
  LRRK2 RNA guide
uuuggaugauguggauuuuugu

SEQ ID NO: 91844 - RNA, 20 nt, Artificial Sequence
  LRRK2 RNA guide
aagccagucaaauuauagga

SEQ ID NO: 91845 - RNA, 20 nt, Artificial Sequence
  LRRK2 RNA guide
agccagucaaauuauaggaa

SEQ ID NO: 91846 - RNA, 20 nt, Artificial Sequence
  LRRK2 RNA guide
aggaaacaaaaauccacauc

SEQ ID NO: 91847 - RNA, 20 nt, Artificial Sequence
  LRRK2 RNA guide
auaggaaacaaaaauccaca

SEQ ID NO: 91848 - RNA, 20 nt, Artificial Sequence
  LRRK2 RNA guide
augauguggauuuuuguuuc

SEQ ID NO: 91849 - RNA, 20 nt, Artificial Sequence
  LRRK2 RNA guide
auguggauuuuuguuuccua

SEQ ID NO: 91850 - RNA, 20 nt, Artificial Sequence
  LRRK2 RNA guide
cagucaaauuauaggaaaca

SEQ ID NO: 91851 - RNA, 20 nt, Artificial Sequence
  LRRK2 RNA guide
ccagucaaauuauaggaaac

SEQ ID NO: 91852 - RNA, 20 nt, Artificial Sequence
  LRRK2 RNA guide
gauguggauuuuuguuuccu

SEQ ID NO: 91853 - RNA, 20 nt, Artificial Sequence
  LRRK2 RNA guide
gccagucaaauuauaggaaa

SEQ ID NO: 91854 - RNA, 20 nt, Artificial Sequence
  LRRK2 RNA guide
ggaaacaaaaauccacauca

SEQ ID NO: 91855 - RNA, 20 nt, Artificial Sequence
  LRRK2 RNA guide
guggauuuuuguuuccuaua

SEQ ID NO: 91856 - RNA, 20 nt, Artificial Sequence
  LRRK2 RNA guide
guuuccuauaauuugacugg

SEQ ID NO: 91857 - RNA, 20 nt, Artificial Sequence
  LRRK2 RNA guide
uaagccagucaaauuauagg

SEQ ID NO: 91858 - RNA, 20 nt, Artificial Sequence
  LRRK2 RNA guide
uaggaaacaaaaauccacau

SEQ ID NO: 91859 - RNA, 20 nt, Artificial Sequence
  LRRK2 RNA guide
uauaggaaacaaaaauccac

SEQ ID NO: 91860 - RNA, 20 nt, Artificial Sequence
  LRRK2 RNA guide
uccuauaauuugacuggcuu

SEQ ID NO: 91861 - RNA, 20 nt, Artificial Sequence
  LRRK2 RNA guide
ugauguggauuuuuguuucc

SEQ ID NO: 91862 - RNA, 20 nt, Artificial Sequence
  LRRK2 RNA guide
uguggauuuuuguuuccuau

SEQ ID NO: 91863 - RNA, 20 nt, Artificial Sequence
  LRRK2 RNA guide
uguuuccuauaauuugacug

SEQ ID NO: 91864 - RNA, 20 nt, Artificial Sequence
  LRRK2 RNA guide
uuccuauaauuugacuggcu

SEQ ID NO: 91865 - RNA, 20 nt, Artificial Sequence
  LRRK2 RNA guide
uuuccuauaauuugacuggc

SEQ ID NO: 91866 - RNA, 21 nt, Artificial Sequence
  LRRK2 RNA guide
aagccagucaaauuauaggaa

SEQ ID NO: 91867 - RNA, 21 nt, Artificial Sequence
  LRRK2 RNA guide
agccagucaaauuauaggaaa

SEQ ID NO: 91868 - RNA, 21 nt, Artificial Sequence
  LRRK2 RNA guide
aggaaacaaaaauccacauca

SEQ ID NO: 91869 - RNA, 21 nt, Artificial Sequence
  LRRK2 RNA guide
augauguggauuuuuguuucc

SEQ ID NO: 91870 - RNA, 21 nt, Artificial Sequence
  LRRK2 RNA guide
ccagucaaauuauaggaaaca

SEQ ID NO: 91871 - RNA, 21 nt, Artificial Sequence
  LRRK2 RNA guide
gaugauguggauuuuuguuuc

SEQ ID NO: 91872 - RNA, 21 nt, Artificial Sequence
  LRRK2 RNA guide
gauguggauuuuuguuuccua

SEQ ID NO: 91873 - RNA, 21 nt, Artificial Sequence
  LRRK2 RNA guide
gccagucaaauuauaggaaac

SEQ ID NO: 91874 - RNA, 21 nt, Artificial Sequence
  LRRK2 RNA guide
ggaaacaaaaauccacaucau

SEQ ID NO: 91875 - RNA, 21 nt, Artificial Sequence
  LRRK2 RNA guide
guuuccuauaauuugacuggc

SEQ ID NO: 91876 - RNA, 21 nt, Artificial Sequence
  LRRK2 RNA guide
uaagccagucaaauuauagga

SEQ ID NO: 91877 - RNA, 21 nt, Artificial Sequence
  LRRK2 RNA guide
uaggaaacaaaaauccacauc

SEQ ID NO: 91878 - RNA, 21 nt, Artificial Sequence
  LRRK2 RNA guide
uccuauaauuugacuggcuua

SEQ ID NO: 91879 - RNA, 21 nt, Artificial Sequence
  LRRK2 RNA guide
ugauguggauuuuuguuuccu

SEQ ID NO: 91880 - RNA, 21 nt, Artificial Sequence
  LRRK2 RNA guide
uguuuccuauaauuugacugg

SEQ ID NO: 91881 - RNA, 21 nt, Artificial Sequence
  LRRK2 RNA guide
uuaagccagucaaauuauagg

SEQ ID NO: 91882 - RNA, 21 nt, Artificial Sequence
  LRRK2 RNA guide
uuccuauaauuugacuggcuu

SEQ ID NO: 91883 - RNA, 21 nt, Artificial Sequence
  LRRK2 RNA guide
uuuccuauaauuugacuggcu

SEQ ID NO: 91884 - RNA, 22 nt, Artificial Sequence
  LRRK2 RNA guide
aagccagucaaauuauaggaaa

SEQ ID NO: 91885 - RNA, 22 nt, Artificial Sequence
  LRRK2 RNA guide
agccagucaaauuauaggaaac

SEQ ID NO: 91886 - RNA, 22 nt, Artificial Sequence
  LRRK2 RNA guide
aggaaacaaaaauccacaucau

SEQ ID NO: 91887 - RNA, 22 nt, Artificial Sequence
  LRRK2 RNA guide
auaggaaacaaaaauccacauc

SEQ ID NO: 91888 - RNA, 22 nt, Artificial Sequence
  LRRK2 RNA guide
augauguggauuuuuguuuccu

SEQ ID NO: 91889 - RNA, 22 nt, Artificial Sequence
  LRRK2 RNA guide
ccagucaaauuauaggaaacaa

SEQ ID NO: 91890 - RNA, 22 nt, Artificial Sequence
  LRRK2 RNA guide
gaugauguggauuuuuguuucc

SEQ ID NO: 91891 - RNA, 22 nt, Artificial Sequence
  LRRK2 RNA guide
gauguggauuuuuguuuccuau

SEQ ID NO: 91892 - RNA, 22 nt, Artificial Sequence
  LRRK2 RNA guide
gccagucaaauuauaggaaaca

SEQ ID NO: 91893 - RNA, 22 nt, Artificial Sequence
  LRRK2 RNA guide
ggaaacaaaaauccacaucauc

SEQ ID NO: 91894 - RNA, 22 nt, Artificial Sequence
  LRRK2 RNA guide
ggaugauguggauuuuuguuuc

SEQ ID NO: 91895 - RNA, 22 nt, Artificial Sequence
  LRRK2 RNA guide
guuaagccagucaaauuauagg

SEQ ID NO: 91896 - RNA, 22 nt, Artificial Sequence
  LRRK2 RNA guide
guuuccuauaauuugacuggcu

SEQ ID NO: 91897 - RNA, 22 nt, Artificial Sequence
  LRRK2 RNA guide
uaagccagucaaauuauaggaa

SEQ ID NO: 91898 - RNA, 22 nt, Artificial Sequence
  LRRK2 RNA guide
uaggaaacaaaaauccacauca

SEQ ID NO: 91899 - RNA, 22 nt, Artificial Sequence
  LRRK2 RNA guide
uccuauaauuugacuggcuuaa

SEQ ID NO: 91900 - RNA, 22 nt, Artificial Sequence
  LRRK2 RNA guide
ugauguggauuuuuguuuccua

SEQ ID NO: 91901 - RNA, 22 nt, Artificial Sequence
  LRRK2 RNA guide
uguuuccuauaauuugacuggc

SEQ ID NO: 91902 - RNA, 22 nt, Artificial Sequence
  LRRK2 RNA guide
uuaagccagucaaauuauagga

SEQ ID NO: 91903 - RNA, 22 nt, Artificial Sequence
  LRRK2 RNA guide
uuccuauaauuugacuggcuua

SEQ ID NO: 91904 - RNA, 22 nt, Artificial Sequence
  LRRK2 RNA guide
uuguuuccuauaauuugacugg

SEQ ID NO: 91905 - RNA, 22 nt, Artificial Sequence
  LRRK2 RNA guide
uuuccuauaauuugacuggcuu

SEQ ID NO: 91906 - RNA, 20 nt, Artificial Sequence
  LRRK2 RNA guide
cuuaaugcauguaaaaacac

SEQ ID NO: 91907 - RNA, 20 nt, Artificial Sequence
  LRRK2 RNA guide
guguuuuuacaugcauuaag

SEQ ID NO: 91908 - RNA, 20 nt, Artificial Sequence
  LRRK2 RNA guide
aacaaauagugaugacuuuc

SEQ ID NO: 91909 - RNA, 20 nt, Artificial Sequence
  LRRK2 RNA guide
acaaauagugaugacuuucu

SEQ ID NO: 91910 - RNA, 20 nt, Artificial Sequence
  LRRK2 RNA guide
agaaaaccuacagagaaaaa

SEQ ID NO: 91911 - RNA, 20 nt, Artificial Sequence
  LRRK2 RNA guide
caaauagugaugacuuucua

SEQ ID NO: 91912 - RNA, 20 nt, Artificial Sequence
  LRRK2 RNA guide
gaaaacaaauagugaugacu

SEQ ID NO: 91913 - RNA, 20 nt, Artificial Sequence
  LRRK2 RNA guide
gaaaaccuacagagaaaaaa

SEQ ID NO: 91914 - RNA, 20 nt, Artificial Sequence
  LRRK2 RNA guide
aagaaaaccuacagagaaaa

SEQ ID NO: 91915 - RNA, 20 nt, Artificial Sequence
  LRRK2 RNA guide
aaaaacucuguggacuaaua

SEQ ID NO: 91916 - RNA, 20 nt, Artificial Sequence
  LRRK2 RNA guide
aaaaagugcacgcagucuau

SEQ ID NO: 91917 - RNA, 20 nt, Artificial Sequence
  LRRK2 RNA guide
aaaacucuguggacuaauag

SEQ ID NO: 91918 - RNA, 20 nt, Artificial Sequence
  LRRK2 RNA guide
aaaacugaaaaacucugugg

SEQ ID NO: 91919 - RNA, 20 nt, Artificial Sequence
  LRRK2 RNA guide
aaaagugcacgcagucuauu

SEQ ID NO: 91920 - RNA, 20 nt, Artificial Sequence
  LRRK2 RNA guide
aaacugaaaaacucugugga

SEQ ID NO: 91921 - RNA, 20 nt, Artificial Sequence
  LRRK2 RNA guide
aaagugcacgcagucuauua

SEQ ID NO: 91922 - RNA, 20 nt, Artificial Sequence
  LRRK2 RNA guide
aacugaaaaacucuguggac

SEQ ID NO: 91923 - RNA, 20 nt, Artificial Sequence
  LRRK2 RNA guide
aagaaaacugaaaaacucug

SEQ ID NO: 91924 - RNA, 20 nt, Artificial Sequence
  LRRK2 RNA guide
acgcagucuauuaguccaca

SEQ ID NO: 91925 - RNA, 20 nt, Artificial Sequence
  LRRK2 RNA guide
acugaaaaacucuguggacu

SEQ ID NO: 91926 - RNA, 20 nt, Artificial Sequence
  LRRK2 RNA guide
agaaaacugaaaaacucugu

SEQ ID NO: 91927 - RNA, 20 nt, Artificial Sequence
  LRRK2 RNA guide
aguccacagaguuuuucagu

SEQ ID NO: 91928 - RNA, 20 nt, Artificial Sequence
  LRRK2 RNA guide
agucuauuaguccacagagu

SEQ ID NO: 91929 - RNA, 20 nt, Artificial Sequence
  LRRK2 RNA guide
agugcacgcagucuauuagu

SEQ ID NO: 91930 - RNA, 20 nt, Artificial Sequence
  LRRK2 RNA guide
auuaguccacagaguuuuuc

SEQ ID NO: 91931 - RNA, 20 nt, Artificial Sequence
  LRRK2 RNA guide
cacgcagucuauuaguccac

SEQ ID NO: 91932 - RNA, 20 nt, Artificial Sequence
  LRRK2 RNA guide
cagucuauuaguccacagag

SEQ ID NO: 91933 - RNA, 20 nt, Artificial Sequence
  LRRK2 RNA guide
cgcagucuauuaguccacag

SEQ ID NO: 91934 - RNA, 20 nt, Artificial Sequence
  LRRK2 RNA guide
cuauuaguccacagaguuuu

SEQ ID NO: 91935 - RNA, 20 nt, Artificial Sequence
  LRRK2 RNA guide
cugaaaaacucuguggacua

SEQ ID NO: 91936 - RNA, 20 nt, Artificial Sequence
  LRRK2 RNA guide
cuguggacuaauagacugcg

SEQ ID NO: 91937 - RNA, 20 nt, Artificial Sequence
  LRRK2 RNA guide
gaaaaacucuguggacuaau

SEQ ID NO: 91938 - RNA, 20 nt, Artificial Sequence
  LRRK2 RNA guide
gaaaacugaaaaacucugug

SEQ ID NO: 91939 - RNA, 20 nt, Artificial Sequence
  LRRK2 RNA guide
gacuaauagacugcgugcac

SEQ ID NO: 91940 - RNA, 20 nt, Artificial Sequence
  LRRK2 RNA guide
gcagucuauuaguccacaga

SEQ ID NO: 91941 - RNA, 20 nt, Artificial Sequence
  LRRK2 RNA guide
ggacuaauagacugcgugca

SEQ ID NO: 91942 - RNA, 20 nt, Artificial Sequence
  LRRK2 RNA guide
guccacagaguuuuucaguu

SEQ ID NO: 91943 - RNA, 20 nt, Artificial Sequence
  LRRK2 RNA guide
gucuauuaguccacagaguu

SEQ ID NO: 91944 - RNA, 20 nt, Artificial Sequence
  LRRK2 RNA guide
gugcacgcagucuauuaguc

SEQ ID NO: 91945 - RNA, 20 nt, Artificial Sequence
  LRRK2 RNA guide
guggacuaauagacugcgug

SEQ ID NO: 91946 - RNA, 20 nt, Artificial Sequence
  LRRK2 RNA guide
uaaaaagugcacgcagucua

SEQ ID NO: 91947 - RNA, 20 nt, Artificial Sequence
  LRRK2 RNA guide
uaguccacagaguuuuucag

SEQ ID NO: 91948 - RNA, 20 nt, Artificial Sequence
  LRRK2 RNA guide
ucuauuaguccacagaguuu

SEQ ID NO: 91949 - RNA, 20 nt, Artificial Sequence
  LRRK2 RNA guide
ugaaaaacucuguggacuaa

SEQ ID NO: 91950 - RNA, 20 nt, Artificial Sequence
  LRRK2 RNA guide
ugcacgcagucuauuagucc

SEQ ID NO: 91951 - RNA, 20 nt, Artificial Sequence
  LRRK2 RNA guide
uggacuaauagacugcgugc

SEQ ID NO: 91952 - RNA, 20 nt, Artificial Sequence
  LRRK2 RNA guide
uguggacuaauagacugcgu

SEQ ID NO: 91953 - RNA, 20 nt, Artificial Sequence
  LRRK2 RNA guide
uuaguccacagaguuuuuca

SEQ ID NO: 91954 - RNA, 21 nt, Artificial Sequence
  LRRK2 RNA guide
aaaaacucuguggacuaauag

SEQ ID NO: 91955 - RNA, 21 nt, Artificial Sequence
  LRRK2 RNA guide
aaaaagugcacgcagucuauu

SEQ ID NO: 91956 - RNA, 21 nt, Artificial Sequence
  LRRK2 RNA guide
aaaacugaaaaacucugugga

SEQ ID NO: 91957 - RNA, 21 nt, Artificial Sequence
  LRRK2 RNA guide
aaaagugcacgcagucuauua

SEQ ID NO: 91958 - RNA, 21 nt, Artificial Sequence
  LRRK2 RNA guide
aaacugaaaaacucuguggac

SEQ ID NO: 91959 - RNA, 21 nt, Artificial Sequence
  LRRK2 RNA guide
aaagugcacgcagucuauuag

SEQ ID NO: 91960 - RNA, 21 nt, Artificial Sequence
  LRRK2 RNA guide
aacugaaaaacucuguggacu

SEQ ID NO: 91961 - RNA, 21 nt, Artificial Sequence
  LRRK2 RNA guide
aagugcacgcagucuauuagu

SEQ ID NO: 91962 - RNA, 21 nt, Artificial Sequence
  LRRK2 RNA guide
acgcagucuauuaguccacag

SEQ ID NO: 91963 - RNA, 21 nt, Artificial Sequence
  LRRK2 RNA guide
acugaaaaacucuguggacua

SEQ ID NO: 91964 - RNA, 21 nt, Artificial Sequence
  LRRK2 RNA guide
agaaaacugaaaaacucugug

SEQ ID NO: 91965 - RNA, 21 nt, Artificial Sequence
  LRRK2 RNA guide
aguccacagaguuuuucaguu

SEQ ID NO: 91966 - RNA, 21 nt, Artificial Sequence
  LRRK2 RNA guide
agucuauuaguccacagaguu

SEQ ID NO: 91967 - RNA, 21 nt, Artificial Sequence
  LRRK2 RNA guide
agugcacgcagucuauuaguc

SEQ ID NO: 91968 - RNA, 21 nt, Artificial Sequence
  LRRK2 RNA guide
auuaguccacagaguuuuuca

SEQ ID NO: 91969 - RNA, 21 nt, Artificial Sequence
  LRRK2 RNA guide
cacgcagucuauuaguccaca

SEQ ID NO: 91970 - RNA, 21 nt, Artificial Sequence
  LRRK2 RNA guide
cagucuauuaguccacagagu

SEQ ID NO: 91971 - RNA, 21 nt, Artificial Sequence
  LRRK2 RNA guide
cgcagucuauuaguccacaga

SEQ ID NO: 91972 - RNA, 21 nt, Artificial Sequence
  LRRK2 RNA guide
cuauuaguccacagaguuuuu

SEQ ID NO: 91973 - RNA, 21 nt, Artificial Sequence
  LRRK2 RNA guide
cugaaaaacucuguggacuaa

SEQ ID NO: 91974 - RNA, 21 nt, Artificial Sequence
  LRRK2 RNA guide
cuguggacuaauagacugcgu

SEQ ID NO: 91975 - RNA, 21 nt, Artificial Sequence
  LRRK2 RNA guide
gaaaaacucuguggacuaaua

SEQ ID NO: 91976 - RNA, 21 nt, Artificial Sequence
  LRRK2 RNA guide
gaaaacugaaaaacucugugg

SEQ ID NO: 91977 - RNA, 21 nt, Artificial Sequence
  LRRK2 RNA guide
gacuaauagacugcgugcacu

SEQ ID NO: 91978 - RNA, 21 nt, Artificial Sequence
  LRRK2 RNA guide
gcacgcagucuauuaguccac

SEQ ID NO: 91979 - RNA, 21 nt, Artificial Sequence
  LRRK2 RNA guide
gcagucuauuaguccacagag

SEQ ID NO: 91980 - RNA, 21 nt, Artificial Sequence
  LRRK2 RNA guide
ggacuaauagacugcgugcac

SEQ ID NO: 91981 - RNA, 21 nt, Artificial Sequence
  LRRK2 RNA guide
guccacagaguuuuucaguuu

SEQ ID NO: 91982 - RNA, 21 nt, Artificial Sequence
  LRRK2 RNA guide
gucuauuaguccacagaguuu

SEQ ID NO: 91983 - RNA, 21 nt, Artificial Sequence
  LRRK2 RNA guide
gugcacgcagucuauuagucc

SEQ ID NO: 91984 - RNA, 21 nt, Artificial Sequence
  LRRK2 RNA guide
guggacuaauagacugcgugc

SEQ ID NO: 91985 - RNA, 21 nt, Artificial Sequence
  LRRK2 RNA guide
uaaaaagugcacgcagucuau

SEQ ID NO: 91986 - RNA, 21 nt, Artificial Sequence
  LRRK2 RNA guide
uaguccacagaguuuuucagu

SEQ ID NO: 91987 - RNA, 21 nt, Artificial Sequence
  LRRK2 RNA guide
uauuaguccacagaguuuuuc

SEQ ID NO: 91988 - RNA, 21 nt, Artificial Sequence
  LRRK2 RNA guide
ucuauuaguccacagaguuuu

SEQ ID NO: 91989 - RNA, 21 nt, Artificial Sequence
  LRRK2 RNA guide
ucuguggacuaauagacugcg

SEQ ID NO: 91990 - RNA, 21 nt, Artificial Sequence
  LRRK2 RNA guide
ugaaaaacucuguggacuaau

SEQ ID NO: 91991 - RNA, 21 nt, Artificial Sequence
  LRRK2 RNA guide
ugcacgcagucuauuagucca

SEQ ID NO: 91992 - RNA, 21 nt, Artificial Sequence
  LRRK2 RNA guide
uggacuaauagacugcgugca

SEQ ID NO: 91993 - RNA, 21 nt, Artificial Sequence
  LRRK2 RNA guide
uguggacuaauagacugcgug

SEQ ID NO: 91994 - RNA, 21 nt, Artificial Sequence
  LRRK2 RNA guide
uuaaaaagugcacgcagucua

SEQ ID NO: 91995 - RNA, 21 nt, Artificial Sequence
  LRRK2 RNA guide
uuaguccacagaguuuuucag

SEQ ID NO: 91996 - RNA, 22 nt, Artificial Sequence
  LRRK2 RNA guide
aaaaagugcacgcagucuauua

SEQ ID NO: 91997 - RNA, 22 nt, Artificial Sequence
  LRRK2 RNA guide
aaaacugaaaaacucuguggac

SEQ ID NO: 91998 - RNA, 22 nt, Artificial Sequence
  LRRK2 RNA guide
aaaagugcacgcagucuauuag

SEQ ID NO: 91999 - RNA, 22 nt, Artificial Sequence
  LRRK2 RNA guide
aaacugaaaaacucuguggacu

SEQ ID NO: 92000 - RNA, 22 nt, Artificial Sequence
  LRRK2 RNA guide
aaagugcacgcagucuauuagu

SEQ ID NO: 92001 - RNA, 22 nt, Artificial Sequence
  LRRK2 RNA guide
aacugaaaaacucuguggacua

SEQ ID NO: 92002 - RNA, 22 nt, Artificial Sequence
  LRRK2 RNA guide
aagaaaacugaaaaacucugug

SEQ ID NO: 92003 - RNA, 22 nt, Artificial Sequence
  LRRK2 RNA guide
aagugcacgcagucuauuaguc

SEQ ID NO: 92004 - RNA, 22 nt, Artificial Sequence
  LRRK2 RNA guide
acgcagucuauuaguccacaga

SEQ ID NO: 92005 - RNA, 22 nt, Artificial Sequence
  LRRK2 RNA guide
acugaaaaacucuguggacuaa

SEQ ID NO: 92006 - RNA, 22 nt, Artificial Sequence
  LRRK2 RNA guide
agaaaacugaaaaacucugugg

SEQ ID NO: 92007 - RNA, 22 nt, Artificial Sequence
  LRRK2 RNA guide
aguccacagaguuuuucaguuu

SEQ ID NO: 92008 - RNA, 22 nt, Artificial Sequence
  LRRK2 RNA guide
agucuauuaguccacagaguuu

SEQ ID NO: 92009 - RNA, 22 nt, Artificial Sequence
  LRRK2 RNA guide
agugcacgcagucuauuagucc

SEQ ID NO: 92010 - RNA, 22 nt, Artificial Sequence
  LRRK2 RNA guide
auuaguccacagaguuuuucag

SEQ ID NO: 92011 - RNA, 22 nt, Artificial Sequence
  LRRK2 RNA guide
cacgcagucuauuaguccacag

SEQ ID NO: 92012 - RNA, 22 nt, Artificial Sequence
  LRRK2 RNA guide
cagucuauuaguccacagaguu

SEQ ID NO: 92013 - RNA, 22 nt, Artificial Sequence
  LRRK2 RNA guide
cgcagucuauuaguccacagag

SEQ ID NO: 92014 - RNA, 22 nt, Artificial Sequence
  LRRK2 RNA guide
cuauuaguccacagaguuuuuc

SEQ ID NO: 92015 - RNA, 22 nt, Artificial Sequence
  LRRK2 RNA guide
cucuguggacuaauagacugcg

SEQ ID NO: 92016 - RNA, 22 nt, Artificial Sequence
  LRRK2 RNA guide
cugaaaaacucuguggacuaau

SEQ ID NO: 92017 - RNA, 22 nt, Artificial Sequence
  LRRK2 RNA guide
cuguggacuaauagacugcgug

SEQ ID NO: 92018 - RNA, 22 nt, Artificial Sequence
  LRRK2 RNA guide
cuuaaaaagugcacgcagucua

SEQ ID NO: 92019 - RNA, 22 nt, Artificial Sequence
  LRRK2 RNA guide
gaaaaacucuguggacuaauag

SEQ ID NO: 92020 - RNA, 22 nt, Artificial Sequence
  LRRK2 RNA guide
gaaaacugaaaaacucugugga

SEQ ID NO: 92021 - RNA, 22 nt, Artificial Sequence
  LRRK2 RNA guide
gacuaauagacugcgugcacuu

SEQ ID NO: 92022 - RNA, 22 nt, Artificial Sequence
  LRRK2 RNA guide
gcacgcagucuauuaguccaca

SEQ ID NO: 92023 - RNA, 22 nt, Artificial Sequence
  LRRK2 RNA guide
gcagucuauuaguccacagagu

SEQ ID NO: 92024 - RNA, 22 nt, Artificial Sequence
  LRRK2 RNA guide
ggacuaauagacugcgugcacu

SEQ ID NO: 92025 - RNA, 22 nt, Artificial Sequence
  LRRK2 RNA guide
guccacagaguuuuucaguuuu

SEQ ID NO: 92026 - RNA, 22 nt, Artificial Sequence
  LRRK2 RNA guide
gucuauuaguccacagaguuuu

SEQ ID NO: 92027 - RNA, 22 nt, Artificial Sequence
  LRRK2 RNA guide
gugcacgcagucuauuagucca

SEQ ID NO: 92028 - RNA, 22 nt, Artificial Sequence
  LRRK2 RNA guide
guggacuaauagacugcgugca

SEQ ID NO: 92029 - RNA, 22 nt, Artificial Sequence
  LRRK2 RNA guide
uaaaaagugcacgcagucuauu

SEQ ID NO: 92030 - RNA, 22 nt, Artificial Sequence
  LRRK2 RNA guide
uaguccacagaguuuuucaguu

SEQ ID NO: 92031 - RNA, 22 nt, Artificial Sequence
  LRRK2 RNA guide
uauuaguccacagaguuuuuca

SEQ ID NO: 92032 - RNA, 22 nt, Artificial Sequence
  LRRK2 RNA guide
ucuauuaguccacagaguuuuu

SEQ ID NO: 92033 - RNA, 22 nt, Artificial Sequence
  LRRK2 RNA guide
ucuguggacuaauagacugcgu

SEQ ID NO: 92034 - RNA, 22 nt, Artificial Sequence
  LRRK2 RNA guide
ugaaaaacucuguggacuaaua

SEQ ID NO: 92035 - RNA, 22 nt, Artificial Sequence
  LRRK2 RNA guide
ugcacgcagucuauuaguccac

SEQ ID NO: 92036 - RNA, 22 nt, Artificial Sequence
  LRRK2 RNA guide
uggacuaauagacugcgugcac

SEQ ID NO: 92037 - RNA, 22 nt, Artificial Sequence
  LRRK2 RNA guide
uguggacuaauagacugcgugc

SEQ ID NO: 92038 - RNA, 22 nt, Artificial Sequence
  LRRK2 RNA guide
uuaaaaagugcacgcagucuau

SEQ ID NO: 92039 - RNA, 22 nt, Artificial Sequence
  LRRK2 RNA guide
uuaguccacagaguuuuucagu

SEQ ID NO: 92040 - RNA, 20 nt, Artificial Sequence
  LRRK2 RNA guide
aaaaacucugugggcuaaua

SEQ ID NO: 92041 - RNA, 20 nt, Artificial Sequence
  LRRK2 RNA guide
aaaacucugugggcuaauag

SEQ ID NO: 92042 - RNA, 20 nt, Artificial Sequence
  LRRK2 RNA guide
aaacucugugggcuaauaga

SEQ ID NO: 92043 - RNA, 20 nt, Artificial Sequence
  LRRK2 RNA guide
aaacugaaaaacucuguggg

SEQ ID NO: 92044 - RNA, 20 nt, Artificial Sequence
  LRRK2 RNA guide
aacucugugggcuaauagac

SEQ ID NO: 92045 - RNA, 20 nt, Artificial Sequence
  LRRK2 RNA guide
aacugaaaaacucugugggc

SEQ ID NO: 92046 - RNA, 20 nt, Artificial Sequence
  LRRK2 RNA guide
acgcagucuauuagcccaca

SEQ ID NO: 92047 - RNA, 20 nt, Artificial Sequence
  LRRK2 RNA guide
acucugugggcuaauagacu

SEQ ID NO: 92048 - RNA, 20 nt, Artificial Sequence
  LRRK2 RNA guide
acugaaaaacucugugggcu

SEQ ID NO: 92049 - RNA, 20 nt, Artificial Sequence
  LRRK2 RNA guide
agcccacagaguuuuucagu

SEQ ID NO: 92050 - RNA, 20 nt, Artificial Sequence
  LRRK2 RNA guide
agucuauuagcccacagagu

SEQ ID NO: 92051 - RNA, 20 nt, Artificial Sequence
  LRRK2 RNA guide
agugcacgcagucuauuagc

SEQ ID NO: 92052 - RNA, 20 nt, Artificial Sequence
  LRRK2 RNA guide
auuagcccacagaguuuuuc

SEQ ID NO: 92053 - RNA, 20 nt, Artificial Sequence
  LRRK2 RNA guide
cacgcagucuauuagcccac

SEQ ID NO: 92054 - RNA, 20 nt, Artificial Sequence
  LRRK2 RNA guide
cagucuauuagcccacagag

SEQ ID NO: 92055 - RNA, 20 nt, Artificial Sequence
  LRRK2 RNA guide
cgcagucuauuagcccacag

SEQ ID NO: 92056 - RNA, 20 nt, Artificial Sequence
  LRRK2 RNA guide
cuauuagcccacagaguuuu

SEQ ID NO: 92057 - RNA, 20 nt, Artificial Sequence
  LRRK2 RNA guide
cucugugggcuaauagacug

SEQ ID NO: 92058 - RNA, 20 nt, Artificial Sequence
  LRRK2 RNA guide
cugaaaaacucugugggcua

SEQ ID NO: 92059 - RNA, 20 nt, Artificial Sequence
  LRRK2 RNA guide
cugugggcuaauagacugcg

SEQ ID NO: 92060 - RNA, 20 nt, Artificial Sequence
  LRRK2 RNA guide
gaaaaacucugugggcuaau

SEQ ID NO: 92061 - RNA, 20 nt, Artificial Sequence
  LRRK2 RNA guide
gcacgcagucuauuagccca

SEQ ID NO: 92062 - RNA, 20 nt, Artificial Sequence
  LRRK2 RNA guide
gcagucuauuagcccacaga

SEQ ID NO: 92063 - RNA, 20 nt, Artificial Sequence
  LRRK2 RNA guide
gcccacagaguuuuucaguu

SEQ ID NO: 92064 - RNA, 20 nt, Artificial Sequence
  LRRK2 RNA guide
ggcuaauagacugcgugcac

SEQ ID NO: 92065 - RNA, 20 nt, Artificial Sequence
  LRRK2 RNA guide
gggcuaauagacugcgugca

SEQ ID NO: 92066 - RNA, 20 nt, Artificial Sequence
  LRRK2 RNA guide
gucuauuagcccacagaguu

SEQ ID NO: 92067 - RNA, 20 nt, Artificial Sequence
  LRRK2 RNA guide
gugcacgcagucuauuagcc

SEQ ID NO: 92068 - RNA, 20 nt, Artificial Sequence
  LRRK2 RNA guide
gugggcuaauagacugcgug

SEQ ID NO: 92069 - RNA, 20 nt, Artificial Sequence
  LRRK2 RNA guide
uagcccacagaguuuuucag

SEQ ID NO: 92070 - RNA, 20 nt, Artificial Sequence
  LRRK2 RNA guide
uauuagcccacagaguuuuu

SEQ ID NO: 92071 - RNA, 20 nt, Artificial Sequence
  LRRK2 RNA guide
ucuauuagcccacagaguuu

SEQ ID NO: 92072 - RNA, 20 nt, Artificial Sequence
  LRRK2 RNA guide
ucugugggcuaauagacugc

SEQ ID NO: 92073 - RNA, 20 nt, Artificial Sequence
  LRRK2 RNA guide
ugaaaaacucugugggcuaa

SEQ ID NO: 92074 - RNA, 20 nt, Artificial Sequence
  LRRK2 RNA guide
ugcacgcagucuauuagccc

SEQ ID NO: 92075 - RNA, 20 nt, Artificial Sequence
  LRRK2 RNA guide
ugggcuaauagacugcgugc

SEQ ID NO: 92076 - RNA, 20 nt, Artificial Sequence
  LRRK2 RNA guide
ugugggcuaauagacugcgu

SEQ ID NO: 92077 - RNA, 20 nt, Artificial Sequence
  LRRK2 RNA guide
uuagcccacagaguuuuuca

SEQ ID NO: 92078 - RNA, 21 nt, Artificial Sequence
  LRRK2 RNA guide
aaaaacucugugggcuaauag

SEQ ID NO: 92079 - RNA, 21 nt, Artificial Sequence
  LRRK2 RNA guide
aaaacucugugggcuaauaga

SEQ ID NO: 92080 - RNA, 21 nt, Artificial Sequence
  LRRK2 RNA guide
aaaacugaaaaacucuguggg

SEQ ID NO: 92081 - RNA, 21 nt, Artificial Sequence
  LRRK2 RNA guide
aaacucugugggcuaauagac

SEQ ID NO: 92082 - RNA, 21 nt, Artificial Sequence
  LRRK2 RNA guide
aaacugaaaaacucugugggc

SEQ ID NO: 92083 - RNA, 21 nt, Artificial Sequence
  LRRK2 RNA guide
aacucugugggcuaauagacu

SEQ ID NO: 92084 - RNA, 21 nt, Artificial Sequence
  LRRK2 RNA guide
aacugaaaaacucugugggcu

SEQ ID NO: 92085 - RNA, 21 nt, Artificial Sequence
  LRRK2 RNA guide
aagugcacgcagucuauuagc

SEQ ID NO: 92086 - RNA, 21 nt, Artificial Sequence
  LRRK2 RNA guide
acgcagucuauuagcccacag

SEQ ID NO: 92087 - RNA, 21 nt, Artificial Sequence
  LRRK2 RNA guide
acucugugggcuaauagacug

SEQ ID NO: 92088 - RNA, 21 nt, Artificial Sequence
  LRRK2 RNA guide
acugaaaaacucugugggcua

SEQ ID NO: 92089 - RNA, 21 nt, Artificial Sequence
  LRRK2 RNA guide
agcccacagaguuuuucaguu

SEQ ID NO: 92090 - RNA, 21 nt, Artificial Sequence
  LRRK2 RNA guide
agucuauuagcccacagaguu

SEQ ID NO: 92091 - RNA, 21 nt, Artificial Sequence
  LRRK2 RNA guide
agugcacgcagucuauuagcc

SEQ ID NO: 92092 - RNA, 21 nt, Artificial Sequence
  LRRK2 RNA guide
auuagcccacagaguuuuuca

SEQ ID NO: 92093 - RNA, 21 nt, Artificial Sequence
  LRRK2 RNA guide
cacgcagucuauuagcccaca

SEQ ID NO: 92094 - RNA, 21 nt, Artificial Sequence
  LRRK2 RNA guide
cagucuauuagcccacagagu

SEQ ID NO: 92095 - RNA, 21 nt, Artificial Sequence
  LRRK2 RNA guide
cgcagucuauuagcccacaga

SEQ ID NO: 92096 - RNA, 21 nt, Artificial Sequence
  LRRK2 RNA guide
cuauuagcccacagaguuuuu

SEQ ID NO: 92097 - RNA, 21 nt, Artificial Sequence
  LRRK2 RNA guide
cucugugggcuaauagacugc

SEQ ID NO: 92098 - RNA, 21 nt, Artificial Sequence
  LRRK2 RNA guide
cugaaaaacucugugggcuaa

SEQ ID NO: 92099 - RNA, 21 nt, Artificial Sequence
  LRRK2 RNA guide
cugugggcuaauagacugcgu

SEQ ID NO: 92100 - RNA, 21 nt, Artificial Sequence
  LRRK2 RNA guide
gaaaaacucugugggcuaaua

SEQ ID NO: 92101 - RNA, 21 nt, Artificial Sequence
  LRRK2 RNA guide
gcacgcagucuauuagcccac

SEQ ID NO: 92102 - RNA, 21 nt, Artificial Sequence
  LRRK2 RNA guide
gcagucuauuagcccacagag

SEQ ID NO: 92103 - RNA, 21 nt, Artificial Sequence
  LRRK2 RNA guide
gcccacagaguuuuucaguuu

SEQ ID NO: 92104 - RNA, 21 nt, Artificial Sequence
  LRRK2 RNA guide
ggcuaauagacugcgugcacu

SEQ ID NO: 92105 - RNA, 21 nt, Artificial Sequence
  LRRK2 RNA guide
gggcuaauagacugcgugcac

SEQ ID NO: 92106 - RNA, 21 nt, Artificial Sequence
  LRRK2 RNA guide
gucuauuagcccacagaguuu

SEQ ID NO: 92107 - RNA, 21 nt, Artificial Sequence
  LRRK2 RNA guide
gugcacgcagucuauuagccc

SEQ ID NO: 92108 - RNA, 21 nt, Artificial Sequence
  LRRK2 RNA guide
gugggcuaauagacugcgugc

SEQ ID NO: 92109 - RNA, 21 nt, Artificial Sequence
  LRRK2 RNA guide
uagcccacagaguuuuucagu

SEQ ID NO: 92110 - RNA, 21 nt, Artificial Sequence
  LRRK2 RNA guide
uauuagcccacagaguuuuuc

SEQ ID NO: 92111 - RNA, 21 nt, Artificial Sequence
  LRRK2 RNA guide
ucuauuagcccacagaguuuu

SEQ ID NO: 92112 - RNA, 21 nt, Artificial Sequence
  LRRK2 RNA guide
ucugugggcuaauagacugcg

SEQ ID NO: 92113 - RNA, 21 nt, Artificial Sequence
  LRRK2 RNA guide
ugaaaaacucugugggcuaau

SEQ ID NO: 92114 - RNA, 21 nt, Artificial Sequence
  LRRK2 RNA guide
ugcacgcagucuauuagccca

SEQ ID NO: 92115 - RNA, 21 nt, Artificial Sequence
  LRRK2 RNA guide
ugggcuaauagacugcgugca

SEQ ID NO: 92116 - RNA, 21 nt, Artificial Sequence
  LRRK2 RNA guide
ugugggcuaauagacugcgug

SEQ ID NO: 92117 - RNA, 21 nt, Artificial Sequence
  LRRK2 RNA guide
uuagcccacagaguuuuucag

SEQ ID NO: 92118 - RNA, 22 nt, Artificial Sequence
  LRRK2 RNA guide
aaaaacucugugggcuaauaga

SEQ ID NO: 92119 - RNA, 22 nt, Artificial Sequence
  LRRK2 RNA guide
aaaacucugugggcuaauagac

SEQ ID NO: 92120 - RNA, 22 nt, Artificial Sequence
  LRRK2 RNA guide
aaaacugaaaaacucugugggc

SEQ ID NO: 92121 - RNA, 22 nt, Artificial Sequence
  LRRK2 RNA guide
aaacucugugggcuaauagacu

SEQ ID NO: 92122 - RNA, 22 nt, Artificial Sequence
  LRRK2 RNA guide
aaacugaaaaacucugugggcu

SEQ ID NO: 92123 - RNA, 22 nt, Artificial Sequence
  LRRK2 RNA guide
aaagugcacgcagucuauuagc

SEQ ID NO: 92124 - RNA, 22 nt, Artificial Sequence
  LRRK2 RNA guide
aacucugugggcuaauagacug

SEQ ID NO: 92125 - RNA, 22 nt, Artificial Sequence
  LRRK2 RNA guide
aacugaaaaacucugugggcua

SEQ ID NO: 92126 - RNA, 22 nt, Artificial Sequence
  LRRK2 RNA guide
aagugcacgcagucuauuagcc

SEQ ID NO: 92127 - RNA, 22 nt, Artificial Sequence
  LRRK2 RNA guide
acgcagucuauuagcccacaga

SEQ ID NO: 92128 - RNA, 22 nt, Artificial Sequence
  LRRK2 RNA guide
acucugugggcuaauagacugc

SEQ ID NO: 92129 - RNA, 22 nt, Artificial Sequence
  LRRK2 RNA guide
acugaaaaacucugugggcuaa

SEQ ID NO: 92130 - RNA, 22 nt, Artificial Sequence
  LRRK2 RNA guide
agcccacagaguuuuucaguuu

SEQ ID NO: 92131 - RNA, 22 nt, Artificial Sequence
  LRRK2 RNA guide
agucuauuagcccacagaguuu

SEQ ID NO: 92132 - RNA, 22 nt, Artificial Sequence
  LRRK2 RNA guide
agugcacgcagucuauuagccc

SEQ ID NO: 92133 - RNA, 22 nt, Artificial Sequence
  LRRK2 RNA guide
auuagcccacagaguuuuucag

SEQ ID NO: 92134 - RNA, 22 nt, Artificial Sequence
  LRRK2 RNA guide
cacgcagucuauuagcccacag

SEQ ID NO: 92135 - RNA, 22 nt, Artificial Sequence
  LRRK2 RNA guide
cagucuauuagcccacagaguu

SEQ ID NO: 92136 - RNA, 22 nt, Artificial Sequence
  LRRK2 RNA guide
cgcagucuauuagcccacagag

SEQ ID NO: 92137 - RNA, 22 nt, Artificial Sequence
  LRRK2 RNA guide
cuauuagcccacagaguuuuuc

SEQ ID NO: 92138 - RNA, 22 nt, Artificial Sequence
  LRRK2 RNA guide
cucugugggcuaauagacugcg

SEQ ID NO: 92139 - RNA, 22 nt, Artificial Sequence
  LRRK2 RNA guide
cugaaaaacucugugggcuaau

SEQ ID NO: 92140 - RNA, 22 nt, Artificial Sequence
  LRRK2 RNA guide
cugugggcuaauagacugcgug

SEQ ID NO: 92141 - RNA, 22 nt, Artificial Sequence
  LRRK2 RNA guide
gaaaaacucugugggcuaauag

SEQ ID NO: 92142 - RNA, 22 nt, Artificial Sequence
  LRRK2 RNA guide
gaaaacugaaaaacucuguggg

SEQ ID NO: 92143 - RNA, 22 nt, Artificial Sequence
  LRRK2 RNA guide
gcacgcagucuauuagcccaca

SEQ ID NO: 92144 - RNA, 22 nt, Artificial Sequence
  LRRK2 RNA guide
gcagucuauuagcccacagagu

SEQ ID NO: 92145 - RNA, 22 nt, Artificial Sequence
  LRRK2 RNA guide
gcccacagaguuuuucaguuuu

SEQ ID NO: 92146 - RNA, 22 nt, Artificial Sequence
  LRRK2 RNA guide
ggcuaauagacugcgugcacuu

SEQ ID NO: 92147 - RNA, 22 nt, Artificial Sequence
  LRRK2 RNA guide
gggcuaauagacugcgugcacu

SEQ ID NO: 92148 - RNA, 22 nt, Artificial Sequence
  LRRK2 RNA guide
gucuauuagcccacagaguuuu

SEQ ID NO: 92149 - RNA, 22 nt, Artificial Sequence
  LRRK2 RNA guide
gugcacgcagucuauuagccca

SEQ ID NO: 92150 - RNA, 22 nt, Artificial Sequence
  LRRK2 RNA guide
gugggcuaauagacugcgugca

SEQ ID NO: 92151 - RNA, 22 nt, Artificial Sequence
  LRRK2 RNA guide
uagcccacagaguuuuucaguu

SEQ ID NO: 92152 - RNA, 22 nt, Artificial Sequence
  LRRK2 RNA guide
uauuagcccacagaguuuuuca

SEQ ID NO: 92153 - RNA, 22 nt, Artificial Sequence
  LRRK2 RNA guide
ucuauuagcccacagaguuuuu

SEQ ID NO: 92154 - RNA, 22 nt, Artificial Sequence
  LRRK2 RNA guide
ucugugggcuaauagacugcgu

SEQ ID NO: 92155 - RNA, 22 nt, Artificial Sequence
  LRRK2 RNA guide
ugaaaaacucugugggcuaaua

SEQ ID NO: 92156 - RNA, 22 nt, Artificial Sequence
  LRRK2 RNA guide
ugcacgcagucuauuagcccac

SEQ ID NO: 92157 - RNA, 22 nt, Artificial Sequence
  LRRK2 RNA guide
ugggcuaauagacugcgugcac

SEQ ID NO: 92158 - RNA, 22 nt, Artificial Sequence
  LRRK2 RNA guide
ugugggcuaauagacugcgugc

SEQ ID NO: 92159 - RNA, 22 nt, Artificial Sequence
  LRRK2 RNA guide
uuagcccacagaguuuuucagu

SEQ ID NO: 92160 - RNA, 20 nt, Artificial Sequence
  LRRK2 RNA guide
augugccuauucuuuuaugu

SEQ ID NO: 92161 - RNA, 20 nt, Artificial Sequence
  LRRK2 RNA guide
caagaaaauuuugucuucag

SEQ ID NO: 92162 - RNA, 20 nt, Artificial Sequence
  LRRK2 RNA guide
cagaacauaaaagaauaggc

SEQ ID NO: 92163 - RNA, 20 nt, Artificial Sequence
  LRRK2 RNA guide
cagaucaagaaaauuuuguc

SEQ ID NO: 92164 - RNA, 20 nt, Artificial Sequence
  LRRK2 RNA guide
ccuauucuuuuauguucuga

SEQ ID NO: 92165 - RNA, 20 nt, Artificial Sequence
  LRRK2 RNA guide
cugaagacaaaauuuucuug

SEQ ID NO: 92166 - RNA, 20 nt, Artificial Sequence
  LRRK2 RNA guide
cuuuuauguucugaagacaa

SEQ ID NO: 92167 - RNA, 20 nt, Artificial Sequence
  LRRK2 RNA guide
gaaaauuuugucuucagaac

SEQ ID NO: 92168 - RNA, 20 nt, Artificial Sequence
  LRRK2 RNA guide
gccuauucuuuuauguucug

SEQ ID NO: 92169 - RNA, 20 nt, Artificial Sequence
  LRRK2 RNA guide
gucuucagaacauaaaagaa

SEQ ID NO: 92170 - RNA, 20 nt, Artificial Sequence
  LRRK2 RNA guide
gugccuauucuuuuauguuc

SEQ ID NO: 92171 - RNA, 20 nt, Artificial Sequence
  LRRK2 RNA guide
guucugaagacaaaauuuuc

SEQ ID NO: 92172 - RNA, 20 nt, Artificial Sequence
  LRRK2 RNA guide
uaugugccuauucuuuuaug

SEQ ID NO: 92173 - RNA, 20 nt, Artificial Sequence
  LRRK2 RNA guide
ucagaacauaaaagaauagg

SEQ ID NO: 92174 - RNA, 20 nt, Artificial Sequence
  LRRK2 RNA guide
ucuuuuauguucugaagaca

SEQ ID NO: 92175 - RNA, 20 nt, Artificial Sequence
  LRRK2 RNA guide
ugccuauucuuuuauguucu

SEQ ID NO: 92176 - RNA, 20 nt, Artificial Sequence
  LRRK2 RNA guide
ugucuucagaacauaaaaga

SEQ ID NO: 92177 - RNA, 20 nt, Artificial Sequence
  LRRK2 RNA guide
ugugccuauucuuuuauguu

SEQ ID NO: 92178 - RNA, 20 nt, Artificial Sequence
  LRRK2 RNA guide
uucuuuuauguucugaagac

SEQ ID NO: 92179 - RNA, 20 nt, Artificial Sequence
  LRRK2 RNA guide
uugucuucagaacauaaaag

SEQ ID NO: 92180 - RNA, 21 nt, Artificial Sequence
  LRRK2 RNA guide
cagaacauaaaagaauaggca

SEQ ID NO: 92181 - RNA, 21 nt, Artificial Sequence
  LRRK2 RNA guide
gccuauucuuuuauguucuga

SEQ ID NO: 92182 - RNA, 21 nt, Artificial Sequence
  LRRK2 RNA guide
gugccuauucuuuuauguucu

SEQ ID NO: 92183 - RNA, 21 nt, Artificial Sequence
  LRRK2 RNA guide
ucagaacauaaaagaauaggc

SEQ ID NO: 92184 - RNA, 21 nt, Artificial Sequence
  LRRK2 RNA guide
ugccuauucuuuuauguucug

SEQ ID NO: 92185 - RNA, 21 nt, Artificial Sequence
  LRRK2 RNA guide
ugugccuauucuuuuauguuc

SEQ ID NO: 92186 - RNA, 22 nt, Artificial Sequence
  LRRK2 RNA guide
augugccuauucuuuuauguuc

SEQ ID NO: 92187 - RNA, 22 nt, Artificial Sequence
  LRRK2 RNA guide
cagaacauaaaagaauaggcac

SEQ ID NO: 92188 - RNA, 22 nt, Artificial Sequence
  LRRK2 RNA guide
ccuauucuuuuauguucugaag

SEQ ID NO: 92189 - RNA, 22 nt, Artificial Sequence
  LRRK2 RNA guide
cuucagaacauaaaagaauagg

SEQ ID NO: 92190 - RNA, 22 nt, Artificial Sequence
  LRRK2 RNA guide
gccuauucuuuuauguucugaa

SEQ ID NO: 92191 - RNA, 22 nt, Artificial Sequence
  LRRK2 RNA guide
gugccuauucuuuuauguucug

SEQ ID NO: 92192 - RNA, 22 nt, Artificial Sequence
  LRRK2 RNA guide
ucagaacauaaaagaauaggca

SEQ ID NO: 92193 - RNA, 22 nt, Artificial Sequence
  LRRK2 RNA guide
ugccuauucuuuuauguucuga

SEQ ID NO: 92194 - RNA, 22 nt, Artificial Sequence
  LRRK2 RNA guide
ugugccuauucuuuuauguucu

SEQ ID NO: 92195 - RNA, 22 nt, Artificial Sequence
  LRRK2 RNA guide
uucagaacauaaaagaauaggc

SEQ ID NO: 92196 - RNA, 20 nt, Artificial Sequence
  LRRK2 RNA guide
aaaauuuugucuucggaaca

SEQ ID NO: 92197 - RNA, 20 nt, Artificial Sequence
  LRRK2 RNA guide
aaauuuugucuucggaacau

SEQ ID NO: 92198 - RNA, 20 nt, Artificial Sequence
  LRRK2 RNA guide
aagaaaauuuugucuucgga

SEQ ID NO: 92199 - RNA, 20 nt, Artificial Sequence
  LRRK2 RNA guide
aauuuugucuucggaacaua

SEQ ID NO: 92200 - RNA, 20 nt, Artificial Sequence
  LRRK2 RNA guide
agaaaauuuugucuucggaa

SEQ ID NO: 92201 - RNA, 20 nt, Artificial Sequence
  LRRK2 RNA guide
auguuccgaagacaaaauuu

SEQ ID NO: 92202 - RNA, 20 nt, Artificial Sequence
  LRRK2 RNA guide
auucuuuuauguuccgaaga

SEQ ID NO: 92203 - RNA, 20 nt, Artificial Sequence
  LRRK2 RNA guide
auuuugucuucggaacauaa

SEQ ID NO: 92204 - RNA, 20 nt, Artificial Sequence
  LRRK2 RNA guide
caagaaaauuuugucuucgg

SEQ ID NO: 92205 - RNA, 20 nt, Artificial Sequence
  LRRK2 RNA guide
ccgaagacaaaauuuucuug

SEQ ID NO: 92206 - RNA, 20 nt, Artificial Sequence
  LRRK2 RNA guide
ccuauucuuuuauguuccga

SEQ ID NO: 92207 - RNA, 20 nt, Artificial Sequence
  LRRK2 RNA guide
cggaacauaaaagaauaggc

SEQ ID NO: 92208 - RNA, 20 nt, Artificial Sequence
  LRRK2 RNA guide
cuauucuuuuauguuccgaa

SEQ ID NO: 92209 - RNA, 20 nt, Artificial Sequence
  LRRK2 RNA guide
cuucggaacauaaaagaaua

SEQ ID NO: 92210 - RNA, 20 nt, Artificial Sequence
  LRRK2 RNA guide
cuuuuauguuccgaagacaa

SEQ ID NO: 92211 - RNA, 20 nt, Artificial Sequence
  LRRK2 RNA guide
gaaaauuuugucuucggaac

SEQ ID NO: 92212 - RNA, 20 nt, Artificial Sequence
  LRRK2 RNA guide
gccuauucuuuuauguuccg

SEQ ID NO: 92213 - RNA, 20 nt, Artificial Sequence
  LRRK2 RNA guide
gucuucggaacauaaaagaa

SEQ ID NO: 92214 - RNA, 20 nt, Artificial Sequence
  LRRK2 RNA guide
guuccgaagacaaaauuuuc

SEQ ID NO: 92215 - RNA, 20 nt, Artificial Sequence
  LRRK2 RNA guide
uauguuccgaagacaaaauu

SEQ ID NO: 92216 - RNA, 20 nt, Artificial Sequence
  LRRK2 RNA guide
uauucuuuuauguuccgaag

SEQ ID NO: 92217 - RNA, 20 nt, Artificial Sequence
  LRRK2 RNA guide
ucaagaaaauuuugucuucg

SEQ ID NO: 92218 - RNA, 20 nt, Artificial Sequence
  LRRK2 RNA guide
uccgaagacaaaauuuucuu

SEQ ID NO: 92219 - RNA, 20 nt, Artificial Sequence
  LRRK2 RNA guide
ucggaacauaaaagaauagg

SEQ ID NO: 92220 - RNA, 20 nt, Artificial Sequence
  LRRK2 RNA guide
ucuucggaacauaaaagaau

SEQ ID NO: 92221 - RNA, 20 nt, Artificial Sequence
  LRRK2 RNA guide
ucuuuuauguuccgaagaca

SEQ ID NO: 92222 - RNA, 20 nt, Artificial Sequence
  LRRK2 RNA guide
ugccuauucuuuuauguucc

SEQ ID NO: 92223 - RNA, 20 nt, Artificial Sequence
  LRRK2 RNA guide
ugucuucggaacauaaaaga

SEQ ID NO: 92224 - RNA, 20 nt, Artificial Sequence
  LRRK2 RNA guide
uguuccgaagacaaaauuuu

SEQ ID NO: 92225 - RNA, 20 nt, Artificial Sequence
  LRRK2 RNA guide
uuauguuccgaagacaaaau

SEQ ID NO: 92226 - RNA, 20 nt, Artificial Sequence
  LRRK2 RNA guide
uuccgaagacaaaauuuucu

SEQ ID NO: 92227 - RNA, 20 nt, Artificial Sequence
  LRRK2 RNA guide
uucggaacauaaaagaauag

SEQ ID NO: 92228 - RNA, 20 nt, Artificial Sequence
  LRRK2 RNA guide
uucuuuuauguuccgaagac

SEQ ID NO: 92229 - RNA, 20 nt, Artificial Sequence
  LRRK2 RNA guide
uugucuucggaacauaaaag

SEQ ID NO: 92230 - RNA, 20 nt, Artificial Sequence
  LRRK2 RNA guide
uuuauguuccgaagacaaaa

SEQ ID NO: 92231 - RNA, 20 nt, Artificial Sequence
  LRRK2 RNA guide
uuugucuucggaacauaaaa

SEQ ID NO: 92232 - RNA, 20 nt, Artificial Sequence
  LRRK2 RNA guide
uuuuauguuccgaagacaaa

SEQ ID NO: 92233 - RNA, 20 nt, Artificial Sequence
  LRRK2 RNA guide
uuuugucuucggaacauaaa

SEQ ID NO: 92234 - RNA, 21 nt, Artificial Sequence
  LRRK2 RNA guide
agaaaauuuugucuucggaac

SEQ ID NO: 92235 - RNA, 21 nt, Artificial Sequence
  LRRK2 RNA guide
auucuuuuauguuccgaagac

SEQ ID NO: 92236 - RNA, 21 nt, Artificial Sequence
  LRRK2 RNA guide
caagaaaauuuugucuucgga

SEQ ID NO: 92237 - RNA, 21 nt, Artificial Sequence
  LRRK2 RNA guide
ccgaagacaaaauuuucuuga

SEQ ID NO: 92238 - RNA, 21 nt, Artificial Sequence
  LRRK2 RNA guide
ccuauucuuuuauguuccgaa

SEQ ID NO: 92239 - RNA, 21 nt, Artificial Sequence
  LRRK2 RNA guide
cggaacauaaaagaauaggca

SEQ ID NO: 92240 - RNA, 21 nt, Artificial Sequence
  LRRK2 RNA guide
cuauucuuuuauguuccgaag

SEQ ID NO: 92241 - RNA, 21 nt, Artificial Sequence
  LRRK2 RNA guide
cuucggaacauaaaagaauag

SEQ ID NO: 92242 - RNA, 21 nt, Artificial Sequence
  LRRK2 RNA guide
cuuuuauguuccgaagacaaa

SEQ ID NO: 92243 - RNA, 21 nt, Artificial Sequence
  LRRK2 RNA guide
gaaaauuuugucuucggaaca

SEQ ID NO: 92244 - RNA, 21 nt, Artificial Sequence
  LRRK2 RNA guide
gccuauucuuuuauguuccga

SEQ ID NO: 92245 - RNA, 21 nt, Artificial Sequence
  LRRK2 RNA guide
gucuucggaacauaaaagaau

SEQ ID NO: 92246 - RNA, 21 nt, Artificial Sequence
  LRRK2 RNA guide
gugccuauucuuuuauguucc

SEQ ID NO: 92247 - RNA, 21 nt, Artificial Sequence
  LRRK2 RNA guide
guuccgaagacaaaauuuucu

SEQ ID NO: 92248 - RNA, 21 nt, Artificial Sequence
  LRRK2 RNA guide
ucaagaaaauuuugucuucgg

SEQ ID NO: 92249 - RNA, 21 nt, Artificial Sequence
  LRRK2 RNA guide
uccgaagacaaaauuuucuug

SEQ ID NO: 92250 - RNA, 21 nt, Artificial Sequence
  LRRK2 RNA guide
ucggaacauaaaagaauaggc

SEQ ID NO: 92251 - RNA, 21 nt, Artificial Sequence
  LRRK2 RNA guide
ucuuuuauguuccgaagacaa

SEQ ID NO: 92252 - RNA, 21 nt, Artificial Sequence
  LRRK2 RNA guide
ugccuauucuuuuauguuccg

SEQ ID NO: 92253 - RNA, 21 nt, Artificial Sequence
  LRRK2 RNA guide
ugucuucggaacauaaaagaa

SEQ ID NO: 92254 - RNA, 21 nt, Artificial Sequence
  LRRK2 RNA guide
uguuccgaagacaaaauuuuc

SEQ ID NO: 92255 - RNA, 21 nt, Artificial Sequence
  LRRK2 RNA guide
uucggaacauaaaagaauagg

SEQ ID NO: 92256 - RNA, 21 nt, Artificial Sequence
  LRRK2 RNA guide
uucuuuuauguuccgaagaca

SEQ ID NO: 92257 - RNA, 21 nt, Artificial Sequence
  LRRK2 RNA guide
uugucuucggaacauaaaaga

SEQ ID NO: 92258 - RNA, 21 nt, Artificial Sequence
  LRRK2 RNA guide
uuugucuucggaacauaaaag

SEQ ID NO: 92259 - RNA, 22 nt, Artificial Sequence
  LRRK2 RNA guide
aagaaaauuuugucuucggaac

SEQ ID NO: 92260 - RNA, 22 nt, Artificial Sequence
  LRRK2 RNA guide
agaaaauuuugucuucggaaca

SEQ ID NO: 92261 - RNA, 22 nt, Artificial Sequence
  LRRK2 RNA guide
aucaagaaaauuuugucuucgg

SEQ ID NO: 92262 - RNA, 22 nt, Artificial Sequence
  LRRK2 RNA guide
auguuccgaagacaaaauuuuc

SEQ ID NO: 92263 - RNA, 22 nt, Artificial Sequence
  LRRK2 RNA guide
auucuuuuauguuccgaagaca

SEQ ID NO: 92264 - RNA, 22 nt, Artificial Sequence
  LRRK2 RNA guide
caagaaaauuuugucuucggaa

SEQ ID NO: 92265 - RNA, 22 nt, Artificial Sequence
  LRRK2 RNA guide
ccgaagacaaaauuuucuugau

SEQ ID NO: 92266 - RNA, 22 nt, Artificial Sequence
  LRRK2 RNA guide
ccuauucuuuuauguuccgaag

SEQ ID NO: 92267 - RNA, 22 nt, Artificial Sequence
  LRRK2 RNA guide
cggaacauaaaagaauaggcac

SEQ ID NO: 92268 - RNA, 22 nt, Artificial Sequence
  LRRK2 RNA guide
cuauucuuuuauguuccgaaga

SEQ ID NO: 92269 - RNA, 22 nt, Artificial Sequence
  LRRK2 RNA guide
cuucggaacauaaaagaauagg

SEQ ID NO: 92270 - RNA, 22 nt, Artificial Sequence
  LRRK2 RNA guide
cuuuuauguuccgaagacaaaa

SEQ ID NO: 92271 - RNA, 22 nt, Artificial Sequence
  LRRK2 RNA guide
gaaaauuuugucuucggaacau

SEQ ID NO: 92272 - RNA, 22 nt, Artificial Sequence
  LRRK2 RNA guide
gaucaagaaaauuuugucuucg

SEQ ID NO: 92273 - RNA, 22 nt, Artificial Sequence
  LRRK2 RNA guide
gccuauucuuuuauguuccgaa

SEQ ID NO: 92274 - RNA, 22 nt, Artificial Sequence
  LRRK2 RNA guide
gucuucggaacauaaaagaaua

SEQ ID NO: 92275 - RNA, 22 nt, Artificial Sequence
  LRRK2 RNA guide
gugccuauucuuuuauguuccg

SEQ ID NO: 92276 - RNA, 22 nt, Artificial Sequence
  LRRK2 RNA guide
guuccgaagacaaaauuuucuu

SEQ ID NO: 92277 - RNA, 22 nt, Artificial Sequence
  LRRK2 RNA guide
uauucuuuuauguuccgaagac

SEQ ID NO: 92278 - RNA, 22 nt, Artificial Sequence
  LRRK2 RNA guide
ucaagaaaauuuugucuucgga

SEQ ID NO: 92279 - RNA, 22 nt, Artificial Sequence
  LRRK2 RNA guide
uccgaagacaaaauuuucuuga

SEQ ID NO: 92280 - RNA, 22 nt, Artificial Sequence
  LRRK2 RNA guide
ucggaacauaaaagaauaggca

SEQ ID NO: 92281 - RNA, 22 nt, Artificial Sequence
  LRRK2 RNA guide
ucuucggaacauaaaagaauag

SEQ ID NO: 92282 - RNA, 22 nt, Artificial Sequence
  LRRK2 RNA guide
ucuuuuauguuccgaagacaaa

SEQ ID NO: 92283 - RNA, 22 nt, Artificial Sequence
  LRRK2 RNA guide
ugccuauucuuuuauguuccga

SEQ ID NO: 92284 - RNA, 22 nt, Artificial Sequence
  LRRK2 RNA guide
ugucuucggaacauaaaagaau

SEQ ID NO: 92285 - RNA, 22 nt, Artificial Sequence
  LRRK2 RNA guide
ugugccuauucuuuuauguucc

SEQ ID NO: 92286 - RNA, 22 nt, Artificial Sequence
  LRRK2 RNA guide
uguuccgaagacaaaauuuucu

SEQ ID NO: 92287 - RNA, 22 nt, Artificial Sequence
  LRRK2 RNA guide
uuccgaagacaaaauuuucuug

SEQ ID NO: 92288 - RNA, 22 nt, Artificial Sequence
  LRRK2 RNA guide
uucggaacauaaaagaauaggc

SEQ ID NO: 92289 - RNA, 22 nt, Artificial Sequence
  LRRK2 RNA guide
uucuuuuauguuccgaagacaa

SEQ ID NO: 92290 - RNA, 22 nt, Artificial Sequence
  LRRK2 RNA guide
uugucuucggaacauaaaagaa

SEQ ID NO: 92291 - RNA, 22 nt, Artificial Sequence
  LRRK2 RNA guide
uuugucuucggaacauaaaaga

SEQ ID NO: 92292 - RNA, 22 nt, Artificial Sequence
  LRRK2 RNA guide
uuuugucuucggaacauaaaag

SEQ ID NO: 92293 - RNA, 20 nt, Artificial Sequence
  LRRK2 RNA guide
aaaaacugucagaugaaucu

SEQ ID NO: 92294 - RNA, 20 nt, Artificial Sequence
  LRRK2 RNA guide
aaaacugucagaugaaucua

SEQ ID NO: 92295 - RNA, 20 nt, Artificial Sequence
  LRRK2 RNA guide
aaacugucagaugaaucuaa

SEQ ID NO: 92296 - RNA, 20 nt, Artificial Sequence
  LRRK2 RNA guide
aaaguuuccugucuuagauu

SEQ ID NO: 92297 - RNA, 20 nt, Artificial Sequence
  LRRK2 RNA guide
aacugucagaugaaucuaag

SEQ ID NO: 92298 - RNA, 20 nt, Artificial Sequence
  LRRK2 RNA guide
aaguuuccugucuuagauuc

SEQ ID NO: 92299 - RNA, 20 nt, Artificial Sequence
  LRRK2 RNA guide
aauccauagaaaaacuguca

SEQ ID NO: 92300 - RNA, 20 nt, Artificial Sequence
  LRRK2 RNA guide
acaauccauagaaaaacugu

SEQ ID NO: 92301 - RNA, 20 nt, Artificial Sequence
  LRRK2 RNA guide
acugucagaugaaucuaaga

SEQ ID NO: 92302 - RNA, 20 nt, Artificial Sequence
  LRRK2 RNA guide
agaugaaucuaagacaggaa

SEQ ID NO: 92303 - RNA, 20 nt, Artificial Sequence
  LRRK2 RNA guide
agauucaucugacaguuuuu

SEQ ID NO: 92304 - RNA, 20 nt, Artificial Sequence
  LRRK2 RNA guide
aguuuccugucuuagauuca

SEQ ID NO: 92305 - RNA, 20 nt, Artificial Sequence
  LRRK2 RNA guide
auagaaaaacugucagauga

SEQ ID NO: 92306 - RNA, 20 nt, Artificial Sequence
  LRRK2 RNA guide
auccauagaaaaacugucag

SEQ ID NO: 92307 - RNA, 20 nt, Artificial Sequence
  LRRK2 RNA guide
aucugacaguuuuucuaugg

SEQ ID NO: 92308 - RNA, 20 nt, Artificial Sequence
  LRRK2 RNA guide
auucaucugacaguuuuucu

SEQ ID NO: 92309 - RNA, 20 nt, Artificial Sequence
  LRRK2 RNA guide
caaaguuuccugucuuagau

SEQ ID NO: 92310 - RNA, 20 nt, Artificial Sequence
  LRRK2 RNA guide
caauccauagaaaaacuguc

SEQ ID NO: 92311 - RNA, 20 nt, Artificial Sequence
  LRRK2 RNA guide
cacaauccauagaaaaacug

SEQ ID NO: 92312 - RNA, 20 nt, Artificial Sequence
  LRRK2 RNA guide
cagaugaaucuaagacagga

SEQ ID NO: 92313 - RNA, 20 nt, Artificial Sequence
  LRRK2 RNA guide
cauagaaaaacugucagaug

SEQ ID NO: 92314 - RNA, 20 nt, Artificial Sequence
  LRRK2 RNA guide
caucugacaguuuuucuaug

SEQ ID NO: 92315 - RNA, 20 nt, Artificial Sequence
  LRRK2 RNA guide
ccauagaaaaacugucagau

SEQ ID NO: 92316 - RNA, 20 nt, Artificial Sequence
  LRRK2 RNA guide
ccugucuuagauucaucuga

SEQ ID NO: 92317 - RNA, 20 nt, Artificial Sequence
  LRRK2 RNA guide
cugucagaugaaucuaagac

SEQ ID NO: 92318 - RNA, 20 nt, Artificial Sequence
  LRRK2 RNA guide
cugucuuagauucaucugac

SEQ ID NO: 92319 - RNA, 20 nt, Artificial Sequence
  LRRK2 RNA guide
cuuagauucaucugacaguu

SEQ ID NO: 92320 - RNA, 20 nt, Artificial Sequence
  LRRK2 RNA guide
gaaaaacugucagaugaauc

SEQ ID NO: 92321 - RNA, 20 nt, Artificial Sequence
  LRRK2 RNA guide
gaugaaucuaagacaggaaa

SEQ ID NO: 92322 - RNA, 20 nt, Artificial Sequence
  LRRK2 RNA guide
gauucaucugacaguuuuuc

SEQ ID NO: 92323 - RNA, 20 nt, Artificial Sequence
  LRRK2 RNA guide
gucagaugaaucuaagacag

SEQ ID NO: 92324 - RNA, 20 nt, Artificial Sequence
  LRRK2 RNA guide
gucuuagauucaucugacag

SEQ ID NO: 92325 - RNA, 20 nt, Artificial Sequence
  LRRK2 RNA guide
guuuccugucuuagauucau

SEQ ID NO: 92326 - RNA, 20 nt, Artificial Sequence
  LRRK2 RNA guide
uagaaaaacugucagaugaa

SEQ ID NO: 92327 - RNA, 20 nt, Artificial Sequence
  LRRK2 RNA guide
uagauucaucugacaguuuu

SEQ ID NO: 92328 - RNA, 20 nt, Artificial Sequence
  LRRK2 RNA guide
ucaaaguuuccugucuuaga

SEQ ID NO: 92329 - RNA, 20 nt, Artificial Sequence
  LRRK2 RNA guide
ucagaugaaucuaagacagg

SEQ ID NO: 92330 - RNA, 20 nt, Artificial Sequence
  LRRK2 RNA guide
ucaucugacaguuuuucuau

SEQ ID NO: 92331 - RNA, 20 nt, Artificial Sequence
  LRRK2 RNA guide
uccauagaaaaacugucaga

SEQ ID NO: 92332 - RNA, 20 nt, Artificial Sequence
  LRRK2 RNA guide
uccugucuuagauucaucug

SEQ ID NO: 92333 - RNA, 20 nt, Artificial Sequence
  LRRK2 RNA guide
ucuuagauucaucugacagu

SEQ ID NO: 92334 - RNA, 20 nt, Artificial Sequence
  LRRK2 RNA guide
ugucagaugaaucuaagaca
